United States Patent Application Publication US 2013/0129668 A1 - sequence listing, part 7

SEQ ID NO: 102098 - DNA, 122 bp, Homo sapiens
tggctcagggaaaggctgcccaccacccacagcccctggacagcttcctctcatgccacccgtgttatttctaagacccgagattgtaaaacaaacactttgggagcaagtcttttgggccg

SEQ ID NO: 102099 - DNA, 122 bp, Homo sapiens
tggtaccagcgcgctccagcttgtccttcccgttctccaggtatctgcggagccactccacgcactcgccctccaggtaggctctccgctgctccgcctcacgggccgcctcccacttgcgc

SEQ ID NO: 102100 - DNA, 122 bp, Homo sapiens
aattactgacaacaccggtgtcagtgaggacatggggcaagtagaaagccaccccagccacggcaatggagatggcacggccattctgcaaagctggcagctgttatgtggtcacacatgcg

SEQ ID NO: 102101 - DNA, 122 bp, Homo sapiens
aggccgggacccgccgggaaatctcaaccgggcagcccccaccccgctcgaacgccgaggcggctccacccgcgcgagccccgccgcctcgggcacctcctgcatcacgtggttccgggccg

SEQ ID NO: 102102 - DNA, 122 bp, Homo sapiens
ccaggtcagcctgtgctcggcgggtgttgacctcgatgtcataggcggccttcttcagttcgtaatctctctgtgccttggccatctcgatctcactcaggtactgagcagacaccttttcc

SEQ ID NO: 102103 - DNA, 122 bp, Homo sapiens
accaggaatgaaacagatggccagatgatgagtttagttccaaacatattgcatttgtggcgatgggaaaaagtgtagtgaacataactgataagcataaggagacaagtcacaagagcaca

SEQ ID NO: 102104 - DNA, 122 bp, Homo sapiens
aagccatgagggatccaagtagagccacagaaaaagaagaattccaggagagggaaagatcgtaaggatgagagaggagaccatccaagccagaaattatttaataaatcagagttctagca

SEQ ID NO: 102105 - DNA, 122 bp, Homo sapiens
gattcatcggattccgactccgaatccgagagcgggggagtgtccatctcgccgcacgcacgtcccacacctacaggaagaaacggggtatcccgagacccaagcggctagcagagggcggc

SEQ ID NO: 102106 - DNA, 122 bp, Homo sapiens
ctgggttctggcctttttggtaatgttattcagctgtttctctcaggaacttcctaataacgtactttagcactattaacaaaaggaccacatggtgaatttcagtgttccagaggtgattc

SEQ ID NO: 102107 - DNA, 122 bp, Homo sapiens
ggcctggggcggagccatgaggcgccttgagtgggcgtggtctgagcaatgggcgtgatccgggcgtccgagggaagttgattgactgtaaggtttgcggtggccgctaggcgatgacaatc

SEQ ID NO: 102108 - DNA, 122 bp, Homo sapiens
tcctctcagctgggacagtgggggactttcagacctaagcgttggaggaaacctcctcagcgaccctccccgagaggtgcgtccctgttttccagatggggaaactgaggcagagctggggt

SEQ ID NO: 102109 - DNA, 122 bp, Homo sapiens
tgtgttgactggacaacttcctggtggaaaaccgcgactcttgcaagtgggcaaacttgacgttttcgctatgggcaaacgcgggagccggagccagagccagctactcaacaccctaacta

SEQ ID NO: 102110 - DNA, 122 bp, Homo sapiens
gtagggtgagtggatagccataccacaaagcacaagctctctctgtccattgctgaaggacgtgaggcattgctcttgtggccgggatcatgattaggctcctgctggctggctcccgctgg

SEQ ID NO: 102111 - DNA, 122 bp, Homo sapiens
cggggtggaggggggggtctcactgctcagggcccgcgtgacattgcacaggtttagaaacgcacagcgggaaggtggccccggcgggccgagggcgcaggatccctgctccgtccagggtc

SEQ ID NO: 102112 - DNA, 122 bp, Homo sapiens
tttgggaacctcagttgcctcggttggaaatggggctccccggcaggaccgaggtggccgcgtgccatctgcgcgagtccctgggtccctcgatgcgcgggggcgactgctgccaccgcggc

SEQ ID NO: 102113 - DNA, 122 bp, Homo sapiens
cgcgaaaggtccccggttcgaaaccgggcggaaacacgtttttttttcctcatcttactacgaaattcttccagtgtgtatcttttaaagactttttcaggctgtcataaatttcctgtctt

SEQ ID NO: 102114 - DNA, 122 bp, Homo sapiens
gacatcactaatttctggtttcagccctcatggttctgatttgactggtctgtcgtgcagcgtaggcgtggggagttttgctcctcaaagggtgtctgtgcatcagcagcactggtggcatc

SEQ ID NO: 102115 - DNA, 122 bp, Homo sapiens
catttctatgggtgtttatctaggctgctcccaaaccccagccaactaggggtgagctcccgtggccacctgtgacagtcagcccctcgcagtagacgtgccgacgtggctcccgaggtgga

SEQ ID NO: 102116 - DNA, 122 bp, Homo sapiens
gaactgggggtggcagcggctgccgggtgcgagcgggctcaggcctgtggccctgcctgacgttggtccccatcaagccatgtgacgagaccaggccacaagaaagaggtttcaacaagcgt

SEQ ID NO: 102117 - DNA, 122 bp, Homo sapiens
ctgatgatgggagtcggttcagaccaagcaaagtatccaacaagagtcaaacacagcacgcgcgcccccaggacccccagctctgccccaggtctctgcctggttatcgtgtggacacaatg

SEQ ID NO: 102118 - DNA, 122 bp, Homo sapiens
agttagctatatttatacaaggaaaaccaaaagaaatacttaaatgagacttttaaaattcgaggctctccactgagacttgttccctggcgccagctccgggagttccgcagagcctcgcc

SEQ ID NO: 102119 - DNA, 122 bp, Homo sapiens
cggcggcgcgggctgccggcttttcaggagctcctggagctggcccttcacctgctgctgcgtgagacctgtgcggcgctgcgcgaccaacttgctgggcccgttgatgatggtgtacatgg

SEQ ID NO: 102120 - DNA, 122 bp, Homo sapiens
attatacatagactaggacagttgaaaaaatgctagattctgtccccgcagggaagtggccgacccgatgtgtggaggggctgggagctgccatgccccgcacaacccggcgcaccctgcgg

SEQ ID NO: 102121 - DNA, 122 bp, Homo sapiens
actacttactttactgccagtaagttgactgagatgtggttttagttcatcaccaattaccgcatgaacagccaccaggcagaagacacaagctttccgaacactgctctctgaattatcat

SEQ ID NO: 102122 - DNA, 122 bp, Homo sapiens
cgataagagggaacagaaagaagtttaagacacggagaaaaggaggaggctgcgtggccacggacgcagacactggtgtgatgcagccatgaccaaaatgcctgcagccccaggaagacaga

SEQ ID NO: 102123 - DNA, 122 bp, Homo sapiens
acaggcgccgcagcgcagggcttctgattacactctgacctccagggacgaaaaggtcgtcggcccaagtcccttgttcgttctacgccacctcccgcccccgccaatctgcctcctcagtt

SEQ ID NO: 102124 - DNA, 122 bp, Homo sapiens
gctgaaaatatagctttcagagtttattctgggttcagacccctgcgtcatcttgggagccggtttcaaactgacttttccttcatttagattctccagggataaagaactccctcactacc

SEQ ID NO: 102125 - DNA, 122 bp, Homo sapiens
tgtgtctgagctggtctgaaggctggttgttcagactgagcttcctgcctgcctgtaccccgccaacagcttcagaagaaggtgactggtggctgcctgaggaataccagtgggcaagagaa

SEQ ID NO: 102126 - DNA, 122 bp, Homo sapiens
cacattagcccagactctggaagtagttttccggcctggctcagggctggctagatgtgccgtcatttcaaatgtaaggaagcgccgggcagatctgttgtcggcggggggcctcgcacgca

SEQ ID NO: 102127 - DNA, 122 bp, Homo sapiens
gggcacgcacacacctttccagcagctggtggtatgtcagccgctccagcgtgttggggtcgaggaagcgcaggtcacctgtgccaggctcaagctctgacagcttgtgccatgtctcccgg

SEQ ID NO: 102128 - DNA, 122 bp, Homo sapiens
tttttgcctttttggcttcggtgttggtttcctgtctccgcgtggcaaataccttttggccgggctagcgtgtggatcacctggactggggtttcagaggtgggccctgagcgtgcggcctc

SEQ ID NO: 102129 - DNA, 122 bp, Homo sapiens
gaccaaaccacgacttatgaggcttgcagatgcatgtcagaattaggctgctatgaaatacggcgtgatctgttccaccttctgtaagtttctcagaagtgaggactctactctcagaaaca

SEQ ID NO: 102130 - DNA, 122 bp, Homo sapiens
ctccacccctctcaccaagactctcctttcatttgaaggtgcccaggaactctagttacccgtgtcatggggaccccagtactattgtcagtatttcagaaagccaaatagaaattgtgcta

SEQ ID NO: 102131 - DNA, 122 bp, Homo sapiens
agactgggataagctgtaggaggaccaggcgtttgggggcagctggaatacatctaggggcggatcagagcatcttgggaacttggcagatggtctgggtgaaagtttttaatctcgtgtga

SEQ ID NO: 102132 - DNA, 122 bp, Homo sapiens
ttgccttgacatagggcttcatcatcatgcctgtgctattggacaagccaattatttcttcgtcgtcatttagatgattcatttattcaacaaatatctattgagcccccttttgtggtggg

SEQ ID NO: 102133 - DNA, 122 bp, Homo sapiens
gaaatatcttcgtataaaaactagacagaatcattctcagtaactgctctgtgatgtgtgcgttcaactctcagagtttaacttttcttttcattcagcagtttggaaacactctgtttgta

SEQ ID NO: 102134 - DNA, 122 bp, Homo sapiens
ccaggccctgttcatggtactgaagaacagcttgtataaaacaaccctgccctcacagggcgatcaccagtgacctgtggtgtggagtctccttttacctatgtctcctccttcccactgtc

SEQ ID NO: 102135 - DNA, 122 bp, Homo sapiens
catctgtagagaatctccattaatgcagccataccccctacctccctttctatgcctttccgaggatccaggagacactgacaccttttaaagttcaaaaagaaatatttaccctatatgct

SEQ ID NO: 102136 - DNA, 122 bp, Homo sapiens
acacacacacacacacacacacggtgtctgaggttcagtgatgcttacagttatagtgtccgcctctggtcttatggccaactccctagatagtagataagtggtacaatgatagctcctat

SEQ ID NO: 102137 - DNA, 122 bp, Homo sapiens
cccgacccagagagtcacgtgactttggaaagtcccgtggaaatccccgggcctacaacccgcatacaactgaaacggggcaaagcagactgcgcagtctgcagtcttcgtggcgggccaag

SEQ ID NO: 102138 - DNA, 122 bp, Homo sapiens
gtcaagccctgcctctttttactcttggctctctgctttcttctctgttggcttccttctcgagccagctctctctgtggggtgacaaatgaccactggcagcctatgctcacattgtccct

SEQ ID NO: 102139 - DNA, 122 bp, Homo sapiens
taaaatggcaaggaaaccaagtatttagagtggcagttttaaaggctgtacggaggggaacgatcagacttagccagctgtcctaagccagacagagacctccatatatttatgtaggatcg

SEQ ID NO: 102140 - DNA, 122 bp, Homo sapiens
aggcctatgaccccaaaggaggtctgggtggcaccgaggtgccctgcaaccccaggagggcgcagccagggccgatggcggcccccaggggcactcgccgcggggctgcccgctcggggctc

SEQ ID NO: 102141 - DNA, 122 bp, Homo sapiens
tgacatggctatgtgagtccaggatactgaattcatctcgtgagcaaaagagaccacacccgagaatgggccaagcaacaggaatggcagagaggaagcacaggagtgctcaaaagtgctct

SEQ ID NO: 102142 - DNA, 122 bp, Homo sapiens
cttacttggtgaggctgctgctctcttcccagccttgggtgccttttgcctttcagttctcggggaggagacaggctggtccttcattgctggccccggccaacttctccgtctcactggag

SEQ ID NO: 102143 - DNA, 122 bp, Homo sapiens
tttctgagaagctcttaggaacattgatttaattatttcttttccctctttatttatgagcgtacatgtcttattcaagatttaaaatatcacttggaaattaacaaggggtttcacaaata

SEQ ID NO: 102144 - DNA, 122 bp, Homo sapiens
actctgcccaggccctggctgtcaggcccggtgatgagaatatttcctggcttcaggtcccggtgcactgtgggagaggggcagaaagaaagctggttgctgagggcggaaggcaggggcta

SEQ ID NO: 102145 - DNA, 122 bp, Homo sapiens
ccctccctttagtggactggcactctcaggcgctgcgctgttaagcctcagattttactacgtattgcggtggcttcatattttcccttttgagttctttaaacgaactcatatcttttaac

SEQ ID NO: 102146 - DNA, 122 bp, Homo sapiens
agctctttaaggacgatgcagatgaatactggctgctgtaacggcccagttggtgcatctcggatgccaggaggcggtccagtgctgatctctttcttttgcccttccctcccgcccttcca

SEQ ID NO: 102147 - DNA, 122 bp, Homo sapiens
tgtgtaatcaggagcttgtgtggtgcgctccagtcggagctgggactcttatcctgggcccgtttttcatagcaccagccaaaggagagcgtcctctccaccctagcggcagagctgctacc

SEQ ID NO: 102148 - DNA, 122 bp, Homo sapiens
ccacggggaggagcctggggaggccagcgtgggtggcagctccagggaggctgagagcaccgctaggcctggggctgtgacgctgggcggacccggcagggtctggaactcccttctggctg

SEQ ID NO: 102149 - DNA, 122 bp, Homo sapiens
aagttacgtccgtatcacccgttaaataaagactccccgctcccctcatccccagttcatcgccgagcattctatttaaaacggcaaaccctagtccctgaggatctggcatgttttatttt

SEQ ID NO: 102150 - DNA, 122 bp, Homo sapiens
tcatggggccctcctgggcactgggtgacctgtcctttctcccctcaggtaggggtcccacggctgggtggtcctaagccactgggtggatgaaaggccgagggatgttggtcctgcttctg

SEQ ID NO: 102151 - DNA, 122 bp, Homo sapiens
tgtgtgtgctgggatgcatcctaaagccaaggagatgctgtttatttacagaggagcctgcgtgggctttttggtgccagtgatcatggtaattaagagttgacagtatctgtctggttctg

SEQ ID NO: 102152 - DNA, 122 bp, Homo sapiens
acacgctgactggttaaggcacttgcttcaatcaatcgaaatgtaagcaattaatgtaaccgcgagcacagatttacaagctttctccatttgacataagatttatttatctgggttggtgt

SEQ ID NO: 102153 - DNA, 122 bp, Homo sapiens
aacagttatgtatattttgcctttgattgcagggaacttggctacctttataggattccccggaacaaagtcatatttagggttcaaagaaggccaatttgggtctgaccatatttgtgaga

SEQ ID NO: 102154 - DNA, 122 bp, Homo sapiens
attcctttgtttgcagctgcataacttcagtccctgcctccgtagtcatgtgcctttctccgtgtgtgtgtttgtcttcacatcaggttctcttctgtgtgtctgtctctgtatctcttctc

SEQ ID NO: 102155 - DNA, 122 bp, Homo sapiens
ccgggacgcgtaagagccgctgccggctcctttttctctctcccactagggctgcccttccgacgctaaaaaagcagtggagctagggtgaaagccgccctcacgctcacttccggcaggcg

SEQ ID NO: 102156 - DNA, 122 bp, Homo sapiens
aaagtgaacagcacgatctgtacatgcacggcacacatgtaacatgcacagaatggtggccgggaccaagtgagatttaatcaacgctgcttccctcccccacttttctcagcacacagaga

SEQ ID NO: 102157 - DNA, 122 bp, Homo sapiens
tgcctcctcctcccaattccccctgctgtggagtctctattgcaaagaatccaaaggccccgttttaattgctctttacctctaaatgccttaagggatccctagagggatgaaacacagta

SEQ ID NO: 102158 - DNA, 122 bp, Homo sapiens
gtgtgctggggtgtgtaaagtagtatggaggcagcggtagcccagtgtctgagtggttgccgggtctccatggagaagcggctcgccagtgtcccaggctgctgagctctcgccgcccgaga

SEQ ID NO: 102159 - DNA, 122 bp, Homo sapiens
ggagggcggcaggcggaagccccggccatcttgggaagggccttttgggaccgtgtgttccgctgagaaccacagacccatgcttcagacgctacagatttctctctcaaatgcctggattc

SEQ ID NO: 102160 - DNA, 122 bp, Homo sapiens
taattcacatattattccaaccagtggccctgatgactcaggacaccaatttcaagcctgcggtcagcaagaatggcaatctgtgagaatgagctcaacaaatgctaattgggccatccaaa

SEQ ID NO: 102161 - DNA, 122 bp, Homo sapiens
aaagaaaataagcaagtgacaacttcccactttcttgtaccagagactcaaatgtgagttcgagttcatattaatcttttagttttcttttgtaatttattatttgtatatttgtgcctatg

SEQ ID NO: 102162 - DNA, 122 bp, Homo sapiens
ctcataatgacatttattgatctatgatttcctcacctatttatgtccttggcttctgcccgtggcaaactaaaaactcctggcttggaaattaagcagtctcctcttcactatttttgttt

SEQ ID NO: 102163 - DNA, 122 bp, Homo sapiens
gggcggacggagaggggcaggggcagcgccggcgttctcagcacccccggatgtcgttagcgggtaaggagactcccagctgcggccacacaggacttctccggttccaccctggtcctggc

SEQ ID NO: 102164 - DNA, 122 bp, Homo sapiens
acgccattaacccgtgcaagacccaatgaacagacgctatcataagccccacttttcaggcgagcaaacaggggctcgtggctatcgatgccatggagccttggcccagaacctggggtcta

SEQ ID NO: 102165 - DNA, 122 bp, Homo sapiens
gacagggagggctcagtgcgggtctgaggagggaacacacgtgtgcaggcgtgtgctccacggtggcatgttgatacggaccagcctgggcaccaggccccctcgggagccagctttgctgt

SEQ ID NO: 102166 - DNA, 122 bp, Homo sapiens
ccaggttgatatggtcgttcttgtagcggatgccatgcaatgcatagctgttgtgcagcacgtcggggtcggcctggaactggaggtggttctctgtgaactgcagccccccaaagctgagc

SEQ ID NO: 102167 - DNA, 122 bp, Homo sapiens
gaagagcccatactttggttggccagaggaaaagtacatttgaaaaaatgaccaaaagtacgagacagtataggaaaagtgagaagcaagtgaccttgacattatgactatagaaactcaga

SEQ ID NO: 102168 - DNA, 122 bp, Homo sapiens
tgtggcttccacattcccttctccagtgcagccaggcttgacctttcagaaaatccttgacgatgggaaggactcccaaggatggcatagaatagccaggcccagcccctggacctgcataa

SEQ ID NO: 102169 - DNA, 122 bp, Homo sapiens
gggggaaaggggcggctggtgggaattactcggagcaactggtaattggtggggcacgcgcgtgccctggtgttcagagttctgaatcgttgcgagtcagttacaagctgaaccactagcgt

SEQ ID NO: 102170 - DNA, 122 bp, Homo sapiens
tgttcttttgacttttgggcttggtaactgaacacacacttgcattgccctgagctcacacgaaagccctcagggcagaggaagcccagcagcaacggcagggccgggtgcctcccatagag

SEQ ID NO: 102171 - DNA, 122 bp, Homo sapiens
acctcgtgatccgcccgcctcggcctcccaaagtactgggattacaagcgtgagccactgcgcccagcttgacttagtttttgaggcctggagttgctaggtccagaatctccactctgagt

SEQ ID NO: 102172 - DNA, 122 bp, Homo sapiens
agccaaagcgaaacatttttctagttaattaaaacagtgcatctttcaagcaagctccctcgaggggccaggctcggacggacccagcgggcaggcaacccgaggtgctcctgagtggggtc

SEQ ID NO: 102173 - DNA, 122 bp, Homo sapiens
catttgattcctcattcttttcccactacattatcctccctatgattaaagaagcattgccgccacaatcagagcatctttgcaataaaagataaaatgttactagagaacctagataagta

SEQ ID NO: 102174 - DNA, 122 bp, Homo sapiens
gctgcccacccgcctgtgggatccaccatgccacatgacagccagcctgacagcaccagtcgctggtgagtctggtagccctggaaaccctctcacagccagccgagatgtgagggacacag

SEQ ID NO: 102175 - DNA, 122 bp, Homo sapiens
gcctgtgtgggggtcacccacaacgctccccaaatgtccactgtgcaccgagccctgaggcggtgtctccacctgacctgatcttctggcacagaaagccactggcccatgaagagttaacc

SEQ ID NO: 102176 - DNA, 122 bp, Homo sapiens
acagaggccctgctgggggcagggaagggcaccagggacccctaggacctggctcaccaccggctcacgcacctgcatacccgtgatggagacgtggtgagactccactgtcggccgccggg

SEQ ID NO: 102177 - DNA, 122 bp, Homo sapiens
tgtctctctccgaatcgctcctcctgctgctctcctgctcctggcaggccttgtgcccaccgggttacctgccctcaagcctccgcccagagaagcgcagctgcaggggcgcgtcctgtcac

SEQ ID NO: 102178 - DNA, 122 bp, Homo sapiens
gagaataaatgtgggggtagaggaatgaacctcttgttcacacacacacacacacacacacgcaaatgccttctatggccctcagagcaatcccgaatccatggagggctgtgttcttgtta

SEQ ID NO: 102179 - DNA, 122 bp, Homo sapiens
gagttccgaataaatattgatgcacatctgtcccccgctcaggtgtagaggggagctttgcgctcgcaacagtttccgcccacccggcagcgcgcgctccgccgcccgccttcgtccctgcg

SEQ ID NO: 102180 - DNA, 122 bp, Homo sapiens
ccagattctgggggtcgttcaggttgaaagactggtcgaaattacgcgggcatgagtcagcgcatccctacgcgccctccgccccttgagggtgggtcgcttatagggaggggagtagagta

SEQ ID NO: 102181 - DNA, 122 bp, Homo sapiens
ttcaatgtataaatcaaatgtccacaataggcaaatccttagaatcagaaagtaaattagcggttgctaagtgggatgtgtgaataaaaatggagagttactgctaatgggtatggtttcct

SEQ ID NO: 102182 - DNA, 122 bp, Homo sapiens
ccgggaatccagtctgaagcaggggcagcgaggggcaaggttgggccagttacggattcacgctgctccccgggcctggggggtccactgagggaataaagtgcacgggccaccgggctgcc

SEQ ID NO: 102183 - DNA, 122 bp, Homo sapiens
aaataagaacaactggttaaaagcctgcttaaaaggcgctcagctgggtgcagtggctcacgcctgtaattccaacactttggcaggcccacagcagaaggatcacttgaactcagaagttc

SEQ ID NO: 102184 - DNA, 122 bp, Homo sapiens
ggtgagtcctctccctccatcctgtttagagccgccgtccttgccccatagctgggcgtccggaccagaggctcacacccctcagtatggcgccgcctgctatccgtccccgtctctgcctg

SEQ ID NO: 102185 - DNA, 122 bp, Homo sapiens
gtccaaggtcctcagcccccgacccgacgggcgcctatgcacaccggccggagatagtcacgcagatgccagtggagtccaccgcaacttagaatgtagtgccgacggctccagaactgagt

SEQ ID NO: 102186 - DNA, 122 bp, Homo sapiens
ggctgcatctcagtcatggtggttccatacagtttttccactgtctcactctaaaagctccgagctcctttataactgtctcaaaaagtctaaactcatctggatggcacacaactcacagc

SEQ ID NO: 102187 - DNA, 122 bp, Homo sapiens
cactccgattaggtctggagacagcctgaaatagggtgtagcccgcagttgttggggctgcggaggaggcgactggggtgaggggcagagaatgcaccccaagagaaaggcatagggcccca

SEQ ID NO: 102188 - DNA, 122 bp, Homo sapiens
gcctgcagatggcccgggttggcgggaaggggaccgaagtggcaggggcggcggggagctcgggcacctttaaaaaccctttgtccctaacctgaagcgggaggcacctcccctcttccgga

SEQ ID NO: 102189 - DNA, 122 bp, Homo sapiens
cgtagcccctgttctctaccaacccgtgcagggccggagaggacggcagagtcccgttcccgcacaagcaacagctgctcctcagcgccacccggggccacagaatccctgtccggtcagac

SEQ ID NO: 102190 - DNA, 122 bp, Homo sapiens
ccttcttccccatggtcagccccgctcccaggctccgtctgtgcccctgcagctccccagcggtggcctttttgttcagtgcttcctcggcggctgggactcaccctgatttaaaagctcca

SEQ ID NO: 102191 - DNA, 122 bp, Homo sapiens
tctttttcattgttttgcttgcctccctgccctccagtaccctgtggagagttcatggatcgccccagaactccggctgcagagtgatgacatcttgcccttgggcaaggactcagggcctc

SEQ ID NO: 102192 - DNA, 122 bp, Homo sapiens
atccagctgccctacttgattgatggggctcacaagatcacccagagcaatgccatcctgcgctacattgcccgcaagcacaacctgtgtgagtgtgggtggctgcaatgtgcggggggaag

SEQ ID NO: 102193 - DNA, 122 bp, Homo sapiens
cagaatccatccatgaaaaccaatacacttcataacaccatgtgggtacacacccagcagcgggattcttgccattcaggtgacaggtgacttcctatgtccccacagaggccttccctgac

SEQ ID NO: 102194 - DNA, 122 bp, Homo sapiens
agggtgggttgtgactccaggggtggggtttgggcaaggaagttttgcaagatggacattcgagtttctgatagaatccaggtggccttctcaggggaactttgctgttcaggcttaatttg

SEQ ID NO: 102195 - DNA, 122 bp, Homo sapiens
ggctgcgggaggcggagccgtggcccagctccgagcagtgggtcaaggtgcactgtgtgccgcgccgcgggatagcgggcctcgggtctgcgcgactgtcgagagcggcgggatccccaggg

SEQ ID NO: 102196 - DNA, 122 bp, Homo sapiens
acttcgggggctcagggcacaagccgcgctggctgggctggggcgtgctgcttatgggcacggggtcgctggtgttcgcgctgccccacttcacggctggccgctatgaggtggagttggac

SEQ ID NO: 102197 - DNA, 122 bp, Homo sapiens
ccggaggttcgatggccgccgggccagtgcgggctcagaggaagaccctgcaaaaaagagcgctcgcccccacccctggagccgaccctgcgcagtagggccgcagccggtccccgcgggca

SEQ ID NO: 102198 - DNA, 122 bp, Homo sapiens
gcctctgtagccaattctgcagacacctgagcctccaaggccttcagccaagacctttggcggtaattggagtctcgggataagctgcttcaggtgtgtgagcctcaggttcttctctcctg

SEQ ID NO: 102199 - DNA, 122 bp, Homo sapiens
cccacctgcaatttctgcaagatcggcttgacttcttcctcttcatcagccatcatctcccggccactccacccccaactttataaccacagagacgcacgccctctctcaccgcggaacca

SEQ ID NO: 102200 - DNA, 122 bp, Homo sapiens
ctcccgcaccgctattggccgggcttactcctggccaggcggagacgcgctgcgattggccgtggtgggtgccggtaacccgtgctagcgtctttggctccccgcaccgtagatgtcaaagg

SEQ ID NO: 102201 - DNA, 122 bp, Homo sapiens
tgaaagatcagccatcattacagcaaatattatcattattacctccctgttgcagttctgcgctgtcacaaacgactctgctggtgtggctgtccctccgtctgctgtgggggcttcttgca

SEQ ID NO: 102202 - DNA, 122 bp, Homo sapiens
ggacctgtcgtactcagaccgggtaagaaacatggcgagggtaggaggaggcagcggctacgcggggattctgaggaccaacacgactccaccggcacccaactcaccggcagccaactcac

SEQ ID NO: 102203 - DNA, 122 bp, Homo sapiens
ttctgatgtcactcttctatttgagtcaccgtttctatatttaccatctattcatcctgacggcttcctaatttgggagaaaaccttcagggtccctcacttcgacttctacctgagtcaaa

SEQ ID NO: 102204 - DNA, 122 bp, Homo sapiens
aacagaagcaaattttaggccatcagctaaggctgcggtagcaccagccccactggaggccggacctccacaatccttggagttgctgctactagtggtggtggtggaattattcatctcaa

SEQ ID NO: 102205 - DNA, 122 bp, Homo sapiens
ctgtccaccttctccctagtttttgtatgtcttattggtataagctgcttccttatcccacggaccagaatattatttttgtattttccctcttctttggagccgtcaggaaacacggtaca

SEQ ID NO: 102206 - DNA, 122 bp, Homo sapiens
tcggaccccgcatggcgccgtcggggctggctggggccgggctggggctgggtccgggtccgaggaggtccgcagcagccgggcttcctccctgctccccctcgcgctggcccgagctcctt

SEQ ID NO: 102207 - DNA, 122 bp, Homo sapiens
acgacaccggcagatggcgctgcaaagcttctcaaatgcagcgggaagtccatttaccaacggctgttgcgatctcttaattagcttgaactgagtttgtattagaatttataatttttact

SEQ ID NO: 102208 - DNA, 122 bp, Homo sapiens
ccgtcttggcaaaagcctgagaagagagagctgctacctgactttctccgtggctcctcccgctctccgctttgaagatggacttgggcttcctggacttgaagttgcccatgctgggtcgc

SEQ ID NO: 102209 - DNA, 122 bp, Homo sapiens
gagagagatctacctacacgtcagactaacaggcaaaagaagcctaaaggtcctgcagcccgactgttggaccagggtggccttccatagagttctgctaggtggacaatggagaaggaaaa

SEQ ID NO: 102210 - DNA, 122 bp, Homo sapiens
tgaagagcgggaccaaggcctgccggccaggtgtgcaccaccctacgctaacatagcacgcggggcgcccacccaaccaccccacacccgccccgggccgcctgccaccctggaatgcaggg

SEQ ID NO: 102211 - DNA, 122 bp, Homo sapiens
cggggccggctggggcagagggagttgcgtgcacgaaagctcagctcggccgaaagacggcgcacactgggtcggtcggctccggccgggactcggtggttacacagggctgctgggcatgg

SEQ ID NO: 102212 - DNA, 122 bp, Homo sapiens
cattccttctaggatgtcactgtgaaccagcacttgtctgcacctcagcttgcaacttagcggattccttctttattctttgtctgttagaataagcaaatatgaaatgttactttaatttt

SEQ ID NO: 102213 - DNA, 122 bp, Homo sapiens
gcgagaggccaggcccagcccgggcggtacaatagggttgggccgaggccgggactgggccggcgccgggcggggaacgggttcgcgaccgcagccgagagaccccgggcgaccggcacctc

SEQ ID NO: 102214 - DNA, 122 bp, Homo sapiens
accacctgagccacaggttggggaggactcccattgagaccccaggctgggtaacaggaacggcctccttcttcatcgcaggcagtgtttgcggtggcacaggagatccggcggtggaccca

SEQ ID NO: 102215 - DNA, 122 bp, Homo sapiens
acttcagggaaacatgaagcattgcattctgtgctaacggtgccccctggagttgtgcaacgcagatgtcatggcgaatgtaagatgtttggcttgagtttctcatgacgggggtctgtttt

SEQ ID NO: 102216 - DNA, 122 bp, Homo sapiens
gcagaacgcctccagcttgcacacgccgggaggctgccccagccggggtccgcgctgcagcgtctttgcaggtctcccagcagcaggcgacagagccacaagcacagctctcagtccaggga

SEQ ID NO: 102217 - DNA, 122 bp, Homo sapiens
ggagttctgacatcgacagggagcagatcccagtcatgaagaaacaacttgagtgtgtgacggcaagaccatgaaagccttcctttgcaagcatcgcctgggctcttctgctcacccaaggc

SEQ ID NO: 102218 - DNA, 122 bp, Homo sapiens
ggcagctcgagcaacgcgatcattcagaagcggccgctttccattcacgtctataattagcgcgcaggctgcagctcaggctcgagctgcaaagcggggcggcggccttgtgggcggggcca

SEQ ID NO: 102219 - DNA, 122 bp, Homo sapiens
tatcccctaatttgttggttgtgctaatctttgtagaaagaggtctcgtatttgctgcatcgtaatgacatgagtactgctttagttggtttaagttcaaatgaatgaaacaactatttttc

SEQ ID NO: 102220 - DNA, 122 bp, Homo sapiens
cggcggtgacgacctacgcacacgagaacatgcctgtgagtgctttggtccaggtttcggcggagatctcgctgttctgtccgaactctcccctcacgctgatttcggatcgtagagggtcc

SEQ ID NO: 102221 - DNA, 122 bp, Homo sapiens
atgcatctgggtcctcactggcttcctggagtgggttgctgccacaggctgagaccccagcgggtgtctagagcctaaggtgcagccaagagcctggctcagggcgccagggttgggagtgc

SEQ ID NO: 102222 - DNA, 122 bp, Homo sapiens
gatcaggatgactttctgctgggaaatatttgtctttgcatcagtggggaaaaagaaagccgatgtcatgagtggaggctctgagaaaataagggctgtgttttcagtttagacccagctaa

SEQ ID NO: 102223 - DNA, 122 bp, Homo sapiens
ggtccacaaagaactggacggatgcagtggtggatggcgatctctctggaccactccggacgcgcccagcagacgcagcctacgcctttaggtcctaggaggctgagaagggtggggagagg

SEQ ID NO: 102224 - DNA, 122 bp, Homo sapiens
agccgggcacagggtccgtgagtggccctcactgagcagggactccctgggactggctgccggaggcctgaagcagagcagtgggcacttgggtcccacaggtttcaggggcgagggtgatg

SEQ ID NO: 102225 - DNA, 122 bp, Homo sapiens
ttaattttccccacatgcagatggagctgggaccagcctctgggttaaaattcagcatcacgtcttactcagaggaagatggtgggaggtcctcatgcttctctgagccccttccacgcgtg

SEQ ID NO: 102226 - DNA, 122 bp, Homo sapiens
ctggtggagctatggggcgtggcatctgccaaaaccaatgggaggagaggacgaggccggcgagccaaagggactacaaatcccagtgtgcatgggcaggggcttctgggctgggcgcgggg

SEQ ID NO: 102227 - DNA, 122 bp, Homo sapiens
gtaaccgagtcagtgcgtgaagcagggcaagctgtgatggacaggtgctgctgccggtggcgttactctcgtgatactgctgaggatggaatgagcgcgtgtctgcagagcttggcctggcc

SEQ ID NO: 102228 - DNA, 122 bp, Homo sapiens
acaggcttggcagaggcgccaggttgtcaatggcctcatgctgggacaggccaggattcacgtaaatcgcctggagcaagctgttgtaaatttggcgccctgtgaatactttcatacctgtt

SEQ ID NO: 102229 - DNA, 122 bp, Homo sapiens
ggtgctctcgctgcagagggctgctgagaatggaatcagcacggtccctcacagatgcagcgggcgacactgggccacgggggcactgctcacggactctgagcagcgtacctcggatgaag

SEQ ID NO: 102230 - DNA, 122 bp, Homo sapiens
gcggcgacttccagggggccccgccgctggccgcgacttcgtgcgtcccaattttaaattcgccaacagcccaggaggcagggtcctgttgggacttgtctttctgagtccagggacagaca

SEQ ID NO: 102231 - DNA, 122 bp, Homo sapiens
gttcgcggccacactggcccaggggaaagccccaaccctttgccactggcgatccacacgcgccttttggaggccttggccagccctccgcccaatgcgaagagctgggccccatttgcctg

SEQ ID NO: 102232 - DNA, 122 bp, Homo sapiens
ttaccgatgcttacctagaaaaggaaagactataaagcaggcctttccaagaactggagtcgagtgtttgcagtcactagaagttttctagcagaactagcctgggtcagggagggtgctgc

SEQ ID NO: 102233 - DNA, 122 bp, Homo sapiens
gtctgcgtaaaactgcggctcggaggcgggacaggcagtgctcccgaagcggaagtttcgcggggaagcttttgcacctaaggacacttcctgtttcctagtaacaataggaagtgtccgta

SEQ ID NO: 102234 - DNA, 122 bp, Homo sapiens
ccccggcgcggggccgcagtgagtgagtggcactggcagcctgtcaatccctcggcccagcggccttccagcccggtccgcggcggctgctggctgggtgcgcggctccggcggcggcggcg

SEQ ID NO: 102235 - DNA, 122 bp, Homo sapiens
cctattaatgacgcaatgaacccgggaagacgaatctcgaccactgtttcgcaaataccgcgtgtgatttattaaatgccgtctctccgagtcccaagcggccgggagcattatgccacctc

SEQ ID NO: 102236 - DNA, 122 bp, Homo sapiens
ctttgtgataactgggccgaaacccgagggtcctggagcgcggcgggtggcgggagcttgcggagcgcggcgcactcggcggccaggcatcggccagcccagcggcagccccctttctccta

SEQ ID NO: 102237 - DNA, 122 bp, Homo sapiens
gacggacggaaggtgtgtccagcccatccattcatgtcaccagccccacaaagtgacagacgcggccaacaataagggtagtgctgtggcaaggggaggggactcgtagtgggaggaggtgg

SEQ ID NO: 102238 - DNA, 122 bp, Homo sapiens
gaaactttggccgttctaacttgccaagagcctgagtgaggccttggaagcctccagccccggctcaggtcgggacgcggctgctgagctttctcaggcccgcaggacagcggcccccgccg

SEQ ID NO: 102239 - DNA, 122 bp, Homo sapiens
accataactttctcttccctccgtactcccggcagaggtcagccctcaggtctgaggatgcgccctgtgtggagtggtgcgcgctcagaaggtccggcaagggggaaaaggccagccggggc

SEQ ID NO: 102240 - DNA, 122 bp, Homo sapiens
tctaaaggcgcagcttcaaccagaagactagaagtcagccaggagctgggagtagtgtcacgcggggtgggggttcctatgagcatcactttacaaaaccaggagggacggaagtgcgaggg

SEQ ID NO: 102241 - DNA, 122 bp, Homo sapiens
gggtcatcagggggcggcagcggcagagccctgctaatgatgggcacttggcgtaccggtcgagcaggagagggcaccttcagttcccattagcgggatgtcactgccaacgtgcctcaggg

SEQ ID NO: 102242 - DNA, 122 bp, Homo sapiens
actctggaaacgctgtggttgtttttcacaggaacccagggagctatcaaagtcggagaacgtgcctctgtttgcaggagaggtgggcaggcagcgagatccccgcgcaccgctcgctcggg

SEQ ID NO: 102243 - DNA, 122 bp, Homo sapiens
tctcggtgccctgaaagacccttggctctcacgaccagccaggactgaacaaacctagcccgaccaaaaacaaatcctgcatccaccggagtgcagcgcctggcactccgcgactgggagga

SEQ ID NO: 102244 - DNA, 122 bp, Homo sapiens
tcacctgactgtagccactttcatcccagtgatctgtttaaaggcctcagagctcccaaccgggactatccgaatacccccagcaactctccctgctaacccagtagccctgctaaccattt

SEQ ID NO: 102245 - DNA, 122 bp, Homo sapiens
aagaggagttgctagcttttgagaacttccatgatcatccaaagtctgaaacaaagtaggcggtcagcctttcaaaatacgtgttggaagaaacagacaccttcccatccccagcgtttgtt

SEQ ID NO: 102246 - DNA, 122 bp, Homo sapiens
cgccgccgcgtgccgggaactgtcacgcgagtccagccaggttgcatcagctgggctcggcgctccgcttactcggcctggacccctccggcagcggccggaaaaagtgaggagcagcagag

SEQ ID NO: 102247 - DNA, 122 bp, Homo sapiens
atagtcaccctactgtgctatcaaacactagaacttattccttctatctgactgtacgttcgtacccattaacctacctctcttcatcacccccctcacacacccacaaacacacacacaca

SEQ ID NO: 102248 - DNA, 122 bp, Homo sapiens
cccgtggaggcgagacgcggccgccaccccctccccagtggctccccaggagcccacggccgccaggtccccagccgtcagcagtgattcaggcatctggggacacacgtgggcctgtctgt

SEQ ID NO: 102249 - DNA, 122 bp, Homo sapiens
cccgaattgcctcctgggtccccttctcttctactccgcgagaatctcctgtccattctccgtgagggtgtttcagttcctcccgggaagcccagaatttaatatcttgcccaggcccttag

SEQ ID NO: 102250 - DNA, 122 bp, Homo sapiens
tcttatggaggactttgatctttagtataggctattggtcagggccataggaactaaccccgatcctcactccaccaggatctaccacatcccctacacacaaacacatgctgtggggaggg

SEQ ID NO: 102251 - DNA, 122 bp, Homo sapiens
cttctccgcctcgatgtagtgtgccttgagccacagctgctgcagcttggcgtggttgtgcggcgagaactggtggctctccaggatcttgtagagctcgcggaagttgccgcggtggaagg

SEQ ID NO: 102252 - DNA, 122 bp, Homo sapiens
tacgtccctgcacatttgattgttgtgtcttcctgaggaattgacccttttattgtcacacgtaccccctcagcctgtggtggagggtctctgggagagagacttccggttctgacagcgga

SEQ ID NO: 102253 - DNA, 122 bp, Homo sapiens
agcggggtgcctgggggccgagggctgaggacggggtgcggaggcgcactctgggaatgccgagagggtcccgcagagacgtcagggcgcccgtgcgggccggcggggagctggggggctag

SEQ ID NO: 102254 - DNA, 122 bp, Homo sapiens
atacggggccgctaaaaataatcatatggagatgtaggcattgatatggaatagtcactacggtctgttattaaattagagggcaggtctaatgtagtatttttagtgtcctctctctctct

SEQ ID NO: 102255 - DNA, 122 bp, Homo sapiens
ggggcggggcggggcgggagggtggggcccgggggactttgtgctggtgcacgggggtcgcgccgactggcgtgtacgtggttgtgcggtgggtatggaggtgtgtgcacggcgcgggggac

SEQ ID NO: 102256 - DNA, 122 bp, Homo sapiens
actccgcggtggagcctgcccaaaggtattagcgttaagtgctgagagcaggagttaagccggcagggaaaagggaccggaaggggtacaggggtgagggaaaccgatttcagacttccccc

SEQ ID NO: 102257 - DNA, 122 bp, Homo sapiens
tgtctctgtcctcgggccacactgagcccttacgagggcaggtggtgcctgggtactggccgcagcatgctttgagtctaaaagtaggcacccaccctgtgaagccagaccagcctccaggg

SEQ ID NO: 102258 - DNA, 122 bp, Homo sapiens
cttcattcctctcctctactcttctcatagaaggagccctggtctgttttcacaaagaatcgggccaaacgttggaatctccaggacggagagcagaagttcctgttctctaacaaacgtct

SEQ ID NO: 102259 - DNA, 122 bp, Homo sapiens
ggggatctgtaaagcatggtggcttggtgtatcattgcagcttcaggaagtggcccgcatcgtgggcaactctggcctcaacatctacaatctctatgccccgtgtgctggaggggtgccca

SEQ ID NO: 102260 - DNA, 122 bp, Homo sapiens
tccctgcgggctgcttgctcagatggatttgggcaccccggggaaggtgttcttttgttccgctggcagatgggcgtgttcagtgctggtctggacatgtgattccggctgtggtttggggc

SEQ ID NO: 102261 - DNA, 122 bp, Homo sapiens
ggcaaccgtgttgcatgagtcccacgtggtggcaggtcttccatgcatgagccatatttacggtgaacggcggcaactccatgcccaggaacagggctcagacccgcactgagactttagcg

SEQ ID NO: 102262 - DNA, 122 bp, Homo sapiens
gccgggggaccgggcgggcctggggagcaggcacgtgtggagggcggacccgccgggggtcgaggcctgcctctccgagagctcctggcgcggccgtcccggcccggggccccaggtgcgct

SEQ ID NO: 102263 - DNA, 122 bp, Homo sapiens
aagatgttacagttgagccagactttgaagaatgttacaacggccaatgactggaagagacgacttcaagtgatgttctgtatctactatccaatatggaagccattagccatttatggcta

SEQ ID NO: 102264 - DNA, 122 bp, Homo sapiens
gctgaatgtcacacggggcccagcctgggaaagcacttcatgagcagctctcaggtggcccgggaccaactgccagctgtctggggaatttctcactaaggctgacatccattttccacatt

SEQ ID NO: 102265 - DNA, 122 bp, Homo sapiens
gcggctggggccctgttgccaggcagcaggctcctggggagggcccttgggcagtttcctcggcttctttggccctggggacccaggtctgggcggggggtggggcggttctgctgcgatat

SEQ ID NO: 102266 - DNA, 122 bp, Homo sapiens
gcccagaaggctgaggaaaaggagaaccattgtcccacaatgctccggcccctttcacatcgcacagtcacaggggcaaagcccctgaaaaaggctgtggtgatgcccctacagctaagtaa

SEQ ID NO: 102267 - DNA, 122 bp, Homo sapiens
ggagcagagaaggaccaaacccagcctggggttgtggggcagaaggtgtgggatcaaggtcggggaaggctttctgaagatagaagcaagtaggctaagttttgagggccaattaagagttg

SEQ ID NO: 102268 - DNA, 122 bp, Homo sapiens
cggcgtaggcagccagagtgggctcaggacctccgccagcagtgaaaccgtcccggttcccggagacccagcttggacggctgtgcctaccccatgccccgccggggctcagaaccgcacag

SEQ ID NO: 102269 - DNA, 122 bp, Homo sapiens
cctgttacttccacatgtggggaaactggactgtaatttgtggtggtggggaattgcgttcgcgctttcttctggaggttgtagtgtaaaaagcagtttgtctaccaagtgatactttcagc

SEQ ID NO: 102270 - DNA, 122 bp, Homo sapiens
ccgcctcggtctgggcaagggcgcggaggcgggcggtgtgtgcgggggggcgcggtgctgcgctccggtgtgttcgcccatgacctcggtggttcgaaggggcgggtgctctttaaaagctg

SEQ ID NO: 102271 - DNA, 122 bp, Homo sapiens
tgttgggagaacgggtcacggaaacagtcccttccaaagccggggccatcgtggggtgggcgagtccgccctcccaggccgggggcgcggaccagaggggacgtgtgcagacggccgcggtc

SEQ ID NO: 102272 - DNA, 122 bp, Homo sapiens
gggaggatcacctgagcttctagggaaatccaagttgcacaggttgcagtgagccatgatcgcaccactgcactccaccctgggtgacagagcaagactctgtctcaatttaaaaaatcaaa

SEQ ID NO: 102273 - DNA, 122 bp, Homo sapiens
ttaatattatacatacaagagcacatttaagacacccgccagaggagcaggaacggtggtcgtgtgggaaaggatacatttttacgcacacgcgtctccgggccattaacgggccgcgcgtc

SEQ ID NO: 102274 - DNA, 122 bp, Homo sapiens
gtgaaatatatttgaactgggtcagaaatgaggccactgggtatcaagccttagctgcagcgccccctggaggtctctgatgtgctccaggctgaccagctcccgtcaaagaagatggagca

SEQ ID NO: 102275 - DNA, 122 bp, Homo sapiens
ctggcgcccgcctggtggacctcgggggcaggctggggaccgggcccctgcgggacgcggcgcggcaggacgctccccgcgcctttctttctgcacctgcccctcggggtgggtccccctct

SEQ ID NO: 102276 - DNA, 122 bp, Homo sapiens
ttgctgcagttggccggctgtttcagtccccgcgccgcagtccagggcgctcgtagagggcgccaactggcacctgggcccactactcatccgagcccatggaaccccacttccgcgtcccc

SEQ ID NO: 102277 - DNA, 122 bp, Homo sapiens
ttagaatcctaacttactgtaaggacccaccgactttagaacctatctaggacaaggaaccgaggtccggaaaaagggaagcaacttgtccaaggacatagacgctaatcagtaacagagca

SEQ ID NO: 102278 - DNA, 122 bp, Homo sapiens
tgccaaaaccaacaaagtcacagaggctttcactgcagtgtgggaccacctgagcctctgcgtgtgcaggcactgggtctcgagagggtgcaagggggataaagaggagagagcgcttcata

SEQ ID NO: 102279 - DNA, 122 bp, Homo sapiens
tcgggtgctgctacctctggggactgctgactccctccaaaggcaagatctgaaatttcccgcgtggatggactctgcatctctgttggttctggagtgccgggtgcggacggtgtaggcgg

SEQ ID NO: 102280 - DNA, 122 bp, Homo sapiens
aatgtgaacaaaggcagatatgctgcaggtaaagacaggtctacagcagtcagggcttgacggcttgaagggcagaaaggaaagtgcagaaaagcctggcagctgctgcagccaccacaaac

SEQ ID NO: 102281 - DNA, 122 bp, Homo sapiens
tgcggagcccacaagctggcctggacaggcatcactgctccaggcagctgtgcacccagccggccctggcgtcccggcccccagcctccgcctccctcgccgacagcttcccggggctctgc

SEQ ID NO: 102282 - DNA, 122 bp, Homo sapiens
agaatggacacttgatgcaatcgttaattctcccttagattctaatggtggctattctgacgttgtttgccaaggcgttgtgtttcttttagtgtttggacctaatagtcgtcgtggtctgg

SEQ ID NO: 102283 - DNA, 122 bp, Homo sapiens
gatagaaaataaaaccccgaagctatagcttacaggacacgcaactccgcagaagcaatgcgaggaaccccacccagaaaagccaaagccacctcgtacccgtccccaggactcacttcccg

SEQ ID NO: 102284 - DNA, 122 bp, Homo sapiens
agcaccattttccaaatcccctttgccttcaagataagaaactgacacccagagaagttacgtctttgactaaaatcctcagagatcactagctgggacacactaaagctacagtctttcta

SEQ ID NO: 102285 - DNA, 122 bp, Homo sapiens
acaaggaggggaaggcctgtccttttatctttgcaccgtggctgcccgggcagggctggccgcgcgccgcgccgcctcctccaccgcaggaacgcctcgccccgaggtgcctgtccgcaggg

SEQ ID NO: 102286 - DNA, 122 bp, Homo sapiens
ggggctgcgggcggaaggttccctgccccaagcccgtgagagggaggacgggaagggcctcggccgggcagtctgcaacaccagcctctcagctgcgccagccctaatgcttccaaccaggc

SEQ ID NO: 102287 - DNA, 122 bp, Homo sapiens
ttaagatggaaaccatagtcttttcatattctgatttggggagggacatcccatcacttccgtcacgtctgttcctaagaagagactcaataagatgatcacacatttaaatggacatgatg

SEQ ID NO: 102288 - DNA, 122 bp, Homo sapiens
tgtcagatttccttgccccggccccaacccaaactccaaagagtgcatctactttaaaagcgtgtggtgaaagtaattccctacccaagtgttcccactactgtcactggcctcacccttct

SEQ ID NO: 102289 - DNA, 122 bp, Homo sapiens
ggaagtcctagatcaaggtgtgagcagggctagttcctcctgaggcctctgtctgtggctcgccgacaccatcttctccctgtgtcctcacagagttgtccctctctgcgtgtcttgtccta

SEQ ID NO: 102290 - DNA, 122 bp, Homo sapiens
aattcacgcaggacgtccggcacggtgaccgctgggaccccacgcgaccaccccgtgcgacggacacaccaggcccaggcccaggcagcccccagcggcgggcacagcagagggcagccccg

SEQ ID NO: 102291 - DNA, 122 bp, Homo sapiens
cttccagtgtctgcatattctgtatcctctgggttttcagagcttgcttcagctttcttccgcccctccaggctatgcttatgctccttttttgtctctaacattttctacttattttccca

SEQ ID NO: 102292 - DNA, 122 bp, Homo sapiens
agggaccatgaataagtttgtgctggcgattactgagaaagtctagcataaaaattaaaccgaagcctaggccgaacactggcatccctctgcttggctgtgaagctggtgaggatgctgca

SEQ ID NO: 102293 - DNA, 122 bp, Homo sapiens
tgggaaagcctgttcctaccccagatagctaatattagaatgtgatttttgctacccatccggaaccccatgccttgtaaaaaaaaaaaaaaaatcaaatcgttgaatttggtttgctaagt

SEQ ID NO: 102294 - DNA, 122 bp, Homo sapiens
atagggcaggtcatcccaaggacagcagttaattcactgacatgccagcaaagggcaaaccgaatcggccccgcggagcccaggtaggggcgccgctcacctcctaaaatgccctcaaagac

SEQ ID NO: 102295 - DNA, 122 bp, Homo sapiens
ccacacggccgggcggggcgtgagggacagcccgaggactacaggtcccaaggttccccgcgccgcttccggggcacggtggcgtcccggcaccgcggccgcagtgaggagactcggccatg

SEQ ID NO: 102296 - DNA, 122 bp, Homo sapiens
cacttgaaaggcaactgtttgaaactggttcaaatggctgtgtttgacttgaaacacatccgcgtttggtggggctggtgaaaatgaccttcggcagttcagaaacagcggaagatggacag

SEQ ID NO: 102297 - DNA, 122 bp, Homo sapiens
cagaggtaggtggtagcccattcatctggttactgatactggccggcatcagtggactgtcggcaggtccttgagcaactggtgtgtgaaatgggacggacgtcaaaggacaagcgggatgt

SEQ ID NO: 102298 - DNA, 122 bp, Homo sapiens
actgtaaggcttcacaggagtcattcatgcaacaaacggtcctgtgatgcacactgtgcccggccccactggagagactgtgaaagcaccgctccatctagtcacactccagggaactcaca

SEQ ID NO: 102299 - DNA, 122 bp, Homo sapiens
gaaatggggcctcacacacacacagatgtacacacagggttcatctgccctatccttcgccggccagaggaggccatacatgttatgaacatgcatcttaaaatcatgcaacacattgaaaa

SEQ ID NO: 102300 - DNA, 122 bp, Homo sapiens
aaactcaaggaatgcaggaaacctgggtgtggttagggcaaggtctggaaagggccgttccgtatcctaagcaacgctaacaccttgttaaggcttccagcatagagaacaagcaggactgg

SEQ ID NO: 102301 - DNA, 122 bp, Homo sapiens
tccaaaccgaccaagtcgtttcttcacccacatacagcagactcgcacgtgccactgcaacgggtatggcctgtctctcacacacatgcacgcacacagacacacacaatggggtccttaca

SEQ ID NO: 102302 - DNA, 122 bp, Homo sapiens
ggtgcatgaacggcggcgcgatccgcacaggcgaggagacgaccgatgggggcggacagccggacgcacggctgcgtcactcaccctcagcgaccagggccccacgtccctaagcgcggagc

SEQ ID NO: 102303 - DNA, 122 bp, Homo sapiens
tttgccttaaatgggaaacttgcatttcattgtaaagatgatgccagcatcctggcttcccgaattcctgaaggagtagtgttttcttgcagggggagtaggaattatgttccagggataat

SEQ ID NO: 102304 - DNA, 122 bp, Homo sapiens
gaggcttaaaacaaaaaccggttattatttctctcaattctttgggttgctggtgtcacccgggctttgtggctgggctctaggctcacctggggtgaggaaaagttggtgcattttgcttt

SEQ ID NO: 102305 - DNA, 122 bp, Homo sapiens
ggaggtggaccttggtgttccagcccctctagggtaggtgaccaggggctgactctagctcgggctgacctgtgatgtgtgtgtgcatagcctcgcccccactgcctgctccagggctacag

SEQ ID NO: 102306 - DNA, 122 bp, Homo sapiens
ctatctcctgctggtctggtctccacaagctcagtgtcctgagtttggtcctcgccatcccgctgccaggtcagtgtgatctccgcagggtagaaacccagggcccagcacctcagggtggc

SEQ ID NO: 102307 - DNA, 122 bp, Homo sapiens
ccagcctgtgcaaactagaaaggccctgtctctacaaaaaaaaatacaaatttagccaggcgtagtagcttatgcctgtagtgccaactacttgggaggctgaggaggatcatttgagccca

SEQ ID NO: 102308 - DNA, 122 bp, Homo sapiens
agtggctggaggactgagctcacaaattacaccctaaaaccttgtggtcggtaagggacacgtgaggccctttgaggaagagagaaggtccccttgtgccccagccagcttcccattagggt

SEQ ID NO: 102309 - DNA, 122 bp, Homo sapiens
agaccacagaggctggccgagaaaccaccagcaactaagctgcattcagctggagttcctcggaacgggaggactcgcagctctccctttccccagccaggatgagggaattagacaatgga

SEQ ID NO: 102310 - DNA, 122 bp, Homo sapiens
tgtgcgggtgacccgagcactgcgctgcattttcctggtggactgtcggtattgcggtggcgtccggcggtaaggcccgggtggggagctgggcagtcactatcctggcatggcctgacctc

SEQ ID NO: 102311 - DNA, 122 bp, Homo sapiens
gccgcccagcgccctgagggcggcaaatcgatcgccggtcagaggccgcctacagggtcacggactgaccagaaaataagcagagaatgaactggaaaatgagggggattaaaagtgaaggc

SEQ ID NO: 102312 - DNA, 122 bp, Homo sapiens
gctttctcccctcccagatctgacagaatatggccctctaatcccctcttcagctctggacgaccccctttagtacatcccgggaacaaagacaccccctcccctgcccgggggtgaggcgg

SEQ ID NO: 102313 - DNA, 122 bp, Homo sapiens
tctgagtgacctcatctgggggaaagagctcattagagactttcaatctcaagcattatccggcaggcagagacagcatttggaggatgtgagagcttccgtcactatttgtgaattcacac

SEQ ID NO: 102314 - DNA, 122 bp, Homo sapiens
gccgtatttactttatctctctcttgtctacaaatatatatctctttctttttcttgagacggagtctcactatatggtccaggctggagtgcagtggcacgatctcggctcactacaacct

SEQ ID NO: 102315 - DNA, 122 bp, Homo sapiens
cacgctcgagtacctgctgcgcctagcctccacgcccgacctgaggcgcttcgcgcgcagcgccctcaacctggtggacctggtggccatcctgccgctctaccttcagctgctgctcgagt

SEQ ID NO: 102316 - DNA, 122 bp, Homo sapiens
tctgggcgggccgcgcacgcctgcatctaggtcttggccccgcccctcccactggaaccccgccccttgggactccggccacgccccaggctctgagcaccgccctggggcggggtatttgg

SEQ ID NO: 102317 - DNA, 122 bp, Homo sapiens
ctgtgaagcagggggcagcgctcgttgggaaggctcgggctgcacaggagcccacggaggcggggggaggggggaggctcaggcatggcgggctgcaggtccccagtcctgccccatgggaa

SEQ ID NO: 102318 - DNA, 122 bp, Homo sapiens
gaggaactcctcagagctgagctgtcccagcctcagcgcgtctttcccgggtggacctggcggtgtccggcgagccccactcagcccttcgcaggcagacttggcaggcaccctgggcctgg

SEQ ID NO: 102319 - DNA, 122 bp, Homo sapiens
gtggtcaggaagagcagggaaccagtggctgaaatcctccccaccctcttgactggcaggcgagtctcccaaatccctatgtttaagccacttcaaagaaggagggcccagctctaccttaa

SEQ ID NO: 102320 - DNA, 122 bp, Homo sapiens
attcctcacacgtctggaagattgtcacacagctggaggatataccacatgagtaggacacgccacacccaagggtctgctcctcgccaccttcactgacaccacactctcctcccctaccg

SEQ ID NO: 102321 - DNA, 122 bp, Homo sapiens
gacgagggaggccggcggctggacactacctgcgggagagcgagtgaggttctggccctccgagttgaccgcctgcaggtagaaatagcggaccggcaggacgacggccgcctgcagcccgg

SEQ ID NO: 102322 - DNA, 122 bp, Homo sapiens
cgccgagccacggggcctggcacacaggcacatgggagggggcgcgccgggagcgctgagcgccagtgacactgccatcccctccagtccctgacacagttcctgggctggtcagtgatgaa

SEQ ID NO: 102323 - DNA, 122 bp, Homo sapiens
tggcacgtagtagagagctgaatttgattggttggtggtttggtggcttggaggtagtggcgtgtgtctacatgtgcagtgagagtttgtctccacatctagactcagctccaggagacggg

SEQ ID NO: 102324 - DNA, 122 bp, Homo sapiens
aaccgataaagggagtgatcgggctctgcatgcgggggtgctgcgtgtgggggtcccagtcgaccgagaaccccacagacttgtcgcgccctcggcgtgctgccatttaatctcttcttgtt

SEQ ID NO: 102325 - DNA, 122 bp, Homo sapiens
tttcgctttgtgatcattctgccttgcagccccaggctaatttcagaagcttaaacactgcggtagcctctgggccacgcgaagagggagcggacccggccatgggcaggcaggagcgcttt

SEQ ID NO: 102326 - DNA, 122 bp, Homo sapiens
ctctgggcctgccaccaagatagttactaaactctctcctcttctcacagttccctcccccggccctgtgtcacgttcaggtaaaatattcagggctcacccaccacttcaagagggaggaa

SEQ ID NO: 102327 - DNA, 122 bp, Homo sapiens
tagggacgacacactgcattcactggaagggacaacgcagcgccagtacatagcctgaaacgctccccagaaggtcccacgctcgccgcgcggtcgacaaccgcatcctgcgctcgcccgcg

SEQ ID NO: 102328 - DNA, 122 bp, Homo sapiens
cagattcttcacaatatactttttttgtttccagactgtaaacccctggagtaaaataaccgtatctttactagttctgtgtggggcactgtgcatgctttgcaaatattatttaatggtgc

SEQ ID NO: 102329 - DNA, 122 bp, Homo sapiens
cgcaagtggcttcctgccgtcgctgatggggacgagcgagcagagacttgctggaatgcccgggcctggtattcgaggttgtccaggggagcgcgggggagctgagggtgtgtgcgtgtcag

SEQ ID NO: 102330 - DNA, 122 bp, Homo sapiens
acgctcggcagttctggcctccgagcagcaggcggcgctgtgagtcgtctttgcggaagccgcggaggcctcgctgactgacttccggtgttggcggtggcgccgcgcagtcaccgcggagc

SEQ ID NO: 102331 - DNA, 122 bp, Homo sapiens
gttcgtacagtcatagggtgcccatagtgccgtgtctgggaaaccccaattgagatcgtacggtcatagggtgcccatagcgccatgtctaggaaaccccgattgggttcgtgcggtcatag

SEQ ID NO: 102332 - DNA, 122 bp, Homo sapiens
gtctcatggatcactgagaaagaatagggccttatgacaaactccactggtcagagcgcccggatctaggtgtgtgatcacagcctttaacacttgaccaggaactcatatttcatggagtg

SEQ ID NO: 102333 - DNA, 122 bp, Homo sapiens
gaccgacggcccctttcctgtggcctcagaaagcagcgacagtcgcagtcaccggaccttcgcccatccgccgccctcacttaagcgacgcacaacggagctcccacaatcctctttgcttc

SEQ ID NO: 102334 - DNA, 122 bp, Homo sapiens
ccctggtgtggttgctgagttgtagctcaagaggagaaaacatacagaacatatttggaccggaaatcctttgttctgaatttgagggggtcttctgaggtccttacttccttaggtctttc

SEQ ID NO: 102335 - DNA, 122 bp, Homo sapiens
gtgcacttgtctctgcctgggttgctatagtaacccacagatgcagagagacttggcctccgtgttgccatggaaaccagcaattgggtgtccctgtgtggcatggccactgagaccttgag

SEQ ID NO: 102336 - DNA, 122 bp, Homo sapiens
gggcaggctattgacaaaccatcagggataatgtggtattattagaggtggccactactgcgacccttaggcctgaaggcgtgaggggagagaacagctcctggactttagagagagatggg

SEQ ID NO: 102337 - DNA, 122 bp, Homo sapiens
tattttcctatttcttttcattcctactgcttacaccctcattgactgaactattgcaaccgcctcttgaggtgactgaaatattcatagatattgcagttattctccttttgggcatatag

SEQ ID NO: 102338 - DNA, 122 bp, Homo sapiens
gtgaagggctttcaggtaagaggcacagaggaaactgggagaggcagcgaaagcacttcacgcctcagataaccagaagatgctcccaccagcgccatgacagtttgccagtgccatggcaa

SEQ ID NO: 102339 - DNA, 122 bp, Homo sapiens
ctccgtctgtcctggctggagtcgcagctggggctgatgaagtgggcacctgagagttcccggggcctctcttagtccccaaggtcctatgggggccttcgtaagaaggtggagccacgtag

SEQ ID NO: 102340 - DNA, 122 bp, Homo sapiens
ggtgatctgcccgctttggcctcccaaagtgctgggattacaggcgtgagccactgcgtccggccatcaagagtttttatgacaatgtgtatgaagctgcctttgagtagggtggctgcatc

SEQ ID NO: 102341 - DNA, 122 bp, Homo sapiens
gctgcccatcctggcgtggctgcccagctactccctgcagtggctgaagatggatttcgtcgccggcctctcagttggcctcactgccattccccaggcgctggcctatgctgaagtggctg

SEQ ID NO: 102342 - DNA, 122 bp, Homo sapiens
tatttgcacagccaggcctctcttccaagcactcaagatgtgtatttgaattttaaatggcggggcctgttcggagcgctggaagcgccgggtctcaaggccccttgactacccgctttctc

SEQ ID NO: 102343 - DNA, 122 bp, Homo sapiens
cgcgcgctccctccttccctctccaccctcctcctcccccgccccctcccgccccgcccgcgcgccgcccgctcgcagccactcgcagcccaggctcagtcgcagcccctcggagtccggag

SEQ ID NO: 102344 - DNA, 122 bp, Homo sapiens
cctggcagatctgagtgaggatggaaccgcaccgctccacgtggggagtgagtggtacagcgtgggaggcctcagatcaggtgcctttccgagtcctcacggcagcctctgcagcaggcgtc

SEQ ID NO: 102345 - DNA, 122 bp, Homo sapiens
cttctggtgggttcgtggtctctggtctcgctggatcaggagtgaagctgcagaccttcgcggtgagtgttacagctcttaaggcagcgcgtctggagttgttggttcctcccggtgggctc

SEQ ID NO: 102346 - DNA, 122 bp, Homo sapiens
cacctggagcaaggtctcttcccggcttggcaatctcagctgtgccggcgctacgggacccgagccgtcccagaaaccaaagggcaggcacggcagcaaacgcctgaggtaattttcatctt

SEQ ID NO: 102347 - DNA, 122 bp, Homo sapiens
cccaccccggagccaggggccgttgggccctgttgttgggctcgcgggggtgggggggctcgggcctttgttggtcacagatggcccggggatttcctgggatagaaatagccgccggctcc

SEQ ID NO: 102348 - DNA, 122 bp, Homo sapiens
ttctaaggtgcactttaaaaattactccacttgccatgctgtcctggaaaccaacctgcacgcctgtcctaggaaatctatttgtgtctcttgagtccttcaataatgcagaacataaaagt

SEQ ID NO: 102349 - DNA, 122 bp, Homo sapiens
tcccagcgcggattaggcggggctgcctcgctgggggctggggagtcttccccaccattacggggaacgaggggcccccagtatccagctccccacctcatccagcgcgcagggagaggagg

SEQ ID NO: 102350 - DNA, 122 bp, Homo sapiens
caacgcccgcgctgattggctccggccgccagggggcgggtaccgcttcgctccgcccctcggggccctagcgtctgagttgctttcctggttcgggtctgccctcagatctcaaatcgaat

SEQ ID NO: 102351 - DNA, 122 bp, Homo sapiens
acagagaagcagggtacaaagggcaggagagggaagcgagaggcagcaagccagaggcagcgactaggggtagctgaaacctcagtccaggcactgccgcatgccccgcccctcccggccaa

SEQ ID NO: 102352 - DNA, 122 bp, Homo sapiens
agctcaagcagtccactagcctcagcctttcggagtgctaggattacaggcattagccaccgcacctggctggcttgtttataaacagtttgtaagtggaagaggagaaagtgcagagttat

SEQ ID NO: 102353 - DNA, 122 bp, Homo sapiens
tatgtcctgtaactgcaagtcccgcttccaggaatcggtcctaaggaaaccgtcagaggacgcagagccccggcgcggaaggtgctggctgggggcaaagcctttgcagtgagtaccgaagg

SEQ ID NO: 102354 - DNA, 122 bp, Homo sapiens
acaccagtggcttcctgacccaggcctcagcagcctctttccctgcagtgatggttcattcgcatatgagtctgtgccttggcaacaaagcgccactcagccggctggatcgctgtctgtgg

SEQ ID NO: 102355 - DNA, 122 bp, Homo sapiens
ttgtcatgtttcttttcaattgaaccccaaattatcagggccgattccaagggtgtaattcgttcatcattttcaaactgtgcatcaagggtttttcctgctgcaattcttgtcaaaaactg

SEQ ID NO: 102356 - DNA, 122 bp, Homo sapiens
gactaagaacaatagcccagtgaatacttagagcagtgttctcaaggaatcctgcagaggcggcttctgaaaagccaaggtagtatctgcctgctgaaggtgttctcaggatttcatttgct

SEQ ID NO: 102357 - DNA, 122 bp, Homo sapiens
gcctgtctactgagatttccatttagctggctaggagacctaaacaaactgtctgcaaaacgtgacctagaatccgtcttctcatccttcctgctgtcactcttatgcaggccactgttttc

SEQ ID NO: 102358 - DNA, 122 bp, Homo sapiens
gttctctggaggcatcctgagggcattcctgaatagcagggcagcctccaccaaccccatcggccccctctagttgtggccctgtttctcagcatttttaaggcttcagctgctacatctct

SEQ ID NO: 102359 - DNA, 122 bp, Homo sapiens
ccgatcgccccaccaagtaggaggtcccaccctgagtagggagccccgtgggaactgacccggccacattcccaactgcagcgattgtgaaatgggcgcccgggcccagccagggcgggctc

SEQ ID NO: 102360 - DNA, 122 bp, Homo sapiens
cccacccagccaagtaagggctggcctgcccaccacagaactggcccagaaagcaccctgcgtggaggcagatggtggacacatgcgtgtgcacgcatgcacacctctaggcgcgtgtgcac

SEQ ID NO: 102361 - DNA, 122 bp, Homo sapiens
cctgccctctctgtgccatcctgcatatgcctcccttgagctgggtgtccctctgatggacgcatccattcactgcctgtcccatgggttgtgtccaaaggtggaatctgttatcaatgtgg

SEQ ID NO: 102362 - DNA, 122 bp, Homo sapiens
cacccgggaccgagccgctgcaggggaagagggccgctgcgcccgggtgtcctttatctccggacccgctggagcttccgaggggcttgcccccaagtccccccaccccaccccggtcattt

SEQ ID NO: 102363 - DNA, 122 bp, Homo sapiens
accgcgggcaggagcgggcatgatagccccgggcgctgtttggtgagtttctaacgcaagcgtggtccggtccgtgcttccttgtgcagcattcgctggctctctgtggactgagcctattc

SEQ ID NO: 102364 - DNA, 122 bp, Homo sapiens
catgtcctcggtgagcgggtagccggcctgctgcgtggcctccaggaatgcgcagtgcagcgggtggttggtcttgccccgggacacccgcagcgggccatcggcgccccggtaccggctgg

SEQ ID NO: 102365 - DNA, 122 bp, Homo sapiens
ctcaagcaatcgtctcacctcagcctcccgagtagttgggactacaagcgtgagccatcgcgcctggccagtaaagtctttttaaataaccttgttaaaaaaggactagaggccaggggcgg

SEQ ID NO: 102366 - DNA, 122 bp, Homo sapiens
ttcactccccagccctgtctgaatcatcctcagcccgcgggcttgcggggaccaggggctcgtgctctgcggggggctgagacagccagggtccccttggccccacagccctcaagagagca

SEQ ID NO: 102367 - DNA, 122 bp, Homo sapiens
cacatgcacacaccagtgtgtccgtgtcctgttggtttgcatggagtttctgttttgccacgaagctttttgccagcccttttcccaaagtgtttgtaccattttatactcccaccagtgat

SEQ ID NO: 102368 - DNA, 122 bp, Homo sapiens
ccgaagtttgagggagaaacttgtgaggaaataaaggaagttaggctgaggggcagagagcgagacttttctattttccaaaagctcggtctgaggcccctcagtcttgcttcctaacccgc

SEQ ID NO: 102369 - DNA, 122 bp, Homo sapiens
cagcccctacatccctgaactgtgagggcttcctctaaacagagggctctgttagcctttcgacttgttttctatccaagatcatctttcagcaagtgggctcagcctggacccaacaattg

SEQ ID NO: 102370 - DNA, 122 bp, Homo sapiens
aaatgctgaagttcctggaatagaggacgccttgtaagtttcctttctaaatggacatctcgactttgagagaggttcacagcactcctagcattgctcactctggtggagcaagttgctgt

SEQ ID NO: 102371 - DNA, 122 bp, Homo sapiens
tttcctggtatacatgatcaccttaaaactgacgctgcgaaatgccagcttccatctgcacgccttggctcctgcctggccctcattgcgaggcccgcgggagtggctgcctccctccccct

SEQ ID NO: 102372 - DNA, 122 bp, Homo sapiens
gggcagagacaatgccttatgcatctttgaacctgcaaggttcagtcactgggaaacagccgactagagagtagggtggagaagagtttggtctagggtaaaacaggcctggattctaattc

SEQ ID NO: 102373 - DNA, 122 bp, Homo sapiens
ttttctactcctgtaatgttccaaaatctttattccacaatctgtacccagctgctcagacgcccacactttagaatctagcccacatatttaaatgtctagtgagttcatgtcattgcaga

SEQ ID NO: 102374 - DNA, 122 bp, Homo sapiens
ctgtcagcaggttgctgccgtaggcaaagtacagaaaactctcctcatctggacccgtgacgtccttgcagcccgagttggccatatcccactacgcccctgcactggagcctgaagcagag

SEQ ID NO: 102375 - DNA, 122 bp, Homo sapiens
atgtgcggatcccgcacagctggcactaggcgcacgcacaccctgcgaagggagggcggccgcctcagtctgagcacctggtccagctcgccacgacttcccacctccagccgcagtcccca

SEQ ID NO: 102376 - DNA, 122 bp, Homo sapiens
gctcgggggccgggtagccgagcagctgtgctccgggtagatcactatgggggctcaggacgacctgaggaaggtcacccagagtgcctacgcccaggtaagggtgggcatcccccggcacg

SEQ ID NO: 102377 - DNA, 122 bp, Homo sapiens
gaggctaagcggctgcgagcgctgcacatgaaggagcacccggattataaataccggccccggcggaaaaccaagacgctcatgaagaaggataagtacacgctgcccggcgggctgctggc

SEQ ID NO: 102378 - DNA, 122 bp, Homo sapiens
gagcctcccaccctagcccatacggtgctggttcagcttctgacggtgctggctgagatccgtgatgctggctttcctcacaggaagaagcctgcagggtacgctgaggcttgtccatctgg

SEQ ID NO: 102379 - DNA, 122 bp, Homo sapiens
aggatgccagcccgacagagcacggtgtcgaccaggaggatggacctgaggatgccagcccgacagagcacggtgtcgaccagcaggaggatggacctgaggatgccagcccgacagagcac

SEQ ID NO: 102380 - DNA, 122 bp, Homo sapiens
ctaccctctagtgaaagtgcagtgttccgctgagctcaagttcttcctgtgctccatgtacgcgcccgtgtgcaccgtgctagagcaggcgctgccgccctgccgctccctgtgcgagcgcg

SEQ ID NO: 102381 - DNA, 122 bp, Homo sapiens
tgggaaccaaatgttggctaggaaagctgcagtattctcacactcttcctgtaaacccagcggcttttcaaagtgataataatcaagggctgacagcacaggacacgccttaacccttccat

SEQ ID NO: 102382 - DNA, 122 bp, Homo sapiens
gacttgatgcgggttcaggaatagggcggctcgcttggggaaccaagtgacgcccttcttcgggctcctaacccaccggtgccaccctactgacccttctcattcctcctcaaacaaaacaa

SEQ ID NO: 102383 - DNA, 122 bp, Homo sapiens
ccagctggacggtggagactgggacgcgggctccttggtggacggacccctcggagcccacgccaggaaagtgccacacaacagatgcatatttgtgcttcatcatcaagatgagttctttt

SEQ ID NO: 102384 - DNA, 122 bp, Homo sapiens
gtcgcatggattcaaggccgacctgccccagcaccaccaccagcagccttctgctggggccggcacagctgggagcaacctcctactctcaggcagacgcgcagcaccaagcagagaggccc

SEQ ID NO: 102385 - DNA, 122 bp, Homo sapiens
ccacctcagcctcccaagtagctcatttctattgggataatggtaatatccgctccaatgcgctgctggaagcactcgaatacatgatgtatccaaacaacaaagcagcatggctggcaaga

SEQ ID NO: 102386 - DNA, 122 bp, Homo sapiens
gagcgcccacactacagccgcagacgctttgcacgccccgctgcgatgcggggagggggccgcccccaggccgcacggactgccgctcctgggaaccccgccacgcacaggcctcggcggag

SEQ ID NO: 102387 - DNA, 122 bp, Homo sapiens
tagcatcgtctgtctgtgcaagtccttcgagttaggtaagtaatacgggcaagtgtcccgcggccgtcagctgtccgagtccaaatcgcttttaccttcctcttccctcttctccggtgacg

SEQ ID NO: 102388 - DNA, 122 bp, Homo sapiens
cttaaaacattattcacaatgaaaataacgctgcatgctgccataaagtccccgtcattccgttttatggaagtgcttttgtttaatgtcagaactcagagcaaatctagacttaccagtcc

SEQ ID NO: 102389 - DNA, 122 bp, Homo sapiens
tgaaacctgttcaaccaccctatttcagatagaacgcactttttaaccacattaggaaagcgaaactcgccgtgggtggggtggaaacgctgccaggtcatcctgtctaaagaaactctggt

SEQ ID NO: 102390 - DNA, 122 bp, Homo sapiens
cgaggccgcggccctcggctcagaacctcgtgtcccctgcagtatgaggccgtcatggaccgggtccagaagagcaagctgtcgctctacaagaaggccatggaggtgagcgccagggcctg

SEQ ID NO: 102391 - DNA, 122 bp, Homo sapiens
gcgcccgaggtcgcgggatagtgggggcgccgggaggaagcctcgcccagccctggtgggcggtggggccgctggggcctggggcgccgcgggctcggcccggactgacggcggtggggggc

SEQ ID NO: 102392 - DNA, 122 bp, Homo sapiens
ctcttaagtattttactgacaaaaaaaatcctcaggttgtaaagcttattaccaagttatcgttgagatacagacagatacagacttttatggacagaaaattataaataatccataaagca

SEQ ID NO: 102393 - DNA, 122 bp, Homo sapiens
cccatactatttagaatcctgcagtcctcagccttccacctcaaaccaaactcctggggccgcccgtagtacgtggtcccctgctcatccgatgaagcccccagctcttgcctgcctgcctg

SEQ ID NO: 102394 - DNA, 122 bp, Homo sapiens
aactggaccctgcaagcccggtggcggcttgtggggctgcccgtccacttgctctttttgcggttctacaagcgtgacaaagacgagcattaccggtaagagagaaatgagaaaggacccaa

SEQ ID NO: 102395 - DNA, 122 bp, Homo sapiens
tgtctgtaccttcacagcaaggcttcccttggatttgaggcttcctattttgtctgggatcggggtttctccttgtcccagtggcagccccgcgttgcgggttccgggcgctgcgcggagcc

SEQ ID NO: 102396 - DNA, 122 bp, Homo sapiens
ggaggtcccaactactccaagttggggcgcggggttcctctgggcacgtaccttgggggccggcccgggtcccctagtccgagttgctcgagctcccgcggcacggtcgccgggaaggctga

SEQ ID NO: 102397 - DNA, 122 bp, Homo sapiens
gcttggtcaggagctgatgggatgagtggccggaccacagtaagttgggagttctggctccggcccaactcccaacaactgcgactttctgagagcctaggtgaacttgcgaaatctttgga

SEQ ID NO: 102398 - DNA, 122 bp, Homo sapiens
tcagcagcctgggcacaatggcaagaccccatttctacaaataataataataaaaaactgcgcatggtggtgcatgcttgtagttccagctgcttggaagcctgaggtgggaggattgctta

SEQ ID NO: 102399 - DNA, 122 bp, Homo sapiens
ccaggcggagggagagccaagtagaggacagacagggaagcaagagaggcagagcagctgcggacctccagacacttggtggggatccaacagctgctctgtgagcaaatgaagaggcacaa

SEQ ID NO: 102400 - DNA, 122 bp, Homo sapiens
gatttaaaaatgttaattatatcaagatagaagttatagtctttttcctcctcactttggcgccactgctaggaagagcgggggagcgggcgttgcaccgcgtccgggccacgagggggcgc

SEQ ID NO: 102401 - DNA, 122 bp, Homo sapiens
gtgatgtgtcttggcgtgtttgccgtgtctgcgggtgtcttggcgtgtttgccgtgtctgcgggtgtcttggtgtgtttgccgtgtctgcgggtgtcttggcgtgtttgccgtgtctgcggg

SEQ ID NO: 102402 - DNA, 122 bp, Homo sapiens
gcagcctgagtacgtgatgctccgattctgagcttggatgttcaccagcatctttgggatcgtggttgtgcttaaacaaatgtccaaaaaggagagattggagaggaagaagtacatggggg

SEQ ID NO: 102403 - DNA, 122 bp, Homo sapiens
tacattttttcactaaggtgctacaggatgcttacatttcccattttggttccctaagtacgtcctatcatctgtttctcatgctataataattaagttaaaccaattatgccaatgttaca

SEQ ID NO: 102404 - DNA, 122 bp, Homo sapiens
gccaggcccacccacattagagaggctgaaggctcccagcgccctaccccgcccgaggggcggagcctgagccaaggccacgtgatgatgacagacggcactctggctttcctggagctgtc

SEQ ID NO: 102405 - DNA, 122 bp, Homo sapiens
acagtattcacacagtactatggaaataccatgcatcattttcaagtccatttatggacacgccctagaagagctggtggcaggaaaggatgtaaatgttaacagctttggcaatgtgagtg

SEQ ID NO: 102406 - DNA, 122 bp, Homo sapiens
agtactggcattgcaggaagagggtctgtccttagtgtttgtgaagttcttcaggcacagcgccctttacccaggaacctgcagaaagaaacccaggtcagagctctggagagatgcatgac

SEQ ID NO: 102407 - DNA, 122 bp, Homo sapiens
atgttacagctttcctaaggccctgagtgaatttttaaaaatacaattcacattccataacgcatcctcctgagagcccagaggggacatgagcagcatgaatcactgtatcagcccctcct

SEQ ID NO: 102408 - DNA, 122 bp, Homo sapiens
ccgttgagctggttgtagaccacctcctccaggtggtccaggcgctgcaggatggcctcacggtcccccagcgtgcccaccttggcgtgtcggctgcgcacccggcggtcgccgctcacgat

SEQ ID NO: 102409 - DNA, 122 bp, Homo sapiens
gcacaaggctttaggacacgccatggttttgcctccctacctagggacccggcacaggggcgggaagggaggaatctgggagagctgagattctagggctttggttaccggtggagcgggag

SEQ ID NO: 102410 - DNA, 122 bp, Homo sapiens
tccccgcaccataggccaaagcttcggcccggaggctggaggcggaagtgacgccaaagacgcgccggcccctcttccggcgccggccccgcctccgcctgtcttacagctgatccggttct

SEQ ID NO: 102411 - DNA, 122 bp, Homo sapiens
ttccgcacaccattggaagcagtgaggactaggtgagggtgagcgactttgagcatggggcgtttatctggtccctcacaaggacgggtcctgttgcacaaggcttggggaagagaagccac

SEQ ID NO: 102412 - DNA, 122 bp, Homo sapiens
cggaccccgcccccaaggcctcaggtgggccgggggctccgggaggcctccgccgccctccgtcccaggagagcagttcccggtgagaagcccgggctctgcagacaccccacagcagttct

SEQ ID NO: 102413 - DNA, 122 bp, Homo sapiens
acagcgagctccagagagagcgcagcgccgagcctggcagctctggctccagcaggaagacgcagcccacggccagcgccaggaagcccgcgtacgcggagccgcgccacagcgccatgggg

SEQ ID NO: 102414 - DNA, 122 bp, Homo sapiens
ttgcccctctgtgccccattcctgctgtgagcagggccgtccgggcttcctgtggattggcggaatgtttagaagcagaacaagccattcctattacctccccaggaggcaagtgggcgcag

SEQ ID NO: 102415 - DNA, 122 bp, Homo sapiens
ggaccgcgggtggccggaggagatgaaaccgtcttggctgcagtgtcgtaaagtcaccagcgccggggggctcggagggcccttgcctgggtcctctccggcccggggagccggtgcggccc

SEQ ID NO: 102416 - DNA, 122 bp, Homo sapiens
ctgcccccgggatgagaagtttgccccggaaggagcctagcaggaggcagtaaggacccccgcaccccaccccagctggccggccggcgcgtaaacacccgcacccgcccggcacggcccgt

SEQ ID NO: 102417 - DNA, 122 bp, Homo sapiens
ggacgcaaggcttcataacttccttgtttagagtccgcaagccaggcttcttgcaagggtcgactccccagtctctcactgtttcagggcctgggagttgcttttccgaggcccacttcgag

SEQ ID NO: 102418 - DNA, 122 bp, Homo sapiens
ggactttttttcatatccgccgaccatgctgtaacgaggcgtacgcgttactggcgtgcacgtactcagaagactagctgacagccttgtttgtggcagacagagatgcagggtcccagact

SEQ ID NO: 102419 - DNA, 122 bp, Homo sapiens
ccactgacataatttacttttgcctgggagtcgggaggagtagtttctcccggacccctccgaggaccgcgtgctatgcaacacccgccctgcagtccaggcgcctgggagaagcgcactcg

SEQ ID NO: 102420 - DNA, 122 bp, Homo sapiens
cgtgcagaggcacgggatgagtctgggtgacctctgcgccatgcgtgcgagacacgtgtgcgtttactgttatgtcggtcatatgtctgtacgtgtcgtgggccaacctcgttctgcctcca

SEQ ID NO: 102421 - DNA, 122 bp, Homo sapiens
agacaaaaatagacacggaagccgcgatcgaggaggagggggaacaaaagggtcagcttccgctaagaaagcctcagccacgtccctggggaagtttcatgtctttcctcacacgtggcagg

SEQ ID NO: 102422 - DNA, 122 bp, Homo sapiens
aagcggatgcctgtggactgtgccgcttcctccgaggacggcctccacccgggaaagagccgtgatagaagggctttatttttaaaggtgttggtacatgttcaaagcttaaccctctaact

SEQ ID NO: 102423 - DNA, 122 bp, Homo sapiens
gtcctccaggcctagaaggcaagacctgtggcggcggcgacctgaggcggcggggcaggacgcgcagcgaggagggcccggtcggcactagccgtggctcaggcggtgacccagcccggggc

SEQ ID NO: 102424 - DNA, 122 bp, Homo sapiens
ctagggaaggcacgctcttgtcctggctgcaaaattgcctgtttttccctttccagtggacgctggtgaaatgccctcttgtgtaggggtctctcccattctgaacacgaaaactcaactta

SEQ ID NO: 102425 - DNA, 122 bp, Homo sapiens
tgacgtagactttgggtacacactatggtcttgtggatatttatgtagactttgggtacgcgctatgtctcgtggatattgacgtagactttgggtacacgctatggtcttgtggatattga

SEQ ID NO: 102426 - DNA, 122 bp, Homo sapiens
gagattgtgacttggtcaaggcgagagagatatgagccccacgcccggccctcacccccacgtgggcttgtcacccccatgcctatgactagtcaggctgcctttgtcaacatgacatagaa

SEQ ID NO: 102427 - DNA, 122 bp, Homo sapiens
ctcttccaattctccgtccgcactgcgtggcggttcccgtggctcttctgatcccccatccgcactgtgtggcggttcccgtggctcttccaatcctccgaccgcactacagctgcgctcct

SEQ ID NO: 102428 - DNA, 122 bp, Homo sapiens
agtgcgggctaagtgctgggcccacagccccgttggccggtggggagctcagcggccctccggatcgccagcctgggttacttcatcccagagcgattcagacgaattccgtttccgaagga

SEQ ID NO: 102429 - DNA, 122 bp, Homo sapiens
agcccgctcggtgtgacggttccccgcgagtcgagggtggagaagccagcctccttcccccgagtgggactctagcagcccacctcttttaggggtgctgagaacacccattactcatccac

SEQ ID NO: 102430 - DNA, 122 bp, Homo sapiens
aggacagatgagacccagctgtcaccagacacaagtatgagtcagcttgggagtgtgtggcgctagtgcagctgccttaccgcagacacctgagggttcacatgctggcagctaaccccctc

SEQ ID NO: 102431 - DNA, 122 bp, Homo sapiens
gaaccccgagaccccagggcagacccctcaccccagcgcagcacggggtgccgttggcctcggttcctggaccctgagctgacccagaccccccagcagaccccgagctgaccgcggtgcac

SEQ ID NO: 102432 - DNA, 122 bp, Homo sapiens
cgtggtctttggctgtgatgggcgtggccttgggctatggagggcgtggtcccagggctgcgatgatggtggtccggggctgtggtgggcgtggccccgggctgcggcgggcgtggtccccg

SEQ ID NO: 102433 - DNA, 122 bp, Homo sapiens
tcggcgcgggcccgagcgcgggggattccgagtgtcagtgctttcctccacccgcgactccgagaaggatggggaggggtctcccagcgtttccctgccacattccaattccacccttcacc

SEQ ID NO: 102434 - DNA, 122 bp, Homo sapiens
ccccggagagctggagtgtggagtcgcctctggggtcccccagggagtaggagtctaggccggtgccccccagccccatttcctcccgatcgttggagcggaggggaaggaggatccccggg

SEQ ID NO: 102435 - DNA, 122 bp, Homo sapiens
gtccgttcctgcctcttgcagctctggaggccgcctgtgcccttggctccagctgcttcacgtccagctctgcttctgcaggcacacggccttctctccgtagtcagggctccctcggcttc

SEQ ID NO: 102436 - DNA, 122 bp, Homo sapiens
tggtctccagaagtgcccacgttgctcttgccgctccccctgcaccaggggaagcagtggcggcaccacttgcccatcttgctcctgagtgtcttcatagcagaatcatcgtggtctccaga

SEQ ID NO: 102437 - DNA, 122 bp, Homo sapiens
gaggagaggaccaggcccccacagggcagagggctcaccatccagagccctgcgcccacccgggacacggggtaacactgccacccgcacaccagtctccagtgggatgagggctgtgacac

SEQ ID NO: 102438 - DNA, 122 bp, Homo sapiens
atatctgatgtcatcaaaaattcatgggtcgcagcagctggtaaatccactgtctccagtcgtgtgtaccctcattcacaaaaatcaccaggcctgggagaattagccccaagagctgtcaa

SEQ ID NO: 102439 - DNA, 122 bp, Homo sapiens
taagctgctgcttgcttccacttaggaaatgccttctctgacagatctctaacagcgcctcgcttccctctccagacccgggggcttctgggtgctcgccgttcccctcgagctccgcgtgc

SEQ ID NO: 102440 - DNA, 122 bp, Homo sapiens
tttatatacaataaaacccagatctggtttgactctgattacttcattatcatttaaaaacggatttccctgtgtattagatgttgtggattgcattcctaactaaaagcttacatacattt

SEQ ID NO: 102441 - DNA, 122 bp, Homo sapiens
ttgggccagtaaactgggacggggttgggacgagggagtgttaccatggtaactgggcggcgcttcgtgccctagcctctcccgccaggctggctgcccacaatggttggcccctttgcagg

SEQ ID NO: 102442 - DNA, 122 bp, Homo sapiens
aggacacacgaccgccaccctgtggtcatcacgcaccctccagccccaagggcagccccacgcctgcagtggtgaggggctccaggagacagaagctgtgggaccacccacacacgcacaca

SEQ ID NO: 102443 - DNA, 122 bp, Homo sapiens
tcccaattctggggtgaaacctccagacgcgccctccagagggcgctactgggcagtcaacgctcccacggagggggtgccgtgcccacccagcccgagccccagtgtgacgtacagccgtg

SEQ ID NO: 102444 - DNA, 122 bp, Homo sapiens
tgcagcccctacacttaagtgtcatagcgaactgtactggtattttccatggatgcaccccgtgatggaaatgaggggtgtgactcactgttgcgttgttctgcatgttacctctttccctc

SEQ ID NO: 102445 - DNA, 122 bp, Homo sapiens
gccacgcagccattgtaaccctggaaaccagtaaatgcgtctccatggctgcaggcctgtcgttatgagaaggtttcagaagcgggctcgtccgcagctcagggccgtctttctgagttgtg

SEQ ID NO: 102446 - DNA, 122 bp, Homo sapiens
ccgttcccgcgaggacccgcagggaggctcctgggggctccgggcccgagctcagaggggcggagggggcgtcggtcaggggcacgcgcccaaaggctcctccccagggtgcgctgcccgcg

SEQ ID NO: 102447 - DNA, 122 bp, Homo sapiens
cgggcggcgttgcctcgcctctctctcccaacagccagttctgttagccccagcaactgccgttgagagcaaacaacggtcctgcagaaaaagaacgagacagtaaaagatgaggaggcaac

SEQ ID NO: 102448 - DNA, 122 bp, Homo sapiens
tgagttttccacatccctgtgtggtggttttgctgactgtcgctccgtgggactggctcccgtttctccttggtgagcccggggagccggcgcatcttgtgagtcgcgtctgtgcatggcga

SEQ ID NO: 102449 - DNA, 122 bp, Homo sapiens
aaaaaaaaaaaaaaaggcaaaatatcggaaagtcttatgctggaagcgggggtggggaggcgggggacaggcagacagggctagaaacacccaaatcaattcctcagggagcgaaacggcag

SEQ ID NO: 102450 - DNA, 122 bp, Homo sapiens
tagaagccaatctacatctctaacttctctgctttacagtaacaccagcttctgcttgagcgctcctccagtgggagggagctcactactcacaaggaagcccattgtactactgaactgta

SEQ ID NO: 102451 - DNA, 122 bp, Homo sapiens
ccagacctgtcccgaagccctgttctccgcggctctgggtgggcgcgggtggcgctggggcgaccccaaatccaggccaggagcccaaatcaggccacgaccccaaatccaggccaggacct

SEQ ID NO: 102452 - DNA, 122 bp, Homo sapiens
tgcgcccaaagttgcaacaaaccaaggtgtctgaaccacaggaagtttcttgggctgttccgctgaagcggcgcggggggacacagaactgggctcccagacttttcctgtcgtggcctaaa

SEQ ID NO: 102453 - DNA, 122 bp, Homo sapiens
actgcctcttgtatcaagcctcagttccaagatttgcacttaaaaagagtcagttctccccgccgccttttaggccaactctagctacatggaaaaaataaacatctgatttccagagaagg

SEQ ID NO: 102454 - DNA, 122 bp, Homo sapiens
gaggtacaataatgccactgtaatcaaaacagtgtgatattgtcataaggacaaacaagtcggtcaacagaacaaaatagagtcttggaaataaacgcatgtatatatggtcaatagatctt

SEQ ID NO: 102455 - DNA, 122 bp, Homo sapiens
gcccctcgcccacatacctggagcacctggtcaaactcaggcttggtctgcttgaggtgtcgcaggatggggaagacggtgagcaccgtggagaagtcgtgtcgcacaatggccttccgggc

SEQ ID NO: 102456 - DNA, 122 bp, Homo sapiens
ggtcgaatcctggctgtgccacttccaagtcgtctgaacttgtgtggatcatgtcacccccgacttagtgtccccatctgtgaatggggcccatacagggacccccatcatagggcatggcg

SEQ ID NO: 102457 - DNA, 122 bp, Homo sapiens
aaccacaaaatctttatattattactgttgttgctgttattatgatttaaacagttagaccgattttctgttacctgtgagcaaaggaactgtgattggtatgtgaagtaatatttttagat

SEQ ID NO: 102458 - DNA, 122 bp, Homo sapiens
aatggatgacagcagcacaaacaaaagctgtcacaaaagtgagttggaggtgggcagtcgcgggagggaagaccacaagccactgaagcacagccttaaaatgcctcgcatggctatggaca

SEQ ID NO: 102459 - DNA, 122 bp, Homo sapiens
atttttaaacttacaaatcagaggacaatcgcgacattagaggaaaattacccaggtttacgccatcactaacgatgatagcttacgatgatagctaacccagctcttcaacttcctttcaa

SEQ ID NO: 102460 - DNA, 122 bp, Homo sapiens
gttgtggtggttttcccggtcttggcagcacccttgtttttgcttccctttggtcggccccgaggtctcttaggtgttggcacttcgctgagctccttctgactccctaccagcgctgtcct

SEQ ID NO: 102461 - DNA, 122 bp, Homo sapiens
tgaaatatcaaggctgtctgatttcctgcatgttgtgaaatcagggctaaataaacaacacgagaggtcacagttattctttaatgatgtgttccatggggagaagctgtataaacgagaaa

SEQ ID NO: 102462 - DNA, 122 bp, Homo sapiens
gcggcgctcacgggcagggccaggcgtccagtggtgtcccaggggacgcggggtgggaagcgacccaaggctctaaggggaatggacaggggagggcgccgacctcacagggacgcctgggg

SEQ ID NO: 102463 - DNA, 122 bp, Homo sapiens
aaaaaagaaaacaaggtggaggtacaacttacaacttatagtgtgctcatctacagagcacggcaatggataagacactgcctgggagtcatgacaattaggtgttggtcgagtttgccatt

SEQ ID NO: 102464 - DNA, 122 bp, Homo sapiens
taggaacagtgacaaaggtttgatctaatgggctcagtcatttttcctttgagtgacagacgcacagaagtaattggctgtgcagaatggcagctcattggcggtacttaaggatacattat

SEQ ID NO: 102465 - DNA, 122 bp, Homo sapiens
gcggacgggcggcggggcaggcctgaaggaggcactctggccagggatgtctcgcttctgcgcactctgggggacccctagccctggccgaactttcttgaccgtccctgcatcccccgagc

SEQ ID NO: 102466 - DNA, 122 bp, Homo sapiens
aggtgtcaattaaggggtcacttttgcctaaggtttccttaacttctctcctagtgaagccgctctaagtgaacatttccgctgtgttttttttaatgactgccattgtctcgctggagaat

SEQ ID NO: 102467 - DNA, 122 bp, Homo sapiens
cgtatgtaaatggcagccaatggagggtggtgttgcgcggggctgggattagggccggggcgaatggctggcaatcttactgggattacagaacaaagagcctccccgcgctcccgctctcc

SEQ ID NO: 102468 - DNA, 122 bp, Homo sapiens
cggcaagctgaggcagaactatgacctcttctgaactatgaccatttcacaaatgtaagtcgaatggaaaacatctttataatattcagtattcacacatacagagactagatttaggacaa

SEQ ID NO: 102469 - DNA, 122 bp, Homo sapiens
aaagtcctcttgctgttcggggggcgacctctgcgggtttggctccagctgcagaaagagcgccaaagaaatctcaactccagcccggctaggctgggagtgggtgcgggagaaacagatgg

SEQ ID NO: 102470 - DNA, 122 bp, Homo sapiens
cacaaatgagacccttagagctggctacaatccaaagtagatgagtccagcttctaacagcgtgcaggctgccacggtgagagtcacggagaccgacccttggcacaataagactgtggact

SEQ ID NO: 102471 - DNA, 122 bp, Homo sapiens
cattggctaaccaggctccggtgcgttcgaccaatcagaaggggcgatggagagccggggcggaaagagcgaacggaaaggggaagcgaacgacgctgggaggagccggctccgggcccgga

SEQ ID NO: 102472 - DNA, 122 bp, Homo sapiens
aaaacaaagccagcaagcctgcttctggtgtgccaagattaatcaatattccagaaacctcggggtttccccctcctccctgtgcggtttccattccccactcctcctttcccgggcacaga

SEQ ID NO: 102473 - DNA, 122 bp, Homo sapiens
gttcctcaaacgacacgcagccgaggtgggtgggtgtggggacgcgggagccagtgtcgtcggatcggcccgcagtccgctgtcctgctgagcccggaggccgcctggatggagccgccgct

SEQ ID NO: 102474 - DNA, 122 bp, Homo sapiens
ggctaggagttttcatgccaatgctgctggtctcaagacctcagtgtaaatagtagaacacggtgaggtgactcaaaatcatttaatgaagatgaagacattgatcaatggtgtcaaacatg

SEQ ID NO: 102475 - DNA, 122 bp, Homo sapiens
acagcccgaagcacatccccatagtcagggaaggtatcaggccctggcttgttgatgagccgctcaatgcgcctgttaacctctgggtagcgggtgccacggtaggggatgcgctgctctat

SEQ ID NO: 102476 - DNA, 122 bp, Homo sapiens
gggcggggtagcctctctagccttgccttcttggctggaggcacaaaggcattaacttagcgcccggggtctctgccaggctcacgggacagctgcacctctcagcgtctccagctccagga

SEQ ID NO: 102477 - DNA, 122 bp, Homo sapiens
cacagccggcgcgccgttgggggagggaaaaccgctgagtgccgcgcacagcgcctgcgccgccccgccccgcaacggcaaccccacccctgcgccagccccgccccctccgttacccgccg

SEQ ID NO: 102478 - DNA, 122 bp, Homo sapiens
aatttaaagaggaaaggggccaaatttccatatacccactctcagcctctaatactctgacggcagtgcagaagcaagattaaaggaaagtaagactgtatccagagtagccagtaagaaaa

SEQ ID NO: 102479 - DNA, 122 bp, Homo sapiens
gttgcaggagctgggatgtggcgggcaagggccctgctctccggaacaggcgttccactgcggcagacaagccacactgaaataaaagatgacctcagaccggatgaagtgctatgaagaaa

SEQ ID NO: 102480 - DNA, 122 bp, Homo sapiens
ggattatacaacacattctccccgttagacctaaacgagaggatggcacagacccaccagcgtcagaggaggttaaaaagcacaggacacatttttgcctgtgcgctaagagatgacagcat

SEQ ID NO: 102481 - DNA, 122 bp, Homo sapiens
gctggctccggttcagtttaatgatgtcgtccagagacatgtccattttgtcggccatggcgggcgcggaatcgggcatcggctcgagcccgcgcgtcagcacgccggcacgtcacttccgg

SEQ ID NO: 102482 - DNA, 122 bp, Homo sapiens
ccttttgaaaataaatccaccaaaaatatttcccaaagcataaagataatggtatcgatgcgcttttaaaggtttaaaatgttttcatataatctcactctaggtttctcaataattcttgt

SEQ ID NO: 102483 - DNA, 122 bp, Homo sapiens
gggctccaatgccgtcggaggggtccatggccccacagaggttgctgtccacagcccagtcgctggcgcgcctctcgtgctggtactgcagggcagggagctggatggcctggatgtccata

SEQ ID NO: 102484 - DNA, 122 bp, Homo sapiens
ctccaggcgctgtcagtctattctaacacccagagcagggagggccaggcaggctacccacgcttccttgtccccgcccccacttgcacacaccttaatccctttctgggccaaagtagtat

SEQ ID NO: 102485 - DNA, 122 bp, Homo sapiens
ggacaaactgttatcccaattttacaggtgaggaaatcagagcttatttaaataaattgccgaggtcacacaactagtaagcgacaaaatctcagtcaaaccgaggctcttttggttcaaag

SEQ ID NO: 102486 - DNA, 122 bp, Homo sapiens
agtagaaaccaggttttgctatgttggccaggctggtctcattggccaggttggtctcatcgtcctgggctcaaggcattcttccaccatggcctcgagactacaggcatgcactaccctgc

SEQ ID NO: 102487 - DNA, 122 bp, Homo sapiens
cagggcatataaaatgcattctgtaccctgatctggcatatagcttcaaaactgcagtggcgagtgtccatctcttagttagctaccttaactgtccacccttactacctgtgggatcgttg

SEQ ID NO: 102488 - DNA, 122 bp, Homo sapiens
actccagcgaggaccctggaaaaggccgctgaagccgcgtcgccgtgagcctctggccggcgccaccaggaaggctcctgtgaagagccgagcacccagcccacacctcctcctgccttgct

SEQ ID NO: 102489 - DNA, 122 bp, Homo sapiens
tctatcctgcgaaaataatgggaaatggtaacatattaaacgagtggccatctgggtgcacgtggtagctgcctctccaacacctacttcagcccaaatcatagagtttgacaaaggaaatc

SEQ ID NO: 102490 - DNA, 122 bp, Homo sapiens
agctgtcctttcaccactttacttccttaataaacttgctttcactttgcacttaggactcgccctgaattctttcttgcgtgagatccaagaaccgtctcttggggtctggaacctggacc

SEQ ID NO: 102491 - DNA, 122 bp, Homo sapiens
ggagaggtggaagccggggcagtgcacccaaaggtagtacctgtgaggctgggggtgcatcgaggggttgtgggcgggctgagtagcagcagggcgaactccagaggagtgaacgccgagtg

SEQ ID NO: 102492 - DNA, 122 bp, Homo sapiens
ggtaaggagtgggaaggaaaagagactccaggaaagtcctaaaagggaaggctctttaaacggctgactgtaaagggctgccaggggcagatgctcttctgaccactatgactttctccttt

SEQ ID NO: 102493 - DNA, 122 bp, Homo sapiens
catttacatggctcaaaatgttaaatgtcaagactcttccatcctgtccctgagttaacccgcttcccatctccagaggcaactaatgttgctggtgtttttccccattgtttttttccact

SEQ ID NO: 102494 - DNA, 122 bp, Homo sapiens
caccaaatctccaagagatgattcctccttccatgttatcaacttatcctaaagaagtggcgccttctcagtacaggtcccacagcctttcaaggttctccctttcgattcctcaatagcta

SEQ ID NO: 102495 - DNA, 122 bp, Homo sapiens
gctccggtctgaccaaccgcggaccctaaagcctagcccataggctgcatgaggcaggggcggggtaaagcttggccaatgatataaaagtattgtaggaccgctgcgaggtcaatttcttt

SEQ ID NO: 102496 - DNA, 122 bp, Homo sapiens
ttggggcacgcagtagctctctcgagtcactccggcgcagtgttgggactgtctgggtatcggaaagcaagcctacgttgctcactattacgtataatccttttcttttcaaggtaaggctg

SEQ ID NO: 102497 - DNA, 122 bp, Homo sapiens
tgtggcttaggggagagatgtagtcactgaagatgagaaggactgttttgttgctctgtacgtcactgtggtctgttgaaattgaaaacatctgtgcaaaggaaatgaccctctaattagaa

SEQ ID NO: 102498 - DNA, 122 bp, Homo sapiens
ccccgaccccacctcggcactcacgagttggcgtggatgaaatccagacgcagctgggcccgctgaagcgcagggtacctgtcgtccatgccctcgaacacgacccgcgcaactcaagggga

SEQ ID NO: 102499 - DNA, 122 bp, Homo sapiens
ggcggaacgcgagtgcagcggtgggaggcttccgggggagctgcacgggcgacgggtcggcggagacagaaaagcgccggacgccggggtgatcatggacgcttgacaacctgcgggcaggc

SEQ ID NO: 102500 - DNA, 122 bp, Homo sapiens
tgacctcgtgatccacctgcctcggcctcccaaagtgttggtattacaggtgtgagccaccgcgctcggccttggcactgacttctttacacaagtgacacagctctaaggccagacagtaa

SEQ ID NO: 102501 - DNA, 122 bp, Homo sapiens
atcagaattcctacagtttacgagctctattatgcacaagagaaacgtgaatgactttcgcgctccagaagaagctgaattcctctctaccaacagaacaagggcaggatgtaataaggaaa

SEQ ID NO: 102502 - DNA, 122 bp, Homo sapiens
ataggtgtcaagatctccaaaagagatggactttactcactggaaaatgttgagactttccgggatcactctggccaagttcttaaacttgagaaggtggtgattaaaagttagcaagtggt

SEQ ID NO: 102503 - DNA, 122 bp, Homo sapiens
gatttttgtgctcagcccccagtgaaaatgaacatttgtgctgaaaagctttttatcaaccgttctcaaaatgtcagtcccccttatctccaaagcccaccgaaatctttgtgcccgtggtt

SEQ ID NO: 102504 - DNA, 122 bp, Homo sapiens
ctggagaacctggcacctgagccccagaggaaggccccagcttcctgcagctcgggctggcggatgggagcagaagcatcagttcctggttgggaatttggagacaccaacaatttggggaa

SEQ ID NO: 102505 - DNA, 122 bp, Homo sapiens
aggcagcatgaggagctggccaatgtgcaccagcttcagcaccagctccagcaggagcagcggcgctggctgcgcaggtgtgagcagcagcagcgggcgcaggcgaccagggagagctggct

SEQ ID NO: 102506 - DNA, 122 bp, Homo sapiens
ttttttttaattgcaaaccttcccagttcactccgcagctggagagcaggccggaggcggcgttccccacccgtctccctctttgtcgtcccctccccgcgcccggagcgggactcgcggga

SEQ ID NO: 102507 - DNA, 122 bp, Homo sapiens
aaactcgccataaaaccttactatgtaacactgctatagaaatctataaagtgtttccttcgtaggagggccgtaggcagccatggcgcccagcaggaatggcatgatgttgaagccccact

SEQ ID NO: 102508 - DNA, 122 bp, Homo sapiens
cggcccgcgaagagcgggtcttagccttagctcgggcctttccgccttgcttgccgcgtccggacattttgaattcttaaaaacgatgttaagcaatgaagacaaaaatgtaaaagtgaatt

SEQ ID NO: 102509 - DNA, 122 bp, Homo sapiens
ggggtgcggaatcgccccgggtgagggcgactggggttccctgaggaggcaacagcggcgcggggccccgacccaggagcaagcagcagcttcgtgctgacctaagctcacagcccgaggcc

SEQ ID NO: 102510 - DNA, 122 bp, Homo sapiens
atccaatctgagggggacgcctgtgggagtcctaagtatccagcgcagctgggaggcccacgttgggaagtcggagaccgaccccgcctcccgactgcgccgactgcaagagagcgcttccg

SEQ ID NO: 102511 - DNA, 122 bp, Homo sapiens
ccggcactaagttttcctcggtcttgggaaacgtggccccgcagtccgcactcacgactgcgcacaaacgctggcctctttccaatggcgaaacttctcgacacgcccccgaggcaccacct

SEQ ID NO: 102512 - DNA, 122 bp, Homo sapiens
gtggggtgggtccccgcctccctcctgtgcctggggtggtcagggacatgcagggcaaggcgggggcgcaggcagacctctgcgatgcctcctccggtgcctgcaggagcgtcttttgcgcc

SEQ ID NO: 102513 - DNA, 122 bp, Homo sapiens
cctgaggttttaagagcaatcagtaagaaaattaattcctttcatgtgaggaaactttcccgttctgccttttcccaggccacattgtgttgtcttcctcatgctttctctcttcccagggc

SEQ ID NO: 102514 - DNA, 122 bp, Homo sapiens
tcacttagggaagatttcaagagggagccaacagtgaagaaagcaagtttattagagcaacgtcgtacagcaaaatggctgctccatagacagaacagggctatcttataggcagagtggcc

SEQ ID NO: 102515 - DNA, 122 bp, Homo sapiens
tgggcttcctttttaaaaactttttctactctcttcagcagttgttattaacctttaggtcgcgaccgtttggaaaataataaaactacgaattctcttctcctacttccacctcccatccc

SEQ ID NO: 102516 - DNA, 122 bp, Homo sapiens
agtaggcgctcagttagtggcgcctcgctctgtactccaggaagcccaaccttctccctgcgcctcagtttctcccgacgtcctcgatggcgccatggcgccacactaggtaccttcgggtt

SEQ ID NO: 102517 - DNA, 122 bp, Homo sapiens
ataggatcaaagcagcactgattcactctggctgaaggtaggcaaaattatctcatactacgcagtaagcgtagtcagtatcaactctacaaatgtaagactttcaagtgcaaagacgaaga

SEQ ID NO: 102518 - DNA, 122 bp, Homo sapiens
ctgtctcctcccaatcctaaacattgtagccgtgcatggacaggctggagtcagctcttccggaatggtcttctaactcctggcagacctgctcaacatccaacaggcttccaaatggaaag

SEQ ID NO: 102519 - DNA, 122 bp, Homo sapiens
ctcccccagcaatgggagatgctggaagcagcccatcacagccagccctgaactccaaaccgcaaactcaatctatcattgtttgctggcaattctttattaaaccagttctgctggatcaa

SEQ ID NO: 102520 - DNA, 122 bp, Homo sapiens
cccttccatctcgttctagtttccagttaaacacagaacccagactctgctctaacgtcacgggctggcactgcgggggaggaagccgcggccagatgggggaggggaaggcttgaagataa

SEQ ID NO: 102521 - DNA, 122 bp, Homo sapiens
tttagagatctgcatggggaggagggagatatggaaataaagagggccaaggtaagaggacggagaggccatagaggacttgcatgtttgggtgtgagttttctggccaactagggggaaaa

SEQ ID NO: 102522 - DNA, 122 bp, Homo sapiens
aaactgtaaaatgattagcatacgtgaagcgttagtgtgctccctggcagtcagtcctcacgtttacgatggattaatgaaggcagccaggcacaatctcaggttatgaccttataaggcat

SEQ ID NO: 102523 - DNA, 122 bp, Homo sapiens
gggccgccgcccttctcgcgagactgccgggcctgagatgtccctattgggcgggctcgccgctgctcaacgccccactcgccggaacttccggccccgccccgggcactaggcgaggaggt

SEQ ID NO: 102524 - DNA, 122 bp, Homo sapiens
gtgagtccggcagcgtctaggaacggcatgtccgtggcagggaacagacagagtgagccgcgcctggccagccatgtggcagcagacacagcccaacccaggccgactggcgaaaaaggagg

SEQ ID NO: 102525 - DNA, 122 bp, Homo sapiens
acttcctgtggtaaccaaaatgtaatgactgttgtccagtacacactggccgcttgtggccgccgaacactgaaaatatgactaatgtgacgcagctgtttaattttatttagctttaattt

SEQ ID NO: 102526 - DNA, 122 bp, Homo sapiens
ttcccttgtccttgttttcccatcccagacctaagctgaccccaacagtggttcagcatccgggacaatcactagacctaaaatgagaagacatggagatgcctgcatcccggaagagatgg

SEQ ID NO: 102527 - DNA, 122 bp, Homo sapiens
ctcaagtgatctgcctgccttggcctcccgaagtgctgggattacaggcgtgagccaccacgccttttggccaaagcaacctgactaaatctttatagacaggtttggttgttctttttggt

SEQ ID NO: 102528 - DNA, 122 bp, Homo sapiens
cagagaggaaccccccccccaggaagtgtgcattgcccacactacttttcccctctgtgccgtgatttcctcccgtgtataagggaggcaagagtacctgcctctgggctgggcttggtggc

SEQ ID NO: 102529 - DNA, 122 bp, Homo sapiens
cagacacacagacacaccgtggcgtcttcatccctgtgggttatagacacatagacacgccgcggcgtcttcatccctgtgggttagagacacacagacacaccgcggcgtcttcatccctg

SEQ ID NO: 102530 - DNA, 122 bp, Homo sapiens
tccctacacaaacatctcaccatcaggctcaacatttcagatgtcaatgacaatgcaccccgcttcaaccagcagctttacactgcttacatcctagaaaaccggcctccgggctcccttct

SEQ ID NO: 102531 - DNA, 122 bp, Homo sapiens
ggttctcacatcacagggcactgcagctgagacttgcttgaacggcccccgttttctacccgcaaattctcaattgctagataaacaacaataacaacactttattgggcgctcatcgtgtc

SEQ ID NO: 102532 - DNA, 122 bp, Homo sapiens
tttccgctccctgagtgcttctttgctgaaactgcaggcgaaaagatctctttcccagaccgcagcgcactttgagaaggggctcaaagtcgcccgctctgaatccggcaccggcaaatagg

SEQ ID NO: 102533 - DNA, 122 bp, Homo sapiens
gagcacttcatggttccccttcaagcccagtgtcaagttcccctgcagtagcagcacacacgtcttgcccatcctgttctgcaactttttgtatccatccttatcccactccactttcattt

SEQ ID NO: 102534 - DNA, 122 bp, Homo sapiens
tctccccctcccaaaaaaaaaagaaaaacaaaacaaaaaccacacctcaaaggaatctaacgaggtggtaagaagcctgtatttttaataaacatgatctaagtcttatgtgtaacagtttt

SEQ ID NO: 102535 - DNA, 122 bp, Homo sapiens
gttctctgcttccagctgccctggagctgcggggagtgagccagggtcgcatcttcacagcgtgaatggcaaggacagcctcggtttcccctcttctgcgctatcaccaactaaatatttga

SEQ ID NO: 102536 - DNA, 122 bp, Homo sapiens
attgttgctgccaactcttcattcttcccagtacactctttgtgtacacaggagctctcccgacatggctggacactcaggttccaagttgaggtgtctctcttttcctgaatgttggatat

SEQ ID NO: 102537 - DNA, 122 bp, Homo sapiens
actggagaaatcggcttatttccaataacaagctccaggctcaggggaggccagcccagccgcgcaggtgaagctgcaattagtgcagggcaattagggacgctccccgttcgggtggggcc

SEQ ID NO: 102538 - DNA, 122 bp, Homo sapiens
tctctaacacctggaagggaataagggaaagactctaaaaatttcctacatattttattccgaatagcccacaccttgacagtacattcagtcactggatgattttgtattgaagtctgtaa

SEQ ID NO: 102539 - DNA, 122 bp, Homo sapiens
tctgaaaaattcaaagagccttaggtacttttaatcagatgttcttggtaactaaaataccgcttatgtttaattgtgattcccttatatgatatcctaatactagaatctaaaggaacttg

SEQ ID NO: 102540 - DNA, 122 bp, Homo sapiens
accccggaggctgctacttagcgccagattaatcacaccgaattctccatccagatattgcgtgcaggccgaactcccaccgctaatcgccgtaatattctcctcggcgtgtgcaggcggcc

SEQ ID NO: 102541 - DNA, 122 bp, Homo sapiens
cgccggccccctcgccgtagccgtgcccgaacggcccgttcatggtgccgtcaaaggcgccgcccttgaccacctgggaaggcatcagggactcctcctgccgcaccatcaccatcagccgc

SEQ ID NO: 102542 - DNA, 122 bp, Homo sapiens
acatgaaagggaaaaggtgatgctctcacaatgctacaagccctccacaaacttctctagcgtgtcccccgtggtgtccccgaccagggacagttcgctggacagcgcactcctgctggggg

SEQ ID NO: 102543 - DNA, 122 bp, Homo sapiens
cccacgcctcatggggctcccgggtcttggccgcggctgggatccccggaaaagcagggacggagaagccaggccggcatgcccgccctccttcccccgggaggacccaacaactccggaaa

SEQ ID NO: 102544 - DNA, 122 bp, Homo sapiens
gacaatggggaggcctttaggccagcccacatgtgacaatggagggctgcggcttccttgcggagagcacaagtgagctcactgccctggactccagggaatcagagttctggccgcggggt

SEQ ID NO: 102545 - DNA, 122 bp, Homo sapiens
aagggcgcgtctgggcgaggcggggccccggaggaaaaggcgccactggggcgtggcggccgctgccagcgccggagggagaccatgagcccctagggccccagcccaccggcgccgaggcg

SEQ ID NO: 102546 - DNA, 122 bp, Homo sapiens
accaagtgaagcgggaaataacttgctactacccagcctccggcccgccccttccacttccggtcttacccggctacttccgctgctgtttcgtagccgactgctgaaggctggtttgcgtc

SEQ ID NO: 102547 - DNA, 122 bp, Homo sapiens
tagctgggattacagacatgtgccaccacaaccagctcatttttgcatttttagtatagacggggttttgccatgttggccaggctggtctcaaactcctgacctcaggtgatctacccgcc

SEQ ID NO: 102548 - DNA, 122 bp, Homo sapiens
accaattccagtgcgatcctccccagacaataacccacctcccaccttggccctgcccagcgcagcaagacagttgtctccctgtcggtctgcttgtccagaagagcggggtccctgcccta

SEQ ID NO: 102549 - DNA, 122 bp, Homo sapiens
cggagcactgggaatgctgggaatcgtggttcctaccgccaatggattgcagtttctcaccggttcccaaagccaagcatgaggtgagcaaggggcaagttaccattctaatttgccattgg

SEQ ID NO: 102550 - DNA, 122 bp, Homo sapiens
tgccatcccgtgacggaccagagcctgatagtggaacttctcgagctgcaggcccacgtacggggcgaagcggctgcgcggtgagggaatggcccccggctggccaatggcaggggcggggt

SEQ ID NO: 102551 - DNA, 122 bp, Homo sapiens
cctccccctggaacgtctcaatgtcaggctcgctccctcctgcagccagggctttccttacgtagtgcaggggggttactctgcgcggttccccgctaccaccccttcggttcttccctcta

SEQ ID NO: 102552 - DNA, 122 bp, Homo sapiens
cgaccacggcgagctgtgccgccaggtgcccaccaccgaggccgagctgctggtgtcgggcgacgagaactgcgcctacttcgaggtgtcggccaagaagaacaccaacgtggacgagatgt

SEQ ID NO: 102553 - DNA, 122 bp, Homo sapiens
tttgcagagtggggagttggtcacagagctagtgagaccaggcctccagcccagttggtccgtctccagggcctcagctcagcaccacatccctgtactgcaagcctcagtggtcagcacca

SEQ ID NO: 102554 - DNA, 122 bp, Homo sapiens
cccaatacacagcacccagaggtcacctattttgtcccccctaaccaagcctgagcttctcgatgtaaagaatcacatcttgctacccttaggtttccagaagcacctggcacaaggctgga

SEQ ID NO: 102555 - DNA, 122 bp, Homo sapiens
cccccagcgcggcgcctggcccggcccggggccacctccgtgcgtggccggcaggggtcgcgctccccccgctcagcctcccgggcgggtccgatgcgaagccctcgcttcccgcgggtccc

SEQ ID NO: 102556 - DNA, 122 bp, Homo sapiens
ctgagcaggccacagtgtggaagaggctccagaaaacccagccctgccgctgcacacgtgcgtggccagcagataaagtcttccttgttattgtgggcagcgtagctgcacctgcggtgagg

SEQ ID NO: 102557 - DNA, 122 bp, Homo sapiens
cccctgcgcccagacactgggcagggttcaggctccctccgccatgaccctccccaaatgcgatgctcccaggcatgagtgggcccccatgccagtgccctgagccacctgccctaccccag

SEQ ID NO: 102558 - DNA, 122 bp, Homo sapiens
gtgagtttgattgaaacgcggctgcgggaaggggtcgacagaggcaagctgcgagcaaggcgggggtgggggcgaggaaggggacccggagagctcccggagggcttggccggccaccgccg

SEQ ID NO: 102559 - DNA, 122 bp, Homo sapiens
acgggggcggggactctgcaagaaaaaccttcccggtgcaatcgtgatctgggaggcccacgtatggcgcctctccaaaggctgcagaagtttcttgctaacaaaaagtccgcacattcgag

SEQ ID NO: 102560 - DNA, 122 bp, Homo sapiens
acaggacacaaatcgagcctctgctcctcccatccgtgctctagatctctaatgaggtctcggcccaacaggtccgatgtcctcctaggagggcccctgcaccctcacccctcctttccctt

SEQ ID NO: 102561 - DNA, 122 bp, Homo sapiens
tattttggaaggtagaggggagggaaaggcgcattcctccaacagcccagttctgccctgcgcagccctctacctcgaggcaggtggggcctgtggttcctagccgcccgaggtggccatct

SEQ ID NO: 102562 - DNA, 122 bp, Homo sapiens
cacgcaccctggaacacgacttggcacaagtaccctggctggggctccaagggtgggcagcgagctctgagccctcagagagtgaaaaccatctttcaaaagagacaaagtgtcggcccgcg

SEQ ID NO: 102563 - DNA, 122 bp, Homo sapiens
agcaggctgtctggcctctgtgctgagggctggagagccaagggaaaggccaggtgagagcgtggaggtcctggtgagaacactcaagtccaggtgagaaagtggaggtccaagtgagtacg

SEQ ID NO: 102564 - DNA, 122 bp, Homo sapiens
tcaagagcaggaccaagtggaggtaatcagataatggggccagttccaccatgctgttctcgtgatagtaagtgagtctcacaagatctgatggttttataagtgtctgacgtttcccttgc

SEQ ID NO: 102565 - DNA, 122 bp, Homo sapiens
caaatttagctaattcgttttgaatgcttactttatgccaagcatacgaaattcctgcaacgctgccaagggaggtatcatgatccccattttatagatcagataactgatactctcagaga

SEQ ID NO: 102566 - DNA, 122 bp, Homo sapiens
gcaggagcggccccgaagtgtgtggaggaggccgcaacggccggggtgtcagggatccggcggtgagtggctgcactggccgccacgtggccgggaggagaaatgcaaacaaggaaaccggg

SEQ ID NO: 102567 - DNA, 122 bp, Homo sapiens
cgtggggtcactcatgccatcccctatgagctcagcacctgccgggtcacacatgtggctcgcgaggtagcccctgcctgctgggagccggccagtgtgtccacagcatccaggccacgctt

SEQ ID NO: 102568 - DNA, 122 bp, Homo sapiens
gcgatctttctacacaagtgctggccagcaacgactgcaagcctcagagcgttattttgccgcagcctacgcaggcgcagtcagtctttgcattgtggtggccacgccccactcctcgtctt

SEQ ID NO: 102569 - DNA, 122 bp, Homo sapiens
tatttcttactgaacagggttttggtttgccctcctggcagtcagagagcacgatggagtcgtcgttgctgctcaaggtgatcacctcgcttttagggctgaaatcgaagcagttaatcttg

SEQ ID NO: 102570 - DNA, 122 bp, Homo sapiens
cctccaactacagagaaagaaagagaatatcacaccacaggcaccactgtcaacacgcctcgggcggcagtctcacattttctaccccggtactggaaaaagataaagatatccaggaaacc

SEQ ID NO: 102571 - DNA, 122 bp, Homo sapiens
agagtgacaggtggcggcagtcccagctgcatggcccctggtgtaagagatcctctcctccgtccccgcctccactgcccacacccctgcctccgcctctgcccacccggcccaatccctta

SEQ ID NO: 102572 - DNA, 122 bp, Homo sapiens
ccgggtgccgccgcgtccccagcgccccggccggcccctctgggcggcctgcgggggcggcgcagttgcgaaactgagtaagtattaactttacttagcggcggcgatccgggctgcgccgg

SEQ ID NO: 102573 - DNA, 122 bp, Homo sapiens
gaccacaaaacaatcaccatctctccctgcctggtaagggtcctacaaccctgacagaggcggtatagagcggcaaatcagggggaagggatagcctctcaccacacccaaatgtcctccag

SEQ ID NO: 102574 - DNA, 122 bp, Homo sapiens
gttcgaacaccgcagcggtggggacggtgggtccggcgggcgccgggaggaggacaccagcggagccctgcactctcgtgccccgctcaccagcatctacttgccccctcgttccttcccca

SEQ ID NO: 102575 - DNA, 122 bp, Homo sapiens
ccgcgaggagcactgggtgtggtgggggcaggggtgcctcctctgtcaagtggagatcggcgcctcgctcgtgcctgcgagtgcgcgccgcgtcgaatacagccgtacagaacgcactacag

SEQ ID NO: 102576 - DNA, 122 bp, Homo sapiens
ctcactgtagccttgacctcttgggctcaggcgattctcctaaagtgctgagactacaggcgtgcaccacaatgcctggttaatttttaaattttttgtaaagatggagtctcactatgttg

SEQ ID NO: 102577 - DNA, 122 bp, Homo sapiens
cctttccacagggtttagttgcagttatttaaccacttattttccatcctttggttaatacgaataatgctttgatgaagtcttggtgcacaagggtcagtgtacctgtggcttactgggga

SEQ ID NO: 102578 - DNA, 122 bp, Homo sapiens
aaacaagtgcgactgtaacttgggactctgctggacgccgagctgaggagttagtcctcccgaaggtctgctaggggcgtggaccgaatctttgtacatgttttgggaaagccagtttctcc

SEQ ID NO: 102579 - DNA, 122 bp, Homo sapiens
ctgtaggacaaactgggaatacaactgatagatcaagtctctgccgtgaagagatctatccggtggtggagaaaacttgtaaagaattagtccaggccaggcacagtggctcacacctgtaa

SEQ ID NO: 102580 - DNA, 122 bp, Homo sapiens
gcctggcagggggagaccacaggtatgcaggtggggggacatggtgtggcactaggggctcgaagactggtttctagcactaccggtcacggccatgtcgtcctagaagggtccagaagatt

SEQ ID NO: 102581 - DNA, 122 bp, Homo sapiens
ctctttctccctccagcgccctctctctcccactcggttatctatttacctatctatttacgtgagctaccccccaccccaaatgaattacgtctgcaaggcagtaaaatgttatgtatttg

SEQ ID NO: 102582 - DNA, 122 bp, Homo sapiens
tgggaaaacctactaaaaatggataaatttccagacacatccagactaccaagactgaaccgggatgaaatccaaagccagaacagaccaacaacaaataatgggatcgaagcagtaatgaa

SEQ ID NO: 102583 - DNA, 122 bp, Homo sapiens
gcagcgaagaaacgtgacttcatggctagaggggcatttcccaggagccgcccatgccgccgcgtgaccttcacacttccgcttccggttctttattccggaagttgctctcagaggcagcg

SEQ ID NO: 102584 - DNA, 122 bp, Homo sapiens
tggagatagcgggcatgggtgcagggccctgccgctggtgctggtgatggaggtagtgggcgtgggtgcagggccctcctgccactgctgtttgccatgggatcaaccccagcccgcgaggg

SEQ ID NO: 102585 - DNA, 122 bp, Homo sapiens
gctacgttgcctccgcccccagcagctccgccaccatcgccctccagctctacgccaccccgcaccgccctgctccgcctactctcccggctggagacgctcaggcagcgagcgagcgcaag

SEQ ID NO: 102586 - DNA, 122 bp, Homo sapiens
tattaggcaaactttaatgagaaacaaggtggctccttgttaacaggcaatctacaaagacgtaaagcaacttgtccagtcgccaagtgggagctcatcagaggagtcaagaataattatag

SEQ ID NO: 102587 - DNA, 122 bp, Homo sapiens
tcactgcgcagctgctccacggtccacgcccgctgtggaacggccgccgccatcttcccccgctgcctccgctttactgagccagcccgccgcagttcggcatcgccccgccccctagggcg

SEQ ID NO: 102588 - DNA, 122 bp, Homo sapiens
cgccatggacgtggcagcagagaacgctagtggaagggccagctgggagaggcaggtcagcgctcagctcgggcgagctcagtccaagatgctgggaggtaaccagggggcgataccgagta

SEQ ID NO: 102589 - DNA, 122 bp, Homo sapiens
cccaaaagaaatgtgaatgccggatctccaacttcttgatttaaaaatgtaatccaggcccggcgcgctggctcacgcctgtaatcccagcactttgggaggcaaggtgggtggatccctcg

SEQ ID NO: 102590 - DNA, 122 bp, Homo sapiens
tggaggtacctgggccccgggtaggctctggattcccgcctgccgcccctcctgtggccccggctctgcaccctgcactgtcccacggcctacgcctgggcatgctggtcactgtgcacacg

SEQ ID NO: 102591 - DNA, 122 bp, Homo sapiens
ttgaatactggagtttctttgatccaaaatacatttgtacccagtgctcaaatggctcatcgaaacatcagtttgaataaatcatgaaccaaattgtatccccgacatccagggccatgggt

SEQ ID NO: 102592 - DNA, 122 bp, Homo sapiens
agaggctctgagaggatgggcatcccaggagtgagagtttcgagatttcttcgggaaagacggggttttgggaaatgtgctgtggtgctgtctgtatgtcacacgatctgcgaggagctgcg

SEQ ID NO: 102593 - DNA, 122 bp, Homo sapiens
gtggccacgctcagcgcagacacctcgggcggcttgtcagcagatgcaggggcgaggaagcgggtttttcctgcgtggccgctggccgcgggggaaccgctgggagccctgcccccggcctg

SEQ ID NO: 102594 - DNA, 122 bp, Homo sapiens
gccacaccacccctgctgtggacaatatgtcattgtggaggccagggcaggcactggaggcgagtgcctcagcatccgtaggcttcggcatccagatgctcctgctgcatctgtgtctgctg

SEQ ID NO: 102595 - DNA, 122 bp, Homo sapiens
acctcaggtgatccaccagcctcagcctcccaaagtgctgggattacaggcgcgagccaccgcgcctggccctgcctggtttaagcttatgtgtcccaggctccctacctcccctcagtgtt

SEQ ID NO: 102596 - DNA, 122 bp, Homo sapiens
agtcgctctacggcttcttctggaagcagccgggcaccctggaggtggtgtcaggctgcacggtggacatgctgcaggcagtgtatgggctggacggcatccgcctgcgccgccgccagtac

SEQ ID NO: 102597 - DNA, 122 bp, Homo sapiens
gcccaccgagcaagtggtcttgagacggtcatggggacggaagaggttcagcatcctgcacgggcccttaccaaggctcactaggctgacaccatggctgagcgccctctctattgacaaga

SEQ ID NO: 102598 - DNA, 122 bp, Homo sapiens
tcagccccatctcacccccgtgtctcttaggagctgtacctgagctgggtggtggaggcccggaggcacatcctggccatcctgcaggactgcccgtccctgcggccccccatcgaccacct

SEQ ID NO: 102599 - DNA, 122 bp, Homo sapiens
agctcccgctttattcggtcagatactgacggttgggatgcctgacaaggaatttcctttcgccacactgagaaatacccgcagcggcccacccaggcctgacttccgggtggtgcgtgtgc

SEQ ID NO: 102600 - DNA, 122 bp, Homo sapiens
atagagacaaaaggtagccaagagtccctggcgaaaccccgcctccaagtctaaaacagccggaaggcggaaaaaccgtactgtgggtcccggatgactcccgccccttcccgtctgattct

SEQ ID NO: 102601 - DNA, 122 bp, Homo sapiens
ccaccagccactgcccatgaagctggttggaattgccctcagcggccacagaggccccagcggggtccccagccaggccgacatgcactagcagctcagaaagaaaggccttgtgtccagtg

SEQ ID NO: 102602 - DNA, 122 bp, Homo sapiens
ttcaagcgattctcctgcctcagcctcccaagtagctggaattagaggcgcgcctcaccacgactggctaatttttgtatttttggtagagaggggagttcgccatgttggccaggctggtc

SEQ ID NO: 102603 - DNA, 122 bp, Homo sapiens
gttccggaagacgccggcattattcctcccaaagagtttaagactcgtcataaggaaagacggtttattacttaagggagagcgaaaagaggtagagggctggttgtcgctgcgagcgggtc

SEQ ID NO: 102604 - DNA, 122 bp, Homo sapiens
gcccccgcccggctggcggggggcggggtgctgtcgcgctctccccggcggccgcgcctccgaggggtcctctgtgagccccgaaaaggccccgctcgcctcctttgtcccaacactagttt

SEQ ID NO: 102605 - DNA, 122 bp, Homo sapiens
ggaacttggggagggggcctgggggctcgagggccttgcagagccgcctgaagggcgagccgggacgcctgcgttcccgggactccggagatccccggctgcaggggcgggggcgctatttt

SEQ ID NO: 102606 - DNA, 122 bp, Homo sapiens
gcgcatttgggccgtaccacaacctgtagggtcatctgggtctgaaacgggcaccagcgacgcgggagcagggactgacgcccctctagcaaagcatctgtggtacatcccagacccggggc

SEQ ID NO: 102607 - DNA, 122 bp, Homo sapiens
gctgccgtaaagcttcgctttgccgactgctgcaaagcgccttacgactgaacccggaatcgacctatggccagcagtcgtccccgccctgcttcaaacatttgggtttcaggagccgggcg

SEQ ID NO: 102608 - DNA, 122 bp, Homo sapiens
tctctctctctatctctatctctgtctctcactcacgggcaggccttgggcaggtggaagcgctggaagcacccacaagtgcaaaagggagcacctaccttcagggccactttctggggact

SEQ ID NO: 102609 - DNA, 122 bp, Homo sapiens
gcccttcacacccctctgtccccatacaggctgcaggcctagggctttgtgtaaggtggacgtggggtcttttgctcaggacctctggctcacctcatctagtggctctaattcgccacatc

SEQ ID NO: 102610 - DNA, 122 bp, Homo sapiens
caaatctgttcccaagatgtccacatttgaaatactcagtgaagccaaataaatacttgccgtgtctttaataatctgtaccatgattacaccagggaagtgctgatgaaaatcccctgttg

SEQ ID NO: 102611 - DNA, 122 bp, Homo sapiens
cacacaggacagccacatcctcgtagtgaaagcaattgtggacgccccagccgcggctgccgcactcgctcagcgcagcttcctgcccgcggcactccacgttgtccagcaggatggggcct

SEQ ID NO: 102612 - DNA, 122 bp, Homo sapiens
aagcttcaggtagttgttctaaaaaatgggagggtcagggaatgctggggtgccgccgtccgtgtccgcagcagcgctcttttggagttccgtgtgtctccagctcccctcatcttgagggg

SEQ ID NO: 102613 - DNA, 122 bp, Homo sapiens
ctccctcggtcctgcagccggctggcggggctggcgggtttggcgttggtggagtggactcgggagggggagggggtaaggaaaggggtgggaaggcaggattttttttttctctctttgta

SEQ ID NO: 102614 - DNA, 122 bp, Homo sapiens
tgggagggtcggggagggcggccgcaggagagtggctgcgtttcccagctagagctcggccggcccctacgcttactcagcccaccccgccccctgctcccgaggccactctgctcgagata

SEQ ID NO: 102615 - DNA, 122 bp, Homo sapiens
tgagtcctcccgtgtaaaatggcagtgtttgcctaggcctggtctacctgccatgcctaccgaaggatccagccaagccctgaaatggtttctgcatttcacctaggcgcctcctgtgcact

SEQ ID NO: 102616 - DNA, 122 bp, Homo sapiens
ttccgactgcacctcgttccacagcagtcagcacccagtgtggaaatatattaatgaaaccgcctttacaaaattatgactgagacagtgaaagaaatctaacttaaccaactccatcttgc

SEQ ID NO: 102617 - DNA, 122 bp, Homo sapiens
gtctgggttttcgggtgttcaccattgaggtgggagccacatctgcgccccgtgacctggcgaacctcattgaacacttctgcccgacccccgcagcagcagcgcgaccggatggcatgggt

SEQ ID NO: 102618 - DNA, 122 bp, Homo sapiens
tccccacggccctcatcctctcattgccaccaggcctcctcccacagctgttcctgaatccgctgcattggcctctaaaaccaaaaatcagggagagggggcgacagactaggagtttgcgc

SEQ ID NO: 102619 - DNA, 122 bp, Homo sapiens
gaagcgtcactgctggaagtgtttgagtcatctcaccgctagaatgaaaccagctgggaacgagaaaccttatgttcagagtttcagttaggaagcctgggaatctgtctgtcttggtttcc

SEQ ID NO: 102620 - DNA, 122 bp, Homo sapiens
cctggctagattgggatctaagttcacttagtttttagtaaggggaacttggtgaaaaatcgacttgtgaggtctccagaaacacttaattgataatgagtcaaaaggcattactcttggca

SEQ ID NO: 102621 - DNA, 122 bp, Homo sapiens
cctgtccactctgctcccctgcctctcaggaagacagctggctacaccaagtgcagggagcgaggcgccacccccattcattcactccaagcatttatggctacagagcctgcgcccagggc

SEQ ID NO: 102622 - DNA, 122 bp, Homo sapiens
gttctagcttggcctcctaccaggtggcagcctagtccagccttgttacaggacagaagccggaggggcctcgtcacctgtcatcagggtggattgggatggcagcctgcttcctcagcaga

SEQ ID NO: 102623 - DNA, 122 bp, Homo sapiens
gggtgtgttagccacatgactaaagtgatagggcatatggttcttaagcaggaaaagacgcgtaggctggacaaaaatgtaaacattggtggcgtgtggagtattcaggagggctggaaata

SEQ ID NO: 102624 - DNA, 122 bp, Homo sapiens
ataaggagaggcccggacttgggcatatctgcagaaaaacccttccccactaggcaggcgcgggggagggcgtggaggggcggggtggtgccgcccccggggcgggcccagtgcgtggcagc

SEQ ID NO: 102625 - DNA, 122 bp, Homo sapiens
caagtaatgtcacatgcttagcacagcacatagtaagaatttgacacataggctgggtgccgtggctcacgcctgtaatcccagcactttgggaggctgaggcaggtggatcacgaggtcag

SEQ ID NO: 102626 - DNA, 122 bp, Homo sapiens
ctatgactaagaattacctcttaatgccaaccgactcggggagactcggggagaagcccacgggccgagaggccctgaagtccggcttcccggtcccagcagagacgctgccttgcgccctt

SEQ ID NO: 102627 - DNA, 122 bp, Homo sapiens
gagtgccttttgctgttagcaggctgatacagggaaattgattctcttcacagaatttcccgacggtcccaataagccattaagcgctcctggccttaccttccttggtttagtagctgctc

SEQ ID NO: 102628 - DNA, 122 bp, Homo sapiens
agaccccaaggaggggcgcgaggtcctcagaaccggaaaggctagcactggatgggtccccgcagccccgcgccgctgcgccgcagcctccggaagacaggggacgctgtggcgccgggcgg

SEQ ID NO: 102629 - DNA, 122 bp, Homo sapiens
cttaaagggaagaaaatctttaatcctagaatggtggcggtgaaaatcgccactgggaaacgaaaagattctaatgttggttgggctgccggcctgtcattacacacacacaaacacactca

SEQ ID NO: 102630 - DNA, 122 bp, Homo sapiens
ctggcccagtcctagccaggggaaatgaactctcggcctccagggtatggctggggcctccgtgcctggacccaggtcagacgagtcactcacgcatcccgaaatcctgccagaggctggaa

SEQ ID NO: 102631 - DNA, 122 bp, Homo sapiens
tcctccgggatcgctcctcgccccagaccaggagcagggtgtcgggacttgtaattgccccgtagccccgagggcgggcaggaaagaaaggctttttcatactccgctgggagagagcaggg

SEQ ID NO: 102632 - DNA, 122 bp, Homo sapiens
tggggcaacttgcccttgagggtgcttcctgcttttcatttcgtgaaatgtgacctcatccgccactcagccctccaccctcattccactaaccccaggataaagctatttaatcctctctt

SEQ ID NO: 102633 - DNA, 122 bp, Homo sapiens
ctgcggccccgccggccgctggcgtgcgtgcgtgcgtgcatgcgtgcgcgccaccgccatcgccatcgccttcctggtttggacagctctaccggctcctcccgcacggcggcgacggggca

SEQ ID NO: 102634 - DNA, 122 bp, Homo sapiens
ccagagctcaggacactgtgggaactaccacccctaacaagccttctttgcccactaagtcggactgtcttaagatctcctgtctttgggtttcaggtggactctgccctgggggctggtat

SEQ ID NO: 102635 - DNA, 122 bp, Homo sapiens
ggcaggacttgtactgtgatagttctcttcctcgtcatgaaagatgtcaacagcactcatcgggattcccccaccttggctggacctatcctctggccttggtagttgcccatgtgaaaatt

SEQ ID NO: 102636 - DNA, 122 bp, Homo sapiens
gtttatggaggagcggggggccttttctcttactccagatgtaggggcgggagctggagtcggcgctaagtctggtttctctgttttcattagcaatcctagatccacatctaggaaaaata

SEQ ID NO: 102637 - DNA, 122 bp, Homo sapiens
atgaagagtaaatacagtttctcttatgcttttcttaataatattttctgccaagtgcggcggctcacacctgtaatcccagcactctggaaggccaaggcgggtgaattgcctgagctcag

SEQ ID NO: 102638 - DNA, 122 bp, Homo sapiens
aagtacaagcaaggaagacaaagagttgtcatgctaatgagacatacctcttgtactgagcgagctgctggcttgtcttgatgattggccaatattaaaaagggtaaagtgcataactgtgg

SEQ ID NO: 102639 - DNA, 122 bp, Homo sapiens
tatacagtcgaaacagaaaagggattgtgcgtgcttcctattgccagtagagggatgagccgggaacaaatagtaaaaatgaagtgtgaaattactttggccatttcttgctccagctgcag

SEQ ID NO: 102640 - DNA, 122 bp, Homo sapiens
ccggctgctgccttataaggcgcgccgtcgccatggcaacgtgcgctaagttgcagcagtcgtgtcaaagttcactatatagagagctcagtgagctgatcgcggagaagccacttctgcca

SEQ ID NO: 102641 - DNA, 122 bp, Homo sapiens
agttgggtgggcaacatggcggttctcaaagagaccacgtccttgtacaggtgcccaccccgacccatgcaccagacccgctgctgcctcccctgctggggtttgtaatataattatagcct

SEQ ID NO: 102642 - DNA, 122 bp, Homo sapiens
tgcagtcggctaagcagccgcattgggagtgggtggcgaggcaggaaccccacattaacccggcgatccactttggagctttgagcctagctggttcccctcccagcacccccctctattgc

SEQ ID NO: 102643 - DNA, 122 bp, Homo sapiens
aatgctttgaaaactaaagaaaatcacgttatattagaagccttaccctggtttcactttcgctgaagatatcactgtttgccacacaggcaatcagggagctaaaactgtagttaaagttt

SEQ ID NO: 102644 - DNA, 122 bp, Homo sapiens
acttcaggtgatccgcccacctcggcctcccaaagtgctgggattacaggcgtgagcaaccgcgcccggcctagatttttgtcttcattcaagtagaagctgaaatgacagatgtcttccca

SEQ ID NO: 102645 - DNA, 122 bp, Homo sapiens
aggaacaatatccctagggagtgtacacatcctgcaatattcagactaatatcatcctttcgcccccctggatattaggatcaatatcacaagggtggtgtgcacccccggcgaaattggaa

SEQ ID NO: 102646 - DNA, 122 bp, Homo sapiens
gttggatggggagacaaaagtataatttaaaagaatgcctctgccctccagacatagaaacgattaaatgagtcctgaacagtgatgtgatggtggccccttcaggagttcatcagcaggca

SEQ ID NO: 102647 - DNA, 122 bp, Homo sapiens
aagtgagttggcaacacaactcacctacaagttctccaatcatgaaaagcaagtacagaacggcagcaatggtcaacctggctttcacctttctctgcttcagtatctctctctgtttgctg

SEQ ID NO: 102648 - DNA, 122 bp, Homo sapiens
ttttacaaccaaagtgttgattttttttcccctttataaagtggcagtggcaatctgtggcggcatgctacagacacaagttcatggtaagttcagaggaaaagaatgttcaaagaaaacca

SEQ ID NO: 102649 - DNA, 122 bp, Homo sapiens
agagcagctttcacggctccggggctgagtgaggcctgtgtctaggctcatcctgccctccggggcgtcccagtgtgcctgggcagtggcgcagctggctccttccactgggtttaggtgtg

SEQ ID NO: 102650 - DNA, 122 bp, Homo sapiens
tgtgcaccttcctgggcttcatcttgagctgagtggccgcacctgtgtcccggaggctggcgtcagggccgggccgtgttcctgcctctccagggtcaccctgagccgtgcccaggggcatg

SEQ ID NO: 102651 - DNA, 122 bp, Homo sapiens
gacccagcgctaaagggtcacagccaagctgtccgcctcctgccttccctttaaagaagccgcacacaagggagctgcccgggagttcaacttccggccacatagtgagaggatgttttcct

SEQ ID NO: 102652 - DNA, 122 bp, Homo sapiens
cgccccaccccgccacccattcctagggttcctagtcccgggaaggcaactacccaaagacgcctgggttgtcaggctcaatccttgagcctcaaccaaggagcagaggggtgcgggtaaac

SEQ ID NO: 102653 - DNA, 122 bp, Homo sapiens
aaaaagaaaatgtaataaaatataattgaaaacagaccctggtatgtgtggagagagggccgggaggaacctaggacaccggggaacctgaactcccccaaccagtgaagggagctgtgggc

SEQ ID NO: 102654 - DNA, 122 bp, Homo sapiens
ggcctgtcctggagcgcaggagttgaggggctgaagaccgggccgcccccgccgccggggcgggaactcaccttctctgaggcaggggcgggcgtctacaactactgtcccccgccccgcca

SEQ ID NO: 102655 - DNA, 122 bp, Homo sapiens
ctccaggagccccaaggacggcgaagggcagcctggagttggggggcgtcagcgagggcgcgggcaggggagagaggcgcccctggaagtggagccggcctggacagaggcagggttcggga

SEQ ID NO: 102656 - DNA, 122 bp, Homo sapiens
tggcctttgtgagccgtggcacgcagctgctgtccaggtgagtgggctggggtggggcagcgatggagtggggggtggcggggggacctgcctgacgctgagcctctccccaccccaaaccc

SEQ ID NO: 102657 - DNA, 122 bp, Homo sapiens
ctgtttttaaactagttcatgcatatgtagtgctttgttcattcatccatcaaatatgtacggagttcctaattacctgacattgtgctaaggatccagaaagttctaaccctcctggaatt

SEQ ID NO: 102658 - DNA, 122 bp, Homo sapiens
gcgccgggccggctttgtatatgttggagcattcctgcccgttgttatggcaacctctgccgggcggcggggctggggcgcaccgactaagggagggtgacagagggtgggggctgggagaa

SEQ ID NO: 102659 - DNA, 122 bp, Homo sapiens
tcgggagcttgatgttgataagtaaagcgccggagtgcgggcgaagcatgtgtggggctccgggtccctgtctccgccgccgccgcccgcgcctcccgccgctggcccgccccggccccggc

SEQ ID NO: 102660 - DNA, 122 bp, Homo sapiens
aaccctcctcctgctactctcgggggccctggccctgacccagacctgggcgggtgagtgcggggtcgggagggaaaccgcctctgcggggagaagcaaggggccctcctggcgggggcgca

SEQ ID NO: 102661 - DNA, 122 bp, Homo sapiens
aggcaggagagggggccacaggcatgagccctcccagtgaaatgagacccctgaatgatgcgttcacttttatgttcaatctaaatattcttttcttcttcaaagatgaagaccattcaaga

SEQ ID NO: 102662 - DNA, 122 bp, Homo sapiens
ctcctcttcataatagtagaattactcatggcctcgccaaacattatgcaaataatttcacgttcccaggtagctcagccctcccacaaaagatttgaacgttttccatatgataacgatcc

SEQ ID NO: 102663 - DNA, 122 bp, Homo sapiens
aaaaaaacctttcttcagaagccctctcaacctacaatctattgctatgattaaactaaacggtaacattcacgatatattaaaaagccaacaaatagttatgaaggtatgacatcaaagac

SEQ ID NO: 102664 - DNA, 122 bp, Homo sapiens
ttgctagatgtttctgctgctgggctaaaaaccgcttaggtggccgggcggggtggctcacgcctctaatccctgcactttgggagccgaagtgggaggattacttgagtttaggagtttga

SEQ ID NO: 102665 - DNA, 122 bp, Homo sapiens
cgcggcgtcggccagtagcgggaggcggtcgggtcaggccccagctgggcgcgagcgggtcggcgttgagggagccaccgccctcccgcctgcgcactgcctctcgcccccctccggccagc

SEQ ID NO: 102666 - DNA, 122 bp, Homo sapiens
cgacgtgcggcggggcaaggtgatcgacaggcggcgctgcggcacgtcctcgcgcgagctcgccaaaggggttcctgcaccgccttccgcagccagctggcttcgcccctcccccggaagtg

SEQ ID NO: 102667 - DNA, 122 bp, Homo sapiens
gcccaggcattttgattctggtcacgaccacctgtgaaggatgacgcagatttagccctacgcacatccttgccttgttgctgtcttcagggtcccaaactgggttgattcaccccacagga

SEQ ID NO: 102668 - DNA, 122 bp, Homo sapiens
cccagcagttggcgtgtcagttatatttatattatacatcctgccatctggggctctcatcgagagtttctcggacatggtgtgacatcagtgggtcctttgtttcagaacaagcgcgttct

SEQ ID NO: 102669 - DNA, 122 bp, Homo sapiens
agcgccgtgagtggacagggctggagcggggcgggcttaatccccagtgtaacctgggggcggggctgccgggatagaggagagactccgtagcggggcggggcctcagctccagctgggcc

SEQ ID NO: 102670 - DNA, 122 bp, Homo sapiens
ctccaccctcccaggtgccagactgcaagtccccacactctcaccatgttggaaatgctgcgggtattggcaggattcagcatgacaatctcagttgtgatgtggccctccaccgcctcagt

SEQ ID NO: 102671 - DNA, 122 bp, Homo sapiens
gggaaaataaacaacctggaacagatagtgataagacaagaaaatatagactcagctctccggcaacactgcagataggcatagaaaaatgagggaagctctgtggtaaggagaaagtcaaa

SEQ ID NO: 102672 - DNA, 122 bp, Homo sapiens
ctgcagatctctatgtctagctgtgtctgtgtctatgggaattctcgttccttgaattcccggcatatccttgaacaccccaatctctctgccatctccacgccactgagcatgccttttcc

SEQ ID NO: 102673 - DNA, 122 bp, Homo sapiens
cttcagatttctcatggagtccaggtcgatctccaaggactggactgtatatctctgctccgtgagcgtcatctcagcagctccaacaccgatggactgcatggtgaccactgtggtgcact

SEQ ID NO: 102674 - DNA, 122 bp, Homo sapiens
tctctccccaactaaataaacgttccgcgtctccacagatgccagtatatcactagatatcgtccagcttccctctttggaaggctcagtggcatctcttcatatccaccatccttcacaga

SEQ ID NO: 102675 - DNA, 122 bp, Homo sapiens
ggacaggtggaagcgaattcttcccgggcgtaggcattgctcaagtaccgatgcactccccggaaggcctcggggatggtgaatccccggtacttcttacacaccacctgaggatggggaga

SEQ ID NO: 102676 - DNA, 122 bp, Homo sapiens
cccagcattgggggcaggagggtggctgagcgtggttctggacggctgcccgatgcccagcgttggaaccggcaggagggtggctgagcgtggtttcggacggctgcccgatgcccggcgtt

SEQ ID NO: 102677 - DNA, 122 bp, Homo sapiens
acttgcgccgaaacagtccccgttttgtctccgggtctgggtggtggcattttctcgcggcgatgtgtctgtcggagcatggagcaactttctgctaaagggaagccagcggagagcggggg

SEQ ID NO: 102678 - DNA, 122 bp, Homo sapiens
ggtcacttcacccccaggagcctcgatttcctcctatggaaactggggatctgtgaagggcgtagttctgagggtttgatgagatgatctgctaaagactttagctcctggcacacagtagg

SEQ ID NO: 102679 - DNA, 122 bp, Homo sapiens
ttacggaacatcctggcccttcctgtggagcaggctttcagagcagttgggctctgcctgcgtctgtacaacttccccctccccatcctcggtgtcatactttacttggccccaacaccacg

SEQ ID NO: 102680 - DNA, 122 bp, Homo sapiens
gcgcctgctcgcccatttatgggaggcgggcgctatccccactttacagccggggctcgacgaatcaaggccacacaggcagtgggagcaaaggcaaagcccggcaggtgtggggctgggtc

SEQ ID NO: 102681 - DNA, 122 bp, Homo sapiens
agctgtgtgacctgaggttttctgtggctcagttttatctgtaaaatggaatgataagaccgcctacctcaaaggggtgcagttagtgctatgagaatgttagctgctgttattcagaaggg

SEQ ID NO: 102682 - DNA, 122 bp, Homo sapiens
cccgccccctttccttggccgaagaccagagggtggattttggatctggatcttgaagggcgaactgctagtgtcgccctggtggaaacactcagttcaaatcctgctagcatcagaaaatg

SEQ ID NO: 102683 - DNA, 122 bp, Homo sapiens
tcttgcccacacctagagtgacagctgggggttctcagccccactgtgtcctggacccaacgtgctgagccctggacttgtctctggcatggtctcttttaatcctaacagcaacttgatgg

SEQ ID NO: 102684 - DNA, 122 bp, Homo sapiens
cattaaagttgttcttgtcaaaatgattaaaatcctcctaattaccaaagtcatcttatacggtaacattcaacatggttgaccactacctccctcccttttttggcttcgcctcctcttct

SEQ ID NO: 102685 - DNA, 122 bp, Homo sapiens
gcccgctggccctgccagctctgctgagtctgtgaggactggaaggctttggagctgctgcgccgactccgacgtggaaaaagcatgtagtcggggcagcgcctgtttccacaaggaacgca

SEQ ID NO: 102686 - DNA, 122 bp, Homo sapiens
ctttgctaatgactgaccggtgtggatgtataaaagtccagctccgtgatctcagacttccggcctccagaactgtaagaaaataattttttgttgtttaagccatccagtctgtggtattt

SEQ ID NO: 102687 - DNA, 122 bp, Homo sapiens
ctagggctgcggctgctgctgcctggcgggcacaagccgggcggcggtgcgcggggggtgcgcttacataaccgctcgccgcgtcctgctttctcgagcgctcctgcaccgtggggtggcgg

SEQ ID NO: 102688 - DNA, 122 bp, Homo sapiens
acggggccaccccagcccctcaccaaaggatgagtggggccagctctgcacctactggctcgctccagccagggacaggtcgcctgggatcgcgtgacgaattccacccggctcgccaggca

SEQ ID NO: 102689 - DNA, 122 bp, Homo sapiens
tctcgtctgtgctcagcagcagctgtgacaccttcaggccgaatggcttcacagcctcatcggagcgtaggatggaatctcggaagcggtccaggcgcatgaggctcagccccatcccgcgc

SEQ ID NO: 102690 - DNA, 122 bp, Homo sapiens
aggggaggggcgcaagttccaggcaacggaagcagcacatacaaggaccctgtggtgcaacgtgcctggtgcctcttaggaaggccaaggcaccaggagggtgcagggtcccgagaggcctc

SEQ ID NO: 102691 - DNA, 122 bp, Homo sapiens
gccgagggaggggctaagactgttgattgactcaagaagtcacttagcgtcatgagggtccgggtagtctggtaaggggtcgctggagagtgtgtcgcccctctcccccaaccaaaagcttc

SEQ ID NO: 102692 - DNA, 122 bp, Homo sapiens
tcacccattcctttacaaaatcagaatccagaaagggcaggacaccgtctcatttgtcttcgtgtccccagcaccccggtaagccaggcataggtagacttttttttttttttttttttgag

SEQ ID NO: 102693 - DNA, 122 bp, Homo sapiens
ataagccaccacacctggcaattatcaacactttttaatctcagtgagatggggaaccatcgaagggttctaagcagagaaattttaaaagaatcatcctggctattttgtggagaagaaac

SEQ ID NO: 102694 - DNA, 122 bp, Homo sapiens
tgatgtttgataatgaataaattaggataaaatgtgaatgcaccctctgtaaggacccagcgggaaacattggctgttgagccagatctcaatcagcaaatgaaaggggttcattttggcat

SEQ ID NO: 102695 - DNA, 122 bp, Homo sapiens
tctggatctttcagtggtgactcctttctccttgaagcactaaactctcctgggcacgatcgccacactcccctcctgtctggtggcttctgttctttcttttgtctgatccctgttctcta

SEQ ID NO: 102696 - DNA, 122 bp, Homo sapiens
acctcctcctatcccaccttcctctcgctggatcccagctacagttggctccggataggacgcttggctggagccagaggacgaggtagctcctagcctaggaatccttatctgctttgtaa

SEQ ID NO: 102697 - DNA, 122 bp, Homo sapiens
ggcgtgcgtcggcgtcctgggggcgtgtgcctctgtggacacctttgaggtgagtgtgtgcgcttgggccctgggagcgccccctaggtgtgtgcctgtgtgaactcctgggtgtgtgtgtc

SEQ ID NO: 102698 - DNA, 122 bp, Homo sapiens
tgtgtgtgagttgggtgtgcacctgcatgtgccccaggcctagggagtcccgcgcccggccgcactccttgtgttgggcatgagctgtgagcagagtgagggcctttatggggctgttgggg

SEQ ID NO: 102699 - DNA, 122 bp, Homo sapiens
ccgtgggcagccgggcgtcgctctcccgccgggtctgcagctccatctcccacctcttcccgtgggcagctctttgcgtcgaggccgccttcagcttgtggttcccagactgcaggtgcgtg

SEQ ID NO: 102700 - DNA, 122 bp, Homo sapiens
aacttgtaggaactaagattcagtctcagctgtctctgggctagtggccttctgactttgcgttgagcccccaaaaaaggcaaatactacaacacaaacccagggcacacatacttttatat

SEQ ID NO: 102701 - DNA, 122 bp, Homo sapiens
tggctcctctctttgcccaagcccatccccccttacaggaataatagcatctgagggaagcgtcagttgtggctgcagcgccgagccctgccccagctcacctcgatgtcactccatacaga

SEQ ID NO: 102702 - DNA, 122 bp, Homo sapiens
gctgactacgttgagtggcaagtggagagtggctcgcagctcgaggacctgcttcgggttcgtctggggccttttctgaagaaaggagatctgtttgatcccctgtttacagaattagagct

SEQ ID NO: 102703 - DNA, 122 bp, Homo sapiens
tggatcgtttggctcaagggctgatagtggtaggggcgtgtgtatggaggcgggggataccggatggtatgagatccagctgctcctggatgaagcaaaatattctgtggattaaaaaaatc

SEQ ID NO: 102704 - DNA, 122 bp, Homo sapiens
aaggaaagcagggatcgggcactgcccgagggcagatacttgggctttggtgttgtccagcgcgctcggagtgcgctgcctcgctcacgcggtcccaggccccgcttcttcaggcagtgcct

SEQ ID NO: 102705 - DNA, 122 bp, Homo sapiens
gggactaataacgcctgccctatctttgcctctccgagggcagcagtgcagcccgtggggcggagcccgggcccaaattggagcctccgccttgcgctttcaggataaacatagctgttttg

SEQ ID NO: 102706 - DNA, 122 bp, Homo sapiens
cggagctaagcaccctgtagatcctgacaacagccctcccgtgatcccacaagagagacacgattctctccaatgtttaaaaaggaaagtaaaagtcaatggttctaagtagctcacactga

SEQ ID NO: 102707 - DNA, 122 bp, Homo sapiens
ggtgagcgtgcccgtcttgtcggagcagatgactgaggtgcagcccagggtctccacggacggcaggcttcgcacgatggcgttcttgcgtgccatgcgccgcgtgcccagtgccaggcatg

SEQ ID NO: 102708 - DNA, 122 bp, Homo sapiens
ggtgaaatgcaaagacccctgtgaaagcgttgcccactgtgcggcgtgcggcacccagcgcggaaccgtcctaatgggacgctgagacccagagggcgcccagggttttcccactgcggccg

SEQ ID NO: 102709 - DNA, 122 bp, Homo sapiens
ccaaggatgaaaatccacagccttttctgatattagttctttttgtttggaatatctttccgactcttattcatctggataacttatatacattcttcaatatttagctgaggtgtcttatt

SEQ ID NO: 102710 - DNA, 122 bp, Homo sapiens
gcctcccgactggggtggggcagggggcggggccgcggggcgggaggcgcgagcccggagcggcccgggtgcgggggacaggggcgcatcgccgtctctgcacccccgccgaccgctccggg

SEQ ID NO: 102711 - DNA, 122 bp, Homo sapiens
cggaaaaggcggagacagaggtttcgttcccgcccctccaattcagtctccaaaaaggtccgcataattgatatataaggggcttcagtgtgtagcaaagttgcaaaagttaagagttgttg

SEQ ID NO: 102712 - DNA, 122 bp, Homo sapiens
ctctggaaaatgtacacaatcttgtgcacaacacgagagttatggacctgggttgagaaacgctgctttcttttgttcccccttggtgacatcacttaaacccagccctctcttcgctgata

SEQ ID NO: 102713 - DNA, 122 bp, Homo sapiens
caccatggctgccactgtcctcccacagccaacccagccatcagttctcattgcccctctcgcccattgcctccggcacaagcctggcctgtgatgctgcccccacaccgcctcctccccgc

SEQ ID NO: 102714 - DNA, 122 bp, Homo sapiens
cggccaggcaggatggaggatggaggcagagactggagccacgcagctacaagccagggccgcctggtctcccggcagccagaagaggaaagaaggacccctccttggagccctcggagggc

SEQ ID NO: 102715 - DNA, 122 bp, Homo sapiens
gaatgttgacagcacctgatggtccaggggaggaattgaattcatacagtttggggttggcggggaggaaccgcctagcacagaagaaggaaaaagccagccctcccctcttcccttctccc

SEQ ID NO: 102716 - DNA, 122 bp, Homo sapiens
acggggttgagaggtgccagtgggcaagtgccatcccacaccggtgtcattaccccttggcgacccaggacaggcgcaggcgggagccggaagggctgggcagtaaacacactgcaggacgg

SEQ ID NO: 102717 - DNA, 122 bp, Homo sapiens
tgtgttttttcactcccctgcagttaccggtattgtaagaacaagccgtacccaaagtctcgcttctgccgaggtgtccctggtaagtagtggaagagcccctgcactggttggctctgcgg

SEQ ID NO: 102718 - DNA, 122 bp, Homo sapiens
ccttagacaaagggaggccggacggcgggtagaagcccttcatgatttgcaaggcaattacgtttggtttcaggaatgcaagaaaggactacatcacagccaagtacatcgagaggagatac

SEQ ID NO: 102719 - DNA, 122 bp, Homo sapiens
cactcccaggggtctggggtttatagtgctctgaggtggcggggaattgacaggcacttgcgtccacacccaggccagacaaaggcaagtctaagattagcctgctgcaggggggccgtctc

SEQ ID NO: 102720 - DNA, 122 bp, Homo sapiens
gtctctcttcgtctgatgtcgagtctacaacctaatgctttgaagacagactgacttccccgtccttggtcagggggttgctgctgcgtggggggggcggtaaccataatcttgcccccgtg

SEQ ID NO: 102721 - DNA, 122 bp, Homo sapiens
aggctgtgatgctatcctcgcccgcagatcacaggacagacattctcggggacaactttgcgaggccatgtgctcgtcccccttaggaaggaagagggagaaatccctgcggctcggttttg

SEQ ID NO: 102722 - DNA, 122 bp, Homo sapiens
ggaggccgcagcctgtcctgtgcgctgtgggaagttcagcagcatcctgacctccatccccgggatgacagtcacgccacccgccgtgacaaccaagaatgtctcctgacactgccacatcc

SEQ ID NO: 102723 - DNA, 122 bp, Homo sapiens
gctccaccgcgaggggtggagtgcagactgctagaggaggagaatgccatgctcaggaagcgggtagaggagttaaagaagcaggtcagcaacctgctggccaccaatgaggtactactgga

SEQ ID NO: 102724 - DNA, 122 bp, Homo sapiens
cacatccgggcacagtaccttcccttgaacttatttatgacgcagattccattactcacacgttttgctgctgaccttctccccaccatcaccctgttcaccctgttctcctgccgcactcc

SEQ ID NO: 102725 - DNA, 122 bp, Homo sapiens
agccgccattttcgctgcgccgcgcagcgccctagacgcgcttacccgacctgcgcgggccggaccccgccttgcacacgccttcctgtccgcctttccgaggccccgcctcccggccctcg

SEQ ID NO: 102726 - DNA, 122 bp, Homo sapiens
gataatctaaaagtcggcattttaacatactgtatagcaaaggagaacactactttcccccgaattctttcacatttcttcattgttctgcaagttgcctgttgaaggacctctagggcacc

SEQ ID NO: 102727 - DNA, 122 bp, Homo sapiens
gagggcgcaggggagacccccggcggacctctaggcgtctgatcccagcacagagcgcgacgggcatctgagagtgcaggaagaactaactcagggactcggccagagaaatgggccgaaat

SEQ ID NO: 102728 - DNA, 122 bp, Homo sapiens
gaacaccccaccactatctccacctggttacggagaaaaggccatcaagggtatttataccgttgcctttcctcaacggttgaggcacctgggaagaactgaacccacctcacttgccctgg

SEQ ID NO: 102729 - DNA, 122 bp, Homo sapiens
ggggaggagccttggagtgtaattacctgtcatctgggccaccagctccactggcctgcccgttgccgggcctggactgtcctaggtgaccccatctctgctgcttctgggcctgatggaga

SEQ ID NO: 102730 - DNA, 122 bp, Homo sapiens
tttaccagactctcttcctggtaatttctcctgtctcttttcccctccccaacctactttcggcagtttggaaggctggagatttttgttaaggacactttacactaatctcagttaaccgg

SEQ ID NO: 102731 - DNA, 122 bp, Homo sapiens
agtccctcctaaattcattacctacagcaacaacaactagcaacaagtaacaactggctacgatcctaacaactaatgacagggacatttatctccctcatgaagaaacggtcccaggacca

SEQ ID NO: 102732 - DNA, 122 bp, Homo sapiens
aatattttcattataaagttgagaagattactattttctctttctttctctgtgtgtattcgtggataatttcttttagaagaacagtcgtattctatgtactgtttttattatctacttgg

SEQ ID NO: 102733 - DNA, 122 bp, Homo sapiens
caatcaaggtgtgtggttcgtgtggggaaggtcccagcttccgcaggtgagctctggcaccggccttacctgcactgatgcacctggcccttctggtcagttaggatgaagtagtggccatt

SEQ ID NO: 102734 - DNA, 122 bp, Homo sapiens
gtcatgaggggaggcctggggcagcagcagagggtgggggacgtggccctggcatcttggcgaatcctgctctggagacagggtgggcacagctctgtggtcagaggcctgggggccactgc

SEQ ID NO: 102735 - DNA, 122 bp, Homo sapiens
gcctcttgcctggacggcgtgcagggtgctagagtgcgtcccagtgcaaagccggaggtgcgggggccagggacgccctgcctgggctgctccgggctgcctgtggagggctgactgcagga

SEQ ID NO: 102736 - DNA, 122 bp, Homo sapiens
tgagacttttgagcaaaggctgggatcagaaaggaccaggagcctgtgcctgcgctggagcggggggaagcggcgggaagcggcgggagagaggggagacagggtcaggagatgaggtgagg

SEQ ID NO: 102737 - DNA, 122 bp, Homo sapiens
tcctagagcagtgtgcttttaattgctcctttaatatctttctcttttgtgcctttttagcgcgaaaagtgtatgggaagactaggtgctcgttagcggctcggttagaactacattgccca

SEQ ID NO: 102738 - DNA, 122 bp, Homo sapiens
gcaaaaggaatgaccaaaagggtaaccaggtgctgcggttttcaacatctttgaatgagtcgatgtctcagacccttcatagcctagaatgcatgggcatagacactcctggttcttcacat

SEQ ID NO: 102739 - DNA, 122 bp, Homo sapiens
tatctttcactattaaagactcaagtgacatattttttcaataaagggcaattttgtctacgttgaaaatctgtggtttggtgtgttaatcttcaccaattatcttggctagattgtttgga

SEQ ID NO: 102740 - DNA, 122 bp, Homo sapiens
attctgatgactaaatgaaatgaaatgggcatatttgttaaagtcagctgggaagccacacgacttggttagttcctgagttcataaatttatgtcagagcaagaggagcagtggaagctca

SEQ ID NO: 102741 - DNA, 122 bp, Homo sapiens
tgggacacacagcctgactttgtgctcagctgagggaaacccctcgcccaacaccaaaaccggcgctggttcatttctctgtgcactctgggaaagccactgcccctcagaccgcagttgcg

SEQ ID NO: 102742 - DNA, 122 bp, Homo sapiens
acactcacctcttccggagagctgttcccaattcaccaaccaaatcccgatgaggccccacgtctttggagttccagttccaagacacaggactcggccagtttgtgaagccttcgtgatgc

SEQ ID NO: 102743 - DNA, 122 bp, Homo sapiens
gaaaaatgggaggtataataggacgcaatttgaaatgcgcacacactgttgagggaaccacgtgagtctttaagaagtatttcctgtccttggagtctgcagaagccttgggattgtcatca

SEQ ID NO: 102744 - DNA, 122 bp, Homo sapiens
cttcccctcccccgagttcagttctaacagcccagggcggggcttgcttaccatagccagcggcacaactccaatcaagtcctttgggctcacatagatcttggacactcccaagtcagacg

SEQ ID NO: 102745 - DNA, 122 bp, Homo sapiens
ctctgtggcgctcgttttacgtcacttccttcacggatctctctccgccccgtcttctcccgtcactagttgatgacgcacccatggcgcctggttgtctagacgagccggtgtaccgactc

SEQ ID NO: 102746 - DNA, 122 bp, Homo sapiens
caaacctcaggcttgttaagagaaaatgctccgcaaggaactaaacacagaaggttctaacgctgagccaagactgggaaacgaactctgggaactcaccccaggctccccaagaacatcgc

SEQ ID NO: 102747 - DNA, 122 bp, Homo sapiens
gggacagcacgtggaggttctgacacccacttccggaggaaagggcgttgctgcacgccccgcgggttgccaaggtgattcaattcgcttcccacaaagaggtccggctcctccacttccgt

SEQ ID NO: 102748 - DNA, 122 bp, Homo sapiens
ttgcacccttctgaatcaaggaggggagcggaagaggaaaccaaggcttggggagcaaaccgccgcctgctctggtgtccttcagggttgtccagccatgagacgggtgcagggaggcagtt

SEQ ID NO: 102749 - DNA, 122 bp, Homo sapiens
gaaaatataccagggcggaggggaatacacgcaaaatataccagggcggaggggaatacacggaaaatataccagggcagagggggaatacaggcaaaatatttcagggctgaagagaatac

SEQ ID NO: 102750 - DNA, 122 bp, Homo sapiens
aggcatgggtgacaaaaggcgctgagatcattttgccaaatccctctgaacaaggccccacggtatggactcttctgtgctaggtaaacaaactccctgttcctatggagctcacgttcttc

SEQ ID NO: 102751 - DNA, 122 bp, Homo sapiens
agggttgcttctcttggtccaaatggggactcgggttgcctgggaaatatctcagtaacccgacctccgctccaaagcgcccttgcggcgtccggtcaggcgcggggctttcctccagagct

SEQ ID NO: 102752 - DNA, 122 bp, Homo sapiens
atgtctgtgcccacccggcttccagccagggccgtgctggagccaccgaggaagccggagcggctgtcgggacccaggctgctccctgtgcctcgtgcccctcggacctggccgctgagggg

SEQ ID NO: 102753 - DNA, 122 bp, Homo sapiens
tgaggctcccccacccgcccctcatctacatggtgtcagactctgcctggcttgcttcctcgcgtgtacctctcacagacgtgacccagcaaagcccccgcactccaccaagcccctagaat

SEQ ID NO: 102754 - DNA, 122 bp, Homo sapiens
agcaccccccggtgtcctgagcacagcctggtgattctgagatccccctggtgtcctgagcgcccactggtggttctcagcactccctattgtccttagcagccccctggggttctgagcac

SEQ ID NO: 102755 - DNA, 122 bp, Homo sapiens
cgggcctaaactttggcagttcctttgtctacaaccttgttaatactgtaaacagttgtacgccagcaggaaaaatactgcccaacagacaaaatcgatcattgtaggggaaaatcatagaa

SEQ ID NO: 102756 - DNA, 122 bp, Homo sapiens
agtctggctcaccgtgcttttcatcttccggatcctcatccttggcacggccgcagagttcgtgtggggggatgagcaatccgacttcgtgtgcaacacccagcagcctggctgcgagaacg

SEQ ID NO: 102757 - DNA, 122 bp, Homo sapiens
ctggtcactcgctcgtttcctctctggccctgttctgtgtgctgagctactaacagaaaccgttaactcgacacagagtcaaccctatgcacgtgtctcacaaatgcctcaagctctccatg

SEQ ID NO: 102758 - DNA, 122 bp, Homo sapiens
ggctcaggagaaggggtagaacgggagggcttcctggaggaaggcttcctaaccagagaccggggtaggagtttgccaggcaggtgatgctggccagcttctcttgccattttccttttctt

SEQ ID NO: 102759 - DNA, 122 bp, Homo sapiens
ctatcattgaagtcccacaacgtgagttaaggacatgtccatttaaaaatcgtgacctgccgttatcttctgggccctttatatatgaagaaatgccaatatttagcatattatgcctggat

SEQ ID NO: 102760 - DNA, 122 bp, Homo sapiens
gggctgttgctgggagcaaaggatacctttgcccagttctcaccaggggacttgtagtctcgcaagggagggatgttttctgatttgtctacccaaaggccgccctttttctaaactcatgg

SEQ ID NO: 102761 - DNA, 122 bp, Homo sapiens
ggtggggcggaggctggagggggtgggcctaggatgcggaggcggcagctcgcgtgggggcgtgaccatgctggcgggggcggggccggaggcgggcggtttagagagcggggcggtctgcg

SEQ ID NO: 102762 - DNA, 122 bp, Homo sapiens
tctggcctagacaggatttaaacccaggaagggaagccaaggagagacgagaaccagggacgaccagcaagtaccaaggtctgcggcaggaggagaccggctcacaggagcagcagcattgg

SEQ ID NO: 102763 - DNA, 122 bp, Homo sapiens
tctggtggtagacatatgggggaggaggacagggtagcgggaacagcacaggcaaacgtccggaagtgggaagtttcactcagaatggatacgggaaacagcaacttgtcccactgggttca

SEQ ID NO: 102764 - DNA, 122 bp, Homo sapiens
acgggccccccactcagtgaaaagcatcctctcactcttaggcttgtcatgatcatgcaccggcagcgtccccctcggttacgaaccccattctagatgacaaagcactagtaacccacgta

SEQ ID NO: 102765 - DNA, 122 bp, Homo sapiens
ccttaggatctcatggctccagacagcctgactgtaggagggttcgcaactgggcgccttcgttccacagcgctcccatcaacacacccactcggtgccacagtgctacccctagcttcaac

SEQ ID NO: 102766 - DNA, 122 bp, Homo sapiens
gtccccaaatgacactcggaggccgcctccctgggctccggtgctcggtgccgggaggagcggcacggctttctaccccgcctcaggtgcgccagcacgttttctgggcagcatctgtgtgt

SEQ ID NO: 102767 - DNA, 122 bp, Homo sapiens
ttctctgggcctggcctgtcataggtgcttcaggtttccccatttgaaccagataccagtcgggttaccggatgtttgcttaaaatgagtcataggcttcctgctattcctgtgctgcttcc

SEQ ID NO: 102768 - DNA, 122 bp, Homo sapiens
gggcagccagagccccgggctctcgaatatggtctccagcagcatcaccaagtgtgataccgacatccagaagatcctctttggggagattgtgctgtcggggggcactaccctgttccacg

SEQ ID NO: 102769 - DNA, 122 bp, Homo sapiens
atgtttgtcccctctccccaaatgaacatatgtatattgaagccctaatctccaaagtggcggttttagggggtggggcctttggtaggggattaggtcactagggtggaggcctcacacat

SEQ ID NO: 102770 - DNA, 122 bp, Homo sapiens
tgttcaaggacacaaagccaacatgtgttagaaccaggacctgccgggtatggtggctcacggcagtaatttggcgcttcgggaggctgaggtgggaggaccacttgagcccaggtattagg

SEQ ID NO: 102771 - DNA, 122 bp, Homo sapiens
ccaggagagctcccctagagtggggccttgaggggagggggcaggggcttcgtgactggacgggggtcctgtccctaaccttgaccgggccacagtctctgtatctcggggtcaggggccat

SEQ ID NO: 102772 - DNA, 122 bp, Homo sapiens
catgtagataattcacggcattaccaagtcaccacgagccccaccctcacctctgtcaaccgaggacccagccaggcagtgccatgtggtctcccaggcacgcttctcaacaccggctaccc

SEQ ID NO: 102773 - DNA, 122 bp, Homo sapiens
ggcgcccggaagcctttcttttgaaagtccccgtgacccctagcgctgagacaaatgcaccgtgtcgctgcccagcggccggcaattcccgcgcgcgccccccagcccccgtcctcccaggc

SEQ ID NO: 102774 - DNA, 122 bp, Homo sapiens
tcctatcaggtgtaaatggggaatccccatgcactaacaatgggccagtgctcctaatcccggtgccctactgcgtgtttgcctggactggcctgaggcagagagggaggttccagtgatat

SEQ ID NO: 102775 - DNA, 122 bp, Homo sapiens
ggaagcaggatggaaggatggaagctggactgaacagcttctggggttcccctacagtgccggggatccacagtgattgtttcttctacaatcactgagagaatcactcccaggaccttgcc

SEQ ID NO: 102776 - DNA, 122 bp, Homo sapiens
agtggggtccctctggtgcctgccaggtgcccaagagagcaccaagccccagcgggctagcggctgagctggccagctcagcggcccgcagccagggctgcctcctggcgacggcacgtcct

SEQ ID NO: 102777 - DNA, 122 bp, Homo sapiens
ggctctgcggcctgtcaggagatttacacccgactcttaacagcctcgcggaatcgcaggcgggtgccgggcctggggtggtctgctgtgaatcggccccctgtgagcagatgaaagccggg

SEQ ID NO: 102778 - DNA, 122 bp, Homo sapiens
accatgcttcagagggcaatggggcacccacatgccaagcctggtggccctcctcagcaacggaactccaaggcaagaaggctgagaatgaggcccaggaggatgcggtgggccccaggacc

SEQ ID NO: 102779 - DNA, 122 bp, Homo sapiens
ccccgggaccggcattaagtagccgctccaaaggcttctcctgctgccatggcgacgctccgcccccataaacagcttccgcctctgccattggccagcacgtctccaaggagaccgcgggc

SEQ ID NO: 102780 - DNA, 122 bp, Homo sapiens
tgctcaatgggaatagaacccacaaatggaataggtatacttttctcaggatagaggcaacgatctgtgcttgagaaagccaggggcagagctgtgtgatctgtgtctctcagctgcctgta

SEQ ID NO: 102781 - DNA, 122 bp, Homo sapiens
atggtatggcccaccgaccagcggtgagggttggctttgctggaggaaaactcaatggggcggtcagggtcgtcctcttcctcggcggcagggtgggcccgatcccgggaaccgggcaacgg

SEQ ID NO: 102782 - DNA, 122 bp, Homo sapiens
ggcggggcccgggcctgcggagaactccaggttccttccgagtcttccggtgaaggcgggcgcgggtagggggtccccgcgtttccccagcgcaaggccgcgtcccgctcccgcccgcgccg

SEQ ID NO: 102783 - DNA, 122 bp, Homo sapiens
cacgcccagcacttgggttctcctgttggcatcctccggccagatgcattcatcccatttcgcccggcccgtttgtctctgtccatccgtcaagctttcttgacttcttggtgcattttcag

SEQ ID NO: 102784 - DNA, 122 bp, Homo sapiens
atgttgctacaagagactcacttcacctttaaagctacacacagactgaaagggaagggacgagaaaagatattccatgcaaatggaaagcaaagagcacaggggtagttatactagacaaa

SEQ ID NO: 102785 - DNA, 122 bp, Homo sapiens
ctccatgcttcatacgtaaggcttccagccctgcccagctggggaacacacgcagaatggcggtcacccagcaggctgggagctgccttctctccaaaagtctggctcctgaacaccctcct

SEQ ID NO: 102786 - DNA, 122 bp, Homo sapiens
tcaggagcgtctctgcctggccgcccatcgtctgggatgtgaggagcccctctgcccggccgcccactctgggaagtgaggagcgcctcttcccggctgtcatcccctctaggaagtgagga

SEQ ID NO: 102787 - DNA, 122 bp, Homo sapiens
ggttgcacaaccttgtggctgtatgaattgccactcaattgtacatttaaaaatggtttacgttatgtgaatttcacctgaaaacaaaaagccaaaccaatcaagttccttcccaccttaaa

SEQ ID NO: 102788 - DNA, 122 bp, Homo sapiens
ttttgttttgccattcattgttttattttttagtgacttattaaaattcttctgaattctcgagactagcatttatttggaatccttaggcaaagattgttacagtgtcagaagaaacctgc

SEQ ID NO: 102789 - DNA, 122 bp, Homo sapiens
ccggcttcttttcatcctcctccagcactgtgagcttggtgatgggtggcgtgccaaggccgggcagctggaaggcatcctgcacacaaggatgtggggtgagagcacggctcatttcagat

SEQ ID NO: 102790 - DNA, 122 bp, Homo sapiens
gtgtgcagaaggaggaccgactatggtgtggattctggaggttctgtccagggtgaccagcgcccagggccaacaggccttcattatgttcattgtgtgtcatttgatgtaaagagtgtcag

SEQ ID NO: 102791 - DNA, 122 bp, Homo sapiens
tccttctcctttcttcttggcaacccgataaggctagcacctgggccttctgtggtctgccggtattataggcttcttgtttgatccttcatcaggaagaggttactttgcagttaacaaac

SEQ ID NO: 102792 - DNA, 122 bp, Homo sapiens
caaagatgacatttgccatctgtgtttgaataatggagaggtagctggaaacccaacctacgcacagccttgctagtcacaaaaaagtcacgcaacatgacttttgcccaccctagttagag

SEQ ID NO: 102793 - DNA, 122 bp, Homo sapiens
gtcatgggccaggccaggcctacctggaagaggcgcgtggctgcggggcaaggagtacttcgtcctgcatgtttctctcatggtgtggggcagaaggtggcccaggaacctgctgtcgaggt

SEQ ID NO: 102794 - DNA, 122 bp, Homo sapiens
acgtcgctgctcttcagggggcaaattaggatcagggcgcatatgcgctctaaatctgtgcgtagattcctgctgatccaaggagttatctgggaaatgtaagaaaataaagacagctgttg

SEQ ID NO: 102795 - DNA, 122 bp, Homo sapiens
tcagctgttggctcagcctgaagatcgctgggataatattcctggggtccgagtataatacgcccggcatacactttcccatgcattagggtttggaagttggataacaaatatattgttaa

SEQ ID NO: 102796 - DNA, 122 bp, Homo sapiens
aaccaatgataggataatgaactctgggtacaactcacctagccataatggggagttcatcgtatcccaggtccagactggctttccggccaggaggtgaattgtcttttttccaaggcaca

SEQ ID NO: 102797 - DNA, 122 bp, Homo sapiens
gtcttcaagttttcagctgtttctttctttaaaacacacctcacagattacttttgtgtgcgggtgttcagttacgatttctgtggcgtcccagagatgctccggttaggttgccgtctttt

SEQ ID NO: 102798 - DNA, 122 bp, Homo sapiens
acagccccgtggctcgtggggtgaaggacttttcagtgcagcttacttaaagctgccaaacgtagttccatttgtaaaagtctgcctgtctttggaaagcatgctgaagagcccctgcacac

SEQ ID NO: 102799 - DNA, 122 bp, Homo sapiens
aaatagcgttttcacccattagcagaattctctgattcatgagcagcactaagtagataccgtgtgcgtgcattttgaatgaattcatttctacactattttataggagtattgaatagttg

SEQ ID NO: 102800 - DNA, 122 bp, Homo sapiens
gtctgcaaagatagggatttaacagcactcatatcttcatgttcataaaaaagtcctacacgcgtgatgtacgtctagatctttccttttgtcacaggatatagcacggtagttacggatat

SEQ ID NO: 102801 - DNA, 122 bp, Homo sapiens
tcggccggcccggagcctgatttcgcatttggaggatgtgatgtcacccgaagcccccgccgaggagagtcaccctccttttcgcggttgtcgccttccagcccggcgaggaggctggggcc

SEQ ID NO: 102802 - DNA, 122 bp, Homo sapiens
tgtcagtaggtctgtctgttctactagagcactgtcccagcagcaggaggagcccggtgccgggggagagggtgggggaacagtgagctcagcattttattattttagctctggccaggtgg

SEQ ID NO: 102803 - DNA, 122 bp, Homo sapiens
gaggcccacaaggctcctctcaccttcctcctcctccagccgcccttcaccgcagagaaccggaagaaaaccatggataagatcatcaggggcaagctggcactgcccccctacctcacccc

SEQ ID NO: 102804 - DNA, 122 bp, Homo sapiens
cagtctcggaagaaagagcggctggggaagccgcagccccgggtcccagtggccgccgggcgcctgcccggctctgtgaccttgagccaggcgctgacttcctggtcctcagtttccccttc

SEQ ID NO: 102805 - DNA, 122 bp, Homo sapiens
atttggaggaaagcagggaaaaggaggtaaagtcaacctatcccgttttttttttcgccccgcatgaggggttacttcctataaaccgtcttgctattttaatgcatgttgggtaagctaca

SEQ ID NO: 102806 - DNA, 122 bp, Homo sapiens
atccacacggataagagttttaaatataagtatgtccaactattgcctaagccacacttacgctaggaaaaaaaaaatctttgcgtttctgaaattgaaatgtgtctgcacagttctttatc

SEQ ID NO: 102807 - DNA, 122 bp, Homo sapiens
cggcccagcaagttgagtttgcagagatgcaggttatcgcagggtctctggcagtacttgcgacggcagacccgggctcgagtggtggccaccaccgatcgggtgatcccggcctcgccgcc

SEQ ID NO: 102808 - DNA, 122 bp, Homo sapiens
ggttggacacatgtcctcctcctgtccctgcagatgctgaccctggaggaagacttgtgtcgggcccccaggccccaggccagtgtccatcagccaggtgctcagctcccagtgcgctgaag

SEQ ID NO: 102809 - DNA, 122 bp, Homo sapiens
tcacctgcgcacacctcggcccctcacctgcgcccaccttcccctggcctcgcttgcgcgcgctgctccacgccgcctaccctctagccaggggtcggagtcacccgcagggcaggggcgcc

SEQ ID NO: 102810 - DNA, 122 bp, Homo sapiens
gacacatcttaaccgggcacggaggtcaccacgagataacagcaaaggttcagatatccacgtgggggccaccccgcctgccccagcacggagcaggcagcctgcttcagacacctgtgcca

SEQ ID NO: 102811 - DNA, 122 bp, Homo sapiens
gaaccctgggggaggtcggtgctggaagcgctcatctccacctccagtctgggtgcgctgcgtgagtgacccgaaaggaagatgattcttgccgtaggaagcccctgccaggacagtcacca

SEQ ID NO: 102812 - DNA, 122 bp, Homo sapiens
gcataccatccagtacatggtttcagagaaccctgaacagctgatgcccaccctgtacaccgtgaagaacccttgatccagagaaacgacagcatttgggtaaagcagggaacagctcgtca

SEQ ID NO: 102813 - DNA, 122 bp, Homo sapiens
acaactaggagtgactgaggagaacatcctttgaatctgccatattgctgttatttctaacgcagctgctttcatccaaacggaaggttgatccattctgtgggaagttagggcaattcccc

SEQ ID NO: 102814 - DNA, 122 bp, Homo sapiens
cacccccctcccttctctcccgctagaactttgaagtttgccgtggtgtttctagggatccgtattttcaaaataaaaattgcgggtattttctgaaggaggaaggggtgggggtgggggtg

SEQ ID NO: 102815 - DNA, 122 bp, Homo sapiens
gattatcccaggggccatcagcaagcagagctggaaacctgcaggtccgggtgggcccagcggtgccttgtaccttgatgggcagaatgacttctttgcttccaacaggaagattggccccc

SEQ ID NO: 102816 - DNA, 122 bp, Homo sapiens
tacgtagtagcgcaggtagaaatcgctagccacagccatttttgtacccgggaagcccgccgaaaacgcagccaacgtgtcccccggcgccttgcagtgacgtcatcgcgcggaataagtgc

SEQ ID NO: 102817 - DNA, 122 bp, Homo sapiens
ggaactttggtgtgaggaaccagggcaacttttctgtggttggtactgttcttgctgccacgcaggcggagaaggccgtggcaaactttgacaggacggagtgggtgcagatccgaagacta

SEQ ID NO: 102818 - DNA, 122 bp, Homo sapiens
agggaaccagggggccttccctacacagagcacagctcccaccctgcagcaccgcccagccggggccaacaccagaggacgccatcctccttaaggccacaaagtgtatggtcctagggcat

SEQ ID NO: 102819 - DNA, 122 bp, Homo sapiens
ccatgtatcttaccttcctcttctccaggaagctcagcccggagccagaaacgggaggcccgcctggacaaggtgctgtcggacatgaagagacacaagaagctggaggagcagatccttcg

SEQ ID NO: 102820 - DNA, 122 bp, Homo sapiens
gtgccatggcacctatggaggctttaaagaacaaacatgccctcggaagaagttactcggcgaagtcgacacacacatctctgagtcagacatttcctcacattgtcccctcatttgtcaac

SEQ ID NO: 102821 - DNA, 122 bp, Homo sapiens
gtattttacagactcagggggtgtatgtgcttgtttgttagatcagcatactactgcttccggatgcagaagtggacctccagtgtatgccttacccacgtggcgaacgttgtctctgacgg

SEQ ID NO: 102822 - DNA, 122 bp, Homo sapiens
gtgacgcataccccactattgcgcacctggccagcggcgcacgctacgcgaacgtcagcgcgcccgacgtgggcacgtcactgctgcccattcccgcaggagcgaccactgtgcgtgagcat

SEQ ID NO: 102823 - DNA, 122 bp, Homo sapiens
gcagttggttatgaatccaggaagatcactgtgtttatacccagaagactgactacatctcgtaggaatcaggagagtcttttgctgttaccacaaaactgtctgttcacaatcctgttcct

SEQ ID NO: 102824 - DNA, 122 bp, Homo sapiens
tcgctgggtcgcacgcctagagagcctccgccgagcacaaaaattatttccggctcctcccggaagtgccgaagctggctactaagggaacttgggaggatcccacctcagccttcgtgact

SEQ ID NO: 102825 - DNA, 122 bp, Homo sapiens
ggctttccagccgccccccgcccctgccagaccgcagcccaaggcacggctggccccacgcgccccaggcacattgactcagactgcccccaagcaagcagaggaacagggatgatacccac

SEQ ID NO: 102826 - DNA, 122 bp, Homo sapiens
gggttcatgagtgtgggtgtgggtataaatctaggggttggcgcactgagcctaggcctgcgcccccgcctccagcacccccaccgaccccaccccgccaagcgcccgagcaaggccaacct

SEQ ID NO: 102827 - DNA, 122 bp, Homo sapiens
tcctcctcttcctcccaggacgtggggtccagcttcaggtcgtacagacgcaggctgtgccgggaggagcgcaccaagtctgcgagcaggggccggccaatggtgaggctgggaatgctggc

SEQ ID NO: 102828 - DNA, 122 bp, Homo sapiens
aggtgccgtccagggcattccaggccagctgagtgtgcagccagcgcccaattcagacggcgccccaggccaaggctggcccgcttagggaccgcgctcgggctggacgtcgcgctcagcgc

SEQ ID NO: 102829 - DNA, 122 bp, Homo sapiens
aagtgggtctccaaattccgcgcccaccccaccgcccgagaagcccactacgcatgcgtccgcaccccaccggcgccccttcctattgagcatgcgcgggagccccacctatttctctctac

SEQ ID NO: 102830 - DNA, 122 bp, Homo sapiens
tttccatcagagccctcggacactcccagcccgggctgagcacgcatcgtcgctccccggcggatacaagggggctccgccatccgctcccgtcagttcggcctccatctcctgggacccgc

SEQ ID NO: 102831 - DNA, 122 bp, Homo sapiens
agaatgcccctcacgcgcttgctggaagggaattctggctgcgccccctcccctagatgccgccgctcgcccgccctaggatttctttaaacaacaaacagagaagcctggccgctgcgccc

SEQ ID NO: 102832 - DNA, 122 bp, Homo sapiens
gcgcccccgcgccaccgtcgcccgcccgcccgggcccctgcagccgcccaggtgccagcacggagcgcctggcggtcaaaagcatacctctgtctgtctttgcccgcttcctggctagacct

SEQ ID NO: 102833 - DNA, 122 bp, Homo sapiens
gtaagcccaaggtccagcacacgaatcaggaaactgatggttcttgggttagcaggaatccgcccagagaacagatgaaagtaacaggtaccaatatcaaaactgcagtgactcaccagaaa

SEQ ID NO: 102834 - DNA, 122 bp, Homo sapiens
gccggggttttaacccttgtttccctggcagagcgccggaggggcgctggtgccggggcgcgaggacccctgcccaagggagccgagatggccaggagcccaaaccatcccaaaggcctcct

SEQ ID NO: 102835 - DNA, 122 bp, Homo sapiens
gcttggggacaattccggtttggttttctgaaaatgcgtagggttgttttcccaaacttccgagctactctgctcttcgtcccaggaaggccaagcaaataaaagtccggggaaagttcctt

SEQ ID NO: 102836 - DNA, 122 bp, Homo sapiens
tggcttcaggagtcccccttagaactttgactgccagggaggcacacctgggacacagcacggttttctctctcttcattccgtttcttagaatcaggaacccagctctggacatcactccc

SEQ ID NO: 102837 - DNA, 122 bp, Homo sapiens
cgggctgctggcggaaggcagtgatgcctgtgccttttcggcagttccagaggcagcactcggcatcaggcggggccaccgggaggacggagcccactccgggaaccggccgcccctgcgca

SEQ ID NO: 102838 - DNA, 122 bp, Homo sapiens
aagtgaaaataaagctgatttagcggagctggcgccggcgccgccatgttaggtctgaggcggctgccacaggcgcgacggatactgtggatcgcctgacagccgcctggggtccgccgctc

SEQ ID NO: 102839 - DNA, 122 bp, Homo sapiens
cagcattccattcattttagacataacagtgcttactttagtctgtatggaccttttcagcgtttaaaacttttttcatctttatattttatttgactttcattcaccacaggccatgagtt

SEQ ID NO: 102840 - DNA, 122 bp, Homo sapiens
gagcaattgcaggaaaacttctgactcgccagaagaaataacccaagacagtctatgaaacgaaactggggttgtggtgactttgatctgcatcattgtagtttaatttctcagttttacaa

SEQ ID NO: 102841 - DNA, 122 bp, Homo sapiens
gccaccgccccggtctcctcttcaattcctatcatcagttacaggagtgagccaccgccccggcctcctcttcaattcctatcatcagttacaggagtgagccaccgccccggcctcctctt

SEQ ID NO: 102842 - DNA, 122 bp, Homo sapiens
tgtcagtttcctccgtctctctcggttctattccaatctgctcatctcccctcccgtccccgctttccccaaggacctactgagatttcgatcccacaacttagtgggtcccatctcaccca

SEQ ID NO: 102843 - DNA, 122 bp, Homo sapiens
ctgagttcccagccttgccatagactcctgtgccccaagagtgatttgaaagcagcagagcggcagaccttcagagactgtgagctggggaaatggtcatctcagtgctagccaacttggaa

SEQ ID NO: 102844 - DNA, 122 bp, Homo sapiens
gttccaggaccttgggcgaagtccacccgcccgagggcagggacgacgcaggccacgccgcggcccagttgctagccaggcagggtggggatttgatcttgccaaggaaatgtgagcgggag

SEQ ID NO: 102845 - DNA, 122 bp, Homo sapiens
cagacggggtggcggccgggcagaggctgcaatctcggcactttgggaggccaaggcaggcgggtgggaggtggagattgtagccagccaagatcacgccactgcgctccagcctgggcacc

SEQ ID NO: 102846 - DNA, 122 bp, Homo sapiens
gggggcctgcacactgctgggttccccgcggcactccccctccacctcgccccgcgccagcgtcactgaggagagctggctgggtgcccgctcctccagacccgcgtccccttgcaacaaga

SEQ ID NO: 102847 - DNA, 122 bp, Homo sapiens
caccgggctgatgtcggccgcggccctgagcagagtggacagggcagccttgctcctgcacgctgctcctggagccacagggccctgcccagccctccagcccctgttggaaaataactttt

SEQ ID NO: 102848 - DNA, 122 bp, Homo sapiens
gtgccagggccgagattcccgcgcttcaagtcccgcagccctggctgcgtcttagagaggcgtgaaaccggatgatgggagccgcttgttggcttagatattccttcaactagaatgacgta

SEQ ID NO: 102849 - DNA, 122 bp, Homo sapiens
catgctgccgcagcagccggggctggcgctgcatgtccgctcgcccaccaggccgcccgccggctcggccagaagcttgctgtgcctcagcagggccacgtcccctgtggctgccatggctg

SEQ ID NO: 102850 - DNA, 122 bp, Homo sapiens
tctgcacaccccacattccagcctcccaagaccattgatgccctgtgtttgcaggcatggcgcgccccgcagagcgagaaatgtaaggaagggcacagggccgagacgcgtggccgcccctt

SEQ ID NO: 102851 - DNA, 122 bp, Homo sapiens
cgaaacgggaaggcgcgccagaaaaggaacaacgcaaagggagcaggcgtgcacggagcgcgaactaaggaacccctctgacaaccccagtccctcggcagttccagagaccggctcctcac

SEQ ID NO: 102852 - DNA, 122 bp, Homo sapiens
ggttaggagcaagatggagccaacaatgtcagatttctcttaatgtcgtaattttgcaaacgtgatttcacagctaagtgttctccttgaacacaggcctgggcaccaggagcctggggctg

SEQ ID NO: 102853 - DNA, 122 bp, Homo sapiens
ggccagagaactctgagcacgtcccctccacttgggggtccccccaccaagaccacaaaacgcaagtcactggctgtggacattctgtcccatctgactctctggggtctgatgaagagcgt

SEQ ID NO: 102854 - DNA, 122 bp, Homo sapiens
ttggagagggaagaggaggaggaacgggagcgggcccggcttcgggagcgacgccaacaacgcaagaatcgggaggccttccaggtatctttgctgtcctttctagatcagagctcagctct

SEQ ID NO: 102855 - DNA, 122 bp, Homo sapiens
ggagaggcgcgaggggcaggggggctgcttggggctggaggagctcatgtgctcgggcctcggaagccaattcctttttcatgacccttgtccaggaccagaagggtgtcgccggggagctc

SEQ ID NO: 102856 - DNA, 122 bp, Homo sapiens
caggacggagcgaggggctgtgggtcggcgcagggacgctggctgctcacctccaggagccgacagaaggtgccttcggcgtcacgcgtccaaccctggggctgatttaaataactaataag

SEQ ID NO: 102857 - DNA, 122 bp, Homo sapiens
gtttgcgccaggcattgtgggaattgaagtccgacgttcacaccggctccgtaaacctcacggcacggagactaggtctcccagaatccatggcgtgacaaacgcagtaatttggcaacaaa

SEQ ID NO: 102858 - DNA, 122 bp, Homo sapiens
aatagtaattcttacttttataagggtgctgacaataaaatgcgatgatagatgcaaaggcgttttgcaagtaaggcattcaattattgttattgtgatgcttatcggaatgggtttggaaa

SEQ ID NO: 102859 - DNA, 122 bp, Homo sapiens
tgcccttcttcctacgtcccttttccctcatgtcgggtcttgaactgactgggaggctcccgtgtccgggctccggccgccctccctgcctgctctgccctgcgctgcttttcccgcggtgc

SEQ ID NO: 102860 - DNA, 122 bp, Homo sapiens
ggggaagggcccgcgggggcgggggcgggtagtcgagatggcttccctggggcgcccaggcggctctggagaagggaggttccgagaattacttaatcctgaacgcccttcagtgccagagc

SEQ ID NO: 102861 - DNA, 122 bp, Homo sapiens
ctaatgggttcgtttcagaagtgcctcactgttctcgtgacctggagttaaccggaacagcgtcttcattcatttctgttgggaccagacgcggagcctgggtgcgcgagccgccctccggg

SEQ ID NO: 102862 - DNA, 122 bp, Homo sapiens
cctcatctggggcgctctttttgtggggtcaccctgaccgtgaggccacagatgcgggcccgtgtgcaccgcaggccatacgtggggttaggtaagtttgaaagtctggacaaggctgtcat

SEQ ID NO: 102863 - DNA, 122 bp, Homo sapiens
tcaaacaccgtcttccagccgaccaccttccctgccccgttcacccgtggggcctcgtaccgcaggccacccacgaaggcgacgggccacacggacaccctcctggtgctgcgcatctacaa

SEQ ID NO: 102864 - DNA, 122 bp, Homo sapiens
tgttttttctttaagacatctttcttattaccttatcgcattcataaggatttgggttgccgtatagaaaaaaagaaattaaagttctatgggtttctaaaatatgtatgagtaaattttag

SEQ ID NO: 102865 - DNA, 122 bp, Homo sapiens
ggcgatgccgccaggtctccaggatgaaccgaagggaggccgatggtggagaatagagcacgcaaggtccctcaccttcactacagctgtcccccggctgccctgccggccactgtctactc

SEQ ID NO: 102866 - DNA, 122 bp, Homo sapiens
gactgagtcctgccaggtcagcgtccagtcctgaggcgcatccagggccgtctgctggcccggccttcgccccagctctggcaccacatgacccggggccgcctgtgcacagctgtgtgctg

SEQ ID NO: 102867 - DNA, 122 bp, Homo sapiens
tcagcccgggttccctggcctacctggcagtgtccttgaatacagaaacctggcaatccccgccctcctccctcagcccccgggtccgattctttctcgtccactagggggagccagtgcac

SEQ ID NO: 102868 - DNA, 122 bp, Homo sapiens
ggggttcctccccccggctccccccgcgtgccgtcgccgccgcccgggttcctctccccccgctcgggcgctccctgccaagcccatgatgtaatggtgtatgttaatcagtagcatgtggg

SEQ ID NO: 102869 - DNA, 122 bp, Homo sapiens
cgtgggagccggcactcagcaccgagtatgaggacatggagctgtcgtccttggtgtcgtcgtcagagatcagcatggaggagcaggccccgttgtcccggggcgaggagtcctccagcttg

SEQ ID NO: 102870 - DNA, 122 bp, Homo sapiens
cccccagccccagtcagcatgcggacggtgaggacgaaggccaggatgacgatccacttccgcttaataaagatccacttccgcttcatgaatagcagccatatttcctctcgcctgtgcct

SEQ ID NO: 102871 - DNA, 122 bp, Homo sapiens
ttcgtggcgccccgagggccggctgctgcggggtcgcgggaaggcgaaggcagttccggacgcggagggcgaggggcggctgcccgcggcccgggatggcgctgccgccgcggccggagctc

SEQ ID NO: 102872 - DNA, 122 bp, Homo sapiens
aggctgaaagtgcatggagggcatcatccacctttagacagctacttgcccacacctcatcgagctctgggcgttgtgccagcatttgaagaagcgatctgttgcaaagcgatccacacgga

SEQ ID NO: 102873 - DNA, 122 bp, Homo sapiens
tgggcacacagcaggccttgcccacctttgtggggaacttgagatgcaccagggtctgcacgatagcgtgtttcgtcggcgtcacatcgtcagccaaggggaagaagcagccgcccttacac

SEQ ID NO: 102874 - DNA, 122 bp, Homo sapiens
taccccgcccccccgtcctgcacacccatcagttccttggcctagttatctatgcgcacgcgcaaaagtcttcggcagcacttgtagttcccgttttcagacagtaagggcgcataggggcc

SEQ ID NO: 102875 - DNA, 122 bp, Homo sapiens
acacaagtaaacaaaaataaaatccaaatgagttaacaacaccctataaactgaactcctcgaatgtgggtaactgctttgctgaacaagaagattcacttttgacatgtgctaaattccct

SEQ ID NO: 102876 - DNA, 122 bp, Homo sapiens
aactccggctccctcaccgccggcgcggccgcgcgacagtcatggagcggaacgccacggcgcagagctcccgcgcacaccgccgcgcctcccagcagccccccgccgacctccgcttcggg

SEQ ID NO: 102877 - DNA, 122 bp, Homo sapiens
agcacctgaacaggagagaaaggagctgagccagaggatgtccaggggtgtctcattttccgcactacactgagcgcccagggctgactgtatcttaacgtgcccacctacttctcacctgg

SEQ ID NO: 102878 - DNA, 122 bp, Homo sapiens
cggtgccacgtgtcatgtcgtgcagcacatggtgctcaggtcagactggtgatgccgacacgctgggctctgggcataactgctccctctgccatcaaaatgcagccgtgctaaagagcagc

SEQ ID NO: 102879 - DNA, 122 bp, Homo sapiens
cagctgagtgaacaggcctttcaaacaccttttccctgctctattcaaacttgaattctgcggtggtcgccggcatcgtgggaagtaatttacgagtcgcaggctctcaggagccattggtt

SEQ ID NO: 102880 - DNA, 122 bp, Homo sapiens
cacgtcttgtgccagatatgtcacatactctgttcaccttttgggggcccccaaatgcagcgccaatctctcaagcaaggacagcgcctgtcacatcacagagagcttacttttccaaccat

SEQ ID NO: 102881 - DNA, 122 bp, Homo sapiens
gctgggcagcttttccagtcttcattctccactcccagctccactggggccatgtcagagcgagaagagcggcggtttgtggagatccctcgggagtctgtccggctcatggcggagagcac

SEQ ID NO: 102882 - DNA, 122 bp, Homo sapiens
agctcagcccacactggcagctccagcgcctgacaggggacggtctcctgactgatccagcgcctgacaggggatggtctcctgagtgatccagcgcctgacaggggacagtctcctgagtg

SEQ ID NO: 102883 - DNA, 122 bp, Homo sapiens
ctactgcccgcggggccacctgtgtgtgcctttccttcaaaaacaaaggcggggcgggggcggaagtgcctcaaaagaaggcgggccgaagcgaggtgcggctccctgtcgccgcggagggg

SEQ ID NO: 102884 - DNA, 122 bp, Homo sapiens
gtgggccgcgcgaccaatggtggaggctgcagcctgcgaactagtcggtggctcgggcgccggcggggagctgctcggcggcggacagtgtaatgttgggtgggagtgcgggacgcctcaaa

SEQ ID NO: 102885 - DNA, 122 bp, Homo sapiens
cccgccgccgcctcttgctgcctctgcctccgagcagcccgcccgccctccccaggccaccgggcccctctgctgggggcaccaggagaggcaggacccggcactcacactcactcacactc

SEQ ID NO: 102886 - DNA, 122 bp, Homo sapiens
cgggtgcatggtgggaactgggatggaggctccagggtcctgtggaggggtttggctgcgcgtggacatccccttacccccagaatttccatctggtccagccctctcatcttgtaggtgag

SEQ ID NO: 102887 - DNA, 122 bp, Homo sapiens
agccccgggaaactcacctaccccatcacatttctaccactgtgaccgagctgcagtctccgacgtcaccaccaaccacagcgaggcgaaccaaccagagccaggccagccacggtggcaca

SEQ ID NO: 102888 - DNA, 122 bp, Homo sapiens
atttcctgtgctatcagctccggaagcagagtgggcctgctcaggttcccagaaacacagcgcgatgggggacagactccgcggctgccacggaaacaaatgagtaaatgccctccccagaa

SEQ ID NO: 102889 - DNA, 122 bp, Homo sapiens
gtggccaccagggggacgtagtgtggccgagactccaggggtgcccgtgagcacccgaggcgctgaggagggctgggtcgcagtctcctgtgattgtaccagcattaaaaatcgctgtgtgt

SEQ ID NO: 102890 - DNA, 122 bp, Homo sapiens
ggagcggccagtgcagacaacctcaacccgtttccggagccactggcgccccctcattcccgctccagcagcccatgcccgcttcacccctggtgcctcatacatcgcgcgaggaagccagg

SEQ ID NO: 102891 - DNA, 122 bp, Homo sapiens
aaggacccctggggtgctcattttttacccccaagggaaccagtcttgaaaatgagcaggcgggcactgggaagcccctccgagggttggtgtaatcggtgggggtgagccggcttcccaag

SEQ ID NO: 102892 - DNA, 122 bp, Homo sapiens
ctcctcacatcccagacggggcggcggggcagtggtgctccccacatctcagactatgggcggctgggcagagaccctcctcacttcctaggtgggatggcggccgggaagaggcgctcctc

SEQ ID NO: 102893 - DNA, 122 bp, Homo sapiens
cgctgctgccgctacacctttgtgaacaccaaatgcgcaggaagcgtatcgggagcagcacggctgcactcagttgttgccttctatttcgtggatgaaaactgctattgatttctctttta

SEQ ID NO: 102894 - DNA, 122 bp, Homo sapiens
ggtgtggaccaggcccagcagatgacacgattcatttattcattcaaagccggttcccagcgcctttcacaccagccccgcaggactggatgagggtgtcctgcccgcccattcctgggcct

SEQ ID NO: 102895 - DNA, 122 bp, Homo sapiens
tgcaggggcccctccgtggggtcgtggatcgtcagggccgcgtgggtggctgggcgggggcgggctgtaggcagcttctaaaagcaggggctgggcgggggcgtggggggatagggagggac

SEQ ID NO: 102896 - DNA, 122 bp, Homo sapiens
agaacctgcgaggtggtcccagggcctcctgaatctgcagacgtgtcccctaggttgctgcggaagccactttccacctgcaggtcaccgtcagccccaggcacccctgctggagggaggga

SEQ ID NO: 102897 - DNA, 122 bp, Homo sapiens
aggggagtgcgcaggggagggcagccccgtgggtctgatctggcgaagtccggcagcggccgcggcggcaggaggaggaggagaaagggagggaaagggggagggcgaaggggggcggagga

SEQ ID NO: 102898 - DNA, 122 bp, Homo sapiens
cacccccactcatagcctcggattctctgcacagctttagtaaaggagctgatggggaatcggatgcctgaccccgagtcctcactctggggctcgagcttaggataacttcaggttcagct

SEQ ID NO: 102899 - DNA, 122 bp, Homo sapiens
ttcctccagcttctaggattgtaaccataataggtccactgcccgatgtatgcggcaagtcggtacaccgagacactgcgttgcaaaagagaaggagatttaacaaagggctgccaaatgag

SEQ ID NO: 102900 - DNA, 122 bp, Homo sapiens
tgggctgagggactgagtattggccctcgggcagctgcaaccgcgcacagctggagctggcggggcggagggcgggccgggaccccgcggggaaggaggcttccttcccagcctcctgctgc

SEQ ID NO: 102901 - DNA, 122 bp, Homo sapiens
tgaaaagggagagaatgaaactgagtagcataaggtgaacctagagagtgtgtagtgtcacgggtcgttaaggaacttccaagtcaactgaggaattataaatgttatcctgagataatggg

SEQ ID NO: 102902 - DNA, 122 bp, Homo sapiens
gtacagcccacagaaagtttcacaatgcattggaatgcctgcagacagacctgcacgtctcgaggcattggaatgcctgtagacagacccacatgtctcgaggcctcagaatccccacttct

SEQ ID NO: 102903 - DNA, 122 bp, Homo sapiens
gccttaaaagggaggaaattctaacacatgctacaatatggatgaggcctgaagacattacgctaagtaaaatatgccagtcacaaaaagacaaatactgtatggttccacttacgtaccgc

SEQ ID NO: 102904 - DNA, 122 bp, Homo sapiens
atgccaccctctcttccggctgcctttcaggaagaccatgctcaatgacctcctgcggttcgatgtgaaagactgctcctggtgcaggtgggtggccccgtgctccagggccctgcctttcc

SEQ ID NO: 102905 - DNA, 122 bp, Homo sapiens
gctccatgatcaaagaagtcagagagaatgaaggtcctagaggcaggagtttgagggagccgattaagagagaatagtccactagtgtgggggaggtgactatggaaacagggtgatttatt

SEQ ID NO: 102906 - DNA, 122 bp, Homo sapiens
ggctggcaccagggagcagagaaaacacacacccagcagcaacacggagggccgcccaggcgtgcacgtaaatgttcaccgcgcacacaaagcccgctctgaccttgctgcggactctagat

SEQ ID NO: 102907 - DNA, 122 bp, Homo sapiens
gccaccatgccgcaccctggtgtgttggggatcctgatttcagcctcagcctgggcctggcgcctgcacagcccagctggatggaagggtggggggagggagaaaggaagaaaggagatggg

SEQ ID NO: 102908 - DNA, 122 bp, Homo sapiens
agtacacatgttacggttagggataatatttgtacatactgtaataatgaatgtgcactgcgtggatttttttggagtccacactattatcagtgtgggaggtggagagaaaacacatgtgt

SEQ ID NO: 102909 - DNA, 122 bp, Homo sapiens
ggcatgcccgtgcttcacaccggcgcgccctcaccagcacacctgcacctcacaccggcacgtgcacttcccaccagcgtgtctgcacttcccaccggcgtgtctgcacttcccaccggcgt

SEQ ID NO: 102910 - DNA, 122 bp, Homo sapiens
gctgttatgtgcaccccccccccccttttttcttgcagaagttaagaagtctgcttaactcgcaggtcaccaagagattgattaaaggcctctggacatcatttgggtttggataaatctgt

SEQ ID NO: 102911 - DNA, 122 bp, Homo sapiens
agaggcggggcgggggagggcgcgcggctcgttgctgggcgaccgagcgcgtcctctcttcggtggagccagtcgagcccacccggcccctaggcacaggaaaggcctgttggacactcgcc

SEQ ID NO: 102912 - DNA, 122 bp, Homo sapiens
cacctgcctcctttcgtcctgactctgcgtttcaccatcagggctcaggatttgcattgtcgggtgtcggaagcactatccctgtgacaaaataaaaattcaaatctgaaaacattccttta

SEQ ID NO: 102913 - DNA, 122 bp, Homo sapiens
cagactgagcctccccatctgggtttatccttttttaaaagtgtgtaaattttagtgtcccgaagtacttctcatttgtctgacttcaaagaacagctgtgccacctgctggctgtgtgctc

SEQ ID NO: 102914 - DNA, 122 bp, Homo sapiens
cctcacaagcaaaggctgctgagtgcccagtgctgggcacctgctgtcctgtgctaccctcgccaccccccatgctccacctgccccaggcccaagtccacgagaaacacttctgccgtgcc

SEQ ID NO: 102915 - DNA, 122 bp, Homo sapiens
taatggcatttaagaagaaaccaggaaaacatacacatgtgaacttacaaagatgcaaaccgcatgaccttccctgacactagcactatgacatcaaaatcagcatgatttagactgagatg

SEQ ID NO: 102916 - DNA, 122 bp, Homo sapiens
tggccagcggttccctggggcccggttggcctgtgccccttagcagatgcccctctgccccgcagccttagcccctacccagccagaggtggacggagactcctccatcccaggcaaggcac

SEQ ID NO: 102917 - DNA, 122 bp, Homo sapiens
ccagcaggggctgtcaggcgcgtgctcggggtccgcgggctccaggagtggatttgctggcgcgcgcccagagccagccgcctgcgcgccgggttttcagcaccgcagggcagaccggcggg

SEQ ID NO: 102918 - DNA, 122 bp, Homo sapiens
aattttctaagataaatcagaattaaccaatcatagttggctccatgtttctgatgtgtgcgtatctgaaccaaacaaatcaagagcagaggttaaggtgtggatctgatgatagctccttt

SEQ ID NO: 102919 - DNA, 122 bp, Homo sapiens
cggcgcgggggccacgggcaaggacactatgggcgacctgccgcgggaccccggccacgtcgtggagcagctcagccgctcgctgcagaccctcaaggaccgcctggagagcctcgaggtag

SEQ ID NO: 102920 - DNA, 122 bp, Homo sapiens
cgcagctgagctaatgcttcctccaccacagataagcaacgttagggggtgggccaggagcgccgggactacaggaggagtgaagcccagcccctcggaccccaggctcagggacctgccct

SEQ ID NO: 102921 - DNA, 122 bp, Homo sapiens
tcaaacagttgttatgcatgtggcttctggttcttccgagtggaggatgtttccagaagccgggctgtgcgacaccgccggggccgtcccagccacttacttgtctctgagataattgtgcc

SEQ ID NO: 102922 - DNA, 122 bp, Homo sapiens
gtgttactgcccataaatcttttctgtatataaacttcacagctatcatacggttgataacgatgtcaaccatatcatatagcacctctattagagactgtttacatatagtatttctaatt

SEQ ID NO: 102923 - DNA, 122 bp, Homo sapiens
gcgggcgcgatttgggggcgctgctgcaggggcggcggggcgggcagaattgcacaggggcgcttttgctgggccgggcgctcctggagccgtcccgtagggagccgcgcagggcgcgcgga

SEQ ID NO: 102924 - DNA, 122 bp, Homo sapiens
ctttcggtgtgtcccaccaactctcctatgactttaagcaaaaccagacgctaggttaatcgaagtgctatccaaggttcctggcagaatcatactgttgttggatgacaagtgagcagatg

SEQ ID NO: 102925 - DNA, 122 bp, Homo sapiens
atccatccgcattccaaaacaattaattacttaagaaatccaaccagcacacatctaaggcgaagctgcttctttggtagttttttattctacagagtgctaccactgtacaaacagtcaag

SEQ ID NO: 102926 - DNA, 122 bp, Homo sapiens
gcttgggttctggtttaacacacaattgggccaccgagttgtgttaatatgatctggtggcgggcagaggaacaacacactatggtggaggaaattgtgggctgtgaaatcagacggaggct

SEQ ID NO: 102927 - DNA, 122 bp, Homo sapiens
taaggcagaacccaaggaagccttaggctcaggtctctgcctgaaggtaggctggggaggcggagagggacagagggaagaatcccctggacaccgcgcctcagggaggcccaggggtaagg

SEQ ID NO: 102928 - DNA, 122 bp, Homo sapiens
cctgagtcaaggcaattagccgtttcctatggcatagatgtgctttcaaattctacgttacgtggcaaatatctgctatatgagttttctgtgatgtgtgaccaatcacacttacacaacaa

SEQ ID NO: 102929 - DNA, 122 bp, Homo sapiens
acaggaggagctggacctggagagacggactcgaggaacatttgcacctggagaggccgccgagaggccggagctgggcctggggaggctgacttgaggacgacttgggcctgcagagtctg

SEQ ID NO: 102930 - DNA, 122 bp, Homo sapiens
actctgaagccctcgcttcactccggagcccgctggctctatcctcgcaccgagcctttgcgacaagtgcacagggaacgctaaccccagccctcaacgctgcacagaacccggggtgaaac

SEQ ID NO: 102931 - DNA, 122 bp, Homo sapiens
acagccccgaggggtggccttgccctgctcccccggggacccccaggctgagggttctgccgcgggctaccggcctctgagtgcctccagccagagctccctgcgctcgctcatctccgctc

SEQ ID NO: 102932 - DNA, 122 bp, Homo sapiens
gtgcagggcttcctttgaagccttgtcccctcaaacaattcactgtctccctctctcccacgcatggaggcatgttggaaagggagctccaggcctcagtgtctctgcctgtgattggaata

SEQ ID NO: 102933 - DNA, 122 bp, Homo sapiens
aggtctttgttattttgagatcagggcattcaagtatcaggaacagctgtaaaatatttacggaaggaacggaaaagaaggaaagcaatgacaacatgagcctagaaggatggaaaagcatg

SEQ ID NO: 102934 - DNA, 122 bp, Homo sapiens
ctgctgggagcccggcagtctggccacaggaggtcggtttcacggaagggcaggatgtggcggcatctcctgaatttaaggagtcttgggggcgcggtgcttctctgtcattgggcaactca

SEQ ID NO: 102935 - DNA, 122 bp, Homo sapiens
cacacagcaagtgcagtggtatgaaccggttgtgcaccaagggctggaaggaagttggctcgggctagcgtttgttcagtgctcgccatgggagcactttgcctgctctccaactaccggga

SEQ ID NO: 102936 - DNA, 122 bp, Homo sapiens
tataggagtaaaatctctacaacaagtttgcaacctagatgttccctcctcaatgcattccgcatggtgagttacactcacaaaacagaggtgttgtttgaaatatattttctgcaggggaa

SEQ ID NO: 102937 - DNA, 122 bp, Homo sapiens
cagcctctaggaccagggcggctgtgggtggccctgaagggactgagcaactggccctgacgttccccttcatgccttggacacttgtccttctactggaatctagtccgttgccttgactt

SEQ ID NO: 102938 - DNA, 122 bp, Homo sapiens
gtgctagcaatctgggggaaagccctgggctcggccaggtggtgttggccacgttggccacgcccccacttcgcgcagccgagtggctaaggaaatcttaagcagggaggggaagccagacg

SEQ ID NO: 102939 - DNA, 122 bp, Homo sapiens
acccgactgcagaacccccgccagcgccaccacagtcccctcgtccccctccgctgaggacgccatcttaactccgggagccccacagggaccccccagctccgcgcgccccgaatgcgggc

SEQ ID NO: 102940 - DNA, 122 bp, Homo sapiens
ataccaagtctccgtatatgaaaatccatcatttcccagcagggagcaagctctcagcaccgcatcaggcagtaaacaccaactcagaatctactggatcaggaaccagctctgccctaggg

SEQ ID NO: 102941 - DNA, 122 bp, Homo sapiens
caggtgtgggtgcaggaggacgtctggttagaggtcagaggcgtcatccccaaccccggccgatgttatcttacgtgcggggaaaggcaaggactggactcgttcatcttttacggaacgtg

SEQ ID NO: 102942 - DNA, 122 bp, Homo sapiens
gtggctggacgtcgagaagggcacgttagcagaagagcacacggacagacaccgacaagccggcaggccactgaccagcacaatgatgcagagtttggcctgagtggtcggagaagagtcag

SEQ ID NO: 102943 - DNA, 122 bp, Homo sapiens
gaaaagatcgcctccaggcactgtgtggaactttgcaaactcgggtcctcacccgaggaccgcacggccgacctcggggaggctccaccccagaaactatttcattggcgccacctctagcc

SEQ ID NO: 102944 - DNA, 122 bp, Homo sapiens
gatttcatactttcccaggctctgatatcttatgtatttgaatatgaataggtgattgagcgtgtgtgtctgtgtgtttctccaaggtatctgaaaccggtcccctctttagttcatttggt

SEQ ID NO: 102945 - DNA, 122 bp, Homo sapiens
tcagacactttcaccaacgtatcactcgggagcatatgaatgtaatccagaaacatgggacgtcttctcggcccactgtggaatacctaagcctgcttctgtgtgtgtgtgtgtgtgtgtgc

SEQ ID NO: 102946 - DNA, 122 bp, Homo sapiens
tacaaatcagcctcctcggcgggagagtgtcaagggactggtgttggaagcgttaacccgcgatgggtttccatccaaccactacccagacctaaatgtttggtggattctgtttcatgctt

SEQ ID NO: 102947 - DNA, 122 bp, Homo sapiens
tcgacggtccacgcccaccgctagcctccagtttcccgcagaccggaagcccttttgccccggctcgcaggtccacgtcttattgacagcaggaaccggaagctcttctgccccgatcgcct

SEQ ID NO: 102948 - DNA, 122 bp, Homo sapiens
ccgagcgggcccgtcggggcctctgggcgcggcggcggggttgggaggagggcgcgcagccgggaggagctgggctgactccgccccaggccaggaagtgactcaagaaacagtttgcgtgc

SEQ ID NO: 102949 - DNA, 122 bp, Homo sapiens
tcctatggtgaaggagagtagaaatacctgaaccctggacttgaagttggttatagtcagcgcacagatgtcacaggaggatagtgattgagagaaagataccaacagacccaaattccttt

SEQ ID NO: 102950 - DNA, 122 bp, Homo sapiens
tccggattgggttctgttcggttgtccttggtgtgtatttcagcgacatggttttgaagccgcttgtcttcccagcacattcacaatcgtgatgccatcggagcccagggccttgtccgcac

SEQ ID NO: 102951 - DNA, 122 bp, Homo sapiens
gcccggagtggccgggacccgagagggctggtgcgggagccggggcctgcgcctcctccccgacccccagcctcctgggacttgccttcgaggcacttgtcactttgtaacttaccagtttg

SEQ ID NO: 102952 - DNA, 122 bp, Homo sapiens
aagttctagggtacgaggccagggagaaggagaagccaccctgaggaaggtgcggaatgtcgcgtggagcccggctctctgcctttgaagcaggattttcatgcactcgccagcatggctgg

SEQ ID NO: 102953 - DNA, 122 bp, Homo sapiens
caaggagcagtcatttatgcaatggtttacatctcaccactccagaagattgacgtgatccgagggatggctgcccttcctattcctctagctctttataccacattatcctttgtgtgtgt

SEQ ID NO: 102954 - DNA, 122 bp, Homo sapiens
tattgagaacggcacatgcaagggatctaggacgcacactccttatgagaatctagtgcccgatgatctaaggtggaacagtttcaccctgaaaaccatccctcctccctatccgtggaaaa

SEQ ID NO: 102955 - DNA, 122 bp, Homo sapiens
tttctcttcttggcccaaaagtgccctctggttgtggtggctgggacctgccctccttctcggtgtccctccaggaaggctggagatttgtttacagaaatccagtgagcgtgcacatttcc

SEQ ID NO: 102956 - DNA, 122 bp, Homo sapiens
cacatattttttcatttgccagtttccttcttcttgtgatttgcagctgaggtctttttacgctgcccatgctggtctccaacttttgggcttaagctattctccctcctcagcctcctgat

SEQ ID NO: 102957 - DNA, 122 bp, Homo sapiens
ctggagagcagaggacaacgacgcatgcgcgcgggttgtcccaccctttgcgttagggcgcgagtgacggaaacagatccctctatttgtaggtttgtcggtatcctctttctaatgctggc

SEQ ID NO: 102958 - DNA, 122 bp, Homo sapiens
ccaaaaccaaggtgttgacacggctgggtcattccggaggctctaagggagaatccaacccgtgcctctctccgggcttcgagggagaatctgcccggcgcctctctcccggcttccgatgg

SEQ ID NO: 102959 - DNA, 122 bp, Homo sapiens
gtccgttggcctcatggcacctcaggcacagagatagccaagtagacaagtggaatcttgcgctgtacctgaaccttccagaaacacagcctacaacctgtgaccacgagatgtgccaccaa

SEQ ID NO: 102960 - DNA, 122 bp, Homo sapiens
agcagatgcagaaaggcagcagccaaagcctgcgggttcctgcaagggccaggggaggggcgagccctacaggcaacttgaacggagagctcacccgccagcccggaaaggcaagccccagt

SEQ ID NO: 102961 - DNA, 122 bp, Homo sapiens
gctcgccgctcgctatggcgtcgctcaccgtgaaggcctaccttctgggcaaggaggacgcggcgcgcgagattcgccgcttcagcttctgctgcagccccgagcctgaggcggaagccgag

SEQ ID NO: 102962 - DNA, 122 bp, Homo sapiens
acaaaaatatctccagttattctgaccaaggtctgcacagagtcagccctagaattctgacgcaatcccactagaaaatactggataagtttttctcctaaaatgttagggaatttgagaaa

SEQ ID NO: 102963 - DNA, 122 bp, Homo sapiens
cccactcacccgagaacgttcccttgctgagacactcttttatccgattggctttccttacgtgaaaggctttcgtaatctcctggttcatgaaggcttccttgttcatgatgttttccacc

SEQ ID NO: 102964 - DNA, 122 bp, Homo sapiens
cagactttcgcttaatcccggaaactgctccaaaggcgtttttctcagggcgttcggcgccgtaactcaggagaaacccaagtcctgctctcccggcggcctcgctggggaagaattcagcc

SEQ ID NO: 102965 - DNA, 122 bp, Homo sapiens
gcacccgcccccacaatgcgcccactcacctggcactgctgctgcagcttcttggtgggccggcccacgatgtagatctgcatgggggacaggctaatggcgctgtacaccgccacgtcctt

SEQ ID NO: 102966 - DNA, 122 bp, Homo sapiens
gcttagggttttcctttttggcagtaaccacatctgttttggtgctccctcagggactaccgcgccatcccagagctggacgcctatgaggccgagggactggctctggatgatgaggacgt

SEQ ID NO: 102967 - DNA, 122 bp, Homo sapiens
gaggaaaagtatagggtgtgtttgtggaacagtcctggtgcaattaatggctaagcctggcgcccagtgaatcagccaaggatgcagtcaaccagctctttggccctggggccagcttcgag

SEQ ID NO: 102968 - DNA, 122 bp, Homo sapiens
tcagcaccttgggcagtgggttgggcacctgcttcatggagctggccatccgatccatgtcgccgcgaggagccgagtcaggggccctcggctgccccgggatccccacggcgccgcccgcc

SEQ ID NO: 102969 - DNA, 122 bp, Homo sapiens
gccttggtgacaattccagtgcttcaccctagacagcctttcctgggcttccgtgagaaacgaatttatacaaataagatttcacaccacagctgccgcggccactgccctccccgcgcaga

SEQ ID NO: 102970 - DNA, 122 bp, Homo sapiens
gtctggcacggggcacataaggcagcacattagagaaagccggcccctggatccgtctttcgcgtttattttaagcccagtcttccctgggccacctttagcagatcctcgtgcgcccccgc

SEQ ID NO: 102971 - DNA, 122 bp, Homo sapiens
acattggggtttcctgcaggaggtggggcaggtggtgagtgctgagggctgttgagggcccgcgctgactgtgctgtggctgcaggctcgctgtccgaggggcctttgtgggggcctcgctg

SEQ ID NO: 102972 - DNA, 122 bp, Homo sapiens
gattggaaatgactgagattcacggtggctctagtcctgtctcctgaagacggagctggacgaggtctgcggacagtcagaaaacacgtcagggttttggctcagctgccagatatgcagct

SEQ ID NO: 102973 - DNA, 122 bp, Homo sapiens
ggcacagcccgggggtcttgcctgagcccaggatcctgccggccctgtccttccatggttcggtggctgggagggcaaagggtcccccacgtctgagacacatcagtgtttcacatggatct

SEQ ID NO: 102974 - DNA, 122 bp, Homo sapiens
ccacgttagtggacaactgcagcactactgcccctttctggaacatccttaaaaggacagcggtgaagggaaattctccaatgggcagaactataggctgtacatctggtttactttgcttg

SEQ ID NO: 102975 - DNA, 122 bp, Homo sapiens
aacatttccatcattatagaaggttctattggagatgcaggtttatggaaaagaatttgccggtacagattccctttgaagacgtagaaggaatagaaaaagtgtttattgaatatatttgc

SEQ ID NO: 102976 - DNA, 122 bp, Homo sapiens
ccgactgagcaacttagctgatccatctttgttgacaactgtttcccaatctgaaaaatgcgtgaattctctctttccatttctaacattctttgcattgcactgtttgaaaaattcggatg

SEQ ID NO: 102977 - DNA, 122 bp, Homo sapiens
ttgttatcatctttatcggcaatatttgatgttttctttttggctccaaatgtttattttcgttcagtccaccccactgtctgaacctctttcttctccctcagtctgttttcttgtttatc

SEQ ID NO: 102978 - DNA, 122 bp, Homo sapiens
agtagacccaagagaagaggttctttgttttaaacctctgtactgagagagcagaataaccgagagtgtcttgactatagtttaaatgcaggatttgcataagcaggtagtggaggctgaag

SEQ ID NO: 102979 - DNA, 122 bp, Homo sapiens
attctacctagtaactgctgagaaataaggctcgacaccattggctggttcactcacacccggccaatcctggactctaaaatacttagggaaatcttgggacactgtggaagcccagagaa

SEQ ID NO: 102980 - DNA, 122 bp, Homo sapiens
ggggcggccgcgctttctgcaagggcttttcctatctcatttcactagcagttgagctgacgggtgcgtgcgagaatgcgagacctgccacgtgtacacgtgtacgcggagtgtcgatctgc

SEQ ID NO: 102981 - DNA, 122 bp, Homo sapiens
gagactcttcgtccattggccagcgagagtgtcagttcccaggctcctgccgcgcacgggcgagcccttctaggcgggaaaagttcagctgagagatataaaagagcagtctttccagcacc

SEQ ID NO: 102982 - DNA, 122 bp, Homo sapiens
gcccagagacaccctgctcagcactgccaagctggaaaacaagtgggtgggggcagccgccgggaggggccagcaaaccgggccctcatccaggagcaaattccaccttcagtgcctcactt

SEQ ID NO: 102983 - DNA, 122 bp, Homo sapiens
tttcccaatttaaagaacattccttagtccttccttcagatgtctgagaatcaccttaaacgtggctttgcgtttaaattaggtaacttagtgtcttataagaaagaaacatgaaaatccag

SEQ ID NO: 102984 - DNA, 122 bp, Homo sapiens
aagcactggaacccagcatctaaggtaactggctcagctagagattaatgagtctgagtccgtgaaggtgtgcactcgtcaagaggccttcgtgcgacacgtagttaggacttttcacccgt

SEQ ID NO: 102985 - DNA, 122 bp, Homo sapiens
taaattatgcactagatgcttggtatccccaacacttataacaggtgttcaataaatgttcgttgaatgaatgttcaattaatatccatggccaggcgcggtggctcatgcctgtaatccca

SEQ ID NO: 102986 - DNA, 122 bp, Homo sapiens
tcctgcagaccagagaaggtacccggggacctcggcccgccataccgatggtgcagtgttcgccattccagccagggctgcactcgcacttgccgtcgcggcaggtcccatgctcggcacag

SEQ ID NO: 102987 - DNA, 122 bp, Homo sapiens
tgagaagggcaaaagcaaagaagactgtaccatgtcctaagctgaggcaggcggcaggcgcggtgcacaggaagtctcagtgtgaaggggtcttttctctccactgccaatgtaagtagaat

SEQ ID NO: 102988 - DNA, 122 bp, Homo sapiens
ccattcaaatatctctatggtctctgtcttctctgatggccaagggaagggcttttgagtcggggcaccaaatgagtggtgtccagagttcttcacatttagtgctctgaagcttgctggtg

SEQ ID NO: 102989 - DNA, 122 bp, Homo sapiens
ccccaggtctgtgtggcctccggccaaggtgaagaggtgtgtgtcttggtgtaaataaaccgctactgcaaccgatttcgctcatcctttggttccgcattgaggctcgccagggtctaaat

SEQ ID NO: 102990 - DNA, 122 bp, Homo sapiens
gaggagggtcgtacggagccttgtcagagtgtgggctttatccctggagcagtgggggatcgttgaagggttttaagtcaggacatgatagtcactcatttattcccagatgggccaaacat

SEQ ID NO: 102991 - DNA, 122 bp, Homo sapiens
tcccagagcccaggctcagtttcatgcccagaaacagcaacagagatgctagggcccaaccggtttcagaactcactgcctcccataaaactatgtctcttaattctgatgcagataataac

SEQ ID NO: 102992 - DNA, 122 bp, Homo sapiens
cgctgggccagctctggcgcccggcgcttgtgattggctgcccccagcctcagcccagcgcgccctcccacccagggcgcagttgggtccccgctcgctgcctagcctctgccttttcctct

SEQ ID NO: 102993 - DNA, 122 bp, Homo sapiens
ctgtgagtggtgccacaggggcaccccagctgagcccctcaccgggaaggaggagacccccgtgggcacgtgtccacttttaatcaggggacagggctctctaataaagctgctggcagtgc

SEQ ID NO: 102994 - DNA, 122 bp, Homo sapiens
atagtgcacctctctcccccttggggaaaagcgttttccctacttccgtaggagttaactcgccaaggcttttaggagacgccgcacagctgtgctcccgctcgttgaaaaaaagatgccaa

SEQ ID NO: 102995 - DNA, 122 bp, Homo sapiens
attttttatcttaatcataaaatgtttaggaatctatgaaatttaactttaggaacaaaacgtttagcagggttgattgatattatttttacattgttctggcaatccacagaaagagaaga

SEQ ID NO: 102996 - DNA, 122 bp, Homo sapiens
tgggttgaggcagactaaggacagagcttgcccggcctggagggcaggcccggtgagcaccgggcccagcacctcccactccagagactgcaagacaagcgagctgccctcttggagcccca

SEQ ID NO: 102997 - DNA, 122 bp, Homo sapiens
ttaaagagttacaggagtttggcagggaactctctgtgtaccctcattcagtctgccagccgtggtcatctctaagctaatggtgcccaaatatatgtctctggcccctacttccctctgaa

SEQ ID NO: 102998 - DNA, 122 bp, Homo sapiens
ctcctctttttttgtctctccaacccatgcggtaaactggtggtgcccaaggccctccatcgggtccctgagagtctcccaactgccggtccttagcgccagcctgcaagcccagacccgcc

SEQ ID NO: 102999 - DNA, 122 bp, Homo sapiens
ctcaccgccggtctcgtcagtaacatagggagtcgccatcttgaaaacgcaaaccacttccggcgtgagcgggctggggtcccgcccccctccccaccggaagtggagtcccgatcgtagca

SEQ ID NO: 103000 - DNA, 122 bp, Homo sapiens
gaaggtacctcttggaaattatacgaaaagtcaatgagttgctatttctaatgcctttagcgaagggctcagcttgtggtaagggctcagtaagtgtaaactgttttttgtttgtttgtttg

SEQ ID NO: 103001 - DNA, 122 bp, Homo sapiens
cgctgcgtcgatagggtaaagccgactgggacaggcccttcctggggagagaagcagtctcgaggtgaggtggcggctagtgccagagcagcccagaacatcatcccctcggcccgctgccc

SEQ ID NO: 103002 - DNA, 122 bp, Homo sapiens
agcactggcggcggcgcgccgggcactagcggagccaagaggtcgggggcggggcggggccggaaccagccccgcccactcggagcagcgccgcctccgccaggcagcctcccggccgacct

SEQ ID NO: 103003 - DNA, 122 bp, Homo sapiens
gagatggcagaccaggctgcggcctggctcacccgtcagggcagcttccaagggggattccgcagtacccaagtaggggccgtccccgggctctggcgggggtgggtagtcctcagaccaag

SEQ ID NO: 103004 - DNA, 122 bp, Homo sapiens
ctcgttaacggaatcttaagggcaaggtccaaccacactcagaatcagcaggaaaatgaccgtttggtaaaactcaattacacccagtaggcacctccccaggcccgaaacagcactcgccc

SEQ ID NO: 103005 - DNA, 122 bp, Homo sapiens
ccagcagcccccgccggcgcactcgacctacaggaaagttgctcccgagctgtggaggggcgtcatcgcctcctagcaacgctcctagcaaccgggtaacatctgctccctgtggtccaatg

SEQ ID NO: 103006 - DNA, 122 bp, Homo sapiens
ccaggacttggtaagatttagggactcaaacatgattcttctggttccagcttctgttgccgtgcacaatatgggaagcagtgtttcctctgacccacacagggacacagagcaagaccaaa

SEQ ID NO: 103007 - DNA, 122 bp, Homo sapiens
ggtcagggctgctctagggtgcgggcaggcgagggcggcccaggggcgcggggcgaggggcgaaggagccaggaggctgagaactgcatggtagccctgcctgcctgccgcgctgcgcgccc

SEQ ID NO: 103008 - DNA, 122 bp, Homo sapiens
ctgggctggagctggagctggagctgcgaattcggagtcccggttccctgtgccacctggcgagctcagcaaactaaaaggtatgacgtggagctgagacataattgcacatgcttagaaac

SEQ ID NO: 103009 - DNA, 122 bp, Homo sapiens
ggtagccaaaccctcttgatcgtgtggttccagaaaaagccagtgcggcacccacttacccgtactgcagccaccgtggtcccgggaagagggcttgcttccgcagagctaatgagggaagc

SEQ ID NO: 103010 - DNA, 122 bp, Homo sapiens
ccgcaggaccggcgcgcagactggggacgcgctccccgggcctcgttgatcaccgcaggccgcaataggcagccaccgaccggcaccgaccgaggagctcccacaatgctccgccgcgcccc

SEQ ID NO: 103011 - DNA, 122 bp, Homo sapiens
cttctttagaacagtagcaggctgcctagcccttgggtgctagctggttctggggtggggcggggtgggggggctgtgggtcctggggtggctctgactgtgaggtctctgtctgaggaggg

SEQ ID NO: 103012 - DNA, 122 bp, Homo sapiens
gagcccagcataacctagagcccgctgtcaacagcgcccaccgagggctccccgcccccacgcagcaccagcgccaccgcacacctgactctgtccgctcacacagcctcaccttcacctct

SEQ ID NO: 103013 - DNA, 122 bp, Homo sapiens
caaactcctaacctcaagtgatccacccgcctcggcctcccaaagtgctgggattacaggcgtgaaccacagcgcctggtctgttctgccgtttctatggttcaacgcttttataggttcca

SEQ ID NO: 103014 - DNA, 122 bp, Homo sapiens
ccccgtcctcctgcgcccaaccaacccacctgctagtccctaggaccggactgctacttccgcatgacaggactgctacttccgcatcccaggacgaaatcaaactccgcgggccaggaccc

SEQ ID NO: 103015 - DNA, 122 bp, Homo sapiens
ttaaataacagcctgggtatcttcagcttcacgaaacgggtgtaacagttttaatcggcacgcttgagagaacctagcattcaatctgagagcttggcactcgcctcatgttcagggcgtga

SEQ ID NO: 103016 - DNA, 122 bp, Homo sapiens
tcctgggaggtcgctagaggagcagccctgcggctgtgcctggtgagttgggaagcatcccggtcaccagtgggaaggagcagctggggtgcggggcctcgtgcaccctcatcaggaccttg

SEQ ID NO: 103017 - DNA, 122 bp, Homo sapiens
aactccacagagtcaggcccagaaagccaaagcttgacagctccaggtcttctcttgccacgtcttggtctccacagaaccacagtgccttaagattcttgatctgcctccccctagagcag

SEQ ID NO: 103018 - DNA, 122 bp, Homo sapiens
aacgggcctccctgcgcttgcgacgagccggggtagggcggcggcaggtaggtgtggtagcgcgtggccgagcccatggccgacatgccgatgccgatgcccgaggtgaccggcgtcgggga

SEQ ID NO: 103019 - DNA, 122 bp, Homo sapiens
catctgcttggtgagctgaatattttggttgtcatgctcagattccctaccatgataacgcgagctcagtgggcgcctgtgtcacctcacactcgtgcaggggaaagccaccctgggaaggc

SEQ ID NO: 103020 - DNA, 122 bp, Homo sapiens
gtatccaaagcaattatgttccttctggagtagcttcagataaagaaccttcagagagttcgaccctgtgcttgggaagagacacagaaggtcaaaaagtccttgattctgaggccttctaa

SEQ ID NO: 103021 - DNA, 122 bp, Homo sapiens
cgccccgtgctgggaggaggccatggccgctgcattccaactggcgagtaagtacctgggcgggtgtggccaccgcgcccttgccccctgtggccttctggtgccacaggagggtcctgagg

SEQ ID NO: 103022 - DNA, 122 bp, Homo sapiens
gctcgcggtgctccctagaagctggattcttcgcaggtgcgagcacaccccagatgccagcgtggacccttgagcaactggaagttaaaaacccacgaaaacagctctgagtgatctctagg

SEQ ID NO: 103023 - DNA, 122 bp, Homo sapiens
agagagctcggcggagacggctgtcgagtacccttcacctcggtgttgggagcctgggagcgaactgcggcgcgggttaccgctcccggggacgcagcaaggggcatcgagtccctggcggg

SEQ ID NO: 103024 - DNA, 122 bp, Homo sapiens
cacccgccctcgtccgggatttgtgaagttgccctgacgtggcagtagcttcgtggcggtcggtcactacccagccgccgcccgcccggcgaagccggcttggggaggtgcaggagcgagcg

SEQ ID NO: 103025 - DNA, 122 bp, Homo sapiens
gaaggctgtgtccttgtcactgctgtgtgtccctggctgtacactccaattgtctggaggcggtggcgtgttggacagtcctggttgctgagtcatgctaaaacactgttgttttgactcac

SEQ ID NO: 103026 - DNA, 122 bp, Homo sapiens
gaggaaaaggcaccgagcctctttgtgtggacccgtctctcccctgggaaagcagcgtgtcgctgtctgcggcctggtggtcagctgctcagcagatccttgtggctgctggtggctgggac

SEQ ID NO: 103027 - DNA, 122 bp, Homo sapiens
tattaatggtgaacaaaaaacaatttctaacccaaaggctaaaaatctactggacagcatcgtggggtggatacaggaataggagtaactgtaatacagggctgacaaatcaacatcacatt

SEQ ID NO: 103028 - DNA, 122 bp, Homo sapiens
ccgccgaagctgtggggctccaggtctcgctcataaacatccacacacgtccagcgaccgcggcgataaggctctcccaggccgtggggcagcttcaccacccggaaacgggaggaaggggc

SEQ ID NO: 103029 - DNA, 122 bp, Homo sapiens
acatgttaaagctcacagacagccacggacgcgcagcagccatgcctttcctggagccagcgcaagcacacaggacaaagccacctcatcgacacacagaggcccttcccattcacaagctc

SEQ ID NO: 103030 - DNA, 122 bp, Homo sapiens
acagcaagagaaaatgagaaagaagcaaaagcggagacccctgataaacccatcagatctcgtgagacttactatcacgagactagcacgagaaaaactggccctcatgattcaactacctc

SEQ ID NO: 103031 - DNA, 122 bp, Homo sapiens
aactgttctagaaaaggcactgcatacattatggctgaatacggaggtgctgcccagtctcgcatggttgctcccagcagctttcatcactctcctaaacgcaacagaatgcctgaaccctg

SEQ ID NO: 103032 - DNA, 122 bp, Homo sapiens
ggaagagatctatggctctgaaaatgatactcagctgttagccggctgcctctaaaagggcgatgtctgcagctaaggtaggagcttgctgtggtaaactgttctaaagaaaggagcttctt

SEQ ID NO: 103033 - DNA, 122 bp, Homo sapiens
ttggttttcagtggtactccatggacagccctccgcgagccccggcgttgaacccatttacgattcactgggaaagttccgaagcgctgcagcgctcagccctcccacgccaggcgtgtgtg

SEQ ID NO: 103034 - DNA, 122 bp, Homo sapiens
aaaggagtaccatacaaagagactagcaaatgtaaaggcctggagatggcaaggtacacacggcatttgagaaattgaaaaaatgatcctatgcacggagctcaaaggagagactgagcaag

SEQ ID NO: 103035 - DNA, 122 bp, Homo sapiens
ccgcacaagcgtcctttcatggtggtgatcaggattagagaggacatgtagaacacatcccgcacagcgcctgagcatgctgcacacgtgcaggggtggcagcatgcaaacacagcaccctc

SEQ ID NO: 103036 - DNA, 122 bp, Homo sapiens
ggaagcggctaccagtaaccaatagtaacgcacaattggcccgtgggggcggggcgagcacggcttgctttctcaggagccaatagggaaaaggaaagtgaagcgtttcctgagttcggggg

SEQ ID NO: 103037 - DNA, 122 bp, Homo sapiens
gctgacattgccgacaagtcagccttgccctgttggaaggcatcaacaattcccaaatgccgaagcacagattccatgtcataatcctcttgtagtttaaattttggaaggagaacttcaac

SEQ ID NO: 103038 - DNA, 122 bp, Homo sapiens
caggcggttccagtgcgacccaacggcagccagaggccgccctgccccgccggccagaagcggactcggtgcagacatgcagctctctccgtggaatgtgcatgtgcacggaggtgagtgtg

SEQ ID NO: 103039 - DNA, 122 bp, Homo sapiens
cgcccctctcgcgggtcagaggtcggcgccccagctccgcagaacccggcgcccggccagcgccccctggcagcccctcccggcagcctcaggtccccaagacctgcaggcccgccccgaag

SEQ ID NO: 103040 - DNA, 122 bp, Homo sapiens
tccataaaagaacgggcatcaccattaaaaagatgggccagtctgggggcccttgctgtccggctctgctgcccacagacaagggcagggccctctgtgaacctgccgccctcagcaatgct

SEQ ID NO: 103041 - DNA, 122 bp, Homo sapiens
acccccaggtttctgattctgtgggtctggggtactgcctgagaatgtgcattgctaacacgttcccaggggacgctgcatctgctggccctggaccacactttgggtaccagtaaagtagt

SEQ ID NO: 103042 - DNA, 122 bp, Homo sapiens
ccggacggcgcggcccaaggacctgccccgggactggctgtggggcggctgtggggacaacgtggagtacggctaccgcttcgccaaggagtttgtggatgcccgggagcgagagaagaact

SEQ ID NO: 103043 - DNA, 122 bp, Homo sapiens
ccctgtaacccatggagaccagaccaacagctctgatgagctccacagtggctgcagctgcgcctgcagctggggctgcctccaggaaggagtctccaggcagatggggcctgggggaggat

SEQ ID NO: 103044 - DNA, 122 bp, Homo sapiens
cgcgtgcactgggacaagtccagcaaggtgggctgggccaggcccttggggtgggcacagcgctgggcctgctgagcccagcctcttgctctccccagcgcgtgctcactgccgacttctgc

SEQ ID NO: 103045 - DNA, 122 bp, Homo sapiens
cgccgcagggcgacgctcggagaccagccacactgtcccaagtcccggcgaagacccgcccgcggctccgtaggtgcccggcccgcccctcgcagcctcctgacttcccttcctgtcctcag

SEQ ID NO: 103046 - DNA, 122 bp, Homo sapiens
gacaacactccggaaatatgcgagcggcggcggaagcggaagtgcctcagcggtaggggccggggaagtgtctgtagcgtccctccctctcaaccacaataacaggcggagggtcggcgtag

SEQ ID NO: 103047 - DNA, 122 bp, Homo sapiens
ctccttgctatctcctatcctgccactggaaccctagcattggccctttccgaggagaaacggttgtttccagtcttcagcttccttcagctctcagaactagacttcccatgcgccctcag

SEQ ID NO: 103048 - DNA, 122 bp, Homo sapiens
caacccgcatttgaacttgcaggcgagctgccccgagcctttctggggaagaactccaggcgtgcggacgcaacagccgagaacattaggtgttgtggacaggagctgggaccaagatcttc

SEQ ID NO: 103049 - DNA, 122 bp, Homo sapiens
aatgggtggacctctggcggattttactgaaggcaacgtgtaaactgataccgaactccccgcgtctacgcagtgccgcaggcacagacttatgaattcgggaaatgtggaagtgaaaagga

SEQ ID NO: 103050 - DNA, 122 bp, Homo sapiens
cagtgcaatctaggactctattaatagaagtgtactgctcagatcccagtgagtaatggacgctttatacttttgtggtcagcccttatttggagttcagaggtaggtgcctcgttttgaga

SEQ ID NO: 103051 - DNA, 122 bp, Homo sapiens
ggcgcgctcaccccctatgtgggcgttttccttcgtgcagctgcgcccttgcctctgctccgtctgtcacctgtcaggcacgccagtgctaccttctggaggggctgtggcacatcctccat

SEQ ID NO: 103052 - DNA, 122 bp, Homo sapiens
agacttttagaggaacttgttgactaagctagaggtcttttaggtggatgagagatcacacgctcagaagggcaaaaccaggattgatgggtgaaggatactccccatctgttccatgattg

SEQ ID NO: 103053 - DNA, 122 bp, Homo sapiens
cgcagctgggttccaggagactctcagctcagctgagctagttgcctggcacccacctgtcgcgcgcggagagggggttccctgttgcttttgtgtctgtttcctgtccctggtaggggaag

SEQ ID NO: 103054 - DNA, 122 bp, Homo sapiens
gtgagagaattgagttagaggtgaccacaggtcacgtgtctggtgatgataatgtcttcacggaccacagaatataatatcaaggtaatgagaaactctactgtgcacttctttgttataaa

SEQ ID NO: 103055 - DNA, 122 bp, Homo sapiens
cagtagtgaattatatggatgtgttccagcaattgattgctgagcaaaaaataatcttaacgcatacaaacgccgggcatggtggctcacgcctgtaattccagcactttgggaggctgagg

SEQ ID NO: 103056 - DNA, 122 bp, Homo sapiens
catttcaaacgatttgcttctttcctttacagccactgccacaaaaacaattagcctgaacgggtgtgaaatccttgatgtgtaagacgacctagttccccagcctctctctagaaacacat

SEQ ID NO: 103057 - DNA, 122 bp, Homo sapiens
atcttgctctctcgatgctgccaggcgtagaagttgagcagctcttttcggctgcgcttccgtctctccctctccagcacccgcaagctggctgcctcagtccgggggagcacaggccgccg

SEQ ID NO: 103058 - DNA, 122 bp, Homo sapiens
gcttcacgctgagacgggagctgtggcatggcagagacgggagctgtggcatggcagagacggggagctgcggcacggcagagacggggagctgtggcatggcagagacgggagctgtggca

SEQ ID NO: 103059 - DNA, 122 bp, Homo sapiens
gcggcccaccgcgggcccggggcgccagcagtcgcggcggcgcctcgggctccagcgcggcgctctggtccatattgatcatatggaccggctcgggctccagctcctccccggccgagtcc

SEQ ID NO: 103060 - DNA, 122 bp, Homo sapiens
agttatttctagcttcgcacagcgcccggcccaccgagcgacctcaaacctcgcgacactcgcaactcccgaggcccttcctgctactggcctcagagggaagagacatcgggaagattgct

SEQ ID NO: 103061 - DNA, 122 bp, Homo sapiens
gtaaatatatttaatgactcattatttacctgtaaactaaaggtaactctccagctcccccgggagacatcagaagcctgggaaagcttcagagaaactgtgatactgatagaaggatgaaa

SEQ ID NO: 103062 - DNA, 122 bp, Homo sapiens
ttcccgctgaggttggcaggctggctgtcttggctccgtcttctcctctcagccccgcaccgtaaacgcgcatcctttgcgcagtctgtttagcaggtcacgttttgcatttttatggattt

SEQ ID NO: 103063 - DNA, 122 bp, Homo sapiens
ggatgtgtgagccaggaagcaggttcaagctgaaatgcacactccagagcattggagaagcgcctgagagcagcagcaaagaccacaaggacattggtcccaccctcccaggtgacaggcag

SEQ ID NO: 103064 - DNA, 122 bp, Homo sapiens
tggtccgtctaatcggggcgaatcaccagtcttctgaggcatcgtattgagtttagtttccgactgattgctaaatgccttcacgctgcgtggatattgcccagctctgcctcccttgctgc

SEQ ID NO: 103065 - DNA, 122 bp, Homo sapiens
tcccgcgaagtggtataatgtagtggttccctaatccagatggacacgggtcctagggaacgtctgaaaaatacaagttcatgggcctgctcagacatgaggaatcacgctgtcccaggaag

SEQ ID NO: 103066 - DNA, 122 bp, Homo sapiens
tcggaaatgtctgcttacagttggtttgtttaaatctagactccaagtgcacacattgcacgtggttatgtgtcttaaatccatttcaatctaaaagtctcccctctcttttttttttattc

SEQ ID NO: 103067 - DNA, 122 bp, Homo sapiens
agatcccttagagggtcccacataaggaatcagtgctgatcttatattgtcatttttcttcgatgtatgcaccaagtttaagtaagagataatttaaaagtgactagcatgacctcatataa

SEQ ID NO: 103068 - DNA, 122 bp, Homo sapiens
ccgccagggtctggctgccctagcccgggcagtgggcactccactccctcctcccttcgtcggcttcaggtgagcttccagggcctcgtctgcagagctggacagagctctccaggctgaga

SEQ ID NO: 103069 - DNA, 122 bp, Homo sapiens
ctgaatgtacacagggacactgttgggatgctttcttcttctcctgtggtctgctcataacgaagtctttatgactcaaagtaaagaaagtttcttcagacttttcaggatgtcatcacaat

SEQ ID NO: 103070 - DNA, 122 bp, Homo sapiens
tttgaagactacaagcgggaggtgttggaggccctgggtgaagtcatggtcagccggccccgagagtgagctttccttcccagaagtctcccgagagacatatttgtgtggcctagaagtcc

SEQ ID NO: 103071 - DNA, 122 bp, Homo sapiens
acgcgtgtcctggtgccctagaaccagggcagggtggcaggcttggcggatgtgggaggccgcagcctgtcctgtgcgctgtgggaagttcagcagcatcctgacctccatccccgggatga

SEQ ID NO: 103072 - DNA, 122 bp, Homo sapiens
catggcaacacatgggttacatgttatgataacggaactacagttcctccaggatggagacgttacagtcatgaggaagattcaccagggttcatctctaagttgccagggtctgtcaggag

SEQ ID NO: 103073 - DNA, 122 bp, Homo sapiens
tcaggtgtattaaatttattaatattgtttgaaatgtctaaggcaataattcccaaacttcgttgagggagaaggaaagcttttaaaatcccattgcccaggtggcatcccatactgttact

SEQ ID NO: 103074 - DNA, 122 bp, Homo sapiens
ttcaacagtcaaaagagaccggtttttattctgcagcaaaacaatgatattctgaacctacgtcaactaactgaacatgtcacacagcccatttccccctccagtttcgcttatctcctttg

SEQ ID NO: 103075 - DNA, 122 bp, Homo sapiens
ctctcgagtagctgagattagaaacttagttcctccatctgttgcataaggtggttggctcggattctcatccccaacctcccttctacttcggacacagctacaccgggtcgagcagggag

SEQ ID NO: 103076 - DNA, 122 bp, Homo sapiens
tgttgtctggggccctgctgttggccggtgctcttagcaagaggtcatttttctaggttgcgctgggacattgtgagtttggtgagggtcatggatgtgggctgggctgggctgggctgggc

SEQ ID NO: 103077 - DNA, 122 bp, Homo sapiens
gacacaactctgcatatagccttccacctctttcagcacagtccagatggtggtgagggacgctccagatcagggctgaggatggtgtcttgttggcttctgcccttaccctgaatccctta

SEQ ID NO: 103078 - DNA, 122 bp, Homo sapiens
catgaaagggttagctgccttctcccgtcccctgtcaaccctggcacagcctggaccatccgtgtgggttggacagacagatctgtggagttatggtgcagcccagcactctcaggcatggc

SEQ ID NO: 103079 - DNA, 122 bp, Homo sapiens
gtgtggcccctgactctcgtgggtggggagatgggggacaacggtggcctcaacgggagacggggccaaagtggggacctgcagggaggacctgcaggccccttgttacactgtaaactgtc

SEQ ID NO: 103080 - DNA, 122 bp, Homo sapiens
ggacctaattcctgtttttctccctccttttagattttgcaacagttctgaactcagttccgctgcctccctgagacccaatcctgcctctctgtcctaaaaacagtttccaccgccagccc

SEQ ID NO: 103081 - DNA, 122 bp, Homo sapiens
catacacgtctctgggtgctcactctgcttccggtcttggccttcccagcagtgtctctgcgctgccaccgggctcatccttgcacagctccccacaggacgcggtgtcgggacgactgatc

SEQ ID NO: 103082 - DNA, 122 bp, Homo sapiens
caactgggataaatgacccgggatgaagaaaccactggcatccaggaacttgtcttagaccgttttgtaggggaaatgacctgcagggactttccccagggaccacatccagcttttcttcg

SEQ ID NO: 103083 - DNA, 122 bp, Homo sapiens
actggtgctctggtcgccgggtcagagactcactggggacgcatgtgattcacactggtgcgctggccgccgggtcagagactcactggggacacatgtgattcacactggtgtgctggccg

SEQ ID NO: 103084 - DNA, 122 bp, Homo sapiens
gaaccttccccgcgtttctttcagcagccctgagtcagaggcgggctggcctggcatagccgcccagcctctcggctcacggcccgatccgcccgaaccttctcccggggtcagcgccgcgc

SEQ ID NO: 103085 - DNA, 122 bp, Homo sapiens
aggtcgaggttgacagaggaggtgggtagggggcgcgggcgccaggggcgatggaagcggcgatgatgccaggccgggtgggtgcgctccagtgtgaaaaaacttacaagtctctgagcaca

SEQ ID NO: 103086 - DNA, 122 bp, Homo sapiens
cgcgtgaggggcgcggcggggctggcgtcgggcgccccctgccacccgctctcggagctccgctcggcggcacctgccttggccacgcgccccagtcccgccaggcccctcggcgggcccga

SEQ ID NO: 103087 - DNA, 122 bp, Homo sapiens
aaccaggctggaggtcgagttaacagggtaaagaggccagggccctagtttcgcatccgccgactggcagctcttcttacgtgttctttcacggaagcccctccttgggaagccccgcgccc

SEQ ID NO: 103088 - DNA, 122 bp, Homo sapiens
gggtattgggaaaagttttcaattagcaataatcgcgcctcggataaacctcattggctacgatactgccactgcgcaaagctggaaaggttctgttcgcgccccgctcccccacggatgat

SEQ ID NO: 103089 - DNA, 122 bp, Homo sapiens
acctactgggcagcctcggatgagcgctgaccctctgacctcaggccccttgctgtaaaacgggcaacagagtccttcctgctgttgtgaggcacaaacaaggtggcacctacaagccccca

SEQ ID NO: 103090 - DNA, 122 bp, Homo sapiens
agaagaaagggctgggaagaggaggggtgttcggggttcttcttctcgtcgtgtctgctgcgatgagacacgatcctgggtcccaactgcaggtgtcaaggcgattcagtaaatgacacatg

SEQ ID NO: 103091 - DNA, 122 bp, Homo sapiens
gaggatgccctcttctcaagagccgtaccttgatctcatctgcagagatgcttttcccgacgtgaatggaatattctgaggattaggacgtggacctaccttgttaggggccaccattcagc

SEQ ID NO: 103092 - DNA, 122 bp, Homo sapiens
aaaaaaaaaactgctgttgctttccgcggactggctggtttctttaaaaatatattctttcgaaggaaaaaaaatctcttacacttcttcaaactgcttggcctcttgcacttgcaaatgtc

SEQ ID NO: 103093 - DNA, 122 bp, Homo sapiens
gctttagtgtgcccttttcctccatgcctgcagtaagagctgaggcttgaccaaacattccgtttgtttcgagcattggtaaagagcaggccaaagggcccgaggccccacgttggcggctg

SEQ ID NO: 103094 - DNA, 122 bp, Homo sapiens
gcctgagttttttaccaggttgttttatttttgcctgttgctgtgacttttcaggcaggccgcttctgcattgagtcttccccaactgattttctctttccttctctctcgcacacagttag

SEQ ID NO: 103095 - DNA, 122 bp, Homo sapiens
ttccttcccgaatgaactggaaacacctttgtaacaactaggggcccataaatggtcatacgtagcctcagtctggcaggaaacttaggagggagcccctacccaggccaggctgatggcca

SEQ ID NO: 103096 - DNA, 122 bp, Homo sapiens
tctgaaggtggatggctgtatctcccagtactggaccgggttgctgaaaagactcacacccgaataagaagcctttttggtgttgtgtccaggtgggcagaagtcacttgatccaactacag

SEQ ID NO: 103097 - DNA, 122 bp, Homo sapiens
atgcagatgctttggttttggtatataaaaggtggtcctggcaaaagacatttaatgccacgtacttcattattaaagctcaatgatctctcatggcatttcttggcctggtgacttcaatc

SEQ ID NO: 103098 - DNA, 122 bp, Homo sapiens
tctaaccatcgcccttttgcctgcccttaacagtatcggcctttgtcttagtcaagctttcgaggagcaactcagcaattctgttaccgataatcacctaacaggtaaacaagatggcaggg

SEQ ID NO: 103099 - DNA, 122 bp, Homo sapiens
gctctactgcagctacggccccttgacctgagcttatgccgtgaaacagcccccagcccccgtctgtcccccaacccaggctagccagccttttaacaacatcttttggggtacaattagaa

SEQ ID NO: 103100 - DNA, 122 bp, Homo sapiens
aagtaaataagacccttcaagaattttgcagtcgctccacctcaacatccgcgtaaggggcgtggctatacttaggggcggggctaggcaaagattgccctatgaggcgagggaatgagact

SEQ ID NO: 103101 - DNA, 122 bp, Homo sapiens
tgccggatgcggttgtggcccagctgcagctcctccaggaagtgcaggtccttgaaggtgcggggccgcaggctggcgatggcgttgtgggacagccgcagcacacgcaggcccagcagacc

SEQ ID NO: 103102 - DNA, 122 bp, Homo sapiens
ctgtcaggcctggagttgtgcaaaaatgaactttggctcttgcagcgaaggaaaattagacgctaaaaaccagggattttttttagaattacctaagacagggtttgtaagatttacaacca

SEQ ID NO: 103103 - DNA, 122 bp, Homo sapiens
agcctggagacctgcttcttgtcacatgcttcttatttatttttgcaaactgccctggttcgggtccagctgcagatgccttacctcccattctttgcctccgtgtgccatcttgcatttat

SEQ ID NO: 103104 - DNA, 122 bp, Homo sapiens
tctgtcttctttttaaactcacttaatatgccttaatcatctgtgtgtaatggagtcatccgctcctcaatctaaccctcctcccctggggctttggctgtcctcaatgagagtttcatgca

SEQ ID NO: 103105 - DNA, 122 bp, Homo sapiens
gatggaaatgtcgtggtcttgccctcgagaaccagatagaacagagacagagacagagcgcgcgccgcggtccctcagatcgtcctgcactacggcgaaacggccactagagggcgtgttgt

SEQ ID NO: 103106 - DNA, 122 bp, Homo sapiens
tatcttcctacttgggagcccaccggctgaggccagggggcaaccgcaggtgccagaaggcgggatttccgcggcacgcacgcacacccgcactcctacggaagtcagtttctcaccacctg

SEQ ID NO: 103107 - DNA, 122 bp, Homo sapiens
cagcgagccgggacttgccgcgccccggggctccctcaatcagacccagccaggcaagcgcggccacataggcaagcgcggccacataggctagacgcactatcttctcctctaccccgcgc

SEQ ID NO: 103108 - DNA, 122 bp, Homo sapiens
ggaaggctcagtgcataagtgggcagtcgttcaaccttctgtcgttcagttcataaataccgttcttattgagcatcctaggtgcagagctacccactccgcatacagtgagactgagagat

SEQ ID NO: 103109 - DNA, 122 bp, Homo sapiens
gtgcaaatgcatgaagggctctcactgttggtagtcattcagcaataaatagtaagtccacgcctagttatttcattatttctggattcaaaataatataaagtgcatccaaaggttgcata

SEQ ID NO: 103110 - DNA, 122 bp, Homo sapiens
agagcgccccacccgggagtcccccgtcctgcctagctccatgtgcaggacggcgctgtgcggctctaggtggaatgcactgggctggccctgccggctatctcagccccgagacccacgaa

SEQ ID NO: 103111 - DNA, 122 bp, Homo sapiens
cggtggattacgggtgaagctgaatcttgaaggcacccaagcctccgcctccgcacgactcggcagaggcagggaaagagcctcaaattcttagcgcgttaaaaatttctgcctagatctga

SEQ ID NO: 103112 - DNA, 122 bp, Homo sapiens
tcgccctccaccacatctcacctcctgagggactctgagagaacgcccggccagggtgaacgccgcggcaggagagcacgggagattgtgaagagcatggggagcctttgtcgtgcagcgtg

SEQ ID NO: 103113 - DNA, 122 bp, Homo sapiens
acttggaaaccggccacccttccccctctggggcgggagtggccactctcccgggcgttccgaatgacctcaggagggctgcatcgctcagcataactaaggccagcattaccccaaagcca

SEQ ID NO: 103114 - DNA, 122 bp, Homo sapiens
tgacgtcaagcctgaagctcagccgctaagccggaagctggcgccagaagatgccggttccgccagctgctcgccgcgcaggcgcaggggagacccggggccttgcagtcaccgggctcaag

SEQ ID NO: 103115 - DNA, 122 bp, Homo sapiens
atccggcgcctgtcctctttctatcctctcccgttgggaagccacttccggtaaagttggcgcttgcgcagaagagactcccgggctcttaacgtcgggtatcaggagtttcttcccggagc

SEQ ID NO: 103116 - DNA, 122 bp, Homo sapiens
aaccactgagtaagagggaaacaggttttgcacaagacgacgtgcaagtggaggatctgacgtggtttgaaaagccgtggggctttgactaacacactgaggcatggaggaaatgccaccaa

SEQ ID NO: 103117 - DNA, 122 bp, Homo sapiens
agactaccaaagccccaccttaaataacacaagcttttgttatatcataattatcttgtccgtatgtaaatggttcctctaaaactgcttgaaaacaattcattttcttaattttatagagt

SEQ ID NO: 103118 - DNA, 122 bp, Homo sapiens
tatacttttagagaactagattttcagttacccacatttctattagaatttattgtacagcgagttggagagcaggaagcagaaaagtagatcagagacttataaaacaagacaaggcttct

SEQ ID NO: 103119 - DNA, 122 bp, Homo sapiens
tctgcctaccgcctttcccggggcttttctgggaagggggaatagttatgtctggagccccgagtttacatcggagagagggaggcgttccctcaacttatttgtttgctcaggtttgagcc

SEQ ID NO: 103120 - DNA, 122 bp, Homo sapiens
cccacgatcgcaccaagaagagcttgcgagccttcctgctacatactgacattaagaaaccggacttgaaagggatcccagacaaacgttaaacatgcaacaagagggatagggtgtaagga

SEQ ID NO: 103121 - DNA, 122 bp, Homo sapiens
cctgccggccccgccctccctgcctctgaggtgttgtgtgcccttgacgtcagcccgtaccggctccgcctccgggcgagttgcgacattttcagtgcttcctgagaagagtttcgcgcagt

SEQ ID NO: 103122 - DNA, 122 bp, Homo sapiens
atttaagaaaattggccaggcccagtgactcacgcctgtaaccccagcactccgggaggccgagacgggcagatcacgaggtccggagatcaagaccatcctgactaacacgatgaaatcct

SEQ ID NO: 103123 - DNA, 122 bp, Homo sapiens
gaaaggttgaggcaaaaggagtgttatgttggggtctcgggcttggcaagggctggtgggcgggaacgagaggaacctcgtgtccacatctgaatcttgaaaacccttgcgttcacttggcc

SEQ ID NO: 103124 - DNA, 122 bp, Homo sapiens
tattattttcaagcactaactgcaatctaacttatatttttggtacagatcttgttctcgcggctgtaagtgagctttctaataacaaagtatgcttctattcatccatcttcataaccgag

SEQ ID NO: 103125 - DNA, 122 bp, Homo sapiens
ccaccgcaggcctcagatcctcccacgcctccccgctgctacccaacgatgacgcaagtacgcatgcgcctccccagctgccgctgggaagagcgcgctccccagggccccgccccctccaa

SEQ ID NO: 103126 - DNA, 122 bp, Homo sapiens
aaccctgtctcaaaaaacaaacccaaaacaaacaacaacaaacgcaggctaactgaataccgagcccatgtccccttccatgcccacaatgctgccttgcctttgtgcagaatgtggttaga

SEQ ID NO: 103127 - DNA, 122 bp, Homo sapiens
ctgaaaggatggacagggagggaaggccagaaagctggagacggggatggagagctaaaccgcaaagagcaggcgccctgccccgctgagggccccgcgcctccagctcctccttcccgagc

SEQ ID NO: 103128 - DNA, 122 bp, Homo sapiens
tgaggggctgaaccgccgcgagaggaatgtgttaattttctggctgggggaagttgtcctcgcccggaatgggctgctttccggcggggagcgcggggtgcgcctggctttgtttatttgta

SEQ ID NO: 103129 - DNA, 122 bp, Homo sapiens
ggtggtgggtggaagggcctggggagggaggctccaggttggctcctgttcccgaacgtgcggaggagaccctgacgctaaggaagcaatgagggccagtccccaggccaggctgctgctgg

SEQ ID NO: 103130 - DNA, 122 bp, Homo sapiens
gcgcttttgccgactgctagagcttacccttactttcttaacctggggttgttttacttccgggctttttgaactctacactctcctacattctaggagctgggtgggagtaggagacggtg

SEQ ID NO: 103131 - DNA, 122 bp, Homo sapiens
cttctctgagagcagctgccgatgctggaatatttcctagagcaggggtccccaaactcccggccgtggcctgtgaggaaccgggccgtacaggtggaggtgggcagtgggcgggcgagcat

SEQ ID NO: 103132 - DNA, 122 bp, Homo sapiens
gctttaagaaaaacatggaaacaatgaacagacgcaagcacgcagagccgcacgccctgacggtgcaccccgagccaggtggcacccagcagccaggaaacccatgagtgacagtggccaag

SEQ ID NO: 103133 - DNA, 122 bp, Homo sapiens
taattgattttccccgcagccaatgcgcggcggcctgggcgggggcgcctcctgattggccgagcactcctccacggctgcctaccgagatttgggtgagctcattttccagtcgaccgcag

SEQ ID NO: 103134 - DNA, 122 bp, Homo sapiens
aggagcgagtccagtcgcaacaaactgctgagacgcacagtctccgtgccggtggaggggcggccccacggcgagcatggtacggcggccgagcaggctctcatgacccggacaggcgcggg

SEQ ID NO: 103135 - DNA, 122 bp, Homo sapiens
agcctttcatttttaaaaaagtttccccccgtgtgtgtgcgtgcgtgcgcgcgcgcgcgccgttctggcacaagccagccttgaccgttgcaataaatgagcaaactgtccgagttggcccg

SEQ ID NO: 103136 - DNA, 122 bp, Homo sapiens
ccgtagcacgaccctgaaggggccagccggaagaaacagtactgcgcgaacaatctttaccgcattgtcttcccctcccccaccctagctctccgggttcccggcggctcgcgccgaagccc

SEQ ID NO: 103137 - DNA, 122 bp, Homo sapiens
cctgttcctgctatcagctgcgccgctgcggccgccgcctctgccccgcaggttccgctccgctccctctggctccccaagccgacttcagcccggctgctgccctggcccactccccggct

SEQ ID NO: 103138 - DNA, 122 bp, Homo sapiens
agccgcgctcgctgcaggcggcctcgagcgctctctcgttgatgccgttttggaggtgaccggcgcggcggccgctctatggtggggccgcgttagtggctgcggctccgcgggactccagg

SEQ ID NO: 103139 - DNA, 122 bp, Homo sapiens
tgaagtaaccagaaaatcaacaactggggctttttccatttctggctataacctagaaatcgttcgtggtggtcaaaagtatgcccccagagccaattagtctcgattcaattccagcactg

SEQ ID NO: 103140 - DNA, 122 bp, Homo sapiens
atggtgggcggtcggtggtcggggctgtaatttgcacacgtgtttgtgatttagtgattccgattgtcgtgcgaggccatggagtaggtgcctggctgctccgtgtatttttgaatgaaggc

SEQ ID NO: 103141 - DNA, 122 bp, Homo sapiens
attatttacctgacagggcaaaagagattttgcagatgcaattaaggttaaggaccttgacgtgggaagattgtgattatttacctgacagggcaaaagagattttgcagatgcaattaagg

SEQ ID NO: 103142 - DNA, 122 bp, Homo sapiens
cggccgcatgagcgcaaaagcagggcagcgaggtgagcagagccagagttcagaaggggccgcaagtcagacgaggggctgggaaaaaagagcctctcccaaggttaacagaagcgtgcgga

SEQ ID NO: 103143 - DNA, 122 bp, Homo sapiens
ggagagagctgttcagacacattccccatcgagccttcaggggcttggagaacaggtcagcggagttagcccaactcacgggcgggaaggcatcccaggcagaggaaaggcgcaggtgcgca

SEQ ID NO: 103144 - DNA, 122 bp, Homo sapiens
tccgagccaagggcactattggccagttccgttcaacgaagtggttgctttttttagttccggcaatgagttgcgccggggcggcggcggctccccgcctttggcggctgcgcccgggggcc

SEQ ID NO: 103145 - DNA, 122 bp, Homo sapiens
tcccaagcacaccgggaacagataccggctccgcctgggaacgacgcggcccacagcccacgcacagagcagccagaggcaggcgcaagaccacagcagcaggactggggaggcagaagggg

SEQ ID NO: 103146 - DNA, 122 bp, Homo sapiens
cctgccgaacgcttcgtgctgtttctgcaatgctcacttgcggtcacatagttagacatccggatgatggatagatgaggagacacagtgcagactgggcgtggctgaccaccacacgtgcc

SEQ ID NO: 103147 - DNA, 122 bp, Homo sapiens
cggtcgccggagcagagcgcgcggggacagggtggagcccaactacctgaggatgttgtgcgcctccatgctccggttctggttgctcgagcacaccaccgccacccgcagcggggacgacg

SEQ ID NO: 103148 - DNA, 122 bp, Homo sapiens
ttcttttgctgagagctttttgttagtaaattctgctttcctcacctttcagcgtgttcacgtgcctaacttcttcctggttgtgggataagaacccaggttttcgctgagctaaggagaag

SEQ ID NO: 103149 - DNA, 122 bp, Homo sapiens
gcggccacccgggctacctgaacggagtgggcggcgcgggcagcggcttgctagggcgggcgggcggacgccggtgcacgggcgccgggcggaggatgcgccaggagcggcgggcggctccc

SEQ ID NO: 103150 - DNA, 122 bp, Homo sapiens
cggagtccacccaccttggcctcccaaagtgctgggactacaggcgtgagccactgtgcccggcttcacattctgtttctacagatagtgcatccacatatttggggggaaggagcattatg

SEQ ID NO: 103151 - DNA, 122 bp, Homo sapiens
tctgggagctcgaggcacccatgcaaacctgtgctgccagtgacttccaccagagggcagcggcagcaggtgccggcgctggggcaggactgggaggagtctcactctgggggcgcctggtt

SEQ ID NO: 103152 - DNA, 122 bp, Homo sapiens
tctcccctcatttaccctggcttcctggacaggtccttcaggaagagacaataacagggccgggtctagggtgaggcatgtgaaacctggagtgaatgaggcacttggctcaggttcaaaac

SEQ ID NO: 103153 - DNA, 122 bp, Homo sapiens
gcccgccaaccctgagcttcaccccagggctgtatgacctcagggtggaaagggaccacccggaccatgctgcccagtccgtcatctcggcattaaagggaagtgaatttcccaagatcacg

SEQ ID NO: 103154 - DNA, 122 bp, Homo sapiens
caggcaaggcagtaaacctgggattgcctgcccaggactgtaatcacattgatgtcccagcgccatggagtatgtaatgaatgaactgccagcagaactactcactaagaactactccctgt

SEQ ID NO: 103155 - DNA, 122 bp, Homo sapiens
aacccgggcacctcgtcccctttgtcccacacgaggcattcttacacgggccaggcacaccggagtcacgttgtgctgctggccccagtggctgaaagtagaggctgataaatttaaatcac

SEQ ID NO: 103156 - DNA, 122 bp, Homo sapiens
cctacctggattataattcattaagttctctgtgccctgtagttgtagattaagggaatgcgattggattagtgtggaggggctttttatggagccaagcaggagtttttaagcttttgtac

SEQ ID NO: 103157 - DNA, 122 bp, Homo sapiens
gatatgggagtcgagagaggcattaatcaaatggtcagacaaatggaggaaggctgcagtcgggggcaggcaccagggatttccctacctcgaacctgcatcactgcaagtgcctccgggag

SEQ ID NO: 103158 - DNA, 122 bp, Homo sapiens
ctggggaggcacctacaaagccagcagactgacacccgtgtcctagccgtcggcggcctgcgaagcgatagtcaaaggaaccaggacccaggaccccggcgctctgcttacccgcagacctc

SEQ ID NO: 103159 - DNA, 122 bp, Homo sapiens
tgctccagaactaagtactgtgcagttaagggtggtcgtggtagcacttagggtcttccacgttaatgaaaatgttttatgagatcaaaggatttctacagttaggagagacttcagagaat

SEQ ID NO: 103160 - DNA, 122 bp, Homo sapiens
cagggcaccacccagccacacacgccccaccccatccctactccaacccagcccagggagcgggagggcacacatctgcactcacaggctcctcactcacaactgtacttcataccggaagt

SEQ ID NO: 103161 - DNA, 122 bp, Homo sapiens
gaggatcaggaagctggtgttcagagggatcatgggattttattaaactggattttcaagcgatttgtctgttataggaaaaatgagggttttacttctgctgctttccatcactattttgc

SEQ ID NO: 103162 - DNA, 122 bp, Homo sapiens
cactccggcttctcgccacagacagcgtgctgaggttcacgtagctgaggcccggggagacgggggaggatggaagctggcaggagggtccccggatgacagccaggcggctggcatgggga

SEQ ID NO: 103163 - DNA, 122 bp, Homo sapiens
cttccaggcagggccaagaggcaaaggcctggtggggctgctgaggcaagtccagctctgcggatcccttaggacgaggaacctccccccaccatggtgggggtgtgggtaagagatgcctg

SEQ ID NO: 103164 - DNA, 122 bp, Homo sapiens
aagacactcgcgcaaagttgtggctccacccaaggcacctgctccgcacactttaagcggcgccctggaggcgggaggtgggttggggccaggaagcccttggccaatgaaagtagacagag

SEQ ID NO: 103165 - DNA, 122 bp, Homo sapiens
caagctcagagccatttgaccgtcatgcacctgctatgttacgggaacggggcactccaccggtggatccaaagttggcctgggtaggagatgtcttcaccgccacacccgctgaaccccgc

SEQ ID NO: 103166 - DNA, 122 bp, Homo sapiens
tccccgccccccttcagctgctgcgcggagcgggcgcccttcccggcgcgtctgggcggtcggctgcgtgggggcgtccagatggaagcttggacactcaccctgcccctccagacacacat

SEQ ID NO: 103167 - DNA, 122 bp, Homo sapiens
agcagaccaggtttatgttaggaaactatgggagctgcaaatacacacggaaaacacttacgggacacgtactatctgcctcagcctagtgctaagcactttacacattttctctcttgtta

SEQ ID NO: 103168 - DNA, 122 bp, Homo sapiens
gatggggcctctgtgccatgcaacaagggacacaagaacagggcttggggtccaggctggcggtggcatgcctgccacctgcagaccctggtcagtgcaggatggtgcctccaacacgggct

SEQ ID NO: 103169 - DNA, 122 bp, Homo sapiens
acacgcaccagaggaagcgggacgagtggatccgcacggggctggccggctccgggacagcgcgccccgcccgcccgcccggcgtgagccggaccccgcagccggacgatcccgcgctgccc

SEQ ID NO: 103170 - DNA, 122 bp, Homo sapiens
gggacatctctgcccctctgcttccctcggaagctggttgtgaagccgggccagtggctgcggggacagctcatggccctggaaagaccccactggcatgcggcacaacatctgctctgaga

SEQ ID NO: 103171 - DNA, 122 bp, Homo sapiens
cccatgcatgcatgctggcagaattctcccttcctgctgacagagctgtattggagagaccgatattagcatttgttgaaatgtttctgagccctctggattttatctcgcctccatgtggg

SEQ ID NO: 103172 - DNA, 122 bp, Homo sapiens
agaaaggaaaggagaggagaacaaacttctaaaagcacctactacgtgctcagctttaagcgaaattattaatttatggtttaccacttgccttcaaggaactgtctaatacaattccagaa

SEQ ID NO: 103173 - DNA, 122 bp, Homo sapiens
agcgctgcgcgaggtcagcaccaaggacagcgcccgggccgagcgcctggcctcgaacgccgggttctgctttgtgtttccaggtttttgtttttggttatgagaggaggcctggctctgtc

SEQ ID NO: 103174 - DNA, 122 bp, Homo sapiens
tgtggagggccgggtggtgacactcagtgacaggtgaggatgtggcacggtgtggagggccgggtggtgacgctgagtgacaggtgaggatgtggcacggtgtggagggccgggtggtgacg

SEQ ID NO: 103175 - DNA, 122 bp, Homo sapiens
cttgcttggagtctatagctttgctaggactcccatgacatcaggatagagattgaggcacggggtcctttgggttccgattaaggaactatctactctgattctgttgatcttattagtcc

SEQ ID NO: 103176 - DNA, 122 bp, Homo sapiens
acagatctgcaggagaccttttttagaacagcgtccgctttctaacgaaactcctgcctccgtctaaggcggcactctaacgctcgtttcagagatagcaccacgttggaaggaagaataaa

SEQ ID NO: 103177 - DNA, 122 bp, Homo sapiens
agagtgagagataattaacaaaaaacatggccccaggacaatgaaacaactggccttggccggccagaaatgtatcctggttttctaggtgaactttctcccatcaatctttcctttaacct

SEQ ID NO: 103178 - DNA, 122 bp, Homo sapiens
gactaatgagagagacaggcatacaacaaaataatggcacacaaaaaatgagctagaatgcgtggagacatagtgtagcaattgcctatctatagagtagggtgaaggaagggcctgaaacc

SEQ ID NO: 103179 - DNA, 122 bp, Homo sapiens
accggcccgtcctgcgcaagatcgaggaggtccgtgccattctgaggaccctcctggaggcgcggaggccccacgtgtgcccgggggaccccgtgtgcagctatgtggacgccctgatccag

SEQ ID NO: 103180 - DNA, 122 bp, Homo sapiens
caggcccggcttagcggtgccggggcgagggattaggggcagtggccgcacctggcggggcggccgcagggctaatgctgtgtgaccgccgcggccccgcccgacaactggcttcatcccgc

SEQ ID NO: 103181 - DNA, 122 bp, Homo sapiens
cgattttaggaattatgccactttatgccagcgaatgaaggactgtcccaaattctacaacgaaatcctccgtgaagcgggccctcagcttgagcgcaggctttgaggaggtctaaaacgtg

SEQ ID NO: 103182 - DNA, 122 bp, Homo sapiens
accactgtgctgaaccaccaagactcctactttcctccttggccccttatctcaccatgccgagagatgtcgcagacagatacctccttcgtgttgtgacccggagccaggtcttcatagtg

SEQ ID NO: 103183 - DNA, 122 bp, Homo sapiens
ataatcaaatgattggacaaccacccccacgtcagcaatgacacttcgccgcagtaaaggcgggtgctagcaacctgcttcttcactgttaaggtctacagcaaaccaatcctcttcctccg

SEQ ID NO: 103184 - DNA, 122 bp, Homo sapiens
agtgattcctcttccttttgccaaacttccacagaagccaaataaacagtgtagacactccgtcactcgctacggccacggcggccactcggatcacactctgtcactcactacggccacgg

SEQ ID NO: 103185 - DNA, 122 bp, Homo sapiens
atcacgccactgcaccccgtgatcacaccacctgcgctccatgaccatgtccctgcactccgtgatcacactgaggcctccatgccgtgaccacgcccctgcactccgtgaccacgcccctg

SEQ ID NO: 103186 - DNA, 122 bp, Homo sapiens
gccacccttcacccttcctgggcttgatctcctggccttcagctggaggccgatgcccagcgtccaggccaaggggaaccccagtccctgtggggccgcgcatgagtatccgcgagcggggt

SEQ ID NO: 103187 - DNA, 122 bp, Homo sapiens
ttctggggcctcatcctactggctcctctgccgggatgccagttaatatctgaccagccccgccctaaactccaaaattcagaccaaagccttgcccacgtagccctggaccaaccgtcctt

SEQ ID NO: 103188 - DNA, 122 bp, Homo sapiens
cgtggccaggcaccccgggtcaccacctctcgacccagggcgagctcacgccgccgcctgcgcgctgaactgggagctgggagcagccgacatcggtctctgaaaccctgcgctgggaggcc

SEQ ID NO: 103189 - DNA, 122 bp, Homo sapiens
cccaagggtggggaaggtcttggctggaggatgaaggggcctcttgtctctggggcgaggcgatgtcaaggggaatgacaaaccaaaccagtccaaagcaaggggactctgtgtcctgggtt

SEQ ID NO: 103190 - DNA, 122 bp, Homo sapiens
ggcctttcctgctgcttccatttcaagggtatgatgacagttttccaagttctgagtgtccgaggtcacccgggaggctgcccgacaccgtggcctagccttgaccaggctcttacggtcag

SEQ ID NO: 103191 - DNA, 122 bp, Homo sapiens
cacatcgctcacatagtggagcttctgggggacatccccccagccttcgccctctcaggccgctattcccgggagttcttcaaccggagaggtgagggcccgggcagcctcaggccatgtgg

SEQ ID NO: 103192 - DNA, 122 bp, Homo sapiens
gtcgccgttgatgtagccgcccgcagcggtggccagctccgggcgcggggtgggcggcggcgcagaccctgcagccgccggacccagctctccacgcacagctgctgcgtacatgggctccg

SEQ ID NO: 103193 - DNA, 122 bp, Homo sapiens
agcatcaggagggttgaaagaatatctgccaatgacccaactctgaggttggtatggacacgttgcacacaggttgggaaggtggttcccttgaataaccattatcactcaattctgtaaat

SEQ ID NO: 103194 - DNA, 122 bp, Homo sapiens
atgagaaaactaaggctcagaggacgggagcagcgttcccaacgacgcgcctggaaaaggcgaggcctggagtcgccatcggactgtaattccaagcccagtcctttccccgctgggttgga

SEQ ID NO: 103195 - DNA, 122 bp, Homo sapiens
cgacagttggcgatgacccgctgcaggtcggccacaaagagcttccgggtcacgtagtagcggcttcgcagccgctcagtcatggtcttcaggtctggggcagcaggagacggagcacagct

SEQ ID NO: 103196 - DNA, 122 bp, Homo sapiens
ctgcctggggggcctcaaagggtgatcacccagcacaagctctcctgcctggcctgggaccgagagtcccagaagcccctgggctggccggatgctcaaggcctcactgagggcatgcgtat

SEQ ID NO: 103197 - DNA, 122 bp, Homo sapiens
gcaatgtggttttccagagtgcatccctcttagtgcaaagtcggaaaccgggaggctggacgactgggagaaaaatgaagcaggctgaggaaaggctgggcggaggcggacagccgggccgg

SEQ ID NO: 103198 - DNA, 122 bp, Homo sapiens
gcggtagcttggttcctgagcggatgctggggctgtaaggcgcgcgcggtcagctgttggcggtgcagggaggaggacgccggggctcgccttccctcctctgccgccgctgccgccatgat

SEQ ID NO: 103199 - DNA, 122 bp, Homo sapiens
cggcattagggcaggggctggtttctggggactcgtgtcatggtggtcgccacagtgttacggtagatgctagcggaggaaagggacgttgaagacttccctttgatttgtttcatgaaaag

SEQ ID NO: 103200 - DNA, 122 bp, Homo sapiens
tctttattgattcaactttattgattcaattgtctctttattgaagcgcctactctgtgccggccatggtggaggcaggagctgggccctccccggttgctgggaggagacatccaccggga

SEQ ID NO: 103201 - DNA, 122 bp, Homo sapiens
ctggggagagggatgggaccgaggccacagcaggttggggcaccagggcctccaggcagccgctagccatgcctgcttctgcagggacaccaacgtgcgcttctccgccgagctgcgccggc

SEQ ID NO: 103202 - DNA, 122 bp, Homo sapiens
tggtggatgagaatcacggaatttcggctttggaagggattttagtttccttgtctgtgacgtagagggtgtgtgaggccccgaggagccaggagacttgctcagggtcggtggcccagaag

SEQ ID NO: 103203 - DNA, 122 bp, Homo sapiens
agctcttgtccgccacgaccgaatcgttagtggctcgcgtatcggcgcccagaatgaccccgtcctgaggagagggagggaccgcagcttcagtgcctgctcgatactctcggctcccctcc

SEQ ID NO: 103204 - DNA, 122 bp, Homo sapiens
ctcgttctgcgcactgccgcctgggtttccttccttttattgttgtttgtgtttgccaagcgacagcgacctcctcgagggctcgcgaggctgcctcggaactctccaggacgcacagtttc

SEQ ID NO: 103205 - DNA, 122 bp, Homo sapiens
aaaaacaaaactacacagtcaagactgtgtagttttgcttttctatgcaatccctacacccgaggcgaggctgggaatgcacgactgctcaagagccagggtctggcctgcccttatattca

SEQ ID NO: 103206 - DNA, 122 bp, Homo sapiens
gctatgtcacacagctcaaggtcacacagtaactgcagttaggactgaacgccgaacccacgttctttccagccgcaccgcactgcctttgttctggctatcagatgtaactcctccaactg

SEQ ID NO: 103207 - DNA, 122 bp, Homo sapiens
cgcgcctagaggggatggggggtggtgcttctgggagctgcgctgccctctcccccacggcgagccggcctgcacgttctggaagcctccaggtgatgggtcgggggagtctgtggactcct

SEQ ID NO: 103208 - DNA, 122 bp, Homo sapiens
tgtaggggcttcctgcggggcaccgtgagcgcaggtggggacaagcgggccgtgcagatgcgcaccccctggatgcctggggctccttccaacaagagccctgtgttggaatgccgggtccc

SEQ ID NO: 103209 - DNA, 122 bp, Homo sapiens
caccagccattgcgtgattcacctaacatcgcttacatttctcagtgtaaagttaagcagcgcaccaaacctttcagcagtcgctaagttgggctcagcactaaggagcacctgacttttcc

SEQ ID NO: 103210 - DNA, 122 bp, Homo sapiens
tcatggagatgatggcccaccaataggaggcggggatgctggtgaactccagcacccgcccggactccttctcggccacgtagaccaaaggggagaagagggtgatggccacggccaggaag

SEQ ID NO: 103211 - DNA, 122 bp, Homo sapiens
cacttggggtctacacaccatggcggggggaactacccgactttgagagggtcccctcttcgctgagagctgtttgttagctcaataaaactcttcaccctgctcacccactggctgtcagc

SEQ ID NO: 103212 - DNA, 122 bp, Homo sapiens
ttggagaaagagtgcgcgcgcgcgagctgggagtaagggggagtctggtactgctgggctcgggattcggaccaagtccttggcctcatttgtaccccgttgtaaataactacgcccttaaa

SEQ ID NO: 103213 - DNA, 122 bp, Homo sapiens
gtcggtggaaaattgatgatcgcatagtggtcaagctcgtttctcctgggggcgctcttccgaggatatttgggctgcctccggagtcgcagtgtcttgggctgccagaaggcgggtgacgc

SEQ ID NO: 103214 - DNA, 122 bp, Homo sapiens
gctgccggaggaaaaaagcggtcctacaccaaggactacaccgagggatgggtggagttccgtgacaagcgcatagccaagcgcgtggcggccagtctacacaacacgcctatgggtgcccg

SEQ ID NO: 103215 - DNA, 122 bp, Homo sapiens
gtctcaaaaacaaaaaacaaaacaaaaaaaacagcctcacccttgagcccacctgcctggcgcctagggagcccccaaccctgccggctctccacctggccctgcgtcctcccccagcttcc

SEQ ID NO: 103216 - DNA, 122 bp, Homo sapiens
catgctccgtgggaggggttgcgcctgtgtatagctttaggagccatagctttccactcccgaacagcaactgggaatcaaaagggaagcaatgtccaggaagcaacctgagtgtgtggtgg

SEQ ID NO: 103217 - DNA, 122 bp, Homo sapiens
gacctttggcgagctgattcattcagtgaacaaacatttaccgagtgcctacttgctgtccggcactggggcaaggggtcaaaggcagtgtctggcctcccggagctcagcaggcagaggga

SEQ ID NO: 103218 - DNA, 122 bp, Homo sapiens
caaccctgagaatgggctgcgtgcactctgcagagtcaaagcatgaacaggaaagctgttcgctcaacattttaaagaaatgtttattttttggagggtggcgcttgggggaggggaagttc

SEQ ID NO: 103219 - DNA, 122 bp, Homo sapiens
tactgacaatccaggcggggtaattctttactgtgggcaggaggaggggggaggttggcccggtattgccagatgtttagcagcacccttggcctcagcccattagatgccagtagcaccct

SEQ ID NO: 103220 - DNA, 122 bp, Homo sapiens
gatgaccgtggggaccagagctcggactggtaccggccggaaaggccccgacgaacttaccgtacagggcagcctcccatagtcctgccctcggaaccatagcaaccgcgcaggaagttcct

SEQ ID NO: 103221 - DNA, 122 bp, Homo sapiens
ggtgacttctcaggttctcggggtggcagctgcagtgatgacaccgcttcctggtggtcacgccgcgggcaggacgcgggaggccaggtccgtgcatcccgcgtgtcctgagcttcggccca

SEQ ID NO: 103222 - DNA, 122 bp, Homo sapiens
tccatgacaactgctgattccagtgtcgaggccatttctctttgccactgagaaatgcagcgtgactgactctgttgctacctgtcaacatgaatgtttctgtgagctctggtgtcactcat

SEQ ID NO: 103223 - DNA, 122 bp, Homo sapiens
cactagggacctgaagtatggaagctgccatccagggattagggagctgaatgaagaagtcgctgctatagtcagtttctgaatacctaggaactttcaagaaaactagcttcttaacaaca

SEQ ID NO: 103224 - DNA, 122 bp, Homo sapiens
aaagtatgtgtcagaagtgggattcgaacccacgcctccattggagaccagaatccccaccgcggaggaagcttagcttgagtctggcgccttagaccactcggccatcctgacacactgca

SEQ ID NO: 103225 - DNA, 122 bp, Homo sapiens
ctcgagctctcgaggggatgactcttcccgcagcgtcggcagtctgaggttttccagtgacgaaagacatccagtcccaatgtccgagatgctcagagggagagatgggcaagactctgctc

SEQ ID NO: 103226 - DNA, 122 bp, Homo sapiens
gaggcggaattcggggcagagcggggtctccccagcgggccacgtcccaccagcaggtggcggtcgatctgcaaggcctgcaaggtgcccggacagaaacttgagcagatattggtgccgct

SEQ ID NO: 103227 - DNA, 122 bp, Homo sapiens
cctacggcagatagccatgtgtgagcctgaatttggcaatgacaaggccagggagccgagcgtgggtggcaggtggcgagtgtcctggtacgaacggtttgtgcagccatgtctggtcgaac

SEQ ID NO: 103228 - DNA, 122 bp, Homo sapiens
tactgggggaggggcgggaggctggggccgggagctccaagttccctgcataaaattccacggaagggggagggatgtcctcttctccggttcccgcccccacccctgaaaattatctggaa

SEQ ID NO: 103229 - DNA, 122 bp, Homo sapiens
tgtgtgagtgtgcgcaggcgtttatgcaagtgccttcatgcgaattaatgcgtcctttgccgggtgtggcagcagaggaagtgcctcggtgaagatcagaccctcgaagcgattagagggac

SEQ ID NO: 103230 - DNA, 122 bp, Homo sapiens
gcccctaccccgcggctcccgcggcgcctcccgggtttccgcgtccaaggcgctccggcgcgcagttccggagtggagggaggaagtccaatcctgcgccaggctccctccctcccgcctct

SEQ ID NO: 103231 - DNA, 122 bp, Homo sapiens
ttcttgggagggggtgaaccaacttctggtgagttttccttgttgaggcaatgctgcacccgtagcctgtttgttaataattacctggtcgggagagagtgggtggtactgagaaggcctgg

SEQ ID NO: 103232 - DNA, 122 bp, Homo sapiens
ttagactggctccctcatggtcccaagatggctgccttaactctcttgtgcagacaacaacgtcagagaccgaagaaactggatgctttcttattagtctctttcccaggggtccccaccag

SEQ ID NO: 103233 - DNA, 122 bp, Homo sapiens
tcggaacttgcacccctccaccgtaaattcccgggcttgctcttaaattttaattttgagcgttcctcaggtcggtgcctccgcttgcttcctgttcctcacttccctccacccacgcctgg

SEQ ID NO: 103234 - DNA, 122 bp, Homo sapiens
cgctgctcgccgagagggaccccggggtggtgttgggcgcgcggggcggggacggggacgcgctgcggccaagtccccgggccctgcgacccgcagggaccttctggacgcacggagcccgg

SEQ ID NO: 103235 - DNA, 122 bp, Homo sapiens
aaaaatgcactatataaatgtatctatctagaattcagggatcggtgaaacaaaagacatcgcatcggcaggtctgtttgcaacttctgggatacaccaggtgttagcggtgatgacttctg

SEQ ID NO: 103236 - DNA, 122 bp, Homo sapiens
ctcgccctcttctgcacttcggtctcaggcgcaaacacgttcaaagtcgctaggccaaagcgctgagatacggtttcccaagccaattagagagcggctctcggatatggggcggaaccctg

SEQ ID NO: 103237 - DNA, 122 bp, Homo sapiens
aactatgctaattttatgcacctaaaaagcagtaactgaaattctgcctttgacatttgacggtgcaaaaagcactaagtaccttatttgttctacataaatgaactttataatctgcaata

SEQ ID NO: 103238 - DNA, 122 bp, Homo sapiens
caggggctgtgaaggaagagtgagtgtcaccctagacggtcatctcagtggtgatctgaacgccctctacctctcctgcctgtcagtgtttccctacgcctggtgaaggaagtcagtgccag

SEQ ID NO: 103239 - DNA, 122 bp, Homo sapiens
tgattaactaaaatgaaagccccgggcatttaaaaataagattcctccctcttgctgtttcgccaggaattgtccttcaggtctttgtgtcctgagatcattaaaccaaggatgactcaaaa

SEQ ID NO: 103240 - DNA, 122 bp, Homo sapiens
aagaagacgggaagacctggcttgtgaccctggcttcccatgtccttctggtctcacccgcgaagtgccctatcctggaagtatgaaatgttagccaattaataccaagacacctcatctgc

SEQ ID NO: 103241 - DNA, 122 bp, Homo sapiens
gatgacggacggggtgactgtggggccaggtcccccaggcgagctctgtgagtccttggtcgtggtggagacagcgcagcctgggtccaaagcagtgaggagcacaggccacagcacgcagc

SEQ ID NO: 103242 - DNA, 122 bp, Homo sapiens
tgtgacattatcaaagatgtccgcctgcatcccagtgaaagatatggaaacgatacgaagcgttgtattgataatgcatatataaaaacctgaagatagttaattaagaggtgtatcaatgt

SEQ ID NO: 103243 - DNA, 122 bp, Homo sapiens
aaatcacggtcaattcacctggtgctgctttgacttcaggctcttccttctgcccagctccgtcccacccagcagcccgcagagaaaggaggcagctggcaccacactgggctttggagaca

SEQ ID NO: 103244 - DNA, 122 bp, Homo sapiens
taaaatggctcgtttcaccattgtggatgggaagatggggaaaggagtcagcttcaaagacgtggcaggaatgcacgaagccaaactggaagtccgcgagtttgtggattatctgaaggtga

SEQ ID NO: 103245 - DNA, 122 bp, Homo sapiens
cacgacgcggacccagttctcactcccactgagtgtcgggtttctagggaagccaatcagcgtcgcgcggccccggttctaaagtccccacgcacccaccgggactcggagtctccccagac

SEQ ID NO: 103246 - DNA, 122 bp, Homo sapiens
ttggccaaatcattccttctctagaaaggctcagtggccccctgggcctttggcaggagacgtgtgaaaatccccagtggaatagggaaagccacacactaaagctgggccaggtgggcctt

SEQ ID NO: 103247 - DNA, 122 bp, Homo sapiens
atcgatagattccaacaccaagatgacagaggtgtcagaattatctaacaaaatttaaagcgggctttgtaaaaatatttcagtgaataactaagaatatgcttgaagcaaatgaaaaagga

SEQ ID NO: 103248 - DNA, 122 bp, Homo sapiens
ggtaagagggaaggtttttggcttcacctaaaaagtaaaagcgacatacatcatcagcagcgtagaaatgtttgttccctgctacatcgcagacacgtttccagcctttgcttgtgtgcatt

SEQ ID NO: 103249 - DNA, 122 bp, Homo sapiens
catggagaaaacacatgtgttagagaagttttgtttgggcatgcgtgacagtgctgctgacgtgaatttgatgttaatgaatcaacaatacgcactaaatgaggttatgtattgcttggttg

SEQ ID NO: 103250 - DNA, 122 bp, Homo sapiens
gctttccagtctggattctgattgatacacaaaagctgcattcccacatcaagggaactccgagtgttcaccctccgtggtaaggggagactgggagaccccacaaaagcatcccaagagag

SEQ ID NO: 103251 - DNA, 122 bp, Homo sapiens
tcagtgcaaataagtcatatccaaatatgccagagaaggaagcctttggcgttgagtagacggctccattggatgagtcccaacttgaaattcagactaagctcatgcattaaggctgggag

SEQ ID NO: 103252 - DNA, 122 bp, Homo sapiens
ctctgtgtgtgtcacggtctctatggagatctcccgcagaggacagcacgaacagttccccgcggtgctgaggcctaactcgaccgccgactggtgggagttcttccgtcgccctagccgta

SEQ ID NO: 103253 - DNA, 122 bp, Homo sapiens
gtgtgagcagcaggagcattcttccaaggtaatgattaagctgagtgcctggcaagggcacgggctgagagcacagaaggtgagccctattcacacctcggccaggctgcggtggccaggac

SEQ ID NO: 103254 - DNA, 122 bp, Homo sapiens
actctaattgagagcaagccctaaatgtcaccccctttgtgcatgcagcatggtatccagcgcaagccctctacagattcaatttttctttttctttctcttttcctttttttctttttttt

SEQ ID NO: 103255 - DNA, 122 bp, Homo sapiens
accctcgcgacacctggggtttgctgctcctaacagaaggcgcgggggcgtggtgacgagcggagtcctttgaggtatggcaggaggaggacatgcgttcgaattcgcgagaaaacttattt

SEQ ID NO: 103256 - DNA, 122 bp, Homo sapiens
tgtagaatcccagtgcaccccgttattctgcagctacagctctctgctctaaggtgagctcgaatctacttgttaaattgttttttacagagtttgcaactctttctgatgtgggccttgca

SEQ ID NO: 103257 - DNA, 122 bp, Homo sapiens
gcctccgtggaggtgggcgcgtggccagggtgaggaacggggtctccgtggaggtgggcgcgtggccagggtggggaacggggtctccgtggaggcgggtgcgtggccagggtgaggaacag

SEQ ID NO: 103258 - DNA, 122 bp, Homo sapiens
cattctagtaagggaaacaacaataaacaagatccttaaaatgcataaaagggtagatagcgaaagtgctttggaaacataaaaaggaaagaggaatatgaagtgcaggtgcggaatgcttt

SEQ ID NO: 103259 - DNA, 122 bp, Homo sapiens
gagagaagaacatgggggcagcatgtttccccaaggcttaggactcagggtccttaatgtcggctcacattccattggtgaccacttagtcacatgttcatactggccacaggggaggctga

SEQ ID NO: 103260 - DNA, 122 bp, Homo sapiens
agctctcagtctcaaaaaggcccagtggaagagtctgaactgactcagggcaaacacaaacgctcccgcaccgggtccgttgtggcgtaagcgggtgactggagcatcttcctcagatacag

SEQ ID NO: 103261 - DNA, 122 bp, Homo sapiens
tcaagctcctgggatggcttcacctggaggctggggaggcagggtgggaaaggtgagcaccgtcattacatgagggtgactcctgcccagtgacagaggcaaggctgctgggaacagtgctg

SEQ ID NO: 103262 - DNA, 122 bp, Homo sapiens
aggggcagccggggcgcagtcctgcggggcgcgcaccacgtgcttttcagccaatcgccgcggccgcttgattcaaagtgaactcctcaaagcagcagccacgccgcctcctctcctagcga

SEQ ID NO: 103263 - DNA, 122 bp, Homo sapiens
caagtagtcacactgtcatcctggctgacaaatgactgatgtcagagcatggtaccgaaacgtatagaaacaggcctgttggcttgggcaatacataaatgagccagtcacacatttctcgg

SEQ ID NO: 103264 - DNA, 122 bp, Homo sapiens
gaatctggctgcctgggctggaatccaggttctgcttctcagcagcttcccgaggtagtacgtgacctaacctcccagtgcctcggtttctccaactgaaaacatgcatgtccacaccctca

SEQ ID NO: 103265 - DNA, 122 bp, Homo sapiens
agcctgagattgaggctcctctaatggatggagggagtggagatgcagacttgggagagacggaagaatgaatgacacagacggggtaatctgagcagcaagaaaagaatccagagtgcctc

SEQ ID NO: 103266 - DNA, 122 bp, Homo sapiens
caacgccatagaagccagaaacaaacaaccccgcccctgcgccgccctgacacccgctgccgggggctccggcagaaactcaccatgttttcccgggaatgtgtgggtatctttccaaaacg

SEQ ID NO: 103267 - DNA, 122 bp, Homo sapiens
gcagctgtccgggtgggggcgcccttctgagggcccgtgctgctgctgattgtaaagaagcgcctgacaatgcagacacggctgagtgcatcctgtgtaaccggcgcatgcgcgcccagagg

SEQ ID NO: 103268 - DNA, 122 bp, Homo sapiens
gaagcgcagcctgtccgtgtcctcggaggaggaggagccggacgacggctggaaggcgcccgcctgcttctgcccagaccagcacggccctaaggagcagggccccaagcaccatcccccca

SEQ ID NO: 103269 - DNA, 122 bp, Homo sapiens
tgggacaaaacggtcgccacgctgaatttctacttggctcgtaacacatctaagcgaaggcgcacatgcagtcacccacccctggcacgttcctgcacacgtgtgcacagccaccggtgcgg

SEQ ID NO: 103270 - DNA, 122 bp, Homo sapiens
tgggggtggtggctggcaggggcggttcttggtggctggcgtgcccttggtgatgctggccgcacccaggccgttgggctggcccggcagcttcaccagaccgtttcgaggcaagcatggag

SEQ ID NO: 103271 - DNA, 122 bp, Homo sapiens
agagaacacttccggggcggggctatctggccctttcctttccgcgtgtagaatgtggggcgcctgtaaagttaaggttcacgattccttggccaccatttccatcactctgagacggtacc

SEQ ID NO: 103272 - DNA, 122 bp, Homo sapiens
cgtcacatgctgaccgtccgtgtgagcatctgtgtgaccgtccatatgagcgtgtgcgcacgctgtggcccacgccctctaacacctgtctccttgtctcgccctctgtgccatcaccacat

SEQ ID NO: 103273 - DNA, 122 bp, Homo sapiens
ttcttcccactttagcagctttgtaagtttaatttttaatgatctctgctcatgctgtcacgagaaacacaaaatcataaatgttactaagcaacaactgcaagtgtaattaatagtaattt

SEQ ID NO: 103274 - DNA, 122 bp, Homo sapiens
cttgctccagaccagtgtgagtgtggtcctgtgtttaagaattctttttaatagctcccacggggaggatgctgccactcttcgggagttctcacattatccacatgtcttttatgtcctct

SEQ ID NO: 103275 - DNA, 122 bp, Homo sapiens
atggcttctgtgcctgttagctaggtgaggtccacgcagtgtctctcctccaggggcttccgtacccgttagctaggcgaggtccacgcagtgtctctcctccagggacttccgtgcccgtt

SEQ ID NO: 103276 - DNA, 122 bp, Homo sapiens
tgcctatcccccactctgctcaccctttaacacatctgtttctaatctgagcctcggaggcgcctgtttgaaacaacaacaaaaaacccccaccctcaggaacctggcacaaaaattcctgg

SEQ ID NO: 103277 - DNA, 122 bp, Homo sapiens
gtcgcacttggcactccccaagagcctgctgaatgcaccccgactttgtgcacggctccccgcctccccctgggttgggcttttaccagccctgtttggcagatggggaaactgagggactg

SEQ ID NO: 103278 - DNA, 122 bp, Homo sapiens
ctggagctaccttcagatggctgtgatgggtacggcagctgccttcgcccctgccttccccgtgtactgcctgttccgcttcctgttggcctttgccgtggcaggcgtcatgatgaacacgg

SEQ ID NO: 103279 - DNA, 122 bp, Homo sapiens
cgttgttgcagctagaaggtaccttagggtcacccctatttcttagtggggaaactgaggcgcggggaggggaaggggcgcggccgagggctcacagacgaagctcaaacccaggagtgccg

SEQ ID NO: 103280 - DNA, 122 bp, Homo sapiens
gagagaccaccagaactggatgacatgtgctgaggcagcagctgtgcagtgcggcggtggcgctgctcagaatgcacgtggggaccggttcagagcagagttgatgaggataaaacccacag

SEQ ID NO: 103281 - DNA, 122 bp, Homo sapiens
atgagataatcacgtcaagtgctcagcatagtgcctggcacgtagtacctgctcagtaaacgttagtgcttattattgcgcacaattactgcaatgactaaggagaattcatctgagttgca

SEQ ID NO: 103282 - DNA, 122 bp, Homo sapiens
gaggcagcttcttctctccagcagcgggcaggttggctctgggatcacctcagtcaatggcgtcaccatccaattcaaagataaggatggaagcagttataagtatgtttgtacaggcttaa

SEQ ID NO: 103283 - DNA, 122 bp, Homo sapiens
atgtcaccttggaacagtccctaagctcctatttccatgaattaggcctttattgaaagccgggagccaatgagaggagagaggcttgttgatcgcagccaatggctgcggcaggagaggaa

SEQ ID NO: 103284 - DNA, 122 bp, Homo sapiens
ctcagggtcacaccccccacaactaaaagcccgggatcccctgccggccccaggcgccttcgtctctcacccagaaaataaaagtgtagattagcagaacgctcttgaaacaagtaatgact

SEQ ID NO: 103285 - DNA, 122 bp, Homo sapiens
aactacatgcaggaggcggggtccagggcgagggatctacgcagcttgcggtggcgaaggcggctttagtggcagcatgaagcgcaccccgactgccgaggaacgagagcgcgaagctaagg

SEQ ID NO: 103286 - DNA, 122 bp, Homo sapiens
ataaattgaaagttcaaataacctcggattatattattctggactgtgtgttatgctgggcgacgaggctgcgcaggctcctgggccgagccatgactctgcaggaactgcggcgccggctc

SEQ ID NO: 103287 - DNA, 122 bp, Homo sapiens
tggagacacatttgcagagatctgcttgcttggctaccgcaggcatggaggattcgcgtacgcatgacagcaacccctttctccggggacatttactcttcctccggggacatttactcttc

SEQ ID NO: 103288 - DNA, 122 bp, Homo sapiens
aggcgcggagcccggggcgggggcaaagatcagggacccctgggggcggggtttcgccctcggcccacaccccctgccccggtttgggagtcggcttcctgcgaagcgctgactgaaggcgt

SEQ ID NO: 103289 - DNA, 122 bp, Homo sapiens
atgctggggctggcactgcagcacctctgggagctgctgggttccacagctgctgctgctcgtctcactccaatagctcgagctcatcttcttccagtggtcagcaagggacctcccagatg

SEQ ID NO: 103290 - DNA, 122 bp, Homo sapiens
ttcctcacttgaaaaacaggaaaacttctttcttgttggcctcaggtttgctatcctccccggtagacctgatggctcaacacgaaattgttcaatgaaagagaaaactagcttataagtac

SEQ ID NO: 103291 - DNA, 122 bp, Homo sapiens
ggcccttgaaaagtcaagggggccataaagactttacatcagacccatcgtagtgtagcacgtttggtcctcttcatttgaagagttaggacccacccctcattgttcacacatcccagctg

SEQ ID NO: 103292 - DNA, 122 bp, Homo sapiens
tctccgtcctttttcttgcggtccactctatcatctatcgtccttcttaccccgcccccccgtcctgcacacccatcagttccttggcctagttatctatgcgcacgcgcaaaagtcttcgg

SEQ ID NO: 103293 - DNA, 122 bp, Homo sapiens
agcggccggcaagccgagcagcggaggcccttccatgcctcttcctctcccggaggcagacggggagcggccgacaaattaattcacgctatctttacattatgtataatgcggcatgattt

SEQ ID NO: 103294 - DNA, 122 bp, Homo sapiens
cactactatctccgtcagccgccgcctcggccatcttcctgcccggagtgcaacaaaatccggctctggccagccttccagctgacgccactctgccagggccctgcagcctcggagcggga

SEQ ID NO: 103295 - DNA, 122 bp, Homo sapiens
ttctgctgagtcactgtgactgcggatttggaaggctgagagtcctggggagacatgctccgtggagacgaatttgtttcttcctttgcaagattcagattctgcacttgggggcccataca

SEQ ID NO: 103296 - DNA, 122 bp, Homo sapiens
cccgctgctcggggagcaggcggtgtgtgcgcggctgcgaagtcgaggttgaaactgcaccgccaaggcgcgctcctgctgtgtctggagctccggcgtctcctctgcctcccagctcagcg

SEQ ID NO: 103297 - DNA, 122 bp, Homo sapiens
gagccaggattcgagccttggcagttgattcctagggtctattatgagtttgttacaaaccgagcttctttcttctccaaccccacccccacccgcagctctggagaccatttctccaggct

SEQ ID NO: 103298 - DNA, 122 bp, Homo sapiens
gggccccgcccgcactggtggtgtgcggaggacgcgcaggtctcgctgggatgacccgggcgggggggctgtgcgacaacggcctggcgggacagggcgcctggagcccgtttccaccgccg

SEQ ID NO: 103299 - DNA, 122 bp, Homo sapiens
acactagctgaatggacaagagatcttggaccacccatagttctgacctgctcagggaaccggtcattcatcccccagcccaggtaagaaggtttacctccagagagcctctcttgactgcc

SEQ ID NO: 103300 - DNA, 122 bp, Homo sapiens
aacatgccaccatttatggggctgagttttagaacgtccccccaccccctaccccccgcccggtgccaaggactcaggaatgatggggagtgtaattgagggatttccatttatgtcattcc

SEQ ID NO: 103301 - DNA, 122 bp, Homo sapiens
ccgccagctcttcctgccgcaggctgcacggaagcctaatggcccaggccggcccctgcccgggcttgtgaaacccgcccagcagcacccaggcccggatgccagccaacggctcctgccca

SEQ ID NO: 103302 - DNA, 122 bp, Homo sapiens
gtattccacagccatggaattcatccagggagaggctcggctgggcgacaccatggaggccgatgaccatatgggtggcatccctgctcagaatagtaaaggggaaaggcttctgctttata

SEQ ID NO: 103303 - DNA, 122 bp, Homo sapiens
cggccggcatccgaacagagccagtctccacccctgcagtggcgaagtgtttacaaagtccgcgccgcgccgccgatccagagctgggcaggaagtggggaagagggggcggaggagacaaa

SEQ ID NO: 103304 - DNA, 122 bp, Homo sapiens
gggagacggggaagccagggcatcacgaagctcctagaacacttcaggcatttccgtggacgtgggcacgggcttccccaggcgtttctgtggacatgagcgctgggcttcctcagtctctg

SEQ ID NO: 103305 - DNA, 122 bp, Homo sapiens
ctaactacttcctcctgtgctcccatggcaacttgtaaacaatgctgacatcatcctcatcgctggttatcataacaatttaatatccatcaattcatatggtactagatcatgggtgcatt

SEQ ID NO: 103306 - DNA, 122 bp, Homo sapiens
ggggtgggggggaacggcggccgcgggtggtgcggagggaggccttgcgggcggatcgggcgcttggcggcggaggtggtgggaggcggcgggcgggagcgcgggtcaggccggccccggcg

SEQ ID NO: 103307 - DNA, 122 bp, Homo sapiens
ttcccccgctcctgttcagtttgcctccttgatttcagggtccgcgtcaggcctaagcgacgaggccgccggcaataaagtatcttaaaaatgagaagaggaacgtgggagtgtagaaaata

SEQ ID NO: 103308 - DNA, 122 bp, Homo sapiens
cgagggacgctttattttcatttccctgaccactactgaggtgagcatttctttcactcgcgtacttgtttgtattttttctgctgttcacgtccaatagaacactggttttctattggagg

SEQ ID NO: 103309 - DNA, 122 bp, Homo sapiens
caatcggggcgagcagctggagcccggcggagcagttggctgagttgttgcaacttttttcgaaagctgggtttcccgggagatcccaggcggtgacagagtggagccatggctagaggtat

SEQ ID NO: 103310 - DNA, 122 bp, Homo sapiens
cggacgcgtgcacggagcggtaaagcgcaggcgcaaagcttcggtgacgtcagagaggcgcgctcccagctcggagccgactcgcagacgcgccccgcccctcggcgtcgctctggactggc

SEQ ID NO: 103311 - DNA, 122 bp, Homo sapiens
ctcccccacgttcactacaaaaagtaccctcagttacaggcccaggggtaatggcatcaccgcattgttgactcaacttgtaactgacttctagctctgtttctgacttagttttggccttt

SEQ ID NO: 103312 - DNA, 122 bp, Homo sapiens
agtggtgagtgttggatggcataggggtgggatggtgtcgggggctgctgacctcagcagcgtccctgctggggtcatgcaggcgcagcagcagcggcacgagactctgcagcaccagcttc

SEQ ID NO: 103313 - DNA, 122 bp, Homo sapiens
ggctgcttctcccaaggctattaccagaagaggcagctgaggtccaggttccacaaggcccgctgtgggtgccgccgggaggaagacgagcgccctggccgtgcctgccgtaggccgcacgc

SEQ ID NO: 103314 - DNA, 122 bp, Homo sapiens
atttttcacatgccagaataagcattactcattcctgtaggcaatggggtggccatgggacgtttcaagctgcagagtgatgaggttagctctgcattttagatccctctggaggaaggatg

SEQ ID NO: 103315 - DNA, 122 bp, Homo sapiens
ctcgggcccggcggaggggcgggcggcgccgcgtgaggcccggcggattgggccggctgccgtccatctggccgtgagagcccttcgattggctcatctcgccaagggaggcgggcatccct

SEQ ID NO: 103316 - DNA, 122 bp, Homo sapiens
cagacccaaccaagtcagtataaaaggggggaatagccatggagaaggtaggcctgtggccgggcttgctttttaaagggaatgctctcctggtgattaggaaccttaaatcacattataag

SEQ ID NO: 103317 - DNA, 122 bp, Homo sapiens
acgcccaccccggagagggccgaggaagccaccatcacgcagcgtgtcacggggaccaggcggggtttaaggctgagggctcggggcgggcagggcctccggcctcagtcaaagccgtgcca

SEQ ID NO: 103318 - DNA, 122 bp, Homo sapiens
ggcggggcgcggcgacgagccaatgggtcggggaggggcgtgacagaggcagccaatgggcgcggggagggggcggaacgcccgcgctgagcagccaataggggtgctaggggcggggcgtg

SEQ ID NO: 103319 - DNA, 122 bp, Homo sapiens
atgctggcagtcacaggactcctggatcagagacaaactatgttattacttccggcatagcgagcagcatgaacttcctgtttgtgttacttccacttgccccttcctccctcctcctttct

SEQ ID NO: 103320 - DNA, 122 bp, Homo sapiens
atcaaagcgctcaacccagactgtcaaatccggaaacacttgggcccaagggcagagatacgttttccctccggtggcatggtatttcacatctattttaaactgttatttcaaattagtaa

SEQ ID NO: 103321 - DNA, 122 bp, Homo sapiens
acctaggcagggaaagggaggtgatagggcgggggcctggcagcagagccaccccacggacgctctagccttaattccccccagcctgacgggccgatacctttgtagtggacgcggaggtt

SEQ ID NO: 103322 - DNA, 122 bp, Homo sapiens
aaggcagcgtgttctgggcctttcacggctaaagcagcaataggcgaccgacgagggaggcgggtggagaggtgactgggagcctacagtacggagccaggcggaggacagagcgaagggcg

SEQ ID NO: 103323 - DNA, 122 bp, Homo sapiens
gctcgagccggaaagaatcggcctccttagtgggcaggttcccgctgaagtgaagctaaccgagactgaggcttaaaaggggtcgacctggttaactagaaagggcgaccagtgaccctgac

SEQ ID NO: 103324 - DNA, 122 bp, Homo sapiens
ccctgagtccctggaggtcctggcctatgtagagcccaactcacccagagtggccacccacggccacacagcggctggtgttgacgctccaggcgcaataggggtcccgggcgaggacacag

SEQ ID NO: 103325 - DNA, 122 bp, Homo sapiens
acgtgcatgtggccacatgtgtgacaggtcccgccagtccctcgggctccatccctcgttcgaagaggacatggggtgctttgcctcagtggatggaggagacccacacccgtgtgtttccc

SEQ ID NO: 103326 - DNA, 122 bp, Homo sapiens
cagacctccatgcccagagctcagaaatcagatataatcagacatcccagacctcctggacgagctcgagcaccaaacgaaatgccatctccagctcctacagctccacgggaggcttgccg

SEQ ID NO: 103327 - DNA, 122 bp, Homo sapiens
cctccaaggccgacattcccagtgtggccttctcgtcgcggctggggggctcccggggcgcgccggggctgctcatggctgtcgggcaggacctttactgttactcctacagctaattctgc

SEQ ID NO: 103328 - DNA, 122 bp, Homo sapiens
gccattttgcgggacttcggggctgtgagctgggacttctcagggactacccctccgcctcggggctggtccccacctctggcccccgggtgctaccagctcctgctgtaccaagcaggccg

SEQ ID NO: 103329 - DNA, 122 bp, Homo sapiens
ggtgtattttcaatatatttctaagaatgaggagtttatgaccctggttcatgggtcattcggtagactaaatgagataaaggcatataaaattattaatacagaacttggcttgggagcca

SEQ ID NO: 103330 - DNA, 122 bp, Homo sapiens
aggctggggggcaggacgggaggcgaaacccctggaatattcccgacctggcagcctcatcgagcttggtgattggctcagaaggggaaaggcgggtctccacgacgacttataaaagccga

SEQ ID NO: 103331 - DNA, 122 bp, Homo sapiens
aatcctggacactgtctattatttccttcagactcctgaccttcactccctcacaaagggcgaatttcctctccattttgcacaggggcctgctcccctccttctgtttcctttttcatttt

SEQ ID NO: 103332 - DNA, 122 bp, Homo sapiens
gttccgtgggtttagcaactgccctttttatctgctgtgggcgaaccccggccactgcggcgtcctcgacaggagcgaggctcttccaaatcgtcctcatcaaagccgtggaaagttgacgt

SEQ ID NO: 103333 - DNA, 122 bp, Homo sapiens
ccccggggtggttagcgcttccggggtcgaagggtgcgcggggttgaaagcaggccgctccgccccgtccccctcccagaccagcagaggcagcagccggagcagccgcagcctgcgccctc

SEQ ID NO: 103334 - DNA, 122 bp, Homo sapiens
cccacccccctcccatgtgcagaagaatgaactgctccttctcccatacccattgcatatcggagttgtgaattctcaaaacacctcctgtgtgcatggattacaggagggtgagccttgtc

SEQ ID NO: 103335 - DNA, 122 bp, Homo sapiens
ctattaacacatgaatcacactcaaataatatgattctcaggttttccttctaaaatagacgctccagccaaatgtgctcagctatcaatccatttcaggcagtccttgttcatttgtatac

SEQ ID NO: 103336 - DNA, 122 bp, Homo sapiens
tcgccgtgaccaggaaaggccactgttctgtgagtgttcttctcggagcggaaggcctctcgcctagtccttaaagaaatacccacctgcagccgggcgcggtggctcacgcctgtaatccc

SEQ ID NO: 103337 - DNA, 122 bp, Homo sapiens
caggtcttcctccagagcatctgcaacgaggagccggacgagaaccacctcaacctcatccgcgtcaacgccaccaaggcctacgaaatggccctcatgaagtaccacggctggatcgtgca

SEQ ID NO: 103338 - DNA, 122 bp, Homo sapiens
gatcccagcccaggcccagaagttccagctctccaccctccgcctcgcccgcagggctcgcgcttccacagttctcgccgagagcgctatgggacagtgttcaagacgcacctgctgggcag

SEQ ID NO: 103339 - DNA, 122 bp, Homo sapiens
aaaaaccctcctttttccttcctcctcttcctcctccatcccctgtaatggaataacattcgaatgccgacatcacaaacacagaggacccttcacttcttggcttgccactccctgcctgt

SEQ ID NO: 103340 - DNA, 122 bp, Homo sapiens
cttaccccgcccccccgtcctgcacacccatcagttccttggcctagttatctatgcgcacgcgcaaaagtcttcggcagcacttgtagttcccgttttcagacagtaagggcgcatagggg

SEQ ID NO: 103341 - DNA, 122 bp, Homo sapiens
ctttgagatagaacgaagcaggtggatcctggctttgactaggcagggccagaccaggcccgacccagccagcccatccgtagagtcagcatcagccgggcgtgaagattggtgtcggctcc

SEQ ID NO: 103342 - DNA, 122 bp, Homo sapiens
cgaagacccaaatatacagggaaaactgtatttttatggagagttgtgcagaagtatgatcggaggacaaaagggtatgatgtcatggtaatcaaccagggggaagtagcaaggcctgtttg

SEQ ID NO: 103343 - DNA, 122 bp, Homo sapiens
aggcaggagcccaggcagtacctgcagcgtccgggcaccagagccaccttggaacaggaacgcgtctccggccgcggggctgcggctccgccaaactttggggcgggcggggcgggctgggg

SEQ ID NO: 103344 - DNA, 122 bp, Homo sapiens
tggcatcccgtctcaggtttttccttcaacccacccaaaatcaaacgagctacaatgtggcgattgaccccccctcccactgtgctctcaggaccctgccctcagatgactgggccagctgg

SEQ ID NO: 103345 - DNA, 122 bp, Homo sapiens
gcaggatgagcgctctctagacagccctggtttcctccaagtcgcaggctgtgtctgcctcgcagtacccattccaggttcggtggctgctggcgagatgcccgcttcctacccgtacaggc

SEQ ID NO: 103346 - DNA, 122 bp, Homo sapiens
gcgcttccgggtcaggaggtggtgcgcctcgcgcggcagattcgaagctagggcggggcccgcgggctgaggcagcggctgtggcggcgacgctgggcgtgaggtggcggcggccgcgccct

SEQ ID NO: 103347 - DNA, 122 bp, Homo sapiens
cattgagcttgtagaaagtatggggtttgcgggagcccatgcctccttcgggctcagcctcggtgcctcacgcgcagtaggcacatgggaagtgcggccattcccaggcactgctgcagtgc

SEQ ID NO: 103348 - DNA, 122 bp, Homo sapiens
gactttggaatcaggcatgatgcaaccaaagattcttactgccctccagccccagggctgcggagtgacccagggaaggcaagatgcagcacacagctaataatccacatgtaaccagcaca

SEQ ID NO: 103349 - DNA, 122 bp, Homo sapiens
ccctgttgactttgcacttccctcccgggccccgcacccccgaaccgaccaccgatcgaccggcaccgctgttgcctcgtaagccatagcgcatgcgcgctctcaggataaacaggccctgc

SEQ ID NO: 103350 - DNA, 122 bp, Homo sapiens
taagaaagacggtgagcctgaggcttgcttgtgtagcctggcctaaggggcaagagaaggcgtggcctgtcctggcctctgagagtgggatggttggtgctgtacctcaggggacagggcgg

SEQ ID NO: 103351 - DNA, 122 bp, Homo sapiens
ccgggtcgtctttccacactgcgagcaggcactagacgagcaggaggctggacctaggagcgcgggtcacgcccccatgccgcccattggctgcttttgaacgttctgagcccgcccctccg

SEQ ID NO: 103352 - DNA, 122 bp, Homo sapiens
tgggcagaaaatggaagcatgcaaggaggggaagggaactgtgagaagttaataagggcacgaggcagggaagggcaccccaggagagccaaggctaagcctggcaacagtgggaggtgatg

SEQ ID NO: 103353 - DNA, 122 bp, Homo sapiens
agaagccccccaggagagcaggggcaggagttagttgctgcagagggaactcggcgtctacgaccgtcgtcgcaggaaatgatccttgtaactttctcgtgttgctgtcttgtcactgctgt

SEQ ID NO: 103354 - DNA, 122 bp, Homo sapiens
ccctgcaggatgaggtacttgtacccagagtgtacctcccgcactgtgcggtgtggctgccgcccatggccccagatctctccactgccttgggggagctctcaggcctgccagggctgaag

SEQ ID NO: 103355 - DNA, 122 bp, Homo sapiens
ccagctaacccctgggtgacatacctggccggccggctgcaggccctcactggttgggtccgcccgcgagggtgccctgggcccggtgtctctcctccttctgaagtttgttcccatccacc

SEQ ID NO: 103356 - DNA, 122 bp, Homo sapiens
atctaggcagaaacagtaggaacctactgccaccccccccacccccccccgctaccaccccggccctggctggctcctcacttgcactgatcaagcacctgctgggttagggggttacaaaa

SEQ ID NO: 103357 - DNA, 122 bp, Homo sapiens
atctaaaaattaaatgagctgataaagaacgccgtcagcacagagcagacgctgggtgttcgcgctcttgagcgtgcgctctgcggggcgcgggctggtggcgggcgggggtcgccggctcc

SEQ ID NO: 103358 - DNA, 122 bp, Homo sapiens
aggctgttcgcagcgtacaccaagacttccgaggcaagtgggggctccccctggcggctgcgccgggtggctgctccgggattgtgcggacctccgagctacaccgtctccaaccaacagaa

SEQ ID NO: 103359 - DNA, 122 bp, Homo sapiens
gtgggctttgaatccgggctggtggggaaactagaaaggagtagttcaggggaccgtgcgcgggacaaggactgccagacatttgcctcggtcctgcgagtcgtgggactggacacccctca

SEQ ID NO: 103360 - DNA, 122 bp, Homo sapiens
ttttccacatttccccatctaaacactgaaaatccccaattttatatcctaaacatttcccgtataattttcctccttccttctctgctccccccaacttctctcataatcactgtcattga

SEQ ID NO: 103361 - DNA, 122 bp, Homo sapiens
tttcctatactagagtgttatgaggacctgccagtgtgatggagtaaacaccttcctttccgtgcctagggtcaggcacaggtgttctgtggcactcaccttgggcaatactcaagggcctt

SEQ ID NO: 103362 - DNA, 122 bp, Homo sapiens
ggttattttggggttataatgaattttggcacttaagactgccactgcatgcagaaaccccgaaaaagaaatacacaggtttcaaaatggatatacttcattttgtttaaaatgcccaagag

SEQ ID NO: 103363 - DNA, 122 bp, Homo sapiens
gtaactgaaatcaaatttgccctggtcacaacgtggccgcgtaacctgtcaagctttgctcgaatgccttatacctgtggctagaagacatttcaaggagcctcagcacaggcccaccactc

SEQ ID NO: 103364 - DNA, 122 bp, Homo sapiens
cgtagtcctggagaggtgctgagaacgcttatacaacaaggactggaaagtaccgatgcccgacttagagcttccacagcactactgcttcccatcttgcttactactgaggacttgttgct

SEQ ID NO: 103365 - DNA, 122 bp, Homo sapiens
gagtataattttagccttggaactcactgaggatatttgggcacttgtgccttctgcttacgacagattgttgatcacagttatgatttatctccggctgcgtctttgggcaggaacgcaac

SEQ ID NO: 103366 - DNA, 122 bp, Homo sapiens
caaaagccgggtgcagtggcttacgcctgtaatgccagcactttggaaggctgaggcgggcggatcatgtgaggtcaggaaatggagaccagcctgaccaacatggtgaaaccccatctcta

SEQ ID NO: 103367 - DNA, 122 bp, Homo sapiens
gtggtttgcgaggaagcgcttgtcactgtgtgggggcagcagccttagtgcacctcccagcgtgtgtggcccccgccctcctctgcatccctcccaggcttcccaggactgcccagctgttt

SEQ ID NO: 103368 - DNA, 122 bp, Homo sapiens
ccacttccctccagagttggtgccaagctgggacctgggggacttggagtctcaggaagtcgtccgctgtctgcagggggtgcatgggggatgtggccacacacgtcagagtgcggccccct

SEQ ID NO: 103369 - DNA, 122 bp, Homo sapiens
agaaacatagagacccccaaaagggaagcagaggagagaaagtcccacacccagaccccgcgagaagagatgaccatgaccaccatgccagaaagtctcaacagccccgtgtcgggcaaggc

SEQ ID NO: 103370 - DNA, 122 bp, Homo sapiens
aaaagcagatacacaagttaataaatgacttttaagtcccggaaaaatttgttgggcccacgagggcaacatggttcacagggccctcaattcacagagtatttgagtttagtccttgcaca

SEQ ID NO: 103371 - DNA, 122 bp, Homo sapiens
agggtgttgtgggtggcagcacttgtttactggctgctttctggctcgaaataaaggaatcgtgcttgtgtcggggtagacgtttctttccttttcaggttccagccctggggaggggagct

SEQ ID NO: 103372 - DNA, 122 bp, Homo sapiens
aaaaaagaaacccacaaacctctgcccatctttgtagtccaggcacttggagagttcttacggggagaagcacttctccccatcgatagaaattcaatttgctgcacaagttaagatgcagt

SEQ ID NO: 103373 - DNA, 122 bp, Homo sapiens
gtcaggcacttatcccctgtctgtgctaggagctcggataaacagtcagccgagcctcgacgcccccaaatcgtccgcctccaagccccgcacgcgcggacagctcccgggttgcctgcggc

SEQ ID NO: 103374 - DNA, 122 bp, Homo sapiens
cgcaagtgctttctgaatgaatgagtgaactcgggagaatcaggagcccgtgtgattggccgggacttcgcaagggctttctgaatgaatgagtgaactcggaagaatcaggagcccgtgtg

SEQ ID NO: 103375 - DNA, 122 bp, Homo sapiens
tctgtttgctctgtcatccccagcatgttgccctcatcctcctggtggaagacggatctccgctaggtttatattccagcccatgaaaagaaaaggcacactgcctttttattttagggaca

SEQ ID NO: 103376 - DNA, 122 bp, Homo sapiens
tatgtgtgtgtgtgcgcgcgacggggcgcctgtcaggaccgggttgggcgggtgtgggtgcgggtgtgaggctgagacaggtgcctggctctctggtgtgtgtcactgaccctctaccctcc

SEQ ID NO: 103377 - DNA, 122 bp, Homo sapiens
gcgggggaagaagggagagcgaggaaactaccattcccagcatgcgacggggcgagctgccgcccttttaggctgcaatgcctcgagcattgcattctagtagtctctgggtccacgccccc

SEQ ID NO: 103378 - DNA, 122 bp, Homo sapiens
ggcttactcctcgctgctgtttccttccaggtttccgcagctagggctcgaaagcccattcggaagtgaccaagaaaggccaacagaattcctcatagcccctgcagcccgtgagaagaaga

SEQ ID NO: 103379 - DNA, 122 bp, Homo sapiens
gtcatgttgacacacatacagatatttttattaccatcagtgccatcatcatgtaattaacgggtcccatggcaacaaaatcagcaagccacaggtgtgtaaacagaaactattcctccccc

SEQ ID NO: 103380 - DNA, 122 bp, Homo sapiens
gggcacggcctacgagtgcctcagcgccctgggcgagaaaggcctggtccagttccgagacgtgagtgtcgcccgggagacgcgggccgcacctgctctcctggcgcccccaatcccgcgca

SEQ ID NO: 103381 - DNA, 122 bp, Homo sapiens
tttttttcaagacgctgtcttccgtactttcgttattaaacatacggctcaagtgatcaccggtatagacagtgacatcagacatctttcattagccctactcaaaaatggcggcaacgtaa

SEQ ID NO: 103382 - DNA, 122 bp, Homo sapiens
cacgccccagaagaccgctgacatttgctgaccaattgctgttttctcattgtaccttagcgctatccagttctcccaagttctgcagggctctcttttagcaatctgcatgattcagaagc

SEQ ID NO: 103383 - DNA, 122 bp, Homo sapiens
gagccccaggctgccgcgctccttcactacagcgagcgtggccgggaggcgcccttccgccgcaggggacccagccacgccagaaaccgctccttgcgggttttgcctggggggaggccgga

SEQ ID NO: 103384 - DNA, 122 bp, Homo sapiens
ctgccccttccacacagttggtgttggaacagtggagctcagagaggccgatgctgaccgcgtagatgtccagcaccaacagtgggattttgggccctgtgggggacacagagagaactctc

SEQ ID NO: 103385 - DNA, 122 bp, Homo sapiens
ggaggtacctgcgaggcaggaggcttggccgcggcgcagtggctggcggagaggcggcgccgcactggcggcggcggcggcggcgacggggagagcagcagcagcctcgcacagcccccggc

SEQ ID NO: 103386 - DNA, 122 bp, Homo sapiens
tatgcccagtagcctggtccccgtggcctctcagacagggtgggttagcagggaggtgtacgggagggcagacccgggattgccaccctcaccccttttccgtgaccgcgtttctgccaagc

SEQ ID NO: 103387 - DNA, 122 bp, Homo sapiens
gttggccttgaaactggtggaaatgctgagaaagttatcccaggaggtgtgtctaagccgcggaagccacccatggtcatgacacctccaacgtgcacagatcactctccatccagaaagct

SEQ ID NO: 103388 - DNA, 122 bp, Homo sapiens
gtgcggaatggacagctgctggtatcaaccgggctcccagccctagaccagctcttaggtcggttcagagcggagatctgggctcagccgaggggaaacttagggaggggacctgtcgggga

SEQ ID NO: 103389 - DNA, 122 bp, Homo sapiens
atccctcgcggcgcccggtggggccgggaacggtgccacccggacaatccgggtgagacccgcgcccacccgcctccggaccgaccctcagcctggagccgcgcagtcctactacccggcga

SEQ ID NO: 103390 - DNA, 122 bp, Homo sapiens
ccgggtggtagcgtttctgtggagccggtggtctccttgtcatccatgagggtcctgccccggtggccgtgtgttccccgggacacggcttctctcctccccaggaaccgggatgcagccag

SEQ ID NO: 103391 - DNA, 122 bp, Homo sapiens
ttaacttgtttttgtcgcagctggtcttgcctttgctggggctgctgacacacttgcaggcgttggatttctcgcgctcgcgggcttgcctcttctgacggatgagcgagctggcgatagcc

SEQ ID NO: 103392 - DNA, 122 bp, Homo sapiens
cctgggcatcactgcttcgtgcacacggagcatctggagcccacagggggcaacccaaagcgtcaggaaggactgaaaggggaagtcgaggcatctgtgtggtgtggaaggaaaaaaaaagc

SEQ ID NO: 103393 - DNA, 122 bp, Homo sapiens
cctggggcactcgacaccagggactgcagtcagcactgcagagttcagctggtagggctgcgccagccaccgggccgccagacccaggggaataggagcctgtgggtggggatgactgagga

SEQ ID NO: 103394 - DNA, 122 bp, Homo sapiens
catttcccagaatgccacacgccctttgaccccagctacagcaaaagacgcgccggggagcgcctgaagccggaagactatagcttcccggcatgcagcacgcttccccctattagatttga

SEQ ID NO: 103395 - DNA, 122 bp, Homo sapiens
agggtcttgggagccgtggttctcagtctgccccgccccctctctctggccccaccagtccggggcccaccccagctgttcccactcctgcgagtgccctgcccagtgctctgggaaggctg

SEQ ID NO: 103396 - DNA, 122 bp, Homo sapiens
ccatattgacgaggacgggcatccgcggctgcggacgctagtctccgccgccgccggagccgcaacctctccgcacccggccccgtcagggcctctgtcgcgcctagcccctccccgcctta

SEQ ID NO: 103397 - DNA, 122 bp, Homo sapiens
cgggtgcagtggctcacgcctgtcatcccagcactttgggaggccaaggcgggcagatcacgaggtcaacagatctaaaccatcctgaccaaaatggtgaaaccccatctctactaaaaata

SEQ ID NO: 103398 - DNA, 122 bp, Homo sapiens
aaaggggaaacaaaaactatgaagcaagcaagaattcagagttcaagttttaggaccaagcggcataaaggcacaaacaactatacaaatcaatagtgaagggacataagtgtattttaaca

SEQ ID NO: 103399 - DNA, 122 bp, Homo sapiens
ctgggttttggcttccctggggagaagggaggaccggagccggagaagcgtgaggtgcggcgaggtagggtgcctggtagctggtgtctcgtgcactccgtcaggcctttattgaacaccca

SEQ ID NO: 103400 - DNA, 122 bp, Homo sapiens
gacgcgttgaggccccgcccactcccgtgctgggcgcgtgcaaggagcgtcttctgtcagcgtagtctgcatctaggctttctggagcatcttccagggtcgctccagagaccccccagact

SEQ ID NO: 103401 - DNA, 122 bp, Homo sapiens
gccgctgcctcccggcccctccctctcctgcccggaccctgtcccctcccaggccggccacgttcctgcttccccagacccccggcaccaccctggagcccggagtgcccggtacccacctg

SEQ ID NO: 103402 - DNA, 122 bp, Homo sapiens
gtatggtcatactggggcacaaattatatccctggcagagaactggggtccctggcatggcggaatagcacctccttctccagccaactccactttgccttccacctgcgactcattaagag

SEQ ID NO: 103403 - DNA, 122 bp, Homo sapiens
ggcggcagcagcagcagcggcggcggcggccgcggcggccttggggcacccgcagcaccacgcacctgtctgcaccgccaccacctacaacgtggcggacccgcggagattccactgcctca

SEQ ID NO: 103404 - DNA, 122 bp, Homo sapiens
ttgtcctcaaaatgaccctccaaggtagctggtaatgtctcattttagtagaagaggagtcgaggttcctagagctcaggtggcttgcccaaagcagtgcttgcagcttatttcagcattcc

SEQ ID NO: 103405 - DNA, 122 bp, Homo sapiens
actggttcacggcactggccccgctgtgccagagatgggctggcgggtgctggtggcattcgagacctctcagtttgtgtggtgggcccagagatatatggccaaacagttgagctcaccaa

SEQ ID NO: 103406 - DNA, 122 bp, Homo sapiens
attcactggcttacaactgtttgttgcttgccttcagctgaccactattcttaagagtctcggttggcactaagcaatagctatccaatccccctttccttccttttatctactacgttcac

SEQ ID NO: 103407 - DNA, 122 bp, Homo sapiens
aagccggacgctactggacgaggcttaaagcgctcgccccagcgcggggccggtgaggaacgttcaccgtggaccatggtcgaataatgttagcgtgcactcggggcctcgccctagccttc

SEQ ID NO: 103408 - DNA, 122 bp, Homo sapiens
gcgtttcccctctttttttaagccccagtattaaaaagaaaataaaatcccaaagaatttcgcaacattgcgattgcactggcttgagaacgaaggaagttagtcccttgcggtgatccgtc

SEQ ID NO: 103409 - DNA, 122 bp, Homo sapiens
atcttccctccttggcctcccaaagtgctgggattacaggcatgagtcactgcgcccggtcgcgtactggatttatattgtgtaatactttgctctagcagtatagtaggtgagacagtgac

SEQ ID NO: 103410 - DNA, 122 bp, Homo sapiens
ctcattgaccaggtcgcctcgggagagcgccctgcaacccccaccctccctttggacccccgcgctggtctggagcgcacccaaccagcgtaaccttacacttcagacccaacccaggtctg

SEQ ID NO: 103411 - DNA, 122 bp, Homo sapiens
ccagctgtgcagcacgtctcagagattcttgaagaatgaagacatttctgctctcagctccgggggtgaggtgtgcctggcctctgcctccaccctcctcctcttcaccaggtgcatgcatg

SEQ ID NO: 103412 - DNA, 122 bp, Homo sapiens
gtgagtggccctgggtggagccggcagccgccctgatgctcacggggcctcctgtgcctgcgccctggtcccagtgccgggagctgagccgtgccacccagttgactttggcttaatgcaga

SEQ ID NO: 103413 - DNA, 122 bp, Homo sapiens
atttatctttcccttttcttttccaagatgtaactacggatcagacactaaggaccttcacgtttcgctgatgtagtttttggaggaaaaaggggggggagtgaagggcgtcggtttttttt

SEQ ID NO: 103414 - DNA, 122 bp, Homo sapiens
cgacctctctgcgcatgcccctttcgggaagcgcgttccaatcgaggtcgcaatcctgtgcgtgacccttctcggcgacccggaaaaacttgtaaatataggctgggtgtttcaatagcaag

SEQ ID NO: 103415 - DNA, 122 bp, Homo sapiens
gggagacagaggtggagggcttgtttgaatgcaccaagccttgcaggctttcctcctccccgcgctggccgggtaggttctcttcagttcctgatgaggcaaacgagaacaaagcagtcgaa

SEQ ID NO: 103416 - DNA, 122 bp, Homo sapiens
tagagaaacttcttcctgcaggtttgggtgcagagtgagctgtggccttccagttccctgcgtgtgcactcagggtgcttggagcatccttcagaaaagatgggaccttggaaagtcactga

SEQ ID NO: 103417 - DNA, 122 bp, Homo sapiens
acggataagaatacaaggtaacaaatgccaaataaccagtgaggactttgtaaagtaacacgaaagtttttatgtgttcacctactctcaaatgcacttttttgtcaacttgcaccaatctc

SEQ ID NO: 103418 - DNA, 122 bp, Homo sapiens
gcctgctcccgaagaccctcggccggcccccagcccttgggccagaccgctcggcgcacacgcccactcaccgcagctactctgcaagaccggccctccgccccatctcgctcgcaccaccc

SEQ ID NO: 103419 - DNA, 122 bp, Homo sapiens
ttttcagctcatttctttctgctgctgcttcgcgctgctctgtcatgcctaaatctatctcgtcactgccaaaggtgcctgaatcagggtgaattccacgagattcaccagcggttttgctc

SEQ ID NO: 103420 - DNA, 122 bp, Homo sapiens
ccaccttcatggagctcatagttactaagggaaaccctgaattttcttagactactgcaacgcactggccgggtgcggtgactcacacctgtaatcccagcactttgggacaagatgggcgg

SEQ ID NO: 103421 - DNA, 122 bp, Homo sapiens
ataactagccaaatttcttttccagcaacatactgaacattcaaagcagactttgtatgccgtggcaaaaccacagtctgtctggacagtagtagtcagtagatttttatgtaaacataaat

SEQ ID NO: 103422 - DNA, 122 bp, Homo sapiens
gtttgcagcccaagagaggggcaatgaatgctccaaggccagaaataatacaggaccgcccggttaaattcgaatttcagaaaaacggtgaataatttctttcttacgagtatgttcatgca

SEQ ID NO: 103423 - DNA, 122 bp, Homo sapiens
aacctccccaccttcttaccactccaggactcagtttcttaatttagttcctaatggacccgccctcaagttctggacaccccgggtgaagactgttaacgcggcggggattgggcgcctgc

SEQ ID NO: 103424 - DNA, 122 bp, Homo sapiens
ctagctaaaggcccttacttcttggtcttgctctatcatattatcttaatttgttttctccgtagaatttactatgatagtctagtaatcatagtaggaattatctagaaagggaaatcatt

SEQ ID NO: 103425 - DNA, 122 bp, Homo sapiens
gggtggaggtcggggatgaggcagcaggtaggacagtgacctcggtgacgcgaaggaccccggccacctctaggttctcctcgtccgcccgttgttcagcgagggaggctctgcgcgtgccg

SEQ ID NO: 103426 - DNA, 122 bp, Homo sapiens
ctgtgttgggtagtcagaggacattagaggaaccttgagagcctcagaaggggaggtgaccgaactggaagagggtgttgtccacagactgcctggaaaaagatacctatagctaagattgg

SEQ ID NO: 103427 - DNA, 122 bp, Homo sapiens
gaggcagttccacaaggccttctacacggtgcgggcctacctcaactgcgagcggtactccgtgggcctcctggacatgaccaaggagaaggtgaggcttccgtggctcagggaccccctgc

SEQ ID NO: 103428 - DNA, 122 bp, Homo sapiens
caggcgggccgtcgggaggtggaggcgctgcgtctgtggacccagctccaggagctacggcgggaacacgcgcggctgcagcgccggcttaagcgcctggagccctgcgcgcgcctgctgga

SEQ ID NO: 103429 - DNA, 122 bp, Homo sapiens
accaaaaaaaatacaaaatatagccgggcacagtggctcatacctgtaatctcacctactcgggaggctgaggcacgagaattgcttgaacctgggaagtggaggttgtagtgaggcaagat

SEQ ID NO: 103430 - DNA, 122 bp, Homo sapiens
tgttgtactcgtgtaaaagaaaagttcaagggaagagaacaggctcaagtctacttctcacgctggctctggggattaggaaattcagaaagttttgtttcagactggcagtgctgtctgat

SEQ ID NO: 103431 - DNA, 122 bp, Homo sapiens
tctccaatccaccccaccactacccccattccaggagtcccaggatcaagctttgggaagcgccatccgtcacaggtcttggtctccccttccaaaagtcagtgcctctccaggctgcccat

SEQ ID NO: 103432 - DNA, 122 bp, Homo sapiens
cgcccccaccaccatccgccaccttggtcagcagggaccataaaataagcagttgcagatcgtgcccagtagggggaggagtgcccataagtcttccactaaatccgaggcctttctgaagc

SEQ ID NO: 103433 - DNA, 122 bp, Homo sapiens
ttcctacctcagcgaccttcgccccagccagacgccgcccagtttatgatcctttacgaccggcttctgccaagggggctcccgctggccggctggtccagcccactgccagaaggaggggc

SEQ ID NO: 103434 - DNA, 122 bp, Homo sapiens
tcttccagcaccttcaaattatataatatatatatgaaataaatttttctagtttatagtcgttatctgtgggagagttactctgaaagcagcaagaagccattaccagatgcagatctcat

SEQ ID NO: 103435 - DNA, 122 bp, Homo sapiens
ctctgcgtgctggtgtctgacatgcaccgtgtgaagctctctgagtgctggtgtctgatacgcaccgtgtgaagctctctgcatgctggtgtctgatatgcaccgtgtgaagcactgcgcgt

SEQ ID NO: 103436 - DNA, 122 bp, Homo sapiens
aacagagagctctatttgtgactaggtctccctagaggtcagtctgacacctcctcctcccgtggtccccccaccaaaccagaccatggcgatggacacagcacagaacctgcacagaaaga

SEQ ID NO: 103437 - DNA, 122 bp, Homo sapiens
ctgagcagaatcctgtttattttgaggcctgagttgccagggaaacagcaggtcgtggctcggagactctcctctggagtcagaaggctgctggatgaaagggaggccttttctgttctgtc

SEQ ID NO: 103438 - DNA, 122 bp, Homo sapiens
ctggtgtaatgggtgagctgccaacagtcatgatgctagcacttttgatcctgcaattgtcgcaatgaatattttgagtaccttgggaccctcagtagttatatattatttttcttctctgt

SEQ ID NO: 103439 - DNA, 122 bp, Homo sapiens
ggaaactgctgtggtctcatcaaggacacagggatggagtaggacatggacaattctccccgatggggtcaaacactcaaatccttcaggttccagccaggtagggcaggcagtggggaggg

SEQ ID NO: 103440 - DNA, 122 bp, Homo sapiens
ggcgggggcgcgacgagggggcgcccaggccgcgggctcggagccggggttgggggtgggcgaggggagtccttcgcccttgcggcgggctcctgcccaagccagcccacccggcccagctc

SEQ ID NO: 103441 - DNA, 122 bp, Homo sapiens
tgacatgttttcatcaataaaatgtggcagaagtaatgtgcagtgggagtccaggccttacgaagcctgaagtttccactttcactctcttgaaattctgctgccttcctataaaggaagcc

SEQ ID NO: 103442 - DNA, 122 bp, Homo sapiens
agccccaagagtgttgctggtgtgaggttgactggaggactttcccacaggctgggtttgcggtttaatgtgaaagctgaaactagaggaggagatgctaaccaaagtggccagaaggtgaa

SEQ ID NO: 103443 - DNA, 122 bp, Homo sapiens
aggaaaacacccgtgccatctttctgctcagcatagcactgaggaaggtggtcccaggaccgtctgtacctatctatcaccctcaggtctggactccacgctgtgattcatcaccacgccct

SEQ ID NO: 103444 - DNA, 122 bp, Homo sapiens
gcaaggctgaggagcgctgagtcgccagacccagagagccacccacctggagggacgtgccgccacccgcgccgccggagctccggctccagcccggattccacctgttttggtctcgctcg

SEQ ID NO: 103445 - DNA, 122 bp, Homo sapiens
gtcggggcgtgaggctgcaggcggggaccgggagaggcggccccaggggccccaggtcgtcgctgaaggccagccgagagaagctccctcgcagggcggccaggtccggggacccccgcgcc

SEQ ID NO: 103446 - DNA, 122 bp, Homo sapiens
atcgccacctcctgccttctcggctgttcggatgttcgccgggctggggccgtgaggcaccgaggaggatcaggaacaccagggtccggccctgcctggggtatttcttcaatggagaagtt

SEQ ID NO: 103447 - DNA, 122 bp, Homo sapiens
gtgttgggattacaggcgtgagccaccattcccagcctgaccctgctgtctttcaggaggcgaaggtagccacaaggaacagtaacaatactcccctctccagtgtccatggcacccagaac

SEQ ID NO: 103448 - DNA, 122 bp, Homo sapiens
tcccgtgcctaggagtcagctgaaggggacaatgtgtcctcactagagccgctctggctccggaagtgaccagccacacccagactcaggactggtaagctctgtgccaccctaggcgcaaa

SEQ ID NO: 103449 - DNA, 122 bp, Homo sapiens
ggaagtagtcagatttgactgagagccgtaaagcgcggctggctctcgttttccggataacgactacagctccgactgtcagtgccggccttcctcgtgtgaggggatctgccggacccctg

SEQ ID NO: 103450 - DNA, 122 bp, Homo sapiens
ggcggccgacgccgaggagaaggcgcgcgggccgctgtctggcgtgacgctcgcgccgcgcgctcggctccccagaatcaacaagattttcaaaatggcggttcgggaaggagagcgggaat

SEQ ID NO: 103451 - DNA, 122 bp, Homo sapiens
gccatcttgcattggcactgaggtgtttggtttggaatagggaaaaaggtaagagactaacgtggaaaggtgctaactcagagactggagattatagtttacagctgtactttccagatctt

SEQ ID NO: 103452 - DNA, 122 bp, Homo sapiens
ccagggccccattctgtctgtgggactgtgggttctcagtggaattgttgcctttcttgtcgtggagaaatttgtgagacatgtgaaaggaggacatggtcacagtcatggacatggacacg

SEQ ID NO: 103453 - DNA, 122 bp, Homo sapiens
ggggacacgtgggcctttccagttccctgcagccacctttggtctgtaggaaggcagtggcgcagggagcggtgggagcccgggtctgcagggctcaaggtggcgacggcgaagcggtctgc

SEQ ID NO: 103454 - DNA, 122 bp, Homo sapiens
agcaggtcaagattaaagcaaaccgaggcaaaggccacggttgacagttccaagggaacccgcaaggccgcacaggatggggtggacgttttacgggagaaaaggctggggaagtgggcggg

SEQ ID NO: 103455 - DNA, 122 bp, Homo sapiens
cgacctggcggcggcggtcacgggccccgtgcctccgtaggtctgcgaggaacagaagtgcgaggaggaggtcttcccgctggccatgaactacctggaccgcttcctgtcgctggagcccg

SEQ ID NO: 103456 - DNA, 122 bp, Homo sapiens
gagagacacgtgaggttctgctacgtcattaccaggcacgcgcaggaaacatggcggcggcgggtgttgtgagcgggaaggtaggtaacggcctccaggaagacctcggcttttctctggga

SEQ ID NO: 103457 - DNA, 122 bp, Homo sapiens
ttgctcttcatggacctgttaacaaccaccatattgtatcttacggacgtttgtatgccacgtttgaagagcaggagccttgtttcggcgtcatgttgatggaacttgagctgtctgatgcg

SEQ ID NO: 103458 - DNA, 122 bp, Homo sapiens
tgtggggccccagaaaccagaaaccggaggtcttgtaaatttttttatctaagagcatcacggaaactgagaacaattttgtttgaaggtacatgagtgcttttttgtagggggaagattca

SEQ ID NO: 103459 - DNA, 122 bp, Homo sapiens
ctgtccttgtcactctttcatggctacagtttgatcggaattagctgccagggcctccgccggcttgggctcttctgcggaggctgtgggggcccgggccttgggtgtggaactaggggctt

SEQ ID NO: 103460 - DNA, 122 bp, Homo sapiens
tcccaacaagtgagagaatctaaaaccaattgcattttttttttctcaatgacagttggccggagagagaggtctactaacaggtgacagtaaatattgttttttatgtcttatgcatagct

SEQ ID NO: 103461 - DNA, 122 bp, Homo sapiens
ccctccttgagcaccgagcggcgcttcctgcaggcggagcagcggccgaggcgccctccacgccctcaaagagccagaggtaaaggcagacatgcaaacggatgattttaatgaggggtgag

SEQ ID NO: 103462 - DNA, 122 bp, Homo sapiens
cggggtcggccccgccgaggggtgggctctgggccgggtgggggcggggcggggcgggctcggggcctccgggcaggtggcgacagccccgtgcgatcctccgggctcccgcagctggactg

SEQ ID NO: 103463 - DNA, 122 bp, Homo sapiens
caagtcgcccttagcgctcaggaagtacgacaccggaaggggtgggctttgcgaagatggcggcgctggtgagtttggtgtggtttcttcctcgcgtagctattgtggagttgtcctttgcc

SEQ ID NO: 103464 - DNA, 122 bp, Homo sapiens
caggcggtggcgcaggtcgcagttctcggcccggagctgcgccacctcccgcgtgaggcacggcccctccgcctggcagctgtagggcgcgttcagctgctcgtccctcaggcgctcgacct

SEQ ID NO: 103465 - DNA, 122 bp, Homo sapiens
gtttaggaagttgtacacatgcccacccaaggctttcttcccttttcccatggagtgccacggaaaggtcatactctgccgttttgtctcttaatgcatttgcctgggaagttgcatctccc

SEQ ID NO: 103466 - DNA, 122 bp, Homo sapiens
cagcagggccatggcccacgtgggagggagccaggcagccagcgcacagccagtggtctccgagctgatgagaattcagaatacgcgtgtgcttcaggccccctgtgttggtactccatcta

SEQ ID NO: 103467 - DNA, 122 bp, Homo sapiens
atggaaccttccagaagtgggcagctgtggtggtgccttctggagaggagcagagatacacgtgccatgtgcagcatgaggggctacccgagcccgtcaccctgagatggagtaaggagggg

SEQ ID NO: 103468 - DNA, 122 bp, Homo sapiens
gattggggaagtccttggttagtttggaattttccatgactcttagctctgcaccattagcgtcaactgcagtcacagagcttttcagtgtgtccgcctgtgctgttctcttccttttttta

SEQ ID NO: 103469 - DNA, 122 bp, Homo sapiens
tttctcataataatgggaccttataactcaggagtgtggcatactcaaggcagtgtggaccggaccttgaccctgacctgtgggtccccttcacccctgtggttgaaggaacaccagccatt

SEQ ID NO: 103470 - DNA, 122 bp, Homo sapiens
gtgcgggcaggaaccggggctgcgcgtggtgctcgcgggccagtgtgagttccaggtgggcgcggtcttggtaggccccacactcggagcagccagccggagccaccagccctgggcagtga

SEQ ID NO: 103471 - DNA, 122 bp, Homo sapiens
ggaggagaggccactgcctgagtcaggcgggagctggtgtgtgccggtgtctgtgtgttgcgtttgtgtgcgtgtgtgcacacacgcgctgtgtaggtgcttgcataaacactttattgcat

SEQ ID NO: 103472 - DNA, 122 bp, Homo sapiens
gagcagcgcggctctggcatgctaagtgggcagcactggggcgcctttgttcctcgcggccgtctcccaggaccggcttccctctgaatctaaatgggcttctccctcacccgctccgccct

SEQ ID NO: 103473 - DNA, 122 bp, Homo sapiens
cgtccgcccggaagaagatctgctgcacacttccgtttccggtccgtgcccttggggctccgtgtcctgctgtctttccgtccgctgcctagtctgcatctgagtaacatggcggcggcggc

SEQ ID NO: 103474 - DNA, 122 bp, Homo sapiens
aggctgaggtaggagaattgcttgaacctgggaggcagaggttgcagtgagccaagattgcgccattgcactccaatctggggaacaagagcaaaactctgtctgaaaaaaaaaaagcgaca

SEQ ID NO: 103475 - DNA, 122 bp, Homo sapiens
caggggacccccagggacccagggagactgtacctggggctggagggggcccatggggcccggggagcagatattgggctttgtcagaggccggggtagggaggttgctgtcaggatgccag

SEQ ID NO: 103476 - DNA, 122 bp, Homo sapiens
ctagggagagcccctgggagggagagagataaggcgctatctgccttcaatcagaaccttcggtttaaaatcatctaagagtctatacttgtgtgtacatacgtatttatttttatttattt

SEQ ID NO: 103477 - DNA, 122 bp, Homo sapiens
ctcgcccgccagcgaacttggaaaggtgtgggcggagccggccgggactgtggggcagctcgcggggaccgcccctgggcgccgggcatcgcccgcgccgggcaacaatggggtcaggcagg

SEQ ID NO: 103478 - DNA, 122 bp, Homo sapiens
tcacctgtcgagtgaccgtcgctaggccggtctctaaagtccttggttgatctggggagtcgtgaccttgacagaattcaagccgaggtgtttttcccctgtccagcagaaaccagccttcc

SEQ ID NO: 103479 - DNA, 122 bp, Homo sapiens
ttcccggcccaaacggcggcgcggcggtggctccccgggccggcggccccgccctcgcctcgtcacttccagtggcaccgcccgcccgccctctaggtctggccgagccgagctgagcccga

SEQ ID NO: 103480 - DNA, 122 bp, Homo sapiens
gatcaccagggtctcgttgatctccaggaggccgctggtccaaacgaagcggtccatggccgctgccacccagccccggccctccgaggccgcgagcagcgcgccaggcagcctgcggcgcc

SEQ ID NO: 103481 - DNA, 122 bp, Homo sapiens
ccatcgtcccggctgttagacgaagagttgggcttgccgcctccttccatgcccggaggacgcggccggcgacggcgcgggctccagactcgccggccgcccggcgccggagacacgtagcc

SEQ ID NO: 103482 - DNA, 122 bp, Homo sapiens
ctccctccacaccttgcctcctccaggcccaaccccattccaccagcaccccgccccaggcgcactggctaggactggaaggcaaggactaaggtgaaagctgactgcccgcaccgccccag

SEQ ID NO: 103483 - DNA, 122 bp, Homo sapiens
aggagcctggtgcgcaagaagtgcagagtaggtggactattacacataaagttttggtgccgcaaaagaaatagcactcgaatataaaattttctttttaattctcagcaaggcaagttact

SEQ ID NO: 103484 - DNA, 122 bp, Homo sapiens
tcctctggatcatcccccttctgctgaatgccagcaaggagttcagaactttaggtgttccggacttttctctgaaccagttctgaaatgtgactgcaaactagcaaacaacccccagggct

SEQ ID NO: 103485 - DNA, 122 bp, Homo sapiens
acgtgcaaaggtttaagcatcgtttgccaaaggtgggcattaggggaggttttgagtcaacgttttagatttgagtaataaataaccctctgggtcttaggcatatctgtttctaatttctg

SEQ ID NO: 103486 - DNA, 122 bp, Homo sapiens
tttctgttgttgtagcttatgcagttgctctgttgctatggaaacgtgacatcaaaatgacgtttcccgtttaaaagcttttaactaaattcctgcctgtcagatgtaggccccattttgag

SEQ ID NO: 103487 - DNA, 122 bp, Homo sapiens
tgcttaaacagttccataggctgcatttcctgcagggtgaggtctgtgcaacttggcattcggctttttaggacctgggctctgcctgccattttactctcctggcacttcctccaaatgga

SEQ ID NO: 103488 - DNA, 122 bp, Homo sapiens
ccacttccaggtccatgttcaaatgctcttcccatttccttcctcctgttctttttatgtcgtggtgatcaaaggatttccagagcagtggtggtgtaagctttagcttaaagatatgcaaa

SEQ ID NO: 103489 - DNA, 122 bp, Homo sapiens
ccctggaggggcctcggctgccgacttctgcctcataaaccctaccctccctttcagactcgcgccaagcaaagccctcagtgaagtctgctctcacccaagaagaataagctgttctgtgc

SEQ ID NO: 103490 - DNA, 122 bp, Homo sapiens
ttccatggcaacaagattgaaatgagatttggggtccaccaaccacccatttgctttgtccggtaaaggaaaaaaaaatgtgtgcttttgttttctccacatcgagaatttccctctccttc

SEQ ID NO: 103491 - DNA, 122 bp, Homo sapiens
aatccagtatcttggcgtggaacttccgcccgccttctccagctacttccgccaggcgcgcgccccacagcgacctggaactacaactcccagactgtcccgcgcccctcgtccaagcacgt

SEQ ID NO: 103492 - DNA, 122 bp, Homo sapiens
tattataattggatcaataaaagaatgaatcaacaaatatataactaaataaagatgattcgtgtgaagcattgtccaattataaaaatagatggtgtggcaagaagtaatattaatatgta

SEQ ID NO: 103493 - DNA, 122 bp, Homo sapiens
aacccactatgggacactaaacttctcgacctcagggccccttcagaccatttacatggtcgggtctcacaggaggagaaaatattttgagactctgaggtggtcactggaaaagcttcttc

SEQ ID NO: 103494 - DNA, 122 bp, Homo sapiens
gcctcatcaatgcccactcgctggacccagccaccttgtatgaggtggaagagctggagacggccactgagcgctacctgcacgtacgcccccagcctttggctggagaggatccccctgct

SEQ ID NO: 103495 - DNA, 122 bp, Homo sapiens
ccagcctggccaacatggtgaattcctgtctctactaaaaatacacaaatttgccaagtgcgatggtgtaagcctgtaatcccagctacaagggagaatggggcatgagaacagcttgaacc

SEQ ID NO: 103496 - DNA, 122 bp, Homo sapiens
ggaagggcgggaccacgcgtgctgcactggccctcagtacctagcccgcggtaggaggtccgccccaaccctggctagggtcaggtgctgcctgagcacagccccgaggttaagcattctca

SEQ ID NO: 103497 - DNA, 122 bp, Homo sapiens
agttctcttcggcctttcaaccaatgcagtggttcactctggatatgcactcaaattgcccgggagctttgaaaaatctcagtgccctggctgccctgtacattcaccatttctttttcttt

SEQ ID NO: 103498 - DNA, 122 bp, Homo sapiens
atacaaattggtttcatctgcaaatgctcttcacaagaaaaccattaaaatctaagataacgtttagagttgatcctcgatcctcgcactcactaaataatctgtcagcaggttgagtctga

SEQ ID NO: 103499 - DNA, 122 bp, Homo sapiens
cagggtagggccagagactcactgtgcaccccgtcccgcagtgtggacacggatgaggaccgctatccacagaagctggccttcgccgagtgcctgtgcagaggctgtatcgatgcacggac

SEQ ID NO: 103500 - DNA, 122 bp, Homo sapiens
gcaggccctgcacacccgctccgcggaagacgcggagacatacacagaacctgactcttccggcagattgccctagtaaccggaagtctcctgcagaccccgggaaggaggaatctaggtta

SEQ ID NO: 103501 - DNA, 122 bp, Homo sapiens
ctgggagagtaagggcagggactagccagaaggggcagcagggccaggtggagactcactcgcctctgtggatactctggtcatgcggcttggggagtgcgtgtcccttgaagagcctgatc

SEQ ID NO: 103502 - DNA, 122 bp, Homo sapiens
ccccacagaaccccttagccagtgaggaagtaagttgagaggcttcatctcacagactttcggggatggccgttgatgttttgtccacgagcctgtgtccccagacacacactccggcccat

SEQ ID NO: 103503 - DNA, 122 bp, Homo sapiens
tctctcatctagagcacccccaccttcctaagcaggtccctcctctattcctctaccttccgaacaatccatttcccacctggtgttgagagagcagctaaaacccaagtctagtgtatttg

SEQ ID NO: 103504 - DNA, 122 bp, Homo sapiens
gggatacgctgaaagtccagaagccaagagggaggtttattcagcagtccaatgaagaagcgacaagcatgcaattgacaccaaggttagagagaatcaggaagagttaacagtgtctcagc

SEQ ID NO: 103505 - DNA, 122 bp, Homo sapiens
atacaaaaattggctgggcataatggtgcaacctatagtcccagttactcaggaggcttacgcgggaagatcacttgaaagcggcaagtggaggttgcagtgagctgagattatgccactgc

SEQ ID NO: 103506 - DNA, 122 bp, Homo sapiens
tggggtttccaaataaactccctccaaataaactgttcaatatcacttctccattcttatcgtgtgcacagttgaaaagcacattcacaaaccatggcctcaatgggctctcccaacagtct

SEQ ID NO: 103507 - DNA, 122 bp, Homo sapiens
caaaggggcttcctaacacatcttccccagtgactctgagatctcaaccagtgctcaaaacgttcttcttccctcaatccagagaaggaaactcattctctacttaagtgagataacccaag

SEQ ID NO: 103508 - DNA, 122 bp, Homo sapiens
gcaagtgattgatctcagttattcctggcacacacacttgacagggccaggatcttatgtcgcccattttaggggtgagctccagtcattttctcagaccgtgggcatctgagttagggagc

SEQ ID NO: 103509 - DNA, 122 bp, Homo sapiens
tgacctgagtctcaatttccttgcttgtaaaacaggctactgtaaatctaccacatcctccggtagtggtgggatgaaatgagaatatgcacataaagcacttatctcatgcttaggaaaca

SEQ ID NO: 103510 - DNA, 122 bp, Homo sapiens
gagatctttcccgcattgtcctcagaaagctggatgaggaacatgaggccgtggcctgagcgtcttcacagaaataggaagctctcgaagagtcgcagcatctcacaggcccagccacttgg

SEQ ID NO: 103511 - DNA, 122 bp, Homo sapiens
ttcaacgagctggaggacaagggactcgccccgcgaggcctcggtttggatgggcagtcgcgggctggagagaaggggaggcgctgtgccttccggggaggagcgggtttaagggttccttt

SEQ ID NO: 103512 - DNA, 122 bp, Homo sapiens
ggcacgaactcggcggcgtggacgttgggcacgaagggcttggcgttgacgttgagttgccggctgaaggccgcgctgaggttctcccgctgggcctcggccgccgccgccagggagccgcc

SEQ ID NO: 103513 - DNA, 122 bp, Homo sapiens
caagtccaagctggctcaaagagcaaccagccacctctgcaagggtgcgcctagtgcaggcggagcatccaccacctgaaccgctcgaggaagtggggatggccaggttcccacagcctgag

SEQ ID NO: 103514 - DNA, 122 bp, Homo sapiens
ttctttctgccttgcgggcttagcgaatgggtgtcctggaggaggggaccccggggactccgttaatgtgggaaccgtgattaatgactaaactcgagactccagaaaaatagattacaggt

SEQ ID NO: 103515 - DNA, 122 bp, Homo sapiens
ggttgaatccaccatgccctaggagttagctaggggatgagctggggaagaggactcagtcgtttgatgcctgaccttgaaatatgtccaggtgataatttgagcattattccaagtgtttc

SEQ ID NO: 103516 - DNA, 122 bp, Homo sapiens
atctccgacctagccctggccctgcccgccggaaccccgcaaaagctatcactcagccctcggccccgccccggccccaccccggccccaccccgcactctcacaaggtgtcactcagccct

SEQ ID NO: 103517 - DNA, 122 bp, Homo sapiens
ccccaactcttccaggggctgtttggttaccagggttacctctgtgggttccctctggcccggggccagcactgccctggtttctgtgatcacacttcattctcacgacccgtgggaggtga

SEQ ID NO: 103518 - DNA, 122 bp, Homo sapiens
cagtgtgcgggtgacaggtgagctctggggccacgccagctacagaaaggagccgagtgccgggctccctgagtccctgcgtgggtcaggagcggctgggggtctctctggtcattggtgga

SEQ ID NO: 103519 - DNA, 122 bp, Homo sapiens
agacgtctcggcctcgccgcgcgcagaggggacgcgcggagaggctggtttctgggcgagcggagagctttgcccattaagctgccggaagaagccaaatcaaaaagccaatctccaagcct

SEQ ID NO: 103520 - DNA, 122 bp, Homo sapiens
ccagcctcaccaacatggtgaaacctcgtctttacttaaaaaatacaaaagtgagccaggcgtgttggcacgcggctgtaatcccagctactcaggaggctgaggaaggagaatagcttgaa

SEQ ID NO: 103521 - DNA, 122 bp, Homo sapiens
gaagtgcccgcgactgaggctgtttactcaggagtacatccttgccttgaacgagctcaacgcggggatggaagtggtgaagaagttcattcagaggtgggtctccggcgcgacgtccctct

SEQ ID NO: 103522 - DNA, 122 bp, Homo sapiens
ttatctgggaccgggagggtcaaccacaggggtgaacagtttctccagaagacagctgaccgaaaccgcagcagttgccaaggcggctggaggagggcggagaaaaggcggtaactggcagg

SEQ ID NO: 103523 - DNA, 122 bp, Homo sapiens
ccctgccacccgctgctgcgggtcctctcgggttcccgcatcctttccaatgcgcaagggcggctggaagctcgagacactcccagatccaggctcactgaatatcaaaaggtgcactcgct

SEQ ID NO: 103524 - DNA, 122 bp, Homo sapiens
actttcttttatctcaagcactcattgttgtttgcatttgcccaaagtgctggctggctccgaaggccagttcccacaagaatgaattcggaaagacttcatccttgtgtttttccttctct

SEQ ID NO: 103525 - DNA, 122 bp, Homo sapiens
tctcccagttcttagttttcccttggtaaagccttcaggaacgtttaacccccatgggggcggggaatggacctggaaggacagcagaacctgccccccgccccatccccaccaccggccca

SEQ ID NO: 103526 - DNA, 122 bp, Homo sapiens
atagtgtgatcataacctcctcaaataggtggcatgaaaattaagatcatcttttacttacgtattttagtactgtgtatggcaattaatagtattattttggagggctccccccacaaact

SEQ ID NO: 103527 - DNA, 122 bp, Homo sapiens
aggtatgaaaataaacttataagtagatatgaggcaatttcctggtgttttatctttatacggtggcaatataaatcatttcagaaaggctttatttacttggtaagcattcagttacatta

SEQ ID NO: 103528 - DNA, 122 bp, Homo sapiens
ttcctaccccggcctgtgcttagacatggggaaagctgcctgagaccctggggcgccccccgtgtatctccggaaggaggaaaaggtcactgcactttcacaagcttttattttagtacaca

SEQ ID NO: 103529 - DNA, 122 bp, Homo sapiens
gaacggcatgacgggggcggacgtggccgatgtcccaccccctctgcctctcaaaggcagcgtggcagattacgggaatttgatggaaaaccaggacttgctgggctcgccaacacctccac

SEQ ID NO: 103530 - DNA, 122 bp, Homo sapiens
cgataaaataactgatgataaaggggcttctgcagactccccaattcatttggtaaagaccgctcagcatcatggtcgggccctgattgctttcacaaccgcttcgaggagtgtcattccca

SEQ ID NO: 103531 - DNA, 122 bp, Homo sapiens
aagaaccccagtccccagggccctagaatgctggctgtggaccgatgggattcttagacccgggtcacctgcgtcaacagccctgggctgggcggagggcagccccgcacctgcacctgccc

SEQ ID NO: 103532 - DNA, 122 bp, Homo sapiens
aatgccttgccagagcagcgcatagcaggctcccgagaaggattaacactggctgaacaccgggaaggaactggcacttgaagtccagacatctgaagcttgtcaagactagtttttggaac

SEQ ID NO: 103533 - DNA, 122 bp, Homo sapiens
accctgcccccatgcagactcctgcttttccctttaagggaatctaagacgttgagtcgccggatccccaagggagttaaagaaaaatgtcttccggcattcacatttgctctgtggttttc

SEQ ID NO: 103534 - DNA, 122 bp, Homo sapiens
ggagagagcgagcgagggggcgaggagagggagcgagggcgcggcgagccggagggagagcgagcggtgcagtgacagggactgccactggggtcaaaggagcacagctccaggaagcaggg

SEQ ID NO: 103535 - DNA, 122 bp, Homo sapiens
cagccatgtcggtgacactggagcagtgcctgatcctgcaacacgagcatggcatggccccgcaggtcttcacccaggccctggagtgcatgcgcaggtgagtgccgcagccaggccgcgcg

SEQ ID NO: 103536 - DNA, 122 bp, Homo sapiens
gccggcgaatgaagtccttggccagctcgctggtgttgctgaagtactcctcgtcgaagtcgtagttcacggctgagatgttggtgagcgtctcctgcttggtctcgcccaggaacggggat

SEQ ID NO: 103537 - DNA, 122 bp, Homo sapiens
actgtggaggagagccctgggtttaagtggggaggcccccacttgaatttgcatagttgccgccctggcctgaagggaagagtctacaaggtttataacccagaaccgcaactgcagaaaaa

SEQ ID NO: 103538 - DNA, 122 bp, Homo sapiens
gcgatagctgctgctaaccacagggtcccctccacacacacccgagccccgcctcccgaccgcattggctcataccggcctcggcttcacgtctattggaaggaaccgctgtctatctctat

SEQ ID NO: 103539 - DNA, 122 bp, Homo sapiens
agaccgattgtgtaacggcattcctcccaaggaaacacgcctgccccctccaagaaggtgcgagagcttcccagacacagaaagggccctgctgggtaaatcagttcttcattattccgttc

SEQ ID NO: 103540 - DNA, 122 bp, Homo sapiens
acaagtaaattatggtaaaggtcgcatccttgagcccctccaatggtgcctgccccttcccgagcccctgctgagggctcagccttaggcaatcatgcattatggtgtggtgccctcttagc

SEQ ID NO: 103541 - DNA, 122 bp, Homo sapiens
cactgacttccacccctccggatccagcagggtgtcccctgagcttctgatccagggaggcgcccattgctgctccggatagggctaggggatcgccattgttcctgcgcagctaagtgccc

SEQ ID NO: 103542 - DNA, 122 bp, Homo sapiens
gggtaaacacaggctgagaaaaaaaggtttggttccagaaggcaaattctacgaaatactcgagggtgtgttacaagctattatttattgcccacttgtgctatcagacctgaatgcagttg

SEQ ID NO: 103543 - DNA, 122 bp, Homo sapiens
agggcggcacgtacccgtgggtggtggaccgcgtcgtgtttcccaccatcaccctggtgccgcctgtgctggtggccttctgcacccacgacctggagtccctggtgggcatcacaggggcc

SEQ ID NO: 103544 - DNA, 122 bp, Homo sapiens
attcttaggcaagtaaacatcaatcaaattcagaacagaccatgggtggccaaacagacccgggagacgtcaaaaatatgtgtgctaaagaaacacagaactaaggaagtctatttacctga

SEQ ID NO: 103545 - DNA, 122 bp, Homo sapiens
ctcctacttctcctctccctcctcccttccctcgggtcggcgctgcctctggattgcctgcgtgtgggagtacaactctgcctctccaaggagaacgggttgtgaccactgaacaaaacttg

SEQ ID NO: 103546 - DNA, 122 bp, Homo sapiens
ccgatgcgtgcccaaagacaaggccattaagaaattcgtcattcgaaacatagtggagtccgcagcagtcagggacatttctgaagcgagcgtcttcgatgcctatgtgcttcccaagctgt

SEQ ID NO: 103547 - DNA, 122 bp, Homo sapiens
aaaaaaaaagatgcttatgatccggcggatcctcctgggttggccaggccggggagagggcgcgggcgccgagtggcgggggcagcgggcgggcgcggcgaccggggccggggcggggatcc

SEQ ID NO: 103548 - DNA, 122 bp, Homo sapiens
ttctcccccggtggagcggcctggcgtttagggaccaggacactaaaggccccggcggggcgggagcacccagcgtgacctcacgctcctacacacagacaagcaaacgggccggcccccgc

SEQ ID NO: 103549 - DNA, 122 bp, Homo sapiens
ccctgaccacttaacacactgtgattggggcaacaaaaatcttcacctgagacccaactccgctgttctgcttcctcggtggaagccacacgaaccccactggtacagcggcagcgatagac

SEQ ID NO: 103550 - DNA, 122 bp, Homo sapiens
aacccagaaaatgaacatttgccagcgagcaccaaacaactgtgcgccgcagtgcttgagcgagtcaggtcctgaggccactctggcgatcctccttacaattcatgtgaaatacctactgc

SEQ ID NO: 103551 - DNA, 122 bp, Homo sapiens
ggcagcaggggccagttggaaggagtggaaactgtcactaatgtaaacagactgtccccacgttctgtcttctccggggaccaacctgttcacagaaatcactatcatgtacttactgttgg

SEQ ID NO: 103552 - DNA, 122 bp, Homo sapiens
ttacagttctcattagttaactcttaatgaactctagtatgttggtgttattcccaccctcgttttcttatcagaacacaagaagaggcttaaaggcaatggctgcctctataaatgttctg

SEQ ID NO: 103553 - DNA, 122 bp, Homo sapiens
tgcgtaactcccgccaactgtgggatgttctctttctgccccgaatccctggagcgggagcgagagcccgccgctctcagagataccgagataaccgcctgcgaggaggcgcttcgtgaacc

SEQ ID NO: 103554 - DNA, 122 bp, Homo sapiens
tcaacttaaaaggggcaggtgcagctgaggatttactttctccctgcaatttgtggtaaccgcttattcagaaacatttctctgtctagttgggccaggatgctgcatgtggattttcagat

SEQ ID NO: 103555 - DNA, 122 bp, Homo sapiens
ggggctggggtagccgactccgggcctagggatcagagcgtctgtccctgcagtggtacccggaggtgcggcaccactgcccccacacgcccatcctcctggtgggcaccaagctggacctc

SEQ ID NO: 103556 - DNA, 122 bp, Homo sapiens
ggaggcagaggttgcagtgagcctagatggcgccactgcactccagtctgggtgacagagcgagactctgtctcaaacaaatgaaccccaacatagctgttggtggcaaggcctttctccat

SEQ ID NO: 103557 - DNA, 122 bp, Homo sapiens
agcgcccggggctccggcgtaccctacgcctctgcgctcgcggccccgccccgggcctcccgtggggctttaatgacataagcaactttcctcgcgcaccccccgccccgtcttggtacggc

SEQ ID NO: 103558 - DNA, 122 bp, Homo sapiens
agtcgaaggggcagggctccagtcaccagcaggccccacgaggacaaaagatccatgaaccggggcccagagggcgctacagggccgtgcaggaagggttcccgcggcaccaaggaccctca

SEQ ID NO: 103559 - DNA, 122 bp, Homo sapiens
aaaacaaaagccacagctatctagcatggcattgtcaccaactccctttgcatggtgatgcgattaaggtagcagcatttttattattcaggaaaagcagctgggggattcatcagttctga

SEQ ID NO: 103560 - DNA, 122 bp, Homo sapiens
cataagtaagatccagcgcagagaatacccgagggtgaaccgtgatgagaagtctcagagcgcactgcgtaattaccacgtgtagaaagcaaaacgttgacaagacacggccgttagcaaaa

SEQ ID NO: 103561 - DNA, 122 bp, Homo sapiens
aggagctctgcaacacagaaacactcaagagtcaagaagcctgggtgttcgtttcagtctcgactcgaggttgtgtgaagtcacccattccttcgttctgcacacggtgcaaggcactgggg

SEQ ID NO: 103562 - DNA, 122 bp, Homo sapiens
gctgctccttgggcatggcaggaacctgtcgtcgcagtgcagggagcacagacacctccacgaaaacagcactcagaaaagcctgacccagggtcctagctcacagaggcccaccccgccgc

SEQ ID NO: 103563 - DNA, 122 bp, Homo sapiens
gcggccgcgcggtgggcgcagcgcgggagggagcgcgggggctgtgagtccgctctggggcggagcttgggactcccgcccaggttgccggggggagggaggtgcagcggcgcggggtggga

SEQ ID NO: 103564 - DNA, 122 bp, Homo sapiens
tcgttcagtgggtggcattagcctgccccaggttcctcagcttcggagaggacaagcagccgggacctgagagctttctgtgttgcagtgaccaagcagagagactcggagatgggccagca

SEQ ID NO: 103565 - DNA, 122 bp, Homo sapiens
gcaggtgcagcctccgaatgccacccagcccttgcggcgccgcgagccagcgcggggacccgttggtccctcggtccccagcacccacctgcactcatctcagcagccgctcggagtcgggg

SEQ ID NO: 103566 - DNA, 122 bp, Homo sapiens
aagatactgcttgtggcttctgaccttggtgttgcaatcaacttggagtgcactgctgcacggaggcagtgaagggtgggggaagattatttcacttggggcctgttgatcccaggctgtgc

SEQ ID NO: 103567 - DNA, 122 bp, Homo sapiens
caccaggcctggagagggagcaggcaggcactcacagacaggcatgtcgttgcagcagtccgtgagacctgtgtgccagtcactgagctgggtctggtagcagctggtggtggcgcactggg

SEQ ID NO: 103568 - DNA, 122 bp, Homo sapiens
tctttccccatctgcagaatgaaggggtcaagcaatggcttaaccttttgtgttcattaacgttttggctccctgttgcaaactaagagccagagataaacgataaatgaactggtaattag

SEQ ID NO: 103569 - DNA, 122 bp, Homo sapiens
gccgcgccgcttaccgtgcgagccgccaggaactcggcgcccggtggtgcctcggcgcggcgcccgccagtcgatccgctccgggtcccgggagctcagcctctgcccctcaacgcgcgcga

SEQ ID NO: 103570 - DNA, 122 bp, Homo sapiens
cattttcccccacgaatgcaagacaccggggcagcctctgagggggcagccagacagccccggaccgggctgcggaagaaagagcgtggcctttgtttactgcggtgaccttaggcgtagag

SEQ ID NO: 103571 - DNA, 122 bp, Homo sapiens
tcatgccactttggggtatgactgatgactcaaaggcacagccttcacattgcatgccaacgtgggttatttttcagaggccagggaaaaggagagaactgggcggggagaggtggtgttta

SEQ ID NO: 103572 - DNA, 122 bp, Homo sapiens
atacagccgggctgatgggggacctgaggctggggagcttcccagcattggggaggccaccgcagcattggcactggcaggccggaggccctcacgaggccttgcaggggcctctgggcgga

SEQ ID NO: 103573 - DNA, 122 bp, Homo sapiens
gcaacaattccagctcctggagctactcccatcatcccaggactacaacttgcttccattcggcctccacactgatctcttctcttcctgagagaggacacccagagccaagttcagatact

SEQ ID NO: 103574 - DNA, 122 bp, Homo sapiens
ggacccaggttcctcccatctatggctctgccatcactaatctgggtcttccacaattgccgtgctccttggaagtgggaagagcaggcggaggacacgtgggaggttttacggagaagcct

SEQ ID NO: 103575 - DNA, 122 bp, Homo sapiens
cagtctgctgactcctgttaccccactctccccacccgggttagaggaagaggatgtcaacggttatgtcatgccagatacacacctcaaaggtgcctgactcttcctagggctttcctcaa

SEQ ID NO: 103576 - DNA, 122 bp, Homo sapiens
ggaactgggcggacccgccggaagactcggcgagtgcgcgcgcgcaggagcccattttcccgcccgcaacgtggccccgcccttttacccaggccctacgcgagcttcgccgagtacgcgtg

SEQ ID NO: 103577 - DNA, 122 bp, Homo sapiens
ggccctcgggagccccgccccgccccggggatgccaagccgcccctccacctcgcagcggcgccggccgcccagacctgcccaccctcgccgggtcagccgcctccctccgccgcgccgacc

SEQ ID NO: 103578 - DNA, 122 bp, Homo sapiens
ccccggggccgcgggatgagccaggtgagcgcggagacccccagcactccctgcctggtgcgcatggacgggggtggggaggcggggcgggaagcggcgtcctcggcctctgttccccgggg

SEQ ID NO: 103579 - DNA, 122 bp, Homo sapiens
ttccgtgtcccggaagtatacctctgaggtcacggggcgaggtcgggttccggaagacgccggcattattcctcccaaagagtttaagactcgtcataaggaaagacggtttattacttaag

SEQ ID NO: 103580 - DNA, 122 bp, Homo sapiens
gaccagcctggccaacatggtggaaccccttccctactacaaatacaaaaactagccaggcgtggctgggcatggtggcttacatctatcatcctaacactctgggaggcccagagtgtcag

SEQ ID NO: 103581 - DNA, 122 bp, Homo sapiens
atgctccggccggggggcaggagacgaagctggcgtgacacacgtgcccttttcagcccccgaccagctcccttgtgaacccttgggtctaccatggtgcacagcctctccttcacctttac

SEQ ID NO: 103582 - DNA, 122 bp, Homo sapiens
ctgtcacccgtctgaccaccagctccttgagggcaagaggcgcctgctgccctcagggtccgcgcccagcccgcagctgctcagatccggagacgggaaggtttgttggcgagaacctgact

SEQ ID NO: 103583 - DNA, 122 bp, Homo sapiens
taagcattctcacttcccacagaaaggcacaaaattagaggattagactagtggaaccaccgccccaggctaccagtttattatttggagctgttcaaccactatcccgtccaacgtttttt

SEQ ID NO: 103584 - DNA, 122 bp, Homo sapiens
agaagcgccggcggctgcggggaaacggtaggcgggggatccagccccaagcaaatctcccgcgggcgcgtgggaggtggggccagtgctgggcgcagccgcgcctcgcgcctcccgccccc

SEQ ID NO: 103585 - DNA, 122 bp, Homo sapiens
gcgggcaggctccagctccagccccagccgaggctgagagcagggcagggactggctgggcggcgcgcggggacgcagagcagccacctgacgctgctaccgcccccctccgggctccggcg

SEQ ID NO: 103586 - DNA, 122 bp, Homo sapiens
gctgccgcagcccgcgcgggcgccagggaaggaccttccctccctcgccctgccctgccccggactgaactcagcacggtttccccaggggactctaccaggccatgtcccccgccgtcctc

SEQ ID NO: 103587 - DNA, 122 bp, Homo sapiens
gaaaaccatcccaccgcttaggaagtcgtgagatgcagcacgaatgtgattttgttaccacgctcccctggaggcacgtcgtgctgttctagaaagcctgtcgttggaggaaaacacttgat

SEQ ID NO: 103588 - DNA, 122 bp, Homo sapiens
tctcagcatctctgaggcactgctcctcagcggagactgtggtggctttgcctttcagcacgcatcctttctacgatgcctgacagtgcccagggaatgggcagagctgggagctctgaagc

SEQ ID NO: 103589 - DNA, 122 bp, Homo sapiens
ttttaaaaacatgttcgtgatttacatactcaaataagtaaagccgggtgcggtggctcacgcctgtaatcgcagcactttgggagaccgaggtgggtggatcacgaggtcagcagttcgag

SEQ ID NO: 103590 - DNA, 122 bp, Homo sapiens
tttccaggaaccccttgctagaatcagccctcatacaagtgtgctcagagatcccaggagcgatggcatcctccctgatgggtataggcaagttctgagtgaacagtagaagcctcctgcgg

SEQ ID NO: 103591 - DNA, 122 bp, Homo sapiens
cccctgtgagagatttttaaagatttttttgtttttattctccttgtagtccatttggatcggataagatttgggagactgataatttgccattatcttaacctcaaagttgaagcaacatt

SEQ ID NO: 103592 - DNA, 122 bp, Homo sapiens
acgcctagagcgggctgagtcaaggatcccggtgtgctcatctaacgtccgcaaatgggacggaagacactctcaaaagtcccttctctgtgtctcaggtgactcagctctccgtcccgact

SEQ ID NO: 103593 - DNA, 122 bp, Homo sapiens
ccctcccgcacacgggagtccaggctcacctgcaggacaagacactgaggtcagggggtgcgggagctgccttccccacctagtgcctggagcaggcggcccccggcctgttctggtgtctg

SEQ ID NO: 103594 - DNA, 122 bp, Homo sapiens
ttgactctagcctctggctcccagatggcatctttgacccacatggggcctaggggaactcgtgactctgaagggaaagacaaaagcctgactggctttgccacctgctggttgtagagtcc

SEQ ID NO: 103595 - DNA, 122 bp, Homo sapiens
cccccgcggaggtcctctctcccagtgcccccgcggagatccgctctcccagtgcccccgcggaggtccgctctcccagtgcccccgcggaggtctgctctcccaatgtccccgctctgacc

SEQ ID NO: 103596 - DNA, 122 bp, Homo sapiens
cacatagaagaacagggagaccaaagggagggcagaagtacctgagtcctgagtgaccaacgaggacagaaaagaacagtgttagattggcattctctcttgaattccctcttgagaatcag

SEQ ID NO: 103597 - DNA, 122 bp, Homo sapiens
acaacatccagcatcaccagcaaacttgctagaatgcagattgccccagcttgctgacttcgaatctctggggtagggctctgcaaccttggtttgaagaagccctctgagtcctttttttg

SEQ ID NO: 103598 - DNA, 122 bp, Homo sapiens
tcctgtggggggggagattttccctggtgtctcagggccacagagattgaacaatgggcccgagtcacactgcaagtcagcagcaaaggcagcagtctaaatgagcccccaaaaagaggagg

SEQ ID NO: 103599 - DNA, 122 bp, Homo sapiens
ctttgatctcacctcagcagcttggaaagccctgcttgacagggagcctgggctccatctcggggcacagacagttgcagtgggaagactccagcaggtggctgcctggtttgggtccaact

SEQ ID NO: 103600 - DNA, 122 bp, Homo sapiens
ggacgtatagaggctgtagatgggctgcagcccggccagcaatgagtaggcgatggcctgcggcaccaggatgatgccgatgaccagcccagacatgacgtcgcctgccaggtactcccgcg

SEQ ID NO: 103601 - DNA, 122 bp, Homo sapiens
cgccgtgctctggccgccttgaattgtgggagatgtagtctcttttgcgcgcctctttgccgtatcccagttaagagcgaggttttcaaactactattcccaggaagacgggggtttcccag

SEQ ID NO: 103602 - DNA, 122 bp, Homo sapiens
ataacagtgaactcactacatgccagactgtcttaggtgttgtatcttatttaatctccacgatggccttatgagggaaggcaccatcatgatccttacttttcaggtgactattttaaggg

SEQ ID NO: 103603 - DNA, 122 bp, Homo sapiens
ctagatacagagcgcctgagtgggattctagatgcagagggtctcagcagatcctagacacggagcgcctcagcggatcctagatacagagcacctcagcgggattctagacacagagcatc

SEQ ID NO: 103604 - DNA, 122 bp, Homo sapiens
ccgctaagccgggatggcaggcggactcgccggacccctttttagacccaaggctctcttcgcctctccatccggctccggccggggtggggtgacctgagggacccggtagccgacgacag

SEQ ID NO: 103605 - DNA, 122 bp, Homo sapiens
cctgtatatatgcttgtgcctcatggtcccaggtacacatccccacgtgcccctgaattgcgtgtgtccatgtggacccctgtggctctgggacctgctgggggtcttgtgcatgtggctgt

SEQ ID NO: 103606 - DNA, 122 bp, Homo sapiens
ccttgcagtagtgggttcccccgcacaggctgacgggccgtccctctccccagcggccagcgacagcgactaccctcccggggagatgttcctggacagcgacgtgaacccagaggacccgg

SEQ ID NO: 103607 - DNA, 122 bp, Homo sapiens
ccaagtggaatggcagagagatggtggcagcagcaaagccctgagtcagaactccagcatcgagccttgcatgtgatattacaagctacatggctccatgccaatcatttcatctccctgag

SEQ ID NO: 103608 - DNA, 122 bp, Homo sapiens
accaacgcagcgtcggcggattctacacaagagaacagcaaataggacccaacacagcgtcggcagcatcgtgttatggccaagcagatgaaggccaggcttacgagggcagcgcagtcatc

SEQ ID NO: 103609 - DNA, 122 bp, Homo sapiens
tttggaggaagtggaaggtggaatgaatgggcccacagtcccctgggactgggcgagacccgtggaggctccaggggtccgtagagctcttcgctctcaccgacccgggccacacccgccaa

SEQ ID NO: 103610 - DNA, 122 bp, Homo sapiens
gcgagaggagcacttgcttctgggccgtcactcggaagaagtgtccgggggaagtgtgctcgccgtcagagaggcggaagcggaagcctccatccagggttcctggggacaggggcattggg

SEQ ID NO: 103611 - DNA, 122 bp, Homo sapiens
tggcgtctgcggcccagcacgcacacagccgggagggacgcacacagccgggagggggctcgcacagccaggaggtgacctcacagacctggcacttgggctcagcggtggagagggggcac

SEQ ID NO: 103612 - DNA, 122 bp, Homo sapiens
aggggaggggtgaaaatgggcttgcgggactgacgcacgcgcattgggataccagatccccgcctcctgctccaggtttcccctcctccttcaccaccctcccggaagtggagccgccctcg

SEQ ID NO: 103613 - DNA, 122 bp, Homo sapiens
tatttaatatctgcgcaagctacagagagccaatgtctacatccagccactctcctaaaccgaagcttacggctccagggacctttagagatcacctggacacaatgcccttgtgtcacaga

SEQ ID NO: 103614 - DNA, 122 bp, Homo sapiens
ggtcttggacatgtcacttaatctctttgagcaccagggcctagccatctgtctagattgcggcaaagattttttttttttttttttttttttttgagatggagtctcgctctgtcgcccag

SEQ ID NO: 103615 - DNA, 122 bp, Homo sapiens
ggcttgacttctcccacgccccatagacccggcaccgtgtaataactgggcccgtgtcctcgcctgaaaactgggggtcacacggcctgtcctgaagaactctgatgtgataaacaccatag

SEQ ID NO: 103616 - DNA, 122 bp, Homo sapiens
atcggtcaacagtgggtgacgctgggccactgcatttctaaacgcccagtgctcctgctgcgcgtcactgccaggcaccatctacgccaagctcccagcttgtgtcaagacagtgttttcca

SEQ ID NO: 103617 - DNA, 122 bp, Homo sapiens
cgctacaataatgccctcacccacatatccacaggtctgaagcccactaccctcttaacacgtcactgcaggaaacatggggtggctagcagaggttccagttgtttgctgaaggtctggag

SEQ ID NO: 103618 - DNA, 122 bp, Homo sapiens
gaccctgttcagtgtgacaacgctgacccagatattttccgttccgacccggggctccggcgcccgggctggctgtttatgtaactactgcacaatattatatgccatgattcattgactat

SEQ ID NO: 103619 - DNA, 122 bp, Homo sapiens
tgctttccctacattcagggctgctccttttgtcgccaatacaaacctgttgacaggtcacgcctgggaagcgggtggggtgtcccggagcggtgctgaggcgctgcaggcccggcttctgg

SEQ ID NO: 103620 - DNA, 122 bp, Homo sapiens
tgggtcccgtgtcctgcagttcttccccaacggctacgccttcaccaccggctctgacgacgccacgtgccgcctcttcgacctgcgggccgatcaggagctcctcatgtactcccatgaca

SEQ ID NO: 103621 - DNA, 122 bp, Homo sapiens
gcagatcaggaccacgtgctcccacgtcaccacacacagcagatcaggaccacgtgctcccgcatcaccacaccacatgcagcagatcaggaccacgtgctcccacgtcaccacacacagca

SEQ ID NO: 103622 - DNA, 122 bp, Homo sapiens
aatcgcatctctgtttctgagtgacaaagtgactgcccggtcagatcagctggatctcagcggggagccacgtctcttgcactgtggtctctgcatggaccccagggctgtggggacttggg

SEQ ID NO: 103623 - DNA, 122 bp, Homo sapiens
gtggggtgggagtaggggaacatgctgccaggaaaagccacactgtcagcatgccctgctcgtttcaggggcaagaactcaaagtcagagatgaaaacaaccaattattctctgggcctgcc

SEQ ID NO: 103624 - DNA, 122 bp, Homo sapiens
cccccgccccgaacccaggcagcaggaaacgcaggcttcggggattgcacaaaaaatagccgcaaaggcaacggtcctgagagaccagggtgagcacatcgcggacctggccccaccccacc

SEQ ID NO: 103625 - DNA, 122 bp, Homo sapiens
gggctgagggagcagggttgagcaactggtgcagacagcctagctggactttgggtgaggcggttcagccatgaggctggctgtgcttttctcgggggccctgctggggctactggcaggta

SEQ ID NO: 103626 - DNA, 122 bp, Homo sapiens
gtggagaccagagtcgtgagcggccctgtggaaagctggcgaaggggcagacatccaactcgccagcaggaagccgcgcccagcacggtcatgctcagcctcagtgatcctggcgggaaaga

SEQ ID NO: 103627 - DNA, 122 bp, Homo sapiens
aggagcgaccactgtgcgtgagcataggagaacgtctgtggcaggacctgtccggtcttgcgccctttttttttcccggctgaaagcagagctttctctccctcttgcactccgggagtgtg

SEQ ID NO: 103628 - DNA, 122 bp, Homo sapiens
ggccaaaattggagagagggtgaagagagggtttgctgggtgcttctcacatgctagcatcgtgttagttgccttaggaataaggaagaagtgaagcacaaactctggccctcagaaccttc

SEQ ID NO: 103629 - DNA, 122 bp, Homo sapiens
atggagttgccctattttgaacacctctgacatatttccctactctcttttacgagggaacgtttaatcttaagggttgtagaggcatgaagatccatcttctgtaacttcttcaggctgaa

SEQ ID NO: 103630 - DNA, 122 bp, Homo sapiens
tgatggcataatgctgatcataccctgatggtgagcatgcagcttgcagaggaaccagctcgctgcaacagaggcttagcgcctagctgcgctttgagctggcaggggcaatcttcatattc

SEQ ID NO: 103631 - DNA, 122 bp, Homo sapiens
ggcagcctgcggccccccatcgttatccacagctctggcaagaagtacggcttcagcctgcgggcgatccgcgtctacatgggtgatagcgacgtctacactgtgcaccacgtcgtctgggt

SEQ ID NO: 103632 - DNA, 122 bp, Homo sapiens
tcgaatagtgatcttcagagatgaggaccttccctgtgcgatatctggtactgaaagtgtcgggagctgattcggcgcaggactctggaggaagagatggcatctcctagcctagcctgtta

SEQ ID NO: 103633 - DNA, 122 bp, Homo sapiens
gatccggggagaagcaggtgtctgtggggcccaagagaagtaccatctcggtaagtaggccggtgcatgcaggggagcgcagagccctaagcccttctctggggtccgcccgttttcctgct

SEQ ID NO: 103634 - DNA, 122 bp, Homo sapiens
ccctgcgcccagagcaccacacagcccagccacaggaagtagagctggagacacagcctccgtcttctccccatcgccggcgccgaaagcgcgcggccgtagacccgcggagagggagtgat

SEQ ID NO: 103635 - DNA, 122 bp, Homo sapiens
ccctgggcgcggatcccgatctgagggcgggtcccaagcggcagggagcgaacctgggaccgtgccacccccccaccagtgggcgcggcagccgaaaaaaaggggaagcgccggcgctggac

SEQ ID NO: 103636 - DNA, 122 bp, Homo sapiens
gatatgaaaagtctaaaatgcatgataaaaagaggattctcctacccttatttctacctccgcccctggactcaaagtccaaagactgactgatatggccaattttcatattatttttacaa

SEQ ID NO: 103637 - DNA, 122 bp, Homo sapiens
gggggcctcgtgtagcgagacatgaccgcttcctccgttccctccgggtctgcccgcggccgctggactcgctccgtctcccgctaccgctgctaccaccacaggagctccgccggcccccg

SEQ ID NO: 103638 - DNA, 122 bp, Homo sapiens
ctggagggcgcacagaactcgtagtatactagataagaggtcatgaagaaaccacctgagcgtttctgcatctcaaccacaagaggccagtacaggaacctcagattttgcaaccagactgt

SEQ ID NO: 103639 - DNA, 122 bp, Homo sapiens
aaacgatattctttgaaggacaaatccacctgctcctgtcccatcaactggaagagcggtcgttctgcctggtgttatttgttcagatccggcttttcgggctcacccaaatatatatcatt

SEQ ID NO: 103640 - DNA, 122 bp, Homo sapiens
aaaagagtcccattatctcccagctgcatagacattccatacggcttggttctgcctggacgcacagcatgcctggctgagagcttgaaacagagttctgcagaaaaactgtaaagatcccg

SEQ ID NO: 103641 - DNA, 122 bp, Homo sapiens
ctcctcgaagggttccgcgcgcagaaaggtgggccggggccagaagacgcgctggaaaggcgttttctgccccctccgggcctcgggaatatttgtgggctgccggcggggcaggcggggtg

SEQ ID NO: 103642 - DNA, 122 bp, Homo sapiens
agatccgtgcggacgggacgccggagcagagccactcgggccgcgtccctgtgggtcccgcgaccgttgtaagctacaaaccggaaagtgagccggcggatagcttcctcctctaagcgatt

SEQ ID NO: 103643 - DNA, 122 bp, Homo sapiens
tgtgctcctgatccagcgaggtgcccattgctgctcctgatcgggctaaaggttcaccatcgttcctgcacggctaagtgtctggggttcgtcctaatggagctgaacactagttgctgggt

SEQ ID NO: 103644 - DNA, 122 bp, Homo sapiens
ccctccccggggctggggcccgccgtctggttgtgtctccagccgctggtttaggggaatcgggagggctcacttaagcatcccttccctgcgtgctcttccatcgcgggacagaagacccg

SEQ ID NO: 103645 - DNA, 122 bp, Homo sapiens
gggcaggactcagcgccgggctccagctgcccgcgggccggtgccgccgccggcgccgcccgctctcggcttctgccggtgattgtcaagtgctttggaaatcagcatctggagagaccaat

SEQ ID NO: 103646 - DNA, 122 bp, Homo sapiens
ggacccacagcttctgaggaaacagctgcctcgggcctaagggtctttgctttcccccaacgcatgcaagcgtgggtcgccagcccagcatgtctggcgtggaggccggaggagggtgggga

SEQ ID NO: 103647 - DNA, 122 bp, Homo sapiens
ggtaaacaaccttcccgcgggtcctaatctataactcacatctgttcccttggataccctcgctacaattgccattcccgcggaaactcttcttcctgccgaaaccgcttgccctaccactg

SEQ ID NO: 103648 - DNA, 122 bp, Homo sapiens
aaacactacaacccccaagcccagcgtggagggccagcagccagcagcagctgctgcctgcgagcccgtggaccacgcccagagtgagagcatcctgaaagtttcgcagcccagagccctgg

SEQ ID NO: 103649 - DNA, 122 bp, Homo sapiens
gacccaggctccagctgcgaaaaggctggacagcttgggggagggtgccccctgctgaggcgtgaagagcctgaggctggtcacctggacagggccagaggggacaggaagggcaggacact

SEQ ID NO: 103650 - DNA, 122 bp, Homo sapiens
tttgtctgcttgcatcgtggagcggaaggtgctggcagtgcgcgtctctggtgctgtgggcgctcaggtatttggcaccgtgggctgccccgacatcttttcttcaccttgctccacttgtg

SEQ ID NO: 103651 - DNA, 122 bp, Homo sapiens
gctccctcccgtcgcggctccgctataaaacccaggccggcaggatcgctgcacccgcggcggcctcctcggtgcgcgacccccggctcagaggactctttgctgtcccgcaagatgcggat

SEQ ID NO: 103652 - DNA, 122 bp, Homo sapiens
ccagttacaaggaaatccttccttatattatgtaagctcctcctccttctgacctttcctcgtggatcctggttctgccatccagagatacgcatagcagtccctccttcccatggcagatc

SEQ ID NO: 103653 - DNA, 122 bp, Homo sapiens
aataacatgatgtttgcaaatgagcccagctagatgaagaattcccgttcaacagcctgccggggctgtggtgcaagagaaacagcatgataagctccaaattgcttttctgcattctcagg

SEQ ID NO: 103654 - DNA, 122 bp, Homo sapiens
tgggctgcgggtcaagacgtctgcgtttaattcgggactgaaggttagcagggaagggaacgatgccagatcttgagtttaagaacttgaatcttgtaaagtaccaaatctaataaaatact

SEQ ID NO: 103655 - DNA, 122 bp, Homo sapiens
cactgccaagggacagctggcttctccgcgcggcgacgctcgcgaggcctagcgaatgcgcgttgctttaaattaccataccaatcacttcttgagggtgagtcccctttttctgttatgaa

SEQ ID NO: 103656 - DNA, 122 bp, Homo sapiens
ggagggagggccctgtcccctgtccctttaaggaggagggccaaacgccggcctagagtgcggcgtagcccccacccgccgtgccctcaccccagagcagctgcagcctcagccggccgccc

SEQ ID NO: 103657 - DNA, 122 bp, Homo sapiens
cacataaatcactgccagcccccttgagtcaattcatacttctgtagttcgttagtggcacgagaggaaattgcatttattataattgcctctaattgcaccagattagtgattacaattat

SEQ ID NO: 103658 - DNA, 122 bp, Homo sapiens
tactgaagtgttacccgctataactcctatttgtttaaaagaaataagcgactcagagcgcggggtgtgaatactggagaggaagggaaaggtgggctgggcatgtaccggcgaggcaaggg

SEQ ID NO: 103659 - DNA, 122 bp, Homo sapiens
tgtagtcatgtgtagtcagcagccatttgtcaagcagcacttgcagtaagtctgggactacgcaagtcactggtgatacagtcctggccctccagcagcagccagtctagaaaaatctaaga

SEQ ID NO: 103660 - DNA, 122 bp, Homo sapiens
ttgtgcgtaagtcaaaagcaaatctttacttcacctcgccaacccagagtgtgggcaaaccgggggggcagtttgggtaaagtcattctacccatctgagcctccatttctcatccgcaaaa

SEQ ID NO: 103661 - DNA, 122 bp, Homo sapiens
cggctcggggcagggcagggccggcggcggcgagccggagcccgccccctgcccgggccccgccgagccctcggagcccacccatggggcacctgccccttgcgcctccttgcccggccgcg

SEQ ID NO: 103662 - DNA, 122 bp, Homo sapiens
ggaggtggccttattttcctcgcccgtctgagcagggtcaggagggtctcggggcaggcccggggggtggtgaacaggaacaccctccagtgccgggggtttctggtccccgggctcagtgc

SEQ ID NO: 103663 - DNA, 122 bp, Homo sapiens
catggtgactgtgtgagaagaaggcacggtgagaaacttcagggattacttcttatttcacggaaacgagatttgacttctgctaaaaagtgggctacaaatttctattttaaggagaagag

SEQ ID NO: 103664 - DNA, 122 bp, Homo sapiens
tggccgtgtgcaccaaactcagcttgaggaagtcctcgggagcaaagtgcaagtggaaaacgctgtgagggaaaagctgtgggcggggagtcaggggcccagggcacgggtccagtcctgtc

SEQ ID NO: 103665 - DNA, 122 bp, Homo sapiens
ctctgggtggggaccagacacgtctgctggacgggggcgtggccgcactcgcttcgtcgccgctgcccccgcccactccgggagactctctcttggacggcaaggatggccccgtgggagtc

SEQ ID NO: 103666 - DNA, 122 bp, Homo sapiens
gcaagctaccctgtagaattcagttcctagaaaagtccaactcagcccttccccgattcacggtacctttagcttatggagctccaccgtctcggtcgccatcttgttacccctcactccac

SEQ ID NO: 103667 - DNA, 122 bp, Homo sapiens
gggccgcttcccggcgggaggcgggctgcgaatgggaagcgggaggaggaggccgggccgcgggctggttctatcacccccttgggagcccagctcttcacctagctctccggcgcttttca

SEQ ID NO: 103668 - DNA, 122 bp, Homo sapiens
cacgcacatgtctaagatggcaatcacaacatcatatcaggccaagaggaccctcccctccgtcccccgacgtcccaatcagttaccacctccccgaaggaaaacaaaccggcccttgacac

SEQ ID NO: 103669 - DNA, 122 bp, Homo sapiens
ggctccgtttgcctccccgctttggtgatgctgtgcgagcggcttcgggggccctggagacgtccgagtcactgagggtgggctgggactcggggcccgcgtcccatctccccgccgattgg

SEQ ID NO: 103670 - DNA, 122 bp, Homo sapiens
cccgtgcaggtgggatcactgttatccccactagactgaggaggaagccggggacccgggcgattggccactcgggcgacctccacagtggagcaccaacagcgccgggaggcgcaaaccac

SEQ ID NO: 103671 - DNA, 122 bp, Homo sapiens
gcatgagctagactacgatgaggaggttcctgaggagccagctcccgccgtccaggaggacgaggctgagaaagcgggggctgaggatgatgaggagaaaggcgaaggcactcccagggagg

SEQ ID NO: 103672 - DNA, 122 bp, Homo sapiens
gggaggagccccccttcctagaccaaggggtcatctacggctctggacttcgataggactcgcggcaggtgctcgaggctggaggaagcgcgggtctgagagccctggggatgctccgcgcc

SEQ ID NO: 103673 - DNA, 122 bp, Homo sapiens
gaaatattttttccttccatcaaaacttaaacatcaattttagaacacagtgttctatatcgtaaggagtcctagagtctacccagtataatgtctcacatcctcgccctcttgctatagtt

SEQ ID NO: 103674 - DNA, 122 bp, Homo sapiens
tcagggtgctgctgggacgcagagcgcgagcctcctcggggagctgagtacctggactcccgggaaccagacagggccacttccccaccacagctcccgaagcagcaggcaggcgggcgagg

SEQ ID NO: 103675 - DNA, 122 bp, Homo sapiens
gcggaaacaaaaccagagaatgagaagaccaaaggctgaaataattaccaatcaaaggaacggccaggggagcaggctctgaagctgcagcctggcctcccggtcacttctccccgactctg

SEQ ID NO: 103676 - DNA, 122 bp, Homo sapiens
acaggccaggcaggcgtcgctggggaagtgaaaaggccctcgaggctcagactgggcccccggcatctccacgggcttccatgagagcccacatcatacaagggacgcgtgggtgcgggcaa

SEQ ID NO: 103677 - DNA, 122 bp, Homo sapiens
aaagaaaagaaaagaaaatatggcaatacataaaaaggacaggccaggcgctgtgtctcacgcctgtaatcccagcactttgggaggccgaggcgggtggatcgcctgaggttgggagttcg

SEQ ID NO: 103678 - DNA, 122 bp, Homo sapiens
ccagggcctcttctgccgctgtcctgacctagaatcctacaacctttcaaggaaggagaacgggagccaccacatacacacagagggtggctttcctctagggatcctgggaaccagattgg

SEQ ID NO: 103679 - DNA, 122 bp, Homo sapiens
acctttgagagtcccctctctttcctcttgatttcacttcatacctaggttcagcagaatcgccctgccctgtaacgctctcactcatcccttcctttccagtcccataacgattacctttt

SEQ ID NO: 103680 - DNA, 122 bp, Homo sapiens
aagtaaagagaaagcaaaggaaaaatgacgcagcaccgcagcccaaacgcccccccacggcggccacctctgctcctccgaggaaccccgtgtgctgctgggaaaacaaggagcaggagaaa

SEQ ID NO: 103681 - DNA, 122 bp, Homo sapiens
ctcggtgcctccgccgctcggcggccctttgcctcggccgccgctcccctccccgctgcccgcaccggtcccagcgccgctccccgcagccttcgctctcgcgcccccaccccgaccggctt

SEQ ID NO: 103682 - DNA, 122 bp, Homo sapiens
tgtaccccgagcgtggcagtgtggggctctgcctgttacccttgtgagcacgcgtgtacacggatgtacacgcgtgcctgggggctggtcggaggctctgtaaccggcctgccgctctcagc

SEQ ID NO: 103683 - DNA, 122 bp, Homo sapiens
gaggcaaaggttgcagtgagctgagatcacgccactgcactccagcctgggcaacaagagcgcaacttcatctgaaaatgaaaaaagagagaaatggagaagaaccagaaagaaaaaagagg

SEQ ID NO: 103684 - DNA, 122 bp, Homo sapiens
gagcgtgaggagtgtgcggagcttggcacaccaagttgctgagactgtgacaccagcctccgcccgttccgcgcgggtgcaggcggcgagcctcggctcggacaccacagctctcctgcccg

SEQ ID NO: 103685 - DNA, 122 bp, Homo sapiens
cggggcctggaggagcggtgggagctgggggcgcggcaggcaggggcagagcaggcgttccgagggccagagacccacccaggtgggggtaggggccgcggaagggcggggatggccgcagg

SEQ ID NO: 103686 - DNA, 122 bp, Homo sapiens
agtccgtttactcatgattcatcttgaggaagaagagatgctgagacagctggcacctggcgttattccaggggccacattactttccgccagccatggcttccaggtgttagatcctttca

SEQ ID NO: 103687 - DNA, 122 bp, Homo sapiens
tcttatcctgctcaccagagataggaagtcggggggtgacttcaggaaaggcccagagcccgtgatgggcgtggggattggggtgaggacagggctgtcgtgagaacagtggctgcagatgt

SEQ ID NO: 103688 - DNA, 122 bp, Homo sapiens
attttcttaaaagcatcatcgttacctttcctggtaaatttctgtaacctcttcataaaccgagggttaatggttgattgggtttcctctagggtaggccaaagtatatgctgaagacaaga

SEQ ID NO: 103689 - DNA, 122 bp, Homo sapiens
caaaagaggagactgggcatattcatcatattcatgaacctactttaggtcttaggaagacggagtttaaacaatttatacgtaaatatggggaagattccttgacaagaaactcaggaagg

SEQ ID NO: 103690 - DNA, 122 bp, Homo sapiens
tgcacgcacatgtgacaccggctctgacatgctgctgactggacgtttgtcctgatgggccgccagctgcggcctccaagaagctcctgggcgcccccgcccgacccgcacctagggagaac

SEQ ID NO: 103691 - DNA, 122 bp, Homo sapiens
cagctcagctcagctcaacccaggccagcccagctcgtcccagcccagcccagcccagcccgtcccagcccagcccagcccagcccagcccagcccatcccatcccggcccagcccggccca

SEQ ID NO: 103692 - DNA, 122 bp, Homo sapiens
cccacaggagacatgaggcctcccagagatactcaggtaacttctagtgactctgaccatcggtgacccccaggaatgtgttccagtgccccaggcagaatggtgccgtgtctctgtgtgtg

SEQ ID NO: 103693 - DNA, 122 bp, Homo sapiens
agccggggcggggttgggaggtgagtcgagggactgccccattggctgggtcggttttggcgcgctctcacttccgcgcttcctattggctggctggcgcagttcccgaggcgcgcgccgcg

SEQ ID NO: 103694 - DNA, 122 bp, Homo sapiens
aacaaggagattagtatcctaatctccgcggcactaatgatttaggtgctgccaggacaccggcgtctgcaccaggcctgtctgaatgtggagcttcccagggcagccagggcccgcggaac

SEQ ID NO: 103695 - DNA, 122 bp, Homo sapiens
gcactggttaaccgagcgattctgcgagattggcagccgcactccaacaatcaggagccacgctgtgccgcaagccccgcccccagctcaaatcctctttccttccccttcgccgctgccgc

SEQ ID NO: 103696 - DNA, 122 bp, Homo sapiens
ccttgtcaagacagtggattgtctcacacagaatggaaatgtggcttctgattctggtggcgtatatgttccagagaaatgtgaattcagtacatatgccaactaaagctgtggacccagaa

SEQ ID NO: 103697 - DNA, 122 bp, Homo sapiens
aatgaaggaccatggaaagctctctggatgcatgctgtgtgggaatggcagcaggcttgccggcctcttcctatctgagcttcacatggcttctgtcctgataaggttttcccagcagaacc

SEQ ID NO: 103698 - DNA, 122 bp, Homo sapiens
ggcccaggctagcctgccttcctacccgccctccccaacccccctccccccagccgtggtcgcttgtgcccaggggactcaaggccgctctgcctctccacccgacagtccgcaaagcgggt

SEQ ID NO: 103699 - DNA, 122 bp, Homo sapiens
cccctccactgatctcacacacgttatcaaaatgacacagatgtccagatggcagcacctcgaagattcttgaagcctcctcctgtgacttcaatgacacagatgtccagatggcagcaccg

SEQ ID NO: 103700 - DNA, 122 bp, Homo sapiens
ccgagctttcggggtgccgggaagcacgagctgcgcgcaggtcgcggggtccgcgggtggcggcccactctgctcctgcccgacgcccagcttggggtgccgttcgttgaaaaggctccggg

SEQ ID NO: 103701 - DNA, 122 bp, Homo sapiens
gacccaagtcttgaaatgtctgtgtattagtctgttctcatgctgctatgaagaaatacccgaggctaggtaatttataaagaaaagagatttaaatgactcacagttccaaagggctggag

SEQ ID NO: 103702 - DNA, 122 bp, Homo sapiens
ggaggagtgggaagtgggcgggcggaggggtctccgagctcacctccgagggttcggtgccggcccggcccctggatccccgcgggcggacgcgctcccccagctcagccctcgcgacccta

SEQ ID NO: 103703 - DNA, 122 bp, Homo sapiens
atgatttttaaaaaatagattcaaatgtgttatcctctctctgaaacgcttcctataactcgagtttataggggaagaaaaagctattgtttacaattatatcaccattaaggcaactgcta

SEQ ID NO: 103704 - DNA, 122 bp, Homo sapiens
aaatgctaaagtctatttcagccgggagaacactgacagctgggaaaggaccacacgtggcgtgcccataacctaagttgttcagatttaggaagtgaccccagtaagtcctttcggagttt

SEQ ID NO: 103705 - DNA, 122 bp, Homo sapiens
cccagcccagcatgggggggtggccaggccggccggggcgggacgctgcctggggctggacgcggaggagccccaagccctgctgggtgggtgacagccgctgaggctctgagtgaccctgc

SEQ ID NO: 103706 - DNA, 122 bp, Homo sapiens
tccggatcttatccctgtacgtgcagttgcccttggggatgagggctatccagttcttgccgcgggtcggggcggcgaacttggtgttggggtcgcaggccaggcggtcgtgggccgagctg

SEQ ID NO: 103707 - DNA, 122 bp, Homo sapiens
agctcggctttagttgatttcctcactgggggaaatcgtaccccattttcccacagtgaacgatcgtctgctccccccgattagactaagttcctttgagggctgcgtattatctccgcttt

SEQ ID NO: 103708 - DNA, 122 bp, Homo sapiens
caggtctgtcctcacacaacggggaggccagggcttctccagtggccgcagcgaggcccgcgggccagctctgcgtctgtcttcctggcagaggcccaggcacacagcagcgtcccggcgct

SEQ ID NO: 103709 - DNA, 122 bp, Homo sapiens
gcatttcctccaccggaacttgtttgttttccccaacgggacgctctacatctgcaacctcgcgcccaaggacagcgggcgctatgagtgcgtggccgccaacctgatcggctccgcgcgca

SEQ ID NO: 103710 - DNA, 122 bp, Homo sapiens
caggggacaggggtcagggcccacatggagtgcccaaggcacaggggccagggcctgccccgccctggaactcctcgctgagctgggagagaagcacaggagcgatggaaggtccaccgagg

SEQ ID NO: 103711 - DNA, 122 bp, Homo sapiens
actgcctgctgcccacccagaatgcagaccgcccacagctcccccagaaagcagaccgcccgctgcccacccagaacgcagaccgcccgcagctcccccagaacgcagaccgcccactgctc

SEQ ID NO: 103712 - DNA, 122 bp, Homo sapiens
gattccttgaagaataaaatctggtttctgaatacctgactccaggtatgcacactagcgcgtacatcaaactgcgagggtctatgttattttattttatttttattttatttttgagacga

SEQ ID NO: 103713 - DNA, 122 bp, Homo sapiens
cactttacttcaaacagaattcaaagtgcccttgagaggctgttgcattaagtacttgcacggctgaggtggaacacacaggatacaatttactttccccctcaagttcatgccactctttg

SEQ ID NO: 103714 - DNA, 122 bp, Homo sapiens
tcccctctgtgtcgagggaagaggcggctcaggccgtcctggtggtggaggccaacagggcggccaacagggacgtgcacggcctttctatcataacgggggcacacctgggcaaccctcac

SEQ ID NO: 103715 - DNA, 122 bp, Homo sapiens
aggaaaatccagatgctattaccagaagcagagggagacacgctagacaggctccatccacggcaatccaccacatccatctggtcttaactgcgaaattgtcagagtgacagtctcttccc

SEQ ID NO: 103716 - DNA, 122 bp, Homo sapiens
gattaatcatagaggggctctttgaaaggcgattggcaccgggccagcgctattcaaacccgctcgccttaatcaattagttcgtgatttgctgcagacccctgtctctccgcgcgctggcc

SEQ ID NO: 103717 - DNA, 122 bp, Homo sapiens
cagaagctgatgctggtagcgtcttcgcacagtgagggctgaatctgcactgctgggggccggcagcccttttgaagcatccctgggcctccttgggtccaaagataccctgagccttcaag

SEQ ID NO: 103718 - DNA, 122 bp, Homo sapiens
tctttaaatcaaaggaacgtagactcgtaaatgccaagcgatgggttcaggccagctgcccgggacactctaacacttgctgtggtttaaggtttcaacccaggaagcttttatgactaagc

SEQ ID NO: 103719 - DNA, 122 bp, Homo sapiens
cctccgcagcgcctcctgcatgtggcggggcagcggcggcgagaaggtgatgcgcttcaccgccggtccgctcgccgtcagcagcaccacgtcggccttcagcaccttcagattccgcgccg

SEQ ID NO: 103720 - DNA, 122 bp, Homo sapiens
cgctccattttgggaaaatagcgtctctccagctacggcaaagggttccgccattttgggcgtggctaggaagctgccatgttgagtgtggctgaggaagtttgagtgcagtttctcccaga

SEQ ID NO: 103721 - DNA, 122 bp, Homo sapiens
ttaggaagtgcggtttgtctaattgcagcccccaaggggctttgagtgttcctgggaatgcgaactgcactgctaagtcacttgagtgacttctgtttggagtttgaatttggcctttgaag

SEQ ID NO: 103722 - DNA, 122 bp, Homo sapiens
cagcaccggagcccagcagtctcccggggccagcacagttgtggaggctgcccagggccacgtccctactggacaccctgctcctcgctctccaggcttcaggtcatgtgcagaacccagga

SEQ ID NO: 103723 - DNA, 122 bp, Homo sapiens
ttttgagacggaggtcgggggcccccagcgtctctagactggggtggagccgggaagggtcgtgcgtgagtgggggacagtgtgtctcgctcaaccgctgtccgcgcagctgggcccagata

SEQ ID NO: 103724 - DNA, 122 bp, Homo sapiens
cccaaagtgctgggattacaggcatgagccaccgcgcccggctgcctcttctttttttcacgtggagaaattccagccacgagagaagacacaaattgagttagagccagagcccagaccag

SEQ ID NO: 103725 - DNA, 122 bp, Homo sapiens
tgaaaaaaaaaatgatgtaagtacaaaccacgagctgcttgacgctgagctgttggactccgggctatttcagccgctgctttgggtacacagtggccggggagcagccggggagcccttac

SEQ ID NO: 103726 - DNA, 122 bp, Homo sapiens
cgggaggacccgggcgcagtaggagtgcatcaggcggcgcccgagatggaccaggggctgcgtcccgcccgcgccgcctctttgagacccgggtcgtctgttccacgcggcggttgcggcga

SEQ ID NO: 103727 - DNA, 122 bp, Homo sapiens
atagcctggtgacttaggatgggcttcctgtcctgcgcgggctctttgtctgtcggcttccggccgagggatgggagggggagcagtctgaacactggtggaaactccggccaactctctcc

SEQ ID NO: 103728 - DNA, 122 bp, Homo sapiens
gctctccgcccgggctccggctccgctccagccgtccggggggcgccgcggcgcgcagagcgcagcaccccgactccagccaggagcccccgcccccccggagcgcaggaggaccccggccc

SEQ ID NO: 103729 - DNA, 122 bp, Homo sapiens
cggttggcgcggtcgtttgtgctcagaggccaacaagcgcgtggattttctgcttcagtgcgcccgggactgccaccccggccccggggatgtcggacatcgtactccagggtttcgagccc

SEQ ID NO: 103730 - DNA, 122 bp, Homo sapiens
gcaggccccctgcccttccctgacactcaggacacagagggcccctctgtcccagccccacgacaaagggcccggtctggcctttacaggctgagaacaagaaggacccaggtccccgtggc

SEQ ID NO: 103731 - DNA, 122 bp, Homo sapiens
cgcgttcctggaaagggctgacgtacgcggccgagggcggccgggcatcccccgtgtccccgctgcccttctcagccgaccccggcgcccgcacgttggagagctgccctggggtcataggc

SEQ ID NO: 103732 - DNA, 122 bp, Homo sapiens
ggtctatttcaagaataggttgggatgagaaacatgtctgggcgaggggggtgggaggcccggtgtcacctgtggatggatccacagccctgcaattgcgtgttgcaaagtttgcccggccc

SEQ ID NO: 103733 - DNA, 122 bp, Homo sapiens
aagtgaaactgagaaatctcaaacaggcaccatactccttgaacttggctactctaattacgtagaaatgaatttcacgatgagctcctctaacatactgtacttatgaaaaaccaaaagca

SEQ ID NO: 103734 - DNA, 122 bp, Homo sapiens
ggaatggtgcataagtgtgaaaatttacaagactgcgcaaagctgcaaggcccggagccccgtgcggccaggccgcagagccggccccttccgctttacgtctgacgtcacgccgcacgccc

SEQ ID NO: 103735 - DNA, 122 bp, Homo sapiens
gagtacatgggtggggaaacccctttcaaatgcatgaactgaccacaaccggagaaaggccgtctgtcttcccaaaagtaaaatggtgagtaaagtggagcaagctaagaaagtcaacagcc

SEQ ID NO: 103736 - DNA, 122 bp, Homo sapiens
ctgtaggctacagaaaagcccaacggcaaaagaaacaccctagattgaaacacacacgcgcgcacacacacacacacacacacacacacacacacacagagagagagagagagagagagaga

SEQ ID NO: 103737 - DNA, 122 bp, Homo sapiens
ggcccagacctggatccagctagccgggcggtgtggggtgcgcatgcgcaatgtccgcttcggctctaggaccgcgcgggcgacagcagggccgcggtgcagtgtccgacccgagagttgcg

SEQ ID NO: 103738 - DNA, 122 bp, Homo sapiens
ttaacagatctcctggcgagtattttaaaacaggactctgcgctagatcagctcgcccgtcggcagctgtcagcgaccagccgacaagctgagattcccctttcagctgtcactggcgatga

SEQ ID NO: 103739 - DNA, 122 bp, Homo sapiens
ggccaggccggcgggggtcccggggagtaggggccgggccgcacctacctggggggtcggcggcggcggcgagcctggcgttcgcgggcggcggcggcggcggcaggagcggcggcggcagc

SEQ ID NO: 103740 - DNA, 122 bp, Homo sapiens
acctttgtggaatctctcctccccacccctggcttttattctcattactaccaaccttgtcgtgtacaagaccctgaatgcttcaccaaatgcaaccaacagcagcccttctctgtttcgag

SEQ ID NO: 103741 - DNA, 122 bp, Homo sapiens
cgggagggggccgcagaggggctcatgggtggcgcctgcttgtctctgggcttgcaccagcgggtacagaccggaaacctgggctggctctcactgggtttattggagcacctaggcttaga

SEQ ID NO: 103742 - DNA, 122 bp, Homo sapiens
ttagctcacttcgctaggcttggatgggtgacctccttcatcagttcatggtagctttcccgtgtcaccaaaagctttgcctcaggacaatagcctatttcatacactttatcttaaaactg

SEQ ID NO: 103743 - DNA, 122 bp, Homo sapiens
cctagatgggcgcaaagcagatgacctggcaggaaccagccgcagtgaagccaccgcaaccgcagccgcagccgcggaggggaggccgtgcacccgcccgccgggagagccgcgcgcctgag

SEQ ID NO: 103744 - DNA, 122 bp, Homo sapiens
cttgttcaatagaccacacaaacacagaaagcagcagacaacagctcttaaagttaagtgcggttgaattggccaattttgaatgacctttaaaaaaattattcatttgaatgtgctcatgt

SEQ ID NO: 103745 - DNA, 122 bp, Homo sapiens
cttttgtggcccttcctttccttttgaacttgaccctgtaccttgcagaaccttccaaatcgtacaggcctccttctttacgaacttgtataatattctactgtatgatcacaccataattt

SEQ ID NO: 103746 - DNA, 122 bp, Homo sapiens
ctggctccccagaagacctggagacctcgggaagtgttctcatctatgttcgctccaacccgggggctcaggcccacctcgatcccgccttcccgggaggtccaggaaggtcccgccgcacc

SEQ ID NO: 103747 - DNA, 122 bp, Homo sapiens
ctggctccggctctggactacttgttctgactctgtctcactaacattttgcttctccaccgcctcacccttcacctcccatgttcttgactgccggtcacacatgctgcccctttcttttg

SEQ ID NO: 103748 - DNA, 122 bp, Homo sapiens
gatattttcctagttattaaaggtcatctgcagtcactgctgtattgcaaggcttctcaccgtggaactcggtcccttcttcctgtctgaaactgttcagctatagaaagattcctcctcgg

SEQ ID NO: 103749 - DNA, 122 bp, Homo sapiens
tagacttggcaaactttttgtcctaaagggtatattttctacaagaaagaggctgagcatcggggtgtggagaggtcctgctgttttgagtttagctgatattttatagtccaatgcagtga

SEQ ID NO: 103750 - DNA, 122 bp, Homo sapiens
aggctgaggcacgagaatcacttgaacccgggaggcagaggttgcagtgagccgagattgcggcattgccctccagcctaggcaacaagagcgagacgctgtctcaaaaacaaaaaccaaaa

SEQ ID NO: 103751 - DNA, 122 bp, Homo sapiens
ttggagacatgaaggtcttcagccagaccttacagagaattacttcacttactcaggtaacgtttatggagccatttcactgtgctgtgtactggaaatataatagaaaataaaaaaataca

SEQ ID NO: 103752 - DNA, 122 bp, Homo sapiens
ctccccgggcccccttccccaaccccgggccccctccctcgcccggcaccctgaccctggcgtgcccgccactcccgggcccctgccggtccccgcctgggccccggcctcgctcgccacct

SEQ ID NO: 103753 - DNA, 122 bp, Homo sapiens
cgctctaattaacggccctcattaatcagggctcaaaccgggcagaactcagatccggcccggaggggagatgagtgctggccgccccaacaaaggccagtttctgtctccgccaagcatcc

SEQ ID NO: 103754 - DNA, 122 bp, Homo sapiens
tgtggcgcctcaacgttaaggacccccacgattccctttgcccggcgggagactaaaggccggaaaagtacagcccgcccaggggtgggagccgagctagccccacctcccggtggcttctc

SEQ ID NO: 103755 - DNA, 122 bp, Homo sapiens
aaaaacatgaagagattgctttagcaaatatttacccagtcctgactctgcacatggcatcgttctaggagcccaaagatgttaacttgtttaataatcaagccctgtgaagtaagtgctgt

SEQ ID NO: 103756 - DNA, 122 bp, Homo sapiens
aggtgcccatgcttgagcaggaatgggggtggaccccatctaggtcgctgccggactagccgcagtgatgcctgacagctggaaaatgtcaaaaagtaatcaagagggagcccaggatcggg

SEQ ID NO: 103757 - DNA, 122 bp, Homo sapiens
aaagtcaggaataagctgcagggcaagttgcacgcatttattgtttcagatcacaggctccgagggaactgagtttatgatccacgctttcttcatcgctttggagagtacacgcctacccc

SEQ ID NO: 103758 - DNA, 122 bp, Homo sapiens
gtctcccccgtgttcctttgcaagggaacccgttatttcctctgttgtgttttccaggctcgaatacggatggtcctcgcctatctgtttgctcagttgagcctctggtctcggggtgtcca

SEQ ID NO: 103759 - DNA, 122 bp, Homo sapiens
ctgcctcaggcctctctcaaaggtctggcccatgatatttggtgtacattgggaccccagcgcccagatatttgaaacggggtggggagcgggtgttgagctgctacatttccaggttctag

SEQ ID NO: 103760 - DNA, 122 bp, Homo sapiens
tccgcgccctcctcggagcgccgagctggctttgagctctggcgagaaagcgccaatcggcggcaacccgggaatccaaggacatatggggtgcattggagtatttttccattttcttgtag

SEQ ID NO: 103761 - DNA, 122 bp, Homo sapiens
tctccgctcgcccagcctgcgggcttgggctgggtccagacgtctcccaggatgcagatgcgccgccgctggcctccccggctataaagccgcctccagcgcctttccgcgcgcaggagcgc

SEQ ID NO: 103762 - DNA, 122 bp, Homo sapiens
agtacagtgacttgcacacaagctccaaggagccgcgcttatctcctctggccagcctggcgttgcaccgtttgtccgcctgctggggcctggtctgtgttcccgtgctcccataaactccc

SEQ ID NO: 103763 - DNA, 122 bp, Homo sapiens
tgcatagagagcaaacatgcatgcatgtccgtccacattcaatctggggtgagcacttaacgtttaaatgcactaaaattaggtctgtatgtagaagatgaaatggagggcgcagaggcatc

SEQ ID NO: 103764 - DNA, 122 bp, Homo sapiens
acgctcctctctgtctcagccaggactggtttctgtaagaaacagcaggagctgtggcagcggcgaaaggaagcggctgaggcgcttggaacccgaaaagtctcggtgctcctggctacctc

SEQ ID NO: 103765 - DNA, 122 bp, Homo sapiens
gctggaaacactgggtgctgtgaccacccctgagcctgaagggcgagagaagggagtggtcgatggaccctgataggagctgtgctctttgtagaggggcacaggcaacctgtgtcagcaca

SEQ ID NO: 103766 - DNA, 122 bp, Homo sapiens
ttacacgtgtctaaaccagaacagggtctatacctgaagagctgacgcctccttcagatgcgcgttccgtgggtcgaatccacgccagtctgtgacaaaaagtgctcttgcaaagaccaaaa

SEQ ID NO: 103767 - DNA, 122 bp, Homo sapiens
gggattttgagaatttggctagggtagacattgtatctcccagaatattctgggagaaatcgaagttaagactggaattcttcttcttctttttttttttttttgagacagagtcccgctct

SEQ ID NO: 103768 - DNA, 122 bp, Homo sapiens
ctgcaagccttacctgcaggagctccctggtgggctgctgctgcttctcttctagctgagcgatcaggctgctgaggtgggagatgttgcaagagaactgggtgatggcaccattgatgcta

SEQ ID NO: 103769 - DNA, 122 bp, Homo sapiens
ggcacctagaaaaccggcgagtggggagaggctgctaaagaggggctccctgcgagaatgcgttcaccagctgtgaggacctggctggcgcacgaacttccaaagacctcacatctggttgg

SEQ ID NO: 103770 - DNA, 122 bp, Homo sapiens
gccaaattcaggagaagggacacttgtcatagtgctgctttgtgatttgcaaacggagtgcgttggatttctgtttctcttttttctttaatgatgcatgtgactgcatcttctaacctccc

SEQ ID NO: 103771 - DNA, 122 bp, Homo sapiens
gtgatctgcctcccttggcctcccaaagtgctaagattacaggctttgagccactgcgcccggccatgtctcttaatttaagccagaagccacaaccgggaccaatggctccttcaggcaca

SEQ ID NO: 103772 - DNA, 122 bp, Homo sapiens
ctctcggctgtctgggtctgaaagccaaggttcccccgacctaatcagagtggtgggctccgctgcactggtctccatattccagagcagaaaaacccgtttgctattggcctaggactgag

SEQ ID NO: 103773 - DNA, 122 bp, Homo sapiens
ccacaccaccctggaccgcccctggttgccagggcaacagaagggagctcatagccgtgtcgcccctgccctggacactggccggggcccagccaggacctggagcccctgccccaggctgc

SEQ ID NO: 103774 - DNA, 122 bp, Homo sapiens
cacgccgaggcagcgggacctggagacccttgacccgggagaggcccaggagccgttacccggtttcattttcagccaaaatccccgcaggttggtcctggcgagggcggggctcggtgggc

SEQ ID NO: 103775 - DNA, 122 bp, Homo sapiens
gcccgctcctgctctggagggcgccgcgggtgaggcggggagtacccctgacccgcagcccgatccccgtcagcgactatgtattaagcacctactatgtgccatggcccaagcctggccct

SEQ ID NO: 103776 - DNA, 122 bp, Homo sapiens
cagaaactactttctggtttcaagggggaaaagaacaactgtggaatcagactgtcacgacgctaatcctatggtaaatctaaaatcattaatgaggccaggtgcagtggctcactcctgta

SEQ ID NO: 103777 - DNA, 122 bp, Homo sapiens
cccttttggttgccaagccaaatgtactctctgtacagagtggcctcatcatttcctaaacgattctgctatgtagatgatctctgatttaccaattgcagaagcaaagaggcaaataattt

SEQ ID NO: 103778 - DNA, 122 bp, Homo sapiens
ggttctcggaggggcggggcaggggcggggcggggggaggggagaggacgcttgcagaagcgtcctcagttgccatggaaacgggacccagcgaagaacctagcggccgaaaagagtcccag

SEQ ID NO: 103779 - DNA, 122 bp, Homo sapiens
ggctcctccacaggcgagtgcctacccacctatcaggtaagacgtgcaactgacactcagcgcgcggaggagcccgctgagaaagggtttacctgtccgaagagaactgcgcttgcatggct

SEQ ID NO: 103780 - DNA, 122 bp, Homo sapiens
gggggtgaggggtagggtgcgggggtgtcacccgtggagcatccagctgcgtgacaacgccgccccctcccggtgccctgccgagctgcgtcccaaaatggagaaatccgactgtctctgtg

SEQ ID NO: 103781 - DNA, 122 bp, Homo sapiens
tatctgaggtcccagcccgcaacaccagttcccgggccgcagccgccatggtcgcagcggcggccattccccgcagcctcacttccggcaactgtcagtcccggcgagtccgttccccggag

SEQ ID NO: 103782 - DNA, 122 bp, Homo sapiens
agtcctgcttcttgagagaaccccttcattgaaataaggcccgcccggcgcggtggctcacgcctgtaatcccagcactttgggaggtcgaggcgggtggatcacttgaggtcaggatttca

SEQ ID NO: 103783 - DNA, 122 bp, Homo sapiens
actaatcaaaagacagtgaaatgtttaggtaatagatattggatggatccattttgtaagcggaaggggaaaaaagtgtttctagaagttgtacttttagtcacatacctaaaataagaatc

SEQ ID NO: 103784 - DNA, 122 bp, Homo sapiens
ctggcattaataattcttagctaaagtacattgcatttttagtgttattacctaagctctcgtagccaaggccctcaatggccctgttaaaggctgcatacctcttttcaagagaatcagaa

SEQ ID NO: 103785 - DNA, 122 bp, Homo sapiens
agcaagagaaagagagagagagacctacaggtgtgcagtacctgatagaaacagtgacctcgcccactggaaaagctgtcctcaccagtgtcttggcacctgcttattaactcattttgggg

SEQ ID NO: 103786 - DNA, 122 bp, Homo sapiens
caggaccccagagcagcataaaagccagcactgcagccccgaagggagcggctactcagccgagcccgcaggcacaccgctgtcagagccgccgagcagcacgccacagtccacgcatgcgg

SEQ ID NO: 103787 - DNA, 122 bp, Homo sapiens
agacccccagccttttgtgcgccgcgcggtggggcggtgcccagcttgggggaaggagagcggcgcttatcgaagtgtggtcgacctccatccgcccaccgagcacttgggacccgctgcac

SEQ ID NO: 103788 - DNA, 122 bp, Homo sapiens
tccttgtgtttccgcactccgcatcgtcgcctcccgccttccccacacttgtcattcgagcgctctgtttttccaaggggcaattttgaagagattgaatttcttggatttctttggcctgc

SEQ ID NO: 103789 - DNA, 122 bp, Homo sapiens
gcacccacaccactccgcccggagccaggaatcgggggtcccaggcagcaaccccgctcgcgccacgagaagcaacaggtctccagtgcttgaggggtcccccagaactggggatcactcgg

SEQ ID NO: 103790 - DNA, 122 bp, Homo sapiens
gaacaggaaagcagacatgacaatagattctcacagatacaatgttgcgtaaaagcaagacgacaaaccatgtatttccacttacacaaagttcaggggtaggcaaaactaatctatgatga

SEQ ID NO: 103791 - DNA, 122 bp, Homo sapiens
tggcggtcgctggggacctggcggagcctttgacgtgggttccagcgttgccgagggaaccgcgtgtttacgcaggagcgcggggcgggacggcagcccagtacccgctgcaaagccgaccc

SEQ ID NO: 103792 - DNA, 122 bp, Homo sapiens
aaagttttgcctctacccaagcagcataccttcctagcagtgggagcatatggtgggtcccgtcccttttgctgctgtctcttttcacaaaggctgactgcttgcctgaactagggaggttt

SEQ ID NO: 103793 - DNA, 122 bp, Homo sapiens
tcattctcaaaaggattatgctgaggcccggcctaggttagaattttggaagaggattctcggatcctgagatccccagccaggccactgaatttttggctggagtccttgaggccctgaag

SEQ ID NO: 103794 - DNA, 122 bp, Homo sapiens
atgactagtaatgttcgacctcattggtaaccaggcacaataaaataaacatagtgagatcgcacagtagcaaagctacatggaaacagggggtctcctcctatgctaccagagagtaaaaa

SEQ ID NO: 103795 - DNA, 122 bp, Homo sapiens
tggttgaatttacaggtgtggaacccacagatacggagggccaactgtgcttgctgttgccgttttgtaaactgttctctgtcttacaacctttttgctcctcttttccactcttgtcatcc

SEQ ID NO: 103796 - DNA, 122 bp, Homo sapiens
gtgctacaactgtggtggaagccccagcagttcttgcaaagaggccgtgaccacctgtggcgagggcagaccccagccaggcctggaacagatcaagctacctggaaaccgtgagtcctcag

SEQ ID NO: 103797 - DNA, 122 bp, Homo sapiens
tgtttctgttcgtaatcatctcggcttttccttacctctgcttgtaagaaaagtcctttgcgccattcccctccaagccccagggaagggcctggaaagcgcttacacctcagacccagtgt

SEQ ID NO: 103798 - DNA, 122 bp, Homo sapiens
tagctcccgcggggagcggagccccagcgagcctccagccgcgcgcgcacgaccggctcccgctcccggccgctcccggccggcgtccctgccagcactgctgccccacatgaaacagctgc

SEQ ID NO: 103799 - DNA, 122 bp, Homo sapiens
tcccgcagctcccggtacccgagccggtttactcaccccgcgtcctgggcttcggccccgcgccaagggcttttgttcgcagctcgccgctgtcccctgcgcttcttcagtctctgcgccgg

SEQ ID NO: 103800 - DNA, 122 bp, Homo sapiens
gcgccccgcaagctccctgctcctgacaggctaaggcgcgggcgccgccggccaccagggcgccattttaacggaacccgccgaaagcgcgggcgcttcccacaatgccccgcttcttccct

SEQ ID NO: 103801 - DNA, 122 bp, Homo sapiens
gaaatattgttggagtttgccgaaaactcagtttaagtaaatccaatgatgggctgggtgcggtggtaatgccagcacttttggaggccgacgctgggtaatcgcttcagcccaggagttgg

SEQ ID NO: 103802 - DNA, 122 bp, Homo sapiens
ccgcggtgaatgggaaagtgggtgggagtccacgagagggctccacggtgccttgacgtgcgctgtcatatgatacctccgctgcctcgaaatagacactctagtgcacgaattaccagaat

SEQ ID NO: 103803 - DNA, 122 bp, Homo sapiens
gactcctaccccctcacccctccaactcgcctccctccctccaccctcctcctctttggccgtgagaggaggagagaaagaaaccaaaagcctcttagcaacacagaccctttgctgctgct

SEQ ID NO: 103804 - DNA, 122 bp, Homo sapiens
gcccgggaacttgcagcagcgcggttgctgtccacgtggcaaaggctgccccagcttctccgggcctacgggggtccccgctaccttgccaggtgccccccaccccggagtcagcgcaccca

SEQ ID NO: 103805 - DNA, 122 bp, Homo sapiens
tcatagtgaaggacgctaggtgtaaattctagtgagaacaatttccaggaagccgtgttccgctcttgagcgagcacccactgggcctcatgcaaggtagaatgagcctgcgtacgtcaccc

SEQ ID NO: 103806 - DNA, 122 bp, Homo sapiens
gatgatggcccagccgtagagcaggagcagcagcagggtgtcagccatgtggccgtcccgcgtgaaggcacgcacgtcgaaggccttaaacaccacctgcggcggcacagggaggcgctgct

SEQ ID NO: 103807 - DNA, 122 bp, Homo sapiens
gcctttaaagaggtaatcaatttaaaatgaggccacagaggttggccccaatctgaccaacgtccttatcaaaagagatgaggacataaacatgcacagtggggtaaaccacatgaagatgg

SEQ ID NO: 103808 - DNA, 122 bp, Homo sapiens
tatttgtgtattagagacctggttttgctatgttgcccaggccagagtgcagatgctattcgcaggctcgattatagctcactacagtcttgaactcctggtctcaagccatcctcccactt

SEQ ID NO: 103809 - DNA, 122 bp, Homo sapiens
attgtatcttattttctacctcaaatgatttaatcttttccatattggtatggtcctggccgataactctttgtgtggcagcctgagagaatatggaagacactgtcagtgttggaagatgg

SEQ ID NO: 103810 - DNA, 122 bp, Homo sapiens
ttggaatacaatttagcaagggcctcttctttttttttcctttaaaaattcacttgtagccgggtgcagtcgcccacacctgtaatcccagtactttgggaggcagagatggaaggatcaat

SEQ ID NO: 103811 - DNA, 122 bp, Homo sapiens
actattttattgaattataatggacctgctacatggagggcatgcaataattgcttttagcgtaaattaatcaaatggactagggaaatttgactacatctagagaaggttttcaaccatgg

SEQ ID NO: 103812 - DNA, 122 bp, Homo sapiens
agcccggctcagtgtgtttagttccgtctttttgggtctctacctgaggctagaatacagcggggtgaaggtggtgagagctccagggccagtgaaggccgggtcagctggagccttaaggt

SEQ ID NO: 103813 - DNA, 122 bp, Homo sapiens
agtctaactgatatccccaaatcccctacctccattcccctgctccccccaatccccacccggttatctacatacacccacaccaccgacatcagtggaagcaggcagaatctaggagggga

SEQ ID NO: 103814 - DNA, 122 bp, Homo sapiens
gcggctgcgcgggaaaccccacggcttcccctctacgtgcctggcggcggcgccaccgcgcgccttcctcagccgctgttaaccccggggtctagagaagcactgagaggactcctcagcct

SEQ ID NO: 103815 - DNA, 122 bp, Homo sapiens
tcgcgtgcagcccccggccccgccgccaagccccgcggggactctggagcaggaagcccgcggcaggaagagaacgtgtcccccaggcccctgattcccagatccaccgtcccagccctcgg

SEQ ID NO: 103816 - DNA, 122 bp, Homo sapiens
gagggggagggcaaagtcccagggccccaggagtggctctcaagggctcaggccccgaggcggtgtctggggttgggaggctcagtattgagaattccccatctccccagagtttctctttc

SEQ ID NO: 103817 - DNA, 122 bp, Homo sapiens
aaagtcagttgggggcgggagaagccggcccagctgcttttctctctagaggacagagagcgctgctcctggaatcttctctgtggcctgtgtgtctggagtaatgcactcgccactctcct

SEQ ID NO: 103818 - DNA, 122 bp, Homo sapiens
ggcactggtgggagctgcgtgttctgggtgtctttaagtgcactgggctgggctaggcaacgcagctcgtgtgtcccgggaaagctgcagtctgctgagtgtaagatacacacccagaccac

SEQ ID NO: 103819 - DNA, 122 bp, Homo sapiens
acagagttctggcctgagcttataaatctcgggctttgcccccaaaccccaggccttttgcggacggaacaggtgagcactgcgcactgctcgcgccccggttcttgcgtcccctgctctcc

SEQ ID NO: 103820 - DNA, 122 bp, Homo sapiens
aggcttggagcggcctagccgcggagccgggcatgctggggtttggccttgggtccgtcacgtcccgttcacgccgggacgcgccgctccgcctctcggcctcagtttccccctctgtcacc

SEQ ID NO: 103821 - DNA, 122 bp, Homo sapiens
gctcccggagctgcttcacctgttgtcctgcgcggcctccgctccgtggcctggtgattccgtacttcagttttggaaaactttctgctggattgcctggacccttttttctctttccagac

SEQ ID NO: 103822 - DNA, 122 bp, Homo sapiens
cttctctctggtaaacaaagggtgccctccgtgaagggcctcacctgactctcaccacagcgggtgaacatcccaggagagcttcggagcttcctcttacctacttaaggttagagggtggg

SEQ ID NO: 103823 - DNA, 122 bp, Homo sapiens
ggcgtccccaccatgtgaccgagtctccctgcaacaaacaatgacttcaaacgagctgggcgccggcgcctgacctctgactctcgctccacgccccttccctggccacaaacccgccgagg

SEQ ID NO: 103824 - DNA, 122 bp, Homo sapiens
tatgagtgtggccacgcgtcccatgacgtgaactcacgtctgcgccgagacctttgccggcggttttttactgacggagtaagcactggagatgcttggtacagcgtcttccatcggtaaat

SEQ ID NO: 103825 - DNA, 122 bp, Homo sapiens
tgtccaggcgctcgcgagggccactggcatccctccaccggaagctgcggccctggtgctcgtcctgtaggctcacagggctgtccatggcctccagtgggtaggcacacgggcagctgggc

SEQ ID NO: 103826 - DNA, 122 bp, Homo sapiens
acccaagcctcttctcagttggagggaactccaagtcccacagtgccacggggtggggtgcgtcactttcgctgcgttggaggctgaggagaattgagcctgggaggcgggtccggagaggg

SEQ ID NO: 103827 - DNA, 122 bp, Homo sapiens
gggagaacccggttgattgacgtgcctagagcccgcttctctcaacttacagctgcggctcggcggcgggtgggaggggaagtgtcccggagcccgaggctgcagacttgggcgcgctccga

SEQ ID NO: 103828 - DNA, 122 bp, Homo sapiens
cctctcgcccgtggagctgcaaagccttttcagtgtgttcccagcagcgccctggggccccgagctcccacgcacagtccgcacagaggccggccggttgcccctgcacggatacctctgcc

SEQ ID NO: 103829 - DNA, 122 bp, Homo sapiens
tcctttccataggtccatgagactggggcagcagcaggggcaggtacagagcacctcagccgcctctccacctgacagcaacatcaaagccgaggccaaggcgggagggcccagagtgagac

SEQ ID NO: 103830 - DNA, 122 bp, Homo sapiens
tctcatggctgctggaggtaccagctggacaaggtgtttggggcatgctgcccccgtcaccgaggatctgtgtgggtagcctcaagctggagacattgtctggcctcactgcccactgggta

SEQ ID NO: 103831 - DNA, 122 bp, Homo sapiens
atgccttgaaggagaagaatcagacgaatgttgagtgtctagtgatcttcaaacccagaccgggagcgtgggtgggacagtggtgtagaccgggagcgtgggtgggacagtgtctggtgtag

SEQ ID NO: 103832 - DNA, 122 bp, Homo sapiens
ccagccctctggtaggaggccatctggccctgccaccagacctgttgatgggttggcaaccgtcccttcctcctgtctccccactgcacccctccacgcctccgctccacaagaggaaactc

SEQ ID NO: 103833 - DNA, 122 bp, Homo sapiens
ggctgcatgacccaagccaacctagccatttatgccaggtaaaagccagctgtaaagacacgaaaaaatttcagagtttaagcagcacattgtaactcccactgcctttctttgctaaaagt

SEQ ID NO: 103834 - DNA, 122 bp, Homo sapiens
cggtgtggacctctcctggggtaaggaaggccgtgtagacctctcctgagtgagggaggccgtgtagacctctcctggggtgaggagaccatgtagattgctcctgagtggggaggctgcat

SEQ ID NO: 103835 - DNA, 122 bp, Homo sapiens
tttctcctgtccacgctccccatgcagtgtggctgcccctcctgggcacagctgtggtcccggctgtctcaggcaccagtggattgatgctcatgaatcaggtcccgcccccaggccaatcg

SEQ ID NO: 103836 - DNA, 122 bp, Homo sapiens
ttcaccttattctccaagtactggaagttttcatacgtccttgtcatgcttgggccaacacggctctgaggttgtcacagctgaaatggaggcagggccggcgcccagtctggggtggagct

SEQ ID NO: 103837 - DNA, 122 bp, Homo sapiens
agggtgcccactgcagtcagcactcaacccccacagcgtccagggagggagaggggccaccgggggctgacccctgcccattctgcagacaaagccaccaccctgccagggctcaagaggga

SEQ ID NO: 103838 - DNA, 122 bp, Homo sapiens
tatgaggagcctcacttcccggggtgtcggtaaacttgaccgtgactcagtaacccacagcgtgctcctcccagcaaaccccgtgtgtccttacaggtcgaccagacgggccgtcggaggac

SEQ ID NO: 103839 - DNA, 122 bp, Homo sapiens
tcttgcttttccctccactggctggacgtgctcctttttcagcccctctgcatttgctttcgcctctgcctggaatggtagtccccaaggtataccagaaggctgctgccctcacctctttc

SEQ ID NO: 103840 - DNA, 122 bp, Homo sapiens
gtgaactcctgcgcgtgtgcgcctctccctgggtgcgtgttcgcacatgcgcgctgccgccgcactgccatcgcttcctgtgtgtcctcaggtcaccgcttgctctagttcccaggctttgg

SEQ ID NO: 103841 - DNA, 122 bp, Homo sapiens
aggtccttgcggttgatgcggtgcattttcttgtacatcttcaggaaccccggggcgttgcgggctgacctgtgtctgatccttgatctgccgttactgcgaacctccgggacgtaggggga

SEQ ID NO: 103842 - DNA, 122 bp, Homo sapiens
ttaaaaaaagatttttagtgtctttctaggcttcaggtgtagttttgactcgttctttgccgagtccttgctgtgtgaccctagtgtggtcactgacccgtgctgagctttgttttcacaga

SEQ ID NO: 103843 - DNA, 122 bp, Homo sapiens
tcttgtggaacaattagaaaactaataatacattttactcttgaatgttgatattccactcgaagtttggttggttgctaagcttaaggataaacactatgaaaaatgtgaagacagaaggg

SEQ ID NO: 103844 - DNA, 122 bp, Homo sapiens
gactcgccgcggggcacatttgtcattttcttatctgtgcgttcactcctcccccatcctcggcttttgggattggccgccgcccaacggacccagactgtttctctctgggtcgccatttt

SEQ ID NO: 103845 - DNA, 122 bp, Homo sapiens
tggctcgttgtgtgggcagttggacaggatggaactcttcaggattctagtttccctccgcgtgggtgcggaggtatcaaggggtcggctcagtgcctgggtgggcaagagagaaatggacc

SEQ ID NO: 103846 - DNA, 122 bp, Homo sapiens
attctatgacctcttgggatccttctagaacaagggttttctatttggggggtcagaatgcgcagcaagtgtagtttacattgtgtgggtcgctgcttcctgactcaagaccctttctcttt

SEQ ID NO: 103847 - DNA, 122 bp, Homo sapiens
cggtgctcactggctgggagcatcccaggaaaagcatgtccttggctcagatgctgaggccgagcctgaggtgcccacagctagaggctgtcagctctctgcactctgtggggtgggctccc

SEQ ID NO: 103848 - DNA, 122 bp, Homo sapiens
acctctgcggtgaggtactccaggatggctgcgctgtacacagcggcagtcgcgcccacacgtccatgactggtcgtcctagattttaggtgtcgatgaatacggcccactgggaacttaaa

SEQ ID NO: 103849 - DNA, 122 bp, Homo sapiens
tgctgaagtctcaattcccctcgccctaggcctgcccaagggaagtcaggagccgcgccacgcccccttacatcaccgatagacgtaatccgggtcggccgcaaacgtgccgcaggcctagg

SEQ ID NO: 103850 - DNA, 122 bp, Homo sapiens
accaacgtgaaaaataaggcttagagaagaaaagtaacttgccataactaatgaagaacacgaaaaggaacctaggttagttagctcgaaagaacaagcctttgtgcatgaggcaacactgc

SEQ ID NO: 103851 - DNA, 122 bp, Homo sapiens
acagagccgcttccgcttccgctcgcgccgcgcacaccccggggtgacgtcacgcgcccacgactcgccccgcctgtctctgttagtgctctccagcccgctccccgcctcctcccatagtg

SEQ ID NO: 103852 - DNA, 122 bp, Homo sapiens
ccccgctcccactgcccgctctgctgtttctctgcctgcatgctgtctgcccttgtcacccgagtgctggttctgcacagggtctctaggccgggtcaggcccagcctagcgtcagctgcga

SEQ ID NO: 103853 - DNA, 122 bp, Homo sapiens
ctcaagtcatcctcccgccttagcctcccaaagtgctggaattacaggcatgagccaccacgcccggccatcttcttgccagcaactcttagaccaggaagcctcggatggcagctatgaag

SEQ ID NO: 103854 - DNA, 122 bp, Homo sapiens
tcccccgaggtcgcgggcgccggcgggaaccgcagtagcgggagacatagccggcccagccgggcaccgctccttgccctcgccggagactgcccagcgccctgcgcctctccgccccggcc

SEQ ID NO: 103855 - DNA, 122 bp, Homo sapiens
ctttggcaaggctcgagtgggctgcttgaacgagcaggtgagctggctgctccattaggccggggcgctgtgtcagaagtagcccctcctgtcttctcacccatgctgccttccccagcagc

SEQ ID NO: 103856 - DNA, 122 bp, Homo sapiens
cagggtagcctggagtggaaacacccagcaatcagcccacacgcggagcggagtggagggcgggtcaactcacttccgcagttgagactgactctgcctggaagtcaaggggttggcaccag

SEQ ID NO: 103857 - DNA, 122 bp, Homo sapiens
tggcaaaaatagcagacataggttagtggagcacatcgggcaacagggagcaactgagcgcggtgccctgaagcccccgcctccgtggggtaaaagttaccttccagaggaggccgggtttt

SEQ ID NO: 103858 - DNA, 122 bp, Homo sapiens
aaaccccaatctgtgtgagtcactgcggaagtgaggctaacagaagcccacactgaaggccgcgttccttcgtggcgccgtcccatgccaaagctgctgttcccacgtggctacggagctct

SEQ ID NO: 103859 - DNA, 122 bp, Homo sapiens
tggaaaggtctcggcgcggggtgtgggcagttgtgtggagctagaacctagccgctgcagcgggatcccagggcctgaggcgcaggaacccactgcccggggccccagcgctgtcagcccct

SEQ ID NO: 103860 - DNA, 122 bp, Homo sapiens
gttcaatcgtcattcagtcctgtcctcaggctccaccaagcttgactctttgtcactgtccgcaaacgtcgggtacggtggcctctatggacgatgatcagccgacaagctggactgcggag

SEQ ID NO: 103861 - DNA, 122 bp, Homo sapiens
gaccgggatcttgctatgctgcccaggccggtcttgaacttctggtctcaagcgatcctccggccttgccctcccaaagcgctggagttacaggcatgagccaccgcccctggcaccaagtc

SEQ ID NO: 103862 - DNA, 122 bp, Homo sapiens
ggagcctcgtgaagccagtgagctgagccgccggagcctcgagacgccagtgagctgagccgtcggagcctcgagaagccagtgagctgagccgccggagcctcgagaagccagtgagctga

SEQ ID NO: 103863 - DNA, 122 bp, Homo sapiens
gtgtgtgatactggcagatactaaggctcttgaattgagaagtggaggtcagagaagacacggcacttctgttcagatcagagcaggggcccacagatgcactctcaggaatcagtggaagt

SEQ ID NO: 103864 - DNA, 122 bp, Homo sapiens
gtctgagtggcagcctcaaaatcagggatgggacaggccttcaaggtcattcaaagcaaacgcctctctacccacttgtgctcccctagagccttctcagccacaatgactacaatccatcc

SEQ ID NO: 103865 - DNA, 122 bp, Homo sapiens
ccatgatcgccaccattaggccatataagatatgcaaattagtgggaagggcccagctttcggctggatgcaaatgatggtggggagggggaaacccggagagagggagagccggaggggca

SEQ ID NO: 103866 - DNA, 122 bp, Homo sapiens
gactaaagctagcaagcactctccatctgtctctctccctctctgtctctccctgtcatacgaggacacaacaagaaggtagctttctgcaaggcaggaagagaaccctcaccagaacctca

SEQ ID NO: 103867 - DNA, 122 bp, Homo sapiens
cgttcaaggtggaaggaaccacatgcgcaagagccttagagtgggagccaggggcagtgccggggtcggggctaggcttggctggcacggggtgttttctgaggattccaggcaggaccact

SEQ ID NO: 103868 - DNA, 122 bp, Homo sapiens
tctctagaacaaattcctaattccctacgatgaaattctcttgctatcctaattttttgccggctcaaaggactaaccgttttccccaaacacgcggccctgagcctccggtgctttgcgaa

SEQ ID NO: 103869 - DNA, 122 bp, Homo sapiens
agccctcccgcgagtcagcctgggtgactgcgactgccctgggctctaaaccccggggtacgggccaggtgtctgcttggggaggtgtagacggacacaggcagggtgggaggaggcgaagg

SEQ ID NO: 103870 - DNA, 122 bp, Homo sapiens
tactcaggaggctgaggcgggaagatcgcttcagcccgggaggtcgaggctgcggtgagccgtgatcacaccattgcattacaacccgggcggtagagcgagaccctgtccgtaaaaaaata

SEQ ID NO: 103871 - DNA, 122 bp, Homo sapiens
gccctcggggccacggctttccccggagacgccgcgagcccagacgaggtgggaggggaccgggagaaagccccccaatctgattcgcgcccagccagtcgtccgcgagccgcggagccgcc

SEQ ID NO: 103872 - DNA, 122 bp, Homo sapiens
ttggaaaggggccttatggtcctgaaggccaaaaaccagagaaaggagcaaagtgagcctcgaggaggaagcctttctggatactgcaaacgctttagcgaagtactgctcatgtgaaccca

SEQ ID NO: 103873 - DNA, 122 bp, Homo sapiens
cagtcttctacggtctctgccgcttctgcagcgaacccctggcaaattaagtataaaactcgttgcctgatcgacagagaaggttgttcaccccccaaaaataaactgcagctcttccgcag

SEQ ID NO: 103874 - DNA, 122 bp, Homo sapiens
gcctggggaggcctctatcttgatgcgtacccactagcccaggtggtgagcagctgggcccggggaaagcacagctgcccatgttggctccagcagccagagaggctgtgcacccctgcaca

SEQ ID NO: 103875 - DNA, 122 bp, Homo sapiens
tgcgcttcggcgtctcaggaggccgtcgtgacaatggcagccttcgcgtcgtgagggggccgccccaggctgccgcagcggcgcgcgcccggccgcggggccgcgccgagactcccgggggg

SEQ ID NO: 103876 - DNA, 122 bp, Homo sapiens
ccaaggagctgtgcactcaagaggtgggagaccgagctggtcctcctgggggacttccagcgcctggcctggacagccgagtgtcatcggacttcctgagaaatacaaccggaagcaaattg

SEQ ID NO: 103877 - DNA, 122 bp, Homo sapiens
aagctgccaaagccttagacaagtacgtgtatcagtctcaatactgtgggttcttgcaaccggaacaaaactgccacccaagggaagaaggcatggagttcatggtgttagcgcaaaagttc

SEQ ID NO: 103878 - DNA, 122 bp, Homo sapiens
ctttgtctctgcgtgcccggcgcgcccccctcccggtgggtgataaacccactctggcgccggccatgcgctgggtgattaatttgcgaacaaacaaaagcggcctggtggccactgcattc

SEQ ID NO: 103879 - DNA, 122 bp, Homo sapiens
tgcctactttgctactttgttaaaacaggtattggtatttgctttctaacgcctagctgacgttttaggtaatggccacgtccacctcaaagcatcaagaaaaactccctgccgtctcccac

SEQ ID NO: 103880 - DNA, 122 bp, Homo sapiens
agcagggtgtttgcgatgagaaaaatgtcccaagaggtatgtggcttccctgaagtcacacggttttaaagtagtgaaacctggaactcatgtctatcacctaccacctctcaccaatgcaa

SEQ ID NO: 103881 - DNA, 122 bp, Homo sapiens
gtgagtggataatggatagacttcgacagagtctgtctatgtggctcacccttgggtcttcgtggggtggttgggtcatgagaaccagggggtcaggggaagagggagatgactagagtgcg

SEQ ID NO: 103882 - DNA, 122 bp, Homo sapiens
gctagttcataatccaagtccagcaagttaagcctcaggggcctgtcatacataaaccctcgcccaaactccagatgcattagccgctccaagttgaccactcgttcaaggcccaccaggat

SEQ ID NO: 103883 - DNA, 122 bp, Homo sapiens
gccccgcaggcccactctcttgtctacaggctgcagatactgactgactccctctctggacgggaggacagagggctgctgggtcactcctgcacccccagctacagggagcagtgaaaaaa

SEQ ID NO: 103884 - DNA, 122 bp, Homo sapiens
gacatcactgcccacaaggtacctggcctcacttcctatcttactagctgtcttttctctcgctgtggccacagcagcaggtggacagggctgggacagggggtgtactgggtttctgagcc

SEQ ID NO: 103885 - DNA, 122 bp, Homo sapiens
tctgaaggaacttggctggggtgaggatcacaagcccttgggtggagctctgagccctggcgcggtcctcaagggtctgcgacatttgtgctgtggtcagctctgtgcactcttccctccct

SEQ ID NO: 103886 - DNA, 122 bp, Homo sapiens
gctcagcttaattaatcaatcgccgactgatgcattggttaacgcggggccccactcccccgtgaatgatgggcgcattaatgaatgccaattatttcagcattaataattaatctccaacc

SEQ ID NO: 103887 - DNA, 122 bp, Homo sapiens
cctcgctttcctgggagatccctcctgtgctgacgcggagtcacggagttgggaagaggccgttttgaggcccgcatcagacctggagcccgagagccttccctccccagggggtcccgcta

SEQ ID NO: 103888 - DNA, 122 bp, Homo sapiens
gcatctcagggaaggagggtgagccgattgccttcctggagtggaaagggtgttcagaggcgagcacagcctttggtgggaatggtcggcttttgttttccactgtggaggaaggccagact

SEQ ID NO: 103889 - DNA, 122 bp, Homo sapiens
gaggtcacccagtttcctctgtcctagttgaccagaaccctctggactctgtgggtgctacgggttttctggcctggacccacgcctccgcctcgctgggggctatgagcaagagagcagca

SEQ ID NO: 103890 - DNA, 122 bp, Homo sapiens
catctcctacacgggtcctggctcctgtcgtccctatgctggcaggacggaacccgttgccggctcccagggccacctcacaaagggccttcattccaagcctgcgtcagcacctgccctgg

SEQ ID NO: 103891 - DNA, 122 bp, Homo sapiens
gagggctcagggctgctgccggctctggcgggcgtctctcgccacagaccccgcccccgccgtgtcagtgtggcctccctggaggcctgtccttgagcggagccagctcccggcctgagcac

SEQ ID NO: 103892 - DNA, 122 bp, Homo sapiens
atggttgcaaaactgcgaatacactaaaagccactttaagtgggtgaattgtatggcatgcgaattacatctcaatgaagctgccagaaaaatgaagccagaaatgtagaggaaaaaagggt

SEQ ID NO: 103893 - DNA, 122 bp, Homo sapiens
acgacaaccacctggtgatggggcaagagggagacaaaaagaaaaactgtagattcaccccggcagagaggactaaacagattaacttttgatatgagttggctgcaggatagtgggccttt

SEQ ID NO: 103894 - DNA, 122 bp, Homo sapiens
tgtgtgtgtgtgtgtgtgtgtgtgtatgcgcgcgtgtgtgtgtgtacgcgcgcgcgcgcacgcgtgaatgtgcatgtgtgtttaaaacgcttattggtaggtcatcagcagctgatcagaca

SEQ ID NO: 103895 - DNA, 122 bp, Homo sapiens
gcctggcatccagggcagggggtgatgttgtgtgttttctctctgaatcaggctgctgatcgtgacctggctggggagggggttctagaagcctggccatggcccgatgaggcagataggaa

SEQ ID NO: 103896 - DNA, 122 bp, Homo sapiens
tgggccaagcaataaccgcgcccgccctgcaaccgaggccggcaggccaaggagcgctcccgccgaaggctctccccactgagtcctcaaacccaagaacgccggcgacttcacacccctga

SEQ ID NO: 103897 - DNA, 122 bp, Homo sapiens
ccgcacagcgcggggggcttcctccgaggcccgcagggagggggcggtgcggaatggatgcgccgagcgggcagcgctcagcctctcgctcacacccccagcaggcagccgcgtccccgtgc

SEQ ID NO: 103898 - DNA, 122 bp, Homo sapiens
gccctctgcaatacttgtcttcatctcaccgcctatgcccccgtgagccgtacccctccgcgctggccttcccattggctgcccgccccttcaggccctgcccccgccggtcccgccgccgg

SEQ ID NO: 103899 - DNA, 122 bp, Homo sapiens
gatgactgggttgaccgatgctgggcagctgagcggaccaatcggccccctagactgagacgttggcgtttgaaatcagccaatggcaggtctacactggagcttcctctccgcctccttcg

SEQ ID NO: 103900 - DNA, 122 bp, Homo sapiens
cgggaaccagttctgggcctggagaggaggccgaggggcaggagccgggcctggagcggccgccaacaggcaagaactgggcctgaggtggccaggctgaggcaagagcccggcccccatgg

SEQ ID NO: 103901 - DNA, 122 bp, Homo sapiens
ctctgaccatcccacatcaaaatgcaaacaaaacaaaacaaagctccccagcagcatacccgcctcccttccttgccttccctgtgtctgcagtacttactctcgcatggatgcatatttta

SEQ ID NO: 103902 - DNA, 122 bp, Homo sapiens
aggaggtgattctgattttgtggcttgtacccttctgcaccacccagccatgcagcgttccgcctgcttccttttctcctgtgtgctttaattctagttacaggaaacatgcatatgaaaaa

SEQ ID NO: 103903 - DNA, 122 bp, Homo sapiens
ataaataccttaatctgtaagaacaccagctaaatcattgtttactatacttgcaaataacgttgtaattaatagagttagaaggtaataggttcaaggaacatccagctaagattccagtt

SEQ ID NO: 103904 - DNA, 122 bp, Homo sapiens
acaagcttcattcatgatgggggcggggctcgcggcccggggaggatggcgttggtgtcgcgtcggctttagctcttaccctggaccctgtctctttacatcaccattttggctgtgttgat

SEQ ID NO: 103905 - DNA, 122 bp, Homo sapiens
tccggattggtccagccgcgtcgccgaagttgtcaggccacgcccctccccgaaggaccccgctgtgattggctgtggctgaggttctgctgccccgacccccttcgggacacagccccggc

SEQ ID NO: 103906 - DNA, 122 bp, Homo sapiens
tatcatcctatcccacgttgaaattaggaacagtatcaccgggggcgtgtacgccccctgcgatattgaaagtaatatcatcctcttccctcctgggtgataggaacaatatcactgggggg

SEQ ID NO: 103907 - DNA, 122 bp, Homo sapiens
ttcccagctccgaattcccgaacaccttctcccactcactatcttagcgcttagaaagcccgaaataagccacattcagggaagtaccaaattaatcctcccaggcctgtggatcacccaga

SEQ ID NO: 103908 - DNA, 122 bp, Homo sapiens
aagagccgaccccaggacggatggctgcagccagctctgcctcaaggagggccagctcctcgccctgtcaggccgcggtgcaagtacaaccttgggtcaggagggaggcgagccgcacaggg

SEQ ID NO: 103909 - DNA, 122 bp, Homo sapiens
atagtgagacctcgtctctccaaaaaaataaacaaaaaattagcttggtgtggtggtgcacgcctgtagtcccagctacttgggaggctgaggtggaaggatcactttatcctgggaggtta

SEQ ID NO: 103910 - DNA, 122 bp, Homo sapiens
gggatgggaagggccctagattttagggcgttgtgcagaagagtaaccagatctgctctacgtttcaggaaaggaaaaaaaaattccctctggctgcggttccgagaatagcctggaaggag

SEQ ID NO: 103911 - DNA, 122 bp, Homo sapiens
gcccggcataattttgtatttttagtagagacagggtttcgccatgttggccaggctggtcgcgaaccctttacctcaggtgttccgcccgccttggcctcccacagggctgagattacagg

SEQ ID NO: 103912 - DNA, 122 bp, Homo sapiens
gagcgggcgaggggacgcgcgcctggagaatggggcctctgtgcacctggagggggccggcgggggccgcccgtgggcctgggactccagggaggccgcagccccgcttcagggtgcagact

SEQ ID NO: 103913 - DNA, 122 bp, Homo sapiens
aaaccgtctttgcttttcaacctggaagtctttatcctgttgtgcccagtagaaagaggccgaacccaaaggccaacgtttggcctccacgccctacctggatcacgacgaggtgaatctcc

SEQ ID NO: 103914 - DNA, 122 bp, Homo sapiens
ttttgtttttccctttgtcttgcctccccatctaggttatgggcttctgtgggcagaaaacgtagactgcaatatgtctctaaaatgcctggcacagagcttggtagtgaatgctcaattaa

SEQ ID NO: 103915 - DNA, 122 bp, Homo sapiens
ggcgccggcccaagttcgccgggggggcccggaggaagcttgggggacgcgacgggggaacgcggaaaccccggggatctgcaggcgcgcccgggccgtgtgccttctctccgcgtgtccaa

SEQ ID NO: 103916 - DNA, 122 bp, Homo sapiens
gccgccgccaccgccgccgcccttcgctcggcgcgcactccagccgggcccagccgccgccgcccgcccccggcccgccccccgcaccgccccccgcaccgccccccgcaccgccccccgcg

SEQ ID NO: 103917 - DNA, 122 bp, Homo sapiens
tttgcgtccttccctggctcctcaaacacctgctgcaccgctcagagcctttccccaccccgacctcctccgcagctccgcaccagcgagactgcgccccgtggcacctcgggggtgccacg

SEQ ID NO: 103918 - DNA, 122 bp, Homo sapiens
tgaaggcacttttacttcacaccattcaaggactggaaatttttttgtacctccccacttcgccctggtaaaatgttgactcttcattcacaaagcacattgatcatttgcttgtggttggg

SEQ ID NO: 103919 - DNA, 122 bp, Homo sapiens
tccgttcttagctacagactcaggcaggcttggagtcactcctctctgcagtctgagctccgcgggtctccgccagagcctccaagcctccccccagtaataatattaataatagttactat

SEQ ID NO: 103920 - DNA, 122 bp, Homo sapiens
gggctgcgtcaccgggagacacgttcccagccagcatgggtcggcgcccagcggcccgcccgagcactccggccgcagaaccagagtgccgccctgaggcctgctgagaacacaacaccctc

SEQ ID NO: 103921 - DNA, 122 bp, Homo sapiens
gttgattctccacagtcccttgcatcacagtctgttgattctcctcggtccctaagacaacgccttgcaagcatcacgcccctcgatgttgcttacgggagacgtgtgcgtgggcgcgggag

SEQ ID NO: 103922 - DNA, 122 bp, Homo sapiens
gccctgcgacactaggccagtgactttcttatttccgtgcctcaagtttcctcttctgtacgagtcagggtagtaacttattctaagagggttgggaacttgagaggaagtcatgaaagtaa

SEQ ID NO: 103923 - DNA, 122 bp, Homo sapiens
agcccgcgaactctgccgcgttaaattgcctagaagctcccacccttctgactgttgccacgtagttcttagtttccgggaatttggggattttttcctcccccttcttcccacccttcctc

SEQ ID NO: 103924 - DNA, 122 bp, Homo sapiens
ggggacaggcatgacgcgtgccccggcctaattccccggggcgctcctaagaagcctgcacgtgacccgctaggctttccggaccggaccgaagacagcttgcgaaccccactcacaccctt

SEQ ID NO: 103925 - DNA, 122 bp, Homo sapiens
tgtggtagcgattggtggcctccagcttctcctgctccccagctgcccggtactcccgggcgagatcccgcactcgccgcttatatttgagctcctgccgctcgtgccggctcagctccacg

SEQ ID NO: 103926 - DNA, 122 bp, Homo sapiens
agtcaatgaggaaacgtacggtgggcggccgggatcaaaatgaaagccataaaggaagcgcgctgatcgtgctgttccgggggtgttaatcacagtggatcccctgggagaggacacgtccc

SEQ ID NO: 103927 - DNA, 122 bp, Homo sapiens
tgtgtgcatgcatgtgcatgcaggttcagctctatgcctgtgtgcatgcatgtctcacatcgtgtgtgtgtgtgtgtcggtgtgtgtgcatgcctgtgtatgcaggttcagctctatgcctg

SEQ ID NO: 103928 - DNA, 122 bp, Homo sapiens
cagagtagctggaccacagagacttgggtcagagctgatttcaaccccagaattgtctctcgggttcaccctactcttctgaagatgaaaatttgtttggggccttggtaaccgatagcggt

SEQ ID NO: 103929 - DNA, 122 bp, Homo sapiens
actctccccaccctcccggcacactcctggaaggagtctcatcctcaccccatgcccacccgcttgcagcccagatgacctgtggtgtggacgagttccgctgcaaggattcgggccgctgc

SEQ ID NO: 103930 - DNA, 122 bp, Homo sapiens
cccaaggacggcgtgaacctgagtgcagagggacagatctgcacgcctgcgggcgctgtccgcgaatcggcagtgcgggtggcagccccctgacaggggcagatgggtggatcttgcggttt

SEQ ID NO: 103931 - DNA, 122 bp, Homo sapiens
acaccactcagcaggtagatgatggctatgtggtgccaccctgccagcttctccaggtcccgcgggatggtcatctggaagcagatggacaccaggtagtgcaggatcctggtgtgcaggaa

SEQ ID NO: 103932 - DNA, 122 bp, Homo sapiens
tgccctcagattctggggttttgggcctggcttgcccctcccgggccccagggattaacccgtgagcgcccggctcgccggcggggctccctgccttgcttgcgcagacccgcccgcgcgcg

SEQ ID NO: 103933 - DNA, 122 bp, Homo sapiens
acgggaatttaatgtcggagctagtgaagaacagtttcaccccaaaggtcaattacgccccggtggtgaaacgctgactattacagaggtcagggcaaacatatggactcttctaaaggctc

SEQ ID NO: 103934 - DNA, 122 bp, Homo sapiens
cctcccggagtgtgccaaaacttctgtcacgaacgaggccatggccaagacgggaaccaacgctgactgggtcactctcgtagccagcgccgcagctcccgtcccgccggccgtcttgacgc

SEQ ID NO: 103935 - DNA, 122 bp, Homo sapiens
agcaaagagcatcaatgccaagtaggactgacgcagtgaccccaaatggggcacagaccccggcgactgagcctgactgctcccagggagtcacaggccacactggagggaggggcacctgg

SEQ ID NO: 103936 - DNA, 122 bp, Homo sapiens
gggggtcttggcgtttcctggtgtctgcaggcagcgtgatcttctgcttcaattcccttacgtcgatgttactgattctgtccccatcttcgcggttgtctcctgcatcagcacaacacctg

SEQ ID NO: 103937 - DNA, 122 bp, Homo sapiens
gcaccacgggagacacaggatcactcaggttttcactcatttcatcgtggaaacaattcccgcccgggtggagtgggcgggagagggtaaatgggaaggttcagtgggggaaaaaaagaaaa

SEQ ID NO: 103938 - DNA, 122 bp, Homo sapiens
actgtcggtcatatttgcagtgaaactgagtatttttctaaaagtagaaggatgacaccacgtgataagaagatattagtaacctaggtttaatttttactagcagaaatggaaagataatg

SEQ ID NO: 103939 - DNA, 122 bp, Homo sapiens
ctgcaacaaaagattcccacttaataacatacaaaggaattccagagcccatgctgaaaccgcttaacagtagttaagcgacccccgcgtgtaggtcaaaccggcttccgatcctgttcctg

SEQ ID NO: 103940 - DNA, 122 bp, Homo sapiens
ccgcgtctgctcgccttcacaggacccgctggcttggagccgcagaagccgctactgcagcgtgggcgacaatgctaggcgcccaggagaactaccgctcccaggttgcctttcgcgccccg

SEQ ID NO: 103941 - DNA, 122 bp, Homo sapiens
atgtgagggtgggcagcccatgaacagtccacccagacacaagttaccctgcccccgagccggaatccagccctgagaccccacagtgctgcctctgaaacagtgctgggacgtctctctga

SEQ ID NO: 103942 - DNA, 122 bp, Homo sapiens
cagttagtaggcaatccatccccccgagctgcagcgagttaagctgcaggccttttgtaacggcctcaggtgtgagctgccgcaagccccccccacccccacccccgaccagaggatcaccg

SEQ ID NO: 103943 - DNA, 122 bp, Homo sapiens
caagacttgccccttaggtaacacagcaagtaagtgacttggggctagaatcctcgttttcgcatcttgagctcgattaccatcctcaacagaccccaatctttacatcatcataccataca

SEQ ID NO: 103944 - DNA, 122 bp, Homo sapiens
atgaccattttttaaattgttattttgaaagccagttgagggtttcagaatgacagtgagcgtaagctgcagcagcccctggctgcccctggcaggaccccctcctgccgcttcccactgcc

SEQ ID NO: 103945 - DNA, 122 bp, Homo sapiens
cggtggcggcgctagggacgggagcgcgcgcgggagctagagagcagtggtctcggcgctcgtccggcccgcagcttcgggtcctcaggcggctgttgctccggaacgggtggttggggagg

SEQ ID NO: 103946 - DNA, 122 bp, Homo sapiens
aggccaagggaaatggagtattgacatcaggagtttcattttttctgttcagaaccttgacgcactgtactatgcactctctgtttaggagcctcagctgatacacaccctgcttgccaaat

SEQ ID NO: 103947 - DNA, 122 bp, Homo sapiens
atcctaaggagtaaatttaagtcaatccctattataaagctaaattatggcaaaagtcctcggtctaatgcaattttcttgtttcttcagagaataaaacaatttctaacattccagattaa

SEQ ID NO: 103948 - DNA, 122 bp, Homo sapiens
gacacacggtgtatgtcctggggtcgggggacagcaggtcctggattaccctggccttgacgggcggggccccaccagcacctgttctgcaggatctctgcagaactttctgctcctgatga

SEQ ID NO: 103949 - DNA, 122 bp, Homo sapiens
gaccgcctcaaagcataaagatagtccatagcgtcttacctagacaacgaggagctgaaacgccaaggcatgacactgctcaacactcaggctaggaaagaagtccgtccccgttagtttct

SEQ ID NO: 103950 - DNA, 122 bp, Homo sapiens
gctaatttgctttttaaaaattaaacaaaacttaggccagctgccatttaagaagggctccggggcctccagactcggtgtgaccgtagccgtgcccggtgctcccctcgcggaggcgttag

SEQ ID NO: 103951 - DNA, 122 bp, Homo sapiens
gaaaggagctgggtgcgctctttctacgaggtagccctgctctgactcccaccctttgtgcgctccccaacccttaccctggaattccctcaggcctcgttgcagagagaggagtttatctg

SEQ ID NO: 103952 - DNA, 122 bp, Homo sapiens
acgaagatgcctcttccctcccctgacctacttcgttcttgtgacggcaaggagctggggcgctggagagtgggagacggggtgagggggcatcctggcttctagtgggctggggcctaggg

SEQ ID NO: 103953 - DNA, 122 bp, Homo sapiens
cttccccagtgaccaagactggagggcttgagaactccaagttcccagcatgatgcttggcgtttgaatgctactttcttccccttcctcacttcctcctgccctttgatttttaatatgaa

SEQ ID NO: 103954 - DNA, 122 bp, Homo sapiens
ttaggcagtgtcacttcctctccactgccagccacccaatttaggcggctccatccctcccgctttcatggatatgcagcaggatgcagagagcacagagctgtgattggcacgagctcaca

SEQ ID NO: 103955 - DNA, 122 bp, Homo sapiens
ctcagaaaggccacctattgtatgagcacatttagatggaatggccacaaggggcaaatccgtacagacagacagcagttcagtagcgtctgaggctggggaaggaggggtgtggggagtga

SEQ ID NO: 103956 - DNA, 122 bp, Homo sapiens
ggtggaaagggcgaggacagaggcggcagctctgagcgggctggatcagccggcgaccaacgctgacatgagggaagtcgcagccatagcccgcgccggtgcccgcgctcggctgacagtga

SEQ ID NO: 103957 - DNA, 122 bp, Homo sapiens
catttggaaaacgagggtgtttttccatctggagtggcctctctcctatcctcaaccctccgtgtccttcgacgcctctctcagatgccatctccaccaagaattttttccgggtacccacc

SEQ ID NO: 103958 - DNA, 122 bp, Homo sapiens
gcccgggtttgggagtcgtttgaggcgcgagcttcctgcgcctgctcagcagcctgaggccgcggccgggtgccctcctgccctcctggccatccagggattgggtgtcagtggcctgttgc

SEQ ID NO: 103959 - DNA, 122 bp, Homo sapiens
catctttttgtgtaaggctggcagggctgataatcccaccactaaattgttttttgtcagcggatatccagcttgtaattatatatagcgaaaataccctctaaagaagacgcaagaagaga

SEQ ID NO: 103960 - DNA, 122 bp, Homo sapiens
ttgagttgaatccgtgtaacatattttaaaacaggcggacctatccggcagtggtgcagacggcctgacgaggttccttggccgggggttgggcaggggcctggggggcttccctggggggc

SEQ ID NO: 103961 - DNA, 122 bp, Homo sapiens
cgcccaggatgacgcgggggccgatgactgggagaccgaccctgattttgtggtaggagccgccagcctttgctttcctctttcatgaagtggaagtggctctcctgggtttttctttgatg

SEQ ID NO: 103962 - DNA, 122 bp, Homo sapiens
aacgcgtcctgggtaaagccatcctcatgagctggcattgcggctctgggagtcacctcccggccaagagcaggtgcaacccaggctcgagactccacacccggaaccctcaaaaccgggaa

SEQ ID NO: 103963 - DNA, 122 bp, Homo sapiens
tagttctcctgggcagcttagtagctggctggcctggatgcaagaccactggctatgtctcggtcactgccttatctcatcaggggctgcttttgtctctgggaatgcaaatgtcactatga

SEQ ID NO: 103964 - DNA, 122 bp, Homo sapiens
cacgcagacggacgcgcccctcggtgagtgtgcgtgtatcagtgcatgattcctttactccgcccacagggtctgggcatccgtcattacctacggctgcctggtcagcaaacaacagcaga

SEQ ID NO: 103965 - DNA, 122 bp, Homo sapiens
gagacttagaaatgaattagcaagggatcagatcatagagggccttataatgcttcattacggagctcagacttcttatcccataagcccaaattttttgctcaccacacacaactagaaag

SEQ ID NO: 103966 - DNA, 122 bp, Homo sapiens
tccaggggtcctatttaagctctaaaaattccacaagagctttagataaggaaatagcaacgcaggggtgtgttcttttgccagttctgccacaggcctgcccagtctctaaagacaagaca

SEQ ID NO: 103967 - DNA, 122 bp, Homo sapiens
ctggaaactgcagtttccattctctggggtcagaaatgttgctacaaggaaagtccatcccgagggaggatttgctctctgacttttccctttctgtgtctggattaaaatagctgtgggac

SEQ ID NO: 103968 - DNA, 122 bp, Homo sapiens
ggtggaggggagaagcaagtcttttcatatggaatcctttaaaaggcagaatgcaaactacggtaacaaagggaaaggggaacccaggaaggtggacctagaataccctcgtaggggagatt

SEQ ID NO: 103969 - DNA, 122 bp, Homo sapiens
ctggggttacaggcgtgagccactgtgcctggccttagcattaattaattcctacctgtacggtttacattctggaatcagtacattttattttcaggtttcaaacagttcgttgatcccca

SEQ ID NO: 103970 - DNA, 122 bp, Homo sapiens
ggaatgtctcctgctggccctcctccgtccccaccccaccccaccatctagctccccacccgcccctgcaagtgctctgggcttttccggtttcttcgcacagctccgagctttagctcagg

SEQ ID NO: 103971 - DNA, 122 bp, Homo sapiens
gcagatgttcttgttccaaaaggttcactagccatgcagctccccgtctcttcaaagctgcggagagagtgactctccgatgagtcacagctgcttctttgctgattggtatggccacaagg

SEQ ID NO: 103972 - DNA, 122 bp, Homo sapiens
agtcctggggcctcagagaccagctgccgccttgatgttcctgggtactagaccacctctcgtccactctgctggcctgaatttctggccaacacttccagcccatgagtggcccttcaggg

SEQ ID NO: 103973 - DNA, 122 bp, Homo sapiens
ctggtcagcagccctccactcgtgggcagctcagccctcctgagtggcacagccttgctgcgtccactgcggcccaagcccccgctgcttttgccaaagccccccgtgacagaagagctgcc

SEQ ID NO: 103974 - DNA, 122 bp, Homo sapiens
caccgggttcctccacctccttcccgatctcaggctggagaagtggtgcaggggtcgctgcgaaaggagaggagcgtgtatgacgccacatccggcgcgcggcggaactggcctcctttgct

SEQ ID NO: 103975 - DNA, 122 bp, Homo sapiens
tggggtggtggcgtgaaccccactgcctttgcctttaattgcactgaaaatatccagcaccgctgatatcaagggcccaggtcccggcggaaatgaactcccagacttgggcgcccaggttt

SEQ ID NO: 103976 - DNA, 122 bp, Homo sapiens
gggattttggtgccacggatgccggacacctgtgaggtgagcaacaccatgggtccagaccgggaatgaggcctcctgtgacggctcagagagtgagccgtgttgcatgaatgtttatgtgc

SEQ ID NO: 103977 - DNA, 122 bp, Homo sapiens
cgcccccactcccgcagccgagccccgccacgcgcgccttgcccgcccgccggccgcccccgccgcccccgccgcccccgggccctgatggactgaatgaaggctgcctacaccgcctatcg

SEQ ID NO: 103978 - DNA, 122 bp, Homo sapiens
gttaatcgcgcacactgcagtatgcaaatgaggagcgtattaagctcactgatgcagagacggagccctcatcagcacttaaccctctgcacgccggcccctcatcagcacttaaccctctg

SEQ ID NO: 103979 - DNA, 122 bp, Homo sapiens
gtccccctcctcactttccttttttccacagaaaactacttccagctaaatgtgcacacacgccagtacagccgaaaagtgactctgcagaacccggagccctaatcacttttccacatgcg

SEQ ID NO: 103980 - DNA, 122 bp, Homo sapiens
ggcggtagcggccgcgcagaaagggtggcggcttgagtgtggcggcctcggcgatgcgtacgtggctacggcacacctcgcgcaccacgcgcaggccggggtcggcctccacccacgtgccg

SEQ ID NO: 103981 - DNA, 122 bp, Homo sapiens
gccccccgggctgcgggatctggggtttattttagtccggcgccaggtttacgacagactcggggggcggagcaacatcccaaacgagcaaacaatggtcattgacatctttttctctcgcc

SEQ ID NO: 103982 - DNA, 122 bp, Homo sapiens
ctgagcgcaggccggctgtgttggaaggagctgacttctaattgacctgcccgccccgcacgcagagccagatcctggagctgggaggagggagggggtgagcagagcaggaacagcgttaa

SEQ ID NO: 103983 - DNA, 122 bp, Homo sapiens
tagggaggagagagacagggacatgccttgggacggagcgttccccatcgggcgggggcgcggggggcgggggccccgggccggcctgcctggcgctcgccctctcgccgcctcgcgggctc

SEQ ID NO: 103984 - DNA, 122 bp, Homo sapiens
tcaagtgaaattaaggttgcaaaggtggcgggagcaaaaagccgcagcagcaaaaatccgcggcggcaggggcaaaaatccgcggcggcgggagcaaaaagccgcggcgggcaaaaagccgc

SEQ ID NO: 103985 - DNA, 122 bp, Homo sapiens
gaaacagattggaattatcactcataaatgatgagacaaaacttgcagcctgagcctaatcgagtggattgcctgaatcaattgatcaatcaatcatcaatcaaacattttcagaaaatttt

SEQ ID NO: 103986 - DNA, 122 bp, Homo sapiens
cttacttcctggccttcccggaggaagtgtgcgggcctccccgaagtaaccggtaccgcccggggggttttgaagttcttggtcaactgcaaaatcaatcaacctagttaactcctagggcc

SEQ ID NO: 103987 - DNA, 122 bp, Homo sapiens
gggccggcgggtgggagatcgcgccccgaggagggcgagggagacccaggccccgcgcgacggtccccctcgctggagtgagactgaggaaggggccgctttctgcccccctcctcccactt

SEQ ID NO: 103988 - DNA, 122 bp, Homo sapiens
tgagcaattgcttcaaggaagagaaaaattataccagagagatagctgaggaaaagttttcggttgaattacgagttccaaggctccaaaacttgccaatccttaaaagaaaaataagcgtg

SEQ ID NO: 103989 - DNA, 122 bp, Homo sapiens
ctcccagcccctcatccgccagcgagctgagccgcgcccgggcccctgtcaccgcgccaccgctccttcgggacctgaagcctccgtgctcagcgatccccctgcagcccactgcgaccccc

SEQ ID NO: 103990 - DNA, 122 bp, Homo sapiens
aaatgatataaaatgggaagctcagagatcttatggctcagtcagaccaggagagccaggcgggaaggaggcacaggtgttccagctgccgcacactcaccagtaatggcgacggccgagat

SEQ ID NO: 103991 - DNA, 122 bp, Homo sapiens
acctgagaggagtctctaggctgccctctggtggcagttcttggaacaagacctgagagccgctaccttggctctcagcattgcacgggagtttagaggttattaaagaaatccccctaaag

SEQ ID NO: 103992 - DNA, 122 bp, Homo sapiens
agggcacccgccccgcccccagctcccaatgctggcagctcgagtgtgcgggtgtctgcgcgtgtttgggtgacagcaagagtgtgcatgtctggggctagcatgactatgagggccttccc

SEQ ID NO: 103993 - DNA, 122 bp, Homo sapiens
gcagaatgagccgggagtaagaccccattgcatctccaggttcctttgccctggactgggcgtcggggcttgactcttgggcaggggaactctagcccccatttcctccttcccgaggtggg

SEQ ID NO: 103994 - DNA, 122 bp, Homo sapiens
cgggcctggccgaagcgcttcctgtgccaggtttccggctccgggtcccgggaggaggatcgcgggccagaggcggagccgccgccctgccgcgactttcagactccgaccatggcctcgcg

SEQ ID NO: 103995 - DNA, 122 bp, Homo sapiens
cctcccacttagtcttcccaggcctggggaaacttcggtctgcagagaatggagcggcgacgagcgatgccccggagtgggggcctgccttttgcccagggacaccaaggcaaaggaacaat

SEQ ID NO: 103996 - DNA, 122 bp, Homo sapiens
caggaaaatcaagcagccagttcttggggccgtggggtgctgtgtggatgcctggcctttcggagccactggaggctgatgtctgatggaagtaagggctgtctggctccagggtagagact

SEQ ID NO: 103997 - DNA, 122 bp, Homo sapiens
aaacaaacagttgagcattgtagtgaattcatgctttgtaaatagtactggtcatagccacgatggctgtcagcccacaaacatctaactcatgtttgacctctaatgttcaccatcactga

SEQ ID NO: 103998 - DNA, 122 bp, Homo sapiens
atatttgggttcttttcagttgagactattacgaagaatgccgtttggagtattcttgtacgtgcctcttggtgcacatctacatactcttctgtggtatatatccaggaggggtattgttg

SEQ ID NO: 103999 - DNA, 122 bp, Homo sapiens
ttttttttttttgagccccggcagcttttgttcctttgaatttaagtgtttgaagcttggcgatggcaggaattggctttggccttgagatcttaatatgtaatgatgactggggctgcagg

SEQ ID NO: 104000 - DNA, 122 bp, Homo sapiens
agcccggccaacacagcgaaaccctgtctccaccaaaaaaatacgaaaaccagtcaggcgcggcggcacacgcctgcagtcgcaggcactcgcaggctgaggcaggagaatcaggcagggag

SEQ ID NO: 104001 - DNA, 122 bp, Homo sapiens
ggctccagcaatcctcccacctcagcctcctaaaggattacaggtgtgagccaccgcgcccggcctaatctttaactttttatggcatcattggcagtggaaggttctcaggtcacaagtga

SEQ ID NO: 104002 - DNA, 122 bp, Homo sapiens
cctgtctgctgtccggttcacacttgcctttataactaagactctgacagaactcactagcggaacctgatgaattataaaacagcccctcctagattctcatattttacatcacagggggt

SEQ ID NO: 104003 - DNA, 122 bp, Homo sapiens
atggggaacccactgcctggtggcttctgcctgcagtgaaatggtgggctttcaatgccccgtaagattggagcacacactgcaggggtatccaagttatgttcaggattccggaaacctcc

SEQ ID NO: 104004 - DNA, 122 bp, Homo sapiens
atggtgatcaaaagcttcaggacgctggtgagtcactgcggaggagccgaacactgaccgcgccgtccccgccaggctcccgcgcggccggcaccgcggccctgagcgcaggcggccccggg

SEQ ID NO: 104005 - DNA, 122 bp, Homo sapiens
tccgctgcgtctgtttgtagcgcgcctggtgattcggctgcacccccacacaggatgttccgctgggagcgctccattcccctgcgaggctcggccgccgccctgtgcaacaacctcagtgt

SEQ ID NO: 104006 - DNA, 122 bp, Homo sapiens
tgaggggtttgatggagaaagggcctgctctagggggcccgagggcgcagaggcacagtgcggggccagcccaggggcgacccttgactcaggaggacctcagtggtggagaggaggagccc

SEQ ID NO: 104007 - DNA, 122 bp, Homo sapiens
tttcctaatctcaggccggggttaaagttctggtcctggtgagatgctggaagctgcggccgcagccgcaacccgtcccggaggtgtcctgtctcctgtcgccgccgccgccgccaccaccg

SEQ ID NO: 104008 - DNA, 122 bp, Homo sapiens
cctttgagtcaaccccaactcatgtgtttcagatttcagtaatgtgatcagcaagagtgacgtgaagtcattggctgaagctgatgaacaggaagttgtggctgaggttcaggtaaacatat

SEQ ID NO: 104009 - DNA, 122 bp, Homo sapiens
aatgcttaatgttgcaaatgcttgaaatgagaaacaagaacaggactgccaaggcactcccgagctctgtgcatgggcaggtgactaagacagtgtttagagaggaactgaggtctggtgga

SEQ ID NO: 104010 - DNA, 122 bp, Homo sapiens
tggtctgagagtggacaggacatccatggaggacctgagctgcctgggtctgggcctgtgcgagcagaacctgggctacatcctgcgggatggccttgggcaggttgcttcacttctctggg

SEQ ID NO: 104011 - DNA, 122 bp, Homo sapiens
ctttatgtgcaaaaaaaaccacggcacctcagtctgcaagtgcctgctctgcctttggggcggagggcaggaggatgttagaagggggtacttaagagggtctaaggaatcttgaaaagggc

SEQ ID NO: 104012 - DNA, 122 bp, Homo sapiens
gggcctgggcgggaggcgggcggtgggcgtgtccggggcggggctgtaccgggcgctgggcggaggagccttggctggggactgcctggaaacgggctgggcctgcctcggacgccgccggt

SEQ ID NO: 104013 - DNA, 122 bp, Homo sapiens
ggcgaaggcgcccagctgtcacagcggctccgcgcacgcaggcagacgaagaagggcccccgcccccaggagctggtcccagcctccagcctggcagcctccttcgaagacttccctacact

SEQ ID NO: 104014 - DNA, 122 bp, Homo sapiens
ggtgtcctgcctggggtatccccagagtttggcacacggtgatagccaacattcactgagcgccaaagggccaggtgctgccactctctcaaaataagcctctgccacttactgaacaacta

SEQ ID NO: 104015 - DNA, 122 bp, Homo sapiens
cctccagactgttccggctccgccgcctgaaattacctgctctgggggaggcgcggcgcgcggcctcatgacggaactacaactcccatgaggcgctgggcccacgcaggcgcggcgcggct

SEQ ID NO: 104016 - DNA, 122 bp, Homo sapiens
acagaagtgcccttctggtttgagggctctggtttctacagaatttattttctgtctaggcggcaagacttttctggtgaattcacttttgtttctgcatgcctggctgaatattttgtttg

SEQ ID NO: 104017 - DNA, 122 bp, Homo sapiens
tcttacccctctccatctaccaaaattccctttcgggatctggcatgaatcacaaacttacggaagtccagaatgttggagcagaatggtccctcagagaccattcatatctttgggcattt

SEQ ID NO: 104018 - DNA, 122 bp, Homo sapiens
atttctaggaactagttaagggagaatgaacaagatgggagcgaggagaaagcgtgtgtgcgttcgtgtgtggctgtctgtctgtctgtctgcggcaagaggaatctcagagtttcggttat

SEQ ID NO: 104019 - DNA, 122 bp, Homo sapiens
gcccaggacacgctgcgtctgcacccaggagacgcccctcccgcccctctccccgacggccgcttcccccggtacaagcccagcaaactccctgcagatggcaggctgccagctcaggacat

SEQ ID NO: 104020 - DNA, 122 bp, Homo sapiens
tggacgagagccgaagatcgagcgttctgattgggtgctagcaaaggcggtccgtttgaacgaagccaagagctgcataagggcaggaagctggactgctaggatcaggcgactacaaggag

SEQ ID NO: 104021 - DNA, 122 bp, Homo sapiens
cgttggcagaaaacatgttgtcaagtaataacaaaccttcccagaggttacgtttattagcgtcctgtccttactccttccccgcaggggtctggaggtcggtacttagtttccctacttta

SEQ ID NO: 104022 - DNA, 122 bp, Homo sapiens
ggaggcggccgaggggctgggctcccacgacagggccatcaagtacctcaaccaggactacgaggcgctgcggaacgagtgcctggaggccgggacgctcttccaggacccgtccttcccgg

SEQ ID NO: 104023 - DNA, 122 bp, Homo sapiens
cctattcccgttggacacaaggagtctgtgagggggtgtgaaggaaggaggctgcggctgcgtcctggactccgtcctgcggtagggagtccagcagggatggctcagcctccgcacctggt

SEQ ID NO: 104024 - DNA, 122 bp, Homo sapiens
agagactcacgctctgtgcagtagggccctttccagccagggttgcacactttctccccacgctccccacaggtgaagtggccgaaggcatcgtcccggggacggcagaaaacggagcagcc

SEQ ID NO: 104025 - DNA, 122 bp, Homo sapiens
acagccatgttaacgtgagcaaattcctctcatgaaatagcctgcagctattaagaagcacgtgtgtgcaggaagcggaggcgcaggacctcaccgcgccagcgtgaagttcccgggcatgg

SEQ ID NO: 104026 - DNA, 122 bp, Homo sapiens
gacgaggctggagcattccaggcctggtttctccagatgacacagccaggcctggcagcccgtccttcaggccgggtggtctcctgctgggacatgtgcagggcggttcctctgcacccctc

SEQ ID NO: 104027 - DNA, 122 bp, Homo sapiens
ctgagtgaaacgtaaatcttgcataaacaaacacgttcttttgcttctgggaaggaacaccggagaaatgggcattccttccgactgcccgcctcccactgtcggtaaaaatgagccgtcac

SEQ ID NO: 104028 - DNA, 122 bp, Homo sapiens
accaggtttatctcactagggagtgccagagagtgggtgcaggtcattgggtgtgcgcaccgtgcacgagctgaagcagggcgaggcattgcctcactagggaagcgcaaggggtcagggag

SEQ ID NO: 104029 - DNA, 122 bp, Homo sapiens
cttcccttctctccccctccccgctccccccccgaccgcggagcagcaccatgtcggcgccggcggccaaagtcagtaaaaaggagctcaactccaaccacgacggggccgacgagacctca

SEQ ID NO: 104030 - DNA, 122 bp, Homo sapiens
aagtgaggagcgtctctgctgggccacccatcgtctgagatgtggggagcgcctctgccccgccgccccatctgaaatgtgaagagcacctctgcccagccgctaccccgtctgggaactga

SEQ ID NO: 104031 - DNA, 122 bp, Homo sapiens
aaagactcaaaggcggcctggtaggagcttggcaaggatcctttttatcctaggctgccccgttgcaggagccctgcgctagggctccctgtaggtcgggtcatactgtgcccaggggcaaa

SEQ ID NO: 104032 - DNA, 122 bp, Homo sapiens
gcgccgaggccaggcaggaagcaaaacatcgggacgctgggcaaggccacacctgaaaaccgccgtggagcctgcttctaaaaagaagtagctcccacctggggaagacagacggcccccac

SEQ ID NO: 104033 - DNA, 122 bp, Homo sapiens
ccaacatcgttcgacaaactgcccgttgatgacggtggcggggcagttggtcttgcccttcgcggtacccggacagatgtctccacactcctcgttgtcatctttgttcaacacgatgtaat

SEQ ID NO: 104034 - DNA, 122 bp, Homo sapiens
ccctagctctgagatgcacgtgccagactcactggaccctgacagcccagaagctcagtgcgaccctgccccctgctgcaggcaagccccgcctgtcacggaagagctgcgccagcttgctc

SEQ ID NO: 104035 - DNA, 122 bp, Homo sapiens
gcgtgcctggctcctgcaaggagaccttcaacctctattactatgaggctgactttgactcggccaccaagaccttccccaactggatggagaatccatgggtgaaggtggataccattgca

SEQ ID NO: 104036 - DNA, 122 bp, Homo sapiens
caacagaaatggaaagctcacagacacagagtgaataacgtctctgaatttgatttggggcgctggcgacacacgccttgatgacgggaacgttttggtagaatgtgaagaaggcagcgcat

SEQ ID NO: 104037 - DNA, 122 bp, Homo sapiens
ataggggcccttttatttaacgacttttccaagctattgttattgcagactatcttccttcgttatgtagtcactgaagtccttgttcctcagcttgtgtttagttggtgttttgacaaaga

SEQ ID NO: 104038 - DNA, 122 bp, Homo sapiens
tggaattgtcttcaggctggaggcacctgctgtgtcactcagctccaggccggcaactgccgcacacaattcaggggcaggtgcacagtgcctgccttggctcccggagggaagggggacag

SEQ ID NO: 104039 - DNA, 122 bp, Homo sapiens
ggccccacacacgagacacagtcagtttctaaatggaggccaggacgcggcgcccggcaccgcctggatgccactgcagcccggggaggattgctgggtgtggccctcgctcttggtgaggc

SEQ ID NO: 104040 - DNA, 122 bp, Homo sapiens
gagaagcggcaattgcaggacgacttcgcacagctgctgcaggagcgcgaacagctggagcggcgctgcgccaccttggagcgggagcagcgggagctcgggccgaggcttgaggagaccaa

SEQ ID NO: 104041 - DNA, 122 bp, Homo sapiens
tacaggaagaccaaggataatgctgggattcttgcagctggagagacagacagctgtcaccgcagagaatgggaaaggaaagggaggggagtgctggacagtgtaagcctagctgaagctaa

SEQ ID NO: 104042 - DNA, 122 bp, Homo sapiens
cattctttagataatgcttaacaaacccccaaacaaaggcagccaacttagctgcatgttcgtaaaatgtattctcagcagattcgggcttattgaagcactgacttgctttgcagccaggg

SEQ ID NO: 104043 - DNA, 122 bp, Homo sapiens
ctcagatgctttcaacacaggctgtgagtgaagaaagagcagctgtaacccctttcctctcgtgcagggaatgcagttataaaaaccaggccaatgttttctcccaccggggtgctgctgga

SEQ ID NO: 104044 - DNA, 122 bp, Homo sapiens
agcctccgtggccaacggatgcaggcccaataagcatgcgcccaactggccatccgcacccgggacccacctggaggggtcctgatcaccccacttggtcctggcctcaggctctgaggggc

SEQ ID NO: 104045 - DNA, 122 bp, Homo sapiens
ctgtccaggaaacaggggctggtggcatgggtggtgagccactgggacgagcgccaggcccgggtccgctactaccaccaactgagccaacatgtgaccgtggacgtgttcggccggggcgg

SEQ ID NO: 104046 - DNA, 122 bp, Homo sapiens
cgcccgcccgcgcccagggcgagtcggggtcgccgcctgcacgcttctcagtgttccccgcgccccgcatgtaacccggccaggcccccgcaactgtgtcccctgcagctccagccccgggc

SEQ ID NO: 104047 - DNA, 122 bp, Homo sapiens
tatctcctaatgctatccctcccttctccctgaacttgattctttagtcaattcaaattacgattgcatctaaataccaaatatcacttcttcactgctggactttgacaaagcattggcat

SEQ ID NO: 104048 - DNA, 122 bp, Homo sapiens
aatgaaccctagtttcactcttgtctctctggcaccctacaggaaagccctgatacagaacgttttacaaaatccagcagcaaaacaaatcacattgacatcgccattttaccctcatgtaa

SEQ ID NO: 104049 - DNA, 122 bp, Homo sapiens
gtcttaggcactgagacgaagagctgatgaagacagagttcctccctctgaactcttcaccggccttcagtgctctccaggttttgtgcatgtggctccccacacttggaatgcttttcctt

SEQ ID NO: 104050 - DNA, 122 bp, Homo sapiens
gcgggcccacaggtcacacggcggactggcaggtgctctaatgagggcccacaggtcacccggcggactggcaggtgctctaatgagggcccacaggtcacgcggcggactggcaggtactc

SEQ ID NO: 104051 - DNA, 122 bp, Homo sapiens
tggagtctgagcactcgcgcccatccgtcaaccttgcagagcattgcaactttatgcctacgcataaaaactggagggactcgtcccagagtttgctgccgccgccgccgctgccattagag

SEQ ID NO: 104052 - DNA, 122 bp, Homo sapiens
ttgggcagtcgatgtgactgggagccacggagcagggggcggtgcccatcagggaggctccggtgggtgggagcccgtgggggcagggggccgggggaggggggttcagaaatggcgggctg

SEQ ID NO: 104053 - DNA, 122 bp, Homo sapiens
atcctccaggagactcaggtggttaggtgcggaagttccggttctcgtcgatgtaggtgacggctgccatcagtgggcacaaggtgagcttggtgtgatcctggaagaagttgatctgcatg

SEQ ID NO: 104054 - DNA, 122 bp, Homo sapiens
ctctgtcttctggggattgatgtaccttttgatggcttcaaccaggatgctgaacatcagcgccaccgcaaaaatggtgttcccaaatgctcccacaacatctgcccgaagaaagccgtaag

SEQ ID NO: 104055 - DNA, 122 bp, Homo sapiens
ggctgagcttcaaaagagcaggcagcagctgcggctgggaggccgcccgcctcaggcagccgggacaccatcagaaattccacccagagtgagaagggcccagcccagacagcagatgggat

SEQ ID NO: 104056 - DNA, 122 bp, Homo sapiens
aaatattattaaattatttgggtccctgattttctattgaacacaaaccaaaacactgtgcggactgggcatagaatctgcttcccctcaactcctggtcctcactttcagtggaaacctac

SEQ ID NO: 104057 - DNA, 122 bp, Homo sapiens
agcctcagcttcacagggagccatgactgcgcgtggagctgcctgccccactgcagccagcgtgcctgctgtgtgcgatggctggaccccatgctcactcacacacctctcgctgctccacg

SEQ ID NO: 104058 - DNA, 122 bp, Homo sapiens
attcaccccacctaggaagaccttgctttttgggttgtttccttgtcagtggcctgtctccgccatcaggcaatgagttccatgagggtggaggcctggtcggtcctgctcccctgcatcta

SEQ ID NO: 104059 - DNA, 122 bp, Homo sapiens
cggaagaagggcatgtaacgttattccagaaactggtatttgccttctctgcttctaatgcgcaggctcggcctccgccatattaaaggtagctggagccttaagagcgggatgtggagggc

SEQ ID NO: 104060 - DNA, 122 bp, Homo sapiens
gctgtgatttttaaggttcctgtcctcctaccccttgcatcaagggccctgccctcttcacgccgggtttctcactgacctcaaccccaccttctgatggggcaggtcctccgacccggatc

SEQ ID NO: 104061 - DNA, 122 bp, Homo sapiens
cgtccctggaaatgggtgggcgatcgggcccatggggtggggctgcggagattcaaggatcgtgccctgctcatggccctgaatgcaaatgaccctgttgagcaatgggtcacaccagtagc

SEQ ID NO: 104062 - DNA, 122 bp, Homo sapiens
gagagaagggcactcgggggtactcggcgcgggctggggaccagccggggggtggtgagccgcggccgcccacctgccgggtaagggcccctcgggcccgtggtcgggcatcgattggcccc

SEQ ID NO: 104063 - DNA, 122 bp, Homo sapiens
agttgttcagcaagaacccaacacttggagattgttaacagaaacatctgcctattccaacgtgagtttcagagatggtgaaaatcacgggagagagttgggtaggagttggagaaggcatt

SEQ ID NO: 104064 - DNA, 122 bp, Homo sapiens
cgtgtttttctgctggctgttccactccatctcctgcgcgaggggatgctctggatcagccgctacccagcagcttaggaaagaggctctcggctgccactcggagcgccgggtgtgggaga

SEQ ID NO: 104065 - DNA, 122 bp, Homo sapiens
acttgccaatagccccagcactctgggaaggaggctgctgaaggcagtgaggtgggccaccgctgtcacccaacagctgctgtcctgtcctgctcttcacgcgggaggcaagctgtacaagc

SEQ ID NO: 104066 - DNA, 122 bp, Homo sapiens
agagaaagcatgacttctcactccaggattctggcttgtcatgtttcatttacttttgagcgcagacaaatttcctgaggaggactgtggatatgagaacaagtcaaatagtaagacttaca

SEQ ID NO: 104067 - DNA, 122 bp, Homo sapiens
gctgggtattaaaagcattcctaaagttctgtcgcttctcctgcttaggagttccttcgccgaggcgctgagctcacggcaaaggtagagaaaggacgcaacggggaggggcggccagcctt

SEQ ID NO: 104068 - DNA, 122 bp, Homo sapiens
gaggggtagtagacctccacatagttgcggatgagctgcaggtgcagcgactccagcttgcgcttggccgcaaagccacaggcactgcagccccgggagaagtccacgtcgctgaagagctc

SEQ ID NO: 104069 - DNA, 122 bp, Homo sapiens
ccacgtgccccaaagcagtgataaccagcatccaccagagaaccaactgccccacagcagcgataaccagcatccaccagagaacaaagtgccccgcagtggcgatttccttcaggcggaat

SEQ ID NO: 104070 - DNA, 122 bp, Homo sapiens
ctagcatcggcgggtgggagggaatacttatctaatggacacctttggctcaaaactccccgatcagcctgctgagaggttctcagcactgagctacagcctgaggctctacctcctctccc

SEQ ID NO: 104071 - DNA, 122 bp, Homo sapiens
caatgagaacacatagacacacggaggagaacatcacacaccaggcactgtttgggggtgcgggggtaggggagggatagcattaggaaaaatacctaatgtagatgacgggttgatgagtg

SEQ ID NO: 104072 - DNA, 122 bp, Homo sapiens
catcatgctggggtcctcgggcagctccgcctcggccgggcccttggtgcggtccttgtccgtgatcgctgggccccgccccacgatctggtccactctaccgggaacagagaccccaaagc

SEQ ID NO: 104073 - DNA, 122 bp, Homo sapiens
ataggtatttctggcagcccctggctttgggtcctgggtactagcaccccagttcattcccggtacccttcctgtcccagatgtcctggaatgagctgctccgggccccagggaggtgccct

SEQ ID NO: 104074 - DNA, 122 bp, Homo sapiens
aggtcaggactgagacgcacatgtgcctgccggccactgtctgtgctgactggtgtgtgccggagcccctggacccggtcagatatttgatgttgcccctttggggggtgacatttacctat

SEQ ID NO: 104075 - DNA, 122 bp, Homo sapiens
agacgggtttcaccatggtggtcaggctcgtttctaactcccgacctcaggtgatccggccgcctcggcctcccaaagtgctggattacaggcgtgagccaccaagtccggcctctcatact

SEQ ID NO: 104076 - DNA, 122 bp, Homo sapiens
gctcccctggtagggatctggctcagtgacccgaccctccttgcggctctctctggggtgcgccctgcatggacacagctgtccttggtgaacgtctgctgagtcaaagtggttttgctgca

SEQ ID NO: 104077 - DNA, 122 bp, Homo sapiens
tggggaacacagggtctgtcccggggctgtcgccagccttatatagtgccaggacagctccgactgacgtcagcgaagaacatgcactgattgtagaagcaatgacagccacagcttcgagt

SEQ ID NO: 104078 - DNA, 122 bp, Homo sapiens
tccgtctggtaggtgtgcacggaccagcccgtctgcagcctcgagagggaacagcacagacggcgtggaggcctccccggtgcaaactccggcagcccctaccacatccaccaagccccccc

SEQ ID NO: 104079 - DNA, 122 bp, Homo sapiens
gatgccggctgggctgcgcggactcctctcggggtcggatgatggatccaaccgggtgatcgggaatggggttccaatgcagtgaggccgaaagggtctcgccggggcacagaaagatcccc

SEQ ID NO: 104080 - DNA, 122 bp, Homo sapiens
ccctggactggcaggtccctgagagcccggaagagttgtgggataatcagggagctcagacggctgcatgttcttggaaaaacaactccccctctcccagcctctgttttctccctgtccag

SEQ ID NO: 104081 - DNA, 122 bp, Homo sapiens
tctttcctggcctctctccgggtgcttagcggacttggccaataacctcctccttttaaacgccctgaattgaaccctgcctcctgcgcatcctctttttgtgtcaccttagggttcagatt

SEQ ID NO: 104082 - DNA, 122 bp, Homo sapiens
tgacaaatcccttttcccttggagcttacattctcagtttcaatatttactgagtgtgttcgatggccaatatagtattttctttcctgagtgactcatggaagaaaggtgacaaggaaagt

SEQ ID NO: 104083 - DNA, 122 bp, Homo sapiens
tcccactcagggcctggtgtactcttggggaaccagctggcaaggccctgtgggtcttaacgtcagcgttggaaggtggaagcagggctgggagccggcagaaggcgcccgggccccaggag

SEQ ID NO: 104084 - DNA, 122 bp, Homo sapiens
tgcgcaggcgcggcgggcagtgcgcaggcgcgggcggagggcgggctgaagcagctgaagcggcggtagcggcggcggctcgggcagaggggcgggagctgaggcgggagcggacaggctgg

SEQ ID NO: 104085 - DNA, 122 bp, Homo sapiens
catgaaattgtacgttccgcccaggcagggctttgcattttacattcttgtttgcatccccgttccagacaattccagggctttcgaatcgtgcttcagccttcctgaccgctctcgcctcc

SEQ ID NO: 104086 - DNA, 122 bp, Homo sapiens
cccctggagacctgggctcagccatgtgtcctgcttcgacggctggcatgttagcaaacacgccggccaaggcccacagcgggcgtgcacacaggcttcccgtcctttctcatggagaaaca

SEQ ID NO: 104087 - DNA, 122 bp, Homo sapiens
gtgaccgaggtgggtgccaggccgagaccgttgacccgggagtgcctgaccctccctctgcgtcagccccccttgagactccctgcgcagtgcccgggtcagcgctcccctccccctcaaac

SEQ ID NO: 104088 - DNA, 122 bp, Homo sapiens
acaaaaaatgcacgatgcagatgttcatcatggtgttggtaataatcagaaaaagttgtacgcaacctaaacacccagcaataggggactggttcatagctaacctcatccataatgtgggt

SEQ ID NO: 104089 - DNA, 122 bp, Homo sapiens
aagctcctggagcaggagaacctgtgagggatttagcgagcacttccaccctgaacatagcggggacagggcccttctggaaccactgtgtggcctgagaaagttagggcatgtctgtggag

SEQ ID NO: 104090 - DNA, 122 bp, Homo sapiens
cacactgccacctactgtcccatctccagagctggagccacgggcgctctccctaccatgcggcctccctgctaagtgccagtagctcaacccaaacgctcaaataaaaatgagggaaaaca

SEQ ID NO: 104091 - DNA, 122 bp, Homo sapiens
gcgggaggagaaggcagctcattggctcaggcatgggatgtccaggtgactgacagctcccgtcccctgtcaagaggaggggcgcctgccttgctccgggcctctctgttgcctcctggggt

SEQ ID NO: 104092 - DNA, 122 bp, Homo sapiens
atggtgaagtggagtgtattgtgtaggtcccgtatttaatgcctctgactgcctttgaagcgcagccctctgtggcccgcagccccctgagcctggctgttgtgtggtatttatgctctctt

SEQ ID NO: 104093 - DNA, 122 bp, Homo sapiens
cttccttggcttaaaacagcattgaaagttgcttttgagtttcttaatgcactgaagatgcgattcctaaagaacctgagaactatggactctgatgaagatgcatgttgggagatgtgaga

SEQ ID NO: 104094 - DNA, 122 bp, Homo sapiens
ctttgggcctttatcccaagtcttcggggcaaggaaggggagtgggaattaaactggtgccggccgttaggtccacccagcagatctacccggcaggcacagcaccgcggtccggagagcgc

SEQ ID NO: 104095 - DNA, 122 bp, Homo sapiens
aattccacatctgcttctggagcacatttccctctaaagagaggggcagagcgacttcaccgtctgtcgtcatctggtggtggaaaccacttctaggtttgaaggtgagttattcatgctgg

SEQ ID NO: 104096 - DNA, 122 bp, Homo sapiens
ccagcttcggtcgggctggaattgggggctactggggactcctggccagggccatggccccgcagtggcgtgtgctggagtaatggtcctctcacttttcttccccgccaccggactgggag

SEQ ID NO: 104097 - DNA, 122 bp, Homo sapiens
ctgttaacttttgtgcatcctgaaaggatccgttcagatcggatcttctccaggacgcctcggatcctcctgactttcccctagagccttgcactgtgcttacctctgtcctgcacttactg

SEQ ID NO: 104098 - DNA, 122 bp, Homo sapiens
ggtttttcacgcagccatttagaacgaaccttcacaccactcccacaggacttgctgcagcgcgaccagttggaccactcactgagcttgcagtctgaggggcaggggatgatgcaggcctc

SEQ ID NO: 104099 - DNA, 122 bp, Homo sapiens
atccagtcatttttttcaactgatgtttattaggcgtcttctaagacctaggtctgggcacgcaaaaacaaaagacatgatccctgacctcaagaagctcttcttagaagagtatattttag

SEQ ID NO: 104100 - DNA, 122 bp, Homo sapiens
gcccctggctcggggacacacggggatttaataaccactttattccatgcactagggactcgggaagggactgggactgggctgaggggcagagagagtacaatcctagacgcaagggagaa

SEQ ID NO: 104101 - DNA, 122 bp, Homo sapiens
aaacgggacgctggcaccggaacctgcagcgttactgagattcaacaactcaaggtgtctcgtctctaaaaagaagtccagctttcttgcactgattcatctatcccttcgtgggtcgaaca

SEQ ID NO: 104102 - DNA, 122 bp, Homo sapiens
tctgcccggaggcaaggcgcgcctccctggagccaggtctggggcagcaggcgaatgaagcgggccacctggggctccggcaggaggttcagcactggagtttctgggtctgaattggcagg

SEQ ID NO: 104103 - DNA, 122 bp, Homo sapiens
cgtctgtgtgcgtgtgcacaagcatctgtgtgtgtcagtgcacgtctgtgtgcgtgtgcacgagcgtctctggatcagtgcacgtctgtgcatgtgcacacgtgcatgtgcatgtgcttaca

SEQ ID NO: 104104 - DNA, 122 bp, Homo sapiens
ctctgagctacagagtctggtgaagctcacttctgggcttcatctggcaacatctttatccgtagtgggtatggttgacactagcccaatgaaatgaattaaagtggaccaatagggctgag

SEQ ID NO: 104105 - DNA, 122 bp, Homo sapiens
tgactcagagcccctaggcgccgggacgggtggctgggaaccctgcttgagaagagattccggagcctctggctggtcccgagtgtcaggcttgggtttggaagggctgggaggtctgtgac

SEQ ID NO: 104106 - DNA, 122 bp, Homo sapiens
accggcgcccagcggacactggaagcatctgaactggtgtgcagtgcagccctgatttcccgtgggctcctccctttcccgtgggctctgcgctttctcgtgggctccttcctttcccgcgg

SEQ ID NO: 104107 - DNA, 122 bp, Homo sapiens
cgtgagccaccgcgcccggccggatttcccttttaaatgtgaaggcacctccatgctcatcgcgagcctgacgtccacgcggcgcccacccgcgggcgcgcctgccccgggcgccacctgcc

SEQ ID NO: 104108 - DNA, 122 bp, Homo sapiens
ccactgtgtgagtcgtcttgcgctccatgaagcctggtgtctgtgcagatgtgtgggtggcgttagggttgggggacatttgtctttcacactggagaatgggagtctggagctggtgctac

SEQ ID NO: 104109 - DNA, 122 bp, Homo sapiens
gtggcggaggtgcggagcggggagagggcgctctcctcccagctgaaaaccaaagtggagcgggtgcaaccgccactttaaatcctgattcctccgagttctgctgaaagcctctaggatgc

SEQ ID NO: 104110 - DNA, 122 bp, Homo sapiens
tggaaacctccatctgaccagtatttggagagactttagatggatgatgggctcagtggccgatggccaagttaagtggctctcttatccacagggatcagcatttcttagcctctattgag

SEQ ID NO: 104111 - DNA, 122 bp, Homo sapiens
ttaacaaactcctatgaagttgaaaccgggaagtttgctctaacatttccagagaaggtacgttactttttgctaagagaatatctgtaagagtttagagaggggtgggattttacgattgc

SEQ ID NO: 104112 - DNA, 122 bp, Homo sapiens
ttttcccttgtaaccactgtaaccacagaatgttttctcttggcaacaatggcatatgatcgctatgtagccatttgcaaagctttactttatccagtcattatgaccaatgaactatgcat

SEQ ID NO: 104113 - DNA, 122 bp, Homo sapiens
ggccggctcgcgcaggatggtgacatagacggtgctgggcggcatgaggcgctccagctccgcacggtcgaagcgcaggtggctggccagcacgtgcggcggccgcgtggccgggtgcacga

SEQ ID NO: 104114 - DNA, 122 bp, Homo sapiens
attactgtctgtcactttaagccaactacgagtcacttgagggaccttgtttaattctcccgtgtgctgtggcagagctagacattcaggcaacaccgctggatgaaaagactgcaatcaaa

SEQ ID NO: 104115 - DNA, 122 bp, Homo sapiens
agctggctgttgcccctggactgagatttcttcctctttgctggtggggggcggctggaacggatgggagacacagtgggaggctgaggccccttgggggtatcattctgtttctggaaggc

SEQ ID NO: 104116 - DNA, 122 bp, Homo sapiens
ataacaacttcttcaggatgtttgatagagacacgcggagggatgtgaccctggaggcctcgagagagagcagcaaaccgcgcgccagcctcaaaccccggaaggtgtgtacggggggtaag

SEQ ID NO: 104117 - DNA, 122 bp, Homo sapiens
cagagacactcaccgggctccagccgccagtcatagggggcggcgcgcacagtctcgtcccgcacgtagccattgttgaccaggttctgcaccagtgtgtgcaggtaccctgtggggggacc

SEQ ID NO: 104118 - DNA, 122 bp, Homo sapiens
ccaagctcaggcaaacgctgggacactgaagtccggaggctgggccttggcgacacgacccggagcatggtgactcccgggcacctgaacaggctggagttctcggggcgggggaggggggg

SEQ ID NO: 104119 - DNA, 122 bp, Homo sapiens
agaagtgggcaaggggaacaggaaacctcattatgctaccaccgctcctctcccaggtggcggaccccttgagggcagggatgtgtcagaatcccgcctgtccccacactaagcacagggtc

SEQ ID NO: 104120 - DNA, 122 bp, Homo sapiens
atttaatttaaaatctaacaattaaaaaaatctaacaattcaaccagtgtaaaataatgacgttttgtagaagcctcttctcttcaaaatgcccccttttatgttctcccaatagacctgca

SEQ ID NO: 104121 - DNA, 122 bp, Homo sapiens
cagcagctggacctgagcgcctgccggctgaccacgcagtgtgaggtgtggctggagggccggtgggggtatgggcgtgtggtggggcagaaagcctagacccaggtggtcctgagctgggt

SEQ ID NO: 104122 - DNA, 122 bp, Homo sapiens
gcccgcccaccattcggttcagcatcctggggcgaccacaggctgggggagcatggggagcgggtgggggcgctcactggggctggttccatggccgaggcccagctctcagcctcacactc

SEQ ID NO: 104123 - DNA, 122 bp, Homo sapiens
gcgcctccttcggtgggcagccggccggaactcacgaatcagagcagccgacacatcgtccgctcagccaatcgtagcagatgtgtgatcccgccacctccccggaccctggcggttgtcgc

SEQ ID NO: 104124 - DNA, 122 bp, Homo sapiens
agaggctgccagagcccaggtaatcaatctcttgggccgtgtgtgacagggcagccttcgcgcccctattccacggggagaaatcagaacttccggtggacccgcaggggtcacaggaagtc

SEQ ID NO: 104125 - DNA, 122 bp, Homo sapiens
ggataaacctagagccactggccatgaagggtgtggcagtggggtgaaaaacgggactcccgcctccactccctggctttcctcattccagccactatagaggggaaaatacgtagaccaca

SEQ ID NO: 104126 - DNA, 122 bp, Homo sapiens
gtggctgtttggcgggtgggcgctgtgttcctctctcgtaaagccgtgcggtctgtgggccgccattcagaaactggatggacagcttcggcggtgggaagggaagggacatgctgcaggcc

SEQ ID NO: 104127 - DNA, 122 bp, Homo sapiens
gaggccagaggggtaggcgagtccggggcggtagggggctgcgtccggaagtccaggctgcgttctgtccaccctgcccacccttagggggcaggacaggaataaggtcacctcaccaaaga

SEQ ID NO: 104128 - DNA, 122 bp, Homo sapiens
caaaatatgcataacaaaatttgccagtttaaccattttcaagagttcagttttcagtggcgttcagtccattcatgctgttgtgcggccgtcacccccatccagctccaggacccttttca

SEQ ID NO: 104129 - DNA, 122 bp, Homo sapiens
ccctctgatgggcatgctttgttcaggaatgacttgtagtgctgctggccatgagttccgcgtcaatgacacagtacatatgaaaggtgtctttaagctgggtgcggtggctcacgcctgta

SEQ ID NO: 104130 - DNA, 122 bp, Homo sapiens
acctaccttctgggcaagaacacgaatctgtcatttgcactcgtgtatttgcaatcggtgcgaacactcacagtctctatgctgcatgtggggaacacgcagccatttcaactatgaaaaaa

SEQ ID NO: 104131 - DNA, 122 bp, Homo sapiens
ctttcttcttgtggttctaaagcaagtctctataatcttccttcagcctccgatcctgaccggccaatgtggttcccaccgttttctacccccgatcagccggagctagttcgccctcctcc

SEQ ID NO: 104132 - DNA, 122 bp, Homo sapiens
gaggccggaagatggaaaggcgagagtccaagacacttccgggctctgtaccgtaaagggcggggcgtagcctccaaaaggcgagatgttccggtcggggaggccctgagcagaggaacccg

SEQ ID NO: 104133 - DNA, 122 bp, Homo sapiens
aactagctcatgaaaaatttaagaacttgtcaatgaaaaatcatgttcaacactagaacacgtgagaaaaagaattttcctttgtgggaactttaaagaaggagacaaacaattgtctgttt

SEQ ID NO: 104134 - DNA, 122 bp, Homo sapiens
cgcctgccaaactggttgctgcctccccggcagccgcggcgcgtccacctgcgcagccaccgcgccgccctgcccgcgctaccattggctcgctaaaaatgcctctctaatctgctctgctc

SEQ ID NO: 104135 - DNA, 122 bp, Homo sapiens
aggcaggtgggccccttctgtcggcacttagcctgagtgccatcacagcccatttcagcacgctgttgaaattcatgctgtctccatttctcatcagatggagtaagtaaaccagcaccagt

SEQ ID NO: 104136 - DNA, 122 bp, Homo sapiens
tctcaaaagcttagacagtccatttttggcccataagtaaaaatcaactttcctctgctccgaactccctagcgctgtatttccatctttgatatagcattttattactctctatcttatat

SEQ ID NO: 104137 - DNA, 122 bp, Homo sapiens
agggagagtcacgggcaggaaccagggctgtgcgtggtgcccgtgggccagcacgagttccgggtgggcgtgggctcggtgggccccgcactcggagcagctgtctggcgccgccagcccca

SEQ ID NO: 104138 - DNA, 122 bp, Homo sapiens
gccccctaaggaggagactgcacagctgacggggccagaagcaggccgaaagcctgcccgcggagtcgggagtggaggccagggccccccaccaccacgcagagagagtcgcacagagaccc

SEQ ID NO: 104139 - DNA, 122 bp, Homo sapiens
atacaattcctccagcttttttccgtgcaaaaaacatgtccatcaaacccgtccctgcggcgcctgtggaagagggaggccgctggattgggtccgggaattgcgggaatggctccggggag

SEQ ID NO: 104140 - DNA, 122 bp, Homo sapiens
tcgcagatcttaatgtacatggcattgattatgagacggaattccagcctggagacggagcgacggccgtgcattcattggctgcaccgcggccttggatctgctgctcccgtcctgtacgc

SEQ ID NO: 104141 - DNA, 122 bp, Homo sapiens
agcttcactcctgaagccagcgagaccacaagcccactgggaggaacgaacaactccaggcgcgcaatgaacaactccaggcgcgccgccttaagagctgtaacactcaccgcgaaggtctg

SEQ ID NO: 104142 - DNA, 122 bp, Homo sapiens
actttaggaagtgcctgccgggtccaagtttaccttccggactgcgacgaggtgaggtttcgccaccgtcctagcctctgtcctctccccaacctgcagcaagtcagctctgactccggcgg

SEQ ID NO: 104143 - DNA, 122 bp, Homo sapiens
agaaaggtcccactggctgttctgctcatcgtcatgtgaacgggaggtcatcgcacgtcacgacgttgcttcaaacacagttttccagccccgcccatcactctcccgcgggagcaagggaa

SEQ ID NO: 104144 - DNA, 122 bp, Homo sapiens
gtctgacaagagagtcgtgaagcctccgcggtcctagaggggccgctggctgggacgcttcgctcggcgcgcgcaggtggagccagcgagaggctctgaggctgccagagtggttgtgtctg

SEQ ID NO: 104145 - DNA, 122 bp, Homo sapiens
cttgtgtttattgtaagactggacagcctcaccccaggcttgcccggggtgagagttacacgtgtggctataaacccttccgttgtgaggtttgtaactactctaccactaccaaaggcaac

SEQ ID NO: 104146 - DNA, 122 bp, Homo sapiens
ggacgcccacaaaatacgtcaccaagccgaagcaatcaatcgctcagaaggaatccggctcggagctctactgagcctgcctgtgctaatttgggccgagctggcgcctcacggccatgttt

SEQ ID NO: 104147 - DNA, 122 bp, Homo sapiens
ggtagcgatggggtgaatgtgcttatttttaggctctagagcagcttacactggctgcagcgttggtgggtcctggggctgattcttgggcctccaggtggcttgcttagaagctagtagtg

SEQ ID NO: 104148 - DNA, 122 bp, Homo sapiens
acctgtttttaagaattctgaaacagagtagtattatcccaaacagaattcttagagaagcgtctgtgttttaaaatacttttctgttgtttcctatggtgataaacattttcaagtcccaa

SEQ ID NO: 104149 - DNA, 122 bp, Homo sapiens
caggagccccaccggccccagggcccagctggcgggttctggagcattaatgtggcagtccgggacagcactgccaagacgggacatctgggtgttgggggggaggggtgacagatgggctg

SEQ ID NO: 104150 - DNA, 122 bp, Homo sapiens
atccaagaaaggctccgggtggaactcctgggcaccctgggtccttactctgccttcaggcgctggccaccgttgggacttcctgggccccaagggactttgatgatctcaccgtcccctcc

SEQ ID NO: 104151 - DNA, 122 bp, Homo sapiens
cggcccggacctcagctgcggggagactaccggaagctaaggagaacagcccgcagcctacgccgcggggccctggtgaccggtttggttagtctcgggctctcgagtctgccaggagtcta

SEQ ID NO: 104152 - DNA, 122 bp, Homo sapiens
tgaggggcttagcaccctggccagcagctgcggaggaggcgctgggtcccccaacactgccggacggcctgtgaagagctcaaattctcaccaggcatcagccacctcccccggggcagtgc

SEQ ID NO: 104153 - DNA, 122 bp, Homo sapiens
ccgaagcggagtcgccgtcctacagggccgcgtggatgcggagccctgtccccctccccccgccaccccttctgcgagcggcctccaagtcgcagggtccccctggacggccgggggtcggg

SEQ ID NO: 104154 - DNA, 122 bp, Homo sapiens
cctagacccggtgccttgcaggacgcctctggagatcaggagggctggcggcgcattcggcgtccgggaggccgggccccggacgcgcgaggagcgcggggcgcgggaaggcaggcgggtgc

SEQ ID NO: 104155 - DNA, 122 bp, Homo sapiens
aggagtgagcaccatggcttgtgatctggagctgatggaatggaagaacaacagctcatgcggttatgatcataaacacggtggcatgggcacagacacaaagatggacaggcaggaggtgc

SEQ ID NO: 104156 - DNA, 122 bp, Homo sapiens
gtatccctccgtgcctcccaccggaccacctccaggacccccagcaccctttcctccttccggaccatcatgtcccccacctggtggtccttatccagccccaactgtgccgggccctggcc

SEQ ID NO: 104157 - DNA, 122 bp, Homo sapiens
ttaaatcttgcaactgcactcttctgtgtttgttacggctcgagctgagctttccatcgccgtccaccactgctgtttgccgcggttgcagacccgccgctgactttcatccctccagatcc

SEQ ID NO: 104158 - DNA, 122 bp, Homo sapiens
ctcttccagtgcttgaatttccgccggtacagcgtggaaatgggcaggcaaagcgacttccggctcactccgcttcaagtacccgccgcttcttgctttggtggggagagcaggcaccagag

SEQ ID NO: 104159 - DNA, 122 bp, Homo sapiens
cgaagcgcggagaagaccttgtgccccaacaagaacacaaaagaacacccactacagaaccgagctagagactgggcccaggacactactatttcttgagttagcaaagcgctgagaaaacc

SEQ ID NO: 104160 - DNA, 122 bp, Homo sapiens
ggcaagggaggcagacaggagctggccgagctttctgttcctttggcctccttgagctgccgcctcttcttcctctccttattagcctggtggacttgcctgtttcattatgaggttattaa

SEQ ID NO: 104161 - DNA, 122 bp, Homo sapiens
aaacggcgtgtagaaaagagtaaaacggacacagagcgctccggacggccggggtctttgcgaggtgagaacaagaaaatccagtcagcggacactggagctaccgagcccaggccgcccct

SEQ ID NO: 104162 - DNA, 122 bp, Homo sapiens
catctcgcacacccttgcgcgtgggatccacagcgctcccacacccgtgcgcgtgggatccggagctccccgcacacccgtgcgcgtgggatccacagctctccccacacccgggcgtgtgg

SEQ ID NO: 104163 - DNA, 122 bp, Homo sapiens
tcacttgcctctggaactggccttgagaatgggagtgcctactcctccctcaacagctgacgtaaaagggagaacttcctggaggccagccaagagcctactggggcataatcaggctgccc

SEQ ID NO: 104164 - DNA, 122 bp, Homo sapiens
aggggttggacacctgatttggcccatggtggctggtgtgattctgaaacccgtgaacttcgatgagagctggtgcccatgtgggaccacccgagcagctgggagccctctgaattaatgtg

SEQ ID NO: 104165 - DNA, 122 bp, Homo sapiens
ttcccgcaaccctcctggagagggggcttccggaaatgcgccgcgtcggggaggctcccacggttttcctgtgacatgggcagggtgcgaaccccgcgccagtctttcccctgcaaagcctc

SEQ ID NO: 104166 - DNA, 122 bp, Homo sapiens
ccccaggctgggtcaccaccactttctccctctgccaggagtagatgacttttctgttgccggggggaagggaggtgcctcctggttctggagatttgtcacttcctggacaccacatagct

SEQ ID NO: 104167 - DNA, 122 bp, Homo sapiens
gaaaggttttgcttaccagaaaccgtagcttgattccccctgccttgagtttacaactgccgcctcctttcctaaagattcacttcttatcctagtaccaatgtacaggaactaatcaagtg

SEQ ID NO: 104168 - DNA, 122 bp, Homo sapiens
aagtccagtgtccaaagatacagctgtgatcccatcaaaatcttcctaatgtacttttttcgctccaaaattttactcctttctaaatattcattgcctgtagccaatgtaccaaatattga

SEQ ID NO: 104169 - DNA, 122 bp, Homo sapiens
tcagggatgaagcggggtgtattgcaggtgtgtaggcgggggggcgtctattaagtggggcgctggggacaggaaagtgttcaaagaaggaaacctgcctggggtcatccgtgctcggcttc

SEQ ID NO: 104170 - DNA, 122 bp, Homo sapiens
gaacgatgccgagttcctctgtgtgttctgcagggagggtcccacgcaccaggcgcacaccgtggggttcctggacgaggccattcagccctaccgggtaagaagtgtagctttacctaggg

SEQ ID NO: 104171 - DNA, 122 bp, Homo sapiens
agtaggagcctttctaggctgtgggaggtttgatcctctctatgcgccctccgcgggttgcggctcagtgctccccaaggacccagtgcgaagaagcctcggaccccacagctgccgtccgc

SEQ ID NO: 104172 - DNA, 122 bp, Homo sapiens
aaactccgtttccggatgaatcccacctgtatctgaatgcatggggcgctctccaagctacgttaagtataaaggccccgagtaaagtaactgaccttttgcagaaacgcacgtagatgttc

SEQ ID NO: 104173 - DNA, 122 bp, Homo sapiens
ccccgcctggacctgcgcgtcatccagctggtgcgcgacccccgggccgtgctggcctcgcgcatggtggccttcgccggcaagtataagacctggaagaagtggctggacgacgagggcca

SEQ ID NO: 104174 - DNA, 122 bp, Homo sapiens
ccgcactccagcctgggtgacagagcaagactccgtctcaaaaaaaaaaaaaaaagaagacgaattggtcggtaaggggactcgaactggagactctaaaacttctccagccctgcccactc

SEQ ID NO: 104175 - DNA, 122 bp, Homo sapiens
tggcaggtagatgacagttcagtgggcacatggagatggtgaaatctgggagatgggatgcggtgcttggtttgagaaaccctggaccaggtcctcactaaggttcctttcatcaaaaaaaa

SEQ ID NO: 104176 - DNA, 122 bp, Homo sapiens
gcggagaggggcggagtcatggtccttaaggcggggccatccccggaccaagggactgggcggaaccgattagggcggagcggagggaatgtgaggcaaggggcggagccctgggaatcggg

SEQ ID NO: 104177 - DNA, 122 bp, Homo sapiens
ttttagcacgtttagattacagaacgaaagctgtgttaactagtattacaggacttttcacgtttttccaaacatcttctagccacctctttggccctacaactacgcataagcttttgctt

SEQ ID NO: 104178 - DNA, 122 bp, Homo sapiens
agcaacttcaaagccgacggcctgtccggcactgctgaaggtaagggttccgcggtgccccgggagagagtctccactgcggaaaattctctgttatttttcaaatgcgtgaaattagacac

SEQ ID NO: 104179 - DNA, 122 bp, Homo sapiens
ccgggccgcccccgagacgactccatactgcaggtgggggccgcaacggaggaattggttcgccccggctccggaggcagtggctgcgcctttaaggggcgttggtagaggcgagccgattg

SEQ ID NO: 104180 - DNA, 122 bp, Homo sapiens
aagctaggcgccaccctggccaatggaaaccagagtgaagaagcagtagctgcgtaccgccgggccctcgagctccagcctggctatatccggtcccgctataacctgggcatcagctgcat

SEQ ID NO: 104181 - DNA, 122 bp, Homo sapiens
gttcctcaccgtgatactctcttgagactttgcctactgtgcctctgtggtgcatggaaacggtgttgatgtaagaatttcagatctttgggtacaagggcgaccccccccacacacacctc

SEQ ID NO: 104182 - DNA, 122 bp, Homo sapiens
tgaatcagtgggctctgtaaagcaggccgccctccccagggtgggtggtgtcacccaatccgctgaggacccgaatagcgcggaaggcagagaaaggtgaatttgcccccctcttcctgcca

SEQ ID NO: 104183 - DNA, 122 bp, Homo sapiens
taaacctggtcttccttgtcacggacactgaagcgcttggttcgaaaagcaccatgaattcgaagcagccttggacgcgggatcatgggcgttagcctggctctctccgacgaggcaaactg

SEQ ID NO: 104184 - DNA, 122 bp, Homo sapiens
ctctcctcgcaggtgttctgggctccgttgtaccaagtggagcaggtggttgcgggcaagcgttgtgcagagcccatagccagctgggcagggggctgccctctccacattatcagttgaca

SEQ ID NO: 104185 - DNA, 122 bp, Homo sapiens
ttagttttatcagcgtttgccaggatctcctggtacatcctcatcgctctcttcctgtaacgcctgtggttctctaactaaaatgtccctgggttgcttcggctctgtaggacatactgcgg

SEQ ID NO: 104186 - DNA, 122 bp, Homo sapiens
ctagaacctagctccattaggaagcagccctgctaacaccttgattttagctcccatattcgttttgtacttctggcctccagatttaaaccactaaatttgtagtaatttgttgtagaagc

SEQ ID NO: 104187 - DNA, 122 bp, Homo sapiens
cccaggatggagctgaggaaactggcacctctcacttctgctgccgccacacgcacaactcgtgtattcactgctcacgattcagagtagaaagcgtgaacacgcacgaggaagcaacactc

SEQ ID NO: 104188 - DNA, 122 bp, Homo sapiens
ggcgcgatgcgttagcgcgggttcccagagcgagcgcagcactggggcaaatgcgggaggcggcctggagaggtggggcggggcaggggagactcgcaaggccctaaaacctgatatcgacg

SEQ ID NO: 104189 - DNA, 122 bp, Homo sapiens
gctgagttgccacaggaggcctgggccgcgagggaggagcccggcctccttcattctcttcgcctgctctcagggctctctggcagggtcaggtctggatgtcgcctcctttctccattctt

SEQ ID NO: 104190 - DNA, 122 bp, Homo sapiens
cctgcccagcctcaccctgtcctctccagggcactctgctgccttggggtggccctgtggcggctcccattcagtgggatcgtagagggtgcctggcagctgttgggggctgccatctccag

SEQ ID NO: 104191 - DNA, 122 bp, Homo sapiens
atacatgacgcagtatccacatacattcaccactttgctttccggttccagacaacacggcgggaatcttaactcggaaaaatggctataatagacacgagatgagcacctatctcttgcct

SEQ ID NO: 104192 - DNA, 122 bp, Homo sapiens
cttaagggatcgtctctgattaggtctagaattcctctccatagaagataacctacttctcgcgcaaatctgcagtgttcttgcagggctgctgatgggtggtcctgttcttttcgcggtcc

SEQ ID NO: 104193 - DNA, 122 bp, Homo sapiens
cctcggggcggtccgcgtcccgcctccccgggggccctggcggggactgtggggaccacgcgcccggcctcccccgcagcttccacttcgagagcactttgcgaaagtttgcgaagttggtt

SEQ ID NO: 104194 - DNA, 122 bp, Homo sapiens
aaagtcccacgcaccccgcgggactcatatttttcccagacgcggaggttggggtcatggcgccccgaagcctcctcctgctgctctcaggggccctggccctgaccgatacttgggcgggt

SEQ ID NO: 104195 - DNA, 122 bp, Homo sapiens
ctagcaactgacagaaaactaggtggaggtttcccattcttccttgtcttcttactccagcgggcttctgtatccactctagattgaataggggatgttttgtgtagagatgggccttctct

SEQ ID NO: 104196 - DNA, 122 bp, Homo sapiens
gttctgttgcccaggctggagtacagtccccatctcggattctgggatcactgcaatctccgccgcccgggttcaagcgattctccatgttggctggtctcgaactcctgacctcaggttat

SEQ ID NO: 104197 - DNA, 122 bp, Homo sapiens
ttcgccttcttctctttgtcaggagatgcgcctcagacgggcggcgaagggctcgggccgcgcgggagcgagttctggagccccggcgggcgcgcgcgcgcgggacgaggccccgccggggc

SEQ ID NO: 104198 - DNA, 122 bp, Homo sapiens
cagtttggctttttttctggttttgttttattctccagtaagttgactccagctgctgcacgcatatatgatatggtcccaggagctgccctgtcagtcagggaaaggaccctcctcctttg

SEQ ID NO: 104199 - DNA, 122 bp, Homo sapiens
cactccgaatgcacctacgccaactgccacttccggagccgctcaagctcccgccagagccgccggcaggcatgctcctattggacagaagccctacgctgtggccaatacccactcttctt

SEQ ID NO: 104200 - DNA, 122 bp, Homo sapiens
ggttactgtacttgtcccaaccgtacagatgagaaagctcagactcagggccagcaaccccggtcccagcggagcgcccggcacgcgccgacacttcagcaccagtcgcggtggccaccact

SEQ ID NO: 104201 - DNA, 122 bp, Homo sapiens
tggagtgcagtggtgagatcgtgactcacagtagcctcaacctccctcaccccagcgtcccgtgtagttgggatggcaggcatacaggaccatgcttagctaatttttttttttttttgtag

SEQ ID NO: 104202 - DNA, 122 bp, Homo sapiens
tgggcacacggtgaagttttgttcttcgggtctcacgcgtggcggcatgtccagggctcacgtgacctgccccacgctgccgccacagcagatggccaggcctcacctcgtcctccagctcc

SEQ ID NO: 104203 - DNA, 122 bp, Homo sapiens
atttgacttcaagcaggcatatagtggaaagtcaatagtatgtttttagggaggaagtgacgaataagagtctatttttaatcttgctagtgatagattcctggctaagttgaacagggtgt

SEQ ID NO: 104204 - DNA, 122 bp, Homo sapiens
gattccgggaccacctgaatgagaaccccctggggtacagctgcccacgcaccatcttatcggaaatcccagggaatggagcccaaggcttatgcacaaagcccctagacgatccgagagat

SEQ ID NO: 104205 - DNA, 122 bp, Homo sapiens
tgaagatggagaaaaaaacctcagcgggcaaatggcgggacagctggacaccatggaccgcggcacttggcgagcggaggagagggagaaggagcgcccctaggaggcgccagcgagctgag

SEQ ID NO: 104206 - DNA, 122 bp, Homo sapiens
gaatgaattttggagcacaggcctcaccagtcaataataataaacggccactttgtactccgcactaaacagtagccaggcgtgtggatgtgggaggaacctcaaagagaggaggcctggaa

SEQ ID NO: 104207 - DNA, 122 bp, Homo sapiens
cgggccgagctggctcagggaatgccagatctctgggggacccaccagtcccctgatgtgcgcgttgaggtcttgggcctggcggcgctccagccgcgggtgtccctaccataaccactgtc

SEQ ID NO: 104208 - DNA, 122 bp, Homo sapiens
ctgagactgtccctcatctctaaaaccacccctcctctggtgaactaaggatggcgataacgctttatgtaaagtgcctggccagatactcaataaatgttaattttccaagcttatacatg

SEQ ID NO: 104209 - DNA, 122 bp, Homo sapiens
agcgattccacctcaataacactccagaaaaaggcatgaagagccctatacctgccagggcgactttgacctagacccggtgacccggttcctagcgctgcagccctacccgccccccgccc

SEQ ID NO: 104210 - DNA, 122 bp, Homo sapiens
cctgctaatgtgaaacatttgcaagagtgtctggcagttaccaccgggtgaggatacaagcgctgagtgactcaatcaattagtcactcgctggccccgaacctcgcccccaacactcacgc

SEQ ID NO: 104211 - DNA, 122 bp, Homo sapiens
accacgtttaaaacctctcacctgctggaaaaccatcagcgcatagcagctgagagggaacgctctatctgtgctcactctttctacattttggaagcagcgagggggtgataaggcaagtt

SEQ ID NO: 104212 - DNA, 122 bp, Homo sapiens
cgcacacgtccccgccccaggatgatgtggccgcagggcccggggcgcccggctgccaagcgcacatgcggcggcacggtccagcttttcaggctgaagctggaaacgatgactctgctact

SEQ ID NO: 104213 - DNA, 122 bp, Homo sapiens
tgtcattctcgccatggggaaaatgcgttgaaaagaaaaataccggggccagggagaagccgtgaatgtatttatttgctttggtgaagctgctgaacactggctgcggagggccccccgcc

SEQ ID NO: 104214 - DNA, 122 bp, Homo sapiens
gaaggggcggagcctctcagcatgggggtgctggcggctgacagaaagaccaggggcagccggcgggagggggctgactgagactgcgggccggccgcgggccaggcgtggcgggaaggagc

SEQ ID NO: 104215 - DNA, 122 bp, Homo sapiens
cccagcagggggcggtgctgctttagttttggcctggtcggggttgagcggaggagggagcgacttcgaattcagtctgcacctgactgacctcgagcaaaaacgaagcgggcgcacgttac

SEQ ID NO: 104216 - DNA, 122 bp, Homo sapiens
ggggttctggggcctgggccaggacagttaggctaaactgactctaggccacgcggaccccgtggggcggggcggaacctggcagggcgccagtgaccgctggggccagagccctgccggga

SEQ ID NO: 104217 - DNA, 122 bp, Homo sapiens
aggggcctgggttgggcctgaattcgcaggctcatccgagcgggcagcctggggtaacttcgtctccaaaaacgagctaatttgtgtaaacggcctgccacctgctacctcctgtgtaacag

SEQ ID NO: 104218 - DNA, 122 bp, Homo sapiens
tggaaacgctcggctgtctcgggggcaccctctagtccaccagtcccgcgggattacgttcggctacttccggaaacactcgggtgcccccttacctcaggctccgcctcggcctcggttca

SEQ ID NO: 104219 - DNA, 122 bp, Homo sapiens
tgacagtaaatagaaataaagaccaaatatatacttcacagtgtcactggtgagaagcagcgttttcatattccccattgaatccaaggttgagaaccagtggtttaagaaaaaaaaaaaaa

SEQ ID NO: 104220 - DNA, 122 bp, Homo sapiens
tttggggctagaatttaatttgtttttgagaataccgaatattaccaagcaacgccagcacggatataatagtagtgtgaggtttgcacacacgcagctgaaatggtaaatttaaaatagga

SEQ ID NO: 104221 - DNA, 122 bp, Homo sapiens
tttcgggaaagttcgtggaaacaggagagtgagataataaatttactttaagccttcctgcgtttgaaattcgtgacagtgtaactagttggaaatatatttatctgccattcaagagaggc

SEQ ID NO: 104222 - DNA, 122 bp, Homo sapiens
acgccggctgctcagcaacgcttgcttgatcctggggctataaaacgagtccaccgtgagcgcagcggagcagcagcagctccagctcggtgcagaagcccagcagccggcgtgccgccgcc

SEQ ID NO: 104223 - DNA, 122 bp, Homo sapiens
aaatgttatttttttcctattgcctttctctcttctatatgagaatctgtaagtattcgccgaaggcttttcttttgcttttgtgaataccttcacaccatgttgtattctgtcttggttag

SEQ ID NO: 104224 - DNA, 122 bp, Homo sapiens
ggcgacggtctcctcttggcatagccctcttccctccctcatgatgggcagctccagtaacgcccattggctaactaggaggcggtgccaggcctacttcgtcccctcattggattgaataa

SEQ ID NO: 104225 - DNA, 122 bp, Homo sapiens
ttgcctaagaaaggttgagtctgaccaaggggcggcgcagcttgcaactttcgccaactccgggatgaggcaccgcatcctggtaccagaggcttggacaccaaaatgacttctctagggtg

SEQ ID NO: 104226 - DNA, 122 bp, Homo sapiens
ggacttacagaatgggtattcacaaatttcttgttaaatgtcagcagtaaactttagctacggcttctttgagtaactgaaccactcagccaagagttgacattacattcatctgagatgca

SEQ ID NO: 104227 - DNA, 122 bp, Homo sapiens
ggtatctccccaccccagactcttcctgtctttgcaaacctcctcacttccccaggttcacggagaaccccagcccaacacttcctgtgtgcaggctatcagtaacttattcagtgatgcat

SEQ ID NO: 104228 - DNA, 122 bp, Homo sapiens
tccaggccctcaagctgcagggacacgttctgcaaggtgtccagagacttcctcagagtccggttctccagctgcaggccctggctctcatgctccagggcctcgactttctcggtggctgt

SEQ ID NO: 104229 - DNA, 122 bp, Homo sapiens
tattaggagatcctcccaggctggctggtgggaacacaactcttcccagcctttatgaaccgtgggggttgttcccccctactcctttctggtggttattgccccaggctttggtattttcc

SEQ ID NO: 104230 - DNA, 122 bp, Homo sapiens
gggctgtaaggagcgagtgctggagggaacctccgcaccgttagcctccaactgggagggcgaggccaggcccagggacccaacgttttctcttagcttgcttctgcctggtctgggttacc

SEQ ID NO: 104231 - DNA, 122 bp, Homo sapiens
tgagcacggttctcctggttgagctccaggccatgccattcaacgccctccaggacaggccgaagggcttgtctgtttggtggttgctaaggtttgaaaaaagccagctggaaacttaatcc

SEQ ID NO: 104232 - DNA, 122 bp, Homo sapiens
cttgccccttctgtctgggaactgtgagcactgagcacaggcctggcaggctgggagaaacggaattaggaagggaactgttgagccaggaattccaatcttatgtgtctataggatcaatt

SEQ ID NO: 104233 - DNA, 122 bp, Homo sapiens
ccgggcggggagcagcgcctctagctcgctgatgaggagtacggagggtgggcggcagcgcgcggccgcgaaggcggcctggaggaggcgcgcgccctcggcggcgccgggcgcagccaggg

SEQ ID NO: 104234 - DNA, 122 bp, Homo sapiens
gggcccccggacgaggagatcccagagactggctgataacggggcgctttggacatttgtcgctgcctggagagggctgggctcacactggcccggggtgcgctgggggctcctcctggact

SEQ ID NO: 104235 - DNA, 122 bp, Homo sapiens
ccgcccgtcgtcgccagagcccgatgacctttttctgccggcccggagtaagggcagcagcggcagcgccttcactgggggcaccgtgtcctcgtccaccccgagtgactgcccgccggagc

SEQ ID NO: 104236 - DNA, 122 bp, Homo sapiens
ccgggtggttggcaaactcatcgtgtctgtcctgagaggctccacaatgcccacccgcatcgccattctgtagtcttcagggtcagctgttgataaaggggcaggcttgcgttattggccta

SEQ ID NO: 104237 - DNA, 122 bp, Homo sapiens
cctagaaaccgaaaatgcttaagttcccggactttggtgttcgccgcaccggaaactgagcggagtccggccgcctgcgcagtgcgccgcgccccgggttccggaatgcactctgaacctac

SEQ ID NO: 104238 - DNA, 122 bp, Homo sapiens
tcggcgtgcgggcgccgggctgcccagctgacttacggatcgggttggtcccgcccccggcgcggccgttttgaaaatcctggtccgcccttggcgattttggtggaagcctgtccctcaga

SEQ ID NO: 104239 - DNA, 122 bp, Homo sapiens
aaatgaaaagcccgcgggattccgaaacaatggaaaatgctctcgctggttttgtgcaggcggaatacgcgcttcttggtggaaacttcactccgaatgtagtgattgacacgtctatttta

SEQ ID NO: 104240 - DNA, 122 bp, Homo sapiens
tgctggttgtgatgaacatgccacatttgtggccagagcacaaacttgatgtttactggccgtgcacatcttatcccatgaagacaacgtccagggatggccaccccagagcctgggggagg

SEQ ID NO: 104241 - DNA, 122 bp, Homo sapiens
acactcctggcactcatagaccctttgtctcactccaggtgaatcttcctgtagtgtcttcgaatctggggatttttgttccagcttctctcttctgaaagaattttggatatcccagcttg

SEQ ID NO: 104242 - DNA, 122 bp, Homo sapiens
aaggacaaagggagaccagcaagagaaggcagggagactccgattggaatgcaggggagtcgaaatctgaaaaagcagaatgggaaggaagaataggttgaaagaacctgtttgtaatgtca

SEQ ID NO: 104243 - DNA, 122 bp, Homo sapiens
ggctttatagtcgtgaacaaaactggcatggtgcctgcattcttgaagcttacggtctagcggaagagagaggcatgttttaaacaaatggacaaacataaaaattatggtaaatgctatga

SEQ ID NO: 104244 - DNA, 122 bp, Homo sapiens
ttagataatcagtacacatgtgcctagtgcctatcatattggacagtgcagattatagaacgttttcatcacagaaagttctattggacaatgctgctctggacaatttagacttacactag

SEQ ID NO: 104245 - DNA, 122 bp, Homo sapiens
atagaacttggcatcttcaacaggaaaagcgtatttactttttgtatcctggtcttcttccgttgttcagaatttctagctcatattcccagcctccccaaccagggcataacatttttata

SEQ ID NO: 104246 - DNA, 122 bp, Homo sapiens
ctaggggcggacccagcagcccctcagctctcctcgtaaccacgggtgggcagtctccaccgtcacagcccaaagggtcttagccatcgggtgcctgtccctagtgtgtacacgtgcagaaa

SEQ ID NO: 104247 - DNA, 122 bp, Homo sapiens
aataacacagctgggcctcacagggctttgtgcagtctcatttcctggctgagaaggtcccgagataccaggctgactggaagctcccacacagcccatttctgggacctgagggcgcaagg

SEQ ID NO: 104248 - DNA, 122 bp, Homo sapiens
agccgcggcggcgacagcgccaggggcagcgagagcgggccagagcccatggctggtggccgggctggccgcggacccggacggtcgggagcgggcgcggcggtcgcagagacggcctctcc

SEQ ID NO: 104249 - DNA, 122 bp, Homo sapiens
actccaaagtgaatctgaggcttctgatttgccacgacagctgacctctgtccccaaccacgaccccccgcgtgccctctctccaccccgctccaggtgtacatccgcagcacggactttga

SEQ ID NO: 104250 - DNA, 122 bp, Homo sapiens
ggggcaggagggggctacgggaaccgagaagcgcctccccttcccccgcacacacaccctcgggtctccttggcagggagcctgtcccctggcccccagttccagctgtgagttgagggagg

SEQ ID NO: 104251 - DNA, 122 bp, Homo sapiens
catatgtgtcaagactaaaaattaagcacggggtaaagtctttggcaaaggacaaatagtcggcaagttcacagattagaatttagaattccatcatgaagtggactaaattgttagtttaa

SEQ ID NO: 104252 - DNA, 122 bp, Homo sapiens
caaacaagattaaatgagcttggattgaacctcgtagcggcccgtagtactcctccttcccgccatcctatagatgaaaggaagaaaaggaaaagccccgcccctcgctcggctgctggagg

SEQ ID NO: 104253 - DNA, 122 bp, Homo sapiens
tctagtgcgcatggccagttgtatttctttctcttttagtaataatttttcaccatgcatcggaaaaaggtggataaccgaatccggattctcattgagaatggagtagctgagcggcaaag

SEQ ID NO: 104254 - DNA, 122 bp, Homo sapiens
caccaaggcttgagaactgtgggggtggggtgcagggagaggatgggggcgaatagcctccgcccgcccaggagaaggcagctgctacctctgcctgcctcccgctgcgctggagttagatg

SEQ ID NO: 104255 - DNA, 122 bp, Homo sapiens
tttgtttttgagacagattctagctctgttgcccaggctgagtgcagtggcatcttggctcgctgcaaactccacctctcgcgttcaagcaattaacctgcctcagcctcccaagtagctgg

SEQ ID NO: 104256 - DNA, 122 bp, Homo sapiens
agctggcgaggtgtccggttgcggagccggcggcgtctctggaaatgcatcctgcatccccgcatggataacagctgcagctatgtcagaattgcacaaagaggggagagtgtcattgtgtg

SEQ ID NO: 104257 - DNA, 122 bp, Homo sapiens
aagcgcgtgaggctggggtcctggcgcgtggttggcagaggcagagacataagacgtgcacgactcgccccacagggccctcagaccccttccttccaaagggtaacctccgcgtgacagga

SEQ ID NO: 104258 - DNA, 122 bp, Homo sapiens
gcccgagaagctggcgatgcggagactgagcgggactttgctgcccggggccaagaaacccgaggggccactaagctgcagagaagggttcttcagggaaggggccgctctaactctctcca

SEQ ID NO: 104259 - DNA, 122 bp, Homo sapiens
caatttaaaaggtaacatatttatagctgtacttggaatgtatggatatcgggggaagaacgcctaccaggctgtaaatagcaggaagtcctgttgtcacctggtttcatctgtaatgttaa

SEQ ID NO: 104260 - DNA, 122 bp, Homo sapiens
caaataaaaatggcaactgttgaaaggggctggacgggtgccctgccttccccctggagccggctctccccgagggacagatggggcatccctgcacccccatggctcagccaggctctcca

SEQ ID NO: 104261 - DNA, 122 bp, Homo sapiens
tgccagctattcgcactccagtgccacttggactggcagagactgagaactttgtgcaatcgcggtggagtgggtgaaaatgaatcagatatgaaaatgtctgaggcaataaattaacacac

SEQ ID NO: 104262 - DNA, 122 bp, Homo sapiens
ccgctcctgggcctgagtcttggccccgcgaatctcttcgatgaggtcctgaagcttcagcgaaggcaccaccatcctgactggcagagtccgggagtggagaaacactctctggtcgggcg

SEQ ID NO: 104263 - DNA, 122 bp, Homo sapiens
aaatccactaaatctcttactttgtaaattacccattcttgggtatgtctttataagctgcgtgaaaattgactgatacagtaaattgatgccagtagagtggggtactgctgaaaatataa

SEQ ID NO: 104264 - DNA, 122 bp, Homo sapiens
cagtctttcccctccgccaatctcttctccgggaccacaaatcccagaagtcaccgcggccgcccccactgcatgaccttctgggatttgtagtagtcagggccacgcggctgggcgcgccc

SEQ ID NO: 104265 - DNA, 122 bp, Homo sapiens
aacaaagaaacaaaagatgacaaccaggctctgtaggggcatagcaactgcttctatcaccggctctctgttgggctgttgagaaagcagtagtgaaaggatgggtataaaacctgtgtctt

SEQ ID NO: 104266 - DNA, 122 bp, Homo sapiens
gacctagggatcacctgccacaggctcaggctccaccacccagctctcccccgtgggggacggagcgaggggtgccgccacaataagttcccacttccagaagcatgctctctccccagtgt

SEQ ID NO: 104267 - DNA, 122 bp, Homo sapiens
ttgctgcagagatgagattatgggaactgagtgctgggaacatcccaagttcaagacctacgccagaggcagcttcaaagagagaatgtggggtggtgggattagtcccctcctcaactttc

SEQ ID NO: 104268 - DNA, 122 bp, Homo sapiens
ttttaaccccccttcttctccctcccctggatctcaagttttccacctatctctttcttgcgtttagcactctccatagtgagtcctactaatttctccctttctgcttgtctcccttgtct

SEQ ID NO: 104269 - DNA, 122 bp, Homo sapiens
tcggtgatgatggggaaccctcagggagccgctgctgtgcccggcaggcactgtgccaagcgctggggctcacctggccttgttgagtcctcacagctgccctctaagatgtatcctggtac

SEQ ID NO: 104270 - DNA, 122 bp, Homo sapiens
agcgatccgcccacctcagcttcccatagtgctgggactgcaggtgtgagccaccaccctcggcttggcatcatgattatctacctgcatgtcctacaaggggactaggggcaactcaagcc

SEQ ID NO: 104271 - DNA, 122 bp, Homo sapiens
gaccctggtcttgctgtcccccgctggcctcctgcccaagcgactgcggccaggatgggccggaaggtgaccgtggccacctgcgcactcaaccagtgggccctggacttcgagggcaattt

SEQ ID NO: 104272 - DNA, 122 bp, Homo sapiens
gctcccggagctgggcggagcggggcgcagcccacgtggttcgggcgggaggcgccgggacgtggccagttgcccgcctgccccggagagccaggcgctaaccagccgctctgcgccccgcg

SEQ ID NO: 104273 - DNA, 122 bp, Homo sapiens
tgcagactctgtgttcatacttccttgaatccacaagttgagtactgtcccaacacatcccgatctgcagatgtggaagctcatcttcagctctcctggaccagccattttctgccaacctt

SEQ ID NO: 104274 - DNA, 122 bp, Homo sapiens
gcgccccgacgacggcgcttggctcccatgcgctccggtgcagcgccccgggcccggccccggccccctgccctggcactgccccccacgggccccgagtccctgacccacttccccttcag

SEQ ID NO: 104275 - DNA, 122 bp, Homo sapiens
tggaactctgttaaggcagagtcatagggaactcacacaccctgtaagctcagcgtgacccggccaccgggacatgcagctgggagtgctgagtggggaagcggggagggtgagggagggag

SEQ ID NO: 104276 - DNA, 122 bp, Homo sapiens
cccagtgttggaggtgaggaggcggggctggcagggctagtcggggcatctggaaatttccgaccccacgcttcgggcgtttccttatcaggttcaccgctccctgatctcgcgctgcactt

SEQ ID NO: 104277 - DNA, 122 bp, Homo sapiens
gggagctgggggagttccatgccttcattgtctcggacctgcgggagctccagggtcaggcgggccagtgcatcctgctgctgcggatccagaacccctggggccggcggtgctggcagggg

SEQ ID NO: 104278 - DNA, 122 bp, Homo sapiens
tcccatctccaacagaatctacttgggtggcaattctaagaaccccttccataataatgacgtggtcctctcacatggctgtatcttccaggttcacatcagctgtgggtgcagctgctttg

SEQ ID NO: 104279 - DNA, 122 bp, Homo sapiens
gctgctcagacccggagtctgctccatctgcagggtcgaggtctgggttgcgaccccgagcgcctctgcggcctgagcaggtcggggtggggcgttcccatgccggcggccgcggggcctgg

SEQ ID NO: 104280 - DNA, 122 bp, Homo sapiens
atcaatttggcagagaacgcctcacctccgactcatatctggggataagtcctacaaaagcgctcctttgagacctaggttcttttgttcccttttgtttccttcctgtagttgttactatc

SEQ ID NO: 104281 - DNA, 122 bp, Homo sapiens
aagccgcctgaggctcccaccttcccgacccgtggtctagtggcacctgcgaagtgcgcccgggtcaggaagctgtgctgtggcccgggctgggctctacacctgcacacaggctgcgcggt

SEQ ID NO: 104282 - DNA, 122 bp, Homo sapiens
gcactcctcagcgcttgggtggtcgatgggactgggtgccacggagcagggagcggcgctcgtcggggaggcttgggccaagcaggagcccacgagggtgggggaggctcaggcatggcagg

SEQ ID NO: 104283 - DNA, 122 bp, Homo sapiens
gtccccaatgtcctgcaagagaaaggaaaaaaaataaccatgagaagtcatttaaaacttcggttttctttcacagatgtttgttgaaaaaccaactacagactggctctcatgggagaaat

SEQ ID NO: 104284 - DNA, 122 bp, Homo sapiens
aagattagacccaggcggtccggctccccggggcctgtcagccacctgctctctgccggccgcctggctcagcacagttgggaaaatgaaaggtcctgtgtggagtccttggcgcggcgcaa

SEQ ID NO: 104285 - DNA, 122 bp, Homo sapiens
acccgctgagtccggcctcctccccccgcagggtctacatcaactattacgacatgaacgcggccaatgtgggctggaacaactccaccttcgcctaagagccgcagggacccacgctgtct

SEQ ID NO: 104286 - DNA, 122 bp, Homo sapiens
catgatccgcccgcctcggcctcccaaagttctgggattacaggcgtgagccaccgcgcccggccggaaaagagaattctttaaaggccgggaaaagacccagcaattccactcctaggaat

SEQ ID NO: 104287 - DNA, 122 bp, Homo sapiens
catgaggaatgggctccacacgttgtttgcaggaaggaattaggatggggatatcagacacgtggtcccctgcactggaggagaggctcgcgtttcatcctggtgtcatgattcctaaacgt

SEQ ID NO: 104288 - DNA, 122 bp, Homo sapiens
atcccgtgccgacccaggcggaacaggctctctaacctgatttgacctcagatcccgtgccgacccaggcggagctggttctctaatctgattcagcctcagatcccgtgccgacccaggcg

SEQ ID NO: 104289 - DNA, 122 bp, Homo sapiens
cgagggcgcggtgaggaggtgacggagggctggctatgggcagccggccggtgtgggggacgagcgccaggttctgtccaagcactgttgaagcaggaaaccccgacgactctcgtggaaga

SEQ ID NO: 104290 - DNA, 122 bp, Homo sapiens
gagcaagaaaaaaagcttcagccacatcttccctggagtttcctctctttccagagagctcggaatacgggagagagaagggtcgagggcgggggccgcggctcggtggcagcttgggcgag

SEQ ID NO: 104291 - DNA, 122 bp, Homo sapiens
tgttttgaatacaaaacagacatacagagagttaaatatcaaacatcacaaagcagtggccgtttgtcaaatgatgatggtggcccatatattgaaatctaaaaagagggacgatttctgtg

SEQ ID NO: 104292 - DNA, 122 bp, Homo sapiens
ctctcctcagccgctgtctccgggtggctgtgaagatccaaagagataatccccggagggcgaagttctttcatatgtaaggtgggcgcattgttattacttcccgaccacttaagagtcat

SEQ ID NO: 104293 - DNA, 122 bp, Homo sapiens
agggctaaatgtgaagctcagcaatgacccttgcttggcccctaaggtccactcttgcctcgactttgcacctttatttatatgtggctgtcctgattttccctttgtgttatatgactgta

SEQ ID NO: 104294 - DNA, 122 bp, Homo sapiens
ctcctctcctgccgcatgagattattttattaaaaaactcaaaggaagcagagtgtggagcggtatctgtcctgcgtgacgtctcacatcggagttggctcagaccctggctgtgcatccat

SEQ ID NO: 104295 - DNA, 122 bp, Homo sapiens
cccagcccaacttttttgcctggcatagaaagcagggaccggacaggtttcaaacggatccgagtccctagaaaagcaaaaacagactgggcggagtgtggggtggggggtggctagtggaa

SEQ ID NO: 104296 - DNA, 122 bp, Homo sapiens
acacctgaccatgttccaggcactgtgctagtgttaggaattttaaaaagacccaggcatcgcttttactatctcactctgttgcttaaaagcactcagggggggtaactccctcttccctc

SEQ ID NO: 104297 - DNA, 122 bp, Homo sapiens
aaagtcaggcttggctgacgtcagttgagtgggcgcggctagggcggttttctttcgcgtcgaccaaacgtgggccaatggaaaaccggaagcgtcctgtgagtgatgtaatgacagcccaa

SEQ ID NO: 104298 - DNA, 122 bp, Homo sapiens
atccattttccagtccagcttccctcaccacctagctgaagaacccggagcaagggagcccgtgttccagttttgcatctgcaaaatgagaaaacggatagcacggatctcatagggtggtc

SEQ ID NO: 104299 - DNA, 122 bp, Homo sapiens
aggaagccctgcctgaaaaggctgcaccttcggctgtcactctgtcctcattcggcccagcgtttggttacatcttctgtcactcagggcctgagggcggggggggggggggtcttaaacgt

SEQ ID NO: 104300 - DNA, 122 bp, Homo sapiens
gcagaagacaaacccagcacttttcttgctaactgaaaaggcaagcagcttttctctcctcgaattgcttgtctctggcaaattggcaacatttgctgcagtcaactggagagggcaaggct

SEQ ID NO: 104301 - DNA, 122 bp, Homo sapiens
ggaacttgcttggaagggaaatttgtccccacaagtctgcaagggactgtctcactccagcggatgccgcctgacagctcttatcaaggggccactgctgctgcctgctggggccccctccg

SEQ ID NO: 104302 - DNA, 122 bp, Homo sapiens
aagagccacttatccaggaatggacaggaggtagagagatggaggggtaggtgggtaacacgtataagaataaaaatgcaggtgacgtgctcacctcaggaccacccagggtggctccctgg

SEQ ID NO: 104303 - DNA, 122 bp, Homo sapiens
caaactcctaggctccagcagtcctcttacctcagcctcccaaagtgctgggattacaggcgtgagccaccgagccctgcctctcgggttttcaaaattcagcagtactcaggctggagttc

SEQ ID NO: 104304 - DNA, 122 bp, Homo sapiens
tgaacccaggaggcggagcttgcagtgagccaagatagcgccactgcagtccagcctgggcgaaagagcgcgactccgtctcaaaaaaagaaaaaaagaaaagaaaagaaaaattagctgga

SEQ ID NO: 104305 - DNA, 122 bp, Homo sapiens
tgcgaggaaggggatgtgcttagtttgtgttcatggttttaccagggtactaacggctggcgctgaaagctcttcccgggggactctgtttcggattaaacataagcactgtttcgtcactg

SEQ ID NO: 104306 - DNA, 122 bp, Homo sapiens
atctcatcatgtttcctcttcattgtgctggtttcatagcaaaggctacaagttatttgccgaccacagccctcagtcccatgttgagagggcactccacaaattgcatggatatttccatc

SEQ ID NO: 104307 - DNA, 122 bp, Homo sapiens
ccctcctcctccagctgccttttgaggtcctccatttgctgggtataagagagcttcccccgggtcagctgcgagattagcgcctccttttcctctagctgccgggccaactctcctggagg

SEQ ID NO: 104308 - DNA, 122 bp, Homo sapiens
ggccagaggggcaggcctgcgcacggggaggctgttgtggcagcggaacagagacgtgcacggtgagaggcctgggggccggctgtccagggctcccgatggcttttctcccagccagcagg

SEQ ID NO: 104309 - DNA, 122 bp, Homo sapiens
aaaccccttctcttctgctgtgcaccactatgtttttgcctctctcctggtcagttccaacgctggcaacagctcctgagagagttgaccaggcaactattaagtacaagtgggccgggtgc

SEQ ID NO: 104310 - DNA, 122 bp, Homo sapiens
cctgtcagtcatggaagtatcggccccccggggagggatggggcagagacaaacaagcgccgggtcacaattggccagggcgtctgccagtcaccacggagaccttcccggaggtttattcg

SEQ ID NO: 104311 - DNA, 122 bp, Homo sapiens
gacgctgattttcccatcagtggaacaaggaataaatattccccagccgtctaaaacaagcggtcctaaggcttttcgctctagaaatgggacttactttgcagacctccctttatctggga

SEQ ID NO: 104312 - DNA, 122 bp, Homo sapiens
ttcccaactacaggatggaatgcaattgtgctctctgaaaaaacagggaggctggtgggacggaaggaatggctacttcccaatcaccactttctagaaaaagtaaaggcaacctaatctaa

SEQ ID NO: 104313 - DNA, 122 bp, Homo sapiens
cacgttaggttaagtcccagagtccggaaccgctgcctgcggcttgacacagggttggtacgtagcgtctgtcctgggcgttggtccaccgggattgcgtttatctggcgaccccatggagt

SEQ ID NO: 104314 - DNA, 122 bp, Homo sapiens
cagcaagttcaagagtcgcaccgcagatgctgtaaaaacgaaagaagcccacagttgggacgaggattccagttttgcgtcaccgtcaaggcgggaaagttcccggctgtcggttggagggt

SEQ ID NO: 104315 - DNA, 122 bp, Homo sapiens
aatgccatgcaacccctggcaacatcacaaagtgctgccacatgttcccacaggcagagacgtcagaggcgagatgttcaggcaggatcctttcagaccagggcaccattggggctgccttg

SEQ ID NO: 104316 - DNA, 122 bp, Homo sapiens
gcgggacttcctttccatcattgataggcgccgggcagctgagctggtaggaggaccagacggggaggttcggtatgtctgaccaggacttatgttcctcgaaagggcggccaggaggatgc

SEQ ID NO: 104317 - DNA, 122 bp, Homo sapiens
gctcctcgcctccagatggcacttctagactggctttctcgggttgctgtgtccctagcacgggtaataaggcttttccatgatcattctgcctcatatctgtcctgggcctgagttcccag

SEQ ID NO: 104318 - DNA, 122 bp, Homo sapiens
ctccgcttcggggaggaggacgctgaggaggcgccgagccgcgcagcgctgcgggggaggcgcccgcgccgacgcggggcccatggccaggaccaccagccagctggtgagcgcgcggcggc

SEQ ID NO: 104319 - DNA, 122 bp, Homo sapiens
gccttcaaaagcccacttggcgatgggttacagtaagaggtacctccaggcccgggcatccgctggaaacaggggtgggtagggtcgtgtcatctaaaggcgcagcttcaaccagaagacta

SEQ ID NO: 104320 - DNA, 122 bp, Homo sapiens
ttggcccctggccggggagccacattcctgcccaggctgggattagaaacagaaacatttcggggggtggagggtggcgcgggaagacacactccctgcggctccgagagccaagaggaatc

SEQ ID NO: 104321 - DNA, 122 bp, Homo sapiens
ggagccccctccctgggctcagtggcagcgaaagcggtttccgtctgctcgggcctgggccgatgcctctgtctgcctgggcttgtcccccgagagggtgtgacccgagggcacgtgggtgg

SEQ ID NO: 104322 - DNA, 122 bp, Homo sapiens
agtgtgtaactgaggtgaaaacatttcatttgaaaagtagtagtacggatcagcaaactacgttaatttaaaagacacagcctgaagagagatgtcccaatctttggagttgagaaaagcaa

SEQ ID NO: 104323 - DNA, 122 bp, Homo sapiens
ggtcctcaggggccccgcggggtttgcctgcgtgggaaccaagcacaggtgatcagcaagcgaatccgcacgcggcgcgtcatcgtggacagaggggccggcttgccccgccccacgcagct

SEQ ID NO: 104324 - DNA, 122 bp, Homo sapiens
agagacacagaagcccacgtgcacacacacacgtgcaaagaaatgcgtgtgaaaaatgaacgcgcagtgtgatctgtagtctcattaatagtttggtttctgtgttgatttcctggtttcca

SEQ ID NO: 104325 - DNA, 122 bp, Homo sapiens
gaacgagcgatgccagatgcggaggaaccaggcagggcgcattctgtcagtggcgccaggcggtgtagctccagctctcagataacccaggctttgggagggcggggctcctgccggcctcc

SEQ ID NO: 104326 - DNA, 122 bp, Homo sapiens
tagcaaaggagactccgaagattgactaaggtgctttgcaggaaataagagggagagtggcgggaacatcaaaatggaaacgttccagctctaagaatctccaagcattgtaggaaagtcaa

SEQ ID NO: 104327 - DNA, 122 bp, Homo sapiens
tagactcatggatttttttactttggcttgtaatccaatactaccttgtttagtttacttcgttgctcaaatggttccatctttggcaactgggagctttcaggtggttcctgtgtctaaac

SEQ ID NO: 104328 - DNA, 122 bp, Homo sapiens
cccggacgcacgccgcaggctctgagatctccctccggctccttggcccgggactttctgcgccctgaagaaacaggcctagctcgccggcctcccgggccacccgcgccgccgcggccgcc

SEQ ID NO: 104329 - DNA, 122 bp, Homo sapiens
gagcaagcaaaaccaatgggtgccatcccacgaggggcctgcacagccatcccacacccccgaccagcacgcccgggacagccctccacaggccacgcatttatgggtgcggctggtgtgcc

SEQ ID NO: 104330 - DNA, 122 bp, Homo sapiens
aacgccccgcctggctgactaacttgagttccgcgctctggacaggaattatgcacagggcgtcgctgtggcactagaaaccccaaagtcacaagcgccccagatccgaccaggatgccgct

SEQ ID NO: 104331 - DNA, 122 bp, Homo sapiens
ctgtttttctttgccacatgtatgaaatagtgaaatgtgagcacgtcagataggagtggtcgcaatggtcacacccttggagcataacatgcctcctaaatacaggtttttagttactaatg

SEQ ID NO: 104332 - DNA, 122 bp, Homo sapiens
cttttgttattatgctatttaatgtatgtgtttctttacttgtgggttgaaaaggaattgcgtggatgaaatttttgagcttctcatgggtatactagatgtagtggtcttttttctcttgg

SEQ ID NO: 104333 - DNA, 122 bp, Homo sapiens
aggcgatggagccggtatggggagacgccctgctggagaagtggccgggtcccggccgtgcgtgggccggccctgcgccacctgggtgacctcagacacctgggccttggacggcccggctg

SEQ ID NO: 104334 - DNA, 122 bp, Homo sapiens
ccggcttgctgccttcccaggcctgcagtttgcccatccacgtcagggcctcagcctggccgaaagaaagaaatggtctgtgatccccccagcagcagcagcagcagcagcagcagcagcag

SEQ ID NO: 104335 - DNA, 122 bp, Homo sapiens
gcacctggcaaaatggcctcaccagaactcactgatgaatgcagtaaaaaatacctgcatcgtgtattgcaaaaacaatgtaacatttaatatcattgccgtttttattctcctgcttttat

SEQ ID NO: 104336 - DNA, 122 bp, Homo sapiens
ccacgttgagaccgggaacgccggaagaggcggggcaggggctgccgtgagcggaagcggcgccattcgtcttccgagcgctactgccagctgatgccgggagctaactaccgcgccggggc

SEQ ID NO: 104337 - DNA, 122 bp, Homo sapiens
agaagggctcaggaggcggggccagggtggggcgttgatatgtcgtagcacgtggccaggcggtgctcggactctgggaggcggagcttaggacgggccgacgtggggaggggcccagggtc

SEQ ID NO: 104338 - DNA, 122 bp, Homo sapiens
gggcattctttggctaatgtgctctggttcatctctttgagcagttcctttaaggcattgcggactgtggcatggttccactgctccgcaggcaagtcttccaactttgaacaactgcaaaa

SEQ ID NO: 104339 - DNA, 122 bp, Homo sapiens
gccatgtctgcccaccagcccgcctgtcgcttggcaccagtggagtcttcgcttgcaaagcgggattagacatcaaagccctaacacccagactgttcaattcattccaggtaggggcagtt

SEQ ID NO: 104340 - DNA, 122 bp, Homo sapiens
ggaggaggggctggaggccagcccgggtgggcgggagggagcggggtcgggcgtgttgggcgtctgatcctgggcggctcccctcagtgcttgtgcagcagggcacctgcgaggtgattgcg

SEQ ID NO: 104341 - DNA, 122 bp, Homo sapiens
tttattgttgggcagagagattggttcagaaacccacacgtgacccaatccaggctgatccgagcttgtccacagtttcggaagttactgcccttttccttggactcaccgaatgtggtggc

SEQ ID NO: 104342 - DNA, 122 bp, Homo sapiens
tgacaagaactaggactctatcaagtggcttgaaaacactgatttatatcatctaggtcacgggaggaattcaaagagcctccaactacaaccagtgagaaaaacagtggaggatcacaaaa

SEQ ID NO: 104343 - DNA, 122 bp, Homo sapiens
ccaaacaattccggaggcaggaggggtcccccaaacccacccggagagcgacctgggagccgccgccagaggccgggggagatgtggaactgctccccaccccgccaccccgccaccctgcc

SEQ ID NO: 104344 - DNA, 122 bp, Homo sapiens
ttgcttcttcatttgtttgttagaactagatgaaataatttataaaaagcatgtagcacacggtgctgggcatagtcgatgttggctctttttattcacttgggattctcagaggaacaatt

SEQ ID NO: 104345 - DNA, 122 bp, Homo sapiens
gcgctcgcggtcgccgctcctctcccgcctttgttctcgggtcgcccctctcgctggtggcgctccgagagagcagcggagccacctgcccaggccacgcttccccgagcatccgcagctgc

SEQ ID NO: 104346 - DNA, 122 bp, Homo sapiens
atctgccaaactagcgaagtcaggatcctcagccatgactcagcaaataacttttttcgacgtttccattactattatttagatataaggatgcttttgcctcagttctccagtttgcctgc

SEQ ID NO: 104347 - DNA, 122 bp, Homo sapiens
gctggcttcgccgccgccatggcaatgagacagacgccgctcacctgctctggccacacgcgacccgtggttgatttggccttcagtggcatcacgccttatgggtatttcttaatcagcgc

SEQ ID NO: 104348 - DNA, 122 bp, Homo sapiens
gagtctgagctaaatgaggcggcctcccgctttggcctgggctccccgctgccctcgccccgggcctcccctcggccatggacccccgaagatccctggagcctgtatggtccaagccccgg

SEQ ID NO: 104349 - DNA, 122 bp, Homo sapiens
ccggcggcccatgcggccccgtcacgtgatgcaaggatcgccggcctttccgccagagggcggcacagaactacaactcccagcaagctcccaaggcggccctccgcgcaatgccgctaccg

SEQ ID NO: 104350 - DNA, 122 bp, Homo sapiens
tttgtgacatggggtgagtccaagcttcaatgtttttatagctaaaaataaagatacaaacggcagccttcagtgctgactaaacaggataacatggcaaaagagcacatttatgaagcatt

SEQ ID NO: 104351 - DNA, 122 bp, Homo sapiens
gagccgcttctggcgcggggcattgtggggggcgtagtctctttctcaggcggtccttcgcggcgtccccggggcccactcccgagcgcaggcgggcagccaggcgggcggcgcggcgcggg

SEQ ID NO: 104352 - DNA, 122 bp, Homo sapiens
gaagcctcagtcggcgtacgaacccagagtctcctcctaatctgctgacaagtatgaacccgccgctgttcgaacccagcgtcgccgcagccccggccaagtaaaagaaagaggtggctgcc

SEQ ID NO: 104353 - DNA, 122 bp, Homo sapiens
taggtcctgttccctagagcagaccctgagacagaaagtcccaggcctgtgatttaatgtcgtgctccctgtgtggggcgggggggagtggggggagagggaaggaaaccaggtaaggattc

SEQ ID NO: 104354 - DNA, 122 bp, Homo sapiens
gtggtttagcggagggagagtagttggagcccaagctgagggactcggcttcagccttctcgaactccacagcccgaccgcgttctccgctctcggcgctgtggttctctctcggacaccgt

SEQ ID NO: 104355 - DNA, 122 bp, Homo sapiens
atcttttcaatggcagaaagataatattcaccccaggccaggaagtaccattccattttgcgggtgagaagagcaaggcctatacgtagaatgtaacaggggcttttcgtcagctgtactga

SEQ ID NO: 104356 - DNA, 122 bp, Homo sapiens
aattcattcttctgaggaagtaagaattgaggttgctgcagacccatacggatttgccgccggtaacaatatgtggcagctaaaaaagtttatctcaaagaagtaaaaagtagaacggagga

SEQ ID NO: 104357 - DNA, 122 bp, Homo sapiens
aggaagagaattcgttttggcttgctccagcgctggaagaacactgagcaccacactctccgcaaaggcctaacacagcaaaggcgactgtcaaatcgatcccttttgggtctgctgtaccc

SEQ ID NO: 104358 - DNA, 122 bp, Homo sapiens
ttagatgtaagggcttaatttcatcctatgaccttgtagtgtggcattttaggactgcagcgggggcgggtgaggggcagtgcagtggagagctggccttgtggtcatggatatgactcatg

SEQ ID NO: 104359 - DNA, 122 bp, Homo sapiens
aattgcattgggaagatgcaatatttatgaaaggggagaggggaatgtcactgttcatctcggtgctgcagtaaaagtcccaggaaagacggtgctggccgcccaggcctggcggtgggcct

SEQ ID NO: 104360 - DNA, 122 bp, Homo sapiens
attaaggatgattgtgaaacgtcgacacgctggttgacattaaggatgattgtgaaacctcgacacggtggttgagataaaggatgatggtgaaacctcgacacggtggttgagattaagga

SEQ ID NO: 104361 - DNA, 122 bp, Homo sapiens
attcatgcacttgaagcagctgcgctccgtgtactgttcccagaatgtaaataagtactgcgttaaaaattaatcaggcatttgctcaaatacctaatggtcaattcagacatttcaggctt

SEQ ID NO: 104362 - DNA, 122 bp, Homo sapiens
acaaacctgcacatcctctacatgtaccccagaacttcaaataaaagttggacggccaggcgtggtggctcacgcctgtaatcccagcactttgggaagccgaggcgtgcagatcacctaag

SEQ ID NO: 104363 - DNA, 122 bp, Homo sapiens
taggtttttcactccaactcaggtatcttttcccattccctcggggttgtgaggtgggagcgttgtgtcgcagctggatctccagatgcgccgtgtcacatttgtccccccaaaaagcatat

SEQ ID NO: 104364 - DNA, 122 bp, Homo sapiens
atcaaaggctagtagagaacataaatctgtaattccaataaggagtcttttcattgtgcacgtgacaaatatgccacgacttcatctaagttatcatcatttctcatctggactaccacaac

SEQ ID NO: 104365 - DNA, 122 bp, Homo sapiens
gcctctgttgaccaaggacatccaggcggtcatactccaggaagcagtagactctgacgtcgctctccctccacatcagctttcttccaacacgcccagccattggcttccaacccctctgc

SEQ ID NO: 104366 - DNA, 122 bp, Homo sapiens
ccctctccgcagcccgccggtgtgtgtcctgaacttcagtcctgctggacttcatcctcccggagtcctgtgtgacttctaagggagaggaagccccaccatctcagggcggtgtgggggtt

SEQ ID NO: 104367 - DNA, 122 bp, Homo sapiens
cccagcagcggccgtgggcgtcacagcaggagcctgctcacagggccgtcgcttcctctccgctgccccatgctgctggccccagcacttggtttggtggctcggccagcgggtggcctgag

SEQ ID NO: 104368 - DNA, 122 bp, Homo sapiens
aagtgtctgtaattaattaaccaactgagatccagttcaggggtgaaagttcttcaggtacgaggagggcattgttgtcagtctggaccgagcccgcagagcccctcctcggcgtcctggtc

SEQ ID NO: 104369 - DNA, 122 bp, Homo sapiens
tcctggcggaaacagcttctccccgtcccgcccctcagtctgctcttcacacggataccacgaatgccacggtggcctcctgaagacggagtctggtctcacattcctccagcttcctgtga

SEQ ID NO: 104370 - DNA, 122 bp, Homo sapiens
ttgtccggctcttaacctagattgcactcagctagaattacattcaggagtgaagcacttcgcagatacaaaagcagtctcacctacttttgtgcctcagaattggaaggaactacgaactg

SEQ ID NO: 104371 - DNA, 122 bp, Homo sapiens
gcgcggcgtgggccgcggagttgtgaatggtgcgtcttgtttgccggagttggaggcgggcgggcgcgcgaggaggaggggtggggccggcgggggcggggtgggcggtgagaggaagtggc

SEQ ID NO: 104372 - DNA, 122 bp, Homo sapiens
gagaaattatactgcatgaaaaagctatggtgaaataccgtagtatatacagatgaataacgtgaagtaggccacactgcaaatagccttgtaaactaagacttggagtgtaaatgccatta

SEQ ID NO: 104373 - DNA, 122 bp, Homo sapiens
tagcactttctctccagggaatgttctctacattcaagggaaaaactaccctaaactatacgttatgaattatccaggacaacttcttaaaactattgttttatcttactactgccttacct

SEQ ID NO: 104374 - DNA, 122 bp, Homo sapiens
tacacaatagcctttgtctctttcaaagctggataacacaagagctctgcacatctgtatcgaaggtacccgtggttctgcacctaaagctctcactcctgctccatatggtttgctctaat

SEQ ID NO: 104375 - DNA, 122 bp, Homo sapiens
cgttgtgggcgtcgcgctcttctgcacagttggagcccagtgcgggggtgtcggggttctcggcctgtgatctgagcggctgagaggccgccggcgaggcggggtctgaggactccagctgc

SEQ ID NO: 104376 - DNA, 122 bp, Homo sapiens
ctaccatagactttcctattttggattagaccaaccccaagcacatgaactaagactatccgtagctcttggattagtcatgccattgaagaggaggagaagacgccactgggctgtgcctg

SEQ ID NO: 104377 - DNA, 122 bp, Homo sapiens
ctcctaaccgggtatgtggctcagggaggctgtgtgggggctgggctggcccgcaaggggcgggcggggtggaggtggggcctgtgagtccggtggacgggatgcagcccaggttggctgag

SEQ ID NO: 104378 - DNA, 122 bp, Homo sapiens
aagcctcaaagaaaaatagtagttggcaggtcaaatggccatgaggttggaagtcaaatacgaaactcggctgaagtgatgttagaagtttgacaagcaaaaacagtccgtgaagataagag

SEQ ID NO: 104379 - DNA, 122 bp, Homo sapiens
ctcagtttccccatcgggacaacgcagaaggtaacgggccgtccaggaggactaagggcgcgaagcctccgccccgagactgagcttctgcacgcctccgtctccagggtcctctgcaggcc

SEQ ID NO: 104380 - DNA, 122 bp, Homo sapiens
ggggagagtcggttattggcagaggagggagggactagacagcaggcgtattgcattccacgaagctgatttaataagtgctgtctgtgatgtttggcaagcctggtttatatccatctaca

SEQ ID NO: 104381 - DNA, 122 bp, Homo sapiens
ttgcctcggagggacctgagtgggctgtggaggtcgcctccagtggcatcctcgcaaaggcggttaaattattggagagggctgcagggtcccagggtctggggaatagggaccaaagctgg

SEQ ID NO: 104382 - DNA, 122 bp, Homo sapiens
gcaaaagaacctagtgctcttcatcatagagcgaaatctgcacctagcacaggagccagccgtgaatgaggactggcaggagctataggaactgcaggagggatgccattgcaaggtagtga

SEQ ID NO: 104383 - DNA, 122 bp, Homo sapiens
gtgaagaactagtcgactctaactccctcagggtggccagggaattgcatttggttctcccgcgggagtcgcgcaggcgggcggccagggggagtgggcgccgcccggcagcgccccgcgcc

SEQ ID NO: 104384 - DNA, 122 bp, Homo sapiens
ctgcgcagacgcagcgtgctgtgcccagaactcttctgttcccaggagaatcaggggagtcggcgccggaaggggcgggtccgagctgagatttccagagccatgggagccggaagtccaag

SEQ ID NO: 104385 - DNA, 122 bp, Homo sapiens
ctttgaaatccagggggttgtgaggcctcacccctcaccccgcctgagcttggagcttggcgtggaggagtgctgcttcggtctacgtgtgtacacggcactccatgtgcctgtggttgtgc

SEQ ID NO: 104386 - DNA, 122 bp, Homo sapiens
cagatgaccattatgagccaggcttgtgccgagcgatgtaacatcatgaggctggtggaccgacggtgggctggggttgctaaaggagtgggcacacagagaattattggccgtgttcatct

SEQ ID NO: 104387 - DNA, 122 bp, Homo sapiens
gacctggttgtgggcctgacctgaccctgctcagggtggcctcaggtgggccgttcacctcgtcagcctcagcttaccctctgactacagtgacctcagacaaaatacgcttcctggccctg

SEQ ID NO: 104388 - DNA, 122 bp, Homo sapiens
gaggccttaggaaagtgttgtcacggaggatggagcggggacctctgccagtgctgctgccgtgaggtcacctgagataaggaccaagactcgtctcatggctctggcagcgtggaattcat

SEQ ID NO: 104389 - DNA, 122 bp, Homo sapiens
agcaggcgcagaatgagatgcacgagcgccaccgccgccgccgcacaccccccgcccccccggggtggaagccagaacctgcgtccccagctcccccaggcccgcccacagggcgcctggct

SEQ ID NO: 104390 - DNA, 122 bp, Homo sapiens
gccctgctgcctctggcctggactgggagtgtgctgcaaggtctgggtgtccagggccatcgactctctggacagcaccgttcagtgtgtgcttccctcacatctgcgggggctactcagga

SEQ ID NO: 104391 - DNA, 122 bp, Homo sapiens
ggagcagcacccagtcggcgagaagtagcagtactgtccccagccatgcgagagaagctccggggaggcagcggcacccgcggggagcgggacacctagagctagccattggcactcggacg

SEQ ID NO: 104392 - DNA, 122 bp, Homo sapiens
ccaggctggcagacctcagaggtgggcttcctgcttctcctctcatcctgggtcctggggcggagaagggcagaggccggtgaacggcgccccactccccgcggcgttgtgcaaggcagcgg

SEQ ID NO: 104393 - DNA, 122 bp, Homo sapiens
gaggctcattaggaccctgaccccacactggggtttacacccctaaaagcaggtgtgtcccgtggcaactgagtgggtgcgtgaaaaggggggatcatcaattaccagctggagcaatccga

SEQ ID NO: 104394 - DNA, 122 bp, Homo sapiens
ggtgactggcacgggcctagtgaccgggatggccttggtgactggcatgggtctgccgaccgagactggcttgctgatgccaatgggtttgctgacacccacaggtttgccaatagtgacag

SEQ ID NO: 104395 - DNA, 122 bp, Homo sapiens
gggccgctttgacagcgcggtcaccggccccaatggcgcctgcctccccgccttctgcgacgccgacaggccagacgcctacaccgccctggtcaccgccaccctgggcggcgaggagctgg

SEQ ID NO: 104396 - DNA, 122 bp, Homo sapiens
cccgccccggctcgggcttcccgcagacccgcccccggcccgccccagcccgcccacgggcgctaggctccccgcagacccgccccagacccccagtaaacacgccccccctttcaccccgc

SEQ ID NO: 104397 - DNA, 122 bp, Homo sapiens
gggacttgggaaatgtgtcttgatttgcacggaactgtgctctgtgctgtcagccttcaccgtggtaactgaaactcagttctctgatgtaaagcctggcagtcccggcctgcttgggggca

SEQ ID NO: 104398 - DNA, 122 bp, Homo sapiens
gggagaggagaaagacgaaagataaagcccctctccacccacttacacacagcctgaggacgtgtcccaaagctcattctaaaggcatgaagccacagcctactgctccaatggaccgatgc

SEQ ID NO: 104399 - DNA, 122 bp, Homo sapiens
atattccctggagtgcctttctctctgcttgggaaatctctcagctgagacttgcatgaccggaaggaagcagtcacaagaacatcggggagaaaaagagttccaggcagagggaacagcca

SEQ ID NO: 104400 - DNA, 122 bp, Homo sapiens
caatcccccgcctcggctggcaacgggcgtccctccactccccgagtccccggcagccgccgccaccccagcgcgccccgatctggccccctgccccgcgaagatggctgccgtacgccggg

SEQ ID NO: 104401 - DNA, 122 bp, Homo sapiens
gcggttctcactggttctttccgggcagcgagcgagaagaatccgttgagccggggccggcgcccgcggggcaactgcaccgcgggggagcccagtcgccccgctcacccgtgagggccctt

SEQ ID NO: 104402 - DNA, 122 bp, Homo sapiens
ggccctagggctggggagggggctgcctggactcggggaggactggttccggccaaacagcgcctcgagcttgatcccctcccccgttttagtgttggagagcgcaggaaaaggctcaggac

SEQ ID NO: 104403 - DNA, 122 bp, Homo sapiens
ggcttccagggactggattctgggggaggctgcccctgctgccctggacccacatccccacggctgcgcctcccaggcaggcagacccagggtgtgtggctgcccctcctgctgcaggtgcc

SEQ ID NO: 104404 - DNA, 122 bp, Homo sapiens
aggtccctgggcccctactcaatttcttgaatgggccatagtagcaagctggagtggtcccgttgtatagtgcaaaatgtggacacaggtaattccacctgaaatgtacctctccaacactt

SEQ ID NO: 104405 - DNA, 122 bp, Homo sapiens
cacatttactttggtctgctttggtgactgtgcagcataaaggtgaagactcctgcatgccgaggtcctgagtgaaggtgatctaaactgcaactacccagctggcctgcaatggtcagaga

SEQ ID NO: 104406 - DNA, 122 bp, Homo sapiens
gctgtttgttattaaactgcccagagaaagggcttcgagtaaaaacaccaactttccagtcggggcggcgcaggtccccgggccctggaaagttctgggacggccgaggtctccccggacac

SEQ ID NO: 104407 - DNA, 122 bp, Homo sapiens
taacgtccggaatgtcccgacccccggctcaatctttggtgcaaagcctgagtgggcaggcgggagaccaggcggtgccggtggagcaggctacttcagcagcgcgaggctcggaagatccc

SEQ ID NO: 104408 - DNA, 122 bp, Homo sapiens
cagggctgagaggcgtgaggacctggagcgtgaacgcgtggggaaggcgcagagacctggcgcaggtgttgcggagccttctgagactggcctaagctgcagaattgatcgagcatctggag

SEQ ID NO: 104409 - DNA, 122 bp, Homo sapiens
ccgcgcgggctgcgcgggcagtggtgggaaggctggcgcgaggcgtgaggtggcgtgaggcgaagctggaatctgcctctgtcacgggggctggtgcctcacgggtttgtgtcctagacagg

SEQ ID NO: 104410 - DNA, 122 bp, Homo sapiens
gggcctccgggtgtgagatcctcccccactgcagtgccccacccgctccccacagaagcccggagagtggctctgtcaccagaggtgtcatttcccagctgtctgtgggaggtgagtgagca

SEQ ID NO: 104411 - DNA, 122 bp, Homo sapiens
caggcccctggagtaagtgaaaggaggaggtagaagaagaggaaggcctctggttgggggcggggtagtgacaagggcatggttttcattcccccggtcctaacccacgccctggggaaaca

SEQ ID NO: 104412 - DNA, 122 bp, Homo sapiens
agctgtctgagagcagggtgatgtagagccttacctggtttgatcactttgccattggtgcgggacctgggcactgactgcctgtcaggaacaggcattggaagcatttttaatggccacct

SEQ ID NO: 104413 - DNA, 122 bp, Homo sapiens
tccgacggtcccgtggcccctcagcaggagcgtcggctgctttgactgtggctgtcgttccgactccgacggtcccgtgggctctcagcaggagcgtcggctggtttgaccgtggctgtcgt

SEQ ID NO: 104414 - DNA, 122 bp, Homo sapiens
tttccttgtgtgctgattgggggccgctagcctgcggctgtgcgcacggaggctggtgtgcgcctgctgtgggctcccagcctctcctcccggcgcgggaggaccaggctaagcctggaggg

SEQ ID NO: 104415 - DNA, 122 bp, Homo sapiens
acttgactgatggaaaactaaggctcagtcacctgagtaagcgtggtgtcgacctcagagcgggcaatcacccctcgttttaaaaccaaagtttccctcgcagtcgatttggaccaagacta

SEQ ID NO: 104416 - DNA, 122 bp, Homo sapiens
gctactaggaaaaagttctgggatagttcgggctcccaaaaggcagcttcctgggaagctcgtaggttttagcaccccaatccataggtttctgcagtgcctgcttcttccccgcaatatga

SEQ ID NO: 104417 - DNA, 122 bp, Homo sapiens
gcgaaacaacgtgacgtcattaacgcgggacctcaccagatgaggacccaaaacttggcccgcccacctccgcctaagccaaaaaccgccgctttcaaatcgccaatcaaattcttccttgg

SEQ ID NO: 104418 - DNA, 122 bp, Homo sapiens
gctgctggttggggagggcatgggtggggtggggctgggaggggaggctgctgggggcggcgcgtccagctctgggccagggggtccaaagtgctcagcccccggggcacagcaggacgttt

SEQ ID NO: 104419 - DNA, 122 bp, Homo sapiens
cttcaagttatttctttataactctaaagaaatattgggttttggttacctcaagcatggcgcttggccagtggcttcagtagagaaaaggatggttgtggtatttgtcagaagagaacttg

SEQ ID NO: 104420 - DNA, 122 bp, Homo sapiens
tgggagttctcgtgcagcactcagagctcagcgtgggcgagggcgtcacccttcagggggcgtccatggggccttggagaagggaggctccggggcgccacagcagtctaccgggagaggcc

SEQ ID NO: 104421 - DNA, 122 bp, Homo sapiens
gggccagccgagccgacccgggcttctgggggaccgcgggggccgtgagcactcagagggcgcatcccaggcccctccggggacccggccagcctgaagatgccgacgaacggcctgcacca

SEQ ID NO: 104422 - DNA, 122 bp, Homo sapiens
agggcaggcagctgcccccactcaacagttcgtaccagtcccacgccacagcggaaggcccgggcccaccacactgctcgggatggttgtcttagggccatgtctggtctgagcccatcccc

SEQ ID NO: 104423 - DNA, 122 bp, Homo sapiens
cttgaacttgtggacaataaaattactacaaagaaacgaagtaaaagcagatccaaagaacggactagacataggtctgataaaaagaaaagtaaggggggtattgaaatcgttaaagagaa

SEQ ID NO: 104424 - DNA, 122 bp, Homo sapiens
taatgtcccatcactgagcctcagtttcttcctttgcagattgttgtcatgaatcccactcgtcacagtggttgtggggtcagtggtgcctgggacattgggaggggctcatttgtgcttga

SEQ ID NO: 104425 - DNA, 122 bp, Homo sapiens
gttggccgaccgagtgccggtcataagccccccccggtggggggcagctggtgtgcggatcgcggcgggagagaggcgcggtaggaacgggtccccggagccgtgaaccgcgggtacaggtg

SEQ ID NO: 104426 - DNA, 122 bp, Homo sapiens
aaacagtttgttgacatggatatacagaattgttttttaaagaacacatttagtctgaagcgtagtagagcaagagcatattgtattcatctttgggcaaggcatggcctggtggccataat

SEQ ID NO: 104427 - DNA, 122 bp, Homo sapiens
cgcagtccggagcgcagggcatggtctttattaagatggggacgggcagcgcgctcagggcgcatccaacaccagcagcttgtgcatgtacgagttcagccagtggcggcgctcgagggcgg

SEQ ID NO: 104428 - DNA, 122 bp, Homo sapiens
gggacaggggaaggtggagaggggagggcaggccccgccagggggaggagccgcctcccgcgtccagctgtcggggctccctcccgtcgcggctccgctataaaacccaggccggcaggatc

SEQ ID NO: 104429 - DNA, 122 bp, Homo sapiens
tatttatttggaaaaaactggagaactgagactgctggtaccagacggggacggcaggcccggccgggtgcagtgttttggcctggagcagggcggcctgttcgtggaggccacgccgcagc

SEQ ID NO: 104430 - DNA, 122 bp, Homo sapiens
tgttcattcccttcttgccccggtcaagttatcaggaatttgaggagagtgcttgtcttccgagaaattctcagacttcagggcatgcgttggggaaggatgtggtcaagatgtctgtgcct

SEQ ID NO: 104431 - DNA, 122 bp, Homo sapiens
cacaaaaaacttcaagtgcctcttttctgtgacatttctttgtgttcaaatcatggagcacgccaggtgttagtggtgactttcttgaagctagcacgagccaggaataagtcaagtaggaa

SEQ ID NO: 104432 - DNA, 122 bp, Homo sapiens
ctgggtccctgggatgcgaggggagggagtcacccatgcctttatgaaagatgcttctagcgtcccgcacatggtctgcacctcctgatgctaggtcaggactgaattgtataaaaggcaga

SEQ ID NO: 104433 - DNA, 122 bp, Homo sapiens
ccacccacaacacagccactccctccccatccccagaaagggccccggtcacatcgccagcggccacctgctccatccccattgggacttctcagtcctggcttcactgagcactgggccac

SEQ ID NO: 104434 - DNA, 122 bp, Homo sapiens
acttacaaagctcagccacccgcacgcctcccttcatcagcaccaccactctaaggaatgcggtccctttgacaggcgaaaaactgaagttggaaaagacaaagtgatttgttcaaaattga

SEQ ID NO: 104435 - DNA, 122 bp, Homo sapiens
tccctgccagcagctgtcctccctggtgcaggtggcctggccagcccactggattggggacgggccaggctgggccaggtcgggggctcagtctgggaggtaataaaagcagaccgacacgc

SEQ ID NO: 104436 - DNA, 122 bp, Homo sapiens
attgagtgtctttgcatatgcaagacgttatgctcattcaggattggggcatcaatcactcgagcataatagactttgtcagcctcataaattctgggatttaaagagttaaaggatcactg

SEQ ID NO: 104437 - DNA, 122 bp, Homo sapiens
gctcgctgtgtgccaagagagggctggcaggtaccagcagctttcactttcattaggaaccgggacgaataatccaactgagctgcctctgcaccagaactgctgggacgtgaagactctcc

SEQ ID NO: 104438 - DNA, 122 bp, Homo sapiens
cctgcctaggagctggctctcaaaatgagattcctgcctgctgtcattcctcctggagttcgctgcctcagtttccctaatgactctggtggtgataacttagaaaggtcaagtgactgtgc

SEQ ID NO: 104439 - DNA, 122 bp, Homo sapiens
cagtgacagcatcccggcctctgtttactcacctgtctccccaggaccaggctgtcttcccggggcagcccaggtgggcaaagacatcacctgattcttactcctgggtgtgtttggggcag

SEQ ID NO: 104440 - DNA, 122 bp, Homo sapiens
gactcgtttcctctctctccatcttcctctctttcttctctcccctcatctcccacccaccgccatggtggaaaatgactgtggtcaagaagattgaacatttgagcaagaccagatgcctt

SEQ ID NO: 104441 - DNA, 122 bp, Homo sapiens
gggagttgtaggcggtaactgctgcaaagccgaagccggcgcgcaaaccggctcccgaggcggcagctctgctgcaaccttttaatgggggaagagaggagactcagctacagatcttaaat

SEQ ID NO: 104442 - DNA, 122 bp, Homo sapiens
ggtccgggatggaatggttgaatacagggcgtgtgctttcttctcaaccctcttgcagtccgtctgctaaccgtcaatgttcactgtctcctagggggacttcctggaggaggccaactttg

SEQ ID NO: 104443 - DNA, 122 bp, Homo sapiens
caacagcaaaatgttaacagttaaacatcgagaaatttcaggaggatctttcagaagatgcgtttccaattttgagggggcgtcagctcttcaccggagacccaaatacaacaaatcaagtc

SEQ ID NO: 104444 - DNA, 122 bp, Homo sapiens
caagacatagccccgctgggtatggtggttcacactcctaatcccagcattctgggaggccgaggtgggaggatctcttgagcccaggagtttgagacaagcctagacagcatagttagacc

SEQ ID NO: 104445 - DNA, 122 bp, Homo sapiens
gcctggaaccagatgcaccccagttgagtcaacaccttgaccacagccttatgagagacccggagtcaaccaagccacacccagatcccatggccatggaaatcatgagataataaatgttg

SEQ ID NO: 104446 - DNA, 122 bp, Homo sapiens
atgctttcgctgccattcctggctttaccaccaggctgctggttgggctatgtgatcagacgggtccttcctcgctgaaatgtgctgggccgtttgtgggcagcctcaggtccagcagagca

SEQ ID NO: 104447 - DNA, 122 bp, Homo sapiens
cctgaacaatccgggaaatactcggcgctgcgtgcagagctgcccagggagctccagacacggcgccgcagggtccgggcgggacgccggggtcccggctgcgggcccagccgccatcttac

SEQ ID NO: 104448 - DNA, 122 bp, Homo sapiens
acgggtcggctaccgtgcttgccatctctcccagctgctcctgatttcctgagctggatgcggggagctgctgctcttcctctcagcacagctgaggttgaccttgacctcagttcaacctt

SEQ ID NO: 104449 - DNA, 122 bp, Homo sapiens
gcaagacctcccaggctcacaggacccgggggaacgaaacacgcgtgctgtctgcagagtcgctttgaaattcctgccgcgtttttgcaacaggcaaagcccaagtcacgctactacagacc

SEQ ID NO: 104450 - DNA, 122 bp, Homo sapiens
ttgggactacaggcctgtgccaccacactcagctaatttttcaaaaacttttcagagagacgacttgctatattgtccaggctggtctcaaactcctggcctcaagcaatcctcaagcctcc

SEQ ID NO: 104451 - DNA, 122 bp, Homo sapiens
tgcccgtcacgctactgctaggtcgttgccaaggtgattgaggaatggcgtttattgcgtcgctgctcaggcaacgcaaactacattatccagaaggaccctcgcggtgcctcagggctggc

SEQ ID NO: 104452 - DNA, 122 bp, Homo sapiens
caacgcgccttaaaccaagccccacaaagaagtcacttcggcgatgtaaacgcgactttgcggcttcctgggctgctaaggtgaaggacgcccgccctccccagaacttgagagcttattgg

SEQ ID NO: 104453 - DNA, 122 bp, Homo sapiens
cacagccacatgaccacggagaggagttaaaacttccctcctgcttggtgcctccaagtgcggtgcagtatttttagggatgtccctggtcagttttgtgttcaggcaggtttcgtgttctt

SEQ ID NO: 104454 - DNA, 122 bp, Homo sapiens
agggtcgaatcgcccgagctgtctgggccgtgcttcccttcagctggccggaagaggcgtcgggggctgctccctaacagctccctgggcaacggatcagagaacactagcccggcccggag

SEQ ID NO: 104455 - DNA, 122 bp, Homo sapiens
tggaggagctgtcagaggaggaccgcttcatgctatgcttcagccgcatcccgcgcctgccggagcgcatgaccacactcaccttcctgggcaacttcccggacacagcccagctgctcatg

SEQ ID NO: 104456 - DNA, 122 bp, Homo sapiens
ttgtttcattggggttctgaattagtgttcccaaacatcaaaatctgttgcaaatatccccgtgtcagtgctcatctgtaatgagattgtataggtgacatctttgaaaatatcttttcaca

SEQ ID NO: 104457 - DNA, 122 bp, Homo sapiens
atgactctttggctatttggctacactaggtccttcctatctttatataaattttagaatcggcatgttaatttctacaaaacagccagataggattttttttaacctttcagtcaacttta

SEQ ID NO: 104458 - DNA, 122 bp, Homo sapiens
ttaattggcttgtgcctcttattttactctaatgcaatgaataaagacagtcccagccttcgccctaagggagcaggagcacctgcgatgccccgttcccaagtcctcagggcgaatccgcc

SEQ ID NO: 104459 - DNA, 122 bp, Homo sapiens
cgcccgccgccgccgccgcctccgccgctgccgccgccgccaaggagagaaccctgccatcgcgcctggcccggcccagcccagcccctaggcaacctgcgcccgccagtgcaacagagtgc

SEQ ID NO: 104460 - DNA, 122 bp, Homo sapiens
actggtgcgggacgacctgctcccgagggggtccgcaggccacacccagagaaactggggcgcctccagtcaccgccgcggtccgccccgccggaggctttgaccccctgaatcagcgtcgg

SEQ ID NO: 104461 - DNA, 122 bp, Homo sapiens
tgaaggagatggtaggaggctgctgcgtatgttcggacgagaggggctgggccgagaacccgctggtctactgcgatgggcacgcgtgcagcgtggtcgtccaccaaggtacgggggtggcc

SEQ ID NO: 104462 - DNA, 122 bp, Homo sapiens
aaccataataacatcagagaacccagcgggtgtctgaggggagcgtttatttcaagctaccgatgggacaaacactcccaggcttcccaggtgccactgtccggggcggcatcctcacttcc

SEQ ID NO: 104463 - DNA, 122 bp, Homo sapiens
gggggcgtgccgagcagcccagagtgtgccgggagcgcgggggaggggaggcgccgggcacgtcaatgtcacggcttaatatttatccctatatcattgtgttgcgccgctaccctccccgc

SEQ ID NO: 104464 - DNA, 122 bp, Homo sapiens
acgcggtaaaaatattgcttcggtgggtgacgcggtacagctgcccaagggcgttcgtaacgggaatgccgaagcgtgggaaaaagggagcggtggcggaagacggggatgagctcaggaca

SEQ ID NO: 104465 - DNA, 122 bp, Homo sapiens
acaccgggaagtgggtttctacagcccgggtcatctgggccgcgtgtgatcattagctgtcgcgggctgcccggaggaggatggcctgtcctttctgggcgtctccagatcagcctcagtgt

SEQ ID NO: 104466 - DNA, 122 bp, Homo sapiens
cttggtatcacaagttccttatgtgacccatcctgggcctcaacttactcatcctgggaacgggagacgattcacagaagaaagcatgcaagagcagcgtccaggctgaaagaactttggcc

SEQ ID NO: 104467 - DNA, 122 bp, Homo sapiens
gccctgggtcctggggcagggcagggccttccagcagcttccttccttcctttcttgggacggaagcctagctgggtggggggcgccaggctggagccttcgcaggggagcgggctcagtca

SEQ ID NO: 104468 - DNA, 122 bp, Homo sapiens
ctcacacccgcctggcaaccacctgacacgctgatgctggcggctgcaggaaacgtgcggcgccccgccgctcttccccgaaacctgccccctttccgcgggtgccccggcctgcgcctcgc

SEQ ID NO: 104469 - DNA, 122 bp, Homo sapiens
ggtccctgagtcaggaaccaaatctggccccacgttccccaaggcgcggaggctgggatccgtgattggggttgaccccctcctccccggcctcgggctattttccgcaggaggccgctgca

SEQ ID NO: 104470 - DNA, 122 bp, Homo sapiens
ggagcaccctatcccctattatcggcatctgatcttcctagttcggatccccggaacacacgccttctccagcctgcaatctacacacgtggggaagcgcgtccaagtggtgccaggaggca

SEQ ID NO: 104471 - DNA, 122 bp, Homo sapiens
ctgccgctgctcagcgggggcctgcacctgctgctcaagtgaggccccggcggctcagggcggggctggccccacccccatgaccactgccctggaggtggcggcctgctgctgttatcttt

SEQ ID NO: 104472 - DNA, 122 bp, Homo sapiens
aggcaggtgatctcctgaggtcgggagttcgagaccagctggaccaacatggagaaacctcgtctctaaatacaaaattagccgggcatggtggtacatgcctgtaatcccagctactcggg

SEQ ID NO: 104473 - DNA, 122 bp, Homo sapiens
atccgtgtgtgtgtgtgtgtgtgtgtgtgtgtgtgtgtgtgtgtgtgtgtgtgtgtgtagcgtggctgggtcagactggattccttgttgagcatctagctaaaagaggttaagaggaggct

SEQ ID NO: 104474 - DNA, 122 bp, Homo sapiens
gtggagccctgcgctgtgtgcgtgcgttttaaagcgtgctggaaacgtctacaatggcagcgcagccagcagccacgcggccttggccacccccgagctcacggccgcagctcggcccgggc

SEQ ID NO: 104475 - DNA, 122 bp, Homo sapiens
acttggtgaaactttgcaggcgccggctgcgaaatggatttaatccgaggcgtcttgctccggctcctgctcctggcttccagcctcggacccggcgcggtgtcgctccgagcggccatccg

SEQ ID NO: 104476 - DNA, 122 bp, Homo sapiens
gaaaaaaacaaaagaaaacccaaacaactctcaaccatgggccaagagaaactaagaaatcgatattgaaaggccaggaggggcaggagaagtggctcaggcctgtaatctcagcactttgg

SEQ ID NO: 104477 - DNA, 122 bp, Homo sapiens
ccgggactcagccctgtgctgagccccgggcagtgtgatcatcctggcccttctcgtgcacgtcccctggctggatgctccttgctgccctcacggggtgtgtgtgtggcatacaggacagg

SEQ ID NO: 104478 - DNA, 122 bp, Homo sapiens
agcaaaagaacaggagatgtccctcctgggacatcaactcttccacaacagggctgggcacgcaggacgctcagaagaaggagcatgtgcctgccttcagcttgtactgttcttgttgaggg

SEQ ID NO: 104479 - DNA, 122 bp, Homo sapiens
gataaaccaagcagttaaataatttccaaaagtacaaacagacattcccctcaagttatccgggcttctacaggtacttttcaagtgacccacaagccctatattttaaacagccacagaag

SEQ ID NO: 104480 - DNA, 122 bp, Homo sapiens
tcacaaaaccaatcctggccaccatcgcaaaaccttgccagttgcctaatctggaatccccgggaccgtcctcaattcacctggttcttctgggcctcacgtcaactgtgtgtgtcgctgat

SEQ ID NO: 104481 - DNA, 122 bp, Homo sapiens
gccatatatatagtcctatcaccccctccgccttggaatgttattaaggaccatctcacacgggggtgtacacttcctgctatgttgggagtaatagcattgtcttcttccgtgaatattag

SEQ ID NO: 104482 - DNA, 122 bp, Homo sapiens
cttgttcaacccatcattaaaatgatacgtctcgccttcgggagctgtgctggctggcggcgagttgggcacacctcctgggtagagaggtctcccaacagggccctacacacgcttctttc

SEQ ID NO: 104483 - DNA, 122 bp, Homo sapiens
atctttgagacagcgacacctggtgcagagaaaaatccgcaagctcgggggttgggagagcgctgaacaaggccgcagagctgctccgccatctcccccacgcctcctgccaagttctgtgg

SEQ ID NO: 104484 - DNA, 122 bp, Homo sapiens
aaacagaggcacggagaaagtctcagctttcccacggcccactgggaccagaacccaggtcgcaggacggggacagccacctcctttttctctccttgcaaccagcctgagctcgctcagcg

SEQ ID NO: 104485 - DNA, 122 bp, Homo sapiens
atatatatgtcttctcttgggctccacccaagagcaacctggaactaagttattcggcaacgaactgttccactttgttgtgaggcaatagatgtggaaattccctgacgaggggctctgtc

SEQ ID NO: 104486 - DNA, 122 bp, Homo sapiens
aaagtcttctctctacgtttttatgtctgtaacaagaatccactgaagacctacatttcccggaaggttaacagcccccttctcagttttcctggtaaagtgtttttatattggtagaatac

SEQ ID NO: 104487 - DNA, 122 bp, Homo sapiens
ggaagacagaatgagggacaggggctcctgaataagctggctcctggtctctgcagaccacgtcccatttctgagccctggcaaaggtttggctggaagtgtcaggaatctccttaaaccct

SEQ ID NO: 104488 - DNA, 122 bp, Homo sapiens
ccttcagccccggccaccaaagaggagtaacccgggcctgctgttctctgggactgaatgcggctgcatccttcccttcctctgcttcctgtcccggtacttactgacggtgcacatgcggg

SEQ ID NO: 104489 - DNA, 122 bp, Homo sapiens
tgctgtccagaaggcgcttgaactcggcggcttccgtagcgggagggcgaaagatggcggcggcagtactgggacagttgggtaaggatttcttagtggttaagcgacagaagggagtcgag

SEQ ID NO: 104490 - DNA, 122 bp, Homo sapiens
ctagttcagtctcattttctaggggcagagactgaggcccagtggggtttaggagcttggcgaactataccaacccccacatcaggccaaggtcttcggcctcaaagctccttgcactgcac

SEQ ID NO: 104491 - DNA, 122 bp, Homo sapiens
tccgcccgcagcgggccgagcgcgggtgcgggtggcgcggggtgcagggagcgctgggggcgcgccgccgcgggcagggaacctggagctgagcgcaatcgcagccggggccgagcacgagc

SEQ ID NO: 104492 - DNA, 122 bp, Homo sapiens
ctattgcaagaccgcacccctgccccgaagcgttgggacctaggcagaaggaggccgcagcgtcactgagcccactggcgcccctgcagtgaaacctcgcagccgccaggaggcggtggccg

SEQ ID NO: 104493 - DNA, 122 bp, Homo sapiens
gcaaatggcccttcggccgagaaatgtcgccaaactgccgtcttccctcctcggccgctgcgacaaacaccccacaaaatggcggcagcgccgtcgccctagaatcccccgagtcgcctcta

SEQ ID NO: 104494 - DNA, 122 bp, Homo sapiens
gcagcgtgggatgctccgggcctttctttgagctcccagggtggggggagtggggtggggcgagaatgggcggatctggacctcacccggccaggtgttgggcccagacctgcctcgggcac

SEQ ID NO: 104495 - DNA, 122 bp, Homo sapiens
gctgtggcagcactaccaccctggcttgccgccgccggacgtcgcaggtgaccccccgggcggcccgtgtgctgtcccggtcctcccacccgccctggatgctctcccgcctcccccagacc

SEQ ID NO: 104496 - DNA, 122 bp, Homo sapiens
tcaccactttgctgtgcccttcaattcccgtgaccttgatttttaagggcttgattaattcgtgaatgaatgtccggctctcagggcagctaacaccctcctgctttgtaacccaggccgcg

SEQ ID NO: 104497 - DNA, 122 bp, Homo sapiens
taggagtggggtgggaccctggaagcctggcgtttcaccaagctttccaggtggtttggacgcacagctaggtttggggacttctgcccaagactgaagcagcagccttcgccggagcatcg

SEQ ID NO: 104498 - DNA, 122 bp, Homo sapiens
ctggccgctatcatcccagcagtggagttcagcccactactctgaaccaggttagtccaccgcgggtcaggctctcccctctcccgggagggtggagaccacaaccaggccatgtatggagc

SEQ ID NO: 104499 - DNA, 122 bp, Homo sapiens
ccaggcatggtgcacctaaagctgcacggaggtgtgtccaccccaagatggaatccagcccggccccttcctctaggctgagcactgtagcccctcctccccagcttttggcccccgcttta

SEQ ID NO: 104500 - DNA, 122 bp, Homo sapiens
gtcctccatgagctcttgcgtcgtgctccgtcccgtttccaggtcctggagcatttcctccgtgattatggctgagctgaggagttcagaagctgtgatctgtcgtctaattccttggaacc

SEQ ID NO: 104501 - DNA, 122 bp, Homo sapiens
cgcaaagcggacccgcggaccgtggcgctgggtggccacggaggtcccgcgctccccgaccgagatagggcgggccctatttcggggagatgttgggcaccaactttttttaaagccccgtg

SEQ ID NO: 104502 - DNA, 122 bp, Homo sapiens
ccaggctttttcattctttcttttgcgcggcatcaaccaccagggggcagtgttccctcccgccgtccctccggggccgccttcccgtttttacctacagggggaagcagagagcacggagc

SEQ ID NO: 104503 - DNA, 122 bp, Homo sapiens
cgtgcctggcctaagaatacccttatttttaaatttcatggcctgggcagccttgggcagcgagggacacaagcttaatttcctagttggttgccagctgacattgtagcagctcctttact

SEQ ID NO: 104504 - DNA, 122 bp, Homo sapiens
tgagtaaatattaaatcgaagtaaagaacttgtacgttacgagagactgaatatttaagtcggtgtttaacacattatggaaaacatgtataagtcatggtataaatgtaaatcctggaatg

SEQ ID NO: 104505 - DNA, 122 bp, Homo sapiens
gctttcgggcagggcggggccagggcaggctggggcgagggctcctgctggtactgtgttcgctgctgcacagcaaggccctgccacccaccttcaggccatgcagccatgttccgggagcc

SEQ ID NO: 104506 - DNA, 122 bp, Homo sapiens
gcgcgacttcgacggcaaggtctactacatagaccacacgaaccgcaccaccagctggatcgacccgcgggacaggtaggaccctggaaccctcctccgtgcccccacacccccgcctgggc

SEQ ID NO: 104507 - DNA, 122 bp, Homo sapiens
tcctaccgagctgaccatgaggttgtctctttcactgtccagagaggagtgctgggggcccgcaatgcttaggggctgtggatgagaatgtggacaatcacttttccctgtgcttggcttct

SEQ ID NO: 104508 - DNA, 122 bp, Homo sapiens
atcgataaagtcctttcaaacagcccaagatgagaactaagtgcttacccattactctggcgctctccacttcgcttctgggaacagcaggaatacgtcagtatcttgaacatgtcggtgaa

SEQ ID NO: 104509 - DNA, 122 bp, Homo sapiens
ctctgctaaatctgctgtcccagttatataagcaattcctctccctgatgctgcgtgacacgagccccgcctcttccagtctgcagaaacccatcagcatggggccagagtcacactaggac

SEQ ID NO: 104510 - DNA, 122 bp, Homo sapiens
tcgtcaggtaggcacccccaccccgcctcatcctggtcctaaaacccacttgcactcatacgcagggccctctgcagatactcggtttgtagtgttgatattcaactcagaaggcatttttt

SEQ ID NO: 104511 - DNA, 122 bp, Homo sapiens
agccttgctatggcgcgagaagtgatactgcgataggaactgagggtgggtaaaggtcaacgaatgaccgaccgtgcgctaggaacaacctagtgtgggagaccgtgccttagtggtgtacc

SEQ ID NO: 104512 - DNA, 122 bp, Homo sapiens
ccggtaaatgttacattgcctaaacaacactggcaattttgacacacatgcacacacgcgcgcacacgcacagacacgcacacacacagacttgctgagagggtcaaaggatgtctcttccg

SEQ ID NO: 104513 - DNA, 122 bp, Homo sapiens
gccgccagcgcggacccctctacctgggccaccgccgctgagaggagccgggcgcgtcgccgccgccgccacctttataggcccggacctgctctggccccgcccccgacgcaggctccgcc

SEQ ID NO: 104514 - DNA, 122 bp, Homo sapiens
cctcgcaattggtcgaattcagcaggctccgcctccttgagtcgccagctgcctgccacacgccaggcgccacgcgccgccctcgctctttatccactgagcagcttatccactttaggtcg

SEQ ID NO: 104515 - DNA, 122 bp, Homo sapiens
cgcgcgtgtgacagtggtgacaggcgaggctgttcctttttaaataccatgtcagagacacggcgtcaggaagcagggacgtgctccatgctctctgccgcgccgggatcgcaccggcttat

SEQ ID NO: 104516 - DNA, 122 bp, Homo sapiens
tttaaggtgcctttgtctgcaattcaccagtcccagagcaggcacagcttacatttagttcgtatgaaaggctttagtcctcctctcccatccttttatctgtccaagaattgcatatgatt

SEQ ID NO: 104517 - DNA, 122 bp, Homo sapiens
gctttggagtcggccctgggacctgcttcttctcttggctttggggaccgtagcccagggcgttccctccgggtcggtggccagggcttgcggggcgtgtgcgactcgggacccccagccgg

SEQ ID NO: 104518 - DNA, 122 bp, Homo sapiens
aaatctgagaatgatcactctaggggtgatgtggaaaaagaaatttgagaaaggaataaacgtcctcaactgaaaagtccagaaactttttatccaaggtgtccagggtgatctggtgctag

SEQ ID NO: 104519 - DNA, 122 bp, Homo sapiens
ccagagtcagccctttgatctttgttctcccctgaactctattacctggaattaaaacaacgcatttgaaaaaaagaaaaacaagcaagtttctgagctcaccctatacccgctgaacagaa

SEQ ID NO: 104520 - DNA, 122 bp, Homo sapiens
aggaagtagaaaatatgagtaatttggggacgcagaatctttcgtcacttccctccatcgcgtctcatgtccaggatcttcccaggagtcgtaggaaatgtagcatccatgcagttagtcgt

SEQ ID NO: 104521 - DNA, 122 bp, Homo sapiens
ttcctgtcctcttgggagatgtctgcgctttgtgagtttgggaaacaactgggtacccagcgaggtgggcgcaggaggaggagctgccttcctccgggaggcggcgcagcgcggggatcttg

SEQ ID NO: 104522 - DNA, 122 bp, Homo sapiens
tttggtttttgtccaggttcctggctcccagcacccacattccttgttagaatgctggggcgccttaggactcaggaaacagaatctctctctgaccttctgctgtttttctttcacttgcc

SEQ ID NO: 104523 - DNA, 122 bp, Homo sapiens
gaacctgtccccatcccaaggccatttgcagcttgtccctgagagaagcacagaatggcacggtagcagcagagatgggggcagggtgggggcagccgccttctggaacagtcagcccaggg

SEQ ID NO: 104524 - DNA, 122 bp, Homo sapiens
gccttatgtcccgcggctggcaggacacttagagctcacttgctgttttcgttgaaagaccgacccttttgataaagactgctggggaaggcgacgaattcctttccccaggtcgcattcta

SEQ ID NO: 104525 - DNA, 122 bp, Homo sapiens
agacctgcagagagtgggatgttgcccccttccctgcgcaaatttagagacagctagtgccgtctggggaccagtcactgtgctaggatcagctcgagtactaagccgcgacagttgggcta

SEQ ID NO: 104526 - DNA, 122 bp, Homo sapiens
aaagccctctttttgtgctttaacaagtgtcactaaatacttttttctttaacaatagcccgttctccaaacccctaactccagaactgtttagttttcaggaaacctgagtgggcccaggg

SEQ ID NO: 104527 - DNA, 122 bp, Homo sapiens
actcgcggacaccaagcgccacaaattcaaatacgagatctagagacgctgggtctcaaacgtctcccagagtgaaagacagaggaaccaatcgaggctcggctgacctcagacgtctaagg

SEQ ID NO: 104528 - DNA, 122 bp, Homo sapiens
cgagatctcagagaccaaccgcgcccagtgggagatgccccaggtcagggaacccgcgcgcgtgcaagctcgcctcctggggcttcgggcatgcgggtgctcacttcctgcaccctcagacc

SEQ ID NO: 104529 - DNA, 122 bp, Homo sapiens
cgcgagaagtggatggtgctggccagtccgtggctaatactggcctgctgccggctgctgcgctccctaaaccagacaggtgtgcagtgggctcaccggcctgacctcggccactggctcac

SEQ ID NO: 104530 - DNA, 122 bp, Homo sapiens
agtaatcagtcggaacagcctcgaaaatatctggcccaatattcattagtgtggcttgatcgttaaacagttaccgtgtttggttcatgacaaggcccagcaaacagctgcgcgcccaacag

SEQ ID NO: 104531 - DNA, 122 bp, Homo sapiens
cggggctgctgaagacagggcagcgatgctccgcccgtgggaagctgggcagcggcaggacggcactcccagcctctccatcggctttgaatcacggcctggagttccgatgcttcgtggcc

SEQ ID NO: 104532 - DNA, 122 bp, Homo sapiens
cgctacgtgaaatggggcgggactggctgctgcagtcttgctcccggggttcctgccctgcggtgctggttaagtggggtcgttctagccggggaagctgcttaagtcctcagcttaagtga

SEQ ID NO: 104533 - DNA, 122 bp, Homo sapiens
actaactaaaaacagacaggctcaggaacacgtgagccaacactcccgagaggcgagactcgggccggacgggaggcgaggtcatcagggttgggagtgggtgggactagaaagatgggtct

SEQ ID NO: 104534 - DNA, 122 bp, Homo sapiens
tcgccgccatcttagtccggagtgcctaagggtctccctgacagaaccacgaaagatctgcgcagccgcaggctggccggtagctgggcgggcactgggaagagcccaccctaccggctgcg

SEQ ID NO: 104535 - DNA, 122 bp, Homo sapiens
cagtctttctacacctgttttcttacacacctcctgatttgtctaaaatattaagttacccgaatgatacagccaattagtgggagctatttccagaaagaaacaaaagggtcgcaaattcc

SEQ ID NO: 104536 - DNA, 122 bp, Homo sapiens
ttggggatggggtgggaagcacccgcataaccgcttatgcgtgggattgcaacaagcatccggatcttccagggttcacggacacccagatttctccacaggatatgccctttaaagtaaac

SEQ ID NO: 104537 - DNA, 122 bp, Homo sapiens
agggaggacgcgttgtgagcctcaaagagcccacttacgtgaccgacagcaccaggccgacgggcactcgctgaactgctggcccggagcagcacagctcttaagtgggcagtggcatcttt

SEQ ID NO: 104538 - DNA, 122 bp, Homo sapiens
cccagaaaataaagggttggatctcagtatgaggcagggcgacggcatcaggacagggggcgaagctcggtgaagaaggagatgggcaaacgggtacgggaagtggggggctgaggggggcc

SEQ ID NO: 104539 - DNA, 122 bp, Homo sapiens
ggcgccgcggaaaccgttaggctgggactgagggccggggcactctccagggctcggccccgtcgaggggcgcggaccacccccttctgtgggcgcgctgtgggcagaggtgcagaggggca

SEQ ID NO: 104540 - DNA, 122 bp, Homo sapiens
ttttccctcccgctaccaaggtctcctcccagctgcctttaagataacagtgaagttgcccgccacactctccttgggttcacaccaagcctgctctctggtttcatttctaatgttatctg

SEQ ID NO: 104541 - DNA, 122 bp, Homo sapiens
gtttgcaaaggctctctggtgaagacgctgagacccggcttcggctcggcccgagtcctacgcgctcgctttccttggagtgccagagaaagctcctggctccgggagagcggcgccttggt

SEQ ID NO: 104542 - DNA, 122 bp, Homo sapiens
aagtgacgtctgtatccctcctgctcgaaagtgtccagctgcccattccctctaaagtgacgtctgtatcactcctgctcgaaagtgtccagctgcccattccctctaaagtgacgtctgta

SEQ ID NO: 104543 - DNA, 122 bp, Homo sapiens
ccctcccagccagtccaccctatgctgtgtgaccttcggcaagacttaacctaagtaagacgatctagccagcctcctcttcccagcctggcctgggtgctgaggtgggcatgggggcttgg

SEQ ID NO: 104544 - DNA, 122 bp, Homo sapiens
cgcggcgtgcgcgatgccggcgtgggaggagctgtgggagaagctgtggtctggggatcccgtccctgctttaccctgttcggaatgagatcgaggccccatcaaaacagagttcatgtgag

SEQ ID NO: 104545 - DNA, 122 bp, Homo sapiens
caccaaactgggaggggaagtgtggacccacgctcagacagtgtctgtcttttgcagacacgagggccgctgcctcccgccgcgttcctggcgcccgctcctgccaaggtgcctgcgggccg

SEQ ID NO: 104546 - DNA, 122 bp, Homo sapiens
agggaaggggtgaagagcgggaactcgaggagagcctacccgacgggctcaggagccaagcgggtcgcggagcgccggctgtggaaaggagagccgctgccgccgctgcctccgcggcaggg

SEQ ID NO: 104547 - DNA, 122 bp, Homo sapiens
tcaaaaaaccagcttatccactttccacttctgcagtcctagccagtaagaactcaagctcggacccaaggctgtggaggcctccaagatcctccataaccaaaagagctattgtgttcctt

SEQ ID NO: 104548 - DNA, 122 bp, Homo sapiens
ctgatgcagcatcaaagccagtaaaagcacatttgaaaatgaaaggtctatcacattccacgcttcttttgaaacatcaaaaaggcacaaaaagaagcggtaggactagaaaaagcggacaa

SEQ ID NO: 104549 - DNA, 122 bp, Homo sapiens
ggtgggggagagaggatgggagctgtgagctccaggctgtgcccgtatcagagcatgccccgcacgagcccagcgcccacctgcccccgtccaccccgtggtgccaggatcagggtgacgtc

SEQ ID NO: 104550 - DNA, 122 bp, Homo sapiens
gctcagcgcgcaccggcgggcttcgaaatcgcagtcctccggcgaccccgaactccgccccggagcctcagcccctggaaagtgatcctggcatccgagagccaagatgccggcccacttgc

SEQ ID NO: 104551 - DNA, 122 bp, Homo sapiens
ttgaaaagttcctggtggggcctgatggaatccctgtcatgcgctggtcccaccgggctacggtcagctcagtcaagacagacatcctggcgtacttgaagcaattcaaaaccaaataggaa

SEQ ID NO: 104552 - DNA, 122 bp, Homo sapiens
gtggtcaggatttacagatctgtgactcagcccagtgagccagggaacatgaaaagatgtcgctggggagaaatatgcaaggaaggatgggagaggtcagcgcctccaccaagcaggacaga

SEQ ID NO: 104553 - DNA, 122 bp, Homo sapiens
gccacagagcggcagccagaggcatgtgggcagtgcagcctccacaccaggcagagggcccggccagcatggctccaccctgggaagctgcctgccactgggatcagatgggagcaccaggg

SEQ ID NO: 104554 - DNA, 122 bp, Homo sapiens
ctccctccctccttagctcttgactttaattgccttgaactcagttcaaaagccaaacaccgtgctgcttttattctctctggcttgccaagccacggggccttgggggcttgtgtaagggc

SEQ ID NO: 104555 - DNA, 122 bp, Homo sapiens
ccgcgaaagtctgcagcttcacccctgaagccagggagaccacgaacccatccggaggaacgaacaactccagacgcgcggctttaagtgctgtaacactcactgcgaaagtctgcagcttc

SEQ ID NO: 104556 - DNA, 122 bp, Homo sapiens
aaagcataatagctagggacacaggccaggggagggatgtaaggttatcaaagcaaatggcgagtggacttttccctaaagctgagagactcaaaacctcacccagagaaagcagaggccag

SEQ ID NO: 104557 - DNA, 122 bp, Homo sapiens
tgggatgcaaaatattcttgggttctgggaaaatgccatttcttccagctgttgaaaaagcgggatccagggagctgacttctccaagttagcccccactggagactgggcctgcaggcaga

SEQ ID NO: 104558 - DNA, 122 bp, Homo sapiens
acaggctcaaagaggtagagtgagctgccgaaggtcacactgcatgggagctggcacagccgtgtcccaggcactgcttggtctctgagcctcaaccactgccccccaggcaccagctagca

SEQ ID NO: 104559 - DNA, 122 bp, Homo sapiens
ggtgcctcgggacgagaaggccatcaagtgttgctccctcatctgtaacgtgcagccccccgcactgtcgccgtcgtcgcgcgcagttcccgcgcccgggcggccgcgcctccgccgcgcag

SEQ ID NO: 104560 - DNA, 122 bp, Homo sapiens
ctgtttaagtctctgccgccagccccaagggcgcttcatgggcattttccgaacggacagcgtgtgtgtataggaagggtctgctccaatgcctcttacctgtgtgaaatgcctttgccggg

SEQ ID NO: 104561 - DNA, 122 bp, Homo sapiens
cacaaatgtgcatattccaagtagagtggaattctaacacttgtgcaagcacgaacctggcgtgcactccacctgtggggatataatccccttgaattgttccagaaaggctgtcctttggt

SEQ ID NO: 104562 - DNA, 122 bp, Homo sapiens
cggacaagccagtccaaacaggcattccagtcattgggtgggtgacagccaaagaaggtacgtcattttccttcctaccacccccatctctgaacaattctacagggatgtctgtcagagtg

SEQ ID NO: 104563 - DNA, 122 bp, Homo sapiens
ttgttcttatttttctccttagctttcattctctggtcatagtccgtcttggcaccctgacgtggtgagtatttcgttggcagggcccagcaggggtcccgctctgcttcccggaagactcc

SEQ ID NO: 104564 - DNA, 122 bp, Homo sapiens
cctgccgcagagcggcgcgggcagtaagccgggcgctaggaccgcggggagcccgggctgcggcggcgctaccttaaacccagcccaatgccgctgcctgcgccactctgcgcgccggcggg

SEQ ID NO: 104565 - DNA, 122 bp, Homo sapiens
ccttccagtcttgactaggacgtcagctgctctgggagggcctctctggcctccaccctacgcaagccgttctcatcgctcgccactctgtttcattttcttcatagcactcaccactgtgc

SEQ ID NO: 104566 - DNA, 122 bp, Homo sapiens
ccagggtgggtcaggggaatactctgcctgcgccctctccgagggtccgcgcagagcgagcgcctctttaggtggggcctctggctccgacccctgctcccaacagggatcttcgtttgcat

SEQ ID NO: 104567 - DNA, 122 bp, Homo sapiens
actgcaaatttttctttccttttgctggggccacgggacagagcacctgggcagagcaagcggagaggcgccacatccccgagaggcgcttcgtagttgtccttggaccgggcgcagacact

SEQ ID NO: 104568 - DNA, 122 bp, Homo sapiens
ccccccacccgcttcctgctcagtcagtcttgacatggccgttggccagggctagggcgccgctgggctccccgggctcagcgtccttgtcgaagcggaggcggagggtgttgcggatgatg

SEQ ID NO: 104569 - DNA, 122 bp, Homo sapiens
tttctgtgtaaagggctcacgatggaaatcaggttaaaacaaggaacttaatcttaaagccgcgcttgcctatgtctgttaaatcctttattttttcttagacagtgttccagtgggagttg

SEQ ID NO: 104570 - DNA, 122 bp, Homo sapiens
aaccaagttcatcgtggtctcaaacaaaagaggaaaacttagtctttaccaatgaggctacgatggcaaatttgccccgaatcttttaagggggtattaacacacccttccattacaataaa

SEQ ID NO: 104571 - DNA, 122 bp, Homo sapiens
cctgtacagaagagggctggttctccagcgccaccaatgagaagacgcagaataggggagcgtcacacccagtcccaggtagtatgcaaatataatgtcacgtgacgtcaggctgagctgga

SEQ ID NO: 104572 - DNA, 122 bp, Homo sapiens
tctaagtgggcctgggattctgggctggtgctgggcaccctcatcttcatcctgttcttccgagccctcggtattgctggcaccctctgctttcccactctccttcctgtcccgcccctccc

SEQ ID NO: 104573 - DNA, 122 bp, Homo sapiens
tgatgggtgagacagtgagctcccagttggtgataccgaagtcacgtaggtgggcccgggcgtggctggagaggccggcccgtgtgtcgaagccagccccgcagaagtcacagcgcatcagg

SEQ ID NO: 104574 - DNA, 122 bp, Homo sapiens
cagttctgagagctgcaaggaagaagaatttataacagtgattcttaagcactgggggaacgttggccccaaataatctgatgctagcagttttacattaaatgtcaagcttgccaacttga

SEQ ID NO: 104575 - DNA, 122 bp, Homo sapiens
ccaaagtaggagaccattggaaatgcactccctatagacaccacgtggggtttcagagctcgttttctccctgaacacgtccctaattacacccgcgttccgccttcatctccacggcattg

SEQ ID NO: 104576 - DNA, 122 bp, Homo sapiens
ccggaaaagagaaggcgcggacgcagcggggagcggttgggcctgagccccaggtagcggcgcaggcacgagcccgggaactctgccccctgggggcgggcgccggccgcgcaagctgctcc

SEQ ID NO: 104577 - DNA, 122 bp, Homo sapiens
agttctttcagaccccagaaggtctgtcgcacggaatacagatggagccagtggacctcacggtgaacaagcggagttcacccccttcggctgggaattcgccctcctctctgaagttcccg

SEQ ID NO: 104578 - DNA, 122 bp, Homo sapiens
ttcccctttctgatacaaacccatttaaaatcatcatgcaacctatgactagccattccccgactttcctctgcgggatgttctagcctcacagaccaatcataattatgatgtgttagctt

SEQ ID NO: 104579 - DNA, 122 bp, Homo sapiens
cgcactcctcagcccttgggtggtcgatgggactgggcgcgtggagcacggggcggcgctcgtccggaggcttgggcggtataggagcccactgagcaggggaggctcaggcatggcgggct

SEQ ID NO: 104580 - DNA, 122 bp, Homo sapiens
cgagtggatggatattccctgttcagtggaggggatatccaccacgactctgggtacccacggcgggatgcagatgtgagttagggccatgcggcgatgatccaggttttgttcctgcatcc

SEQ ID NO: 104581 - DNA, 122 bp, Homo sapiens
tccccacgcgtcccacggggcgaggatggtgcggtccccgtccccacgcgtcccacggggcgagggtgatgaggtccctgaacccatgcctcccacggggtgaggttgatgcattcctgtcc

SEQ ID NO: 104582 - DNA, 122 bp, Homo sapiens
cggcaccgcgtccacctgcacatcccatggccacagctacacggacgcggtcttccagctcgcgagaggaaagttttcctcatgccggtggtttttcacttattaaatctcatatttcaggc

SEQ ID NO: 104583 - DNA, 122 bp, Homo sapiens
ttttgttcaaaaagaaataaagatatttataactgttgggctagaatgatggaagtttaacgctggttaagtgagactcaggtaacagacagcaaaggagatactttaatagtgaagggaac

SEQ ID NO: 104584 - DNA, 122 bp, Homo sapiens
tatgttacaaaagccaaaggaggtaactcatatggtttcctgggccatattgtttccttacgtacaagacagactcaatccccatcctcagagagcttactatctatcagaaaagttagatg

SEQ ID NO: 104585 - DNA, 122 bp, Homo sapiens
gtgcaacagtgtcagctgtgctgtgcctagcagccgtaccagctgcggcttgaagagtgccggtggctgtccctgcagaccccgcagggcccagcccagcagccacaggagctgggcctggg

SEQ ID NO: 104586 - DNA, 122 bp, Homo sapiens
cagcatgagcctgcacaggagcccccgacaccccatggctccggggggccccaggggctgcggggctctggtcttagacgcagttatcagggacgcactcagcctcttcttcgagctcgggg

SEQ ID NO: 104587 - DNA, 122 bp, Homo sapiens
ctacccagtcttctaactcaactgaggtcggggagtcgttgtcaacgttgcggaatggaacgcctggaacgggaggcatgacgacttcttcaggagcagcaggtaaacgtatcaacagggat

SEQ ID NO: 104588 - DNA, 122 bp, Homo sapiens
tccgaggtgtggtcgtgtctccgggggcgtggcttttcgttggaggtggtctgtctgtgtcgggcgtgactgtgagccggaggcgtagccgtgtctcgggagcctggcggtgtccgcaggag

SEQ ID NO: 104589 - DNA, 122 bp, Homo sapiens
gaggggcgcgcccacggttgtcccgggagacgcggaggacgcgcgcaccgcgcacccgggcgccaggggctggaccgccgctcgctcccgcagccctacccttgcccagcgagccaagccgc

SEQ ID NO: 104590 - DNA, 122 bp, Homo sapiens
ggatgaagctccagcgctcacgcgctttccgcattgagtgcagcgccatcttgagaagggcggagccgtcttgtttggaatgacgtctgttcagagagccaatcccagtctcgcgactcctg

SEQ ID NO: 104591 - DNA, 122 bp, Homo sapiens
tctcaccgccgcctgccttctgccccagctgagcagcccagccaacctcagtgcctccgtcgccacagtccagctgccacagcaggaccagccagtgccccacggcacccagtgcctggcca

SEQ ID NO: 104592 - DNA, 122 bp, Homo sapiens
cgggttgaggtggcgcttgctgctggttaagaccagacctctgctgctttgtagcaaacgcgcgtctcccggtttcacaagtggctgactcgttaacctcgtggttagctcagtttttaaaa

SEQ ID NO: 104593 - DNA, 122 bp, Homo sapiens
cggaggaggcgcaggcgcagcacaggtacgtgggcgggcggatcgtggtggctgcgcttgcgaggaccctgaggtagattgggtggtttcaacaggaacgcatccactgtctgagaggtgac

SEQ ID NO: 104594 - DNA, 122 bp, Homo sapiens
tggctgagataaaagtggaaacaatttgacttcactatgtatcttttaaagtttgcaccacgtgtttcatgtgtatatattacctattcaaaacttaaatatacacaagcacagagcaaact

SEQ ID NO: 104595 - DNA, 122 bp, Homo sapiens
ggatgtcttcaacaactacttcagcctgggctttgacgcccacgtcaccctggagttccacgagtctcgagaggccaacccagagaaattcaacagccgctttcggaataagatgttctacg

SEQ ID NO: 104596 - DNA, 122 bp, Homo sapiens
gtgcagggggaggagccctggggagaccctaccctggtggccttccagagcccacagaaccgaggtcgcactacccgtggagcccaccggatcagagcaggtgccatgcacagctagtcccc

SEQ ID NO: 104597 - DNA, 122 bp, Homo sapiens
caacacattgtcctgaaacagaagacaggagaaagtgcgccaatcgctgtgtccagctggcggccgccatgtactgctggaaaacacgcacggtgcatgtgactgttttttaggattattaa

SEQ ID NO: 104598 - DNA, 122 bp, Homo sapiens
ggtgtctaagccccatattgccgtgttagcttagagggcgcaaattttgttaatgactcgcgcctgataaacttcaattaagtttcccgcctagagaaaaactgcatacttatcccctagcc

SEQ ID NO: 104599 - DNA, 122 bp, Homo sapiens
gcgcgcgctccgcccgccccggagcctcgccctccgccacgatgagcaaatgagcgcgagcgagggcatgaaatttaaattccactcaggggagaaagtgctgtgcttcgagcctgacccca

SEQ ID NO: 104600 - DNA, 122 bp, Homo sapiens
aaaaagaagaggcaagaccggcccccagaccgaccaaagcccacgtgccgccacaccccacgcccagcgcgccgacgtcccgccactgtcgctgccaccatcatgcccaagagctgaagggg

SEQ ID NO: 104601 - DNA, 122 bp, Homo sapiens
gggccattgtgcgcccccggggtcccccggcccctgcagggctacttgggcgcagagccgcggagggtctccgttcctagaggtcctcctatcccgggctgcctgagtcctcgccagcatcc

SEQ ID NO: 104602 - DNA, 122 bp, Homo sapiens
aggaactaccgactagacatgtttaagatgagggctccatcttcgcttctctgccagccacgtgtacagtaagaaggggttacaataggcatatgggtgattttgtgcttttcgttcatctt

SEQ ID NO: 104603 - DNA, 122 bp, Homo sapiens
tcctcacccaagggacacactcagaaacccaaactcaactcggcagcaaactgggagacacgagaagttgacagcaaagtatccatttccccaaatcctccttcttccagtcaatgtgcatc

SEQ ID NO: 104604 - DNA, 122 bp, Homo sapiens
caatcactccctccagctggcctcacagatccagaaggcaccagacgtggtgggtagccccggccccgtgggggactgtccccgcctggcctccgcaccttcgagttacagccgcttgctcc

SEQ ID NO: 104605 - DNA, 122 bp, Homo sapiens
ccccgttcttcggttccccccgcgccttctgaccccgcagccaacctgctacaagcccttcggatccagccaaggccccattcttacctgaacggcggtcccagctaccgcgaagatggagt

SEQ ID NO: 104606 - DNA, 122 bp, Homo sapiens
aggactaagcgagccacctgatcgccaggctctggccttgaaacattcaggcccctcagacgccaccgcggccaagctctcatcctgcctctttccttgcccttcacccaccctccctccag

SEQ ID NO: 104607 - DNA, 122 bp, Homo sapiens
tcgcttcagtaaggcgcttccccactccaggcccgacccccggcgcctgagcgccaacttcgccaagaacgctcctaactccaggccatcctgcagcgcagagggggcgctgctgccgggca

SEQ ID NO: 104608 - DNA, 122 bp, Homo sapiens
ccctttcaaattttagttttgctaatttgaggctccaaggtggaccctcccaccgccccccgctgaggatcatgagatctggctccctacctgattgttgcaagactttcacctacactacc

SEQ ID NO: 104609 - DNA, 122 bp, Homo sapiens
ccagtgtggaggagacggagcccgtggggcgtgtgctcagaagctcctgcagggccgggccgccgtcctcctcctcctcctgtgtgaagggcgggccgcccttcctgccgcccctgctcccc

SEQ ID NO: 104610 - DNA, 122 bp, Homo sapiens
tatttagttgtttgtaaaagcctgggtaggaaaattcacaaatgcatatttgtagttattcggcagcctctaaaaattacagtcttgctgtatctccagagtagaacattttctgtcccatt

SEQ ID NO: 104611 - DNA, 122 bp, Homo sapiens
cacctgcgcctcgtacggtaggaagtgcccgccagggctccaaagcgcctggaggaggggcgcgcaggcgcctgcgtcattcacgcgcgccgcagcggggcaccggaagttatggaggtagg

SEQ ID NO: 104612 - DNA, 122 bp, Homo sapiens
tcctcaagtcttattgatccataaatcaggctttgagttcatggttctaaaatgaaacaacgtgaaagaaacttgtacgctgtgaaaatgttccttataaaagtctagaaagttttccacaa

SEQ ID NO: 104613 - DNA, 122 bp, Homo sapiens
cgcaccccaaactcccggccggccgcccgctttgtgagcgcccccgtgaagcgagcggcgcggagagtgctcctgctatgggtcggactcttttcctggaggtcacttttagagactgctca

SEQ ID NO: 104614 - DNA, 122 bp, Homo sapiens
gactggagggcagcccaggcccggccagggtgactcgctaagtgtggttggggtggatttcgttttcctaaagtggcctgagtctgtcaggttatccttgactcccagagttgggcacaggg

SEQ ID NO: 104615 - DNA, 122 bp, Homo sapiens
tctttctcctggccgtatacttacatatttcctttctttatacaacatcgctagggtccccgggccaacaaggcgttggggcgaatccacagggcattgcagaaccaccgccttgcagtacg

SEQ ID NO: 104616 - DNA, 122 bp, Homo sapiens
tcccgccggagctgccgaaaatgctgaaggagtttgccaaagccgccattcgggcgcagccgcaggacctcatccagtggggggccgagtacgtgctcctttctcgccttcatctcttggag

SEQ ID NO: 104617 - DNA, 122 bp, Homo sapiens
ctctggcctcaaggaatgaaggatggatttgtgatgtggaggatggaagttggagccagtcgctcatttctggactgtattctgaggcatagataagccattggagctttgtgaatgagcag

SEQ ID NO: 104618 - DNA, 122 bp, Homo sapiens
aagaaggaggacacagagaaggtgcgtgccacggggggagcaccaccacacctaccctgccggggaagcacctcccacacctgccccgcctggggaccacctcccacacctgccctgccggg

SEQ ID NO: 104619 - DNA, 122 bp, Homo sapiens
attggaattagtgaaatggaagccatttgcaatctcatttcaagttgcaaaacctctttacggtatttctcctcagctcatctacctgtgcttccccctaccttccaataatgaaacagaac

SEQ ID NO: 104620 - DNA, 122 bp, Homo sapiens
agtgcctcaggctaagcgaagccccgcctccagctccgcccctccggatctgataagccccgccctcagcaagactccgccccactcaccggtgctcatctcgcccagccagcaagagagcg

SEQ ID NO: 104621 - DNA, 122 bp, Homo sapiens
aagaggccctcaaattcctccacgtaaggcaccactcctgcccgtgcacagacctcgtcgcgaggctccgggacttaccaccacgttcagcagtcctccgtatggcccgatatctggctgcc

SEQ ID NO: 104622 - DNA, 122 bp, Homo sapiens
gagacgaccatcggcattccacagacggctcctctagctgtgcacaatgcctgttcttatcgttatcacccgcttcgcgccagcggttctcaatacaaattccttgaggtttcacagtcaca

SEQ ID NO: 104623 - DNA, 122 bp, Homo sapiens
aatcgggaggctgaggcacaagaatttgcttgaacccaggaggcagaggttgccgtgagccgagatcacaccactgtactacagaggcaacagagtgaggctccatctcaaaaaagaaaaaa

SEQ ID NO: 104624 - DNA, 122 bp, Homo sapiens
aagggcctatcttcaaatagaatcatgttctaatacgctgggggttaggacttcaacatacgaattcgagggtagagacacaattcagcacatcatcaacaaactaattcatagccctgcta

SEQ ID NO: 104625 - DNA, 122 bp, Homo sapiens
ttgccagctccgacgctcctggcgctgagctcctcactggagagggtagggagagtctaccgtatctgagaggcaactgaggaaggggcacccttcctggagacgctgccctgcatcagaat

SEQ ID NO: 104626 - DNA, 122 bp, Homo sapiens
atgtcgacatcttgctaatggtctgcaaacttccgccaattatgactgacctcccagactcggccccaggaggctcgtattaggcagggaggccgccgtaattctgggatcaaaagcgggaa

SEQ ID NO: 104627 - DNA, 122 bp, Homo sapiens
ctttgaacaccagcctgagccctcccgctctttcctcttccatggatttatctttcccctcgaacacaaagcctgctagttatcccacggcggaagcatgagcggcatgccaaggaggaagc

SEQ ID NO: 104628 - DNA, 122 bp, Homo sapiens
agggggctgagagcaagagcaggagctgcaaggccttttaaagctcagcctcgaacatcacggcacatcatttctgccacgtgctattggtcaaagagatgcccaaggccagctcagcttcc

SEQ ID NO: 104629 - DNA, 122 bp, Homo sapiens
tccgtgtttcgccaccgagtggctcaaatctggaggatttctttggtgtccggggtaaaacgatccctgctgtgagtggtttttagggcagtgaatctgtaatgtattccaagcttctgaag

SEQ ID NO: 104630 - DNA, 122 bp, Homo sapiens
tccttgagaagcggggacccaagagaagagctttattgcctgttttactttttcccaaagcgtcccttggcttccgccgcctggctgccggcagctggaaaggagacgagctcccgctcccg

SEQ ID NO: 104631 - DNA, 122 bp, Homo sapiens
attccctttcctaggggcttacttgtaatggggtaattaatttatggctttgcagtaaggcggcatcagaggagcaatttaactcacaagaggtaacgcagatggagagtacaactgaaaga

SEQ ID NO: 104632 - DNA, 122 bp, Homo sapiens
agttgccactagccacatgtgactactgagcaactgaaatggggtgggtctaccctgagacgtgctgtcagtccaaaatacacaccatattgttaaggtttagtacgataaaagaatgttaa

SEQ ID NO: 104633 - DNA, 122 bp, Homo sapiens
gtctccaggctacagcactcccacagccccagctcctggcgacccagcccttaccccaaccgcccgtggacacctccaggaaagggcttcctgtcacgggacagacccggaggtcatgggca

SEQ ID NO: 104634 - DNA, 122 bp, Homo sapiens
tcaatctcctgggcgcaagcgatcctcccgcttgggcgtgggccagcgcgcccgtcccaacgctgggagtcccggagatcttggtcacaggcttaagggaaaggcctagcgcgtggccgcgc

SEQ ID NO: 104635 - DNA, 122 bp, Homo sapiens
agtccttccttctctgcctccaattaagtatttattagccgggccttgggtccagatcagcggtaagggtggtctgcgaggtccgtgcaccgccgtccgcccacgccttcttccaaccacct

SEQ ID NO: 104636 - DNA, 122 bp, Homo sapiens
aggtgtgcacctggggtctgcctcggcccctccttccactcagtctccggcctgtcttctcgaccgaggtgtccacctgtccaccgggagcttgtccagagcccggctgtccggcgctgtca

SEQ ID NO: 104637 - DNA, 122 bp, Homo sapiens
ccaatgtgtagccacgtctacaggggccaggaaatctggatgcaggtgcaaagctggggccggggtttgcccagaaggtttgcaccaaaggggaagtgacagcctgactgtgtcctcccctc

SEQ ID NO: 104638 - DNA, 122 bp, Homo sapiens
cacgtgccccatatttcgaaataaaggagcttgcatgaatgacgatttccaaacttctctcgtgtgctggtagttacaccaaatagcactttcttcatatggccaaccataacactgaactg

SEQ ID NO: 104639 - DNA, 122 bp, Homo sapiens
tgggagcgcctaggaccgggtttggtcccagtaagagaggattggcaggtgggtgggacgcgaaagaaatgggcataagtagaatgaagtgggggacttgaacctggggattgttgggaagc

SEQ ID NO: 104640 - DNA, 122 bp, Homo sapiens
cggcgtggtacacgctgggatttgtagtcttacatggctttgcgcctcctacctggaaggcgggccagcgattggtaccagttcagacatgggtacacgttgacaggccgccggccgtcgac

SEQ ID NO: 104641 - DNA, 122 bp, Homo sapiens
ggctgcctgcacagcactgtggccacctccacactctatggaaacttctgggcaccagtacgtcagagttctgggctctgtgttaaggaggaaggcccttttccggcgtcttctgcagctga

SEQ ID NO: 104642 - DNA, 122 bp, Homo sapiens
gtagttgcgcgcaccttttgaaaagcttggcgtcttcaggtataaggacaaaaacaaccgcggacatcacaccattccaaagaagaaaaagaaagtgcccggaatctcagggcgcgacttcc

SEQ ID NO: 104643 - DNA, 122 bp, Homo sapiens
gtaacaccctagcctttccaggtttaaggcaggagtctggtgctcacagacctgtgcaggcgggaagaggtcagggtggccctcctctgtgcagtcaggcgactccccagctgtgtctccca

SEQ ID NO: 104644 - DNA, 122 bp, Homo sapiens
ctttgcatctaaatgcccagacacctgttttagctgaaggaagtgacttgttctggtggccgtggcagtctatggatggagccatcatcgtggttctctcagacccagcgccgcttccctct

SEQ ID NO: 104645 - DNA, 122 bp, Homo sapiens
atgttttgttctctcagtggttattacagcagcttatatttatgaagtgtctttttctgacgagtttaaaagattctgtaattcactgcattttacatgtggggacccagaggaatagaaat

SEQ ID NO: 104646 - DNA, 122 bp, Homo sapiens
ttgcaatctcctttatttattttctaagtgtacatgctctgtgtttgtctttgtggttgtcgttagtgctaagactcatagtttatccctcagccaacatcactggaagctttagttcattt

SEQ ID NO: 104647 - DNA, 122 bp, Homo sapiens
gggaccctccaccccactctttggacctcccagggttcagccaggggatgggctgtccttcgtcttcccgtggagcgtgggccaaataaacggaactaagcgcaaggtgaactgctccaagg

SEQ ID NO: 104648 - DNA, 122 bp, Homo sapiens
tactttaaatttaagactgatccttggggtcttaagtacaggatgagtcactgggttcaacgtgtgggcacacatgtaggagagaagtgctggcatttctccaagtacagagatagtggctg

SEQ ID NO: 104649 - DNA, 122 bp, Homo sapiens
cagctgcgtccttcccagccagccagcagctctggacaagatcaagcctcctcttgcttccgcctgcaggcggcttgggtcagttgctgcatctacttagccacctaggcctgcatctcccg

SEQ ID NO: 104650 - DNA, 122 bp, Homo sapiens
acagttctacatactcaactctgagttgtctggcaagcataatggagggaggataccagccgtgaataattacagaataacctgtatcgtgtgatatgtttgaactgtcatacgtatgagtc

SEQ ID NO: 104651 - DNA, 122 bp, Homo sapiens
ctcatgagattgttctggatcaggcagcaatcatctgagatggcgcagaagccccccacccgaagccttggggcgagtggtggttcctcctgcacccccacctggggccccgcaaagaggcg

SEQ ID NO: 104652 - DNA, 122 bp, Homo sapiens
cctgctgaaataaccccttttcttccggtacccactttcatccgacgtgccccgcccgcccgactcgattgcatcagcctcctgtcagccccgccccagtgtacttgcactcgcaagcgcag

SEQ ID NO: 104653 - DNA, 122 bp, Homo sapiens
ttggtaatgctattcttttcttttcttgctgccctgccccctttccccaggaaacaaagccggttttgtttcttgcctgcttgtgaggtctctgctgcaccccatgtgggtgcaccgctctg

SEQ ID NO: 104654 - DNA, 122 bp, Homo sapiens
tgttggctaaacgaggagcagcttgggcaggatcagcagtgcccaaccctggctgcacgtcggaatcacctcagacaacggcttttaaataatactgacagccaagcccacttgggccagtt

SEQ ID NO: 104655 - DNA, 122 bp, Homo sapiens
ctttctgcccctccggggaggcggatcccagcccccaacccaccaccctcatccgcccagcgccttccctgtcctggtcccgaactgacataaacagtaggttgccggacacggtgaagtcc

SEQ ID NO: 104656 - DNA, 122 bp, Homo sapiens
ttcaccttggtttcgcgggttttcaaagtggttcgtctcgcggcgacgccatcaggtgggcggcaggttgggtggtattattacgggagtgtgtttttctgtttacaagatgaagaaatcaa

SEQ ID NO: 104657 - DNA, 122 bp, Homo sapiens
ttagttggttctggtttgggtcagagacacccagtggcccaggtgggcgtggggccagggcgcagacgagaaggggcacgagggctccgctccgaggacccagcggcaagcaccggtcccgg

SEQ ID NO: 104658 - DNA, 122 bp, Homo sapiens
ttattgctaacttgcacacagtcaagctcccttagtctccaaaagaggagatccaagcaacgatacttcatgagcagtcggcttcgagagtcatcctgagttttcaaggctgacacaaatat

SEQ ID NO: 104659 - DNA, 122 bp, Homo sapiens
agacattccataaagggatagaatgatgtcaaagaacatttgtccattggcttctcgaatcgtttattcagtcaaacaaatgtttattgagcaactgttatatgccaggcactgtgttagac

SEQ ID NO: 104660 - DNA, 122 bp, Homo sapiens
gaccctcggacccggctgccgccgtcgccgccatcttccggccgtcccagccccgccccgcggagaaacctggccaggttcctgttagaatcctgccaggtgttaacttgttttaagaggcc

SEQ ID NO: 104661 - DNA, 122 bp, Homo sapiens
ggccaccctgaggggctgccaaccggggccccatgagtgctagagctgctggtcttgtgacgtgggcacctgtctgccaggcctgggcacgggcccagggtcacgctcatgctggggctccc

SEQ ID NO: 104662 - DNA, 122 bp, Homo sapiens
agggggacggcagctggagcgcgtggagagagcgcccgttccctgggagccactggagggcgcatggcacacggcgcccggccagggcctgactgtgactggagcaagagccgagggactgg

SEQ ID NO: 104663 - DNA, 122 bp, Homo sapiens
aagtgaatgcattttaaatatttgccatgtcttttattagcccatcctttccctaacttccgcacctatttcaaaacctttatgaaactccaggtagactgcagtttcgccctccaacaggc

SEQ ID NO: 104664 - DNA, 122 bp, Homo sapiens
ttcccctttaagctgcacagcccagggtctctggacacaggcgccccgcctgcttccccacgcaggtcccctctggcactgtggaggactcgccatgcctctcctgccccctcccctgtgtg

SEQ ID NO: 104665 - DNA, 122 bp, Homo sapiens
tgtcaacccgtcccaggccctgactggggctcaccaggccgcggtcaggaggccgggctacgctgaaccccaattcccaaaagctcctggtggatttgagatggcagagacatctggacccc

SEQ ID NO: 104666 - DNA, 122 bp, Homo sapiens
ctggagtcctccgttcccctcagcctctgagctgaggccccacaccagagtagggggcggcgcggcacccgtgccccggcatggcgacaccggacgcggggctccctggggctgagggcgtg

SEQ ID NO: 104667 - DNA, 122 bp, Homo sapiens
acgacatcttcgagcgcatcgcaggcgaggcttcccgcctggcgcattacaacaagcgctcgaccatcacctccagggagatccagacggccgtgcgcctgctgcttccgggggagctggcc

SEQ ID NO: 104668 - DNA, 122 bp, Homo sapiens
ggcagaggctggaggaccgcggcgcccgggacctgcccgcacctgactgcagccaggtggcgccgattccggacgcccagaactctgtgggaatgcagctgtactgtgcggcgtgtaaacca

SEQ ID NO: 104669 - DNA, 122 bp, Homo sapiens
agggcctgggctgtggagtcagacatggcttcttgtctccactccactagttaccatctgcgtggctcagagctaatgatttcttctgtgagccccagtttcctcttctgtaaaatgaaagt

SEQ ID NO: 104670 - DNA, 122 bp, Homo sapiens
cagtcaccagccctgcgtcttctgtgtaccctagaataagtaagacaagcagagtctgtgcgtaggaaagaaaagtgggcacagagggctcagccagcgttataagccagtataataaacaa

SEQ ID NO: 104671 - DNA, 122 bp, Homo sapiens
accacagtgaggatttggcaggaaacacggtgcggccacacagtggaacgtggacctctacggtgactctgtgagtgaaggcagaaggagggaatgaatgaagtgagcttcagggggacgcc

SEQ ID NO: 104672 - DNA, 122 bp, Homo sapiens
tagtttttgggttgaaaatagtgggccagtgtttggttgggggcagtgaggctgtgatggcgggggaccatgccaagctcctaccagcctgggacgctaaaccagcacttccccatttcctg

SEQ ID NO: 104673 - DNA, 122 bp, Homo sapiens
ttcaggagccgcaaggccatggctacccggtcagctcaggatcaaggacccaaggggacgcggtcgcgacggggccctctctcgcggccggcgcgctgccgtgacgtcacggccggggtgcc

SEQ ID NO: 104674 - DNA, 122 bp, Homo sapiens
cctccatcttttccgggttcttcctcccagctaggccccgcccccatccccgcccatacgcgttaggccccgcccatgcccctctgagccctgccccagtacgccaggcccccctcccaacg

SEQ ID NO: 104675 - DNA, 122 bp, Homo sapiens
cccaatgtcacgcagctggtaaacaatagaactaaacccaagtctggctgcaaccagagccgtagtgcgtggttgcatgttatcagcctctcttggtcaaaggattcagaaggcaaaggact

SEQ ID NO: 104676 - DNA, 122 bp, Homo sapiens
ttgtctgggaatgcaggaaggttttgcagaggagatgaagtttcagttgcaaccctgctgcgtgggcttcaatttcaccacctgagatttaaatagaggcaggagtcactcaggctagaatg

SEQ ID NO: 104677 - DNA, 122 bp, Homo sapiens
atcatctcagtcgtgtcaccatcacagatggatcagaggtccagacaacgtcacctgacacgtgtcaaccacacacttcctacatatctccatcatgatcggtcacagatatcacaggcatt

SEQ ID NO: 104678 - DNA, 122 bp, Homo sapiens
ttagtcaataatgagggatgggctaatgttccacacttcttgggattgtcactgtagcaacgctgcctccctggcctgcgcacttctccctagctgttacttgtaagattgggaaagggaga

SEQ ID NO: 104679 - DNA, 122 bp, Homo sapiens
ttattgtgtaattgatttataaataacaaaattttttttacaacttatttctgagttgtgcgtttgttttgagggaaggagtgagagaaggcaggcaacagcttcacccctctaaaagtgga

SEQ ID NO: 104680 - DNA, 122 bp, Homo sapiens
tgcagttcactcagccagtgtggaattatcctcctctttccacactgccttagtcagtgccgctgtccaagtgcacgttgttggcgcccgttttcatttcctgttttgctaagaaagtgggg

SEQ ID NO: 104681 - DNA, 122 bp, Homo sapiens
gcccacagcccgggattcctcctaggccgtgccgtgtctgtgcgggcccccactggaggtcggactgtccgactcacattgccgccgctcctaaagcccctggagcccaaatccaatgttcc

SEQ ID NO: 104682 - DNA, 122 bp, Homo sapiens
agggcgggagcaaacgagatgaaaagtgtgaacattgtgcagcactaggatttcgagatgcggacctggctttaaagtgcatacactttagggacagtgcacactttctagttatgacctcg

SEQ ID NO: 104683 - DNA, 122 bp, Homo sapiens
ggatagtctgttactacctctgggactctcatctcttgagtgtgcttgggtgtgtccaaccgtttttcctagtgacaaagtctgggtaattctgtggggacatatattggtgtatctgggag

SEQ ID NO: 104684 - DNA, 122 bp, Homo sapiens
cctggggttggggagctgcgcatcaatattatattaactgtgaagccttagtgcttactacggtcgagaaaaagcgctcctctgattcgcccctcccggcggcgcggaggtgtgagctagaa

SEQ ID NO: 104685 - DNA, 122 bp, Homo sapiens
tgggagagagagagaccgagccggtctcccttcacatgctctgcattataagcgaaggggcgggcaggtggaaattcagaatattacagagaccggaaagaacatcatgggctgtcacacgg

SEQ ID NO: 104686 - DNA, 122 bp, Homo sapiens
aattgggaattgggaattgggaaatctaggttctcagcccaacatttgcacctgctagttcgtgatgcaaggcacctcacttatccaggtccccattaaactaggtttaataaagtgagttt

SEQ ID NO: 104687 - DNA, 122 bp, Homo sapiens
cccaggctgaggccgggcgtattcccgcggtgtttcgggctgaggctgggcgtattcttccggtgtttctcacattcttgtttgggaaactataacgcgctgctcaaagatcatcttaattc

SEQ ID NO: 104688 - DNA, 122 bp, Homo sapiens
gctagttggtgtgtgcttgaactaacctcacgctgaaaaagaggggcttttatagagctgcggcggagaaaagagacaaaaggagccctcctatctatcctgggctggttaggatgacgtgc

SEQ ID NO: 104689 - DNA, 122 bp, Homo sapiens
ttgggccctagattttgaggcggcctgggaggggcctcgtttttaaatctctcctacacccgccccttctgcccggggatggtagtttctcagagtcaacctattggcattatgtggcaaat

SEQ ID NO: 104690 - DNA, 122 bp, Homo sapiens
gtgagccaccacgcctggcccgtttttaaatctttacaagtaactgtaattttctggacgcgctgcctgtgagcttcttgaaactggagccctcggcaggcacgcctgccatcagcgccacc

SEQ ID NO: 104691 - DNA, 122 bp, Homo sapiens
ccagagattcccgcacctgcacttccagcaactgtggatacatggacaagagatgtcacacgggttggcaaaccatcagggacactaatacctgagttacctatttggaaattaaaggtgag

SEQ ID NO: 104692 - DNA, 122 bp, Homo sapiens
ggcagcacaggatgtgtttgtgctgcgggaagcagggtgggtgggttctgagcactctctcgcctgctcagtgtgaatacacatgacagagccaagtggaaattctgtgtgtattatctatt

SEQ ID NO: 104693 - DNA, 122 bp, Homo sapiens
gagtcagaactctctcgtgctctgttatctgtgtatggccgagaatagcgcgtcctctctcgataaggggagctcctatggtagcgacgatcagagtcataataatgagatcgttctgacct

SEQ ID NO: 104694 - DNA, 122 bp, Homo sapiens
ccgccacaaggcctgccgggagtagtagtttgtatagttcgcagccggccagggcggagccgggtgggttggtggggagggcggggaaacaagcctggaccacaactcccaggagtacccgc

SEQ ID NO: 104695 - DNA, 122 bp, Homo sapiens
cctgggactggggaaagtgtcctgtcgagcttaaccctgaagggatttgttcttcaggtacgaggaacagcaaattcaggaaaaagtggcgacctttcgactcatgttgctggagaaggatg

SEQ ID NO: 104696 - DNA, 122 bp, Homo sapiens
cccccgctccccatgagcgcagctccaagctccgggctcctagaaggcagcgccactggtcgtctccctttagctgccatcggccgccatcatgattatctactgggaccttgtcagccatg

SEQ ID NO: 104697 - DNA, 122 bp, Homo sapiens
ccacgatatgcaggagaagcccatgatatgcaggagaggcccaagatatgcaggagaagccgacgacatgcaggagaagcccaagatacgcaggagaagcccacgacacgcaggagaagccc

SEQ ID NO: 104698 - DNA, 122 bp, Homo sapiens
gtctcaactgcagactacaatctaagacactgctgctgactcactgttacacaattaaagcggtttcccaaagtagactcattttctaccacatgaaaatctatcccgaactgttttccaat

SEQ ID NO: 104699 - DNA, 122 bp, Homo sapiens
cacctgtcgttattgatctccctgttaattctcttctagacaagagccgttttcaaacatcgggacacaaactgttttgacaaccagccaatagaagttgctaatctaccactagaaagggt

SEQ ID NO: 104700 - DNA, 122 bp, Homo sapiens
cctttctggtgagtgtgtgtgtgtgtgtgtgtgtgtgtgtgttaagggggggtgtgtctgcggagatgtgtatgtctgtgtatgccaaggtgtctgtatataccctgatgggtgtgtgtagc

SEQ ID NO: 104701 - DNA, 122 bp, Homo sapiens
cataacctaaaagtccctgcctcccacccgcagccccctccctgaccctgtgacccatcacgctagccttctgcaccctttgattctgtgcttttcagagccccgagaaagctccgagccta

SEQ ID NO: 104702 - DNA, 122 bp, Homo sapiens
gagtggagtcattataagctaatggcgaaaatcagacttaagtggttgccaagctaatggcgaaaatcagacttaagtggttgccaagctaatggcaaaaatcagacttaagtggttgccaa

SEQ ID NO: 104703 - DNA, 122 bp, Homo sapiens
cccgactgcttgaggcgcgtgttcgagaagtacgggcgcgtgggcgacgtgtacatcccgcgggagccccacaccaaggcgccccggggcttcgccttcgtccggtttcactaccggagcga

SEQ ID NO: 104704 - DNA, 122 bp, Homo sapiens
catttctgctcggtaacccctccaatgcctgaaggggacgatgccgtgacgttgctctgtcgggacacctcttccctcccccgcccgcggtcgccaggttcccccgcggcccgcgctgtccc

SEQ ID NO: 104705 - DNA, 122 bp, Homo sapiens
ttcactccaggctggagattgacaggtctcgggcttcactgagccaaagtggcgcccccacgtggcgacagcttaactttacacagctctccacccaaccccagctttgaaattatgcaagt

SEQ ID NO: 104706 - DNA, 122 bp, Homo sapiens
gatcatttgcaggaggtaccatgtccctcggcaccgctgggacaggggtgatgcccagaacggcgctgatgacaccagtttcagcaccagtgcgaggtgctgagccccgattcccgccaggt

SEQ ID NO: 104707 - DNA, 122 bp, Homo sapiens
ctacccccatgccctatattcacacaacctgtggctctggaccaggtggagagatggaaccgccatgatcagaagctgctggaggcagtgcacaggggggatgtgggacgcgtggctgccct

SEQ ID NO: 104708 - DNA, 122 bp, Homo sapiens
gggtccgagacacccgaatcgcagccgtaatctgaattccaacctctccgatccgggtaacgtcaggggcggcgcgccactttcattcaggatcaactccacagctccaggagaacccacaa

SEQ ID NO: 104709 - DNA, 122 bp, Homo sapiens
ccgctacacacaaaggttttgggaaaaacccaaacttgttgcagagctgggtgaagcccccggcccggcgcgcttctgccctcgccggctctccgctcctgcccctgccccttcctccactt

SEQ ID NO: 104710 - DNA, 122 bp, Homo sapiens
gtgctgggcagtctttctgctgctttgcagcatcagatggcagcattatcatccatagcacggcaggtatttcccctcagggattactgtttctgttcagcaccgagacagtctaatgtgct

SEQ ID NO: 104711 - DNA, 122 bp, Homo sapiens
cggccccgccgcctggaatcggggcccggggactgcggtatttgccggggagggggctgtcgcctccccggccccgggcgccgctggaaccgcgagccgaggagagactgagcaggctgcgg

SEQ ID NO: 104712 - DNA, 122 bp, Homo sapiens
caggggctgacctaaatatatagtgaaaagaaaacttcaacaaacaaatcaagcttcttacggaggaactctacaaaacgcagaactggcataggatatatgttttaaaaatactgcagtaa

SEQ ID NO: 104713 - DNA, 122 bp, Homo sapiens
gcgaaagaacaaagtttccacagcgtggaaggggacccgagcgggttaccaatgctggctcgggcagcctgcttttattctcttatccggccccgcccacatcctgctgattggtagagccg

SEQ ID NO: 104714 - DNA, 122 bp, Homo sapiens
tgggtccctgtccctgcacaccgggtcagccggctcctgggtgcacaggcaggtggtgtgcgtccgcattgcagaacacggggcgttgcaggccggagctgggttttcacacagattgagac

SEQ ID NO: 104715 - DNA, 122 bp, Homo sapiens
tttctgttcttcacttagtatgtcaaagcttgttgtggccccacagggcaggaatggcagcgtcagaatagaagctatttattcagagggtttatgtatgtgtatgcgtgccagcacacgtg

SEQ ID NO: 104716 - DNA, 122 bp, Homo sapiens
ccctgccgtcacagccaagctcgcgctccaaggcagctctgccatcatctgatgcagactcgtcagctgttgccatggagaccagccagcagtgagctctgtgccctcctgctgcaggggcc

SEQ ID NO: 104717 - DNA, 122 bp, Homo sapiens
ggtatgaccggaaatagcgcatgggactctaggcaggcgacaccttagcggttcctaaagcgagctatgctacggaagcctcagagtgtcaaaattactctcgttgccaaaatactctgtgg

SEQ ID NO: 104718 - DNA, 122 bp, Homo sapiens
gcccttgcagtggttccgggggtgccctgggcatccccacaccgccccccacacacagcccgaattcccctccacgaaggatacagcttgaccacgtccgtgtccatccgcctcttgcccgg

SEQ ID NO: 104719 - DNA, 122 bp, Homo sapiens
ttgcggttacaggacgggtgggggcctctgcatatgtgcagagtacggagggcccagggacgcgaggctccccgatgggcaacctcccctgcctttgcttttccccagagccccctcctggc

SEQ ID NO: 104720 - DNA, 122 bp, Homo sapiens
aggcggggcggtccttgcccctgcagcccaccccagctccggcagtgctgggaacgccagcggctcctccgccttaggaaccagaggtggctgcctttgtccctcatcatgcagcccagagc

SEQ ID NO: 104721 - DNA, 122 bp, Homo sapiens
agacaggtcgagtgtgtttccagagaccgggccgtccgtggggcagtagcgcctggatgacgtctgctttcgcctggagccctggctgcaaggggcggtgccgggcaagggccaccccaggg

SEQ ID NO: 104722 - DNA, 122 bp, Homo sapiens
gcagggctttggggcctcactttacctttctcttccctggagaccactgaaatgcactggcgagagagatgggtttaatattcatgaaccagccaggcatgagtgattagctgactcctgtt

SEQ ID NO: 104723 - DNA, 122 bp, Homo sapiens
gtcactttgttcactgcatcaccagtacccattcccagtagagtgcctgacatagtgcttcgcatatggtagtcttaagaaatcattttgaaccaaagaatgaatgaactaaatttctattg

SEQ ID NO: 104724 - DNA, 122 bp, Homo sapiens
tgtttcgggaggctacatccacgcccaggacagccgggagggcaagctgcagcctctgcacggcctctgctgtgtctgtgcaccctgattgagaagcctgcgtatcagagacctccaagtgc

SEQ ID NO: 104725 - DNA, 122 bp, Homo sapiens
agagattagaaagactcggacgtcttttgactgggttcaggtcacactactcccaaaatacgacacctcggcatttgagaaaacagcagaagcagaaacgtttttctctgggcccttgttcc

SEQ ID NO: 104726 - DNA, 122 bp, Homo sapiens
gagaaaaccgttgccggaaattgtcgaagattaccggaagctaccgagtctgacccaaagcgtaggtttctcttctcagccacgccttcagccacgcacaccacgcccaatcggccgtccca

SEQ ID NO: 104727 - DNA, 122 bp, Homo sapiens
aatcacgctgcattaactccaaaaggggagttgcatgaagcaggatcctctctgtactggcgctgtgtcccagcctgacttttgccctaacggtgggatgggtcagtctgactcagctcaga

SEQ ID NO: 104728 - DNA, 122 bp, Homo sapiens
ttttttttttttttttttagtgtcgggtatgcgtttccccaaacaactgaaggactcagccggggctttcactgtctacctcttcctgtgtagtgagggtgggacttgcaatgagcaatgta

SEQ ID NO: 104729 - DNA, 122 bp, Homo sapiens
gcatcaggggccctgccgtggggctcccggtctcagcagtgtttcagccaactagctgcacggctgcagacaccaccgtggtccggcggcagggggtgaggtcaaatcgcggagctgttttt

SEQ ID NO: 104730 - DNA, 122 bp, Homo sapiens
tgctgctgctgtcgctgctgcccgaagctggggccggcccgctccatggttggcaccgcgcgcctcggaggctctctggtactgcttttccaccccagctggggtccgtccctcagaagaac

SEQ ID NO: 104731 - DNA, 122 bp, Homo sapiens
gagaagactcgagctgcagctgatcgaaaagcaaggccataaagcccaagtaaatagaatcgatccagagaagacttgagctgcagctgatcgaaacgcaaggccgtaaagcccaaatcaat

SEQ ID NO: 104732 - DNA, 122 bp, Homo sapiens
ggttccacacaaagttgcctgtttggggggaagctccacgaaggacactttgggatgccacgccagtgcccaaactgaaaataagcatgcccagctgtgcagagacgggaatgcaggaaaat

SEQ ID NO: 104733 - DNA, 122 bp, Homo sapiens
gtgggaggagacaccgacgaaaagcattctgacggccgcgcttccagcgctaaggattcccgcgtagtgagcatttcccagaggtctctggggcatggctccattagggccgtgtgcagttg

SEQ ID NO: 104734 - DNA, 122 bp, Homo sapiens
ccccgcagcccggcccctccagggggcaccgcagagcctcttccccgccctgtgcggctccgcccgtgctgggcctgctgggccaatgctggaggtgccttcaagtcttcggttagcgtcaa

SEQ ID NO: 104735 - DNA, 122 bp, Homo sapiens
cgggagggaccctgcaatgcttaattagaaccggttgccatggcgacagtctctaggcagcgtgggctgagctctccgtaggaataaagggtgggccgccgctggaccctgcgcgcgcccgc

SEQ ID NO: 104736 - DNA, 122 bp, Homo sapiens
ccccttcccagtgccctcgtccctcagcctccaggaccccccattcagccctccagctaacgggctcctgtcccctcatgacgtgctgcacctgaagccctcgcaggcacccacggtgccct

SEQ ID NO: 104737 - DNA, 122 bp, Homo sapiens
gtccccgcccccggcccgcgcccgcgccccccacgcgcgcccacccggccacgcgccccccgcccacgcccgccgtgcgcgcaccctgccaccgcaccccccgcaaaatcccacattcacaa

SEQ ID NO: 104738 - DNA, 122 bp, Homo sapiens
ccttcttcctccgccttttcttctggggcatcattctgtcggctgccttctcccagcgctcgcaggctcactgtgccgcctcctcacacctgcgggaacctgagacctcctccctgagctct

SEQ ID NO: 104739 - DNA, 122 bp, Homo sapiens
agcagatgcaagggaagggggtgggagagggaggacacacagatctgcagtcagggtgagcggatgagtcagcacatttgttcctgacactagttttaaaaacatgcttctggcttccccca

SEQ ID NO: 104740 - DNA, 122 bp, Homo sapiens
gggtcgtcggtcctgggtcgctggtcctgggtcgtcggtcctgggtcgtcggtcctgggtcgtcggtcctgggtcgctggtcctgggtcgttggtcctgggtcgttgatccttggtcgttgg

SEQ ID NO: 104741 - DNA, 122 bp, Homo sapiens
gaaggaccccaggggccttgggagcccagggggttccttgggggcactccgagcaggggccgggccctccatgtgtccattaacgacgacggcaactggcccctcggctctgctggcaggag

SEQ ID NO: 104742 - DNA, 122 bp, Homo sapiens
gaatccggaagcctgtacggagaaggggcggggccaaaactgcgcgcccaatcggggtgacgctctagccttgccggggactcgtgggtaacttgcttttgggagccagcggtatggcgtcg

SEQ ID NO: 104743 - DNA, 122 bp, Homo sapiens
cctggctccgcgcggcctcatcgcatcgggcggcctctcccagcgcccagcctcggggctcgccagtgttaaaggtgaatgaaagacgtgacccaggaatgcccgacctgcagctaacgctg

SEQ ID NO: 104744 - DNA, 122 bp, Homo sapiens
taatttaaaatgtagtgacaccctttactgtgggggaatataaaggtggctgaaagcacacggcattcagcagccattgtagccataattgctgcttggctatggcagaactgattttatag

SEQ ID NO: 104745 - DNA, 122 bp, Homo sapiens
tgggtaggggtgcagaggggcgcggcaggcaggatggaagagacgcccccgttcagccaacggcgtccctaattctgcgcccagcccccgcgctgctcctccgtaaaaactttttgaaactg

SEQ ID NO: 104746 - DNA, 122 bp, Homo sapiens
ggagctacagaagcaagtttgggcgggaggtcaggccttgccaggtcccagtgaggcctccgagctggatctgggcgccccagggagaaagtccccaaatcctcctgggaggcattggagaa

SEQ ID NO: 104747 - DNA, 122 bp, Homo sapiens
tatcttcaaggaattatgctgaagcagttatactgctgggtgcctgtttccaataattgacggcagtagacttgtagtcttccaatagggaagagaatattacttcttcctttttctagaaa

SEQ ID NO: 104748 - DNA, 122 bp, Homo sapiens
accttgtgatccacccgcctcagcctcccaaagtgctgggattacaggcgtgacccaccacgcctggctgtgtaggtgtagtcttaaaactctaatctgagattccttataaaagttccagc

SEQ ID NO: 104749 - DNA, 122 bp, Homo sapiens
ccaagtccccaccccacccagaagcccagacagcttcacctctcactgtgttcgccacgacgctttgcggcacttagcccgggcactctggcagcccagagggagctggtccccggatcaag

SEQ ID NO: 104750 - DNA, 122 bp, Homo sapiens
tgaaaattaataacagttgaagacgacagcacagcctggaaccaagagcagggcctttgacgacgttcaggggtgacgacgccctcccttcctcccccactgtgcctctgaccctatatttt

SEQ ID NO: 104751 - DNA, 122 bp, Homo sapiens
ccagcactttgataagctctctggcctgttttaggttccctggggtgaagaaggtataggcggtacccttgttggtgctacgggctgttcggccaatacggtgcacataatcctctgagctg

SEQ ID NO: 104752 - DNA, 122 bp, Homo sapiens
ctccaatgatcacgtgatatgatgccccctccccactttactttgttcatttcttgacaacgaagaagagaaaagggggggatgtttgtttgccttctctctagaaaccctctgtactgtgg

SEQ ID NO: 104753 - DNA, 122 bp, Homo sapiens
agccttcgggaaacaaagcccttcactttaaagctctcccttctttcaaatctgcctgcccgccaggcggctctgttcccctcagtcagctctggcagcaagaagtctgtgaactgtgtctt

SEQ ID NO: 104754 - DNA, 122 bp, Homo sapiens
tggggatattcataagtgcccagctgagggtatgaggcctgctcgctattttatcaatttcggagagagcgcatcgatactgcctgcctggaggctttgctgggaactagaaattctgagtc

SEQ ID NO: 104755 - DNA, 122 bp, Homo sapiens
agaggctggttgcacaggaaggataaatgtgggatgctcacaggacacacgctgccccgccggttagtgtcagaactgcatgagatgcagcacagagtgcatttaggagggccccggcatgt

SEQ ID NO: 104756 - DNA, 122 bp, Homo sapiens
tgcgcgggggagagggaggaaagacgagctccaggccggtgcgcccgggcacaatcacgacgatctggacaagagtggggatccccggccctgcccaggcagcctaggccgcccgcgtctgg

SEQ ID NO: 104757 - DNA, 122 bp, Homo sapiens
cttaacggtcaccgcaccccgagaggtgggggtcactgcctgagtcccacaggcaaggaccgcgaggtctgcaaggccaagagcttgccctgcacctgcccgccagcaagtggggggctgag

SEQ ID NO: 104758 - DNA, 122 bp, Homo sapiens
aatcctcagcccgggagtggcttccccagaaacagcagccccaagcctccgagagtcagtcggagaaaaggacacactcaggcgccctgcgacagggatgcccgtccgacctacaaggaacg

SEQ ID NO: 104759 - DNA, 122 bp, Homo sapiens
tcaggctggaaaacacggctcccagaaggtggggttagaaaacaagagcttgcgaggcggcgccctgtggtccctcgaggaaatagtagagagacaaagagggcctgctcctgggaagccct

SEQ ID NO: 104760 - DNA, 122 bp, Homo sapiens
gttccctttgttacgttgcgctgaccctaggcactttcttcccagaatgcaccaagaatccgaaactccaaacaagtttgagatcagcgttggctggggggaggcagtgggggtgcatctac

SEQ ID NO: 104761 - DNA, 122 bp, Homo sapiens
aggtatgctggtgctggtggcccaggcaggaggtgacactctcaaagtgactggtcactacgtaaaatgtgtctttcttttgtttgtttcccacctgctttccgagcccctttctcggacag

SEQ ID NO: 104762 - DNA, 122 bp, Homo sapiens
ccgcggctctacccggcgcgcgatttccaggttcctccgccggctggtgcctgggcgccccgctctcgcccgggagcgaggccctgggcctccaaacgccagcatctctttctcgctctttc

SEQ ID NO: 104763 - DNA, 122 bp, Homo sapiens
tgtaataactattgaactatcttcctgcttctctagtttcccgcagttgtctcatagtaacgagagtgatcctttacaaagttcctttgcttaaaatccgccactggttttctttttcacat

SEQ ID NO: 104764 - DNA, 122 bp, Homo sapiens
cgcggacatgggggagaagctggagctgagactgaagtcgcccgtgggggctgagcccgccgtctacccgtggccgctgccggtctacgtgagtgccgccctccaccgtccctacctcccgg

SEQ ID NO: 104765 - DNA, 122 bp, Homo sapiens
agtgcatcacagatgctatgtgcaagtttttaagtagtcaaccaaaataccctgcactgtcgaaagccttaatacttttttccaatttctcaaaaaccttgtatttgaaacggaaaataaaa

SEQ ID NO: 104766 - DNA, 122 bp, Homo sapiens
attaaagtgaaaggggagtatcggccaagctcaggggtctccaggaacagatatgcagctcggggcaccgggggtgcatgatccttgacccccaggcccacatgagccccagccacggggag

SEQ ID NO: 104767 - DNA, 122 bp, Homo sapiens
gcagattaaccatccgaaacaccgcttgggtcggcttcttccctactcgcaagtcctccacggctcccttgtcggaggctctgcatgtaaaagcaccccgaggctatcagaccctggctccc

SEQ ID NO: 104768 - DNA, 122 bp, Homo sapiens
tggccacgaaacaggtctcacccagaaaggaaagcggggtcggctcgcccgcctgccgcacgcttccccgggaggccgagctcaggaagacgcggcaaatcccatcctatgtgcttgcagca

SEQ ID NO: 104769 - DNA, 122 bp, Homo sapiens
gagtttcttacagtaattcaagatcagaaaatgtttgaaatacagttgaccccgaaacaacgtggggttgaacagccatgggtccacttatacgtggattttcttccgactctgccacccgt

SEQ ID NO: 104770 - DNA, 122 bp, Homo sapiens
acaaaccctgggtctgacagcagctcttcctcacaggtgagaccctcccttccagcccttcggctggttggatgtgagctggcaaacctaattcataaaagctgaactactctttgtctcac

SEQ ID NO: 104771 - DNA, 122 bp, Homo sapiens
ccatgtggtctgcaaatgggagcggctgtttttgaacacggggtcattctgcagtcaggacgaaccggtccccgtcgcagacggagtgcacgtgccctgcgccacatcctcacgctcggtgg

SEQ ID NO: 104772 - DNA, 122 bp, Homo sapiens
ttgaattatggaaaaagcagggctcaagtctgaattcaacaaaagcttaatttgaatggtcggattattttgtaaatgtgttagtgtccacagtcagggctttctgaactccaaataatatg

SEQ ID NO: 104773 - DNA, 122 bp, Homo sapiens
gcctgcattaggaggtctttgctgggttctagagcactgtagatttgaggccaacggggccgactagactgacttctgtatttatcctttgctggtgtcaggaagttcctttcctttctgga

SEQ ID NO: 104774 - DNA, 122 bp, Homo sapiens
ggcagcacagaccaccacgtgcccagaaaccagggatgttcctgtctccaaacacccactcgcgaatccctttagctcttggttcagccaagaaagctaccaagccgcgtggctcagaagca

SEQ ID NO: 104775 - DNA, 122 bp, Homo sapiens
aaaacgaacacgccggcccaggccgcacggtgacggatgcagcagagattcaaatggcagcgatgctcaacacccgctcagccagggccctgccggcccccgccatcaaccccagaacaatg

SEQ ID NO: 104776 - DNA, 122 bp, Homo sapiens
tgcgcaagggaggcggcagccccccccaagaagagaggcaggccggcctccagcgctccccgcccacaagcacgtccttgcccccgggaggttgtttgccggctccaggatctccctcccgg

SEQ ID NO: 104777 - DNA, 122 bp, Homo sapiens
ttatgtgattacatattagatttagggagagcaagtgtagatgtaggacttgaaaaaggacgcaggtcatttgaaaaaagacaatcagctcaaagcatgacatgaacttcacagcctacgag

SEQ ID NO: 104778 - DNA, 122 bp, Homo sapiens
gggagggcctgccgcccgggaggctcggatccggggcgcccagtgccccccgctgccttccgtgagccgtcgggccccagctccacgtaggcctcagacccagccctgtttctgcttgcggg

SEQ ID NO: 104779 - DNA, 122 bp, Homo sapiens
agggccggccggcggggctcgctcctctccggaaggaacccagggccggctggcggggctcgctcctctccggaaggaacttccagagggaagagactgagatcattctggatccagacttt

SEQ ID NO: 104780 - DNA, 122 bp, Homo sapiens
ggtgaagagctgattgaggctgccaagaggaacgacttctgtaagctccaggagctgcaccgagctgggggcgacatcatgcaccgagacaagcagagtcgcacgctcctgcaccacgcagt

SEQ ID NO: 104781 - DNA, 122 bp, Homo sapiens
ggcccacgatgaaacctgagaggggtgtccccttgccccatcctctgccctaactacagtcgtttacctggtgctgcgtcttgcttttggtttccagctggagaaaagaagacaagaaagtc

SEQ ID NO: 104782 - DNA, 122 bp, Homo sapiens
accagagccaccgtctccggcctcaagccgggcacccgctacgtgttccaggtccgagcccgcacctcagcaggctgtggccgcttcagccaggccatggaggtggagaccgggaaaccccg

SEQ ID NO: 104783 - DNA, 122 bp, Homo sapiens
tttcttgcaagtgacctctttttttattttctggaagctaagatcttatcattggccttccgaaatttcataagggtattttaggatgtcctgccttccagacaaagacctgtattttccaa

SEQ ID NO: 104784 - DNA, 122 bp, Homo sapiens
tctctcaggcttgctgccaaaagccttttgtgttttgttttgtatcattatgaagtcatgcgtttaatcacattcgagtgtttcagtgcttcgcagatgtccttgatgctcatattgttccc

SEQ ID NO: 104785 - DNA, 122 bp, Homo sapiens
gagttttaggttcgaatcccatcttatggaaggtggtattggtcccttgggtgtcccacccgtctcagccaaactgcgggccatttcccggggcgagcaaggggagttaccgcgccagtggg

SEQ ID NO: 104786 - DNA, 122 bp, Homo sapiens
tctggtacaacagcaggtgtttgcgtgggatgcagcagtggctctgcccgtccttgggcacgcagtccaggatggagtccccttgggtctgacagttgccccggctcctgccaatagtccag

SEQ ID NO: 104787 - DNA, 122 bp, Homo sapiens
ggcaggaatcgttttatcattctccatcctcacatgcaatgttactttgaaagcctagaacgcttttcaccatgggcacccaggttctccatatgcacaagtccctgaagggttggtgcttc

SEQ ID NO: 104788 - DNA, 122 bp, Homo sapiens
ggcggagaggcccgtcaggttgggagggttacgagtccagccgtggagaggggaatatcacggccttccttgcccagccttgcatgcccacgtggaatttacttagatctgtattcaattaa

SEQ ID NO: 104789 - DNA, 122 bp, Homo sapiens
ggagacgcataaacctgggttgggaaagtgcccagatctgcctgggggacacacgagcctcgctgccagtgccgggcacgcagcctctccagtcctgccgtcagcaaccgcctccggccctc

SEQ ID NO: 104790 - DNA, 122 bp, Homo sapiens
cagtgaagtcgagacctggaaactccggcggcagcgagagacaaaggcccagccacatcccggaagccgccctgtccgctccagctttgtgcctgattggacagttcccagcccagcgtccc

SEQ ID NO: 104791 - DNA, 122 bp, Homo sapiens
ttaatatttctaaaatataagtttcattgtcccccaggttagcccagccaggactcattgcgcagtcctcctcgccttcctggaggcgccgcaggaagcgggaagtcgcggcttggcggttg

SEQ ID NO: 104792 - DNA, 122 bp, Homo sapiens
ctgctgcagctgggaacacagggtcccttggtctcagcgacagggtcactgtggctgccccgggcttgaccccacctctacctgtgcctgtttccccagctgcggggaggcaagcccggcgg

SEQ ID NO: 104793 - DNA, 122 bp, Homo sapiens
aggctcaagggagggtgacactgactaaggctgcacagcagggctatgaacctgctctaccgactcctgtggcctgtggggcatggtgtgggagcatcttcctgaggctgctgttaagaaca

SEQ ID NO: 104794 - DNA, 122 bp, Homo sapiens
gaagcgcatgaatgagctaaagccacaaagcgcggggctggaggtttggctcccaagaagcgaggaaatgggttcggaactcttctgccaagtcccagtagatctacccggtaaacttccgg

SEQ ID NO: 104795 - DNA, 122 bp, Homo sapiens
cttggtctacagtgctcagaaagacacactgccttaaaagtcaggctagtgccctagctccggtggcctctgcaaatgaggccttgacagtcgtcagtggacagacacatagtatccagcac

SEQ ID NO: 104796 - DNA, 122 bp, Homo sapiens
cgggcctaggcgccaacaccgacctcccccgccaagcttcgcggccccttcaaacttgggcgattgtctccgccagcttcgcccaggccttggactcaagagttgctcgcaaaagagagccg

SEQ ID NO: 104797 - DNA, 122 bp, Homo sapiens
tgcagccaaggcctccttaagtgaggttgccactactcgtctccaaaaaggctactgactcgggtgcgagtaacagagatcgagactcagttcccagggccactccatataacacagtcatc

SEQ ID NO: 104798 - DNA, 122 bp, Homo sapiens
ctgttcatggaaggaatgtgtctgcagctccaaattcccacagagaaagacaaggggaatcgttggggagaaattcctgggccacatttttcttgctgttcatgtggcctgaagccattgaa

SEQ ID NO: 104799 - DNA, 122 bp, Homo sapiens
tatagataaaatcatgttctatatcacccctttggataaaccttttatttatgaatctagcgcatttcccctcgtaggctaaatttccttaagcttttctggacaaattccctgcattcaac

SEQ ID NO: 104800 - DNA, 122 bp, Homo sapiens
ttgagaagcttccataaatttaggtccatctgtgggttagagaaccccctccaacaactccgtgactcccagggtcttaggctggttgattgagaaatgacagccttgaaggggtccattct

SEQ ID NO: 104801 - DNA, 122 bp, Homo sapiens
tgctttgaaataaatggaagttttagctcacatggcggccatgcatgatctgtggcaagacggggcaccgctgctccaccagtgctgcgagcgccgtcagaataggccgcgtgggctcccag

SEQ ID NO: 104802 - DNA, 122 bp, Homo sapiens
cccaggccggccagtccaagtccttttgttgttgtgcagcgctcgcaacagctgatcggccgctccgctcgccgtcgggccccgctgccccgccccgggccgcgccaggccgggccccacca

SEQ ID NO: 104803 - DNA, 122 bp, Homo sapiens
tctgcggaggcccaccctgcccagtagatggaacaggggctgagcccatcatgtcactgtcgggggtcccagcccttctcagccttgggccagaccactccagccccgggatctgcctgtcc

SEQ ID NO: 104804 - DNA, 122 bp, Homo sapiens
ccccaaaattggggttcagcccaggaagtcatgtgggttcttggctccaaacaggaagagcgagccaagagagcaaagtgaaagcaagtttattaagtaaaggaatgaaagggtggagagtc

SEQ ID NO: 104805 - DNA, 122 bp, Homo sapiens
gatccgttaggggagcatgtttggctctctctggttggttctaagttggaagcagtggatcggggtggaattagggcagctgtcatttattaatcaactcctggccatttggggctgatcat

SEQ ID NO: 104806 - DNA, 122 bp, Homo sapiens
cctatctgcgccctgcgtggccacccgcaacagctgcaagccgccggcacccgcctgctgcgacccgtgcgcctcctgccagtgccgcttcttccgcagcgcctgctcctgccgcgtgctca

SEQ ID NO: 104807 - DNA, 122 bp, Homo sapiens
tgaaactaagagacctctcgcgtcttcaaggctccaagtccacagtctgaggtaaatgcacggccggcaatgggcttcacaggacagagactcggagattacagttatcgaaacacggatgt

SEQ ID NO: 104808 - DNA, 122 bp, Homo sapiens
ctgcacccttcttccatccctgctttcactcgcgaccctctaatgcagccctgcctccagcgacccccgggatggaacccctcgcccacccacaaaagagcagcctcgacctagacccactt

SEQ ID NO: 104809 - DNA, 122 bp, Homo sapiens
ggagtcgcagagaggaggaacgctagctagctccagccccacttctttgtgctttactaccgtgctttgacacttaagcaactttgggggtggggaagggagaggtctgtgtaattcattct

SEQ ID NO: 104810 - DNA, 122 bp, Homo sapiens
gctggagctgtggctgacgaacttgagagcgagggagggggctttactcttatgaaagagcgtgggttactctcctgcccgctgggtctcacctctggctctcactctgtctcctgatctca

SEQ ID NO: 104811 - DNA, 122 bp, Homo sapiens
ctgtccccggatcccgagtccctggctggcccgcagtcttcttccactgcaccggggaaacgttcttgcccctaccgactcctgagagccgctgggccgaatctccaggaaggcgattccga

SEQ ID NO: 104812 - DNA, 122 bp, Homo sapiens
aggatgctccgcgagtcagggcggctgctcccgccgccgcatccctgcaacaccgactgacggcagcatcagcaccagtgcccgcccccgagacgcgcgcattggaccacgctgcgctgacg

SEQ ID NO: 104813 - DNA, 122 bp, Homo sapiens
ctttggttccggcaagccatcgcacaagccagaatctgtaactccaaacagtagcgctctcgagcaccgtcccgaacattcactccccacgggcctggtctgcggccgcaagccgtcgcccc

SEQ ID NO: 104814 - DNA, 122 bp, Homo sapiens
caggtaacgcaggtgacctgtcttgaggcctttgcacaggcaacatagccacggtgatgacgtcctactgcgtgccaggcctgacctgagcattttgtgcagaacacctcatttcgtgcccc

SEQ ID NO: 104815 - DNA, 122 bp, Homo sapiens
ttttttttttgagatggagtctcgctctgtcacccaggctggagtgcagggacgcgatctcggctcactgcaagctctgcctgccgggttcatgccattctcctgactcagcctcctgagta

SEQ ID NO: 104816 - DNA, 122 bp, Homo sapiens
tccaagtagaaggtttccctgatcctgttccaattctgtcatctgtcttcagtccaatagcgatttgtagaagatgggggtgggacatgccaaatagctgtggagttaccccttctatggca

SEQ ID NO: 104817 - DNA, 122 bp, Homo sapiens
ggcagccggcggccccagatctagaaccgctgcagtgccgagcttccagggacgtgaagccggaaagccaggcgcccttcttgactgcgcctaggtggaactggccctccagcagcttgaac

SEQ ID NO: 104818 - DNA, 122 bp, Homo sapiens
gcagagacttccagaagcaccagaaacggagccagatgaaaggaccccaacacctccccccgccaacctttgacagaatataggggcatcttcagcctggacacgcatgcatctcccctctc

SEQ ID NO: 104819 - DNA, 122 bp, Homo sapiens
caggtaggctgggttggagcgccaggtgccaggcaccaggcaggcgggctggcaggggggcggccctgggcgggcccaggatgactggcctccaagccctgccttaatgccccggggcgggg

SEQ ID NO: 104820 - DNA, 122 bp, Homo sapiens
caaggagctggggggattcccaataggagctccgagcttcactttctcgtcttctccccgcgcccctcccgtcctgccgaccccaggtgtcctgtataaccagttcctgtcgcaagtggact

SEQ ID NO: 104821 - DNA, 122 bp, Homo sapiens
gggcccgccgcggtgagatccccggcctgtccagcccaagcccaagcgccctcgcggtcacgtggcatttccggaacattcagaacctaacagccaggaggcaggagggccgggccgaggcc

SEQ ID NO: 104822 - DNA, 122 bp, Homo sapiens
cagcctcagctccttaggggcagccatggcctgggctgcccaccccatgtcctggtgggacgtggctgcccccggagcctgctggccccagaaggcagctcagggatgctccttgctcatcc

SEQ ID NO: 104823 - DNA, 122 bp, Homo sapiens
ctgtcagtttctgggcaggctctggccgggaacgcatacaacgtcaaagcagtgaataagcgatttctgcagttcccgtagctgccagcctgtgcagtcctctgtgatgcttggggaccggc

SEQ ID NO: 104824 - DNA, 122 bp, Homo sapiens
gaaaagtgctgggcacagagctccccacgaggtccccggaaagcagacttagctcctgatcgttgtcaatctttgggcaacccggggcctcgcaacggctcgggtttagtgtgatctgggga

SEQ ID NO: 104825 - DNA, 122 bp, Homo sapiens
tgcaatctctacctcctgggtacaagcaagtgaatctatatttttaaaacttgaaccaggcggggcatggtagctcacgcctataatcccagcactttgggaggctgaggcaggtggatcac

SEQ ID NO: 104826 - DNA, 122 bp, Homo sapiens
ccagagctgaggtgaaagtgagaaccagggctccgcagtcgggggctagggcctggctgccggctgagcaaggaagggcagagaatctggctttagaattagcttgtcctccctattccccg

SEQ ID NO: 104827 - DNA, 122 bp, Homo sapiens
ccctggttcatattctagcttagaaatagttcacatagttctgtgtagacataatatttacgggaaccagagatgggtggattctgatagtggcttgtggaatagtctccagtgcagtcaaa

SEQ ID NO: 104828 - DNA, 122 bp, Homo sapiens
ggtcccggcaggaaagggttccttcagcccaacatagagcagctcccagctgaaactcagcgggctggtcaggcctcgaggactgcccaggccacatgaggtgggcaacaggggctctgggg

SEQ ID NO: 104829 - DNA, 122 bp, Homo sapiens
cgacctgaaccgccgggtgcccggccgttgcgcgggctgatgacgtacggaagctgccggcgttgccctctcccaagatggcggccaggtcgcctgctcgggcctcccaggcgactttgccc

SEQ ID NO: 104830 - DNA, 122 bp, Homo sapiens
ttccccttcgatttggggaattatcacatggggccttcttgagctggtgtgaaagggaggcggcgtggggaggagagatacaggctccacactcacactctctgtgcagttgatcgttttct

SEQ ID NO: 104831 - DNA, 122 bp, Homo sapiens
tctcacgctgtctggctcctcactccgtccctggtgcagaaccactgcccagtcaatgttcgtggagaatggaaatgtcccccacagaccccttgaacctttttccgtgttgcccagcactc

SEQ ID NO: 104832 - DNA, 122 bp, Homo sapiens
ctggattggacaaattctcggatgggcggaactatgggcggggcttagcggccccgaggccgtagagaatcctgggcggagcgcggtcgctctcaggcgtcctctggggagactcgacctgc

SEQ ID NO: 104833 - DNA, 122 bp, Homo sapiens
cagttgtttatgacccctacattcttggttttgctctttaaacaacttactggccattagcgttatcttctgcactaggagcatggggtcagcaagctactacctgagatcaaattaaaccc

SEQ ID NO: 104834 - DNA, 122 bp, Homo sapiens
ccgcctggccctggggctcgggacactggagttttcagggggagcagtgagtggaaggctcgtggagctgctggacaccagatgagtgttggcatcaggacacacacattgctcagaaccac

SEQ ID NO: 104835 - DNA, 122 bp, Homo sapiens
gtggcatggagaacatgaagttgagagcagctcgggaaggctggtgtgtgctagtggggtcgttattttcagtaggatgatggggaaggacctcactagcagaggaatcctgagcagagacc

SEQ ID NO: 104836 - DNA, 122 bp, Homo sapiens
gcgcgcgcggttcccagagtccagagctgcgggcctgaggctgagggccagggagcgaggcgagcacccggggccagccacggaggagtcccgaccaccacgggagcagggggactgggagg

SEQ ID NO: 104837 - DNA, 122 bp, Homo sapiens
tggtcgtgagtctttttggaattcaggttccaaccactgggatgtgtaattcctctctggcgagggctggtctaaatgctccttctgtgggtgctggctgagttctgcctggtgttgtttct

SEQ ID NO: 104838 - DNA, 122 bp, Homo sapiens
tacttgtggtctctggcttgagtgtgatatgttttgacatttaatgttttgaaaaggtagcgcctggcagcaggcttcctgcaacacttctgcttcattatgcttagggcatcagtacaaga

SEQ ID NO: 104839 - DNA, 122 bp, Homo sapiens
gtggggctaggaatgaaaagctatagacacctttttctctgagatctttgcaaacccaggcgctttagaggaaagaacactggcctgggagtttaaagacctgttccctagtcttgattctg

SEQ ID NO: 104840 - DNA, 122 bp, Homo sapiens
tacaattctacaatgcaaaacttgttgtagaggccagactgattatatccgttctgtgctcgaacacaagtcagtgctggctgtgtgggcatctgcgcctcccagaggcactcgcacacctg

SEQ ID NO: 104841 - DNA, 122 bp, Homo sapiens
acagactacccttcctttttaaatgccctcatgacaccctgtacttccttgatatagtcacgacactttaaattctcttaatagaggcctttctcaatttgattctaagtagaacctatatg

SEQ ID NO: 104842 - DNA, 122 bp, Homo sapiens
agctttttgtccccgccaccgcggtttttcacctccgccaccgaggctttttgcccccaccgccttggctttttgcaggttttcacccccgtcgctgcagcttttttgccccctgccaccgt

SEQ ID NO: 104843 - DNA, 122 bp, Homo sapiens
gtctggttttggcagataagttgaagacacacagcacagatggcctcatcctagaggagacgaagcctggacctggcaggcggggctctgtggctggcacccagcccctctgcagtagggga

SEQ ID NO: 104844 - DNA, 122 bp, Homo sapiens
ctcaagcaatctgcctgcctcagcttccccatgttctgtgattacaggcatgagccactgcgcccggcccccaaagtccttttacagacatgattaaataaggagctaatgaaaggtcatga

SEQ ID NO: 104845 - DNA, 122 bp, Homo sapiens
cagtggtgcaatctctgctcactgcaacctccacctcctgggttcaagcaattctacaggcgcatgctgccatgcgtggctaattaggatactttatgtagtttttaaaacataacattaat

SEQ ID NO: 104846 - DNA, 122 bp, Homo sapiens
acctcctcgccacctcccaactcagttcaacctgctggcttcctcttccgctgccgccgccgctgccgagcagtcctccccacagctctataacttctcgggtgctgccccgggcccaccgc

SEQ ID NO: 104847 - DNA, 122 bp, Homo sapiens
ccgtcccttgctcttggcttctgtttcttccggctgctgctgccctcgtgcccacctcatcgtcattttctgaagcttcccctggcccagctggaggatttcaccatggagggtgtctggcc

SEQ ID NO: 104848 - DNA, 122 bp, Homo sapiens
ccgcctgaccctgtcccgccatcccccaggaatgccagctgctactttgacatcgagtggcgtgaccggcgcatcacactgagggcgtccaatggcaagtttgtgacctccaagaagaatgg

SEQ ID NO: 104849 - DNA, 122 bp, Homo sapiens
cctcaagcaatccacccacctcagcctcccaaggtatttaggattacagggatgaggcaccgcacccagcctgtctccaattctatagtcattcctgtgtgctgtgtgatttggattcacag

SEQ ID NO: 104850 - DNA, 122 bp, Homo sapiens
ggtccgagcccgcacctcagcaggctgtggccgcttcagccaggccatggaggtggagaccgggaaaccccgtgagtgcagggagggggcgtgggcgcggagcagcccaggtgccaggaccc

SEQ ID NO: 104851 - DNA, 122 bp, Homo sapiens
gacgcatcctgcctctgtgcgccattcctgccccttcactgtcactccttggtgatcgcccgtgttcttgggtaagcagtggagaggcacagaatggcttcctctgttgatctaccgcgtca

SEQ ID NO: 104852 - DNA, 122 bp, Homo sapiens
gaaagattctacaatcgatacaattaaaatgcccgtgagttctcggcgcacaggtgtctgcgcccaggccgcgcgctaaacacgtttctaattagcatttctttaaacaatgctgatcacaa

SEQ ID NO: 104853 - DNA, 122 bp, Homo sapiens
gcattccttattgcctgtcttctggataaaagccagtttatctggggtgggatgttatctcgtaggagttttgatttgccttcatctgttgacgaatgatgttgagcaccttttcatatacc

SEQ ID NO: 104854 - DNA, 122 bp, Homo sapiens
ggcccatctattacatctacagctgacccttgaacatgggggttaggggagctgacaattcgtgggtccgcaaaatcttaactacctaatagcctactattgaccataaaccttactgataa

SEQ ID NO: 104855 - DNA, 122 bp, Homo sapiens
agctaaggatctctgttgcttcacaccatcctctaacgacaatgcgaagggagccggggccgcagctagagcgtgggcacccctaaagggcagggcaacgccggcctcaaaaaagcgaatcc

SEQ ID NO: 104856 - DNA, 122 bp, Homo sapiens
ctaacttagtcttttacagtctcagcagaagcaaaagctctttgaaacctcctttctccccgctccctaactttcttacccctgctggggctctttctttatgcttccatatttctttggag

SEQ ID NO: 104857 - DNA, 122 bp, Homo sapiens
gattacaggcgtgagccaacgagcccggcctggagacctaattttgggaaatagtgccaccgattgctgtgggggaattgttgtagtaaagtgtgattgtaaagcacaggctgacattgggg

SEQ ID NO: 104858 - DNA, 122 bp, Homo sapiens
ggccggccgccagagggaacgctgccaagcagagcgcagctaatgtgaaccatacggcggcggcgttgggcagtggcggccatctcccgcccagcttagtacagcccttactgcgggcaggg

SEQ ID NO: 104859 - DNA, 122 bp, Homo sapiens
cactaagactatggtagctaggagttccaggactcagtttcccctttgagcctcctttagcgactaaagcttgaagccccacgcatctcgactctcgcgcacaccgcccttgttgggctcag

SEQ ID NO: 104860 - DNA, 122 bp, Homo sapiens
tttaagatataatcatcttgttctttttcgtacattagcaaaggaaaccatgaaaccacacgttagaattgaggggactttgaagtcagggagtctcttttttacagttgaagaggctccga

SEQ ID NO: 104861 - DNA, 122 bp, Homo sapiens
acagggagcttacagtttagagaatgcagacatgtccacaagcaacgatagtacagcagccgtaaaatgataggggaagggtagtgttataaggccgtccatgggagggatagatacgtaac

SEQ ID NO: 104862 - DNA, 122 bp, Homo sapiens
agggcggctgggcggtgcgcctgcgcggctgcggcgggtaccaaaaggaacagcgttttccgtgcagccctgcaggtccgggcgatgatttttagtatagtgaagtgttgttaccaaaccat

SEQ ID NO: 104863 - DNA, 122 bp, Homo sapiens
tgctcttgggtgtatgtgtagggaaggagtgggagtggaaaggaactcacatcgggcctgcgctttctcccagggaccctgagcagttccagcagggaaggaggacttgtgaggaggaggct

SEQ ID NO: 104864 - DNA, 122 bp, Homo sapiens
actgcgcgtgaagaaaggcggaaccttcacgctgattggcggcgacgcgggaggctgtagcggccgaccggacgcagggggctggcgggaacgtgaagctccgcggtgcctgatggggccgt

SEQ ID NO: 104865 - DNA, 122 bp, Homo sapiens
tttggaccttgcgtcttttcgcgccaaagtcctagagacagagcctgattggcccagccacgacctgtgcccatccattggtggagacctcttgattaacaatctttcaaatttccggagcg

SEQ ID NO: 104866 - DNA, 122 bp, Homo sapiens
gggcgggggacccggcggggcattgcgggagaaggcctgggatccctgggagccttgtagcgtgggggagttcactgtgtagagaggtttcatgtcttcatctatatagtcacttatttgtc

SEQ ID NO: 104867 - DNA, 122 bp, Homo sapiens
aaggcctcttccttgagggttggtgctgtgttgcagtgaccgtggcggattacgccaactcggatccggcggtcgtgaggtctggacgagtcaagaaagccgtagccaacgctgttcagcag

SEQ ID NO: 104868 - DNA, 122 bp, Homo sapiens
ggccacctgggaagggtgtgaccctgagccaggcagctctctgcagctgaagcaggctctcgaggagctacccctgagggccacctgcagagggcactcccagcagctgggtggcaggtgct

SEQ ID NO: 104869 - DNA, 122 bp, Homo sapiens
actcattgtaccaacctggccgggagagtcattctctatatttagtgtctcactgttcttcgaggttcttgggtcctggagacttctcagagcgttatcttgtttacctctgtgtccccagt

SEQ ID NO: 104870 - DNA, 122 bp, Homo sapiens
tttaaatagagatcagaaaatgcactagacctcagttctaataactattattttaaaacccgaaagtctgtatctttcaaataaacatttttttcccacattctttctgcctggaaaataaa

SEQ ID NO: 104871 - DNA, 122 bp, Homo sapiens
ctcctgattgcggccccgggggaggtggccgagccggataagctgcggcgggctggagggcggccacctcccctgcaggtccggccctcccgggcgggtggggcgcgggggaggaggagcct

SEQ ID NO: 104872 - DNA, 122 bp, Homo sapiens
catacagaatcacgacatcatgcatgccatcatcagcccactgcgttctgcaaacacagtcgtgcagagcaaagctgctctcgctgtcaccgcaactgcgtgtgacgttgaagcccggactg

SEQ ID NO: 104873 - DNA, 122 bp, Homo sapiens
ctgcaagatcgtggtggtgggagacgcagagtgcggcaagacggcgctgctgcaggtgttcgccaaggacgcctatcccggggtgagggacctgcgtcttgggagggggacgctaaggctgc

SEQ ID NO: 104874 - DNA, 122 bp, Homo sapiens
cgtcccccgcccctcccgaggcgtctgacatttgccctaaccttgcagccttggaagatacgattacggcgcagagtgctgtcgccttaagcaggaaaggttagactgccgccgcctcgccc

SEQ ID NO: 104875 - DNA, 122 bp, Homo sapiens
gcactgccaccagcccaggattcaccagttctgcccacccagaaccacctccaccctctccgagtcctagcccaacctccaaggagaccattggagactacacgtggaccaatggttcccag

SEQ ID NO: 104876 - DNA, 122 bp, Homo sapiens
ggagccgctcaggaggtgagacgcggtgggtgccagcctgtagtgctgccagccaatcagcgttgagaccaaggcgagcccgccaatcggcagtcaggaggtgctaaaggggcggggagtag

SEQ ID NO: 104877 - DNA, 122 bp, Homo sapiens
cagagggagggtgggcaaggaggcgtggcaactttcataaatagacataatcagggaaggcggctggcggggttgctctgcagcagagcaaaacaagaattccgtattttctttcttctttt

SEQ ID NO: 104878 - DNA, 122 bp, Homo sapiens
gggatgcctccccagtcctgcagacttcgggggtagtagggctccacttgcagtccccctcgggccagcacgtagtagcgggcacccttgaagaggatgaggcggcgcagaggagggaagaa

SEQ ID NO: 104879 - DNA, 122 bp, Homo sapiens
caatagattttctgtcccaattccctgcccctgagctatagcagaagccacatcagtcatcgcaacaagaggaagactaacgttctaaagaaacaaccaaactctctatacaaacactgcct

SEQ ID NO: 104880 - DNA, 122 bp, Homo sapiens
ccctctgcggaggtcacggccacgtgtgggcagggaaggccccctacccacttcctcattcggacccgtcacctttagccggcgaccaccttttgatctcttgtgttgcacttgtgtccccc

SEQ ID NO: 104881 - DNA, 122 bp, Homo sapiens
tcctggggtggacatctcagggtcccgggcctccaagctcatggccggtctccgcggcggcggggtgacccaccaagggcaagactttttcagacttgcctatggtcaccaggcaatgactc

SEQ ID NO: 104882 - DNA, 122 bp, Homo sapiens
ctaaaccaagtagtctggttacactttctgaacaacttttcttgcgctctgggaaaataacgaggtcttttattgttcactgcattagagatttgtggtacccacatatcatgtgtgagggt

SEQ ID NO: 104883 - DNA, 122 bp, Homo sapiens
ttttttttttttttttgagacggagtctccttctgtcgcccaggctggagtgcagtggcgcgatctcggctcactgcaagctctgaggatggcagcttttttgttaactttagaactggtag

SEQ ID NO: 104884 - DNA, 122 bp, Homo sapiens
ccccatctgcataataaaacataagggtggaatggccggcttcttcgtgcgctatgcaaacgttataccggttctgaccaatctctcagtccctatgtatatcagacaccaccttctcaagt

SEQ ID NO: 104885 - DNA, 122 bp, Homo sapiens
ctgcttcctctccctatggtggggcagtgacgattatgcttattagagaaatcaccaccccgtcacagagatgacatttattagagaaatcgccaccccatcacagagatgacgtttattag

SEQ ID NO: 104886 - DNA, 122 bp, Homo sapiens
attgttccttctgctctctggatgatggaaattgcttcaggtcactgcactatcttccaacgtttttgtggttgccatgagctgttgtacagaccacagtttggggcctgagacaagctggg

SEQ ID NO: 104887 - DNA, 122 bp, Homo sapiens
gcaagcgcagaaacaaacagatgttaatggaggcgtgaaggctactgcgctctcactttccgaactgtcgtaaagagccctagtgtcgtgctctcctcggtaggggaggaattggttaggcg

SEQ ID NO: 104888 - DNA, 122 bp, Homo sapiens
aataaatgtagtgatcaaataaagctaaaaaataccactgacaaaaagaataatgaaaatcgagagtctgaaaagaaaggacagagaacaagtacatttcaaataaatggaaaagataataa

SEQ ID NO: 104889 - DNA, 122 bp, Homo sapiens
tgcctgccatacagcagccacggggccagggagcaccgtgcagccagccagaccttggatcgggacagaaaagacagaccggggaggggaaacaaggtcctggctgggatcacactaaaaga

SEQ ID NO: 104890 - DNA, 122 bp, Homo sapiens
ggcacgcccgacgccttctgggagttgtagtttcttccgctggctccgggccggccctcccgacgcctcctgggagttgtagtttttcctgggctccgttcccggcctcttcggggacgcac

SEQ ID NO: 104891 - DNA, 122 bp, Homo sapiens
ttctcagacctgggtgggtggagcgcgtctggctcctcttggagctccaggtcaccacgacgcatccccagcagcataagggaatgctgactgctgggaagaatacagactctccctacgtg

SEQ ID NO: 104892 - DNA, 122 bp, Homo sapiens
gagcagtgtccgccggagcccatggagccggccagccccgccccgaccccgacctcgctgcgggcaccacgcacccaacgcactccgggccgcagccccgccgccgccatcgaggagccttg

SEQ ID NO: 104893 - DNA, 122 bp, Homo sapiens
gggataagcggcaatgtcagcgccctcaggtttctgcgttttctctgcctgcaggtcgcccggctcatggagatgggattttccagaggtgatgctttggaagccctgagagcttcaaacaa

SEQ ID NO: 104894 - DNA, 122 bp, Homo sapiens
agagccttccctgggagccctgcctaattgcttcagacttaggctcccaggtagctgtgacgtttctgcaggaactgcctttgtttgtcctcagtgttgcagatgaaatttgccttgtcttc

SEQ ID NO: 104895 - DNA, 122 bp, Homo sapiens
aaaataaaacctttggctaaaaccatgtccaggtctttctgggggaattctcaatgggggcgctagcagagtaatctgagtacatccaacacaccagacacctaatggttttcaaatatgtt

SEQ ID NO: 104896 - DNA, 122 bp, Homo sapiens
gaagaaatggaagtggccatgtgaatcgtgaagcatgcattgaatgtatgcatgggcaagcgattaggagaaactgtcttattgtggaaggaaagcacatgaagtgcttgtcaaacttcatg

SEQ ID NO: 104897 - DNA, 122 bp, Homo sapiens
gtccgggctctagtcccgccctcgcccctccccgcccaccggcctcgcagtcaccgcggacgccaatcttgtgcatggagtcgccattttgctcctagagaggccgccaggagacccggcgc

SEQ ID NO: 104898 - DNA, 122 bp, Homo sapiens
agccgctagaccagctccctggcgggcgcggagcaagctttgacctttggaactgggcaccgcagccccaatatctgccctgcggtcagagcaacctgaacacttcctagtgaattgcaatg

SEQ ID NO: 104899 - DNA, 122 bp, Homo sapiens
agagtgtcggagagagacagctttatctacagcttcacccattgtatagcacaacagaatcgcatttagcctggagaacagccgtcggggcaggagttggtgccttctctaacaattaggct

SEQ ID NO: 104900 - DNA, 122 bp, Homo sapiens
tccaggcgaccgctacgccggcagcgtaggcgtagaactggtggggtgcgcggaggaagccgggggagataagaacagcggcgcaggacgcctagcggccggagcggagaccgagcggtcca

SEQ ID NO: 104901 - DNA, 122 bp, Homo sapiens
gggccgtggtcacagcgtgtggatgggccgtggttacagtgtgtggatagaccgtggttacgttttgtggataaagcatggttacagtgtttagataaaccatggttacagcatgtggatag

SEQ ID NO: 104902 - DNA, 122 bp, Homo sapiens
cccacctcgacctttcagagtgctaggattacaggcgtgagccaccgcccgctcctgggacgagttcttatttatttgggtggttatttgactgacatctgtgccctgcaccagaccgtagg

SEQ ID NO: 104903 - DNA, 122 bp, Homo sapiens
gttcctctgcccctcatcgaggccatcccagttactcagcgaataccaaattccaaataccgggaacctgaagctgcctttactcatgaaactgcccccacagaagcagaggagtgttctga

SEQ ID NO: 104904 - DNA, 122 bp, Homo sapiens
aggccattgctcagggaggagctctgttgagatggaatgttccggcagccgggagtgagccgtccactcatgcatcagtgatttcaatcccccaggtggtggcctgtggtgggtgtgggctc

SEQ ID NO: 104905 - DNA, 122 bp, Homo sapiens
gggaggcgtccagcgcccaagctgggagccagccgggctggcatgctgcagctgtccacacgattaggttcccgatcggatcagccaggaagtgggtttttttcattctgacctgctgtggc

SEQ ID NO: 104906 - DNA, 122 bp, Homo sapiens
ctcctcctatgagaggaggtgaactcggtgactccaaactacaaaattaataggtggcggcgggggcgggcttcagccggggtagaggcggagtactcaccgcggctcctgttcattgagca

SEQ ID NO: 104907 - DNA, 122 bp, Homo sapiens
gtctcctgtcctctctcattcttctgagaccctacccaccaacttatctccacagttcaacgaactattgagcatacactgggggagtatggtgaggcactgggcattgattcaccagtctc

SEQ ID NO: 104908 - DNA, 122 bp, Homo sapiens
ttccctgcacaggtaaaatctcagcagcatccactgatataaacacaaccacagtaacaacgcctgggagccacccaggtccattcacaggagaaaggataaatgaaccatgtcatgcccac

SEQ ID NO: 104909 - DNA, 122 bp, Homo sapiens
tcattcattcattcatcaacttcgaggctgagctctgtgccgagcccactgtattttcaccggaaaatgcgagactttcatttctacctctcgaatgcccagtctttgagtcctgcagcccc

SEQ ID NO: 104910 - DNA, 122 bp, Homo sapiens
tacaaaatgttacacagatacaatatgtacactggggaaggggacccacctccagcagctcgtgccctcgcctggtctacattagctccattgtcctgcctcagctgcctctctgagtaaaa

SEQ ID NO: 104911 - DNA, 122 bp, Homo sapiens
gtccctgtgtcattctaggtactttgctgttttttttcctgtgtcccaaaatctgtcatccgtacaaggagagtaacaatattgacattgacattgctttctactatagctaaatggaaaag

SEQ ID NO: 104912 - DNA, 122 bp, Homo sapiens
aagaagctgttcagcacagagacgtcactgcaggtgcaccggcgcatccacacaggtgagcggccatacccatgtccagactgtggcaaagcgttccgtcagagtacccacctgaaagacca

SEQ ID NO: 104913 - DNA, 122 bp, Homo sapiens
tgcacaagcgctcactcggccccgcacgcaagcagcgccccgcgcgcccggggccctcctcggataagggaggggtgacaaaagtctcccgctcactgctgcctacccacccccaacccggc

SEQ ID NO: 104914 - DNA, 122 bp, Homo sapiens
cctgaagccctgcagaattttaatccacaccgggaggtgcggggtcctgcgggagggcagcgggcagggccaggagttcacccccgcagctcgaccccgcaccctgtatccccctccggggt

SEQ ID NO: 104915 - DNA, 122 bp, Homo sapiens
aaaaaaggctgcttacccgattcaaaattggtgaagtgtttcttggctggtcagaggacccgaggttgtaggtggattttctcacagagcaaagagcaggaggacaggggattgatcttccg

SEQ ID NO: 104916 - DNA, 122 bp, Homo sapiens
aaactcttcaggcacctgaagtgagaacccagctgtccgtcctcaggccggcctttcttccggcgacacccgtccatggctggctgggtccccttcgcagtgtttgtctgtcttgacatcta

SEQ ID NO: 104917 - DNA, 122 bp, Homo sapiens
tatccaccccagcttggctttgtggttttctgttttgctcattcccaaaacaaggtcctccggaggatggaggtctggtcctccagatagaggatgatctgtgtgattcctgggaagggtgg

SEQ ID NO: 104918 - DNA, 122 bp, Homo sapiens
tcatagccttgctgcactgtcctgttaattttgctactctccttcctcttagagcttccacgtagaatacatttatcttctcgctctagtctcgtcttgattgaaatattggagtgagagat

SEQ ID NO: 104919 - DNA, 122 bp, Homo sapiens
tttgttcttggttttaaagaagctttctccagcatctcccagatgtgtgcgggggctgggcgagcggggagaggctgggtccagctgcagttagaaacgagggaggccacagtcatctgggg

SEQ ID NO: 104920 - DNA, 122 bp, Homo sapiens
tccatagggaccaaaagcggattagtggctgccggggccagagttactgttaatgagtaccgaggtggcgtttgggatgatgaaaaagttctgacctagatagtggtgatggctgcataaca

SEQ ID NO: 104921 - DNA, 122 bp, Homo sapiens
tacattctaggatcttcggactctgactaccgcaaaatacctccccggagccccaggcatcgcaggaatttagagttggaagggatcctgggaaccctttagcgcgccccttatatttcagg

SEQ ID NO: 104922 - DNA, 122 bp, Homo sapiens
aacttctgcctaaaggtgttgtctttctctgatgagaagaggaattaggggaagtaaccccggtcttcagagtgtggtctacagtccagcaacatctgcactgcctgggagctctttaagaa

SEQ ID NO: 104923 - DNA, 122 bp, Homo sapiens
tcccacagggccactgctcccagcaaagacttgcccttgtccgtagctccctgcgggtggcgctgtgtctcatgcattttgcattgtccatgcccttcacagggcccagatacaatcagcag

SEQ ID NO: 104924 - DNA, 122 bp, Homo sapiens
gcccgcgcttgttgtgctgaggccgagggagtcgccattttggatggtgaaccctgaagtcggtgtctgctgcgttcacggcaggattcggttaggtgagtgtggcatcctcggcgtcagag

SEQ ID NO: 104925 - DNA, 122 bp, Homo sapiens
tcagaaagggaactccctgaccccttcccaagtgaggcaatgcctcgccctgcttcggctcgcgcacggtgcatgcacccactgacctgcgcccactgtctggcactccgtagtgagatgaa

SEQ ID NO: 104926 - DNA, 122 bp, Homo sapiens
tgcaaacacaagtttctcataaaacagcgatcacggcacctaccctccgtggttccattccgtgccaagttccacgtgagtccaatccaccattccctgtcctgggagatgtgcttctgcag

SEQ ID NO: 104927 - DNA, 122 bp, Homo sapiens
tgcaggtacaggaggcctgtttcctgacccagttttctccccaatctctatttagctgttcgctagtgatgctcctggcatgccaatcagatactgcagccggcagtgcagtttgttacaac

SEQ ID NO: 104928 - DNA, 122 bp, Homo sapiens
gccctaaaagcatacgaccccctagcttcatttcctcagaaaagggaaagatagaggtctcggccttccggagtcttcagaggtcctgagtatccgtgagcatttggtcaaggtctagaaat

SEQ ID NO: 104929 - DNA, 122 bp, Homo sapiens
catccgtgggatacatttttacatggttcgcctgcctcagtcaaaacacgtggttgttaacgtcaggtcaggagctgccatcaggagcaaagctacagtcagaacatgccgccaccaccgcc

SEQ ID NO: 104930 - DNA, 122 bp, Homo sapiens
aaatatactgtcttactcttcctttctccgccatcatggtgtgtgcttgactctgcttctcgccatgtcttctcacaaaaccttcaggattaagcgtttcctggccaagaaacaaaagcaaa

SEQ ID NO: 104931 - DNA, 122 bp, Homo sapiens
cgccgccacggccacggccacggccccggccccggccaccgcccgccgggcagcccagagcgccgcgcacggccgcactctcccgccaccccacgcacacgcacacccccgcccgcccacgc

SEQ ID NO: 104932 - DNA, 122 bp, Homo sapiens
agtagtatttaaaattgcaacttcagttagagtttccttttgtaactctaccttagttaccgtaggccttttggtaattcattatcccctgaaatctcagttacctaatgacacacagaacc

SEQ ID NO: 104933 - DNA, 122 bp, Homo sapiens
agtcctactgtgtccggaattggtaggttcttggtctcactgacttcaagaatgaagctgcggaccctcatggtgactgttaccgttcttaaaggcggcatgtctggagtttgttctttttg

SEQ ID NO: 104934 - DNA, 122 bp, Homo sapiens
ctgctaattcatgcttttgataactgatatctagtatgtatatatatataaacaaaatgacgaggacagggaatttaattatttgggtatcacacatgcaggtgttatatatgccaaatttt

SEQ ID NO: 104935 - DNA, 122 bp, Homo sapiens
gctggtggcatatatagggagggctcggccttggctccacactgcgctgcccagaggccccgctgactcctgccagcctccaggtccccgtggtaccaaagctgaacatggacgtgaccatc

SEQ ID NO: 104936 - DNA, 122 bp, Homo sapiens
tgactatgtgatctgcccacctcagactcccaaagtgctgggattacagatgtgagtcaccgtgccaggcccaaattcattctttaaagagaatgatactcagaagctttgtctaacaaaag

SEQ ID NO: 104937 - DNA, 122 bp, Homo sapiens
agtgttaaattgaaagcccaggccagagagtcccacagtttcctactcagacggcatcagcgcgtaaccgtgttgagtcaagcgtctcgtttgttcaagtctggacctcacacagcgtggtt

SEQ ID NO: 104938 - DNA, 122 bp, Homo sapiens
tgcattaagaggactaaactgaatgcgtgggtcggcagagttgggctcgaggaccattaccgtcgggcgctgtttgtctctaacccgaataccaagcctcccagatggcagcttgcagcatc

SEQ ID NO: 104939 - DNA, 122 bp, Homo sapiens
agacattgctcactaataatcataataatcaataataacagcaagaaccatcctaaatggcgcggaggtggctaggggtcccggggctccttctgcctccacgtccgaccctggaaccccga

SEQ ID NO: 104940 - DNA, 122 bp, Homo sapiens
actctggtctggttctttctcagttacctttcgctaaggcaaactttgtgcttacggagtcgctgcggaactggatggatagcaagtaaagtctgttcaagtcctttttctaagaatttcct

SEQ ID NO: 104941 - DNA, 122 bp, Homo sapiens
agaaagctcgaggccccgccccttaggcatgaggccccgcccccagccggccggaggctccgtccccagacagcttgaggccccgcccccaaagagcctgaggccccacccccaggcggctc

SEQ ID NO: 104942 - DNA, 122 bp, Homo sapiens
tgggtgctcaccctggtttcctggttacagcgtctctattccggacgccagttctctgcgcgcttgcttctgattggagagactttttgtttgtaatcagctgtgccacggcaaaaccgtgc

SEQ ID NO: 104943 - DNA, 122 bp, Homo sapiens
ggcactgccgcgcgcggtgacagccctgtcattattgtattattacttgtttagttaaaacgctgtcccagctgctcgaggtgtaaacaggatttggcaaagtgacagcccagcgcggcggg

SEQ ID NO: 104944 - DNA, 122 bp, Homo sapiens
atctagacacagacccatgcctttggactctaaggctggcactattgtgctgtagaaacacgttctatagataatgcctcagctgcagaacagaagaagtagagagaaactggtaacttgcc

SEQ ID NO: 104945 - DNA, 122 bp, Homo sapiens
ggacttgtttcctgctgaaaaagcagaaagagattaccagccacagacgggtcatgagcgcggtattactgctggccctcctggggttcatcctcccactgccaggtgagtgatgagcccag

SEQ ID NO: 104946 - DNA, 122 bp, Homo sapiens
tccccagctggttttccttctctttgatgtgtttccactgagggtccaaaccggtccaggcgcgggttccagaactttcttcagatctctcgcacctgaaaatttcctctgtagccattcgc

SEQ ID NO: 104947 - DNA, 122 bp, Homo sapiens
tctaattttttcccaagatcggtctcactgtaagtctgctatctgtattttcccattcttcgtctgatagccaccgacattaatgaccagctcattacatgttgaggtgtggggagatgggg

SEQ ID NO: 104948 - DNA, 122 bp, Homo sapiens
gcaggcaggatcccaaaccacagaagctcaagttaggtcattcttgtgaacatgacaactcgctgtctctctaggtcaacaaaaagagacatagatccatttgaaaatggacttaaaagact

SEQ ID NO: 104949 - DNA, 122 bp, Homo sapiens
gctgcctggcgggcttggctagtgcctgatccttctctccgcagagcccatgccaagcagcgaccctgagccgacagccggagcgccgggcaaaggccgcctcaacagcctcgcaccggccc

SEQ ID NO: 104950 - DNA, 122 bp, Homo sapiens
agtttaattgtttgggttcatcttctctaactacaaaattaagtttacagttctctttatcgtcccaagtttcttcctttgtgaaaggcccactatcatctactcttaccacttccaggtaa

SEQ ID NO: 104951 - DNA, 122 bp, Homo sapiens
ggccatcccagctatttcctccagcattctagacatcatggcgtccgagggtgggtccaacgggcttcgagtgttcgggagataatgcacacttcgcagtggatcttctcggggccccgagc

SEQ ID NO: 104952 - DNA, 122 bp, Homo sapiens
gggcaaggcatggtggcgtactgctctctgtggacttgttcgtgttagacacggtgggctcgttcgtgttagacacggtggactcgttcgtgttagacacggtgggctcgttcgtgttagac

SEQ ID NO: 104953 - DNA, 122 bp, Homo sapiens
acacttctaaaagtatatgctccctgctgcactgaccgtgggaaggggcaggaaagcaaacgtgtcttccacgtgacagaccctgtgccaggaacctcacatatgttacatcagttaattcc

SEQ ID NO: 104954 - DNA, 122 bp, Homo sapiens
cataaggggtggtggaggtgggcagtcgagcgttaaagagtaacctgctgccgggaagcccgccaagcaatcgcggccccttccccggctctggcagctctgcgagcgcgcccgtggggaac

SEQ ID NO: 104955 - DNA, 122 bp, Homo sapiens
aatgtaatgaaagacaatggctttctggtatggaatgggtaaacagataaattaggtccccggcatgtactgagctctgtgcttttgtgttttgacttcgttctccagcaacaataactttc

SEQ ID NO: 104956 - DNA, 122 bp, Homo sapiens
taaaccacttttcgtgttcatccgcctccatccgagatcgaaacgggacctcgtcggccccgtaggggcccgacaagaagagggaatccctgcagaccaacagcgggctatattgacgacgg

SEQ ID NO: 104957 - DNA, 122 bp, Homo sapiens
tcgtctggtgaaatcgttagcatctgaggggctgctttgcagtaccctctgttgggcttgcggctcctgcctttgtatgtttaacctttaaacaagggggttggcagaaggaagcaagctgt

SEQ ID NO: 104958 - DNA, 122 bp, Homo sapiens
aacgtctctgcaacaaattttgtgcaaacacctatgcttgcatctggcatttcccctccccgccctgcggaagtggcccagctctcagagctcctcagacctcacccccagggtcctggggc

SEQ ID NO: 104959 - DNA, 122 bp, Homo sapiens
ccgggcacgcctgacgccggcgacacaacgccttgtcgagccgcccccgaggcttggagtcgggctgcatccctgggggtgcctttcattcgtccactttctgaatgcagaacctaggcctc

SEQ ID NO: 104960 - DNA, 122 bp, Homo sapiens
gctacccacactcgggacccagagcagatctctggccccaggatccccctttttaatgtgcgctgccccatcatccgtgattttttcttttatttttctttttttggacagagtttcgcttt

SEQ ID NO: 104961 - DNA, 122 bp, Homo sapiens
gcgcatcaagaggccgcaggtagggccccgcagagcctctgcgcagagccaactacgtcccgcggcccacgtggtccgttcaggctgggttctgccagccacactgccctcccctccgcaga

SEQ ID NO: 104962 - DNA, 122 bp, Homo sapiens
agaactgctcggccgccaggcgcagcttctctagcttctctttgttctgtggggagaccccgtcccctgccagctcagcatcctagccctgctgagtcagggatctgttgcccctagtccag

SEQ ID NO: 104963 - DNA, 122 bp, Homo sapiens
acagccaagccctggggtccaccgcggatggagccggcaggtaaggatcaggcccgctggcggccgcgctcctatccgcaccccttatccgcaccccttatccgcgccccttatccacaccc

SEQ ID NO: 104964 - DNA, 122 bp, Homo sapiens
ggacccttgatgctgaggctttgaagcagagcctgggttttccaggcactgctgattagccgggggaagaaaagtagggtgttgtagcaaaccctccagttaggactttgggtccctaggag

SEQ ID NO: 104965 - DNA, 122 bp, Homo sapiens
gcagccggcggccaggagccagtggcgggagccaccggtgggaaaaccggcaggaggctgcgctggaccccgctgggcagcgccaatccctaaggcagccgggcgggtgagctaacggcggc

SEQ ID NO: 104966 - DNA, 122 bp, Homo sapiens
tcacttgtcctcaccgggccagcgaggatgcctggtggcccacggccagcccaaccccaccgtgaggatgtgtgaagcgaagcccctgcctcaggcctgagcgtcctccatgcagattcagc

SEQ ID NO: 104967 - DNA, 122 bp, Homo sapiens
ggccggcagttcatttccttcacattctcagcattcctcctctgagcttgtggatagttacggggagcctgtctttgttggaagactgtcattagccggaaatgtttctgttctaaatcttc

SEQ ID NO: 104968 - DNA, 122 bp, Homo sapiens
ctctatgtggcggccctggatgctcctagcttcgagaataatttagattccttgacatgacgactcaccttccaaaggatgattcattttcaaatggcctgaaagaaatgaaggaagtagaa

SEQ ID NO: 104969 - DNA, 122 bp, Homo sapiens
atacatccgaagccccagtgtctctctgtgtgtccaaatttcctcttcttagaaggatgccggtcatattggattagggcccacccgtgtgacctcattttaccttaataacctctttcaag

SEQ ID NO: 104970 - DNA, 122 bp, Homo sapiens
agaccaggagaaagagagcaagtgagcgagagcccagccggagggagagccagagctaggcgcaaaagaagggccagcacattacatcatcgcttggcctggaatcaaatgggaaggatatg

SEQ ID NO: 104971 - DNA, 122 bp, Homo sapiens
tcaggcatggcgggctgcagatcccgagccctgccccgccggaaggcagctaaggctcggcgagaaatcaagcacaatgcgggtgggctggcactgctgcgggacccagtacaccctccgca

SEQ ID NO: 104972 - DNA, 122 bp, Homo sapiens
gttttgactctggagctgcattcttcattcttatcctacacttgcttgtgaattctttttcgtccttccagaatccctgaagctgtacagctatactttaccggttacgtctagactataaa

SEQ ID NO: 104973 - DNA, 122 bp, Homo sapiens
ggcagcagccgatgacatgacgcaaggtgagaggctggaggcactgaccagcgccgcctgcgcaacccgtctgagtgccactgcgctcccctccccagcggcctcgcccagcttccctgggc

SEQ ID NO: 104974 - DNA, 122 bp, Homo sapiens
cccgccccgccgcccagcgctgacagcgcgcatccccgcccggccccgccattggtggaccgcagttgctagggcagctgcgcgctttcactggcttggttgtccgtccatcttactctcgt

SEQ ID NO: 104975 - DNA, 122 bp, Homo sapiens
aataaaactaaaagcgtgcatttaattaaagtgatgctgaatcaataggctctccaggcacgtagcagaagcaaatgcaaatcctatttaaaggaacctcttttcaatctaagcctcagtaa

SEQ ID NO: 104976 - DNA, 122 bp, Homo sapiens
tccaccgagcctggcgaaaggtccgctgagcgggctgtcgtccggagccactccgggctgcggagcacccagtggagaccgcgcctggctcaggtgtgggaccccatccttcctgtcttcgc

SEQ ID NO: 104977 - DNA, 122 bp, Homo sapiens
tagaattcccctggcacacttccctggggcaggaggtgacccatggctcaggctagtgatcgagtgtctcagctgctgacatttgagctagcccctggcaagggtgggggtaaccttgcctc

SEQ ID NO: 104978 - DNA, 122 bp, Homo sapiens
gcaaacaaagtcttattcctttgaaacaggaaccctcaggggccgcctggggactggtgccgactgtcaaacccagcagacgggcttcatccaggcctcgactgtcagccgggacgacccca

SEQ ID NO: 104979 - DNA, 122 bp, Homo sapiens
tgagaagtgtaactaccaccttggacctcagggccctaactaattacagctgttactggacgactcagactttgtgcctaaagccatcttagagataacagtttatagaagccatgacatta

SEQ ID NO: 104980 - DNA, 122 bp, Homo sapiens
aggggccagaagaaaggacgtccattctaacagtgttctcggtattgaatcggcgctcaccgcagatttaagaaaggacatcgattctaacagtattctcggtatcgagtcggcgctcacca

SEQ ID NO: 104981 - DNA, 122 bp, Homo sapiens
ttgtggtgtcttcagaggcagtcccgcctgcgtcctttgtgcatgcctgtccacgccggtcgcagcggtctccccacagagcccgcgcccacgccctggcacagcctctcctgctgtgcacg

SEQ ID NO: 104982 - DNA, 122 bp, Homo sapiens
tcatttggggaaggatgtcccatctgtaatgaggatgactctgatcccatgtgtgcatctcggatggtcgggcagatggtcagatcccaagaagttctaaactctgtcagatcttattccac

SEQ ID NO: 104983 - DNA, 122 bp, Homo sapiens
agtgcaatgtctgtggctcctagcatgcctaagaaaatgtacaagggctcatggagactgcgctcagatttgatgatgctcagaagcaaggaatttccaatcatagcaatgagataaatggc

SEQ ID NO: 104984 - DNA, 122 bp, Homo sapiens
tgcctcccataggaagatgcaggtattgcacatagcccaaatatttgatgattccaggaccggcagatacacaagttatgaaactgtttgtaccttgaagaataacgagaagaggaggagac

SEQ ID NO: 104985 - DNA, 122 bp, Homo sapiens
tttatttttaaaataagcacttggcgtgccctcgcagatgtctgagctgagaggtcggggcgatggtagaagagcagtcagtgtccattcttattcatattaagtagccaagtctgtaccct

SEQ ID NO: 104986 - DNA, 122 bp, Homo sapiens
ctttagggtagcagtctattcctgccagaattcgtttactggaattacaaagtaaataaccgtgaaaagaagatggaggtgaaaatcaaggttgtagagaatttgagagggaaacagaaagg

SEQ ID NO: 104987 - DNA, 122 bp, Homo sapiens
tgaattccacatgatggtgcagctgcagcagggtgatgtcactccccatgcggtgcaactcgttatagtcagcgtgcaccatgatcttattcactgtcatctgcttgctgtgctctgtggga

SEQ ID NO: 104988 - DNA, 122 bp, Homo sapiens
tttggcttccaagccatgttgaggatggagttatcttcaaatttcaggggtgtgatgttgcgtattggaccacagatgctcctcaattctgtgaggatttttcattattttgatttcttttt

SEQ ID NO: 104989 - DNA, 122 bp, Homo sapiens
aggcagattgctggagacacagcaggcatgctcaggtattgcgagtgagcaccgaggaaccgaggcagctcatgcggcacaccttggctgagtccgacatggaacaagatatgggcggtcat

SEQ ID NO: 104990 - DNA, 122 bp, Homo sapiens
ctgtccccttccctgctcaggggccaccaaatatgtccatggtctctgctgcctggtcaacggccaccccgggctgccgtctcctggccagacctggagctcacaagctaattttagaaatg

SEQ ID NO: 104991 - DNA, 122 bp, Homo sapiens
gtgtgctctccaggcctgcagaccctggatcatcctcggagtttgctgcattctgccccacggcggtttggccaactacccacgcacaaaaaaatatatttctaagtttaaccaactaccca

SEQ ID NO: 104992 - DNA, 122 bp, Homo sapiens
ttggccctgtaaccccagaccacctgcttctaccgtgccctgatccatgcgcccctacagcgggtaaagcagcctccaggggagaggtcattggtgacaccaggaacaggctgatcagagaa

SEQ ID NO: 104993 - DNA, 122 bp, Homo sapiens
ccccctgctgatcctagccctgccctgccagcctctaagggcatatgctccggccaggcccgtggggtcagatggttcccagccaggccaggtcactgcctactgagaggtatgaccatggt

SEQ ID NO: 104994 - DNA, 122 bp, Homo sapiens
atctcgcgaccatttactctggccatccgaaggcgcgtgcctgggttgcactcccgtgtccggccctcgaggttcttgcctagggaagacccgagccctagggccgtacttaagctgcctgc

SEQ ID NO: 104995 - DNA, 122 bp, Homo sapiens
taggtttccgtctcgccgaagagtagctactgcctagtgcaagcacctttgtaagaccggcgatcgcagtggtcgctctgagcagtaatatttaccggcttaactgaagcacccgctctttt

SEQ ID NO: 104996 - DNA, 122 bp, Homo sapiens
gaagtctctttctgatcacgaacaatagcttgcgctctactctgtagttatgtggattgccgagcaatgacccttttcaatttcttatttctgtgttactgaggaccctaatcacttaggga

SEQ ID NO: 104997 - DNA, 122 bp, Homo sapiens
ggctcgggacctgcagcccgccatgcctgagcatcccccaccctctgtgggctcctgcgccgccagagcctcctgacgagcgccgccccctgctccacagcgcccagaaccgcccaagggct

SEQ ID NO: 104998 - DNA, 122 bp, Homo sapiens
ccacccgccacgcgatcacgtcggggctcctggtccagcgtccgccggctcccgcggctccggccccaagtccgagccccaggccagccaagcccgcccctccgccgccgcccgcttggcgc

SEQ ID NO: 104999 - DNA, 122 bp, Homo sapiens
cgagttgggatcagagctaggctgtgcgggcaggagcctgatggggaagcgcctggaggccggccctgcgtgctgcccgcagctcactgttcccaccccgtggtcctctctgcagctcctgg

SEQ ID NO: 105000 - DNA, 122 bp, Homo sapiens
agaacattgtaagagacttatcaaagctgtctgaggattttatccacattttctcattaacgtctcacagtgacactagtcagaggaaagtattatcatccctcttagacaacttgtccaat

SEQ ID NO: 105001 - DNA, 122 bp, Homo sapiens
aatacaagtaattagagttgacaactgaagtgtcaagaaaaccacagttcatctgttatccgtccatctctgttgaaatattagtttactgccatatattaatctatttataaagagatcca

SEQ ID NO: 105002 - DNA, 122 bp, Homo sapiens
gtggcgcttgcctgtaatcccagctactcgggaggctcaggcatgagaatcacttggacccgcaaggcagagactgcagtaagccaagatcccacaccagggcactccagcctgggcaacag

SEQ ID NO: 105003 - DNA, 122 bp, Homo sapiens
tgagtccggagagaactagacgggaaggagaggcgggagaccttggcgctcagatccgagcgaccttatccacgcagttccctgcgtggcattactgcggcctcaccgagtctgggcggagt

SEQ ID NO: 105004 - DNA, 122 bp, Homo sapiens
agtctgtgatccctcgcgtttcaatccaattcaaaccatgctgcagccaattcgttcgcgcgtgcgtgtgccatcattgtgagtggaggagactgcccgatatgatcccagtcattgcggcg

SEQ ID NO: 105005 - DNA, 122 bp, Homo sapiens
tggggtcccgcgggagcagaggctggtcggctcctctcggagagagcctgtctccgtctccgcccctgttcccatccccgtctccatccccgtccccatccctgtcccacaaaactcagccc

SEQ ID NO: 105006 - DNA, 122 bp, Homo sapiens
atgaagcccgccacccccaaagccaaacccggccccagctcccagggcagtggaagccctcgccccggcaccaagacaggaggtggcagccagccccagccagccagcgggcagctccagag

SEQ ID NO: 105007 - DNA, 122 bp, Homo sapiens
cagagacaactcaaatcaagaagcaccctgatacatttaaagagtcttaaagaaggaaaacgggctcagcaagattgagtctattctctgggccacagacttggagagaatcctgaactcca

SEQ ID NO: 105008 - DNA, 122 bp, Homo sapiens
gatggcatagccccgccgcgctccagaccagtccctgcttcctgccagcggcagggcccacgcgcaccccgcgtgcctccacgttccacacgtaacccaaccctggaacgtggtctcgggcc

SEQ ID NO: 105009 - DNA, 122 bp, Homo sapiens
cgcagttaaggaagcttttgcagccggacaggtcgcgaagcacacatggggcagggtccgcgctctccacacaaggtggggcgccggttcccagctggtggcaaacgggggcgcggggccaa

SEQ ID NO: 105010 - DNA, 122 bp, Homo sapiens
agcataaagaaaacctttcacccctttacttttaaaatcccggtatccatgacaactggacggagggtagaaagtggctgtcccctcccctcttcattgtttaactttcagttgctgcagca

SEQ ID NO: 105011 - DNA, 122 bp, Homo sapiens
tatcctaccatacttggcagtctggccaaaatgaagctaacagcggtaaacttggagaaccgaggcctgtttcaggtgctgcagtggcctctcagatgacttgggcaaatgatccatctctc

SEQ ID NO: 105012 - DNA, 122 bp, Homo sapiens
cttggacgagcccaagcagcaaactgcaccttgaggtctcctcccgtgatgagaacatcacggcagaagccggcacttgggggaggcaggggaaccatgacaccagctctggacgtcccctc

SEQ ID NO: 105013 - DNA, 122 bp, Homo sapiens
ggagaatatggaggtagaggaaacggagtgctcatgcaatggaaaattgtgccgctgctgcggaaaacaggctggtggttcctcaagagttacacagtattatcatatgatccagcaattcc

SEQ ID NO: 105014 - DNA, 122 bp, Homo sapiens
accttgaccccttgctttccccatatgctgttgggcatgactgcccacaggcctggtgggcgtttgtgaagggctggagtcgggggtagggggagcttatggctgctgggcacaggcgtggc

SEQ ID NO: 105015 - DNA, 122 bp, Homo sapiens
gcacccgggaggctgctgttaagggagaccgtcttccgggccacttcgctgtctacaaggcgtgtgctttcacccacggggctcagcgatggctgcgtttgtttacagtctctggcaaagct

SEQ ID NO: 105016 - DNA, 122 bp, Homo sapiens
agggaaagataaacacaaaccaaacctccttcctttcagggacttcctgctgggtttcagcgtaagagtaaacttaagaggtgattaacaacagagggaaggaaaatgaactctgcaggcat

SEQ ID NO: 105017 - DNA, 122 bp, Homo sapiens
ctcctgttcccacctcttcgtctgcatgcctaagaaactgttttacaagtaaataagggacgctttgtctaggctttggagccaggaagttgagacaaatttaggaatgagatgaagtaatg

SEQ ID NO: 105018 - DNA, 122 bp, Homo sapiens
tgcccttgtctcctgcgctgccgttcccgttccaatgcctcccgttcctctctttcttcacgctcccgctgcttctgggccaccagctccaacatcctgtgttgccgagggaaaacagttca

SEQ ID NO: 105019 - DNA, 122 bp, Homo sapiens
tcggaccgagtccccgaacctgccctagccaaaatggcggccgagaaagagcggaagtgacgtaagtgcctcattagcataagaggactcattgtccagctaaataggggggggcagtgggg

SEQ ID NO: 105020 - DNA, 122 bp, Homo sapiens
tcatccaaccactattctttgtttggctttttctcagctcgtttcctttgttctatcaatcgccaattttttttttctgcttgaggaaaaaccttgctttgagttaatcccctgtctctgat

SEQ ID NO: 105021 - DNA, 122 bp, Homo sapiens
gaaataagaataataaaagagatttttaaaattgcttaactttaccactaatcaaataaacgtggagtacagcaataatgaaaacattcaaaagcagtttattatccagtattccacacatg

SEQ ID NO: 105022 - DNA, 122 bp, Homo sapiens
ggaggtgcagacagcttggggaactcactatagtgtacatttcaatataaccttatatatcgtaacaggttccttaggtgcttgccaaagtgatagaaaatacactgagcacagcatgagga

SEQ ID NO: 105023 - DNA, 122 bp, Homo sapiens
tatgccttagcttagagaactcggcaggtggttcagatttacagtgagcggcataggttacgatgctgtgaaagaacaaacgtgaaaaagtggacagacgccctcttttttgcaaagagtaa

SEQ ID NO: 105024 - DNA, 122 bp, Homo sapiens
actacttacctaacactggagtggtccaaggctcattccttggacttctcagtctattctcgccacttctgtcatgtcagtcagtcacacagctttaaataccatctgtatcgaataatttc

SEQ ID NO: 105025 - DNA, 122 bp, Homo sapiens
agatatttaataaagtaaagcctcgaggatcaaggggctgcaatccttcccactccttcccgcagctcgtgctggagttctttaaagcctgccttgcgtctgcctttctctccagaaagcct

SEQ ID NO: 105026 - DNA, 122 bp, Homo sapiens
ggagaccccctcaatatggagtagggcctccaagaaggggcgctcagggaaagaaaaccccggaaatcctctcattgtgggggtgtgccatcaccgagaagggtacgctgggggaggggggg

SEQ ID NO: 105027 - DNA, 122 bp, Homo sapiens
taagaagaaattctaagttctttttacagcattcaagaccaaccaagaaattgcctctgccgccctctacatacttaatgcttattgctgtctgccttatcatctatgctctggtaaacaaa

SEQ ID NO: 105028 - DNA, 122 bp, Homo sapiens
gggcgcgcccccacctccaggcggcttccgtgccgggggcgccggggcagtcccgccgagcgaggctctcagcaaactttattttgaaagctcagctccctagggagggcccggcggcctcc

SEQ ID NO: 105029 - DNA, 122 bp, Homo sapiens
cgtctgcctgccctgctccctgggcacttccctggatgctgtataccacaggacagagatcgagactgtcttttgaaaaacatttagagacaggatctcaccctgtcacccagactggtctc

SEQ ID NO: 105030 - DNA, 122 bp, Homo sapiens
cactcgccccgactcctctccagacgtgggatcccatgttatacttggagtgaatctggtcgctcgctccccgtccccgattcccactttgcttgcctcttctccccatccatctaccccac

SEQ ID NO: 105031 - DNA, 122 bp, Homo sapiens
gggcgtgacctaccagagccacccagccaatgtatgcggcagcccaccagaacctgggcccgggatcaccctaggttaaaaataatgttctaataaatggatcaaattttacagatggagaa

SEQ ID NO: 105032 - DNA, 122 bp, Homo sapiens
tggagaggactcagggctgggtcaggtgaaagccaccaggtggggccctggcccgcctcccgcagcactggaggaggcagtggccaggtgggaggggccggagagaggcttggagaggactc

SEQ ID NO: 105033 - DNA, 122 bp, Homo sapiens
aagctgagagggactttaaggatcatctagaatctagattccaggccaacccctccatttcgtagatgaggaaactgaggctcagaagggagaagtgactagtccaaaatgacatggcccat

SEQ ID NO: 105034 - DNA, 122 bp, Homo sapiens
ctcctgcagcgtggtggcctgggaagcctgcactggtgattttctgccaccggagttttgcggacttcgggaagatggatgcataatctggggcaaagacagtcagaggccccccttgtcac

SEQ ID NO: 105035 - DNA, 122 bp, Homo sapiens
gcactctcctgtaaaggcgtcttaaaagagtcaaacccaaagaccttcttcagcgtactccggactcgccgctcagggtcaaaaggaaaggtggtatggtggctgctcatcttagccaagaa

SEQ ID NO: 105036 - DNA, 122 bp, Homo sapiens
tctccaagaaaacaaaaacaaaaaacaaggcctccagtacacactaaggtttgagaaacacgggtataatgcaatgcaaaggtgagaggcaggagtcatatcatagcatgatcagagctgat

SEQ ID NO: 105037 - DNA, 122 bp, Homo sapiens
atgtcagaactgctggaactatgaaatggggtatataaccacgactctggtggggaaaaccgttttttaaaggacacacacacacacagcgatgcatctctctctaaagctcagccacggct

SEQ ID NO: 105038 - DNA, 122 bp, Homo sapiens
accctgaactcggaggcggcggggcccggggtggggactccagggcgacttgaatttgggcgtgcatttctttaccccatcctctgtctcggctgtcgctaacatgagtcttcgggccccgg

SEQ ID NO: 105039 - DNA, 122 bp, Homo sapiens
tctacaggtatatcccgcagctctgaagagacagcgaccagcgagaaggggccataatgacgatggcggttttgtcaaaaggaaagggggctatgtagggaaaagaaagagagatcaaactg

SEQ ID NO: 105040 - DNA, 122 bp, Homo sapiens
agatctcattggtttacagagaaacttgtcaacgtcacttgggcatcttaagagtgggttcgtaaacttggttgtgtgcgctgtgcagatgtcagtcaccctgtgtggtgggcaaagccgac

SEQ ID NO: 105041 - DNA, 122 bp, Homo sapiens
ggccccagagtgcgcccgggggtctagaggcggagtggccactcagcacagagccatcagcgaggtcatcccagccaaggagacgcgcgaatgtccagggggttacatggtggaggctccag

SEQ ID NO: 105042 - DNA, 122 bp, Homo sapiens
gtcatttagtatttgcttatatttggctgttttaataaaggcatattttaagacacaatgcggaaattcatggttataaatctgaggaggaggcagacagaggagtcactatttgaatctta

SEQ ID NO: 105043 - DNA, 122 bp, Homo sapiens
cgcacacctcgaggccactgtagggttactcactggactaacttggatatttttgtgtctcggaatagggaggctggagcggggagaagagagaggctgggaaaggctggtgggcggaacag

SEQ ID NO: 105044 - DNA, 122 bp, Homo sapiens
tactctggaagctgagccaggagaatcgcttgaatccgggaggtcgaggttgcagtgagccgcgatgaagccattgctctccaacctgggtgacaagagctagactctgtctcaggaaaaaa

SEQ ID NO: 105045 - DNA, 122 bp, Homo sapiens
cactgccctggaaggcgcactcgacgcctcggggcctttgcccacgcgagcagcctctttcggggacacgaagggaccagcacttgggggatttgaagccagtgctcatcctaggaatctgg

SEQ ID NO: 105046 - DNA, 122 bp, Homo sapiens
cggtggccgagctgggctgccgcctgctgagcagctcctttagaaaggcctgcacttgagcgttagttaccctgtggagggacaggaggccggctgcttcacttccctctgctgggagtggc

SEQ ID NO: 105047 - DNA, 122 bp, Homo sapiens
ttcaagcagatgttcctcttgaggtgcatacccaattaaatgatatagatgaacattcagcgactactgcaacacaaagtattttgaaaagccaagttcctagttttctccttaactacgaa

SEQ ID NO: 105048 - DNA, 122 bp, Homo sapiens
gtgcctgtagtcccagctacttgggaggctgaggctgaggatcacttgagcccgggaggtcggaggctgcaatgacccatgattgtagcctgggggacagagtgagaccctgtctatatgtg

SEQ ID NO: 105049 - DNA, 122 bp, Homo sapiens
gggaacgcgtggagcacagctcagagctgccccagggctgggagtgagctatgtgcacaccggctccctccagccaccagacagatgctccctgcttggggctgctgcgtggtcacaggctc

SEQ ID NO: 105050 - DNA, 122 bp, Homo sapiens
cggtagaagtacaaattttgttccagagtcaaatatgaagacttgatcagtggcctggcgcggtggctcacgcctgtaatctcagcactttgggaggccaaggcaggcggatcacctgaggt

SEQ ID NO: 105051 - DNA, 122 bp, Homo sapiens
agggccaccccagccctcccatcaacagctctagaaacccaatggtccttcctggaaacacggggcctgcatcaatcagaggtgtttgaaccatgtccctctgggcctgaggggcagaaggg

SEQ ID NO: 105052 - DNA, 122 bp, Homo sapiens
aggggtggggggagcggtcggggcgggagtggtggtagcgccaataaagcacttgcaacacgtggagcggtggttggggggaggtgtccaagagtcaagaagggggcggagggacaccccat

SEQ ID NO: 105053 - DNA, 122 bp, Homo sapiens
aactcggcaggcaagaagctggtccggcctgacaaggcgaagacacaggacacaggccaccgccgaggaggaggaggaggagcaggtgcctgcacaggtggctgggggggacctgtccgagg

SEQ ID NO: 105054 - DNA, 122 bp, Homo sapiens
ccgcccgccaccccaccattggcttcccagagcaaagacctcctatgattggtccatttccgcgaggccacgcctcctggtcggcacaaagagccggaccagcacagcccgccccaactccg

SEQ ID NO: 105055 - DNA, 122 bp, Homo sapiens
gggcaaggcagaaaggggagcctccccagatgaagtgccccctacccagcggcgcctgggcgcaggcctcctttgtgtcaccgccaccactgaaccttcgcgagtcggcggcaatcgctggt

SEQ ID NO: 105056 - DNA, 122 bp, Homo sapiens
taataactcagttggaggaagaacctcgaggaccgagtgtctccagatcacttaatgcatcggcatccaccacgctcggctcatgggcagggcccccgaggctgccaccaacccacggagcc

SEQ ID NO: 105057 - DNA, 122 bp, Homo sapiens
ctccggagcgcgcacccacccaggcggcaaagttgtgactacttgggcgcgggtgactggcgccccgctcgctccgcgcccggcgcagacaacttcccgcggctcggccccgccgcgtcccg

SEQ ID NO: 105058 - DNA, 122 bp, Homo sapiens
acacgaactggaagggggttcacggtcaaactgaaatggatttgcacgttggggagctggcggcggcggctgctgggcctccgccttcttttctacgtgaaatcagtgaggtgagacttccc

SEQ ID NO: 105059 - DNA, 122 bp, Homo sapiens
caccaagctagcaactcagttgagctccaactcaaccaatgaattgcctgcctgtcacaacgtgttggggtaccaacttgagactgcaattttttctatgagtctagttactaggcagtgta

SEQ ID NO: 105060 - DNA, 122 bp, Homo sapiens
ctgtgggcaataacttggagtgatttaaatacgtgagataaggccgggtgcggtggctcacgcctgtgatcccagcactgtgagaggccgatgcgggcagatcacctgaggtcaggagttcg

SEQ ID NO: 105061 - DNA, 122 bp, Homo sapiens
gtgaggtcaccccgggaacggctgtcaccgcgggaggagagcagcccagggaactaaagacgagtccagttaccagggaaatgtcctgaacacgtgtggtcatccctgccggaatgaggttg

SEQ ID NO: 105062 - DNA, 122 bp, Homo sapiens
gaaatagagaaaggacgttgaaagggagcctttgatagagggccctgtgccgtctgggaccggaggtccgtcagaatctgatcagaagtctgatgagagtactcactgtaggcagtcttata

SEQ ID NO: 105063 - DNA, 122 bp, Homo sapiens
atgcagatgaggatgttgggctggcccagctccacccgagacttggggagcacggtcacccgtggaggcactaggaggaacaggccctgagtccacaggctcatccctcaccccagggcctt

SEQ ID NO: 105064 - DNA, 122 bp, Homo sapiens
acagttcagatgccgggcttctaccccccagcgtgcagcttccctctcaggctgaaacgccgactctgcagcccggcgactgcttcccaggtgactgtttccagagtcaggtgttggccgtg

SEQ ID NO: 105065 - DNA, 122 bp, Homo sapiens
ttatgagtgacaggatagaactaggtggccaggctatatctcttgtatgcttggctcctccgttccttggttggccaccaggggaagcatactgttttttggttacagttgaccctgtcttc

SEQ ID NO: 105066 - DNA, 122 bp, Homo sapiens
acgagcgagcagagacttgctggaatgcccgggcctggtattcgaggttgtccaggggagcgcgggggagctgagggtgtgtgcgtgtcaggcggctgagcgccggaggaggagaggcagcg

SEQ ID NO: 105067 - DNA, 122 bp, Homo sapiens
ccacatcctcgtaggctgggggcttgaaggtgctgaggaggcgaaggtcaagcagtgaaccggtagggaaaggaccagccccatggcatgccccatgataagccaacaagttgatttcacgc

SEQ ID NO: 105068 - DNA, 122 bp, Homo sapiens
actgagtactggagtccctcaaaataacccgaagggtcaaatagtgagctccaagcaaagcgttgacccggctacccctgagcagcgccctacgctgggttccactccacttcccctccccc

SEQ ID NO: 105069 - DNA, 122 bp, Homo sapiens
gtgtctgggcatgctaggggtgtagacacatccaagttcccgtcttattctcactcatctcgtgtccgggcgtgctgggggtgtagacacatccaaattcccgtcttattctcactcatcgc

SEQ ID NO: 105070 - DNA, 122 bp, Homo sapiens
ccacttttgcaggaggtttagctgacaaactcgccgatgtcctcttgggctcttccttggcggccccttcggtggagatgaccttcctcttgggcatcctggcggcagggagggcgcgtgcc

SEQ ID NO: 105071 - DNA, 122 bp, Homo sapiens
gactgcccacaaggccaccgatgtaaagcgcccaggaagccactggctgcaaaagccgctcgcagagtgcgccctctaccggaggggtgaaggaacctcatcgtcccaggtccggtactgtg

SEQ ID NO: 105072 - DNA, 122 bp, Homo sapiens
agccctgtcttcataccttgacagtatctctgagggttgatggcttctcacctcaccatgcggcggattcctctaggggggtttagtaagtgacatcttcttttcaccgccccaagaccccc

SEQ ID NO: 105073 - DNA, 122 bp, Homo sapiens
aacttccatgaccctgactcaggaggtgaggagtggagtcggggaggggcatggcctttgcgcggctgggagcctgacccttatctgtctgtgaacccagagtgccccctgagcctcgcagc

SEQ ID NO: 105074 - DNA, 122 bp, Homo sapiens
tggtggcttcctggattatgggagttatgcattcaatgagtcaggtcatatttgccctcacgttaccattctgtggtccctatgaggtagacagctttttctgtgaccttcctgtggtgttc

SEQ ID NO: 105075 - DNA, 122 bp, Homo sapiens
gagaggtgagagtgtgggctttggggccctaaacttgcttgggacgcccaggagggcccccgtggaagcggcgtttcagtggagccctgaagatgggtttctatttgtcaggtgaagataat

SEQ ID NO: 105076 - DNA, 122 bp, Homo sapiens
gcaccgccttcccaaagggctcgggggcggggccggcggagggggcgtgtcttctgggggcggggcctgccgagtccgcggcgttccccggctgcagccgggagggggccgaggagtgactg

SEQ ID NO: 105077 - DNA, 122 bp, Homo sapiens
tcaggacgtcccaaccagagacgcagggacgtctggcgcctcagcgcctgcgccaagtggcgcgcttaaggtgagcagagtcagctgtgggtagactccccctggcggccagggaaggaatt

SEQ ID NO: 105078 - DNA, 122 bp, Homo sapiens
agaccagctttggcaacacagtgaaaccccgtctctactaacatacaaaaaaatattatccgggcgtggtggcgtgtgcctgtagtcacagctactcgggaggctgaggcaggagaattgct

SEQ ID NO: 105079 - DNA, 122 bp, Homo sapiens
aggaaccggggctgcgcgcagcgcttgcgggccagagtgagttccgggtgggcgtgggctcggcggggccccactcagagcagctggccggccccaggcagtgagggccttagcacctgggc

SEQ ID NO: 105080 - DNA, 122 bp, Homo sapiens
gcatgggttgttccggtccgtgggtgagaaacgggttctctgtgtcgcgtctcttcagagcgaagttgagtcttttcgtgtgcttctgacattcgcatctttttttctgtgcattcttcact

SEQ ID NO: 105081 - DNA, 122 bp, Homo sapiens
tcctggagcgattgtttcaatgttgcttgctcggaatggccctcctgagcaaacaacagacggtgctcaaagtaacaactggacttaataaaaggagcttacacgaaggaggagctgaaggc

SEQ ID NO: 105082 - DNA, 122 bp, Homo sapiens
gcctatcagttacaagaggaaggagaaagaggatactggttttcctctgcataaaaaacgcgatggattctcaagaatttattgaaagtctgtgtgtccaccatagtccaggatattttgga

SEQ ID NO: 105083 - DNA, 122 bp, Homo sapiens
ctcggcgttggtgagcagcagtggctgctcccccttcttgtgcggcagcagcggctggcgcgtgtagtgctccccgttagaaatgttctcaggcaggttctggtccctgctctcgggcagca

SEQ ID NO: 105084 - DNA, 122 bp, Homo sapiens
aaaggtgggtgttgtgttcttatctactttgtttgcatatgaaaatagtgctggagcatacggctagttcaagcgattttaatattctgactaaggtatcttcaacattttaactatgaggg

SEQ ID NO: 105085 - DNA, 122 bp, Homo sapiens
cccgtagcactgccggcatttgctcggtgactaactcatcatgcttccatgactggctaacgggcaatgctttatttagatatgccaacacaatcaatcaagccttaatctggcctgggaga

SEQ ID NO: 105086 - DNA, 122 bp, Homo sapiens
cccagtgctggcttctgctctgtggtccacgttccatttctgccgtggtcccagcagcgtcgctgtgggtctggcctgggttgcgtgtgtttcgtatgtgggccgtgctccctgcttggttc

SEQ ID NO: 105087 - DNA, 122 bp, Homo sapiens
gccgagggagagagctcagaaggtgtgtcacgctgctcgctcggtctaggtggaacgaagcggagggaagccacgcggagcaatggaggcagccctgtaaggcagtgtccgtttctgtctgt

SEQ ID NO: 105088 - DNA, 122 bp, Homo sapiens
ctgttcccacagcagtacccacagacacccagaagtcacgtagtgtgaccctcggatcttcgggccacgcgagtaccccgtcacacgcacacgcgcgtacacacacacacacacacacacac

SEQ ID NO: 105089 - DNA, 122 bp, Homo sapiens
atgggggaataagtcaccctctggccaacgcgtttgctgtttggttagagctgattcttacggatgcgcgatccgctgctcctttaactagcaactggtttgaaaacaaacttctgtttgaa

SEQ ID NO: 105090 - DNA, 122 bp, Homo sapiens
ccgaggggatcgcgctcgcgccgcgccactcgcgcggccaccgctagagggagccgggagcgtctccgaagtctcccgcttgcggcttcgctcaggcgctgcctttcacccgcctcgcaggg

SEQ ID NO: 105091 - DNA, 122 bp, Homo sapiens
ctttaggctgtcgatggcgtgttcatccggagtttgaaagtcaactgcaaagtcacctctcgcttcgcccactatgttgtcaccagccaagtggtcaacactgccaatgaagccagggaagt

SEQ ID NO: 105092 - DNA, 122 bp, Homo sapiens
acggaacccgagcccccggcgacttataaatatttgcgtattcaaatgaggcctggctcccgttgctatggcgcccaggccgcaaccccgcggcggccggaagaacagcctggagtaggaga

SEQ ID NO: 105093 - DNA, 122 bp, Homo sapiens
ggaggccagtatgcagaggccgagggagcttcggggctcggggaggctgggtgggcgtcccgttcctgcgctgcccctgacggagtccccgtcgcagagggcctgtgggccggtgactttct

SEQ ID NO: 105094 - DNA, 122 bp, Homo sapiens
gagaatggacctagctgccttaacttccctaaacagagatcttttccatagattatatgacgtactttggaaaaatctgaacatgtttgacaattgtaacagaaattggtatagatttcctt

SEQ ID NO: 105095 - DNA, 122 bp, Homo sapiens
ttcgaatcacaacctctgctctaggctctgtgttcaatttttagctctggctctagcaaacggaggacaaggctcattactgcatacatgaggttttgtttgcttttcaatcgaagaggaag

SEQ ID NO: 105096 - DNA, 122 bp, Homo sapiens
tcactgaatcatgggggtggtttcagccatgcggttctcgtgatagtgagtgagttctcacgagatctgatggttttaaaagcattgtctggcattttctctgctggcgcttcttctcttgc

SEQ ID NO: 105097 - DNA, 122 bp, Homo sapiens
aatccggggcctctccttcgtgaccccggagtgggcaagtgacgagggcacggccagaaacgcattggcgtcaaggaaaccacgacccatcttcctggaaggaaacttggggacacttatga

SEQ ID NO: 105098 - DNA, 122 bp, Homo sapiens
ccaggtcccctagtttaagggcagagatttactttctctgaggctacaaaggagcgtctgcgagaatgtctctaccttagacaaaacagggaggaggggtggagctctccaaattgcctctg

SEQ ID NO: 105099 - DNA, 122 bp, Homo sapiens
ccttctcattctaatggttctatgcctctacattttggatgttcctgagacacagaacttcgtaactctctttcaggatccctgaatttaaagccctaaatacagagtactagccatgtgcc

SEQ ID NO: 105100 - DNA, 122 bp, Homo sapiens
gcagtggactgaggttcagagaggtaatgtggagcgctgcacacacctgagggagttgtgcgcctgtctgacttccgggtgattcatgaggaacattcctgatggggtgggaagggaacctg

SEQ ID NO: 105101 - DNA, 122 bp, Homo sapiens
tagctcggagagacgggctggggcagggcgtgcgttcgtgcggtcaaaatccactggtggcgtttggggtgttcccgtggacgcggcctcccggcaggcggacctccaccgggtgggcgcgg

SEQ ID NO: 105102 - DNA, 122 bp, Homo sapiens
acccaggatctcagcccttgtgcgtcttcaggatcctcatccctgatctctcccgaaggccgccctatccctccttcaggcggggacctagtaccttccgtccagcgctccccgctgcccag

SEQ ID NO: 105103 - DNA, 122 bp, Homo sapiens
cttttctctactggccttgcaccaagaacagccccagtcattaggctgctctgccactgccgtagctgtcaaccaaaccaagaaaaaagacccatgggatcccatgtctgtgtgtctgagtg

SEQ ID NO: 105104 - DNA, 122 bp, Homo sapiens
aaccgaaaatccgtctgctttgccgagagctagggaagccacaaccaaacaaagagatcccggcacgctgtcagagagcgcgcgaggagcccacggagccggctgggcgcacgcgggccggc

SEQ ID NO: 105105 - DNA, 122 bp, Homo sapiens
catcgctgagcacccacaggccacgctggctgctcaagtactagccccggccccagcacccgccaggatgtggagaccgaggcccatctccgcatcccgggctcctggctcttgattttgtc

SEQ ID NO: 105106 - DNA, 122 bp, Homo sapiens
gtcaagatggttagtggctctgaatagtaagggagtactttgagtaggtcctgaggctggcgattagaggttcccagcacacttctgtgtgaagtctaggtgtgtccgcagagagtaatccc

SEQ ID NO: 105107 - DNA, 122 bp, Homo sapiens
tgtgtgtgtgtgtgagagagagagagagagagagagagagagagagagagagagagagcgcgcagaccctgtgaagacaagactaattggataaagttcaggcctggctcaggagcagctct

SEQ ID NO: 105108 - DNA, 122 bp, Homo sapiens
tcctgacttcttgctgatcacaaacgttaaatctattcccttaatggctctcgacatccccgctttttagtgtggaaattctcgacttgaaattgtttttgagtcttttactatccccttgc

SEQ ID NO: 105109 - DNA, 122 bp, Homo sapiens
tgtcagcaggagtccgggacaatccaataccaggcggggcgcagcggaggctggcaggcacgccctgggaggcaggcaagttgattccaaggacgagtcaccctcaacctcttttagcccac

SEQ ID NO: 105110 - DNA, 122 bp, Homo sapiens
ctctcccggggaaggcgatcacggcaggtggcctggacggcagcatccacacctgtattccgtttcccaccgagcacgtgaggaccaacgagcgctcgcccccgccgggcacccggcatggg

SEQ ID NO: 105111 - DNA, 122 bp, Homo sapiens
acccgggccccgtggtcaccctctatcttcagggtcatctgctgcccaggtacaggctgccggtcttctgactggccgctttttaccaccagctgtggggagggtggagacgccgaaagaag

SEQ ID NO: 105112 - DNA, 122 bp, Homo sapiens
tctaaaatgctggagaatgtaagagcatctcacccctcccgtagctttgggaggaaaacacgctacctttgatgcattaatgaaagcaggctggctgtgagcgctggcacacactgtgtcct

SEQ ID NO: 105113 - DNA, 122 bp, Homo sapiens
gcttagcaaaagttccaccctggcttcctagactgctacagctccaagaaaaatcctgtgcgcacaaacggccgccgcctttggcgtctcccgcggattagaccagttaggaggtctcagta

SEQ ID NO: 105114 - DNA, 122 bp, Homo sapiens
atttgaggaaaactatagggaaggtttagatgctatcctccttccatctctggctgcatccggctgagaaatactattcctcctttttatgtgaagccctccacatgggctttggaccctga

SEQ ID NO: 105115 - DNA, 122 bp, Homo sapiens
gctgataccagcaactgctccacgttcttctggatgggcacctggagccagttctgcaaccgtggtggctcctgagctttggccagtccgaggcagccatggatggggggcagcgtgtgact

SEQ ID NO: 105116 - DNA, 122 bp, Homo sapiens
cccggggccaggcaaggcctgcttctgttagggcaggttcctcgttcgtgagcgtgaacccggatctgaaaaagctccctgtggcccgtggctagcacctgcccgggtggccgcctcttact

SEQ ID NO: 105117 - DNA, 122 bp, Homo sapiens
tgtgaagattttatactttattgagcacacattaagtgctctgtttgagaagctctgcagcgtgtttacaaaattttaagcatagatctgtttctaagtcaagatagtttctttctgagaca

SEQ ID NO: 105118 - DNA, 122 bp, Homo sapiens
atttgctaagagaagaaagcatattgtttcttaagtcacctgtagggcgaagtaaatatgcgaggaaatagtctccataattgtttaaaattcattgaagattgcttttctgtacaaaagag

SEQ ID NO: 105119 - DNA, 122 bp, Homo sapiens
gcgacgggggactgtctctaactacagaccaggggagcggagggacgctcgattcacccgcgtgcacagggcagtcctgaaagtggatggaaggctcggaggaacttctgagagctttgctt

SEQ ID NO: 105120 - DNA, 122 bp, Homo sapiens
cactttatgctggcacctccgtgggcatcagtctcctcccctgtggaagggggatgattgcgccttcctcacagggtcgttatgagtattctgagatcgtgtatcagcacattgcctgttgc

SEQ ID NO: 105121 - DNA, 122 bp, Homo sapiens
gcctcaacttcctgcgccgacggctggggacgcggagaaccctctccgagctggggtccccgcctgctgggcaacctcacctcaacgtctggcctggcctggggccgcttggactcggcagc

SEQ ID NO: 105122 - DNA, 122 bp, Homo sapiens
aaaggaaaactattccaaatgcgggtcgaggttgatggtgaaaaaaatcaccgcatgaggcgcaggaggggtgaggtgatgaaaagaacgtggattcgggaggcgaagaagagctttgggat

SEQ ID NO: 105123 - DNA, 122 bp, Homo sapiens
ccgccgcccgcgcagaaagccgtcgccgccgccgccgccgccgccgccgtcgtccggacccgttagctcgcagctctctcgtccgcccgccgtgggctagtcccgcccttgcctggcccaac

SEQ ID NO: 105124 - DNA, 122 bp, Homo sapiens
cgtggggagagatggtgacggcgcggagcctccctgggccgattggcacgatccgcgctccggagtcacctgcgcgccagctgatgacacagtgtgaatctcctccaaggtgtgactccatg

SEQ ID NO: 105125 - DNA, 122 bp, Homo sapiens
gagaatctaattacagtttagtagccaaagatgtaatatctcacatgactttttaaaaaacgattatttttgcaacagcacaagagtgagactttgccgtgtttttcattttaaatgtgaca

SEQ ID NO: 105126 - DNA, 122 bp, Homo sapiens
ccctttccgagtcaaagaaaggggtgacagacgcacctggaaaatcgggtcactcccacccgaatattgcgcttttcagaccgccttaagaaacggcacaccacgagactatatcccacacc

SEQ ID NO: 105127 - DNA, 122 bp, Homo sapiens
agcgtgtgattccaaaactgtccacaagaaggtgctcgggagccagaattcaggcgttcccggcccgcggacgcttagagaggggagcttcggagttatggggggacccacccttccattta

SEQ ID NO: 105128 - DNA, 122 bp, Homo sapiens
cgcctgcggaggtgtcctcgctcacttcggggggcccagagtctcgggtgaggagccagccggcctcgcgttccctcggacggttgcccaatggcagcccaggtggcagcccgggaggcgcg

SEQ ID NO: 105129 - DNA, 122 bp, Homo sapiens
ccaggaagtgaacaatgatctcctctggcctcgcccagctggctctggtttcctaatccccggtcctcctggcaggggccacacactgagcttcctccacgtgcccaggtcctggcagggag

SEQ ID NO: 105130 - DNA, 122 bp, Homo sapiens
taccagctgtgtgaccatgagctgctagtcatttaacctctctgctctcagtattctcatcggtaaaatgggaataagaatgctgctgttatttgtggtgatgatgatcaaatgggatcatg

SEQ ID NO: 105131 - DNA, 122 bp, Homo sapiens
tcttcttacagcacagggtgtgtacagcccccctgtgatatggtccttcatatttcaaggcggagaggatgatcttactcccaataccgcagaaagtgtacaccaccccagtgacattgctc

SEQ ID NO: 105132 - DNA, 122 bp, Homo sapiens
gcctcactgacatgcccccgccctggcctcaggcctgccctgctgaggcccgataaggcccggcccaggtccgcctcaggctgcagcattatctttaacgactgtcacccagacctccagaa

SEQ ID NO: 105133 - DNA, 122 bp, Homo sapiens
gcctgggattgcaggcgcgagccgccacacctgatggttttcgtatttttttggtggagacggggtttcgctgtgttggccgagctggtctccagctcctaaccgcgagtgatctgccagcc

SEQ ID NO: 105134 - DNA, 122 bp, Homo sapiens
ttgttaactgggtttattagctgttgaccttccctttcagcataatagtggcagtcagaccgaagagagcactaacgtcctgattagcatttatctaaagataggctgctgcctgttacaca

SEQ ID NO: 105135 - DNA, 122 bp, Homo sapiens
gctctggccagcaggtgtgactgaccctgtggtggctgcggcttccccacacagttggctcgcactcttccctcctggggacaagttgctccaaatagattttccatgccaggctctgctgc

SEQ ID NO: 105136 - DNA, 122 bp, Homo sapiens
agctggcggtgggaggagagagaggccgggtcagtggggaggggaaaggcctgtgtgtcccggtcttgcccaacccccggcccggggcccacgcacccgggcgatcttctgctgcttgtctt

SEQ ID NO: 105137 - DNA, 122 bp, Homo sapiens
tccacttgccccaaactaaccgttagcccttcacacacactgacccttgctatagcaccacgatctctccatagtctgcaataggcccccggagttctattccctgaaacttttatccatgt

SEQ ID NO: 105138 - DNA, 122 bp, Homo sapiens
cctacgtctctggctgccccgcccctctggccaagagcggcttcggggttcccgatttctcgctacccaaggctcatttaccctcctggttgggggtggaacttgggattcctgataaatta

SEQ ID NO: 105139 - DNA, 122 bp, Homo sapiens
cgcaggtggtttacctgtcttctcaggcagtcaccgtggtccttgtccccatggtggggccggggcaagagagggccctggaggggaggggggtttagttgaagatggagtgagttttgagg

SEQ ID NO: 105140 - DNA, 122 bp, Homo sapiens
aggctgaggtgggaggatcgcttgaacacgagatgcagagggtacaataagccgtgatcacgctactgcactccagcctgggcaacagagaccctgtctcaaaaaaaaaaaaaaaggaaagg

SEQ ID NO: 105141 - DNA, 122 bp, Homo sapiens
gctcgcaattacggggtttttgccgggactagttccttttatagattcggctgcaccgagcgcagaggttactatcggtcaaagcctgtgctctccctcctccccgccccgttcccggcctc

SEQ ID NO: 105142 - DNA, 122 bp, Homo sapiens
agaaggctggggtccacctgagggtggcgtcttaactgtgccttttactgaggctgagcccgggcctcccctgtagtgcctccaaccatgctgggctctggcggccatggcaggcctcttct

SEQ ID NO: 105143 - DNA, 122 bp, Homo sapiens
ccgtccctcttagcctatcacattgcaagctccacctctattccacgtttcagcctatcacggtagaagcactgactattgtagtctgattcggccaaaaacaaaaattcactaattttttt

SEQ ID NO: 105144 - DNA, 122 bp, Homo sapiens
ggctcctgcctggccctcattgcgaggcccgcgggagtggctgcctccctccccctgctccgcacagagtcctgcatgggaccagcagctcctgtctcacttccgcacttggggtttcagcc

SEQ ID NO: 105145 - DNA, 122 bp, Homo sapiens
tctggctaggccagggcaaagggacctgggccatgacctgtctgttttataaaccgaaatcgctgcagcccttgtcttggcatgagggtttcatggtagagcacgatgcctgctggagggcc

SEQ ID NO: 105146 - DNA, 122 bp, Homo sapiens
tttcctctgctatcagctttcacttttatttacgatgagtgtccccttgtgtctcctctacgccaaggtccactatcactaatatttctgtgatatgtgaataaacctaaatgtaaagttag

SEQ ID NO: 105147 - DNA, 122 bp, Homo sapiens
gaaaaagcccaaagttcttgttcggtttcgcctggcactggaaatgccgtcaaaccagagcgcgaaacggtctggtggagtatttctggtatcagcatcttgcaattatttgctcaaaggca

SEQ ID NO: 105148 - DNA, 122 bp, Homo sapiens
cacacagcgccctgctagccgaccccccatcccccgccaccgggagtcctcaagcttttccggaattgagggagagcaaaagccagcctggggatctgagttccccccagccctgccccgcg

SEQ ID NO: 105149 - DNA, 122 bp, Homo sapiens
gtgggggccaatattcaacattcttaaaagaattttcagctttccacagcgcgggggaaccggaggctgcaggatggtcaagctgacggcggagctgatcgagcaggcggcgcagtacacca

SEQ ID NO: 105150 - DNA, 122 bp, Homo sapiens
cagacagtggcaatatgcctattgttgtgcaaaaagaagggaatgtgctcctctggcaagcggatgctggcatagttatacagaggttcgcctggaatgctgtgagtattaggaggagcttc

SEQ ID NO: 105151 - DNA, 122 bp, Homo sapiens
gtctctgagtcctgaaggaaatgagtgggtgtgtaaggtcaggatacaaacaggaatgctcgacatcaacagagaacaatggtggccagtgttagaattgaggccaacctcagacacatggc

SEQ ID NO: 105152 - DNA, 122 bp, Homo sapiens
ggaaaagccaaagttccttcaatgcaaccagggggtgtcctgcatggtcctcctgccccccgcccccttgcctctcttattccacttcccatcaggctccaccctgctctctttgcttcagc

SEQ ID NO: 105153 - DNA, 122 bp, Homo sapiens
atgggggaaagcaggcaatgggaggtggagacactttttccctttatttaaaactaaagacgcagccctaattgttgggagagctggcccaagcgggtgaattgactgtgaacttgtactaa

SEQ ID NO: 105154 - DNA, 122 bp, Homo sapiens
agtggcatccggggccagggtagcggccgtggactgggcctgggccagggccgcagagctcgcggaggcaaggccgaggataaggagtggatgcccgtcaccaagctgggccgctttgtcaa

SEQ ID NO: 105155 - DNA, 122 bp, Homo sapiens
ctacaacattgcctcctatggtctttctgacctcagaccctggctccccctcccgctgggcgctccttggcccctttgggatcctccgagttaaccaggtacagctgcacaccacggttgct

SEQ ID NO: 105156 - DNA, 122 bp, Homo sapiens
cagcaccccgcccctccaactccatccacccgggccagctgcggcgcccacccccgccgccgctgccaccactgccgccgccgccccccggccccgtagtgtccgcctcaggcgcggcccag

SEQ ID NO: 105157 - DNA, 122 bp, Homo sapiens
caaaattcaggatagtggttgcctctggctgcaggggagagagatatgaatgagagcatacgaggctcctgggatgtagtaatgttccatttctcagtctgagcaacgggcacctggacatt

SEQ ID NO: 105158 - DNA, 122 bp, Homo sapiens
cttttcctcttcctgggtcttttcaggctgcggcttctgcccgtccagggccacttctcccgggacagtcaggtttgggagactccggattttgtttttgtaaagtttcctctgggtggagg

SEQ ID NO: 105159 - DNA, 122 bp, Homo sapiens
ttcaccctgtgctcggagttcagcagctccaaagctgtctatctccgtggcccgctactacggcactgcggctctgtgccctgcccctcgcagcctggcaagtccagctgccactctcactg

SEQ ID NO: 105160 - DNA, 122 bp, Homo sapiens
aaatagctccaggcctgaaggtacctctgaaaggtacaaccccagataggacagaacccccgagcgcatctgcacgtgggtcttctgccatccagggctctgcagcttcccagaatccacac

SEQ ID NO: 105161 - DNA, 122 bp, Homo sapiens
catcatctggatggaccgcatttgtttatccatccaccccttgatggacacggctgtttccgctctgtggctgtgtgaatggccctgctgtgaatgctcgcatgcgtgtgctgtggggacgc

SEQ ID NO: 105162 - DNA, 122 bp, Homo sapiens
ctctccgacccgacgtgtcaccttagccccctgcgtcaccccaacgcctccagccagctgcgcaaagctgtaaaagttccagggagagaacagcctctggagacaaaaaaaaaaaggaaacc

SEQ ID NO: 105163 - DNA, 122 bp, Homo sapiens
ccagagtccttggagtcagggacctggtttgctgagggacagggacagccccacaccagccgggaccgggagcctgtcaaagacgaaggcagcgccccccaacatcttccccaaacctctgc

SEQ ID NO: 105164 - DNA, 122 bp, Homo sapiens
tttgggagtggaactgctacgtggaagtaggcgtgagcactgacatcgttaacattatgtcgtcgctctcaaaatgctaaatgtagttgctctcggagccaacaattccccttctgggtttc

SEQ ID NO: 105165 - DNA, 122 bp, Homo sapiens
ggcacgtcgtgggcgtgcaccaggctgggcaggagagtccgatgatgagtcagcgctcagcgcttcagtcagtgagagatggggaggcggcaccggcaccgtggctcgggctgggagctaaa

SEQ ID NO: 105166 - DNA, 122 bp, Homo sapiens
aaaatgctaaaactttcatatcactccacctgctcagctacatgtgaccagaggggcctccggacaaacgagacacttaatcctcataagcagcagcagcaaaccacacttagtccagactg

SEQ ID NO: 105167 - DNA, 122 bp, Homo sapiens
cctacaaaaggaatggaacagataagaacgtattgagattagactgtgctgccatgcggccgccgtaggacacttttaatatccccgtttctcaggctgtagatgaaggagttcagcatggg

SEQ ID NO: 105168 - DNA, 122 bp, Homo sapiens
aatcgactcactatacagggaataatagaaactgggcctccaccacttatcccatatgtgcgtggacttgagccagattatagatctgtgaattgcaaaactataaagttaatgctaaaaaa

SEQ ID NO: 105169 - DNA, 122 bp, Homo sapiens
cgcgctggggaccgcgcccgcacggagccggggcgcgaggagacctgctccgctcagcgtcgggcacgatgcccacctctgtctgaagacttggaatgagctccctctccccaaccgcgaaa

SEQ ID NO: 105170 - DNA, 122 bp, Homo sapiens
tggtacgacacagagggattctgggattaaatagtgcgcgcggggcggggccaggtcgcccgccggccgcacatgcgccgcctcgcctccagcagcgccgcctcgcctccagcagcgccgcc

SEQ ID NO: 105171 - DNA, 122 bp, Homo sapiens
aatctcccctcacaccgcaaactgtcctgggatcttcccccgcgcaccgcccctcgcccgcgcctgccttgggaaatcttggccccacctttctgattcagaccccgcctcctgaagagagt

SEQ ID NO: 105172 - DNA, 122 bp, Homo sapiens
agtattgagttagatgagggcaaacaaactctgcatatatcaggtcgcatgatcgcctgccgttactcaatgatgctgttctttaaacagtggtcctgctatcagtcaagctggaaaattta

SEQ ID NO: 105173 - DNA, 122 bp, Homo sapiens
atggtgtcactgacagtgagaagaggtagttgaggatactgctgcaatccacctctcccccgactgcagcatagtactttgggtttctcaagctattcccttggaggtgatagtcaaaaatg

SEQ ID NO: 105174 - DNA, 122 bp, Homo sapiens
gtgtccagcctgggagccagggccggtccatggtgaccactgatgccttcacccccaccccgcaggagcctgcaggcctgaaccagggtgatgctgaagatgatgaccttcttccaaggcct

SEQ ID NO: 105175 - DNA, 122 bp, Homo sapiens
cttggctcgggctcatcgtgctcctgggcagctggagcctgggggactggggcgccgaggcgtgcacatgctcgcccagccacccccaggacgccttctgcaactccgacatcggtaagcgc

SEQ ID NO: 105176 - DNA, 122 bp, Homo sapiens
cggacctgagtttacacagcttcagtgatggtgcttctcttccccacaagggccccgaggcggccggcctgagctccccgctgagcttcccctcgcagcgcggcaaggagggctcggacgcc

SEQ ID NO: 105177 - DNA, 122 bp, Homo sapiens
ttgaaccggaccaaaccaaaccaaaccaaaccaaaccaaaccagaccagacaccccctcccgcggaatcccagagaggccgaactgggataaccggatgcatttgatttcccacgccactga

SEQ ID NO: 105178 - DNA, 122 bp, Homo sapiens
ccagcctcagtggttactgcctcttgggcaacggcggggaggacctgaccctaggctggccggtgacgcgatgcacagaaacccacgccacggcgaggcacacggtgagagtgccatccgtg

SEQ ID NO: 105179 - DNA, 122 bp, Homo sapiens
tatgtcagaaaggggtaagtgatgctcagaaaaataggacaagggatcagaagtgctaggcgttgcaatttaaaataatggggtctggaaagccaccctgagaagggccaatggagctatgc

SEQ ID NO: 105180 - DNA, 122 bp, Homo sapiens
tcgccgccggcgcttcaagatgcgccgcatgaagaacgtacaggagcagagcctggaggccgggctggcccgggacctgcccgccgtcttggcccccggcaaggagttcctgcagctgccgt

SEQ ID NO: 105181 - DNA, 122 bp, Homo sapiens
tgaccgcagagtgggtcaccacagcagcacctgctggcccagtgggtgaggggctgaggtcggctgcagtacttggagatctagggccaagctggggcgaagtgggagacagaggcaggcag

SEQ ID NO: 105182 - DNA, 122 bp, Homo sapiens
gggaggggcacctaggatggtaaggagagcccatgaaattcagttctgctgcatccctgtcgccccctagtgactggtgtgggaaggacagctatctggggagagacattctccctcccaag

SEQ ID NO: 105183 - DNA, 122 bp, Homo sapiens
aataaagaaggcgtttggagcgcaggcagaagacacttgtgctcttctaagcgcagcgaccgtggcaggaataacgagctacagaggccacacccgcacacgggaaacgcatttcccatcgc

SEQ ID NO: 105184 - DNA, 122 bp, Homo sapiens
accgcgagttcgcggactaaacaggcataaactacaagccccagaatgccttgggcgagacgcgagagcacggaggagcggaggggcgtggccacgtcgaccgcgcgggaccgttaaatttg

SEQ ID NO: 105185 - DNA, 122 bp, Homo sapiens
tcccaagccataggcccctcctaggccagctcaggcctcaccttgtccctccctgcagggcggggtctgattgacttcaagaaggagtcagagatcagcttaagggcaaaggctggaagcag

SEQ ID NO: 105186 - DNA, 122 bp, Homo sapiens
acttgctctgttcagatatttggttaggagtgttgctttttaggaggagcagttgggggccgggttggggagaagctaacaatgtcagcagctttgaagaaggcattttgtaatctatacca

SEQ ID NO: 105187 - DNA, 122 bp, Homo sapiens
gcagtgaaaacgaacagaggctatggaccacagcctctctggaaaaggctgctggctgggcggggagagtcagcgcacagtcgggagtgtctggtgccacagacaggggactatgctttccc

SEQ ID NO: 105188 - DNA, 122 bp, Homo sapiens
gcggtgcacacggatgaagtccttgaggtccttcatgcggctgtggtagagcgagcggcgcgagtacatgcgctggatgatggctgtcacgttcccgaacaccacagcgtgcatcagggctg

SEQ ID NO: 105189 - DNA, 122 bp, Homo sapiens
cgggcgcttcctgggagggggaccaaactcccggccttcagctcttgccctccgggtctccgggctccgcacctgcgcccgcccccggcctcgcccctgacctgtgcccaggggctgggcgg

SEQ ID NO: 105190 - DNA, 122 bp, Homo sapiens
cactttgcaccacagtgcgagtcagcgatcacactctgttcctgacagttgtgtctccgtcgtcaccgtcgtcacaggcgtccgggcccttacaacgagtccagcggtttcttcctgctgcc

SEQ ID NO: 105191 - DNA, 122 bp, Homo sapiens
tgagctttggcccagtacaatgtcacttgtatttattttcttatggcaactttgagatagcggaagtgttctttaccaagagccagggagggcccggagtcctgccggctgctgtcccggcc

SEQ ID NO: 105192 - DNA, 122 bp, Homo sapiens
ttacacacccctgtaatattgttcgttaaggagttaagaggatgatattactcccagtatcgcgggggagtgcacgcctctgtgatattgttcataacatcttgggagagacaggaggaaat

SEQ ID NO: 105193 - DNA, 122 bp, Homo sapiens
ccaatatctgttggacatcatatgaaatactagcttgaggtatttcaccatttctacattcgaatgcactaaactacataattgacatcatcatatccttgaaaagttgagctttcatcagt

SEQ ID NO: 105194 - DNA, 122 bp, Homo sapiens
gtctgggtgtgcgctgtgtccatctgcacctcacagacaccagtcatggggggatgaaaccgggccaagaacacatgtgtgcacaggctgtgtgtgcctgcatgtgtgggatgcgtgtaggc

SEQ ID NO: 105195 - DNA, 122 bp, Homo sapiens
gggctcacatatggttgctaattagctggctatctcttggagttaaatgattttttttctcgccccgttcgcatccataatagacgcgaacagagtcgtgattgttccctgttgcgggacat

SEQ ID NO: 105196 - DNA, 122 bp, Homo sapiens
aggtccagaaatgcgtgtttgtgggggatggggagcggggcaagcaggagccacatcgcccggtcaggagtctcatgaggatggcaatgcctgggtgtctctgacacagagaaagccgaatt

SEQ ID NO: 105197 - DNA, 122 bp, Homo sapiens
ttaagtagtaactggagctcagattacagggagctgaacatctttagaaacaaacaggctcgaccctcaacaggaaggagttgtccagacattggaagttgatgatgtgtgtctttgcttgg

SEQ ID NO: 105198 - DNA, 122 bp, Homo sapiens
cgtggtgtgtgctcaataaaaatgttagttcatccactcgggaggaagctgctttgccggcgcgtcatgacggatccaggagccggccaaccgtgctctatgatcgtgaccgggctatggcc

SEQ ID NO: 105199 - DNA, 122 bp, Homo sapiens
ctgggacgtgtagggaccgctgccttcaagggccaggtgccctcaggagccacaggtaagcgcctcggggcgcgggggaagggtggccccggcgcgtaggtgcgggtgaggggcgctcccag

SEQ ID NO: 105200 - DNA, 122 bp, Homo sapiens
attggtctcagaatttcttggctcctcttggcctctgcagccttgctggaggctgccctgcggaatctgagtgaataagggaaacagcaacagtcacgttggggaaaagctgattcggacag

SEQ ID NO: 105201 - DNA, 122 bp, Homo sapiens
aaattcactgtcccagtggctgggaacctggctcttgccttttcaacgccacttttcctccgtccccgccatcccttggaattgccctaaaccctctctgtgggccccgcctcggagcgccc

SEQ ID NO: 105202 - DNA, 122 bp, Homo sapiens
ggtgcgcttaagcggagctcgtccatgttcatcccgcagctcttgaccagcatcgacgcccgccccacgtgcagctcctccgtgcagatctccctgcagcgcaaggccacggacggggccac

SEQ ID NO: 105203 - DNA, 122 bp, Homo sapiens
cggatggtctttcacacggcacatttggacatttccagaactaccatgagatggtttagacgggaattcatgcaaatgaggggtcaaaaatggtatagtgaccccgtccacgtcctccaagc

SEQ ID NO: 105204 - DNA, 122 bp, Homo sapiens
tggcacctagcaggtgtggtgaggtgggcaggtgacggtcagctgtgtgatgagctcctgcgagctcgtccgtgggcctctgccgccggtaccgccccgccccctggcctcctgaaccacca

SEQ ID NO: 105205 - DNA, 122 bp, Homo sapiens
cgatctaattaccggtgcatgcagcccccagtcacatacccctgcttgctcaatcaatcacgaccctctcacatgcacccccttagagttgtgagcccttaaaaaaagacaggaattgccgg

SEQ ID NO: 105206 - DNA, 122 bp, Homo sapiens
ccctgcctccgcccgcgcggccccctcgctcaggtcgcgggcgcccggggcctggcttcgcgtgggtcctggctcctcccgttccgcagttggtgccgtctgacagccccttccgcgcggcg

SEQ ID NO: 105207 - DNA, 122 bp, Homo sapiens
tcctttctctggagcccgtctcacaagccgcctgcctctgggagaggccaagcctggagccggatgaagcttggaaatgcatgcaattttgcaaaagtggtcatttctgagaggcggtaggg

SEQ ID NO: 105208 - DNA, 122 bp, Homo sapiens
gtttctttccaccgaagcaacaagccagccctccaaggtgtctggcttccagcatggaaccggaggtctggattcatctccctgcaagagcatcagaagccacacactcttggaggctgagg

SEQ ID NO: 105209 - DNA, 122 bp, Homo sapiens
tagcgttggggtcgatcatcatcttcgtgtgaaccacgatctccccttcaaactggggcgcgagatgttagggcctctgcttgtgctgccgcccttgggcccctgtcttctttctgagcctg

SEQ ID NO: 105210 - DNA, 122 bp, Homo sapiens
agggagaaaatggcattctaaataatgtattcctaggagttttattatcaatgtaataatcggacacagtcaaatacaagtttctgaacaaagtcttggattgtactgatgccaagtcatat

SEQ ID NO: 105211 - DNA, 122 bp, Homo sapiens
aatgattcctggtgccctgccaggagaaatcctaggtgtcctggttttagggatgaaccacgcggtcaccccagctgggggcgagcagagggacggctcctcctcccctgttatttgtcttt

SEQ ID NO: 105212 - DNA, 122 bp, Homo sapiens
tcattggttcagccacccctttcatctcggctctttattggcagcttctccataaggcgccgccctttccgtatcagaaactaccaggtgcttcatggttggactgaaattccgctttcccg

SEQ ID NO: 105213 - DNA, 122 bp, Homo sapiens
ggtagaaattccaggcatacagttaacctactagttcttgccctgttgtgtgttcagcggcgttgtccgggcgggctacctcagactccgcaggaaaggttccggacaagtcctgctaatgc

SEQ ID NO: 105214 - DNA, 122 bp, Homo sapiens
ttatcgaaaatctgttgtaaggagcattgttaacttagaataaaaatcgaatccaaaacacgcttttgcaataccccctcccgatatccaccgaggcaaaggcagaattaagaagcagggtc

SEQ ID NO: 105215 - DNA, 122 bp, Homo sapiens
gatgtttactcagggcccctcaaattcctgcatcaagatatcgactctgggcaagggatccgaaacacttactttgagtttgaaaccgcgttggcctgtgttccttctccagtggactgcca

SEQ ID NO: 105216 - DNA, 122 bp, Homo sapiens
gcgtggcccggaacttgttctccaaggccaccagctgctcgtaggtgaaggcggtgcgcgcgcgccgcggcttggcgcagttgggctccaggcgccggcgcctgggacgcggggagccgggg

SEQ ID NO: 105217 - DNA, 122 bp, Homo sapiens
gtcaggaggagcgtcctgggggcgggctgtagggcggggccaggatgagcgttaggagggcgaggcctggggtagggccaggataagcgtcgttggggcaggtcctgggtagagtccaggtt

SEQ ID NO: 105218 - DNA, 122 bp, Homo sapiens
ccaatcacttgaggtcaggagtcagcctaaatattcggcagaaccaacatgggacgagagcgcttctaaacctaggtccctgcacctcttcgcacaaagtttaaagatggttcaccccatcc

SEQ ID NO: 105219 - DNA, 122 bp, Homo sapiens
cttataactaaacatttacaaaagacattctcatgccttttttctggggggttgggttggcggggcggtggggggggcgcggggagacagggtcagcattgaaagtcatcacatttcaaaca

SEQ ID NO: 105220 - DNA, 122 bp, Homo sapiens
tggctcagaaggaaggatagcccctgggtgtctcattccctgccactgctcctccggagacgccctggggaagccctgccagcctgttgctccgaaaaccgcataccagcctcacattgtag

SEQ ID NO: 105221 - DNA, 122 bp, Homo sapiens
tccttggtctggcgtccggggatggaggagggtggaattaagttagtaggtgatgcgggccgagcaaagaccctccgtgctctaagaagcacgaccgaaatgcggcgacccctctttaatga

SEQ ID NO: 105222 - DNA, 122 bp, Homo sapiens
gaggcgccggcccagcgaggccgctgggactgtgcactgaggggcgctgaccgttggacgcgcgctccccgcagaccctcgctgaaggagcagggggcggcgcgcgtgcgcggggcgccggg

SEQ ID NO: 105223 - DNA, 122 bp, Homo sapiens
gccgatacccacagagcactccctgcccgtcgcccggctgcggtctcaggcgggtacctgcggcatccggctggcacttcacctccaggtcgacggtggacaggcacagcttgtggccctcc

SEQ ID NO: 105224 - DNA, 122 bp, Homo sapiens
attcattcattcatccattcattcattcgtctcactcaggcattcaggcattaatacaagcgtttcctgagcacaagcatttcctgagcacaagcgtttcgtccgctgatcggccggcggcg

SEQ ID NO: 105225 - DNA, 122 bp, Homo sapiens
cagacggggtcatcggcacacctgggagcaccctcggccttggttgcctgtgcctgggttcgctggattttccaccaaatcagccaggctggggctgccattggacctgtgccttctgcaca

SEQ ID NO: 105226 - DNA, 122 bp, Homo sapiens
agagaataaagagaggtggggggctgctgagctggcacccagtgtggcaaatacccaccacgctcgggacccagtacgttggggaaaggacagcagaagggggtgcacctgagtgagaagtg

SEQ ID NO: 105227 - DNA, 122 bp, Homo sapiens
ccagacattatttcattggactgattcccaggccctgctgctcccatccccaccccagatcgaatgaacttggcagaaagaagagaactttgtgctctgttttaccttactctgtttagaaa

SEQ ID NO: 105228 - DNA, 122 bp, Homo sapiens
catgggcagctcggccagtgtcactgcctacaaatggtcctggggccctgggaatgggtgcgtgacaggtgggaaaatgcgtttcctccaaaaggcagagcccgcataagtaggggctgctc

SEQ ID NO: 105229 - DNA, 122 bp, Homo sapiens
cgcctcgccttggcaggggagaacttcggtgggcaggattcagaggggcttttggtttcccgttttccacactgaacccttctaactggtctctgaccctgattattcagggctgcaaacag

SEQ ID NO: 105230 - DNA, 122 bp, Homo sapiens
cacatgtttatgatcttatcattctggaggttagaagtcctaaagtcaaggtatcagagccgtgctccttccagaatccctgagggaggaacccctctgctgtcctgtcaacttctggaggc

SEQ ID NO: 105231 - DNA, 122 bp, Homo sapiens
acttttcccctagagcccagaccactgagatagaaaatcacctttattgtctccctgagccgatgggtgcatttcctgattcattccctcactctgagtatagcccttctgaagaccaggat

SEQ ID NO: 105232 - DNA, 122 bp, Homo sapiens
gaagggaagcgggcacgcactttgaggtcccgcgcgaagaactgcgcagaggaaaaccctcgaaaagagacggttatgaaagcttgtgagaagaaaatctagagggctctggagttgctaga

SEQ ID NO: 105233 - DNA, 122 bp, Homo sapiens
agtaataggtgggttttctttcatggttatatcatcctaaagcttattcagatgtgataacgttttgctgctgtatcttggcaacatgatttattctgcaaatgctcagtgttaccgtctca

SEQ ID NO: 105234 - DNA, 122 bp, Homo sapiens
aatataacccacatacacgaaagctcttttggagtcctcaataatttttaaagattataacggggtcctgatataaaaatgtttgagcaccacagccctatactgtactgccttggggcagt

SEQ ID NO: 105235 - DNA, 122 bp, Homo sapiens
gagcaaggagaaagaactgcaaagggaaaggagaggaagtctttgtccgggctctttggacgagcattagagtggagttaaattgtcagctaatgagatttcctaaccacgtgctccctttt

SEQ ID NO: 105236 - DNA, 122 bp, Homo sapiens
acagcctttcactccctgatgcactcggctttcggggtcctgggggtcgccaaatgcgcgcggcgagttggctgcctccgaaacaaaccaggtaaatagtccacggtgcagcacgtacattt

SEQ ID NO: 105237 - DNA, 122 bp, Homo sapiens
cagcacagtatggccacacaggcccaggccccggcccgggttcgcgggttcgcgttagtgcggctctgccggagtaggcgcagagctttgggagttctgaacccctaagcgcgagtcgggcg

SEQ ID NO: 105238 - DNA, 122 bp, Homo sapiens
caggagtgaagcgggcaactctgacggaggagggaaggaggcaggtgcagcggggatgcccggcccctaaggcctcatggcccttcaggcaggcagacccttctggaacacccctgaccccg

SEQ ID NO: 105239 - DNA, 122 bp, Homo sapiens
tgagcaaatacatatcaccaagtgaaggaagtggggaagttattatgtgcttcatagactcgatgacactttataaccccatatcagggatcctaaacagtgattggttgagaaaattatca

SEQ ID NO: 105240 - DNA, 122 bp, Homo sapiens
gtaaatgtcaaaggtcagccccatggcgaatctccctaagccccctgtcgcaaccgaagccgatggaatcaacaagacaaagatgctcctgacccactggctagaatcgtgaagaaaacgct

SEQ ID NO: 105241 - DNA, 122 bp, Homo sapiens
ccacctcgggagagctgctgctgccattcagggcagaagccagcttgatggcagacacctcgccaccagtagcaggcgtgggagagtcaggcagggcatcaggggcgtcgggggcactggcc

SEQ ID NO: 105242 - DNA, 122 bp, Homo sapiens
ccgtcagcagcttgttcaccccaggtctccgtccttccctagggagcgggagtcttcacacgtcccctgggggtctggcacctcaagtataagcaccccctgcgatcggcccctcccacacc

SEQ ID NO: 105243 - DNA, 122 bp, Homo sapiens
gccagctgccccagagagaggcagagggccctggacggagagtgccttggagaggcagggcgggggccgaggcagagctggggctcatgcccacttcctaccagtgcccagggcacttggtg

SEQ ID NO: 105244 - DNA, 122 bp, Homo sapiens
ggaggcagcaatggaggtagcaatgtgggcatggaagatggggagcgaccccgaaggaggcgacatgggagggctcagcagcaggataaaccgcctcgtttccggaggctgaagcaggaacg

SEQ ID NO: 105245 - DNA, 122 bp, Homo sapiens
aacaagaaagtggcattgtggtttgtgttcccatgtcttctgctaaatttccccttctcccggggttgcaggttagaaccaaaagctcatggctgggtacggtggctgtagcctgtaatccc

SEQ ID NO: 105246 - DNA, 122 bp, Homo sapiens
cggcgacgcgcgggtcctcacgcgctccctcacttcctgcggcttttggtccctcccgctcgccgtccctttagttctgcccacttcgcctccgggttgtcagggcaaccgtagcgacgccg

SEQ ID NO: 105247 - DNA, 122 bp, Homo sapiens
aatcctcatcactgaaacaagaatagcaatgcccacctcatagggctggtgtgaggatgacgagaacagtgagaccatgcaattatttcacaaatacaagtaaatggtcaaagtagaaaaat

SEQ ID NO: 105248 - DNA, 122 bp, Homo sapiens
agggattaatctgctcagcacgatgcggtcccctgctcaggtggtcagaccctgtgctcacgccaggtcactaccactaacacgcctaaccactgggggcaccactgctcctgccaccccaa

SEQ ID NO: 105249 - DNA, 122 bp, Homo sapiens
atgggaggtgtggatagtgaggggtcccacacgcctggagccgagggtctgtgtcaagagcggcaggggctgcaggagataagagaaacgggtgagggcgccgcgcggggctggactgggaa

SEQ ID NO: 105250 - DNA, 122 bp, Homo sapiens
agcgaggagcggcccctacggggcctgggcacagaggtgagagtgacaggtgtttggggccgagcggacagggacgaattcatctcgggatgagatctgggagggggttgggctctcgggga

SEQ ID NO: 105251 - DNA, 122 bp, Homo sapiens
ttcgtgtgcatgaggacaaaaccaggctgtgtgcgtgtgcgtgtgcaggggcgacggcctcggttcattcctggggaaaagggagagaagagacgcacaaaacagatcatcgccgcacaagc

SEQ ID NO: 105252 - DNA, 122 bp, Homo sapiens
ggacgagactcgattgagcgcaattatgaccaatcaccttgcggaatattcggcctatagcgaaggaggagctcagaacaaaaaggagaccccacccccgccgacggtgaaaacctatgaaa

SEQ ID NO: 105253 - DNA, 122 bp, Homo sapiens
ccgggccccagtttcattggatgagcggtcgggggaccgggccaggtgactaagtttccgcggcgccttctccccggccactgcttgagccgctgagagggtggcgacgtcggggccatggg

SEQ ID NO: 105254 - DNA, 122 bp, Homo sapiens
taaaattaaaaactcttgtactacaaagacatcattaagaagtcatacgctggggccgggcgccgtggctcacgcctgtgatcccagcactttgggagaccgaggcgggcggatcacgaggt

SEQ ID NO: 105255 - DNA, 122 bp, Homo sapiens
ggtgttcctggctgccctcaatgccctgctgcagtggctgctgcggccactggtgctctacgcacccctgctgaacccctacacgctggccgtggccaacaccaccttcaccgtcagcaccg

SEQ ID NO: 105256 - DNA, 122 bp, Homo sapiens
acagcaccctcaatgtggtgtcaatgcctccttcagttctgaagttttgaaataaatactcgaaacatccagttatacaccctctttccaagagtgtttgcacatatttggtgctcctcaag

SEQ ID NO: 105257 - DNA, 122 bp, Homo sapiens
gccacactgtcagtgggcctcaagctcccttagcatatggcctctggaataaagtgagcccgcacctcgggagggggcaagcagaggcaggagcaggatggcaggtggcaggcggggctgca

SEQ ID NO: 105258 - DNA, 122 bp, Homo sapiens
ggactggtcgcgctgaagctctatcctagggcactggtcgcaagagcagatggtgccacacgctccgggcctacaaacttcagcggctgccgggcccgggcccctcgtcttttgttgggttt

SEQ ID NO: 105259 - DNA, 122 bp, Homo sapiens
tgtgtgtgcatgtgtatgtgtgcgcgcgtgtgtccgcacttggggcggggctggaagccccggccccgccccggccccgcccccggcccggccgagctggtatttttccacccagcaggatg

SEQ ID NO: 105260 - DNA, 122 bp, Homo sapiens
agagaagcagccagtccccaggtctcccatctgcacccaccccgccccgcctgcctctcccgctgtgaaacattgttcagaataactagctccccctgcaatacgcaagagcgagctatgcg

SEQ ID NO: 105261 - DNA, 122 bp, Homo sapiens
ggaggctagagatgcaggagccccagaacctgcggtgcagcgagtgcacatgcgcatagacggggcccaggagctgaccctggccctcccgttcgcttccggtgtagcatgcagagacgtga

SEQ ID NO: 105262 - DNA, 122 bp, Homo sapiens
atgccccaattctctagcgatagtctaggccctcaaacactgcttcatttctctcttcaccgagaggagtacacggtatatactcgagaacaatcatccacctagctgcacaaagcaccata

SEQ ID NO: 105263 - DNA, 122 bp, Homo sapiens
ttgctgttttttcctactagactgtaaagtcctctgtaatatcacaaattacttcctctccgtatgctaatttcttacccagttcccaaccatagtagttatttgatctgtacttaaaaatt

SEQ ID NO: 105264 - DNA, 122 bp, Homo sapiens
ttggtaaaccgggtataggttccgccttctcttactttggtgcttcccattgggtagggccgggaaacacgataaaggggacatgccgggagttgcagtaccctcaggaaggtagcgtcttg

SEQ ID NO: 105265 - DNA, 122 bp, Homo sapiens
gggtcggagtcacatggatacaaagcttttgattaatgtccaagtcactgctgtggctgccgaagccgcttcccctccagccccggccgtgtgaggccagagcagcggggccgggcgcgcag

SEQ ID NO: 105266 - DNA, 122 bp, Homo sapiens
atggggagagagagtattacggcaaatacttaatgcatgcagggcttaaaacctagatgacggattgataggtgcagcaaatgaccatgacacatgtatacgtatgtaataaacctgcatgt

SEQ ID NO: 105267 - DNA, 122 bp, Homo sapiens
tgggctccccagccaaccccccacgagcccgcgcgccttgcagaccagacacggccccgccgagccccagcagcaccgcctggaatgcatgcgtgtgttctcagagctgcaccaattacaaa

SEQ ID NO: 105268 - DNA, 122 bp, Homo sapiens
gcgcgaatgcccgtgtgagggtgtttgtgtgtgttctggctgggagcgcgaatgcctcggcgtgaggtgtttgtgtgttcgcgcgcccgcgggcgggcgagagccccgcgcctcagcgctgg

SEQ ID NO: 105269 - DNA, 122 bp, Homo sapiens
cacaacttttggagaatgtgctcagggaaggacaactgctcccgcccccaaccctgagcacggttttccaggcttgtgacaggggttcctgggggctcccacattgggtggggtgggcttca

SEQ ID NO: 105270 - DNA, 122 bp, Homo sapiens
tccttgaggaaatatttcaacttactaggtggactggcataaattaaactcagtagtgcacgatcttctaaccccttcccttagcctgggtgaagtggctaggagagaagtagggagaggga

SEQ ID NO: 105271 - DNA, 122 bp, Homo sapiens
agtgcccgtgagcaagactgtggacacatgcacgccgtggcacgtggagcaccagggactcgggcgtgtctgctggcagtggctttaatttggacaccagcagttcccggtgggttatcctg

SEQ ID NO: 105272 - DNA, 122 bp, Homo sapiens
cgcctacaacaagcaacacgtggaattgaatgttgaagagccgcgcggggccgcggagtgcgcgtgcgcgcgccgccgctgctgcccgggcccgcctggagccctagcacacagtttgcaaa

SEQ ID NO: 105273 - DNA, 122 bp, Homo sapiens
caagcaggacttctcaacctcagcactgttgacttttgggtgggacaattctttgttgtgcgtgtggcgggatggaggtgctacgccatgtaccttaggatgcttagcagcacgggggcctc

SEQ ID NO: 105274 - DNA, 122 bp, Homo sapiens
cgctaccttttggcttggagacgctgccccgaaggcggaacctccaggacagctacgtagcgtcccgagcactcagactgaagccagggcagccatgttcattattggaaccgtgaggtggg

SEQ ID NO: 105275 - DNA, 122 bp, Homo sapiens
ggagcagagtgatgacttgaaggaggaggaggctggctccagagttcacactggtgaccacgacaggcgatgtcgaaacccagcggagcagttactcaacagtttactcaccatctacacac

SEQ ID NO: 105276 - DNA, 122 bp, Homo sapiens
ccaggggtagggggctcagggcagccagacctccctaggctcaggaagagtagtcttcagcgctcggctgtcaggcaatccggtccccggttccccacggcggtctcctcggtgtgccccac

SEQ ID NO: 105277 - DNA, 122 bp, Homo sapiens
gatgtctccaggcacccccgacctgggcttggccctctgcttggggcggagcttccaggacgtgctgggacctaggtctgaccccgcccaaggcagagttgaacccactgtgaactttcagg

SEQ ID NO: 105278 - DNA, 122 bp, Homo sapiens
cgagcggctccagagccaagggctcttttgcctgcggtcgacgtccccgcccctagtgaccgcgaattccggagcgccccagctcaggcttcccggatccgggaactccctcgccgcacccc

SEQ ID NO: 105279 - DNA, 122 bp, Homo sapiens
cctttctttgactaggaaagggaactctctgacccattgcgcttcctgagtgaggcaatgcgtcgccctgcttcggctcccgcacggtgcacgcacccactgacctgcgcccacctctggca

SEQ ID NO: 105280 - DNA, 122 bp, Homo sapiens
tgacctcatgatccacctgcctcggcctcccaaaatgttgggattacaggcatgaggcaccgcgcccggctagaagccactttcctaatgtcaggaaggtagaaggtggtagatttaaaggg

SEQ ID NO: 105281 - DNA, 122 bp, Homo sapiens
gcgctgcagacaggtgggcgctgtgggcaggtgggtgcagtgccaggccccaggcacagccgtcctgccagtgcgccgctcaccagacccaccccacccaccccacagaccccgcagcagtc

SEQ ID NO: 105282 - DNA, 122 bp, Homo sapiens
ctccaactagtatactgagtgacaagttagaattccctgcctagaaagtatttattgggccgggcgcggtggctcatgcctgtaatcccaacactttgggaggccaaggcggccggatcatg

SEQ ID NO: 105283 - DNA, 122 bp, Homo sapiens
cgagggagcctcactgcgtagaggagcagcgtcatgtccacatcacccagaatgctttgccgcaccgaatggccagcagattcccttgagggtggggaggggaggtgctgctgttgtcttcc

SEQ ID NO: 105284 - DNA, 122 bp, Homo sapiens
aaggaggtagtgggatccgaagcccaatggggcggtggaacttccggcgccggggctccacggtgacaatggggctgaatgtggcctggttgcccaggagcttagtgacaagctcatccggg

SEQ ID NO: 105285 - DNA, 122 bp, Homo sapiens
gagggggctggtggccccaaacctggtgacaatacacagttgtcagctgtaccctgctggcgtttcttccttttatagtcagcagcagttgctcttgctttcacccagcccctctgtggggg

SEQ ID NO: 105286 - DNA, 122 bp, Homo sapiens
tgcgttgtgccaggcggtgtgtgtttgtgccgggcggtgtgcgttgtgccgggcggtgtgcggtttgtgccaggcggtgtgtgtttgtgccgggcggttggcgtttgtgccgggcggtgggc

SEQ ID NO: 105287 - DNA, 122 bp, Homo sapiens
cggctcctgggacaattttgtccctgctccctgacgttctctccgtgaagcctaaggggacgccggggcaacagggtacaggagccccgatgatagtggcagaaaattaaatttggatagta

SEQ ID NO: 105288 - DNA, 122 bp, Homo sapiens
ctccgcggagtgggggggcctatgctttcctcttctggctcccatggcatctctatttttcgggtttaggaggcaacatttaccagtgaggctgaagcaactcagcaggatctccctggggc

SEQ ID NO: 105289 - DNA, 122 bp, Homo sapiens
gcgcgtgtaagcttttgagatttgacaatttgtgaagtgcttggtgctgactttcggggacgacaggatccttttacagtcattctcctgtcaggggaggcaggtggggagcgaggaaggat

SEQ ID NO: 105290 - DNA, 122 bp, Homo sapiens
cgcagaaggaggaaggcagatggcagaagcggcagtgctgtccggtagggaaggccccgacgtccgcccttccccagaccgtgggctcccctcgcttccaggggtggaggagagaagagctg

SEQ ID NO: 105291 - DNA, 122 bp, Homo sapiens
gcgagattgcgaccggcgccaggtgagtaataggcagcaaaatccagagagactgcgagccgttcatcccctccaccccccgcccatcagcgctacaggagttactcattaacatcacaata

SEQ ID NO: 105292 - DNA, 122 bp, Homo sapiens
ccccaggaatctctggcctggcgccctttgggtgagatgacggggtgctggcatccctgtcggtcccagattacccggaaaagccctggcaggtaaagagaggacccgcgcaggctgggagc

SEQ ID NO: 105293 - DNA, 122 bp, Homo sapiens
cgatttcccctgctgggcagtcgacagcgttggaaggaagaagtgccccctagggcctcgcggaaacgggaacaaacctccctcgaggcccccggaaccgatatggcgaccccgcccagacc

SEQ ID NO: 105294 - DNA, 122 bp, Homo sapiens
gccctgcacactcacctgtggcacggaatgaaaacagagcttcccgtgcaaaaagggtcacgcctcccacccccgccccctccctgcacctcctgtcctctcccagttcattcctggaacca

SEQ ID NO: 105295 - DNA, 122 bp, Homo sapiens
tgatgggcatttgattccatgtcttggctattgtgaatcatgctgcactgaacatatgcacgcaggttcagtgtctttatgatagaacaatttatattcctttggatatatacccagtaatg

SEQ ID NO: 105296 - DNA, 122 bp, Homo sapiens
gtggagacgcgcagagccgggagggcgcgggcgcggcgggaggtgtgcggggctggggtgcgcggagagcgcgagggaggagattctgagcgagggaggggagcgcgcccgggcagcagtgc

SEQ ID NO: 105297 - DNA, 122 bp, Homo sapiens
caacggctgtgtgtgagcttggtgagggcgagtttccttgtcacggacctcaagcattggcgtgagaggtcgcccatgataagctaaggtcacgtccacttactggtgaataagacgagact

SEQ ID NO: 105298 - DNA, 122 bp, Homo sapiens
gaaaactggagggggctggaaggccatgaccatgacacaagcaggaccacccacactcagcgaagcacacaacagccgtgcaggaaagacagcccctgaggcccgcctgccagcaccccctc

SEQ ID NO: 105299 - DNA, 122 bp, Homo sapiens
agccctgtgactacacgcgcacacgcaggcgcgcgcacacgcgaactgacggctcgctggcgatgctggaggctttcacagcccccctccggacgcgttaagctctcccaggtcccacccct

SEQ ID NO: 105300 - DNA, 122 bp, Homo sapiens
agtctttctgttaccacttttcagaaagcagatggtctggatctgatgattggcttggctcgcccccttcctcggtgctcccacctccccctgctgtcacccaacctccccatcttcctctt

SEQ ID NO: 105301 - DNA, 122 bp, Homo sapiens
cccggccgcgtcggattgaggcagtagtgtggtctgagcagcctccagacccacgccgggcgggcgcagcacttggagcgagccctgcgcccgcccccgcgcagcgccgcacgcccggctcc

SEQ ID NO: 105302 - DNA, 122 bp, Homo sapiens
tccctccctgctgcccccagggaaggctgctggtgtcctcagatgcgggcaggaggaacccgccagcgcctgagagcctggcccgaaccaggcctggaggtgctggggcgaagacacagagg

SEQ ID NO: 105303 - DNA, 122 bp, Homo sapiens
gctcagcgtgacctacccagaattaagctgaggacaatgggatttagagtcccaaacactcgccccgtgacaatgggaggggaagtgtcatttttctcccttcgaatggagcatgcttggct

SEQ ID NO: 105304 - DNA, 122 bp, Homo sapiens
atgaataaaactattacgacccaggaggaggtactccccttacaggctgacgttgtccaacgtgaggaggaattgaattccctgaagcagaagctggcagcggcccttttggcggagcagga

SEQ ID NO: 105305 - DNA, 122 bp, Homo sapiens
ggaaaaagcataagcttgagccttccgatccgaccacgaatactcctgtaataaacccaccgccccaacaaatctgccatagcagccgccgccgccgccggtcacttctcgtctcagcgctt

SEQ ID NO: 105306 - DNA, 122 bp, Homo sapiens
ccccacggcgtgctgctgcatggccgctgttggcggtgccgcctggccctgcctgtacgccgccagcggagccccgaggccgccgccctccatgcccactttcttgtagctttcctccaggg

SEQ ID NO: 105307 - DNA, 122 bp, Homo sapiens
ggagccggatccggaggcgccgagccgcatccggagccgcgcacgcgcaatctgcatgaacgaaggccagtgcttaaagacgtgccattcattgccagaactcgattctcattggagcggag

SEQ ID NO: 105308 - DNA, 122 bp, Homo sapiens
cattttagcagaaaaaaacaatgaatgtaactctgatagcccttctataacttttaggaacgtagcaatcattcagaaagtaaatttctgtgaatagggcactaggtctttcagtcaaacag

SEQ ID NO: 105309 - DNA, 122 bp, Homo sapiens
agaacctttctgtagaatccaaattgattttctgaagtcaggtgactacatttggggccacgcctgcttatgcagctatcttgaccattatgtgctcagcaatacctcacaagtcactctga

SEQ ID NO: 105310 - DNA, 122 bp, Homo sapiens
ccaaaaaatgaggtaaagtgcaccctattatcaagaaaccccccgcaaaaggagataaatcgcagggtcagttaggaccctgtggttcagttgtccctactaccagttagagatcttcagcc

SEQ ID NO: 105311 - DNA, 122 bp, Homo sapiens
gggttctggacctgggctgcttcagcggaaatccctgcccccaacaacttcctacctaaacggtagctccatggcttctggcaacttttgttttgttttttgagatagggtctagctctgtc

SEQ ID NO: 105312 - DNA, 122 bp, Homo sapiens
tttttcattgtcattattaatgatttggatctcgcagctctctatccgggtcctcagtggcgcgagggttgccgggatagcactttctcctgttcctcattctcccggtcctttatccctcc

SEQ ID NO: 105313 - DNA, 122 bp, Homo sapiens
tctctttctctgacgtactcagcaccctcagccctgattgaaaggctttccaactgattccgtcaggcccacctagattatccaggattatctccctaactttaagtcaactgattaggagc

SEQ ID NO: 105314 - DNA, 122 bp, Homo sapiens
gtttggaaaaagttctgatgcttatagactcagggctggccacggtgagcccacataccgcggggctgagctgcctggtccgggatcagaagcagaacccagccaccgcagtgccaggcctg

SEQ ID NO: 105315 - DNA, 122 bp, Homo sapiens
ctcacccagagagtaggaatgccgctcagctgagagcacaggagaccagctgctgccactcgcgtgagtcagggggtttggtttctccttttaggactctgcctctcagatgtcactattgt

SEQ ID NO: 105316 - DNA, 122 bp, Homo sapiens
agctcctcccagtcgctccggagcccgcggggaccaagagcgcgggggcagggagaggtacgcggtcttcgcctccaggcccgctgggactaaccgtgccctggggacatgccagttgccac

SEQ ID NO: 105317 - DNA, 122 bp, Homo sapiens
tggggggatacagcggcaagcgggtgtcagaatggcccctagcccgggccaggcctgtagcgggggcgtgtggccactcagaggccagattcgggcagagggtgcagccagggcgggcagca

SEQ ID NO: 105318 - DNA, 122 bp, Homo sapiens
aaggggaaggggacgcagatctcccactgcttggggggggtgatgtgctttgtggggggtcgggggtcaccaccctcccaggggggtgggggagggcggccagcacagctggccgcgagggg

SEQ ID NO: 105319 - DNA, 122 bp, Homo sapiens
gagccccttgggtgtgcccggccccaccccttgggtgccgcggccattcacccatgtccgcgttctgctgcagagcctgcaagctgagccggctgtagtccccggatgtgcctggccgcagc

SEQ ID NO: 105320 - DNA, 122 bp, Homo sapiens
gccatcaccagtggactgggctgtctcccctctcagactgggtttcttgaaggcaggagccgtgtcccactcagaactggaagaaccacagctctgccatcagactcaagtctctcccacgg

SEQ ID NO: 105321 - DNA, 122 bp, Homo sapiens
ggcccctgcccaagccgagctcgagccgtgggcgggagtcgttgactctccaggtgagggcgacccctctgccctgtccttgggggggtcccctctgctcacgtgaagagccgctctgggcc

SEQ ID NO: 105322 - DNA, 122 bp, Homo sapiens
aatgaggaagggaaaatagaatataaaatttggtggtggaaaagatctgattcatgatgccgtgtcagagagcaaagctcctgtccttttggcctaatttggtgatgctgttcttgggtcta

SEQ ID NO: 105323 - DNA, 122 bp, Homo sapiens
gggacccagaggccccgaccaccagttaacatcactggagcctagagacgctccggggcccggcactaggaggagatggcatctactgttagcttgttttcaccttggccttagcagctact

SEQ ID NO: 105324 - DNA, 122 bp, Homo sapiens
aagctcgctcccaaggcacagcttggtcccttccccagctacctgcagccggactggggccgctggtcgttggctggaaaggaggcttgagagaggcacgggggcccccggaggaaagcgga

SEQ ID NO: 105325 - DNA, 122 bp, Homo sapiens
tcggcgcagcgcctggagttcatgtgcgggctgctggacctgtgcaacccgctggagctgcgcttccttggctcgtgcctggaggacctggcgcgcaaggactaccactacctgcgcgactc

SEQ ID NO: 105326 - DNA, 122 bp, Homo sapiens
caaaaagccgcggcggcgggggcaaaaagccggggcggcgggggcaaaaagcagcggtggcgctgacaaaaagccgcaaaaagcagcggcagcgggggtaaaaagctgcaaaaagccgcgga

SEQ ID NO: 105327 - DNA, 122 bp, Homo sapiens
atgtttggggataatgaaagagagtctgtgcgggttagcctcgggacgggctctgcttaccgagcccggcaaccccacggcaggggcctcgggaagccgcttccgagggccaggataatggg

SEQ ID NO: 105328 - DNA, 122 bp, Homo sapiens
ctcagtgtcccctccatgtcgcctctgccgtcccattgttaaaggctttctatgatctgtcgctgtgttttccctctagtcaggagtggcaggaaaggacgccgacgagtgttcagcctgtc

SEQ ID NO: 105329 - DNA, 122 bp, Homo sapiens
aaaagttatacaacacacctatatatcccactatctttctgctatatccaggaggataagcgactagatttaacccagaaaactactatctctgattaagtgtatcagaatgaaagcactgt

SEQ ID NO: 105330 - DNA, 122 bp, Homo sapiens
ggtctcgcctacacctgggcttggctggctgcatcctgcccgctggccggcgggcgttgccgccctccctcgggagcctctgtgccccgggctgccgctctcctggggtctcggagcacagg

SEQ ID NO: 105331 - DNA, 122 bp, Homo sapiens
ctgagttccgcctttccttcctcacacattccatttgcagcttcctgctaagtcagacggcgatattgggcaacagcaaatcaaacttgacccaagtgcttctccccagggaatgtgagaag

SEQ ID NO: 105332 - DNA, 122 bp, Homo sapiens
gagagaattgggtaaacatggcgaccgcggcgcccatttgcacacgctacacaaatgcatcgcattcccggttgtttgcagaaaatttacagctgagtaataaaagtttacgatcgactcac

SEQ ID NO: 105333 - DNA, 122 bp, Homo sapiens
ctgggagcctggagcataagttctcaagtgacactctaggtgcaaacttgcagtcggccacgtattcattgtgtaacccaaagcaggttacttaacccctctacacctcagtttctcatctg

SEQ ID NO: 105334 - DNA, 122 bp, Homo sapiens
agaatttgaatgggaaatgtcagccatagaatttgtttaaaacatctcttccaatgattacgatgactagcctggtttaagaactgctggcccatacatagggctaccatctatcccctctg

SEQ ID NO: 105335 - DNA, 122 bp, Homo sapiens
cctccctttcttctccctggatgacctcatccccacagcaatgtcaatcatcacccacagcgggtgactgaaatctgcatctcactccaagaaggcccctcagccctggcacccaccccaag

SEQ ID NO: 105336 - DNA, 122 bp, Homo sapiens
gaatgccgagaggctttacttgctattagcaaaaatgctttgggaacctcgtacgaaaggcgctggatgtggtgtaaattaaataaaactgtgcccggctccaataaccgtccggttgtaat

SEQ ID NO: 105337 - DNA, 122 bp, Homo sapiens
aagaaaataaatggaagcatcaaggactgttttgcctctttcgggttagctggtagtgagcgggagaacgagggaaggcgggcggggctgcagtctctccacgcccttttcatttccactca

SEQ ID NO: 105338 - DNA, 122 bp, Homo sapiens
ttttttgtttttatttttagaaacagtctcactcggtcacccaggctggaggccatgtcacgatcacagcttactgtaacctcaaactcctagactcaagcaatcctcctgcctcagcctcc

SEQ ID NO: 105339 - DNA, 122 bp, Homo sapiens
gaggggacgaaatgagggttctcataagaaaatgccataaactggctgggtggtggctcacgcctgtaatcccagcactttggaaggctgaggcaggcagatcacctgaggtcaggagttcg

SEQ ID NO: 105340 - DNA, 122 bp, Homo sapiens
gtcccaggagaaccagctggtggagaccgggggtcacgtgggcctgccctccgtgagctacgccagctccggggccagcgtgagcctccagctggtggcggagatggcgactctgttctacg

SEQ ID NO: 105341 - DNA, 122 bp, Homo sapiens
cggcttaccgtaaagtctcatgcaaaggcgcagagacccaggggcaggagcccaggctcccgctccaccgcgactgccctactcatgtgggcacacggcccctgcccttctgcgctgcccac

SEQ ID NO: 105342 - DNA, 122 bp, Homo sapiens
ggcgggctgcaggtcccgagccctgccccgcgggaaggcagctaaggctcggtgagaaatcgagcatagtgccggtgggctggcactgctgggggacccagtatacactccgcagccactgg

SEQ ID NO: 105343 - DNA, 122 bp, Homo sapiens
ggtcactctggttcagagaagcggacgaggtgggtgagagttaccctctgagcgccggggcggagagctgaggccgggtgacaatgtggtctgtgaggtttccccatcctaccgtaggggat

SEQ ID NO: 105344 - DNA, 122 bp, Homo sapiens
gagagccaaatatttcttttggttagttacaaaataaaaaatatgcctttgccaactctgcgggaaaagcaaactcccagagtttgccttcgctaatttgtccaagtcgtgctgtggtttta

SEQ ID NO: 105345 - DNA, 122 bp, Homo sapiens
gcctccaaacgcccattgcctgggccgtcgcccccaagggtgcggagtgtggaggttgcccgggggagggccggctacggattcacgctttcgggacaggcaccctgtgtgctcagctgcgt

SEQ ID NO: 105346 - DNA, 122 bp, Homo sapiens
ccatccgtcctcaggactgcttcccgggggcagcgctggcaccacgggacgcggcagccacgttcttgagccgatggcactctgggtacctgagaagaggttgtctgtgatgagttcgcttt

SEQ ID NO: 105347 - DNA, 122 bp, Homo sapiens
aacttgcttttctccccaagaccccagatggggcctacccatcgttctcgtgtaacaaaacgtgtaaaaaaaaaaaaagaaaaagaaaaaacaaaacaaaaaaactaagttgaccagtctgt

SEQ ID NO: 105348 - DNA, 122 bp, Homo sapiens
ctggtcctgcgggccgggcgttcaccccctggggccttctcatccccagcgagggcctggcgtccccaagggcacccttgttgacgttattgttgtagccgcgaccatattgtttgtttccg

SEQ ID NO: 105349 - DNA, 122 bp, Homo sapiens
cttccgttgagttggtgaaaagaagagaagcaaaatgggcatgtgtgacgtgtaagagggcgccatttaatcagacaggcctgtgaaacactttcaagagtccagggctggcagtgagaggt

SEQ ID NO: 105350 - DNA, 122 bp, Homo sapiens
atttgctttgcttagacagcgagatcttgtcgccccagacccctccgttagttcctttctcgtagaaagaatgggctgtgcagctgctcaggagctcatcctgtccaggctgaaggcagcaa

SEQ ID NO: 105351 - DNA, 122 bp, Homo sapiens
caggtcggcatcgtggggcggacgggagctgggaagtcgtccctgaccctgggcttatttcggatcaacgagtctgccgaaggagagatcatcatcgatggcatcaacatcgccaagatcgg

SEQ ID NO: 105352 - DNA, 122 bp, Homo sapiens
cacagagatgtccataatctgccgctgcttaactctgggcccattttaactccccttcaacgtgctgaaggtgctggacatgactatcacatgtctttggttgtaaactgctgtgatagtta

SEQ ID NO: 105353 - DNA, 122 bp, Homo sapiens
ccctggaggcctccggacgatcggaagtgactgagcgtccgggtccgtgaggccgggggtcggcccgccctaagactcccacctggtcccggttctccgtccgctaggctggccgcggggcc

SEQ ID NO: 105354 - DNA, 122 bp, Homo sapiens
ctggattttgaaatggtgctgtgctgcacagcttggatttcagggactgtgtgtggtactcggcatgagctccctctctagagcaatgctaacgtgctatgtctaggcagctccttatgcta

SEQ ID NO: 105355 - DNA, 122 bp, Homo sapiens
gccgcgagctggagcctgacgccagccggctgcacctggagctggactgcaccaagttctcgctgcctcacttgagcagcatgagcccggagctctccatgaacggccaggctgctggctat

SEQ ID NO: 105356 - DNA, 122 bp, Homo sapiens
tgggctgtggccgggatagggggggtccctgcaggaggggtctgtgcaggaggggctggtcggggcacagacccccacctgactcaggagtgaacagtgaacacctggggtcccacgcagac

SEQ ID NO: 105357 - DNA, 122 bp, Homo sapiens
atttcgcattaagaaactggaaaaccttcccgtcggtcctggcgtagcgcctcccgtgtccggggtagatcttgtacccgctaaaactgcacagctcgaccttcatggcgacagctccacag

SEQ ID NO: 105358 - DNA, 122 bp, Homo sapiens
ctgtaccaggaaggagtcaaaggggccctgggccaccgtccatgagaggcccactgagtccgaggtcacggccgccaccgccagctcccccaggcggggctccaccggcagtggtgtgggca

SEQ ID NO: 105359 - DNA, 122 bp, Homo sapiens
gtctatattagtcccacctactgacacaaacaaaagcttgctggaagatcgagttttagacgcatttttaaaaatcttaaagactaaaacacttccattttaacttgtaaagtaatttaatt

SEQ ID NO: 105360 - DNA, 122 bp, Homo sapiens
cccgtgctgccccccgcaccctccctcggcccccctgttacactttacatcctgaggcagcgctggtccgagcccgacccgccttagttctggcagttttcacatcacatattttgaagctc

SEQ ID NO: 105361 - DNA, 122 bp, Homo sapiens
ggcttggggcgcacccggctgggggcaggcagcggcgtccagggggcctcaccgcccggccgactcctagtaaatcccacctcaagaaaactctggttcagttctggagttcagtctatgcg

SEQ ID NO: 105362 - DNA, 122 bp, Homo sapiens
cttttgccggcgaaagactggcaaggggggcgcaggcgcaaagaggtcgctacgcgcacgcgctgttgttttctcggctgtgcaccaggctgtcgtgcccgggcacgctctccctgctgtct

SEQ ID NO: 105363 - DNA, 122 bp, Homo sapiens
acttcgtctgcctggcacattgggctctgagctctctgccatgcggtgcaaggcacatggcgtccattgtgagtgttcctccataagaagaggaactgtgctggctaggaatctgccttcta

SEQ ID NO: 105364 - DNA, 122 bp, Homo sapiens
agccacactaaatttcccaccttcccttcctcggtggagggggcaacccttacagaaaaacgtatcctgtcgccacccttaggcccatccacgaactcccgtaactctgctggggccacttc

SEQ ID NO: 105365 - DNA, 122 bp, Homo sapiens
ccaaggcgtgtgcgcccgggtcctccgcaggcgggcaggcgcgcgaggcgctccggtaatcgctatccttccgggaaacgaaaacgaaagagcgggatgcggttccacttgcgccgctgcgg

SEQ ID NO: 105366 - DNA, 122 bp, Homo sapiens
gtgtcggcgcaatcacgctggaaaacggggcctctcgaagcagagtggggatgacttgcccggccttgggcaagcaggagggagcaggcgcggtcggctggctgactgctggggcagaggca

SEQ ID NO: 105367 - DNA, 122 bp, Homo sapiens
ggccgaagtgtgcacgcccctctttggcggcctcagggcctagaacaatgaatgagtcaacgcgcctgcgcgccacgagagcctacccacgcatgcgcaaaaggcttagctagctaagccgc

SEQ ID NO: 105368 - DNA, 122 bp, Homo sapiens
tgataccacccctcgccggcgcgaaccgcccatctccccagacccgcccaccccctgctgcgaatccctgacgttctagcccggcgaaggtcctcttaaattaggaaacaatagctatttaa

SEQ ID NO: 105369 - DNA, 122 bp, Homo sapiens
catcatccacgccagggagtcccagggtccatttgttggcccacagcttctgctttcctgcgggcctcttccgagtcccccggtctctcaggaatgaagccccaacgctgttggcaagaccc

SEQ ID NO: 105370 - DNA, 122 bp, Homo sapiens
gggcagtcccctccttggtcagaagtgtggctggtgctaacctcccgattcgaacctggacgcttcatcgggggacgcaggcatttgttttccctctgtctccttgggcgccttttcaccat

SEQ ID NO: 105371 - DNA, 122 bp, Homo sapiens
ttaacctgaccccattttagggtaaaatttcaaacgtagtcggcaggattcgaacctgcgcggggagaccccaatgggtttctagtccatcaccttaaccactcggccacgactacagacat

SEQ ID NO: 105372 - DNA, 122 bp, Homo sapiens
acgagctggctctggcacccaatgctccgcacccaaggcctgctgtggactcagtctgcacgccatcggcatgccatctgggagtgagaggcccaggcgccagccagaggggtggcaagaaa

SEQ ID NO: 105373 - DNA, 122 bp, Homo sapiens
ctccaagtcctcccattttacagttggggcagctgaggcccagagagaaggagggtcgcccggaagttatttactagaggccagaccataattcaaatagttggctccggacttaagttccc

SEQ ID NO: 105374 - DNA, 122 bp, Homo sapiens
accagggtcctgggacccgtccacccctacacctagctagcccggagcctctcagctccgcgtccccacatcctccggatgcccagcggttgctgagataccgcgggccgttacgccggcgc

SEQ ID NO: 105375 - DNA, 122 bp, Homo sapiens
tcataatggaaaaattaaattgctaacattttcagccattttgcatttcaaatcaggaaacgccaacactgagcccagatataaagggcatgggttggcacaggagcccaggaaggtattgg

SEQ ID NO: 105376 - DNA, 122 bp, Homo sapiens
attaagcgaaccggctgtggctgactcttccctcctctaacaactgtggctcctcatagccggcacaatgacgtccaaagctgtcggctcccgcacgggttcctccctttgaggcttgtctt

SEQ ID NO: 105377 - DNA, 122 bp, Homo sapiens
ctccttgcttcccagatagggcggcagccggacagaggcgatcctcacttcccagatggtcggtggccgtacagaggcgctcctcacttcccagacagggcggcggccgggcggagacgctc

SEQ ID NO: 105378 - DNA, 122 bp, Homo sapiens
tcccgccgcccccccctcggcctgaaagatctgcgtccacaccaccctgcacccagggcccgtcaggttttgcagaagtttgctgagggtcctcacagggggtctcccaggggaaggggtgg

SEQ ID NO: 105379 - DNA, 122 bp, Homo sapiens
gaggttctgagcctgcagcccctcagatgaatctctctccagatgtaattctgatggtgccggagctcctaacagtcgaaggacatggtgtgttgaacgttttcccatattatcttaccact

SEQ ID NO: 105380 - DNA, 122 bp, Homo sapiens
tcggaatgctgggcagtgacggccacagctccctgtcagccacatgccctctgcagtggacggcgatgccaaaagacttttcccgcctccaggccaacgtaagtgttgcgagcgtgtttaag

SEQ ID NO: 105381 - DNA, 122 bp, Homo sapiens
cctgggactggcagggtggctgagcggctgtcttgcctcttgtcattgtctgtccccacccggtcgtggcccacccggctagagacggcgtcctcaaggcatctggagggctttcgtggctg

SEQ ID NO: 105382 - DNA, 122 bp, Homo sapiens
tatctccctcattacacttgaatttcaacagggttccaccacccaggaagacagaataaccggttttctgagtttttcctgatacaattctggttatcacaaacgacttgagatccctactc

SEQ ID NO: 105383 - DNA, 122 bp, Homo sapiens
ggaaaccaccagctgtaactggtggttttaaagcaagcagtcattatttccaggaggttacgctgtgactggaaggtaaacacttagaattcacaggcaaatgtctgaatggtctattcaaa

SEQ ID NO: 105384 - DNA, 122 bp, Homo sapiens
cattcgttatacatttattttggtcttttgagtcgaccttgtggttgccccgggtgaccacgtgggtagctgaatctgctaagcagcagttcccaggccccatctggtgctagaggatgagg

SEQ ID NO: 105385 - DNA, 122 bp, Homo sapiens
aagctatggcataaacgtgcctggactgcagacgccttcctttttattgcaggacacagccgtctgcccctcgtgcgagtccgtgagcctctggggctccacgtgcattcactgcctcaggg

SEQ ID NO: 105386 - DNA, 122 bp, Homo sapiens
gtggaatgggagaagagggtgccagagagagcagtggccagtcggaggctcacatctcggcgtctcccgctcgggtcccgaatccgggctgctggcgcggacgcggctcccggggcggaggt

SEQ ID NO: 105387 - DNA, 122 bp, Homo sapiens
ccttgcaagtcctactcaggctgcacctacacagctgtctcagtttctatctgaggctcccgcagcctcctctgaaagtcctcatcacagccaatgatactgaaactgttttcttatgcagg

SEQ ID NO: 105388 - DNA, 122 bp, Homo sapiens
ctgctgcacttgtaaagtgggtgcttctcagcttcatggtttgaggggtgcagccagcttcggcctaagtggtgttgagggtcgaggacccagcacccccacacgggaagcgcggtgtcccg

SEQ ID NO: 105389 - DNA, 122 bp, Homo sapiens
cttcaccatggccagtcactggtgtttctgactctggttgctcgtcccttcaattaattccgcaaactcatcaatgtttggtgaatttctattttcttctactaatcttctcacctgctgcc

SEQ ID NO: 105390 - DNA, 122 bp, Homo sapiens
acaaacaaacaaaaaaaaaaacccgtcataatcttcctgttgctttttccgattagatggcgacttgaatttttagggaatacatccaccagtttgggcacacccaccaggcacgacagttg

SEQ ID NO: 105391 - DNA, 122 bp, Homo sapiens
acagtgactacccttctgggtgtggctgtaggggggtttgtcctctggaaaggcatccagcgccgccgaaggagtaaaacgagtcctgtgacccaacagccacagcagaaagtgctgggcag

SEQ ID NO: 105392 - DNA, 122 bp, Homo sapiens
ctgggctcagtatgggcatcagcctgaggcctgcaatccttggccttggccaagggtggacgcactccctccacccttccttctgtagcagtgcctacctggcctaggaggcactgagcgct

SEQ ID NO: 105393 - DNA, 122 bp, Homo sapiens
tgtccctttccagaagtaaggctccttaaaacgaaaggcgctccggggccgcgcgtattccgcgtcccagccaacccgcctccggcccgtcagcgtttctcttttgcttaggtgcggcttgg

SEQ ID NO: 105394 - DNA, 122 bp, Homo sapiens
cgcagcagcaggtctcactcgctgtgtcacgctcccctgtgctcacacccaccactcactcgctcaaggccgcagtcgcacttgctcactctgctgcactcacattcacactcattcacact

SEQ ID NO: 105395 - DNA, 122 bp, Homo sapiens
ggtcccactgggggcggggctgagcgcgaccgcgccctcaactccccctattgcccgccccggggtggggcataaccacccaacaggctccttactcaagctcgggttcttctcctaggcgg

SEQ ID NO: 105396 - DNA, 122 bp, Homo sapiens
gtcagcccagcgggggaaattggctggtgagagagtagcctttcattgcactgtatttatcgagcgatgccttgagatgcaaattgctgtatcaatcaaacctgtggtgcctacctccaacc

SEQ ID NO: 105397 - DNA, 122 bp, Homo sapiens
aaataggtggtgtctcccaggctgctgagatcagttaatgagacggtaattgaaggccgccgtgcgccaacagaataatgcacgtcgattgggcagctccaagggacaacccactaccgctt

SEQ ID NO: 105398 - DNA, 122 bp, Homo sapiens
ccgcccgccccggtcacctgtgttttcctcctcaccaaacaagaatgtgtcagcagggcccgggctcctcccccaccccattgttaacaaggccggctcggcggccccttcccacatcccca

SEQ ID NO: 105399 - DNA, 122 bp, Homo sapiens
tctgactggagctcatgcaccagcattacagggtttagtaggttagacaaggtcctttggcggagtgaagagaaatagccagggaagctggcaatgactcagggaatcaccagcatggtgat

SEQ ID NO: 105400 - DNA, 122 bp, Homo sapiens
gatcaggtcaggaggatcgggggacagggccgggctcacctcatggccaggtacatgggccggatggcaaagagtgggaaggtgtgcaccttgatcatgatggtcatgaaggccatgtacag

SEQ ID NO: 105401 - DNA, 122 bp, Homo sapiens
tctaggacccgggggcgcccggcggcccgcccggctcccacaaatagactcctgggcgggcgcctgagcccccaaaatagatcctcagggcccaaaagcagactcttcggcgggcgccatgg

SEQ ID NO: 105402 - DNA, 122 bp, Homo sapiens
gggccttcagtgcctaaagatgatgccgcacaattctcttgcttcttttcactggagactcgtgagcgagagactacagaattgagtagcttctctctctactcgtcttttatccctagcga

SEQ ID NO: 105403 - DNA, 122 bp, Homo sapiens
tcctccagctgcctggccagcacctgcagcaagtcgaccaggccgcccctcacccctgcccgcagcagcgcccggcagacccgcagcaggccctgctgtaggtcccagttcgtgcagtgggc

SEQ ID NO: 105404 - DNA, 122 bp, Homo sapiens
gaccccagccagtattccctcagagccggcacgaccctgctgtggggcggcgggcccagtcgtgttcctgcagtgggcaccctaggcgtatgtgtatacacgcacagatatttattcctttc

SEQ ID NO: 105405 - DNA, 122 bp, Homo sapiens
cttgggaggccgaggcaggcggatcacgaggtcaggagatcgagaccatcctggctaacacggtgaaacctggtctctacttaaaattcaaaaaattagcctggcttggtggcgggcgcctg

SEQ ID NO: 105406 - DNA, 122 bp, Homo sapiens
ccggcatgacgtcactccccgggggcgggctcagtaagtggagctccaccgtcattggtccggggccccgcagtaaccaggggaactgcaaacagtgtagaggccgcttccggttcgagctc

SEQ ID NO: 105407 - DNA, 122 bp, Homo sapiens
actcggccgtgcacagctgcgtgatcctgggtccgtccctctacctggctctggacctcccgggttccagcaggaggaagtgaaccaggtgaattccacgctcccgttgccctttctcactt

SEQ ID NO: 105408 - DNA, 122 bp, Homo sapiens
tggtgttcaatttctctccctggctatgcttctctaccctccctctccctctttggcccacgtatccctgccagccctcaggatgcccagccccttgctgttttgctcactgaaccagtact

SEQ ID NO: 105409 - DNA, 122 bp, Homo sapiens
tgacctgaacaaactgtttccacctagagtgtgatgatgactcccgctgggaagaaagctcgagccccctctagtggccagcactggttatggcttctgattgcctgcaattgttccaccct

SEQ ID NO: 105410 - DNA, 122 bp, Homo sapiens
gaaatgccgtcaggccggatatcctgaagcctccgaggaaatgggggggtcagaggagcccgtggtagctttggatcttttggaactagggtgatctataaaagtgcagcttgagaagattt

SEQ ID NO: 105411 - DNA, 122 bp, Homo sapiens
tgagacctgtgtcccctccccaccctccctccccacctcctcaggccagctctggggtctcggcaggtggtccacaacatgacctctgagttcttcgctgcccagctccgggcccagatctc

SEQ ID NO: 105412 - DNA, 122 bp, Homo sapiens
gcataggaagtgaattccctgaccttccttcccagcctctgacctgatagagccccaattcgccaaagcaagagagctcaggtgcaacaggcattggcggccaacctccctggcacacagca

SEQ ID NO: 105413 - DNA, 122 bp, Homo sapiens
gaagcgtcggagggcctgaccccacccccgggaccctcggccgcggccaatcacgaacgccgcctgaaacacgacttccgcaccccgctcacgtgaccagggcatatatctctctctctctc

SEQ ID NO: 105414 - DNA, 122 bp, Homo sapiens
ccatgcattctccacaggccgagagtgtgctgtgaaaccgcaaggctgaaaccaccttcacgctgggagcaaacgaaaggacccgagggcaaggaatctgattggtcccccagtcagatgtc

SEQ ID NO: 105415 - DNA, 122 bp, Homo sapiens
aacaatcgtcctcctctgcctccggctttgcccaacacacaccctccggtctccttcttccgctgctgccaaatcccccccgccacccggaaagcaatggtacaggccgcgttacggcaagc

SEQ ID NO: 105416 - DNA, 122 bp, Homo sapiens
ggagcgccgcactgccttggaggcggggcaacgcttggaggcgggaacgcggcacgcgagcgttgggggccctaagcgtcgcgacctgggggcttcggggaggtagccgtggacgtgggcag

SEQ ID NO: 105417 - DNA, 122 bp, Homo sapiens
ttctttcctagatccacttcccggacgtggagcgggtcgagtgggccaacaaggtaaggccgctggcagggcctagcagggccggacgcatgccagcctcgtcctccccgcggctgtcaccc

SEQ ID NO: 105418 - DNA, 122 bp, Homo sapiens
tcagtggggacttcaagaagccagctctgccggtgtccccagcggcgcggagtaaggccccggccagcagttcttcaaaccctgaggaggtacagaaggaagggcccactgcgttgcaggac

SEQ ID NO: 105419 - DNA, 122 bp, Homo sapiens
tgggccacttctgagagctggcccaggagaagcgacagggcgcccagagtctgtggaagacgcaaaaccagcgcggagccctctgcgatgccatccagaagccgtcctgggatgaataggac

SEQ ID NO: 105420 - DNA, 122 bp, Homo sapiens
cttcagctggggcctgggaggaccggaatctggacgggttttcacaaacggagatgaggccgagagcagccaactgcgaccactcaagagagggccttctgtacgctcagcaccgtcctaaa

SEQ ID NO: 105421 - DNA, 122 bp, Homo sapiens
ggccctacaacttgtgtgggagacaagggagatgggggtaaaaagacctctgccttcagccgttcgcctggcatctcgcctcttcagctcctagtaccagggtgaaaggagggggctccctg

SEQ ID NO: 105422 - DNA, 122 bp, Homo sapiens
caaactcctgggctcaagcattcctcctgccttggcttcccacagtgctgggattacaggcgtgagccactgcgtccatccagattcatgatatttagatgttgaaatgtggctttacagac

SEQ ID NO: 105423 - DNA, 122 bp, Homo sapiens
ttgctaagcctttttttttttccttgtttacttttccctcagccttaaatgtggcagctgcgttctgtagttgctacctctgttatatcttagagctgtcttccattttcagttgtttacca

SEQ ID NO: 105424 - DNA, 122 bp, Homo sapiens
ctctatttacagcataaaggtgtttcaaaagacgtgatacaaataactgcaaatgctctgcgatgtgttaagcactgtttgaaattcgtctaatttaagatttttttttctgacgtaacggt

SEQ ID NO: 105425 - DNA, 122 bp, Homo sapiens
caatcttaccaaacccccaagaagcctccctcaggtgcagtgcagtgtgccaggcaggttcgagttcccaaagggtttggcaggcatgtttctctgtgagggtctagagaagcagcaatata

SEQ ID NO: 105426 - DNA, 122 bp, Homo sapiens
gtggtgtctgtgctttgtcaatttccataacgtttcttacccttttatatcttgcaccagcggcatgttccacacacctcattggaggctctactgattttgcatgaggacccccagctgcc

SEQ ID NO: 105427 - DNA, 122 bp, Homo sapiens
tctacctgtgatagctattaataaacaggattcatgtggggacaagtataagcagcatcccggggtctctaaatctactgggagaaaaggctgagattccagcagcaagcagagggctcaca

SEQ ID NO: 105428 - DNA, 122 bp, Homo sapiens
aggctgggctcaggggctgacccgaatctcccctagagctgggcccacccggctgccccccgagcagcctcgccgctcccacgccaccgcccaagtgacaggcccgggaaggccggacggga

SEQ ID NO: 105429 - DNA, 122 bp, Homo sapiens
atcctcgccggagccaacagcacctgccctccgctggagaccgtctttgcttagtagagccggcctgaccacagggaggggcaaccaccccaaggtcatgccagctgctggaggcagggcta

SEQ ID NO: 105430 - DNA, 122 bp, Homo sapiens
acagctgccacccggcccccaacctggggccacatctggagcttgttctgaaaggtgccccggcgtgcggccccgctctggacaggcggagagctgcgctgccaccccagccccgacgggat

SEQ ID NO: 105431 - DNA, 122 bp, Homo sapiens
atatcagtcaagcaggaagccttatggccctgcagcctttaagtgactctccgcaccccacgaaatgtgtgtatatgcaggtatgtgtatatgtgcacacacatgtgtatgtatatagatgt

SEQ ID NO: 105432 - DNA, 122 bp, Homo sapiens
ccgcctgaccccctcgcccaacgactcgccgcgctcgcagatcgtgcccggggcccgctacgccatggccggctctttcctgcaggaccagttcgtgagcaactacgccaaggcccgcttcc

SEQ ID NO: 105433 - DNA, 122 bp, Homo sapiens
gtaaatcttctcattaagccatgtagattttcacttacttccctgttttcagtaagatgccgcattcccacactcagacttagtggcccccatgctagagactcttacttaaccttgccaga

SEQ ID NO: 105434 - DNA, 122 bp, Homo sapiens
ccttggctgctggggtcagtcatctccagtctcctccatacagatgttgagacagaaaatcgttctgtcacccaggctggagtgcagtggcacagtctcggctcactgtaacctctgcctgt

SEQ ID NO: 105435 - DNA, 122 bp, Homo sapiens
ctgctgaagacccagctgcaggaaggccacgttcactgttaactggctactgatgggagacgaggcaaactgcttaacctttctatgcctccatttccttgtctctacgaagagaacaactt

SEQ ID NO: 105436 - DNA, 122 bp, Homo sapiens
cccaccctccgctcaggggcacaggaccctccgcccctcgcacttctacccgactgctgccgtctcagagccggggtctcagcccccacccagggcaggcttgagcggcctctccatgagga

SEQ ID NO: 105437 - DNA, 122 bp, Homo sapiens
ggaggtggaggggacagaccagcactcccagaggaccctgggaaaggtgtagcttttgggcgcttcccgcagactgtgggcaaagtcatacttagtgcaagctttaaatactctccccacac

SEQ ID NO: 105438 - DNA, 122 bp, Homo sapiens
tgtgtaggtcagttaagagaatgctcttgtttttaggaaaaacacacctaagtatttaggcgcaaaagagcctgatgttagcaacttgctcaaacagttcagaaaaaaaaagatacatatac

SEQ ID NO: 105439 - DNA, 122 bp, Homo sapiens
ccccggcagcagctgggcttcgcgctcgggagctgaggctatctgggcgtctgtctggctcgcctatgctataggagcctgccttgtgcttttagctggatttcccagccatcagcaggagt

SEQ ID NO: 105440 - DNA, 122 bp, Homo sapiens
agggcatttttaggttcacaacaaaattgagcagaaagtacagttttcatattacccctgcgcccacccacctccagcaagcagcaatctgttcgctttcaagttttatttatttatttatt

SEQ ID NO: 105441 - DNA, 122 bp, Homo sapiens
ggtacattctgtacacacaggcccctcctttgcctgaagtcattgatgaagacttcattacggagggtttggggaaaggtgggggtctggctgggtaagccggcgtcccagccccgctacag

SEQ ID NO: 105442 - DNA, 122 bp, Homo sapiens
aatgtccatcagtacagccacctcggagagccactgggcaaaatctactgaggcagagcacgatgttctgaactgctgaacgcatctggaaaccaccacctcccatctctcaggaagcacaa

SEQ ID NO: 105443 - DNA, 122 bp, Homo sapiens
gccgcttgggttgctcgggatgagaggaacaggggtgctcccggggtgtgggtgtgctggcggtgacatcctgaggctgcagctcgctggaataatgggctcaaaccaggcggtggagaggg

SEQ ID NO: 105444 - DNA, 122 bp, Homo sapiens
ccgctcctgatcccggaggctgcagagcagtaattgtcacttagccacttaactccccgccgcactgctcactcactcatcgtggtttatctctcagccaattactgctgtcatttgcgttt

SEQ ID NO: 105445 - DNA, 122 bp, Homo sapiens
ttagcacccgggcgccggggccctcgcccttccgcagccttcactccagccctctgctcccgcacgccatgaagtcgccgttctaccgctgccagaacaccacctctgtggaaaaaggcaac

SEQ ID NO: 105446 - DNA, 122 bp, Homo sapiens
aggcgggggcgggggcgcggacaggccaagccagggggtgaggcggaggcagggccaggccggtccgtggggagagggcgggccaagccggtgggcgcgggcagggacgccctgtgcgcgcc

SEQ ID NO: 105447 - DNA, 122 bp, Homo sapiens
caaagtcccggggcgggcatcagaggccgagcgctctaggggattggccaccctggcggacggacgtgctgctgaccgagctggttcgcccccggttcggctcgtggagagccggcccctcc

SEQ ID NO: 105448 - DNA, 122 bp, Homo sapiens
aggtctgcagcttcactcctgagccagtgagaccacgaacccaccagaaggaagaaactccgaacacatacgaacatcagaaggcacaaactccagacacgccgcttttaagaactgtaaca

SEQ ID NO: 105449 - DNA, 122 bp, Homo sapiens
agcagccaaatgctctaaggcccttatggaaacagagcctgactcctctgtcccatgtggcggggaggaaggggtgtctagggcctcaccatttcctcttccgtctttagctggggcagtca

SEQ ID NO: 105450 - DNA, 122 bp, Homo sapiens
cctgggatcactatgggagactggagtttatttcatctctgcagcctcgaccataagagacgaccacgccccagggggaccagtttagagacccacccccaggtgcacattctctttctcag

SEQ ID NO: 105451 - DNA, 122 bp, Homo sapiens
ggggtattttagatgcccgaggtcttgcccatgctgacctcccccctctccctcctctcccgcaggaccctgccccagtgattctgccatttctaggaaaaaaagaaagtgagttgcatgga

SEQ ID NO: 105452 - DNA, 122 bp, Homo sapiens
ggctcctgcctctccccgcccccagggccaccgcccactgtgccgcgcatcgattggtcgcgggcccattagctggggcggcgagtccgactcatcaatattttaaggaatgacccggcctt

SEQ ID NO: 105453 - DNA, 122 bp, Homo sapiens
agacatttttattgtagaaaatttcaagatacacagaagtggaataacccgatgaagccgcgtagagtcgctctccgacctcagcagttacgcgactcatggggcaatcttgtttcctctat

SEQ ID NO: 105454 - DNA, 122 bp, Homo sapiens
ggtagtgggcgctgcgggcggctggtcagagccactgggagccgttgggaacaactggcgcgggagtttcctgcatttgagaaatgctgttctcttcgttgtgaatcgtctgtccgctgcat

SEQ ID NO: 105455 - DNA, 122 bp, Homo sapiens
ggcgcagcctccccggagtcccggtgctggagggggtcgggagatccggcagcctctgtccgcgggccggcgaaactccaccccctcctggcacccgctgtccgttcttggctagaaaacct

SEQ ID NO: 105456 - DNA, 122 bp, Homo sapiens
gggccttaacaaggataaggactgagagactcccatttggttccccttacctcctacacacgatgcatcagaactgccatgctgttgtgatcctagtggaaccaaataccagagtcagagta

SEQ ID NO: 105457 - DNA, 122 bp, Homo sapiens
ccagagtgcagcccctcatgcgtctctctcaagctcgagtgacttagtgaatgaaacgctcgtgtccactcggaactgcttagggagccggagggaggctgggctgtgccctggtgccatcc

SEQ ID NO: 105458 - DNA, 122 bp, Homo sapiens
tgagaattttgaataacaggcttcaaacacaatgattattacatattagcatggagcacacggaaaacaaagggtaaagagacaatgaaaaatcaggatgaccaagacagaaataaatgcaa

SEQ ID NO: 105459 - DNA, 122 bp, Homo sapiens
catcctcaagctcttccagagcaacctggtgcccgctgaccctgagtgaaggccgcctgccggggactcagacactcagggaacaaaatggtcagccagagctggggaaacccagaactgac

SEQ ID NO: 105460 - DNA, 122 bp, Homo sapiens
ccttgccatgttacaccccatgccacagagtccctaccagcaagaaggctggcacaaatgcggcccctcaaccttggacttttcagccttcataactgtgagaaataaattcttttccttta

SEQ ID NO: 105461 - DNA, 122 bp, Homo sapiens
cggcgcggcgcactaaatcatcgctggcgtccacatttcaaagcggagccggaggagtgccggtgatttctgggtgccacaccgatcactcccaagctctgatctatggattgttttgattt

SEQ ID NO: 105462 - DNA, 122 bp, Homo sapiens
ctcagcccggcccctccgccgcagcgcctcggagtttgggggctacaggggaagaggaagcgtctggtcggctcccgtccgagctgctccacctgcgccgctggcctttccgcccgctacgc

SEQ ID NO: 105463 - DNA, 122 bp, Homo sapiens
accctcacaaatgaaatcctacaggccttgcttccttttcctaaacctctgctctgctgtcgccccccttgtagtttggctacttctggaaactttccttagggccaaaggagacttccaca

SEQ ID NO: 105464 - DNA, 122 bp, Homo sapiens
attgaatacttacaaatacttccaggcagggacagcttcataagtgtgtgacccatgcagcggcacaggccttactctcagaagggccctgcctttgtttttattatctgtcatgatcttga

SEQ ID NO: 105465 - DNA, 122 bp, Homo sapiens
ctgacgccctagctcattccgcaaatttagggcttgggtctggcttgttcccctccggctcgaaccacctcttctctgagccgagccagctaccggggctcctggaattgccacccctccct

SEQ ID NO: 105466 - DNA, 122 bp, Homo sapiens
agcggccaccatcttggaacgggaggcggagcagagtcgactgggagcgaccgagcgggccgccgccgccgccatgaaccccgaatagtgagtgagccccgcccgcgccgtccagcgcagcc

SEQ ID NO: 105467 - DNA, 122 bp, Homo sapiens
acagtgtggtctctgatagaggaagtcctttctctataactgctccagctggctcattggcggggaggcacctcttccttgagttattgggctatggaaacagcaatcctgccttctggttg

SEQ ID NO: 105468 - DNA, 122 bp, Homo sapiens
gtcactcttctgttctttccagagaggagcttagccagggacttctgcccttcctgggcccgggcctcgggggcgattccgggtaggtaaagcggaacgagggcgtggcctctcttgtgagc

SEQ ID NO: 105469 - DNA, 122 bp, Homo sapiens
cacccgggcccacgctcactttaataacccggactgggcaaggactaagtccagccagagcgtcagcctcgctggcgtcctcactggccatggccctgcagccttgctcttcagttcctgga

SEQ ID NO: 105470 - DNA, 122 bp, Homo sapiens
aaataaacgtggcgggacgtatgtgtcatggcgctctccatctaaagtctgtgcagcttccggagagtggcgggttgattttctcactttggactggtttttacttcccgacttctgggtaa

SEQ ID NO: 105471 - DNA, 122 bp, Homo sapiens
tattatactatgacattatcttgtgtatgtacacgatgtacttatttgttaatcgtctcccgtcttcctcacacctgtacccctcctctcctgttgacagagaacaagaattttgttttgtt

SEQ ID NO: 105472 - DNA, 122 bp, Homo sapiens
gacttgctggagtaacccaaccagtaggcggcaatgctggaagtagggccaagcttccaacgccattccccgcgctttcagcagacgcagcccattcaggaggtaaaaggagtaaagatcct

SEQ ID NO: 105473 - DNA, 122 bp, Homo sapiens
ctagagatggacatggtaatgcacaactagagttcagccacgcttcctttcggccggaaccgccatcttccgtcattggcccaaatgaccaacaggaggggaaaggggagaggctcccgatg

SEQ ID NO: 105474 - DNA, 122 bp, Homo sapiens
gcccgccccgccccgcctggccccgcccgcctgcccgcccgccggagccggccgcggcgccgcccaaaccctggcgccggagtctcggccaccggaccagagcctgcccccggggccgcctt

SEQ ID NO: 105475 - DNA, 122 bp, Homo sapiens
ctgcgatcacagctgctcagagcctcttcttaccaatttaaaaaacctctaaagatgtgacggctgcctttccagtggccaacaagcagatttccatagcagaggagctgcgactggggcag

SEQ ID NO: 105476 - DNA, 122 bp, Homo sapiens
ggagcttgccggtgatgtcactgctgctagctgggagggaatcccaggacctgcgtccctcgggtagagccaatcatggtcggctctggatgctggaaacctggggcttttaaccagaaaga

SEQ ID NO: 105477 - DNA, 122 bp, Homo sapiens
ccagtctggaaagtgaggggcgtctctgcccggccgccatcccatctaggaagcgaggagcgcctcttcccggccgccatccccatctaggaagtgaggagcgtctctgcccggccgcccat

SEQ ID NO: 105478 - DNA, 122 bp, Homo sapiens
agctggagggaaggaggtgtgagacagttgttgcatttgggataggtaagtcattaataacgataatagcaattaacacttaatagcactatgtgccagtgtggtatctaaatgtcatatat

SEQ ID NO: 105479 - DNA, 122 bp, Homo sapiens
ccagaaggttactgcgcgggccgccgaggagaatggtgggggtcagtgctgttgggtgggcgtcagtgctgttgggtgggcaaggcaggaactgcaagagcagttcctcaggttggtttcac

SEQ ID NO: 105480 - DNA, 122 bp, Homo sapiens
ggttgacgatggctataagaaacggctttgaagatggagggagggccatgagccaaggaccggggcaacctcagaagtgggaaaaggcaaggaaccagcctccccgcagagtctccggaagg

SEQ ID NO: 105481 - DNA, 122 bp, Homo sapiens
aggtcccccatcccatcatcgtcactgtcttacctgactgcttactgcttatcatcctgacggtgcaggattcttccttggccagagaggattttgctggagtcagaaattcaaccaaccgt

SEQ ID NO: 105482 - DNA, 122 bp, Homo sapiens
ataaaatctcaggtactatgaaataccgaagtcaatgaagacatttgagtaagggttttgcgctgggatcgtggcttatggcgcagagacttccccatgaccaatcattccctgtagctgtc

SEQ ID NO: 105483 - DNA, 122 bp, Homo sapiens
gacacaggatggcgtgggggagggcataccccccgtagaagggcacagtgtgggtgacctcgtcaccagagtccatcatgatgccagtggtacggccagaggcgtacagggacagcagagcc

SEQ ID NO: 105484 - DNA, 122 bp, Homo sapiens
gcaggctcgcattgcacccagggagctggagttgagctgttcccctaaataaaaacccttcggaaaggagaccaaaaaaagcagaaataatgcaaaaaataataatgaaatgaactgcgatc

SEQ ID NO: 105485 - DNA, 122 bp, Homo sapiens
tctattaaatcactggagtagactacagtatataatgtttttagtccctatttcttctaccgttttctctctctctttctttctttctttcttttttttcttttcctttttctttctttctt

SEQ ID NO: 105486 - DNA, 122 bp, Homo sapiens
gggcgccaggcagcgcgcacgggagggagcggcggggggcgggccgggagcggaacagctcgcggctctggaatgccaggcatccaggtcacccgcggctgcaagattaatggctccagcga

SEQ ID NO: 105487 - DNA, 122 bp, Homo sapiens
ggcgcaggtacccaggaggcacaggtacccaggaggcacaggtgcccacacgggccttgccgggggaagcacgactttgaagatggggacgtccacgtttcaacgctgccttgccagaggcc

SEQ ID NO: 105488 - DNA, 122 bp, Homo sapiens
gccaggtacagtggctaatgcctgtgatcccaacactttgagaggctaaggcaggaggagcgctgaagggtagagttccagactaacatgggcaacatagcgagacccccatttctacagaa

SEQ ID NO: 105489 - DNA, 122 bp, Homo sapiens
ggggatgagggatgggacgcatccccgggggatgctcctccaaagcttttatcgggcgagcgcagtggctcacgcctgtaattcctgcactttgggaggctaaggtaggtaaatagcttgag

SEQ ID NO: 105490 - DNA, 122 bp, Homo sapiens
gcccagcctataaacagcctccgtgcttagcagatggtgtgccaactgctgtcctctacccggctaccagggggctcagaaacctgcccctcgacccagtcacagcctcatggaacctggaa

SEQ ID NO: 105491 - DNA, 122 bp, Homo sapiens
caaccttgtcctttttcccctctgaaagcccttgcggatgataccacagcaattcatacgcgccccttgctactttgttctgagaacgctttttgggctctcgcacaggccttacgtcctca

SEQ ID NO: 105492 - DNA, 122 bp, Homo sapiens
agccccagcttccggctgatgaagatggcgcggctgctggccagattcctgcgcgagggccggctggcagtgctgatggaggcgcagtgtcggcagcagacgcagcccggcttcatcctgct

SEQ ID NO: 105493 - DNA, 122 bp, Homo sapiens
ggcttggagggctgatggggcagagctgcccaggggcccaggacaaaggccaggcgtgcgcgcgcacacacacacacacacacacacacacacgcagtggcctccctgggggccgtggctgg

SEQ ID NO: 105494 - DNA, 122 bp, Homo sapiens
tggggaggttcccctgatgtgggattttcagtgctaaaactgagacaggcccaggcaaaccgagacagtggtttctcgtaccgcgcctgagtctcacagccatcccgtagggtggcaccatt

SEQ ID NO: 105495 - DNA, 122 bp, Homo sapiens
tcttgctttcgccaggagctctccccctgtttcaagtctgttcctgtctttcgaccagtccggatctggacggctctctcctttttgctaatgaataaccaaccagcagaggctgttgcctt

SEQ ID NO: 105496 - DNA, 122 bp, Homo sapiens
ggagtagggagaagctgccccaggaggcgatgtagtggtggaaagaagaggcagagaggtcgtcgtcgtcgcccagcagcaagggctgcaaaatagtagaactcgtggttgctttggacagg

SEQ ID NO: 105497 - DNA, 122 bp, Homo sapiens
tcttctgccaaagagggaccaatcacttttaaatcaggctgaaagtgggaggcccaagagcgtcctctttttttttttttttttttttgagatggagtctcactctgtcgcccaggctggag

SEQ ID NO: 105498 - DNA, 122 bp, Homo sapiens
acctcatgatccacccgcctcggcctcccaaagtgctgggattacaggcgtgagccaccgcgcccggcctgaattgtcattttcaatgcatgttttctggttgtataaaagctttcccatgc

SEQ ID NO: 105499 - DNA, 122 bp, Homo sapiens
ggtatgtgggcagggctccggcgaaggggagtggccggggagtcctggtccaatggggcccgggggcggggacttcctcccatctctgtccagcatgcgtgtactcctcgcagttccatcta

SEQ ID NO: 105500 - DNA, 122 bp, Homo sapiens
ggtcgggaaggaggcgaaggggaaagcggtgtgaagtcctcggtacggaagagtgagcggcgctgtacccggcggccagagaaaaagcttcccaacccggacattgagcaaaagccccgcgc

SEQ ID NO: 105501 - DNA, 122 bp, Homo sapiens
agtggggcacctgataaggtttccttgtgttcctctttaccctttaccttaagacctgctcgaagcatcagcataagagagaaactgaaacaatgaacacccacatgtgttagtggctgtca

SEQ ID NO: 105502 - DNA, 122 bp, Homo sapiens
gagtggggtgaccattgaccttaaccaaaaagatgtcaaggctttcctcctcctcactcccgcgtccccagtgccaggcagagtctctcagctagaccctagcagtctcagcacacaccgca

SEQ ID NO: 105503 - DNA, 122 bp, Homo sapiens
tgaaagggaagggattctgttattaaagtcatcagttctggcgcctgggccctggggagccgagcttggctggtaattagggtcgttagtggagacggagccagctggggctgatgccagcg

SEQ ID NO: 105504 - DNA, 122 bp, Homo sapiens
aaacctccttctgttatggtgttttgaaatttagtttcctccgttaaggctctgtttgaccgaattttattttatgtttttcctattctctctctctctcattttaaattctagggacgggt

SEQ ID NO: 105505 - DNA, 122 bp, Homo sapiens
ctcgggtgatcctcccacctcagcctcccaagtagttgggtccacaggtgcgtgccaccacgcccagctaaattttaaaaattttctgtacagacaggttcttgccatgttccccaggctgg

SEQ ID NO: 105506 - DNA, 122 bp, Homo sapiens
cccgtcctgcacccccagcctgggaacccccggctttctcgcttgggcctctggggagcccgcgtccccaaatgtagccacatcagagcacacttctccggcagcaacttcccaggcatgtc

SEQ ID NO: 105507 - DNA, 122 bp, Homo sapiens
ctgatgaaataggccgggcccgggctacactcggtggtggtggaccggcgggaggacgagcgctacctcagtactacttctgggtctcccgcgcgggctgaggaagcgcctttcgccgccaa

SEQ ID NO: 105508 - DNA, 122 bp, Homo sapiens
tatcaagacttcaaaagagcagataaataatccacaaggaccccggatcagagagtgctccgagctgggttgccccactgtgcttgtatctgcactctccaacactaggcatcattgacatg

SEQ ID NO: 105509 - DNA, 122 bp, Homo sapiens
taggaccctccgagccaggtgcgggatttaatctcgtggtgcgccgttttttaagcccttcggaaaagcgcagtattcgggtgggagtgacccgattttccaggtgcgtttgtcaccccatt

SEQ ID NO: 105510 - DNA, 122 bp, Homo sapiens
gggggacttccaagggaaacctggtgacaaacaggtcactttcccttaccatgaccacagcgactaagaggcccagactcactcactccctcttggagccgccccgaaagcctgcctgccac

SEQ ID NO: 105511 - DNA, 122 bp, Homo sapiens
tggtcctgaagcaccactagatttgtcccgttttagcgatgaggatgaccttgcttcccccgcatcttggctaggccaggctccctgctctttccctgactgggggatgggcagtgggtggg

SEQ ID NO: 105512 - DNA, 122 bp, Homo sapiens
aaaccctcgactgtcttttcagtacttaagaggttacttgtgtgctttaggcagcagcagcgagctgtggcaagctatgcgaggcgtgtgggaaggtgagtgggtaaatgtgcgtgcattgg

SEQ ID NO: 105513 - DNA, 122 bp, Homo sapiens
ggagatgaaaggaggagccgagagagcctgggggagccggacgggtgcggcccgacactgcgtagagacgcggccgtggagtttctccaccgtcattaaaccccttttttgctgaggaacgt

SEQ ID NO: 105514 - DNA, 122 bp, Homo sapiens
ctcccgattcccgtgcaccgccccagcctccgctgtcgcctgccctccacctggcgcctccgttatttacttgttccccaggttcagtctcgggcggcctcggctttctccacgtcttctcc

SEQ ID NO: 105515 - DNA, 122 bp, Homo sapiens
gggcgctgctcccgcaccatcctcccccagttctcttagactccggggtactttggaggccgagacagacacgctgtccctgctgccacggaggtccctgcttgcaggtgcaggctgttaga

SEQ ID NO: 105516 - DNA, 122 bp, Homo sapiens
cggggcactgccctgcagtttgaggaatttcctgttaaccttttctcttcctcagtcggccggaagagttttcagttgcttagaagcccactgccgatgctgagggcactgaccagccccgg

SEQ ID NO: 105517 - DNA, 122 bp, Homo sapiens
aagctatggtagctttggctgaaatacctgaagtaaaagagagaagctaatgctcattaacgggttaaacccatgtggttttgctttgttcaataaactgaaagtaaacttttttctgatga

SEQ ID NO: 105518 - DNA, 122 bp, Homo sapiens
cctggcctcaccgccccgtgggctatcgcataggaaaacccccaccccacccccaccccgcgccagagactctgacgagaggacccctgccccctgctccccggactacagcgaggcaggaa

SEQ ID NO: 105519 - DNA, 122 bp, Homo sapiens
ctctgtccctctgctcccagcaccaggtgcagccattgttctggctggtctctcttcatccggcctcgtctgttactctgctctttctagctcattgtttctgtaggaaattagcattaaaa

SEQ ID NO: 105520 - DNA, 122 bp, Homo sapiens
ggatggggaactgggtccttcgttttaaaaggtgcctctctacacggagggaggggagcacgtgatttttggagctaatcctagctctcatattccatgaatgtagccaaacgctaaaacta

SEQ ID NO: 105521 - DNA, 122 bp, Homo sapiens
cctgtcacactggcctccccttccttgaacaagtcaagcccattgcagcctccagaacttcgcacctgctgtcgcctcccttcagagcgcgtttctttcagggattcccgtggctggctttt

SEQ ID NO: 105522 - DNA, 122 bp, Homo sapiens
aggtggacctgatggccagagctactagcggggaccaggggtaacatgggtccccctccccgagccatgaagagctgcctgcggccatcttggccctcgcaccccgtctctgtcaccccagg

SEQ ID NO: 105523 - DNA, 122 bp, Homo sapiens
gagggtgtccttcaggggaacatctgtcccagagtggcactgggtaaagggcaggggcttcgcattgggagctgtggattctcgtgccagcttgcccactcgccagatgttgtgctcttgtt

SEQ ID NO: 105524 - DNA, 122 bp, Homo sapiens
atatttgtctttctgtgtctggcttatttcacttaacacaatgaccttcaggtccatccacgttgctgcaaatgacaggatttcattcttttttatggctgaatagtattccattgtgtata

SEQ ID NO: 105525 - DNA, 122 bp, Homo sapiens
atcagggcccgctgggcgcagggtggcacccgcggcttctgcgcgcagtccgtgtcgcggcggaccttctcatagcacttgtccaggtccttcagggtctcctccaggaaagtctccgtgcc

SEQ ID NO: 105526 - DNA, 122 bp, Homo sapiens
gtttccaagtagaaagaggctagatttgggccttgtctagctgttggctttggcctgaaccggaaccagtctcagatgaccacgggtttaaccttcttatcccagagacacccaattctaga

SEQ ID NO: 105527 - DNA, 122 bp, Homo sapiens
aacccctcacccccatttttctgcctggcagatgaaaaattgaaagtacctctggccggccgtggtggctcatgcctgtaatcccagcactttgggaggccgaggcaggcggatcacttgag

SEQ ID NO: 105528 - DNA, 122 bp, Homo sapiens
gtgaagctcagcactcacacttgcgcagtgtcacagtcaaacctgtggatgtggagcttgcgctaactccagagccagaaggaacttatgtcaagccaggaacaggcctctgctcagcctcc

SEQ ID NO: 105529 - DNA, 122 bp, Homo sapiens
cccaggcttactattttaaagtagatgtaggatacaaataaaaaaaaaaatctccttccacgtaggtaaagcaggaaataccgtgccttgttaataagtaattccctcatgatccttttccc

SEQ ID NO: 105530 - DNA, 122 bp, Homo sapiens
gggaactgcaggagaagcaaagtgaaaaaaggttaagaaacgccttgagtactgcgaggacgttaagatccaaacagcacaagaaggaaggtcaaaatcaggtgtacgaggcccgtgtgccc

SEQ ID NO: 105531 - DNA, 122 bp, Homo sapiens
cgttttggggaccaagaggcggggctccgcgagcagggtgcctattggcctgagggccggcgggctctgggcgctaattgggcggagggcggtggcgctctggcacgcttgcgcggcgagta

SEQ ID NO: 105532 - DNA, 122 bp, Homo sapiens
cttatcatgaccattttgtatttctcagtccatgtatatccctggcacataatgggtgctcgcaatgatttctcgggttgaagttaaatccaggaagcccagtcactcacatgatgcatttc

SEQ ID NO: 105533 - DNA, 122 bp, Homo sapiens
tgggtgccgaggcggcgatgggtgtcctcaaagtgtggctcgggctggccctagcgttggcggaatttgcagtattgcctcatcattccgaaggtgagagagcggtgccgcgtgtgtgtgtg

SEQ ID NO: 105534 - DNA, 122 bp, Homo sapiens
gttgaggcggggtgcaagggcgcggatcggggtgccgagtgcgtgcaggggtgcggggtgcggggaccgaggcggccggccccggtgctgctgcagggcgcggcggaatgcaggggcgcggt

SEQ ID NO: 105535 - DNA, 122 bp, Homo sapiens
accttatttgtgtcctattcatcaaataaggggatttgttttgttttgttttttgagaaccgcagcaagaaaaattggtcatgcccaggcaaatcttctaggtgagttctaaagataagtca

SEQ ID NO: 105536 - DNA, 122 bp, Homo sapiens
aagatcctgtggacggtgtggcccagtggatgtaactctcgctgccacttccgtggccatcgttaagctagctccgaacagccccaatgagggagctaggcagctccgagttcccggggtag

SEQ ID NO: 105537 - DNA, 122 bp, Homo sapiens
aaaaaaaaaaaaagaatcatctgttctatcatcatccagtggccccacggggtggcccagcgcccaggacagggccttctcccgaggcccggcctgtcctgagcccgcaccctgtgtggcca

SEQ ID NO: 105538 - DNA, 122 bp, Homo sapiens
tctgagctgcaggcgggcgactgagaacagcctggcgggctgagcccctggccctgaggacgcagccgtgtattttttcccctgtggctcacggggcctgggaagcacaatgtcctccatta

SEQ ID NO: 105539 - DNA, 122 bp, Homo sapiens
gggcgtgggtctggagggcggagcgctaggtgctggcaggggcctttcagggggcgctgccgccgcttgacgtcacttcccgccgctccactgccttgggtcacagctggcgtcttaagggc

SEQ ID NO: 105540 - DNA, 122 bp, Homo sapiens
gggcgaggggcttggggctgatgagcggagacaccatgtacagcagcagcacgaaggccacgaggaaggcggcagccagcagcagcatcgctccgcggggccaggggcccggagcggccggg

SEQ ID NO: 105541 - DNA, 122 bp, Homo sapiens
caactggaattcatttttatctccttcgaaacgtctaactgtggcttgggcatatagacgcgtaggaaacaaaagaaggattgaccgctgaatggtcagatgccgttgaatacaactgagta

SEQ ID NO: 105542 - DNA, 122 bp, Homo sapiens
acgctttattgaagagtacagcaccatcagctgaagctgatactcaagtacccacagtaacgggttccagtgacctcaactgcgaccgcctccagcctcacgactccgcaaacaggtcacga

SEQ ID NO: 105543 - DNA, 122 bp, Homo sapiens
tgcaggagggccccatggcacggccacagaacttgaatgcaaggcccttccctagcgggtcggtctcgaaattaagtcagctaaaacgagagtgtgcggcgaggaagcgctgggcggacgga

SEQ ID NO: 105544 - DNA, 122 bp, Homo sapiens
cgaagcgcccaaatatgtggctcaggggtaagggtcggtcaccagcctttccacataagccgatgtggcagagaaaagcaattactgtgtatcctggcagagccccttgtccctccctccca

SEQ ID NO: 105545 - DNA, 122 bp, Homo sapiens
ctccgggacaagggtgctgtcttaggactgcgttttcacctcctgcgccgtggtgagctgcgtcctctctctgcagaccaagctgtacaccctgcctgcaagccacgccacgcgtgtgtatg

SEQ ID NO: 105546 - DNA, 122 bp, Homo sapiens
cctccgagggtgaccccggaggaagagaacgcgtgggcccctgctccaagtgccagcgcacgcctggcccagaggtccatcgggctgccaggacaaatgcgtacgcatagacacgtgcacgg

SEQ ID NO: 105547 - DNA, 122 bp, Homo sapiens
catgggcagtggcggggcacgcaggcggcgatcagaggctgtcccgtcctctccgggggccgcggctcatcctgccaggcatctccgaggaaagtttgctctccggaaaagaagaaacccgc

SEQ ID NO: 105548 - DNA, 122 bp, Homo sapiens
ctggaaaccctgggtgcctgacctggggcgtccgattcccgcagcaggaagcagaaacttcgctctggattctgccggtgggaagggtggcagccgggggaggagccggatgcggatctgag

SEQ ID NO: 105549 - DNA, 122 bp, Homo sapiens
cacaccttctgtcattcagggcctgagggggcgggtccttaaacatcctccaatcagggacgctgggctgggacccgtccaatcaggcacgcagctggagcggacaggacggcttccgggat

SEQ ID NO: 105550 - DNA, 122 bp, Homo sapiens
ccaggacaccaggcgacccacccgctaccctttccccttcagctcgactctggagggctacgctgctccgtcccccgccaccccggggtcccttcgagcccagcctcggggcgagccaaggg

SEQ ID NO: 105551 - DNA, 122 bp, Homo sapiens
tgcagcagggatattgtctggaagccagtttccggggtgtcctaatctcgcctgtgagaccggataagggtgcaggaacttggaggcccgggacgtgacccgggctccatctgtagcctgaa

SEQ ID NO: 105552 - DNA, 122 bp, Homo sapiens
gggccaagaacagtgagatcccatacgtcacgtgctttgcgatttcttacgttcttactccgtttctgtaatttgctatgttgctaagcgagtcaacgtaactacctaggaaaagtctcatg

SEQ ID NO: 105553 - DNA, 122 bp, Homo sapiens
caacaggaagttcctttgtagtttaagtcaatgggaaccaatttttttttcttttttttgcgatagagtctcactctgtttcttaagatggagtacagtgactcagtcatggctcactgcag

SEQ ID NO: 105554 - DNA, 122 bp, Homo sapiens
cagccaagtaactggaccaacagtttactgttcttggtccagatttctggttcatgtttccgcttactattgtccacttacttgctccttgtgagatgacagaaatgtctccaaaggagaca

SEQ ID NO: 105555 - DNA, 122 bp, Homo sapiens
aggggaggaaactgaggctcaaagaaacaaatcgtaagtccgaagccgtacaacggagcccgaactgagtccagacacccggacgccacccgtccctaccgcaaccggcccagtcccaccac

SEQ ID NO: 105556 - DNA, 122 bp, Homo sapiens
cggagccaacagtggtaacgtggtcgggtccccttctgtactgtggaagctttgttctttcgctctttgcaataaatcttgctactgctcactctttgggtccacactgtttttatgagctg

SEQ ID NO: 105557 - DNA, 122 bp, Homo sapiens
cactccgtgtggaatgccaagctgaccacagggatgctggtcagacagagcccataagcacgcccacagacctgggaaaggaaacagccttgcgctagcatatttatgttggaaaagaggca

SEQ ID NO: 105558 - DNA, 122 bp, Homo sapiens
ttctccccacagcaaggatactgtctcctgtgcttagtaaagtttgggagggtaggtattcgataaaagcagttctgctatcattagctgtgtagtcttggggaagtgatatcaatgtagcc

SEQ ID NO: 105559 - DNA, 122 bp, Homo sapiens
ccggcgggtggaatccctgtttccgacaccggttgatgcggtcgggagagcgagactggccgagggaccggcttaggcaaaggcctggaggcacgactgcgccaggaggattcggaacacag

SEQ ID NO: 105560 - DNA, 122 bp, Homo sapiens
caagcctttctgcaacccctctgtaggttcacccaggggagacccctgcctccagactgccggaccagggatcattggtcccattagaaagacgaagaaactgagtcctgagagggacagtt

SEQ ID NO: 105561 - DNA, 122 bp, Homo sapiens
ccccagacacgggccccgcaggaggggcgtctgcagggcacatggccgaggtcctggctgcggggcccggggccgctcacaccctgcccggctagcctatggcaacggaaccggccctgatt

SEQ ID NO: 105562 - DNA, 122 bp, Homo sapiens
tggctcagagacccagagcccacctgggtgctgcttacagcccataaggcagctcccacccgcgtgtcactggccctgcagcctcatgaagccttgtgagcagccatccttatctcctttgt

SEQ ID NO: 105563 - DNA, 122 bp, Homo sapiens
ttccaggcagctccagggccggcccagcggatcaatagcaatctggggtgctagggagggcgccatctgagtagttcggaagaactgaacatgatgagttgccggctgcttcctgagtcctt

SEQ ID NO: 105564 - DNA, 122 bp, Homo sapiens
gggcttgtcctaaagcatctgagagaatcttttcttggagcggtccttccacacttgccccgacttgggcttccccttcgggattacaggaagctcctcctccttcagcttcttggacgctg

SEQ ID NO: 105565 - DNA, 122 bp, Homo sapiens
aagttcagaaaatctcttactattagagtgttccttcttgtcactcccacatactggctacggtgagaaatccaatgtggtttagtgaaaggatcttgggctttaaagaaatagaaagagag

SEQ ID NO: 105566 - DNA, 122 bp, Homo sapiens
gccttgtagggtttgctgggaaaaaaaaaaaaaaaaaacgtggagaaggagacgtgggggcggggagggctgaggtcagagccaatattgaaagaaatctatttgtggctgtgggagggatg

SEQ ID NO: 105567 - DNA, 122 bp, Homo sapiens
ccagcagaatctccagtgcctggtgctgaattcattaactctctccctcgaggatccttacgagcgctgcttcagccggctttctggccttcgagctttaagcatcacgaatgttctctttt

SEQ ID NO: 105568 - DNA, 122 bp, Homo sapiens
cttctatctctagaaagggacctgctccagctgcgagagaggcttcttcttggaaatctgcgacgaggtggaagactcctcctatgataatcatctcaaggacgaggaccccaagagggagg

SEQ ID NO: 105569 - DNA, 122 bp, Homo sapiens
cacaggtggcagcccggcacatttgttaactggcttgttgacaggaaaatcaaggttacacgttcctttctcttaaaccagtttctttatcagtaatatgactgctgtctttaactggctaa

SEQ ID NO: 105570 - DNA, 122 bp, Homo sapiens
gctctcttcagagtgaagaatgggcctcatgtcacacgaggcaggggaagctgctggacgcggccctggaaggtgcactggcccagtccccctcccactggccttggctgcaactcatgctc

SEQ ID NO: 105571 - DNA, 122 bp, Homo sapiens
cgtgaaaggaggaaaaggaaggtgagggcacagggtggctccggggctggcgggcgtagacgaagccgctttgctgcttaaccgcaactgccagcagcaccctctttcgtccgcccctttag

SEQ ID NO: 105572 - DNA, 122 bp, Homo sapiens
ccgccgcgggacagccagttgttcagtgccgggatcccgcggctgtgccagaaagcaggacgccgcggggctgccgtcccgacccctcgcttccttccgcgctcccgggaccgggctcagca

SEQ ID NO: 105573 - DNA, 122 bp, Homo sapiens
cgcggcgtcctgagtgctccgagcttcccgcgggctctgcctcctgctctgggctcccagcgcagggaggctacttttgcgcctctgctagttgtttggcaccagccactttgaagccaatc

SEQ ID NO: 105574 - DNA, 122 bp, Homo sapiens
gccattcccaaagtctcctgggttcccgggggtggagagtgcagctcaggagaatcctcccggcgggcgcccctgtgtggagcgggtacccctgtgcctggtgggcgcccctgtgcggagcg

SEQ ID NO: 105575 - DNA, 122 bp, Homo sapiens
agggaaaagggtagagggaacagtgtttgataattctgtgcttgacacagcatcttctatcgtctctgaaggaaccaaatgtttcagagctttgtgtaaatacttgctgagctgtcaatatg

SEQ ID NO: 105576 - DNA, 122 bp, Homo sapiens
tggcttctccttcggtcccggtgtcttagagctgtgacagctgggctggaaatctctacccgggttggggagggaccagagctgtccctgcctccccatctggcttgaatgatatgggtggg

SEQ ID NO: 105577 - DNA, 122 bp, Homo sapiens
cgaagaacacggcctgctgctctggccggatggggaggcccaggaggaggaactcggacacgctgctctggttctcagggctcatgtttatatcagctggagggcactagggaaatttgaag

SEQ ID NO: 105578 - DNA, 122 bp, Homo sapiens
accctgcagctcctccgcgggtttggacttgaaggacagtggtttggagagtcctgctgccgccgaggcgcctctgagagggcagtacaaggtgaccgcctccccggagacagccgtggccg

SEQ ID NO: 105579 - DNA, 122 bp, Homo sapiens
gtgtgcctctgcagacgtttatcaaatcgaggtggggtctctgctactctctccaaaaaccgtttctctcttagttatacaactacctgctgtatacctcacccaggaaagcatggttggct

SEQ ID NO: 105580 - DNA, 122 bp, Homo sapiens
ccctgtccccgcctagatgtgtccctgagccatgccactaacaggggctgcgagggcttccgcggctcctggaaaggccccagaagttcccccaggcactggcttgctggcatggacaatgt

SEQ ID NO: 105581 - DNA, 122 bp, Homo sapiens
agccaggttggtctcaatctcccgacctcatgatccgcccgccttggcctcccaaagtgccgggattacaggcgtgatctcatttaattattaaatgaaattctaggaagttacggtaaact

SEQ ID NO: 105582 - DNA, 122 bp, Homo sapiens
tggcagtttttcttaactgaaggcagttgcctgcagaagccttgtggctttccagagcaacggcgccccttcgtggtgataatgtgaactgcaccccaggcgtgattgaaaataaggcagaa

SEQ ID NO: 105583 - DNA, 122 bp, Homo sapiens
tttgccgttttccaagaacactaatacgataaatgctctcgcagctaaaaccgttctctgcgctgtctaatcgtgctttgacgacgccaaaggccttggaggctcgcgcagcatttcaggac

SEQ ID NO: 105584 - DNA, 122 bp, Homo sapiens
gcacttcgtgctctggggctgcctgcacgtgtaccagcgcatgatcgacaaggcggaggacgtgtgcctgttcgtagcgcagcccggggaactggtggggcagctggcggtgctcactggcg

SEQ ID NO: 105585 - DNA, 122 bp, Homo sapiens
cttcccaaacctatttcacccatgggattttcctctagcaaacctattttttcccagtgccgacctcactttccccacttgtccgacctgctgcccaggcgtcgaggaaatcgattgtctcg

SEQ ID NO: 105586 - DNA, 122 bp, Homo sapiens
actcgtctgtgtggtgctctcggcggttctggtccgagcgcgagctcagcaagtccacaccgttcactactagcatgccctctgcaaggacacagctccgtgtcagtgaagccccatgagga

SEQ ID NO: 105587 - DNA, 122 bp, Homo sapiens
gccgacgctacgtccctaaggttagggactaacagacctcatagaacacagtctgttggtcgctgtacacccgtgaggggttcatcacagtggccagctataagacgaacggttgcattcca

SEQ ID NO: 105588 - DNA, 122 bp, Homo sapiens
ccagggtgggcgggagggctgggagcggatggcggagatgttcagacacagctggggtcgcgggcgtctgactgcgagctgtcctctctcccgcaggcctgctgctcttggtgagcctggag

SEQ ID NO: 105589 - DNA, 122 bp, Homo sapiens
tttgccctgggagtagggtgcaggaggttccacggacgcctcgacgaccggtagtagcttcgggtggggcctagagaggacggcgagcaactctgtggttccggagtccagaaaaatgaaag

SEQ ID NO: 105590 - DNA, 122 bp, Homo sapiens
gtcttccaagtcacgggaaacagggcgcccaggagacggtgagcccggctgctgccaccccgaaggccaggctcgccccacactgtgagaccctccccacacgaagattctgtaagcggaat

SEQ ID NO: 105591 - DNA, 122 bp, Homo sapiens
ctggaatccataaactgcaatttatcagtccgtaaaactcgtagcgtcagggcgagactccgcctctggggccccgcccaccgcgagcggcaggtggggccggcagatcttctttgcgcatg

SEQ ID NO: 105592 - DNA, 122 bp, Homo sapiens
gcacacccgtgcacacctgcccactgatctgctgacccctccccacagggcgccttcagccgctgctacaagctgacagacatgtccaccagcgccgtgttcgccctcaaggtggtgccgtg

SEQ ID NO: 105593 - DNA, 122 bp, Homo sapiens
ggacctctgaccttgaggctgtcacagtcaaatatacagcaacgttccccaaagcacaaacgaggtgcaaacaggcacatttgggggatgtggtagacaaagaatatggcttatgcagttta

SEQ ID NO: 105594 - DNA, 122 bp, Homo sapiens
acataatgtcactggcttgttgggatttttaatttatcttcactcagcaccaagggcccccgacactccactcctgctgcccctgagctgagcagagtcattattggagagttttgtattta

SEQ ID NO: 105595 - DNA, 122 bp, Homo sapiens
cgctctggatccagccgggcgcgtcccctcccaccctcgcgccgcggctgtcgccggccccggcccccagtgacgcccaggctcgcctcctgcctgggttccagggggctgcacccggccag

SEQ ID NO: 105596 - DNA, 122 bp, Homo sapiens
ggggatgctctctgattggatgcaggattggcgggaaggcagcggggtcatcaaaggctgcgcggttgctgaggcatttccggggtgtcttccgaccaggattggaacagctactgcgctgc

SEQ ID NO: 105597 - DNA, 122 bp, Homo sapiens
ctgaggactggagggaccagccgcccacagagccccgagcccgtggtcccggtgagtgagcggagctgtgctgcgtgcagctgggcgttttcctaacggccctgcccctgtgagaaggaggg

SEQ ID NO: 105598 - DNA, 122 bp, Homo sapiens
ccccgccggccgccctagagcggagggtgaccttggggaaatgttagtgaggtccggccacgtgctgcaggcggggcgggcgctccgggcgcggggggtgcgcgggtcctgcccactacgcg

SEQ ID NO: 105599 - DNA, 122 bp, Homo sapiens
agagggcctccttggggcctgggcatcccgatgcttgcagtctcctcctgaaacacacatcgccaccactaccgtctgtatccagtggccagtgacgggcaccagggaggaacactgcctcg

SEQ ID NO: 105600 - DNA, 122 bp, Homo sapiens
gccttgctgagactttccatgagaagcaatggttgacagcccctggcaaagctgggcctgcgtggaactgacccagcaactctgcgtctaagtacacatcccggagagaccctggccgccgc

SEQ ID NO: 105601 - DNA, 122 bp, Homo sapiens
ctccgcgactggccgggaaggcgcagagcctctttcttctctttcctggatcctggagtgcggaggaggaggggagagtgctttaccttgctccttcccggggggcggtccaggggagcgga

SEQ ID NO: 105602 - DNA, 122 bp, Homo sapiens
gcccccgttgctgtggttgggggaggcgagcaaagggcagcggctgcgagcgcccgcccccgccccaccctcccagccccggacagcgcaggctgcggcttttcgtcctccactgagtcctg

SEQ ID NO: 105603 - DNA, 122 bp, Homo sapiens
taacagctgcaccagctttgcgtatcccctgttcgagaaaactgctgccgtcggtgaacacggtggcgtccgcctttctcaggagcacatcttgaagatctggcctgccagtttcggtagct

SEQ ID NO: 105604 - DNA, 122 bp, Homo sapiens
tgcgggcggggctggcacacacagctcaccttcagctgaggaagctgcctgctccgctgccgtcctggcagtcagtgacaggtattgctgagatgtcagctcaagggtgtctgggttctttt

SEQ ID NO: 105605 - DNA, 122 bp, Homo sapiens
ggaggtgtggctggctgtcaatgactactacgacatggtgggcatccagggctctgacagcgtcttctccggcttcctgctcttccccgactagggcgggcagatgcgctcgagccccacgg

SEQ ID NO: 105606 - DNA, 122 bp, Homo sapiens
cgcaggagggcgcgacttccccgctgggccgaggcctttgccgggccctctactgtacgccggtcctagggctgggaccgccgtcctggaccgacctcagcccactgttctgcggaggccgc

SEQ ID NO: 105607 - DNA, 122 bp, Homo sapiens
aatacagaacatcccaagacactcaaataatgcctttgctctgttcctttagtttccagccgacaggggcttccctccccttctctgttcccagaaagcagttcaaacaagtgtaggttttc

SEQ ID NO: 105608 - DNA, 122 bp, Homo sapiens
cgcacctcagctccggttgccgcgcggcatggtatttatctgtgggttcagtgcgcacagcgttgtccagtctcgaaaccaccctaaaccggcattaaaccccaaccaaaatcccctttaac

SEQ ID NO: 105609 - DNA, 122 bp, Homo sapiens
tacgacaacggaataagcatgaatacgacctggctacctgaaggaggtaggacggggaaccgagcagcagcaggtggtggaatgccagggaaatccaaccgtgcttcccacgctggcatcgc

SEQ ID NO: 105610 - DNA, 122 bp, Homo sapiens
ttcttaaagctattgtaacttgcctggccccacgtagttcaaggattatgtgagataacacgtggccccatgaccactggagcacatgggttaatggagttaggggaatggcctacaactct

SEQ ID NO: 105611 - DNA, 122 bp, Homo sapiens
ccgcgctgtggtatttttcccagtatccaggtggggagaggatcctattacttccaatgtcgcaggatgtgtacaccccctctgtgatctcgttgctaacatccaggtttcgggaggacgac

SEQ ID NO: 105612 - DNA, 122 bp, Homo sapiens
cacctggggacaaagccaggcctaggaggggtggcggggtcgtggagggacgggtccggccgcccctggcccacgggtggggcacgtgctggcccatgggcgacgcgcggcttctccaggga

SEQ ID NO: 105613 - DNA, 122 bp, Homo sapiens
cactcggcacagccagggttccagctgccaggagggatcgggcgtctgtcagtgacccggcgtgtgtcctcccctccccctccccaggctctgagggcgtcgggcgtctgtcagtgacccgg

SEQ ID NO: 105614 - DNA, 122 bp, Homo sapiens
tttttagtgtgggtcctaaagtttagagatgggcaaggaggtctctaatccaccgcttcccgcttgagaagggaggggtatcaaaattgagccccaagctgtttgttccagtgtaccaagca

SEQ ID NO: 105615 - DNA, 122 bp, Homo sapiens
gaagggatggaagaatgagcctcaggtatctagagagtgaggaagcgggcagcatccaagcgaagcggcctgaaatggaggcaggtgccccaaggctcagctccatactgacacgtggactc

SEQ ID NO: 105616 - DNA, 122 bp, Homo sapiens
attggacggcagcagacttggttcttaagcttccaaatgtcagactacaccccttcaccccggctgagaatgacggagatgaacctaaatccttttagcgagggttgcacgaccttgatcaa

SEQ ID NO: 105617 - DNA, 122 bp, Homo sapiens
gagggagcgaggaggggagggctgtgactgagcctccgcagccggggcggggcctgcaggcgccgggagggccgccaatcaggcgctcccggcactctaattggttacgtccccgtcgctcg

SEQ ID NO: 105618 - DNA, 122 bp, Homo sapiens
ctccacgcccggccccattgaggaagcgcgtacgcgtggcgcgtggctcacggggagcatcgctaacaaagctgggttcctgctgggccccgccctgctcctcgcccccgcgactgggctgg

SEQ ID NO: 105619 - DNA, 122 bp, Homo sapiens
aaatgtaattaaaagtttttattgagcccccgagctttggcttgcgcgtatttttccggtcgcggacatcccaccgcgcagagcctcgcctccccgctgccctcagcctccgatgacttccc

SEQ ID NO: 105620 - DNA, 122 bp, Homo sapiens
aggctggaagagggtggctggggtttcacttgtgtaagccacacacctaaaataagcccccgcaggagactctgggaatttcctgtaattttcactgtaaatgtcctatttataaagctgag

SEQ ID NO: 105621 - DNA, 122 bp, Homo sapiens
aaaggataaaaaaattacatatctgacgcaggcagccttcaaggtcatgttccttggcaccgctacattggagatgatgctgtccgtctcctggggagatgacagtaattaattaccatcag

SEQ ID NO: 105622 - DNA, 122 bp, Homo sapiens
ctactgcgcaggctcagtgctgcttacccatcatggaagcaatgtggctcctgtgtgtggcgttggcggtcttggcatggggcttcctctgggtttgggactcctcagaacgaatgaagagt

SEQ ID NO: 105623 - DNA, 122 bp, Homo sapiens
gtgggaattgtgcttatacactgggcctccaaagtgctgctttatttttatgtacagactcgttgggggtggactgccgaaatccttgctcttagaaatgtatttgagcccctgggaaactg

SEQ ID NO: 105624 - DNA, 122 bp, Homo sapiens
gtcccaggagagatcaaaggccagggctggtgagttcagggaagaggaattgaggatggccggtcccaccactatgtaatgagaaggctgaaatttatgtggagacctggagcatgggtagg

SEQ ID NO: 105625 - DNA, 122 bp, Homo sapiens
tgccaacgccgcgctctggcaccctggtcccgccgccgaggggcgaggccgcgttcaggccgggctctaaaagcacaggaagggacacatcagcgcccagcctaaggctcacctgagcggtt

SEQ ID NO: 105626 - DNA, 122 bp, Homo sapiens
cctacttcagatgagacctttggggtctctcaggaggggcgagagacagagccggtgactcgctgggcgctgacaggacccgcaagggttggttcgtcagtatccaccacccccttcctctc

SEQ ID NO: 105627 - DNA, 122 bp, Homo sapiens
cttaacctctccctctctcccctcccagccacccttcccaccctctaataaccaactctgcgttctaattctgtgagttcaattgtatttttgctttcacatatgagtgagaacatctggca

SEQ ID NO: 105628 - DNA, 122 bp, Homo sapiens
ttttgcaacttcctctgaatccataattatttcaaaattaaaaagttaacaggccaggcccggcggctcacacctgtaatcccagcactttgggaagctgaggcgggcagatcacgaggtga

SEQ ID NO: 105629 - DNA, 122 bp, Homo sapiens
gtcgggctcgccagcctcggcttcctacatggaaggtccgcgggggcaaaaaacgaaaggcgttcggctgggctgttggaagaaggaaaaagcctctttcccccttgctaagcaacttaatt

SEQ ID NO: 105630 - DNA, 122 bp, Homo sapiens
gccaacttcctccccgacggggacggcgcggtggcggggccctgggtggcgcgggcggtgcgtggacaatgcgagagtcaggaagtgctcaccccgcccctccgccccgccgcggctgcccc

SEQ ID NO: 105631 - DNA, 122 bp, Homo sapiens
ggagggtcgggccttgtggctaatgcctgtaatccaggtactttgggaggctgaggtgggcggatcatttcaggtcagaggttcgagatcagcctgggcaacgtggtgaaatccccgtctct

SEQ ID NO: 105632 - DNA, 122 bp, Homo sapiens
cagcctcctccgacctccgaagagtggtcattgatttgtccttcaggcctcatccactgccgcgacccccaccccgagttgccggacacagtcaggcagagccggttgctcctcccctggtt

SEQ ID NO: 105633 - DNA, 122 bp, Homo sapiens
cctgatttcattcacactccactgttgagttctcttgtgaccagcatatacagtttattccgtattttatttatgttttgaataaggaacacattcacatagttccatggatacaaaacggt

SEQ ID NO: 105634 - DNA, 122 bp, Homo sapiens
cactcaaccattataagttcaccccagccgtcagcgatggcgtaggtaggtagtcgtggccgagtggttaaggcgatggacttgaaatccattggggtttccccgcgcaggttcgaatcctg

SEQ ID NO: 105635 - DNA, 122 bp, Homo sapiens
acgctctatacagagagctcctttgcttccatttttactccaatcctggaaattctttgtcgatgaaaaggggacagtttatagtgaactccaaaagaggggtcctaacctaacccagctct

SEQ ID NO: 105636 - DNA, 122 bp, Homo sapiens
aaaaatcagttcctgcccacccagggacgccttgggttgtgtttaacccgtttctgttgccgggtgcggtggcttacgcctctaatcccaacactttgagagtccgaggtgggtggatcact

SEQ ID NO: 105637 - DNA, 122 bp, Homo sapiens
ggcctggccccgcccatccctaggaaatgccctcttcagggcgtcttctgccctttaaagcgacttggctcgtctccagatctaaaggtgggcgagtctgctggacggacgctgggaccgtc

SEQ ID NO: 105638 - DNA, 122 bp, Homo sapiens
atttcgcggggcccaggggatggcggggagtgagatttggccagggtcatttcacactgccgggcctgcagccacgcacgcagctgctggcccggctgaggctggcggctagggagaggcgc

SEQ ID NO: 105639 - DNA, 122 bp, Homo sapiens
gagacgctgggctgggaaccgtccaatcaggaacgcagctggtgcggatagggcggcttccgggatgtggcggggcctttgtctctcgctgcagcctgagctctaggtcttgttttccctgc

SEQ ID NO: 105640 - DNA, 122 bp, Homo sapiens
caggctcgtgatattctaactcttcaaatataattgggctgcaattcgtggaggagccgtcgtgtgactgggaagaccccaaggggctctggcgggcctgactgctgggtaggagacacacc

SEQ ID NO: 105641 - DNA, 122 bp, Homo sapiens
ccaccgggccggctccgtgccgtctgtgagcacccctttgcgcctctctccacccctgcccgctgcctgctcgcttccgcagcctgtgtgtccctgtgtccatcctccacctgcacccgccc

SEQ ID NO: 105642 - DNA, 122 bp, Homo sapiens
gtatatttacataactcacacaaatattgtgggagcttagagaaaggaaggagaagataccgttactgacctcaggggatctattattctgttttggacatgagaaccacactgtgttctta

SEQ ID NO: 105643 - DNA, 122 bp, Homo sapiens
cacaccctcagggctgcccccatggcaggccctcagcctgagccttcacatacatcatgacgaggatggcagctcttcccagctactgagcacttgcttcccaagtgccaggttctgtgcta

SEQ ID NO: 105644 - DNA, 122 bp, Homo sapiens
aactccctctgaatctcaagacttctgggacgccgattccgctcctggcctggggcaaggcgtgggagcttggaagccagcgctgcgctccccgtgggaagcgatcgtctcctctgtcaact

SEQ ID NO: 105645 - DNA, 122 bp, Homo sapiens
ctggtggcttgtccgatttgcacggtgacttgattacactctctcattcatggtcacttccgaagcgctttagtgccttccgtccctaaaccgccaacagccagaacggcttctccccgcgg

SEQ ID NO: 105646 - DNA, 122 bp, Homo sapiens
acccaccctcctcgcgagggcagcgtccctagcacacgccctagcaccactctcctctgacgtccgcctccggatgtctgacgatcgcccccgcctgccgcccttataaaggggacttttcc

SEQ ID NO: 105647 - DNA, 122 bp, Homo sapiens
ctgagcgggggtgtcctgcgaactgagcgggggtgtcccatgaactgagcgggggtgtcccgtgaactgagtgggggtgtcccatgaactgagcgggggtgtcccgtgaactgagcgatggt

SEQ ID NO: 105648 - DNA, 122 bp, Homo sapiens
cccaagtttgttttctccagattcactgggtagggtcctgcccagctccagtggaggccacggatgcagggggcgacgcgctggctgagaaggaagtgcgctccctgagccagctcaagagt

SEQ ID NO: 105649 - DNA, 122 bp, Homo sapiens
cccaaagccggatgagaaggccatcatgacctatgtgtcctgcttctaccatgcctttgccggggctgagcaggtaaggcggcccaactgctgctgcctgggcttgtggacccaagggccca

SEQ ID NO: 105650 - DNA, 122 bp, Homo sapiens
gcgaatccagtgccccgcgaccacgctctcctctccagaaggagccccctccccgggctgcgaccactcacccagactgtgggacccaagtgccccgaaaccccgggagagcggcggagagc

SEQ ID NO: 105651 - DNA, 122 bp, Homo sapiens
tcttcccaaaaacccacaccccaattaagagacatctgacaaaatccctgaccagtcagtcgtcctcaaaccgtcaaggtcccaaaaacacaaggaaagcctgagagacggtcccagattgg

SEQ ID NO: 105652 - DNA, 122 bp, Homo sapiens
tcacctccactccttgcgggagtcggagtctcctccccccagaaaatgcatgagtgtaaacgctccctcaataccagagtgggcctgcccccctagaaaaaggaggacgagcccctcccccc

SEQ ID NO: 105653 - DNA, 122 bp, Homo sapiens
gtcgcttagccagaaagcctgggagtccaggcttgggtttgtctcctttgtggccaagagcgcctcccgggctctcggggcgtcctcccctgcccgccagagccggggcgccggcactgggc

SEQ ID NO: 105654 - DNA, 122 bp, Homo sapiens
cccctcgctccccgccgtcgggtcagccctgtcccggccttctggaattgctgaaccctgcggggggcccggctgagtttgttcatttatggaaacgctccccagacgacgctcgccgggcc

SEQ ID NO: 105655 - DNA, 122 bp, Homo sapiens
tcctgtcgcgctgctggctggcctcagttgtctgcaagcgagaagcaaggcctgtggccacgcgtttggacgaccgccgccccagggtcgctggagtggtctccacacggtgccccactttg

SEQ ID NO: 105656 - DNA, 122 bp, Homo sapiens
attttccttgtcttctgtattctcgacctttttagagattccgggctcagattccaggctcggggacgtcataggatgtctcttgatttgagtttgtctaatgtttcctcgggatttggctc

SEQ ID NO: 105657 - DNA, 122 bp, Homo sapiens
tgcttctgagtaggttaccatgaggcatgtgggtgtgcaggagggaagagctcccatctccggggatcttccatgacattctccatgacagcaggccaacaggaagtggcagaaccttcatg

SEQ ID NO: 105658 - DNA, 122 bp, Homo sapiens
cgcactctgcctgcagcggaagctgccggactaacactccgcgggtgtttccatggagaccgaggccgagcctgcgcggcctcacggcgttgccatggagacaactccggggctggggctcc

SEQ ID NO: 105659 - DNA, 122 bp, Homo sapiens
gcgtggggacaagtcacctgcgccacagcccgacacagcatctgctttggtgcagcaggacgcggagggaagcaaagggacggcgggtggacctgggacacagcagcggggcactcactggg

SEQ ID NO: 105660 - DNA, 122 bp, Homo sapiens
tacagcggcccgggagaggctgtggtggccccgagcgcgagtgtgtaggtgacaggacagcggccaggcccgcccctcccctcggtgagtacccggaagccgttttggggtcgcagcggggt

SEQ ID NO: 105661 - DNA, 122 bp, Homo sapiens
cgtcagagacctgactgtggagatggcggctcagaagataaacgaggggctggaacacctcgccaaagcagagaaatagtgagtgagaaccttccgggggcctgtgtgtagacgccgggtcc

SEQ ID NO: 105662 - DNA, 122 bp, Homo sapiens
tgcctgggaggtctcgcgattcccacgcttgggggcgacaagagttggctggagcagggtcggtcgaggctagttaacaggtgggagcaactttattctgccggtgtttaactgctgtctta

SEQ ID NO: 105663 - DNA, 122 bp, Homo sapiens
caaagtcacaccaaccaaggcagccacgcgccacacacacacacctacaaccccgcataccgcacacccagccgcttcccagggcttcgcccaccctcacctgccgtggccgcccccacgtc

SEQ ID NO: 105664 - DNA, 122 bp, Homo sapiens
tagattctgagccaggcacctcttctctctatgagtctctaagacctgcaaagctgagaacgagagtctgaaaaggagcttcatcaagtccagaaaatcctcaaagaatagaaggcatcaag

SEQ ID NO: 105665 - DNA, 122 bp, Homo sapiens
aatgccttagatccagttagccttaagaatgtctgcagcccctaaagcatctaagatggacgtttaatctagcccctgctcccttttatttttctggggaaaacagaggtccaaggatgtgc

SEQ ID NO: 105666 - DNA, 122 bp, Homo sapiens
gctgccctgttgattcctcagatttagggtctttagggaaaggtgaaagagggtacagggcggcccccagcaaggccgttcattgtccatcgagagcttctgctcatctggccctggagctg

SEQ ID NO: 105667 - DNA, 122 bp, Homo sapiens
gcgcacccggactcaggtctggggacttacagaaagggaggtgacatcaggaggtgggcacgcacggcctcagagacccccgcctccacccaagcagccgccactcacacgacgggcagccc

SEQ ID NO: 105668 - DNA, 122 bp, Homo sapiens
cccacagctcacctgccctccgtccacaagaattaggctgatctgtgcgctatgcaccggcgctctgtggcctcgggttcttggtcccaacaccgcagcgtcccggcgctgatctccgcggg

SEQ ID NO: 105669 - DNA, 122 bp, Homo sapiens
gactgagtttcccaacccaccgcagtggggcggcctcggatgacgtgcaggcgtgcagcccggacggccccaggggactgcagcaaaaacaaacatgccgggttgattccagcagaaccctt

SEQ ID NO: 105670 - DNA, 122 bp, Homo sapiens
ttgcgggtactcagatacagagttaaattacttttttcttccaatccaaaccttaaaggacggttagaaaatataaagaatctttattgctataccttctccctttgagaacttatttcctt

SEQ ID NO: 105671 - DNA, 122 bp, Homo sapiens
tgagctgggcgggccggggcggggcggccgggcggccggggcggggctacactcgggccccgcgtcctgctcccatggccgcccccggctccccgcgctgccccctttaccccgggccgcgc

SEQ ID NO: 105672 - DNA, 122 bp, Homo sapiens
acggtctggggtggctagggggtgcggcgcccggcggggatccgaatagggggcagccagcgtacggtgtgggaactcgggccggcgcgggagcctgcggtcaagggggctcagcactttgt

SEQ ID NO: 105673 - DNA, 122 bp, Homo sapiens
cggcgagtgctcggctcagggcggtttctggccacacgcagtttctggccacgcgcaaggcggttgccttttgaggtcccatgggcgctggggcccaactgctctgctccgtatattattta

SEQ ID NO: 105674 - DNA, 122 bp, Homo sapiens
tttgccagtctttgccatgcttgcaggtggtgaggagcacaacgtcctccccgttatggacgtgatataaggcattcctggtgtctgatcctatccctgtcaggtacctcttccccttgaat

SEQ ID NO: 105675 - DNA, 122 bp, Homo sapiens
ggcgcctcctcctcctctcccgcgaagccccctcccctgagggcaccccctcccccggaacgccccctcacctgaccatgccgtacgcgccctcgccgatgtactgcaactgcgtgtagcgc

SEQ ID NO: 105676 - DNA, 122 bp, Homo sapiens
tttgattgcaaaatagctactctcaaaatgcagacaggcagccacagtcagggagcccttcggccacggcagcggggtggcgccagacacctggctttgagtcccgtggaggcatgccactt

SEQ ID NO: 105677 - DNA, 122 bp, Homo sapiens
cactttgtcttccaattacatgctgatttgctaggtggctcaatgacaaggtaattaaggcgaaggaaacaaatgtagcaggcacagcgtggggtggacagtcagctgtcggtggcttctgc

SEQ ID NO: 105678 - DNA, 122 bp, Homo sapiens
ctcgtcggacctcgccgtcggaggcctcgcgtcgcacgcccagcacccggtaaaggtcggcggtgccgaacacttcctcgcaaaggtccagcagccccatgccgggcggagatacgaccccg

SEQ ID NO: 105679 - DNA, 122 bp, Homo sapiens
tgaatttaattctttttcaagcatgtggctgccataaagatgtgccgtccgcaatagagacgtatagttttggaaatacaaaggcagtgtggcattctgttgaacgattcggcagctgactg

SEQ ID NO: 105680 - DNA, 122 bp, Homo sapiens
ggaatactagatataaaacggagataatagcctcagagtgagtagtgccatcttgctttacggagctgcggcggcggctgccggaaagccacttccggcctgctccacggaggcgggcgcga

SEQ ID NO: 105681 - DNA, 122 bp, Homo sapiens
catcgagcgcccgagaaccatagtgggcaccaatgcgggctccaccccgtctaatggtagcgggtcttgggttttcctggctgtctccacaccctgccacccctcacctggctcccatcctg

SEQ ID NO: 105682 - DNA, 122 bp, Homo sapiens
aaaccgagatgcaaagtcctcccgcgctcctagagaggacccggaagcgcggcgcggtcccggaagacgaggtggtgacacgcttccggcctttgtgactcattgtgtctgtgtcgaggcgt

SEQ ID NO: 105683 - DNA, 122 bp, Homo sapiens
cgagttggggacgctagttgcggggcagcaggggtccacgcatttccaagcgccctttcccgtccaaggacctgctggggggatgactgtgcctcagtttccatcacccagcaaacgccgtc

SEQ ID NO: 105684 - DNA, 122 bp, Homo sapiens
gtcaccaggaaagacgctgggggaggttttgttgacagagagcgcgggagcgagcgcacacggatgcgtgcatgtcgggggtgaacatggcagaaaaaagcagcctcccagccccattcttg

SEQ ID NO: 105685 - DNA, 122 bp, Homo sapiens
gaatcacgcagctgactgcgtcgcgcaccaacaacaaaatggagctgacagctgctgcgtcgagactcgtctcgaaaacactgatgacgcagcgagcgcgtctccgccgcggggcgggtcat

SEQ ID NO: 105686 - DNA, 122 bp, Homo sapiens
ccctttgcccttagctacagtttccctctcttctctgacaggtagtgtttctgagtctcccggcctccagcactgcccatgttgctgctccacttgcccctccaccctggagtcaaaaaaca

SEQ ID NO: 105687 - DNA, 122 bp, Homo sapiens
aacggacaatctgcgttcacaactgagtctggggcctcccagactcccacggggaaacggcgagcccggcattggtggtccccgctggccggatctcacccagctcagcgcaatcttgtgcg

SEQ ID NO: 105688 - DNA, 122 bp, Homo sapiens
agccccactgctcagcagggccagtgtgggacgatatgctccactggcaggccaccataacgaggcccaacgacagctcctacctgggaggggtcttcttcctaaagtttccctccgactac

SEQ ID NO: 105689 - DNA, 122 bp, Homo sapiens
agactgggagggcaggtcagcttccagatctttaaaacgagacagactggaagggcaggtcggcttccagatatttaaaacaagacagaatgggagggcaggtcagattccagatatataaa

SEQ ID NO: 105690 - DNA, 122 bp, Homo sapiens
tgttcatttttaaaagtcgaaaacttcagcagaagaagagcaaggaggtgaatttctaatcgatttattttgctgaaattctgagagaaacactgtggtgtggggacagggaggagctcttg

SEQ ID NO: 105691 - DNA, 122 bp, Homo sapiens
ggagcggcagcagctcatcctgatgctgaaccgacaccgccccacctgcatcgtccggaccgacagtgtcaagacccccgagtcagaaggcaacccactgctcgagcagctcgagaagaagt

SEQ ID NO: 105692 - DNA, 122 bp, Homo sapiens
atgatcttgcaagctcacatcaagaccaagactccatcagtttgagtccttgagtgactacgatgagcagggtccacctgccaaccacactggatgcagcatgggaaggaaagaaactgtat

SEQ ID NO: 105693 - DNA, 122 bp, Homo sapiens
cacgtaattttaggcgttctaattggcagtttaaaaatagcagagtcgcaggctgctcctcggtgctgcttctcgctttgtttcgcccatgagtatgcactgtacttaaggagtcttaaggc

SEQ ID NO: 105694 - DNA, 122 bp, Homo sapiens
ggtttgcacggcctgctctcctgccctcttcttgctctgtggctgaacttcaattctcttcgggcttagaccccactgactcgctcccgggcaaagcaaacgatttgatcagatggccacgt

SEQ ID NO: 105695 - DNA, 122 bp, Homo sapiens
cccttccaggggaataatgggaaatgtagtctcccctccaggcatcatgggaactgtggtcgcctttccttttcctccctttcctctccgaacgcctccttccgtcagctcaaattcatccc

SEQ ID NO: 105696 - DNA, 122 bp, Homo sapiens
tccctgcacacctcaggggccacaaactgtccatgtcggtgagatgtccaggagtagtgccggggactggaaactagagtgaaaccatctcattggtcagaatgagaagtgctgtcatcttt

SEQ ID NO: 105697 - DNA, 122 bp, Homo sapiens
ctattgtggagctcaatcagtcctgcttgtcacaaaccatggtttgaccctgaagctgggcgggcagagcagtgtactagtgtaccagctctgttctacttttggggaactgcggtttccac

SEQ ID NO: 105698 - DNA, 122 bp, Homo sapiens
tctggatcctgtcactgtttcccatcccagagccaagagggctgcctggcatattccaagcgtgcttcccttccaggggcttcgatgctgcgctcaaccccgcgtcaactaaatgggtggga

SEQ ID NO: 105699 - DNA, 122 bp, Homo sapiens
acagcccctgcgatggggtcatattttgcactcacatacaagaacccatgagcctgcccacggtcacgcggctggtgagtgatgcacttcccaggagcacggtgacctcttcaatggccctc

SEQ ID NO: 105700 - DNA, 122 bp, Homo sapiens
tgtgtccagagagatgctgccctggggacccgacacaatggcaccttggttgcagccgtccgggctggcagctcacagaggcacagtggggttttctcatttcaaatgcctggcccctttcc

SEQ ID NO: 105701 - DNA, 122 bp, Homo sapiens
gtggcccgatttcgacccggctgggtttcgcggtggccatctcgcgcgcgctcgccctagcgcttcattcattggttttgttttaaaggccctggcggtggatcccttggccgcgcccgagg

SEQ ID NO: 105702 - DNA, 122 bp, Homo sapiens
ttttagcaatttaattccaaagcctggaagttgtctacggcaggaatgcaaactagaatgcgaaatgcaaagccttgcctgagcgaaaggtacaatttcatgctgacggtccacagaacaga

SEQ ID NO: 105703 - DNA, 122 bp, Homo sapiens
aagcgaaaataacacaatgacatgtacaatgtcactgagaggagctggcgttgttgattccggaacgctggcaggtgcaccgtgaatcggcaggtagcacatgatcctcagacccccgtgct

SEQ ID NO: 105704 - DNA, 122 bp, Homo sapiens
ggccaggccccattatagggcaattacccttcaggctgattggtgcagagacgctgtaaacgcacctttgcggaacacagacgacacaggaaagacgtttggcagtaatactacgacagcga

SEQ ID NO: 105705 - DNA, 122 bp, Homo sapiens
ccccagcacattccagacctgctcccttgggaggcggtgccaagacagcatcttccttgccgcctgatttccatgaggaacaatggctaaggaaggaaggtcctgggatggagagtgagttg

SEQ ID NO: 105706 - DNA, 122 bp, Homo sapiens
tggcttgaggctgggtggtcagagtagctgtccaaggtcagcactggccatggaggagcccggccacccgccaagctgcacggcgcctccgcctcgggtgccacacagccccccacggagag

SEQ ID NO: 105707 - DNA, 122 bp, Homo sapiens
gactttgtttattaatgccacaacaaacgtgtctctgaataagggaactgacaggacacccgtctctgcattgaaacctgattaaaagcaagtccagccccttctagtctctcaggagtctt

SEQ ID NO: 105708 - DNA, 122 bp, Homo sapiens
tgaagagatgtatagtggattggtggctttcagcagctgtggggaggtgggactgaggagcgactgctaatcaggatggggtttcctcctgggatggtgaaaatgttccggacctagatagt

SEQ ID NO: 105709 - DNA, 122 bp, Homo sapiens
ggaagcgcctccagtgtgcatgagcgtgtctgaagatggggggctcagggggcacgtttgcgtttggacctgtctgtgcgttctcctgcgtggcagtcctgatttccatgcttctggagaat

SEQ ID NO: 105710 - DNA, 122 bp, Homo sapiens
gcagattaacagtagaaacgagaactcacgtctccctcattcttaagaactggtaacaaacgtgaacatttttttcagcattaacaaatgtggaaagtttttcaagaactggttttagtgag

SEQ ID NO: 105711 - DNA, 122 bp, Homo sapiens
gccccccaatccctccttcccaatccctcctccccacccccaaccccgcagcccccgtcgcgcatgcgcaatgactcctccaggtccgcaaggcaggcatctcccggccttagtcaaagccg

SEQ ID NO: 105712 - DNA, 122 bp, Homo sapiens
tgaaagctgttattttaccccctatctgatcaccgcaggagaaccattcctaagatatcccgcttggccactcacatcttgtggcttatccacactgccttcgttaccttagtctaacatca

SEQ ID NO: 105713 - DNA, 122 bp, Homo sapiens
agcagaagaatccagccttggaaatacctttctttcaaattgcttgtccagctgcaatgacgtctgcatcagccacacccacatcacttccccttcgaaccttctcgcctccatctgcttcc

SEQ ID NO: 105714 - DNA, 122 bp, Homo sapiens
gcgccatcctttgtgtgcccgggaagggcgttccgggagccgggtcgggggctcctgactcgcactgggcagcatgacggtgcgccggctgtcactgctgtgccgggacctctgggcgctgt

SEQ ID NO: 105715 - DNA, 122 bp, Homo sapiens
ggcctagcacagcctgatctctaacatcataagtcagaaatgacgtcacggttacagccacgatactgatgacagccattcacaacacgctgggccagtgcgaaatcctgtcttgctgactg

SEQ ID NO: 105716 - DNA, 122 bp, Homo sapiens
atgtccttcttcctccgccttttcttctggggcatcattctgtcggctgccttctcccagcgctcgcaggctcactgtgccgcctcctcacacctgcgggaacctgagacctcctccctgag

SEQ ID NO: 105717 - DNA, 122 bp, Homo sapiens
ctttccccgcctaacatttcaagggacacaattcactccaagtctcttccctttccaagccgcttccgaagtgctcccggtgcccgcaactcctgatcccaacccgcgagaggagcctctgc

SEQ ID NO: 105718 - DNA, 122 bp, Homo sapiens
tgggcaccattgagcactgagtgaagcagactccgtctgcaatcccggcacctcgggaggcggaggctggcggatcactcgcggttaggagctggagaccagcccggccaacacagcgaaac

SEQ ID NO: 105719 - DNA, 122 bp, Homo sapiens
gcaggtggaggcgcatcttgagatcccgcgccaccgagatgtggagagatcgaaaggcagcgctgcaagggaccggcggtgaagccactcaccccctcggaagtagccgaggctttaggtcc

SEQ ID NO: 105720 - DNA, 122 bp, Homo sapiens
cgtgtctggccgccgccgccctgccccgtccctgcggccaccacctaatttattgccgtgcgtcctgctgctgtgactgcttttgtacctttgcaataaagaattttctggtttcagaccct

SEQ ID NO: 105721 - DNA, 122 bp, Homo sapiens
ctgagggtggtcggtgggaaccacggcaaggcctgtgtgctgtctcctcccggctccctccgtctttggagacgagggtgcctctcacaggagggtcctgtgacccactttaggggtgggga

SEQ ID NO: 105722 - DNA, 122 bp, Homo sapiens
ggccgacaactgggcaactgcgcagaccttctctggcatcacacacagcgcaggacggcgcgggacccgagcagctggcttacctgaattgtggcagcagcagtaacaaccccgaactagct

SEQ ID NO: 105723 - DNA, 122 bp, Homo sapiens
atccgtgagagcactaccccggcctgccggagccccagtcgacgcacagaaaagcctcggcggcacagacgcgggctttattaacatttggtagtgagcacggcccccagggcatcgcgggg

SEQ ID NO: 105724 - DNA, 122 bp, Homo sapiens
gcctggggaggcagtgaatcgtagacctcacccattcccttctctgacaccccccgcccccgatgcctgcaactcactttcttgtggcatagctcagagctccaggcctagaaaatcagagg

SEQ ID NO: 105725 - DNA, 122 bp, Homo sapiens
aagaacttgtgtttctaactccagaggtgcctggattcacagccaaaaatgcttcttcctcgctctccacagcccctcccatgccagacgccggctcggcaccccctcttcgctgtgcattt

SEQ ID NO: 105726 - DNA, 122 bp, Homo sapiens
ctctttcggctggctttcctctctccttccatctcccctctttcgcttcccttccctctgcgcccgcgcgcgcctcccagcacgctggtcagctcctcttgctcgcaagcaggtctggcccc

SEQ ID NO: 105727 - DNA, 122 bp, Homo sapiens
gattatcttctggcctttagggaaatgcgctaaaaccctaatatgtccactacccccaagcggtctctttttgaaggcgccgcacaaaatgtggtctctaccagcgcttggcctccaaggat

SEQ ID NO: 105728 - DNA, 122 bp, Homo sapiens
ccgcctctcggggggaggggcgtgggggcagggagcggatttgcatgcggccgccgcggccgctgcctgcgcccgagcccgccgccgccgccggagcccgcgcccgcgcccgcgcccggccc

SEQ ID NO: 105729 - DNA, 122 bp, Homo sapiens
ctgagcaagtctttgattcatggattcccagcaactctagctggaacaacttctttggctcgtattcctctggtatatgtgctgaatttagaattcaatcactggacaccaggaaaggcaac

SEQ ID NO: 105730 - DNA, 122 bp, Homo sapiens
cgacagccagctcaaagcaggcaagaaccggaaggggcggggacgttccccgtgagccttcgcggtgctggctgctcatctgcatacggaagttcggcacattatgaattatttattttcct

SEQ ID NO: 105731 - DNA, 122 bp, Homo sapiens
agagcctccccaaccaaggctctgctgtccaccccggtgagaaatggcgagagccacagccgggaggggctggccggcctcgtcctggatgccgagcgcaccctcggggagctggacagaga

SEQ ID NO: 105732 - DNA, 122 bp, Homo sapiens
cgcaactgggggtgggcccgtgggtcccagtacctggtccaggaggcagcgtctccctcccgtccgggataagacaccccctccgcgggtcccctgtccactctggagaggcagcccccact

SEQ ID NO: 105733 - DNA, 122 bp, Homo sapiens
ggtggttcgcgattttttccccggtcctctgctccgtccctgtcgactccggaccagggtcgtgactccccaccccagcccctggctacctgggcatatgagggtcacctcttccaagtggc

SEQ ID NO: 105734 - DNA, 122 bp, Homo sapiens
agtcaccaggaggcggaggaggtggaggaaaaggagaaggaggagtgcactggccgggatcggtgcagcgctcacactcactcacagtcactctctctgagcgcgtctcgctcgctctcata

SEQ ID NO: 105735 - DNA, 122 bp, Homo sapiens
ctgacttgtgatctgccctcctcggcctcccaaagtgctgggattacaggcgtgagccatcgtgccaggccaggtcttggagattttcatactctgatctggatctttattacagcagacat

SEQ ID NO: 105736 - DNA, 122 bp, Homo sapiens
ctcgcccgatggaccaagcaggcagtggcagcgctatgccccggactgctggagcaaatccgaccttgggctggttggttggcgccaggactgtcactgtcgtcctcggggcggcagctttg

SEQ ID NO: 105737 - DNA, 122 bp, Homo sapiens
gtggcacagcacctgccttaatatttttaacattatattgactccttttgctgttcctctcgaagaaaatgtcttccttggaaaagtgtggtgtctaaccgatcccaatagcgctttaaccc

SEQ ID NO: 105738 - DNA, 122 bp, Homo sapiens
cgagcacacatcctcctcctctgtggcaggacggggcgagcacgtgcacctcgtgaccaccggctctctagagccccaggcagaggcccagctctgcagtagggaaggcatcgggagtgcca

SEQ ID NO: 105739 - DNA, 122 bp, Homo sapiens
aagtcaggaggcttcttgggacacagggatgccagtgtcggagagccaggggcagctgcgcggcgttgcctgcggagccctgcacacagggagtgattgggggcggggcggggcgggggtgg

SEQ ID NO: 105740 - DNA, 122 bp, Homo sapiens
ggttataacttaatgcaatgtactttatattgctgctcaaattgtcccaggcgcggcccccggaagctctctgggtagatccctgcgcccttggacgcccggtccttcagttttttgagcac

SEQ ID NO: 105741 - DNA, 122 bp, Homo sapiens
gattgtgatattgaggcttccctttgcctttcctggatgttgcctctaggccagatattacgatttaaaatgacataacatgacctcatgaaaaatttgaggtctaacttcgtgaactccaa

SEQ ID NO: 105742 - DNA, 122 bp, Homo sapiens
tggagagatgaagacccagctgccgtgggacttgggagggctgcagagggagagaagagacgactgtccatggagaggaaaaagacagtttaggatttggaggggggtttgacaaggggctt

SEQ ID NO: 105743 - DNA, 122 bp, Homo sapiens
tgttgtgatgaagactcttgagacgtaaaatgtatgctctaactgcagacctgtgcagaacgcgagtttgatcttcaagtgactttcgttccagccttgatattcagatgcagtgcactaat

SEQ ID NO: 105744 - DNA, 122 bp, Homo sapiens
gaggccctggccctgttctccatgccacatcccaagctctgtggctcccagtagtcagtgcggcatgagaatgttctcccagtatctcccgatcctccactcagttcaatttattgagcacc

SEQ ID NO: 105745 - DNA, 122 bp, Homo sapiens
gtgttgagagttaaaagcggaatctgccgacagcttcgagactgagcaggacagtggaaacgtctaattttattaggcttgaaatgcagaagatgagaaagaaagttcccgtttgtttgctc

SEQ ID NO: 105746 - DNA, 122 bp, Homo sapiens
gaaatgaaagtgggttgcgcgttgcagtcgtggctggaggctgcagtttggagaacagcccgtaggcgtggcagttcactcctgttgcattggaatttcatttccttttgatttggtttgta

SEQ ID NO: 105747 - DNA, 122 bp, Homo sapiens
acatatttgcatttctactgaagatgactttaaccttaactcggtgttttaaacccaccccgaagtttcactggagttgcttttgctatttcttttttttagcctgccacggggctccttta

SEQ ID NO: 105748 - DNA, 122 bp, Homo sapiens
gatgctcttccacattgcccagggcagggctctgaggggcaggcgcaggaaccagtggagcgacattcttggcagcctgtttgtgctcccagcagagaggctttgttctaggcccaaattcc

SEQ ID NO: 105749 - DNA, 122 bp, Homo sapiens
tgtgcgtgcgccggtggcttaagagctccgacttgcgcacgaaggccttgctgcagtgggcgcagacgaacggcctctcgccagagtgcaggcgctggtgctggcgcagctcggagctgccg

SEQ ID NO: 105750 - DNA, 122 bp, Homo sapiens
gcgcggcgacttctcgggctcggtgcagtcactcgcggcggccgctcctctcagggtccgcgggaaactgcccgagaccccgccctggcctcgccctgcgctccagcgcctggccaggcggg

SEQ ID NO: 105751 - DNA, 122 bp, Homo sapiens
cctccgtatccctattttcatcttctccatccatgcgcattgtgtgaaaaccctgcactgcgtttgtgatcctgcctgctttccctgggcacgtgttgctgcgtgttcacgcaggggagagg

SEQ ID NO: 105752 - DNA, 122 bp, Homo sapiens
agatgtgcacagcttccccaccaggtgagcagcatgtgtgcagggtgaccgtgctgtcaccgccgtcactgctgctagggctctgccatccctgagtctgtgatgatggtgactgtcaggca

SEQ ID NO: 105753 - DNA, 122 bp, Homo sapiens
ctggcgtggacgtggcgcagctggcaggtccgggcctctgaacttcaccccgaatctggccgcgctcagcagccacactgtgtggagaccgtgctccaccacccagagcggcaggcgggaga

SEQ ID NO: 105754 - DNA, 122 bp, Homo sapiens
aagcttgacactgagtaaaagactttccgttccttctgtaaggagatacattaatgcagtcgtggaaatgaatatccattctgtggttttgaacctctgaaagtagcacttgggcaactaaa

SEQ ID NO: 105755 - DNA, 122 bp, Homo sapiens
ggcggggaggggacgctcgcggggtctgcatggcgagggccaggcgacaggaggaggtgacgcctgcgggcaaggggcggcgaggtgagcggcctgcagtcccgctcgtggccacaagacgg

SEQ ID NO: 105756 - DNA, 122 bp, Homo sapiens
ccgcgggtggcagcctgggtggaggcgctgcgctgcgacggcgagactgacaaacactggcgccaccgccgggattttttgcttcgcaacgccggggacctggcccccgctggcggcgctgc

SEQ ID NO: 105757 - DNA, 122 bp, Homo sapiens
tgtacctctttgtaaccctagatggaaagcaacttgcccagcacaggagggcccaagtgacgcttttcccgtgccaccccttctctgggcagtttcctttaggcgtggtccccctcctgagg

SEQ ID NO: 105758 - DNA, 122 bp, Homo sapiens
ggtgagtaccaggcagcctcgggttggcgactcgagctcgaagcctgcctttgggggctgcgcagaagagggacggagctgagggctgatgggggacgcgacggcaggggtcgagggggcgg

SEQ ID NO: 105759 - DNA, 122 bp, Homo sapiens
gcggcgtctccaccgcgcgctccaggcaccgcaggtaccacggccggtgcctgagccctgcggagtctccagagcacccgaggcccggccttcccccatgtcgggctcgctcgcccctctag

SEQ ID NO: 105760 - DNA, 122 bp, Homo sapiens
gggaaggcggataggagtctttgaggcctagtgcaaagtttgcatcagtttctgcgggggcgacagtgtgacttcgtaaatctgccattgcgctcgggccctgccctccaaactgagggtag

SEQ ID NO: 105761 - DNA, 122 bp, Homo sapiens
aacttcggaaattagagtttatgatgttaaatttctggcataccacatacagaaagatcccgtaggataaatagggcaggggtgcatgcaaaaaaagagaacatataacctgtgataagtta

SEQ ID NO: 105762 - DNA, 122 bp, Homo sapiens
ccggctccgctaatttctattttgacagtaactgtggcgagtgggcggcgcggcggggggcgcccgggactggcggaggctgcgggcgggagtcaggacccgacgcggaggcggagtggggg

SEQ ID NO: 105763 - DNA, 122 bp, Homo sapiens
ccgccccacatgccggggacgtcgacttactccctcccgctggtcacgctgctccttggacgaacgagcatagcgccccttaggggctgggcacggcatgtccaattcttaagtggttgcat

SEQ ID NO: 105764 - DNA, 122 bp, Homo sapiens
cgctgtggttttgattagctgttctgcgaggcgggcctgctggtgagtccatgggagctccgctggaacagagggtcccccgcccggccgccgcggccccccctcctggcagccccagactc

SEQ ID NO: 105765 - DNA, 122 bp, Homo sapiens
acgttgatctcgcacataagcttctttgttacccaatcaagggcagccacatgacctcggcgccctccaaaagccaggtgtctgttggaggtgaggggcaggcagggtgttaaggcagggga

SEQ ID NO: 105766 - DNA, 122 bp, Homo sapiens
tttttttcttttcttttctctcttggtctccctctctctttttctctcccttctcactcacgtatttgcagggagtaatgaagctctggagacagtcagagcagagccctcgaaagtgtggg

SEQ ID NO: 105767 - DNA, 122 bp, Homo sapiens
gaaaaaaaaaaaccttgaaaaaaatgggtgtaaccctgggctttgatacaactggcctttcggcccccacttgagatttgcacatccccaagggaagctgtggtttggaataagatggtgca

SEQ ID NO: 105768 - DNA, 122 bp, Homo sapiens
tcagaattactcttgataacatgctaacctcccccagatactgtatattggatcctaccacggtagtgagcatggttaactcctctttagcacattttttctaaaaatcattttattttgca

SEQ ID NO: 105769 - DNA, 122 bp, Homo sapiens
gcctccctaggtgccactgaggggagttctttgccccaagcctttcgggaaagctcagggcgtgggggcagaggggctcttgttttcaccttctcgaaattagagccagcgtgctacacctt

SEQ ID NO: 105770 - DNA, 122 bp, Homo sapiens
ctccctgctcagtcacccaggcggagcagggctcgctccccgcggccctggtgccctcgccggcatgtgctgcctaccagaccaggttttggaaaatgacgatggtgaggtctgttcatggt

SEQ ID NO: 105771 - DNA, 122 bp, Homo sapiens
gcagtaaagcagtgagcttcccacactggaggtaagcagtaagactctggaaaccaccagcggggatgtctctcagaactactgtcctcagtgagacctctctcattccagaactcaccaaa

SEQ ID NO: 105772 - DNA, 122 bp, Homo sapiens
cccggctagggatgctcgaagccggcgcgtccaccgctcaaccgagaccccggcaaggagcgggctctcgtcacttccggcgcccgcctacacgcacttccgttcgtccgcaggcgggccct

SEQ ID NO: 105773 - DNA, 122 bp, Homo sapiens
ttttttgtcctcccccatgtcaggtttctcttcttagtttctccttgtggcaggtacagtcgctgcagggccagccgtcatgtttgcatatagcctgcaagaaggaggaaaaagggcacacc

SEQ ID NO: 105774 - DNA, 122 bp, Homo sapiens
aagcacagcccagcacagagtacgtgcaataaatattagctgctttattctcatctttgccgaaattcagctgtccatcaatccacagacaagtatttgtcagacgccagttaagcgcccaa

SEQ ID NO: 105775 - DNA, 122 bp, Homo sapiens
tcatcctggaaatgtattccaaggtgctcagtcaattttttccttttgaacaactaaccacgattttcagaaaacaaaatgcatctggctgattaagtcactgaatcagccagaagcttcta

SEQ ID NO: 105776 - DNA, 122 bp, Homo sapiens
ctcagtccttggtactttcgtctccctcagccggaggtggcaaactcagacatctacgggcgcccgaggccctcgcagccctgagccccagctttcacttccctgggctgcccctctccggg

SEQ ID NO: 105777 - DNA, 122 bp, Homo sapiens
catcctttttgctcccttcattaggagggagggtcaggtgtggcggtggtcaccggagcccgggctgccgaccctgcagaaaagcgccatcctccgcccgccctctgcctcccacggtgctg

SEQ ID NO: 105778 - DNA, 122 bp, Homo sapiens
tagattctgaccgatttcactctgacattggaaagggtcctacaaagaattaggttccaccgttataggtgctagcttacagcagcggttcttagacttttggccttaggacttatttacaa

SEQ ID NO: 105779 - DNA, 122 bp, Homo sapiens
ccccgggcccctggattctgagcacgggcggagatcaccttctggacccggaagaatggtcggtaggtcagtccgtccccgctacggtccccgccgggcttccggtcccgctggaaaaggtt

SEQ ID NO: 105780 - DNA, 122 bp, Homo sapiens
gaaaatttataattacatttgcggctcacatgagactagcattttatttccattggacagcgctggctgagaacaaaacctaaccctctgtgccgccctcgcggccgggatgcggtgcgccc

SEQ ID NO: 105781 - DNA, 122 bp, Homo sapiens
tgtcatggtcttacctgtcggcggggcgtaagcccgggctggagacgggatggttggccccggactcatagaagcgctggggccacccgccggccgattcaggagacggcgtcccccgtccc

SEQ ID NO: 105782 - DNA, 122 bp, Homo sapiens
gtgcacgactcgtcaaagcctgaacctgattgttcagtgcgacccctccccgagcgtccgcgctttcacactcaggctgctcccggcagcgggaagctttaagcgatctgtgcatttccttg

SEQ ID NO: 105783 - DNA, 122 bp, Homo sapiens
caggtgagtcggacccgtggctgccgcctgccctgtgtcgaacaagaaaggaccggtacccgctgccaccaatggctgtaccagtgataccaatggacacccacaagtggaggaaccccaga

SEQ ID NO: 105784 - DNA, 122 bp, Homo sapiens
ccattgactggacaaaccatccccaatgctgactctttgacctatagtcagctaactccccgggacctgcttcggatccctggagggctgaggattgaattcaggagcctagggattctccg

SEQ ID NO: 105785 - DNA, 122 bp, Homo sapiens
tggtcacacagctcagtggctgctatgtggaaatggcctctccttgcagccaggggcagccggcacctggaacagcaatgaactcgactaagaagttattcccatgcagcgagtggcactaa

SEQ ID NO: 105786 - DNA, 122 bp, Homo sapiens
cgctcactgacctggagaggtgcttcaagatttgtttcttgatgatcccggccatggtaccgaggctggagacgccgcggtctcgtcctgttgctcactgcctcctctcttcgtggccgtct

SEQ ID NO: 105787 - DNA, 122 bp, Homo sapiens
cgtggccaccggcgcgtccactcagacgagcggccctacccttgtcccaagtgtggcaagcgctacaagactaaggtgggtctctggccgcaggaccctggcgcctgatccccccatcctgc

SEQ ID NO: 105788 - DNA, 122 bp, Homo sapiens
tctatatggaatgctccccctttctaggattacttgaaaaaatcaagtcaattcgaattacgtagctgtaaaacattgacatgtgtagtttttacagattcagaatcttctgtgtgatttaa

SEQ ID NO: 105789 - DNA, 122 bp, Homo sapiens
cacattcttgagctggagcaggtgctccaggcgccttaccttcatctgcaggacctaagccgcaccgcgcaggcgtcaagcctggcggtctgctccctcctgcccggcctctgctggccgcg

SEQ ID NO: 105790 - DNA, 122 bp, Homo sapiens
gggtccccccggcttccccgggaaagggtcggggtgcaaggctaggccaggagtgcctggcgagagggccggagcaggacacagggggtcagcggcagggcagggcgctcccgccgcggtgc

SEQ ID NO: 105791 - DNA, 122 bp, Homo sapiens
tcgagcgattctcttgcttcatccttatggcctcttgagccagcagtgctgctgctgcagcggccaaggttgggcgatgcaaaccccaggcgcagagccgggatctggagaagcagagaagc

SEQ ID NO: 105792 - DNA, 122 bp, Homo sapiens
cctgaaccagtctccgatgtccgacatcttcgacccacaggtagccaagatgcacaagaccgcccgactccccgtgccgaccccctcacgacgcggccggctccgcgactgttaggtgtcta

SEQ ID NO: 105793 - DNA, 122 bp, Homo sapiens
cccagggaggaaggcagggcatggggccaggtggtgggcagacaacgctggaggcagaaccgaggagctgagccgcgtctggcaccaccagggagtagaggcatcctgtgagccaggaccgt

SEQ ID NO: 105794 - DNA, 122 bp, Homo sapiens
cctgtgtctcagagagcatgtgctggattccgcatgtgccttttcctcattggttggtggcgttgctgctcgcccgtgtgataggtttccacagtaatctttatgctgcattagagacatag

SEQ ID NO: 105795 - DNA, 122 bp, Homo sapiens
gctgccagtgaggtttgtttaataagctcttttctcccctcacacgtctgctggctttcccgtccacaggccacctgggaccaggttttccagtccctctgcagccccctgcatgtgtctgt

SEQ ID NO: 105796 - DNA, 122 bp, Homo sapiens
catcaccaggtgactgctgcctcccagagagctccctcatgaaagccccgtaacccaccacgctgcactgtttctatagcaaccagaaagaaaatataaagcaagcagtttcacatgaaaat

SEQ ID NO: 105797 - DNA, 122 bp, Homo sapiens
cgtgggctggaggagagcagctgcttgctgcttgggaacacgctagggtgaccctgcgctcgcgggatctaagctgctttggaggcagaacagcttttacttatttacaaacatttcattaa

SEQ ID NO: 105798 - DNA, 122 bp, Homo sapiens
gggttcatactcccgtgagaatctaatggcgccgctgatctgacggaggcggagctcaggcggtgatgcgagggatggggagcggctgtaaatacagatgaggtttcgctcacttgccgtcc

SEQ ID NO: 105799 - DNA, 122 bp, Homo sapiens
agggggaactagaaagagattgtaaaaactaggggcagtggcagagaagtttctttcttacgtggaaagatgacaagtagggagaaacaatgttctctggcaggtgttttgtaaacaagatc

SEQ ID NO: 105800 - DNA, 122 bp, Homo sapiens
atgcagaaaatagcagggctatgggaaagaaagagaccaggttagaaaagtcatttgaatcggatctgcatgaaaaaaggcactttagataagacctgatagcaaagggctgtaagaggaga

SEQ ID NO: 105801 - DNA, 122 bp, Homo sapiens
gaggggtagctgagactgataattgccctcccaaagctattcttccatttttccttactacggaactcttgttttgtctaagatggcaatatgcctagagaaaagattacatatcccagatt

SEQ ID NO: 105802 - DNA, 122 bp, Homo sapiens
tgcctcctcaaaggggactattaaactctgcgcattcaccaccagcctgtcctttcctctcggagacccttttctctatggagagaggtgtttctctttttcttctcttctccctattaaac

SEQ ID NO: 105803 - DNA, 122 bp, Homo sapiens
ccaccagatatctgtagtacaaactcattttatcaaggaaagataagaatttcgtcttgtcgaggattgctttccaggttccaggcttctctgaggttttctagttatttctagttatctcc

SEQ ID NO: 105804 - DNA, 122 bp, Homo sapiens
gaatgaatcatggccccaagctgcctctgtgtgccccagcatccctactgaatgtcaccccgccagtgccttcagctgtgtacctctcatggtaggacacgattactcctccagattccagc

SEQ ID NO: 105805 - DNA, 122 bp, Homo sapiens
gccaccggcgtccccacgcatggagccccgacctggacagaggagattgcggtgggttctcgccgtcgcggtgctcccgggagcgccctgcgaccctggggccaggccccctgtgctgccgc

SEQ ID NO: 105806 - DNA, 122 bp, Homo sapiens
acgtgtcgcttggcaaagccgtgggcctggcagtggggttagcctttcccactcaggaaccgcgctggccacgtttctgccggcatcagcgcccctgagctgctttccaaagcgcggcgtca

SEQ ID NO: 105807 - DNA, 122 bp, Homo sapiens
agggcttacagggggtttttccggacatcaatcatccccgggctggctcgtcgcagttcccgccggggcttggacaaaggcccaaagttccagggcaggcctgcctcacccacaggaagcac

SEQ ID NO: 105808 - DNA, 122 bp, Homo sapiens
cccgcgtggacacagatggcaaatgctgaggagggcgtggggcagctgcgtggacacagacggcaaatgctgaggagggccgggtgctggcgggtggctagagggcgtggggcagccgcgtg

SEQ ID NO: 105809 - DNA, 122 bp, Homo sapiens
ctctgtcattggtcactgctgccacccggagacagaaggcgccgggctcgtaccggcggccgctgaagtctgcctggtaacagaatctgattggtcaataggggagggaaaatccaaagttg

SEQ ID NO: 105810 - DNA, 122 bp, Homo sapiens
cgcgcacacaggcccacaggtagctctttgatatctaaatttctgcagatgcttggagtgcggctgcctccccctactccctcttcccctcccttatatggttaaaaaaacaccccagagcc

SEQ ID NO: 105811 - DNA, 122 bp, Homo sapiens
gggctgccatggggggctcactttcctgatgccagggctcctccaggatgccccctctgacggcctatgaaaccttgcacatcaggcagcttcttcctaaggcctgcctgactccggcgaga

SEQ ID NO: 105812 - DNA, 122 bp, Homo sapiens
ctgggattcccactgggagcctaggttccgattgctcaacttcgtctggaactcagacagcgggcaccagcttctccaacccgcacgtgagactcccaggcttcccctcctgattccagggg

SEQ ID NO: 105813 - DNA, 122 bp, Homo sapiens
agcagaaaggagaaccccagcaggaacacgcgttgcaggaaccccaccgccgaggctggtcgccgactctcgtgtgggcacccgtgcagctgtccttgtttcctggagaaagcgtggcactg

SEQ ID NO: 105814 - DNA, 122 bp, Homo sapiens
cctcgcacgcccgcccgctcaggacctgcgcgtgggctggtctctcgagccgcttcccaacgtgcctcttctgagcaaataagtcataaacaaagcaactcacgtgcaatcaaatagtttac

SEQ ID NO: 105815 - DNA, 122 bp, Homo sapiens
taaaaaatattttgttttgcaattttccaaatacagtagcctcacagtgcatatagcaatcgtaagactttatcaacctctggtttccgaactcacatccaacattcatcactttcctctat

SEQ ID NO: 105816 - DNA, 122 bp, Homo sapiens
ttgtgtcgagggggagcgcctggaaagtttcctcgtacagatacgagggtccaaaagccccgaggagagggaataatgagaaggggagggcgcagggttagaggtcagggtctcgaccaaag

SEQ ID NO: 105817 - DNA, 122 bp, Homo sapiens
tagggcgcacacgcttccccgcactcgcttagagccacacaccccacgtaatttcattaacgtttaaacttaaatgccaaaaggcatgcacgatttgaacaaagaactcaccagtctagccg

SEQ ID NO: 105818 - DNA, 122 bp, Homo sapiens
aagttgggctgtgggtccgtctctttcacttcttgggttacagtgcaggcgtgtgacgtccgctccacatgacgggggcggggggcggggggcgggcgccggggggcgggggcggcgggcca

SEQ ID NO: 105819 - DNA, 122 bp, Homo sapiens
tataattactccctaaattaaaccattagatctgaaactgtttgcatttgcggataatcacgaaaggtcatgaccccagaatccatctctcctaccagggttgtctgcctgtaccaataata

SEQ ID NO: 105820 - DNA, 122 bp, Homo sapiens
tcccacttaaggacccttccaccctatacgcagcttctcagggtccctccgcctctcctgcgccccagtgctcgctccgatgccctcgcccctgaagccgtacccgccagctccaggatgtg

SEQ ID NO: 105821 - DNA, 122 bp, Homo sapiens
ttttttccccgttttttcttcagaaaacggacctcagaaaaccaggactagctctactgtcgggggcagggtgaccccatcagtaacctacaacccctctagaacttcacaactccctctca

SEQ ID NO: 105822 - DNA, 122 bp, Homo sapiens
ctggcccactggtccagggagctctgctgctgcagggtcagcttgaaatcctgctccagccgctgcaccacactctcctcgcactggcacacccacgaggcctgctcctgtgggcagggcag

SEQ ID NO: 105823 - DNA, 122 bp, Homo sapiens
gaccgtcaaactctgcccttgaacacaggccttaagcttcctacttgcacttcaaatgaccgagaccatcaagtatgccatcgagtttgtaccacaaagccattttgattagtggatatcta

SEQ ID NO: 105824 - DNA, 122 bp, Homo sapiens
cggggccggcgcggcgaggacggcatagcagggcccagcatggagcaggtgagcgggcgccgggcgtgggtgcgcggccgagaggggagagagagctgcgggcgttgtgacccggcgaggtg

SEQ ID NO: 105825 - DNA, 122 bp, Homo sapiens
gcttcagggatgggatctgggtgggcttaactctgggcctactccttagagatgggaccccgcgagcgcccacccaccttggagattctccttcctcgagggttttacagcccgggaagctc

SEQ ID NO: 105826 - DNA, 122 bp, Homo sapiens
cggtccccagaagcttcaggctgtcaggcccttgagtagtaactgctagtgagcccacttcgcttccttgcgagggtacctcgaggatgagaacagtaatcggtcgaattcgctagtcgtgt

SEQ ID NO: 105827 - DNA, 122 bp, Homo sapiens
caggctctaccctgtgacttggtgcatagggcgcatgcaacctcctggcaccagcccccacgagggttggggatgacagcattcattgggatggagtggaggagctggtagctgagaactca

SEQ ID NO: 105828 - DNA, 122 bp, Homo sapiens
ccgaggttacaccatctccgactcggccccatcacgcaggggcaagagagtagagagggacgccttaaagagcagagccacagcctccaatgcagagaaagtgccaggcatcaaccccaggt

SEQ ID NO: 105829 - DNA, 122 bp, Homo sapiens
gagagataactcacttctgttttattttttattgctctatttttgctttgtaagtcaccacgaatgtaggcaggatagaaatcctaagtacaccaaagtgggaagtgctacaaattaaattg

SEQ ID NO: 105830 - DNA, 122 bp, Homo sapiens
ccatgacagagagacatttcttcaagctctctgctttcctgagggcctgggaggggacaccgggtcaaccccaagcaggaggtctgagtcagactcactatcctgtgtctgagcagctgcgg

SEQ ID NO: 105831 - DNA, 122 bp, Homo sapiens
gacccccgaacggttcagcacatatttattatgactcagtttcctcatctacacagtgcacggtcttgtaaggccagtggaaataagagcacacacacagcgctaaataaatggtacttcct

SEQ ID NO: 105832 - DNA, 122 bp, Homo sapiens
tgctctgcctgagaagtattctggtttattgaattaaaatcattttaagaatttttttttcggataaaatgtgaagactcaaagataaggatacattcagtccagtatttgcccttgctcaa

SEQ ID NO: 105833 - DNA, 122 bp, Homo sapiens
tggaaagattccaagcagcatctcttctctccggcaagcagcattctcctgtgggtcactcgggccctgataagacagatcctctgtgtttgactataaagcagtgactcatccttgccatt

SEQ ID NO: 105834 - DNA, 122 bp, Homo sapiens
ggcaaagagaactgggcacagattgttttggagaaatctctattttaatctattcctatacgttagttattgaaaaacaatagccaatcgcaaaaaaaacaagttgacttttttgtgttcct

SEQ ID NO: 105835 - DNA, 122 bp, Homo sapiens
actgaaacaggtggtactaaagggttttcagctacccccagagtactgtgggaggagaggcgccctcccaggagcagggtgtagcggtaatcctctgactaataatcttcctgcgagttgag

SEQ ID NO: 105836 - DNA, 122 bp, Homo sapiens
tttcactcttttctgcacagattccagggaagtatcctggagacagacatcaaaggcatccgagctggcagcccacaacaggtcacgctgtcacggggacgccgggaaccacatgaaaagca

SEQ ID NO: 105837 - DNA, 122 bp, Homo sapiens
accttccccagaaccaggggaggcctgaggcttcagttttactctgctgcaaaatgaaggcgggcctgcaagccgactacacctacggaggctgttgaggacaatttcattccattaaatta

SEQ ID NO: 105838 - DNA, 122 bp, Homo sapiens
ttagtgactgccttgtcaaagacaccaggaaaatcacaagggtgttcctgcctgaacttccgagcagggactcagatccccgagagcaggggcctctttatgtgtttctgtgtcttctctga

SEQ ID NO: 105839 - DNA, 122 bp, Homo sapiens
ttctctggccgcagtgtggagttgtgctgtgccagccgcaagcccaccatggccgaagcacgggctgtctccaggaaggctgccaacacagccaccaccacgggtccccgccagcccttcag

SEQ ID NO: 105840 - DNA, 122 bp, Homo sapiens
aggctaagtaggagttagcaagtgaaagggacaggtgatcctggcagagggaagcacatacgcaaagggcaaatttcaggagttcagatggagcaggaagcatgaggggtgtgtgtgtgtgt

SEQ ID NO: 105841 - DNA, 122 bp, Homo sapiens
gtgggacaagagctacaggatcaaggctaaatctgagacctgaagttgagtgtgaaaacgcgagctgcagcatgacacatgctataggactccattcacagaaaactttgaagaacaaacta

SEQ ID NO: 105842 - DNA, 122 bp, Homo sapiens
ttacctgaaatggttctgcactccaaagtaactgaaagacttagagctctgcatgtgattcgacactttccacaggaagagggtggtatccttgcatcctgaggataaagactttaccagag

SEQ ID NO: 105843 - DNA, 122 bp, Homo sapiens
atgatttccattagcttatttttggtaaataagaaaaagactatatattttcctggatgtcgtctgcatttgggggagccccagtgaaacacatttcaagtttttgggacacatggaaatta

SEQ ID NO: 105844 - DNA, 122 bp, Homo sapiens
gcgagcgactccggatcttgtggctatttatccgctccagactttttggcctgccgggatcgcaggagcctggggttggaatgtgcgcggcggcgtggagggggagagaaggaggaaagtgg

SEQ ID NO: 105845 - DNA, 122 bp, Homo sapiens
gcctggaggaaggagcacgtgctatgggcctcagagggtggcagaggaggtctgcaggggcgagaatctcggacagagccgaggcacaggtgagcggtgcccggcacagcagcctggtagat

SEQ ID NO: 105846 - DNA, 122 bp, Homo sapiens
tccattcccagaatatgtttgctgctttttcctctccccactggcctaaatggatcgctccgcctgtttcctccccagcacctagggcgcaatggaatattccattgcccctcctgtcctgg

SEQ ID NO: 105847 - DNA, 122 bp, Homo sapiens
catttccattttcaaatgcaatcaaggcttcctatatacgggcggaaaggcggcttcctccgctgagaaagctgaaggtccttacctgcggcgtacggactgctctggtggtccctgagggt

SEQ ID NO: 105848 - DNA, 122 bp, Homo sapiens
agagaagtctaatagtggaataaatcatgaacattcacttcagttctcttctgcttagcacggtaataaatataatcatactaatcattgacagtacaaatgataggatttttattgtgaga

SEQ ID NO: 105849 - DNA, 122 bp, Homo sapiens
ggccacgtgcattgtgtttcatgacctggggatatgactgtgaggccaagtcaagagacccgtcactgcctcttggaatggcctcagtcccatctggcaagacatattcaagttaactgaaa

SEQ ID NO: 105850 - DNA, 122 bp, Homo sapiens
ttttaataatggctgtgtttaacaaccagttccaaaattcctgagacataacaatcagctcgctccagccagatccagcacactgctgttttagaaggggaaactgaggctcaggaaaataa

SEQ ID NO: 105851 - DNA, 122 bp, Homo sapiens
cggtagggaaggagcgagtgcgcctggctgcctccgcacggagttgtccctctctgttttcgattgacacaaacacttctccaaaagcggggaaacctaagcaacaacagcaatcaacacca

SEQ ID NO: 105852 - DNA, 122 bp, Homo sapiens
gcaggtggagtttggtggacagctcaatgaggctgtcgatcgtctgcggatccatctcctcgtcgtcctcctcctccccgccctcctctgtcccctcggcctccttccgccggtggcccggc

SEQ ID NO: 105853 - DNA, 122 bp, Homo sapiens
gcggaaggcgggcacaccggcgactcttcaatgtcaccagcgaaatgggttccatatgtccgacccggcagagaagggaggggaagggagagagttctgggcaggacaggagtggggacagg

SEQ ID NO: 105854 - DNA, 122 bp, Homo sapiens
gtgatgaggatggctcagtccagaagagccaagcagactgtgtccctggaatagggtgagcggcagagactggcccacccacacccacaccgcactgcggggccctgctgtgcaacgggtcc

SEQ ID NO: 105855 - DNA, 122 bp, Homo sapiens
tcgccgctgaccccgcagggcccctgggtcctcgccgccagcagtctgagtgcggtgccccgacactgacatggcctccaggcagcaacggccttcccgggcagcagggcgcctcgtccgcc

SEQ ID NO: 105856 - DNA, 122 bp, Homo sapiens
gggttctttagggattcacccgcttgctttgcgccctccgcctcctcccggaaaatgggccgtgaacggctcccacaatgcaccgggcgctgccggcttcccttaagcattgcctgaataaa

SEQ ID NO: 105857 - DNA, 122 bp, Homo sapiens
gattataggtgtgagccaccacacctggccaaaatcttgtacgtgaatgttcatagtagccgttattcataccagttaaaacatgggggaggctgggcatggtgtttcatgcctgtaatccc

SEQ ID NO: 105858 - DNA, 122 bp, Homo sapiens
gacgaaaggcagctggggtgtgcgcccaaggcctggattcctggggagctgcgtttccaacgccgggtcccggccaggccaggccttccaggccagcgcggaggccagactatcagtcactg

SEQ ID NO: 105859 - DNA, 122 bp, Homo sapiens
cccatcgtgacccgggaaccactctgtattccgtgcgctgacaactcctgctgcctgctccgtatcctgcagagacttcttaaatctgagcttctgacggctgcaagatccctgtggcctct

SEQ ID NO: 105860 - DNA, 122 bp, Homo sapiens
ttgaaagtggctttatataaacgcattcatcttctacccaataacccaaaggttattgaacgccaataaccaaacgactcaggactgcgagatgattcccaaggaggcgaacttgtgcggac

SEQ ID NO: 105861 - DNA, 122 bp, Homo sapiens
cttgcaccgtgcatcgctctgagtgaggcgacttaaatgcgcgatgttaccgttttcagccgtgaccgtagcactcggtctttgactgtagactgttgtgtctacatagtgctagtttgtat

SEQ ID NO: 105862 - DNA, 122 bp, Homo sapiens
gaccaaaacagtcatcgccgtgggcctctggtgcagagccagtgctcacgctgcagtgagcgcctcttcattcgcctcccgtccgtttggggcagatagctgactctgcaaggagcctccac

SEQ ID NO: 105863 - DNA, 122 bp, Homo sapiens
ctacaagggcctctgcaggcaggaggctagtgaagacttagagcctgtagcgtggactcacgctcaggagagccatgaagccggggcctcgtctgcagctttcttcattcacgctgagaaag

SEQ ID NO: 105864 - DNA, 122 bp, Homo sapiens
caagagaacaggagacgtccctctcctgggacatcaactctcccaccacagggctgggcacgcaggatgctcagaagaaggagcgcttgcttgccttcagcttgtactgttcttgctgagag

SEQ ID NO: 105865 - DNA, 122 bp, Homo sapiens
gaggagccgcgcgtcccctcccgggataaacgctggtccctgcacacgtgaggagctgtgcgtcccttcccagaataaaggaaggtccctgcacacatgagggttggtggctctcctgaggg

SEQ ID NO: 105866 - DNA, 122 bp, Homo sapiens
caaggcgtgacaaccaaaaaatgtgtcccgacaatgccatacatccctggggagcagtgtcgcctgacggagagcggtggcactgaggctgctgtgagatccagcgaacgggagggttgggt

SEQ ID NO: 105867 - DNA, 122 bp, Homo sapiens
actgcctgatcttgtatgtggaatctttttttaaaaaaaaaaaaagagtcaaatacttagcgcaaggaggaaatggggatgtgtaggtcaaaggtacaacttacagttacttgggttaaata

SEQ ID NO: 105868 - DNA, 122 bp, Homo sapiens
ccctgctgctcagggtacttctgtttgcagtaggtctccagtgatgcatacactttctcccgcaggacctccacctcactagggttggagaggcccttggcatctgggatggcagggaagag

SEQ ID NO: 105869 - DNA, 122 bp, Homo sapiens
tcctcggcgacctgggggcgcgacctccgtcaaagccgcaggacccccacccgcctctgccggaccccaaagccaccagcctctcaagggacacgaaagcctcgccccccacgccttatttc

SEQ ID NO: 105870 - DNA, 122 bp, Homo sapiens
gaagtctgtgcaccagccattccttcccttgtattgctaaggagcgttccatgatgggggcgtactgcagtttcaccattcacaagttgaagggcttttcgatttttctagtttggggctgt

SEQ ID NO: 105871 - DNA, 122 bp, Homo sapiens
gggtccaccgtggatcgtaaaaaccaggggcggcgagggcgtggctcttactccccacatcgcgggggggcctcatccccctgccatctgggtcatgagagccaggggcggcgagggcgtgg

SEQ ID NO: 105872 - DNA, 122 bp, Homo sapiens
tgcggtgccgcctcccacttcaccgcacggtgctctctttcccccaccccccctcagaagcgccggcatattccagaggagtcaacaaacaaatggaagcagagggttaagacagccatggc

SEQ ID NO: 105873 - DNA, 122 bp, Homo sapiens
gggggctgaggggcgacgggggaactccacagagggaaggagcctgcgttcgccttcggccgcccaggccatagagttcacaaactctgatttatcactgaggtgacttgtcccgcgcagcc

SEQ ID NO: 105874 - DNA, 122 bp, Homo sapiens
tgaaggggcctgagctgggtgtctcctccatcagtcgctgtgataactctatgccagtttcgatttccaaagtcagaagtgcaaagcagggctcgttattaatcctctcaaatcgtccaggt

SEQ ID NO: 105875 - DNA, 122 bp, Homo sapiens
ctgcggggaagtgccggggctgctcgaggctcagttcttaggactgcaaggaggcagccccggcgtgcggcggtgcgcacagtctagagtggccagggcgcgagagtgcaacgtcctcctgg

SEQ ID NO: 105876 - DNA, 122 bp, Homo sapiens
ggcctgagcgggggtgagagcaagtcgcagttctggcggatggtggcgctgagcacctctcggctgccgaaggacaagccccgatatctgatgggggttgggtatgttgtggatagggaagc

SEQ ID NO: 105877 - DNA, 122 bp, Homo sapiens
ctccagcagtcctcttgcctcaggctctcaaagtgatgggattataggcgtaagccacagcgcccagccaggtcatatcatttacgctctgtcgaaggaagaggaaaaatttttgcattatc

SEQ ID NO: 105878 - DNA, 122 bp, Homo sapiens
agtgcacccctcccggcacctgggccccgaggctcgggcctgcctcgcctgccatctctccggggcctccaagtactccccacgctgatgggcacttggcaagtaagtcaagatgaacagag

SEQ ID NO: 105879 - DNA, 122 bp, Homo sapiens
tcataggaactgagtcatgtaacatgtggaacatttgtgtcttgtgtctctcactcagcacggcgcttttgaggctcacccacaccgcagcatgagttagagctgtgtcctttctgattgcc

SEQ ID NO: 105880 - DNA, 122 bp, Homo sapiens
ctgcaagatcacgtccgtgagctgcggctgtgacaaccgcgacctcttctactgtgcccacgtggtggccctgtccctgtaccgcattcggcacgcccaccaggtggagctgcggctgccca

SEQ ID NO: 105881 - DNA, 122 bp, Homo sapiens
cacctggggaaatacaactttatgaggtttcaaggggcagcagcagaactactatttttccgaggtccacgcctttccgcaggcggcggaaagacgcggctggttctgttgggtcctacaaa

SEQ ID NO: 105882 - DNA, 122 bp, Homo sapiens
ttactttgcagacaaggggtgcagccaggccacagcaggtaagtggcccacccaaactcacgcagcacacagaagtgaagctgcaattcactgcacaccattctgtaaccaacagatggaga

SEQ ID NO: 105883 - DNA, 122 bp, Homo sapiens
gcgagcccagacattccacctccaggactggtactctcgggctctttgcttctgtctctccgggagctccccaaattctatgcccaacaaacactccaaaacacaaagggaacccgatcccg

SEQ ID NO: 105884 - DNA, 122 bp, Homo sapiens
ttgccgaggactaaactatatgcttactataaagccctgacatacattagcgcatttacgcggtggctcgcgcctgtaatcccagctctttaggaagctgacgcgggagaatcgcttgaggc

SEQ ID NO: 105885 - DNA, 122 bp, Homo sapiens
ccagctgcccaccggctgggcatggagatgccttcacctggcagcagccggcagaggactcgagaaatgaccacagaaaggcacacaccggctcccagtcacagctctccgcagatatcccc

SEQ ID NO: 105886 - DNA, 122 bp, Homo sapiens
aataatgactcttaagtgattcaccatggggatctcaggaagatccacaaagctgcctcccggggccaagcctggaagctggagaggatgatgaagaaaacgacaatggacccgaacataag

SEQ ID NO: 105887 - DNA, 122 bp, Homo sapiens
acagctcaccctacggtgcacagcgtcggggcagaatggggctctctagacacccctacccgcattcactcacctcacccggctgctgtcaattttcatagctcttcctgttttggaaacga

SEQ ID NO: 105888 - DNA, 122 bp, Homo sapiens
gcttccgagaggaactgggatccagaggtggctcgggatcctactctctgtccagtgccccgtgcctgcggctgcgcagagggctccggagcgggactggctgagggcgaaggtgcacaggt

SEQ ID NO: 105889 - DNA, 122 bp, Homo sapiens
aaggtatcaggccctggcttgttgatgagccgctcaatgcgcctgttaacctctgggtagcgggtgccacggtaggggatgcgctgctctatgacacggccggtcagtgaagagcagtcttt

SEQ ID NO: 105890 - DNA, 122 bp, Homo sapiens
ttcaagtttctgctgggtcacacacatctgcttccatctgattagccaaagcaagtcacacggctcagtccaacagcaacggagcaaggaagtcggcacctcccacagagctcaggggaaag

SEQ ID NO: 105891 - DNA, 122 bp, Homo sapiens
gttcaccgtgatggagtgtgaggtgtgtgcagccagggccccgcacttggtggcagactccgttctgagcttaggtggcacagaggtggcttctccgggcactgggtgagggctctgtgtga

SEQ ID NO: 105892 - DNA, 122 bp, Homo sapiens
cacctgcgagccctgccaccaactttatctcgctaggcctgccctttacggcttgccatccgtgccatctgtttggagcctccttggttatgtatatgacgttcttaatacacccacatcga

SEQ ID NO: 105893 - DNA, 122 bp, Homo sapiens
ggcttgtagtcgaggaggagcccacgaggctttagctgctgcaagatccaagcgcgctcccgcccagcggtggccccgggctcagggaaccagcgctgcttctctccgaggctcgcggcctg

SEQ ID NO: 105894 - DNA, 122 bp, Homo sapiens
aaacagagcacaggcagcaggtaaagacactacctcatgctgtggacaagcaggacatatcgtgaaaactatcattcatcttcatctctagcccaaacctcacagaggaggcagcaaaaagc

SEQ ID NO: 105895 - DNA, 122 bp, Homo sapiens
ccgcggtccccagcgcccaggagaggaggcctgcgcggcttctccccgcgccccaaagaacgttcttctgcagatagtcccctgggttcccagaaagccctcacttgagagaggggcttctc

SEQ ID NO: 105896 - DNA, 122 bp, Homo sapiens
tgggaacgctgctgagagcgccagagccacaaggtgcttgtgctgctgctgcaccgcccacggggctcttgggcccatctgcttgggccagcgcaccccccatccgtattgatttccgctgc

SEQ ID NO: 105897 - DNA, 122 bp, Homo sapiens
cgggggcgcacccggggccacacacgcctccccaggcgatggggtccaggcggccccgcccgaaggcttccgtccggccagcccatccagccgctgccccgcacctgtccccgccgctccgg

SEQ ID NO: 105898 - DNA, 122 bp, Homo sapiens
actacctgctcgttagtcactagatagccatctctgttataagacgactgtcacgtatcacggtgcttgggttcaagtgactcttattttacaggataacaaggccttgaataacgttgtcc

SEQ ID NO: 105899 - DNA, 122 bp, Homo sapiens
tcccaggacgtttgttgacaataaatgaatgaaggtcggcctggagacgttttcgcacaacggacagaggggagttggaccgtaaaccagcgagaacctggcatgaaataggacccctctat

SEQ ID NO: 105900 - DNA, 122 bp, Homo sapiens
gcgctgttattccaagcgaggtcaggatttccggattctaccccgctccgcccctggccccgccccgagaatgtacgtcccgccaggccccgccccggccttgtcccacccaccccgtcccc

SEQ ID NO: 105901 - DNA, 122 bp, Homo sapiens
ccaaggtcgcccaggtacagcgctggcgcaggtagacccgagccggcctggggtctgcagcggggcctgctagccgaagtctccgccaggatgggccgccagagcccaatcacacatgagaa

SEQ ID NO: 105902 - DNA, 122 bp, Homo sapiens
tgtgttccctttatgggtgatgccaccatgattgcctcacacaagcataatcaatcgccacgagagactggatgccaaagagtatggctggcaaaaaggcatcagggctcacagtccgaaga

SEQ ID NO: 105903 - DNA, 122 bp, Homo sapiens
cactgtggtatgtagtagtgaggtcaagttggctgtgtgataggatgttgcctcagaggtcggtgcagggaagccctgtagatgtgtccagtgcaagaatgatgacaggcggtgtgtcctgt

SEQ ID NO: 105904 - DNA, 122 bp, Homo sapiens
ctgtttgcgtggaggtgccatgagggagcagagtgtgcatctgagctccgcctgcctctccgcctcctggctcaggctgtccaaatctgaatcacctgcccaagctctggatgatggtgaca

SEQ ID NO: 105905 - DNA, 122 bp, Homo sapiens
aattggtcacagccggcaccaggaaaggcagttttccaatagatataaaacacctgaggccgggcatagtggctcacgcctgtaatcccagcactttgggaggccgaggcgggtggatcaca

SEQ ID NO: 105906 - DNA, 122 bp, Homo sapiens
ccagggcccggggagcagcggcagtcttccttggaggagcacctgttcttcctctccctgcgccggaaacgtgccaccttcccccaccccatgctgctttcccctgcgtggctccattttgt

SEQ ID NO: 105907 - DNA, 122 bp, Homo sapiens
aattacgtttgtttgtgtttgtaaactaaaaataaaattgtaagccccccaagcactgaacggacctcctcttagccaaggagaccccagagaaaccttaaaaactgagttcccagccattc

SEQ ID NO: 105908 - DNA, 122 bp, Homo sapiens
aggagcctgggagtggcggggctgggggcagggcggtgggtgaggcttgagctgctttcccgcctcccctcctcctaggagtcgggctggctgggaggcgcgtcctgcgggggcgggggggg

SEQ ID NO: 105909 - DNA, 122 bp, Homo sapiens
tgggccgaggtttctctcaagccttgtttggggcaaggccgactcctgcttaatgagtgccgctctgataatcggatgcgaacgtgaaccttgacctcgtgtcaaaggagaggacgcaataa

SEQ ID NO: 105910 - DNA, 122 bp, Homo sapiens
ccaggcaatactgcttgggaatgtgaagccccatgggcaccagctagggggtcccggctgcgcggccagccttggaagagaggacttcttggacacctaacccggagggagcagagcttctg

SEQ ID NO: 105911 - DNA, 122 bp, Homo sapiens
ttaagattcgaaagcgctacatggtttcggggcccaagcaagtagtctttaacacacagacgttgcaaataaatgcgcccgccccgagcctttctcaggtggaggtggaggtaggggagaac

SEQ ID NO: 105912 - DNA, 122 bp, Homo sapiens
cctgacagtgccacagatagccagctccagagcagcgtctgaccaccgcccgcgcccacccggccacggcgggcactcagcatttcctgatgacagaacagtgccgttgggtgatgcaatca

SEQ ID NO: 105913 - DNA, 122 bp, Homo sapiens
cgctcctgagcaacgacaatgccttcctgagctaccacccgcaccccttcgcgcagcgcacgctcaccgcgcgcttccaggtcaacaacacccgcccgccgcacgtgcagctgttgcgcaag

SEQ ID NO: 105914 - DNA, 122 bp, Homo sapiens
ttgctaaaattccagaaggagattaatttaccagttcgtgtcatataatacttgttttcccgtaccatccagcacccattttggcaaatagaaatatacaaggatggtggagatcgatgtac

SEQ ID NO: 105915 - DNA, 122 bp, Homo sapiens
cggaggcctggcagcacacgctgggggctccccaacctgggcggctgggcgaggacgaggcgcagaccccacacctgccacaggcccacactggagggagtcagcggctgagggtcgggccg

SEQ ID NO: 105916 - DNA, 122 bp, Homo sapiens
ggtcctccccacgtgcagattctcaaacggaaactttggatcctggggcttggagggttgcgagcagtgatggcgggtctgaaaggaaggggcaaacgaggcacagcgcgaggcgaggtacc

SEQ ID NO: 105917 - DNA, 122 bp, Homo sapiens
cacagaagcaggctggtacttagggaagaaggcaccagtgtatgccagagcttaggatggcgtgaggaccaaatggaaagatagatattgtaagtggttgttgggagaaggaaggctggagg

SEQ ID NO: 105918 - DNA, 122 bp, Homo sapiens
tggaagctgggccatgctgggccagatggacatccactctttgctgaggccacctggtaccgtcccatcctccccaccctctgcccctcagctggtggatccagcccccacactgtcccctt

SEQ ID NO: 105919 - DNA, 122 bp, Homo sapiens
ggtgagcgagagctgccaggtggcagtgaaaggcgagtgtgaagttaacctggggaagatcggtgcgtccagtacttcggccataaacctcccagagccgacccgcctcgcccgctgagaat

SEQ ID NO: 105920 - DNA, 122 bp, Homo sapiens
cgcgcacggcaagagcgtgccggagatccacgagcagctggtcacctacgacgaggagggcggcggcgagatggacaccaccagctacgatgtgtcggtgctcaactcggtgcgccgcggcg

SEQ ID NO: 105921 - DNA, 122 bp, Homo sapiens
ggctcccctccgctggctttctcctcccgccgcctgcgcctctcggagttcggcgggctccggagaagcggggaagagatgagacttccccgcccgcactgcctccccaccttaccctaaca

SEQ ID NO: 105922 - DNA, 122 bp, Homo sapiens
ttagttccgtgaagacagtcgaggtctgtgcacttaatccagagccccggacggcccccacgccccaccgctgcccccgaacccacagagccccgcggcggcccccacgccccaccgctgcc

SEQ ID NO: 105923 - DNA, 122 bp, Homo sapiens
aagaaaccaaagttcggggaaaacaatccttttgcttaaactgttccttgtcttctttcccgatcccaatgattcagatgccaagtggcctcccctcagccactccctcttcttttctttgt

SEQ ID NO: 105924 - DNA, 122 bp, Homo sapiens
ccatcaccgaaaggccagggaacattaaatatttataaccaagctgataacaggattagtcgcaccgataaggaatgctctgacaacgtcccttctctcgaagcttatggaagatgacaagc

SEQ ID NO: 105925 - DNA, 122 bp, Homo sapiens
caatcccccttgaatctcgtatcctgtctgtctcatcctatccgacagtagaattgatgccgctctaatccctggaagtttggaactaatgaactgactgctgagctgccgccacggagctt

SEQ ID NO: 105926 - DNA, 122 bp, Homo sapiens
ggtccctggaaacaaagctcatcctcgttatttgccacacaaagcaagagcgtttccaggcgggcggagggaaggggcgttcagggcgggggctccgcggggtccgcaggcctcctggtcgc

SEQ ID NO: 105927 - DNA, 122 bp, Homo sapiens
gtctgtgcccaacctcaagcccccaaatccaacggatgcatcgagagactgacataaagacgcggagggaagaggactggcatgcctatttgcctccccttcacgcctcgagataacaaacg

SEQ ID NO: 105928 - DNA, 122 bp, Homo sapiens
tctccactgcaaaccaccggggtcaggaagcctccgggtaatgccctctccctcttgtttcgctttttaagtaggtaagctgcacagagagaagcactgttgcatatttctggacagcttat

SEQ ID NO: 105929 - DNA, 122 bp, Homo sapiens
ccacgccctccgaggggaccggtggcaaactccagccctcgctctagggcccgccctttgcggctttgtccctgcccactgggtcctcacagtacctccaccccagaggcccagcatcccct

SEQ ID NO: 105930 - DNA, 122 bp, Homo sapiens
aattggaattccaacgcgggcatcgtttggctggggcgcctgattgacggggccgctgagcgggcccagtggagaggcacaaatcacctgcaagagggcccaggcaccccgccgcataaatc

SEQ ID NO: 105931 - DNA, 122 bp, Homo sapiens
tcatccgtacaatgggggcgacttgagacggagttcccacacaacgggtgctcgccgaagcgccgcatccctccgcactcccttccgggacttcctctccctgtcttgccccgccccggcat

SEQ ID NO: 105932 - DNA, 122 bp, Homo sapiens
tgtataaccagaggcgtgggagctgcagctgtcagaatcctaatcccttctgcctggactcgttaccagtggtagcgagtgtgtatagtagtaaactgtgctgcgatgctagcctttcagtc

SEQ ID NO: 105933 - DNA, 122 bp, Homo sapiens
tctgtggcccagagtggagtgcagtggcaacatcataagtcactgcagtctcgacctccgcggctcaagccatcctcccatctcagccggctgaacgtagctgctgggactccagtcgcttg

SEQ ID NO: 105934 - DNA, 122 bp, Homo sapiens
gtctcaaaaaaacaaaaccaaaaaaaaagataaatagattgactccggaaactgaggcgccgagaggtgaggtgccttgcccaatatcacacagcacttactaagtggcacagctggagttt

SEQ ID NO: 105935 - DNA, 122 bp, Homo sapiens
tgctggccgtggtcatcggagtgttcgtggtgtgctggttccccttcttcttcacctacacgctcacggccgtcgggtgctccgtgccacgcacgctcttcaaattcttcttctggttcggc

SEQ ID NO: 105936 - DNA, 122 bp, Homo sapiens
tcacaggctctcagcaactgctctggccccagggcccgagtccatcctctcccccgcctccgactcttcttcaagactgagatcagagggcacaaaaggatgggcacacgggcttaggcctc

SEQ ID NO: 105937 - DNA, 122 bp, Homo sapiens
cccgatcccgcccccgcccggaggctcgggacccagcagccgctccacgcggcgggagggcggggaaataagaggactggccgcccgtgcatccagccaagctcctggcggacggatatcgg

SEQ ID NO: 105938 - DNA, 122 bp, Homo sapiens
ctgggatgcgcatggcgaggaggggggaaacgtgctggggagaaggcaggccttgatgtacgccctggtggacaaaagctgctagtgtcagcttgatttgcaagatcaacattcatgagttt

SEQ ID NO: 105939 - DNA, 122 bp, Homo sapiens
cccagcccctgctagctgccccccgagccgagcgcagcgagcgccgccgcccgggccccccggtggggccagggccagcatggagcacctgggtccgcaccacctccacccgggtcacgcag

SEQ ID NO: 105940 - DNA, 122 bp, Homo sapiens
acgggcgtgtgttgctatccctcaagcatgcacctgaggcaggtccagccttggcccaggcgaggactgagtctccctgttgctcctggaaggtgaccaagcctgcagctctcgtgcccctg

SEQ ID NO: 105941 - DNA, 122 bp, Homo sapiens
aataaatgaacgagctccagtaagaagtctacaacctgtcttagtggttcactaaactcacgtttattgaatgattgtgtggtttctctgcaaagagcagttttggacgaaaagacccgagg

SEQ ID NO: 105942 - DNA, 122 bp, Homo sapiens
ttcacagcagaaccagaggaacagttgaagcacagccccaaaatagaacgaactctagcccgtccgcaagagtgataagaaatcgcagtgtgggcccacgcgcgccgcacggccgggtcgcc

SEQ ID NO: 105943 - DNA, 122 bp, Homo sapiens
tgcaggtttttggtttttttttttttttcacttgttcaatgatgtacccccagtgtcaggcgctttgcaaacacacgatacatacgggttgatgtttggtcaagagaggaattaagaccagg

SEQ ID NO: 105944 - DNA, 122 bp, Homo sapiens
cccctcggtcccgtgtctgtgtcgccctcgtccgtgtctgcctcccgcttccccgcctcgcgacttgagccccgcccgtacctgcttagggcgctgccctcgcccgcttgctccggatccca

SEQ ID NO: 105945 - DNA, 122 bp, Homo sapiens
atttttcaccagagtaaacttgagaaaccaactggaccttgagtattgtacattttgcctcgtggacccaaaggtaacattaattgaccatgtttcaagtagaacttttgtttttaaagtat

SEQ ID NO: 105946 - DNA, 122 bp, Homo sapiens
ccatagggttcttcctactctccagttcggtttattttaaggccaacagccctagcttcacgtccctccttcacagccttctttccttccctcctgccggatgcgcccggcagccgttgagc

SEQ ID NO: 105947 - DNA, 122 bp, Homo sapiens
cgtggtgcttttttaaacggagtccacctttactacattattgttggtcatcagtggagacggtttccatttaaccctatcggccacgtcgttagagctgtccacaaagaacaccctggctg

SEQ ID NO: 105948 - DNA, 122 bp, Homo sapiens
atggttatgaattgaatggaaacggtgctgcaccagatagccaccaggtagctactatatcgtattcctgatgccagcatctgggggatgattgctcatttcaaataattcaaacaaattaa

SEQ ID NO: 105949 - DNA, 122 bp, Homo sapiens
tctcataggaggcatatgatgagcacagggaacaggcatctgtgctgggcagacctaaaacgaggaaggggcaccgtgaccagttaccttgcggtgtggcacagtgctatcttgaagaccat

SEQ ID NO: 105950 - DNA, 122 bp, Homo sapiens
cagtccccgcccgtttcaggaaaagcggcgcgttacgatgcttatctgcatgcggtaagccgattggtgtgctttaagctgttcagacgttgattggcccaaagcatcgtgaatattcatga

SEQ ID NO: 105951 - DNA, 122 bp, Homo sapiens
cagacttattttctaataagaataacctgggtttttttctcaagagttagcattgtctcacgtggagtgagctacagtctttgtccctagtcccagccagcactatttatggttaagtcttt

SEQ ID NO: 105952 - DNA, 122 bp, Homo sapiens
ttcacctctgccacgctgcagatatttaaagatctgtagataccgtaaccctcagcgatgcgggactcactctggttatagataatattctctgggtggttatttgaacataagttctatct

SEQ ID NO: 105953 - DNA, 122 bp, Homo sapiens
caagtccttgtccaggactctctccaactcagaaagtgcctctttgggatccagggtctccgggaactcctccccggccacctcctcggggggaagctcctcttctgggtcttctggtccca

SEQ ID NO: 105954 - DNA, 122 bp, Homo sapiens
tgcagcccccgttcccacccacgcctttcccttttacatctctctacaagcctagggagccggctccagcgtcagccagcccagacaggggctcccagagtgcagcagcaggctgaagggcc

SEQ ID NO: 105955 - DNA, 122 bp, Homo sapiens
cgggcggagcctactagtaggcgcagaggacgcccccgcgcaggatccagagaccaagggcgctctggcatggtcaaggcgagggaggctgcccgggggagaagcccctaacttcctttgct

SEQ ID NO: 105956 - DNA, 122 bp, Homo sapiens
cagtagtggctcttctgggtcttggtcttgctggtaaagaatgcaattaggtaaaaatcgcgtgtcagtttgaaagagattcgacacccagtttcagcgttcatgagaagagaggcgtagga

SEQ ID NO: 105957 - DNA, 122 bp, Homo sapiens
tggctggccccaggagccacttcgcctgtactttatgcaaatcctagaagccgcgcctcccgccccgcctgcccgcccacactcactcggtgatctcctctgtgaccgtgtgctccacctgc

SEQ ID NO: 105958 - DNA, 122 bp, Homo sapiens
gtaagttcatggtaaaggtatctccccccacactggggcaggcggcggaataagctccagcgttcatgcgccactcacaggactgcttacccccactgcacttacaatgcagtcacagagtt

SEQ ID NO: 105959 - DNA, 122 bp, Homo sapiens
aacgccacgcctggcccggtcagtgctgcatgcactgcatatgaaataaaatctgctacacgccagggagaacaggtgtcctgtgtctgtctggcttgggcaggaaagcccagaaggtgctc

SEQ ID NO: 105960 - DNA, 122 bp, Homo sapiens
tggaggggacagtgagctacgcacaactgccagcggaggtgaacttgcacctgcccaggccggatgaacatcagcctgcaagaactagttgtttgagttgatttgcagtgctctcaatgggc

SEQ ID NO: 105961 - DNA, 122 bp, Homo sapiens
gccagccctcccttctttccccagtcccgtagagcctgtttctcattagagtaacgggcgcggtccccgcccggcttctgagtgtttgtaaacgtctgacctggggccgtcgcttaaccgtt

SEQ ID NO: 105962 - DNA, 122 bp, Homo sapiens
atctccaagctctaaaacctgaactcgtaggtgagaaacgtttgtaggcaccagcgctgacgctgtgctgtgagcagggacgcatcgatcggtaagaggtaaaggagtgaacgccgacaggc

SEQ ID NO: 105963 - DNA, 122 bp, Homo sapiens
cggagaataaccccgtagggagttaagcggcctctgcctacagcgttcctcccgcctccacggcgccgagccctgattgacgttcagccaggccaatcatagcctgtgtctgaggcgcgcgg

SEQ ID NO: 105964 - DNA, 122 bp, Homo sapiens
gtgaacacggatgcaaatttatttctgagatcaacgcctgcctcagggaacagttgttcccgtgctattttttacccccgtgggctgcgagttctggaacgttccaaacgacagtgacaacg

SEQ ID NO: 105965 - DNA, 122 bp, Homo sapiens
ctacgtccgtattccctactgaacgttatgcccagtcttgactccaaatccccaggtggtcgcctcctcaagaatgagaaattcagcaggaacctccctagtttgagccctctgttaaggca

SEQ ID NO: 105966 - DNA, 122 bp, Homo sapiens
cctttccgttttacagcctggaggggtcgggtaaaacaggtacttcctgtgagcagtttccgccttaggtgaaaggaagaggcggtcacatgaaggactgcgcgttccaaactgaccaatca

SEQ ID NO: 105967 - DNA, 122 bp, Homo sapiens
ctgcatttatgaggtgtaaagtgctctctttctgtcctcttcctgcaaatggtcctatttcggggcactccttgccatgcttctcttctttttccgcacaaacagcacttggatggccttgc

SEQ ID NO: 105968 - DNA, 122 bp, Homo sapiens
caccaggtacccctgccaggtgtcatgaagctggagttcggggcaggtgcagtgggtgtccggctggtagaggatgcgccacagtgccatgagcacttttcccggattacccgagacttgca

SEQ ID NO: 105969 - DNA, 122 bp, Homo sapiens
cagatggtcagtccgggcagctggcccacgtcctccgtgaagaactcggagtagtcaaggcggggcttctccaggccctggtcccaacgccgcaccttcccgctgggggcccgggcatctgc

SEQ ID NO: 105970 - DNA, 122 bp, Homo sapiens
tagaacgaacattcttgagactttagatctaagccagcctgatttctgaaagccttggaccgtttccaaaatcaaatcaatactccaggaacaagatctgcctcgactttgtctccatccaa

SEQ ID NO: 105971 - DNA, 122 bp, Homo sapiens
gcggccccgggcagatggagtctgagggaaacagatctgcgccccgccccttcgctggggcgggccctaaggagacccggccctggccccgcccagggtcctaagccccgccctctcccctg

SEQ ID NO: 105972 - DNA, 122 bp, Homo sapiens
ctggcggtagaagcggcactgcataccaacacaagacgttattttaagcgcgtgtccccacgagagaacccatccgatctactggagcaagcatctcccacccgccgggaattttccaaagc

SEQ ID NO: 105973 - DNA, 122 bp, Homo sapiens
gaatggattctcccgtacccggggcaacacatcacacaataaacgccagctgtggtggaacgtgcagaggcgctgcgcagcccaggcgtgtcgcgcgcttgggaaccctcgccgctcccgca

SEQ ID NO: 105974 - DNA, 122 bp, Homo sapiens
tttccttttcagaaacatcctgagttggatgataaattacatggccactcaatcagtgagcgaatgctgtctctagagagcccagttcccatgcaagaggctgcatcaacagcattttgaaa

SEQ ID NO: 105975 - DNA, 122 bp, Homo sapiens
aaggggtgacggacagcacctggaaaatcgggtcactcccacccgaatactgcgcttttccgacaggcttaaaaaacggcgcaccacgagattatatcccccacctggctcggagggtccta

SEQ ID NO: 105976 - DNA, 122 bp, Homo sapiens
tcatcgcaaaatcacaactctctgaatttgagctcaatctctgtaggatgggtgcaacaacgtggggttttgaaggttgaataggagctctcccaggggaacttgagggtaatcatgatgat

SEQ ID NO: 105977 - DNA, 122 bp, Homo sapiens
ctagactggagcagagaaacccgagttcaggtgctaattctgcctttcactgctgtgtggcgtgaatcatcttatttcaggttccacatctgtgctgactgtacacgatggccatgagaact

SEQ ID NO: 105978 - DNA, 122 bp, Homo sapiens
atcagagggaccggttctctgctcttgcccaatccagacctgtgaccctggcaccggagccgcaggccccagtttcctgtggggctgagccccaggcttcccagctctggcctgacttgctt

SEQ ID NO: 105979 - DNA, 122 bp, Homo sapiens
gctgccttgtctgagatggcactgtagtccccacctctgctgcctttagccatgtacacacgtgcatacgcacactaacacatgcccatacatgtactgagcacagagacagtatgaaaaga

SEQ ID NO: 105980 - DNA, 122 bp, Homo sapiens
ctcgagcccagatcctgacgtcgtctgatccgccagtccaggctgccccgaaggcgtgcgcggactgccggctcaaggggcatgcctgcaccctcagggcagccccggacatcggcgtcagg

SEQ ID NO: 105981 - DNA, 122 bp, Homo sapiens
cggggccgacggggaggtgctgactcgggggcggggccatcgcgggaaccccgggaggggcgggccgcggggggcggggccaacgttcgctcttctggccttgggggcgggcgggagcggcg

SEQ ID NO: 105982 - DNA, 122 bp, Homo sapiens
gccacgcaggagcccacgtggggaggcagctgaggcttggtgagaatttgagcgcaatgtcggccggcgggcactcctggggcacccgtcgcaccctccacagctgctggcctgagtgctac

SEQ ID NO: 105983 - DNA, 122 bp, Homo sapiens
gacaccctctgtgtgtaaggcacctgaagaatccctttcccaaatcgcttttcaagctggcggggagagaggtgcatatccgctctgtggaagcttagctcttcatctatgcgagtgagact

SEQ ID NO: 105984 - DNA, 122 bp, Homo sapiens
ccaacctgcatgcagggcgtggcgggcggccgggttaaggtctcgcagccaaagctgcggcgtgctcactgcccagtcagggcagcacctgcgtgccaggcccagccctgggttagggcccc

SEQ ID NO: 105985 - DNA, 122 bp, Homo sapiens
tgggtctcccggtggagctcggctcctgcaggtccgctccggaacctgctgactctcctgcgattcctaaactggcagcgatgctccagagcctcttccgccccgacagcagccccacctct

SEQ ID NO: 105986 - DNA, 122 bp, Homo sapiens
cagagctccagcctgggggcagcgaggctgctgcacggcccacgggactctgtcttgaagcgagaccgttaccatgactggcgccgggcgcccacatactgaggtgtttctgtagcacagac

SEQ ID NO: 105987 - DNA, 122 bp, Homo sapiens
aaatgtcttgcccagaagctctcgtcaaacttcctctagcatctaattaagccagattctcgaggcccatgcattgattgggccagtcctgccatcttgaccaatcagtgtcaaggagggtg

SEQ ID NO: 105988 - DNA, 122 bp, Homo sapiens
agcttgcaaggtgcgcggcttcgcctcctccttccatcctcctccggcaggcacactcaccgcatcctcccagttctgcctgttgtaggtgttggaacccagagaggtcgccatcttgagag

SEQ ID NO: 105989 - DNA, 122 bp, Homo sapiens
agcgttttgggggtgtaggtggccggtggcgcccacgggccctcttgagtaaggcggctccgcccaggccgtcccggggcctcggctcggctcggctcgggaagccgcagagcctgggggcg

SEQ ID NO: 105990 - DNA, 122 bp, Homo sapiens
gtcacaagagaggaagtcagggaatcacagaaccttacagccagaacagaccctggagagcgggaggtctgctctcctttcagaaagagaagctaaggcccagagcagggaagtggcttgtc

SEQ ID NO: 105991 - DNA, 122 bp, Homo sapiens
cccgcccccggggctcctagggttctccgctggcctagtccgctggccgcactaggttctcgaatcaagggttccacttactctcaacacaaatatttggggtggggttgggaagatggatc

SEQ ID NO: 105992 - DNA, 122 bp, Homo sapiens
aagtttttggaaaatgattctaacccaatctgtggtgtaaaaaagcaaaccacaaccactcgggggcttttttcacagggcaacacgtggctcccagttcaggtcccgggttggcgggtgca

SEQ ID NO: 105993 - DNA, 122 bp, Homo sapiens
ctgcgctcggcccacggttggtccaggcgtgctgcgactggcttcttcctcggacattggcgtctgaatgagggggacgcaacagcacccaaaagcttggagactccagcaaccgtggaggc

SEQ ID NO: 105994 - DNA, 122 bp, Homo sapiens
ctccccaccccaggaattgctgaggttggcttcccctgagctgccacagttcagcacccacgtgtaacagggctgtcattcggccatctaatgtcatttaggcaccaggcactgtgccttgt

SEQ ID NO: 105995 - DNA, 122 bp, Homo sapiens
ttccacagaggctgagtagaacagtcctgctaaagaaaccagtggaataagaacagtcaacgtaggaagagacagaaacattcttctcttccacttattacctgccactgtgttttaaaagg

SEQ ID NO: 105996 - DNA, 122 bp, Homo sapiens
cagtggcatccttgcaatgtgctagttagaccgctcctttaagtccctcccgcactggcccgctcggccccgcccctctctggctccgcccctccccacccctgccccgcccatccccaccc

SEQ ID NO: 105997 - DNA, 122 bp, Homo sapiens
caggctcaaccaacacatagagggatttcagtggggcccaataaccctccagaaattattcgcaaaatgttatatctatgagcatatgtacattttttgagggaggagttccaaaacatgaa

SEQ ID NO: 105998 - DNA, 122 bp, Homo sapiens
catcctgccccctgccggccgcgagcgggaccgcagcggcccgcgggtagcgtcccgccgcggaggtggtttttccttgtgatctttccagaagcagtgaagccctcttgggcacccgcgcc

SEQ ID NO: 105999 - DNA, 122 bp, Homo sapiens
cagcacctcctcctccaggcagccttcccaggcccgggggaactcctgttctcttcagatcgtcttggcgtatggctttgtgcaccgtctgcagcaagccgagacccttcccgccagatcca

SEQ ID NO: 106000 - DNA, 122 bp, Homo sapiens
ctctgctccccacgggacctgctgtctccagcagacctggaggtgagcccagcccctggccgcggaactgggagagaaaggccttcctggggcctgggaggagctttgcgagtcaaagcctc

SEQ ID NO: 106001 - DNA, 122 bp, Homo sapiens
ggtatctccaatatttaaaagtcaggacaggaaggaagattgggacggattagccattgacgtagaagaaccaagaggtgtcccaaaagccaagtggagagagtttcaagaagagagagtga

SEQ ID NO: 106002 - DNA, 122 bp, Homo sapiens
cgccgccggaggggttaaagtggctgttgtttgatattctctccttttctttttccagatcgaagcggatttccgattgaatggtgagtgtgccccctgcgccgactccggggccccccagc

SEQ ID NO: 106003 - DNA, 122 bp, Homo sapiens
ttggggcagggggcgctcactagttctgtgtcccggggtgggcgcccaggggagccggggcgacggcgacgggaagtctcactcactgttgcacgaattcatccgctgcatccacgggtaga

SEQ ID NO: 106004 - DNA, 122 bp, Homo sapiens
aacgactgggggactggggaattatgggactggggatttggggaattgttttcaaacgcgcggggcaaggactccccaccgcctctggaaggggtgaagaactagtcgactctaactccctc

SEQ ID NO: 106005 - DNA, 122 bp, Homo sapiens
actccaggagatttcccacgttcacgaacacatctgcgtcgcccttaaaaacgaagcgcacgtcggggcagaaagctgaggcccaggctagaaagtggatctccttgagcgttaggttaaaa

SEQ ID NO: 106006 - DNA, 122 bp, Homo sapiens
ctcctgctgccagcccacagtgggcaggagcagcaggctcaggagcaggcctggcagggccgtgtggcccagggcatgggtcagcagccggtgcactgggagagagaaggggcttatgtgcc

SEQ ID NO: 106007 - DNA, 122 bp, Homo sapiens
caggccacttgtgccccagtttcttcctggggctgtgacttcacctctgcactctccttccgctatgtaagccgcctctccacgtgttcagacacattggaacagtttcctcccagagcctc

SEQ ID NO: 106008 - DNA, 122 bp, Homo sapiens
tctcccagttccggaggccagaaatctgacaccaacttgtggaaagggcctccaaagcctcgaggaatctttcctggcctcttccagcttctggtgaatgcaggtgttccttggcttgcggc

SEQ ID NO: 106009 - DNA, 122 bp, Homo sapiens
tcctcccgagttccaacccctcagttccagcatcttgctaggggctcagtgtaggcacaccgggcctgctccacgctgggcggccacagtgctccagcggctcaacggggatgggactgttg

SEQ ID NO: 106010 - DNA, 122 bp, Homo sapiens
tgtgcatgtctgtgacgaccctgtgtgtacctgacatgggtgagtctgtacgtgtggtctcggcttttgtattcggaggatcccgtgtgagctgcagctgttggcgtgtgcctatgtgctgg

SEQ ID NO: 106011 - DNA, 122 bp, Homo sapiens
gcatgcgcttgggctgcacccattccgtctagcccaaaaggttcctctacaaccttcctccggattggtctatagggacacgatggccttttacgcaagcgtcacccgtgctgacccggaag

SEQ ID NO: 106012 - DNA, 122 bp, Homo sapiens
accggggggcagggcgggtgtctgcagcgtcctcgggaggtctcaggccccttgggcagacgctgcgcgtgcccagagggagggatggcaggcttcagccacttctcccagccgccctaccg

SEQ ID NO: 106013 - DNA, 122 bp, Homo sapiens
tactgttaaccaatatggaagagagtaattgcgcctgagaggaaattacggcagcggaaacgcgggtattctacgtttaagaaatcccccaactgaggcagaaaaaggccaagttatttgtg

SEQ ID NO: 106014 - DNA, 122 bp, Homo sapiens
agaaacattctaagcctgtggtaagctctctctccctaaagccaatacatactcttagtccgtaagagagagcgctcctgactgcaatcggccagaaggccctctcggtttattctccaaaa

SEQ ID NO: 106015 - DNA, 122 bp, Homo sapiens
tctcacgtcttccacatcttggttttcctgcgccagcagcttgtaggtggccccactgcacgcagccgtcgtgcctgccacctcccccgagagggccttccggtgctgcagaccccgagctg

SEQ ID NO: 106016 - DNA, 122 bp, Homo sapiens
ggggttggtgtgggggaagccaggaaccagtgaaaagatgaccctaatagtttaggaccacggtggcggtagctgaggtgcttcagggcctggcaagggcgcgagcttattaagagaacagt

SEQ ID NO: 106017 - DNA, 122 bp, Homo sapiens
cacagacagggaccttccccaagggtatgacaacacccctccttgccctcaactctacagcgtcaggtgtttgaaatacatatatactgtgtgttttttctaggaagatttgaaacttctgg

SEQ ID NO: 106018 - DNA, 122 bp, Homo sapiens
tatctttagcctgtagtgtgagattgtagccgaaaggatgactgtcccaatcaatgccaccgatggctttgactttatactccttactccctggaaaggacctcactgttctaaactgctgg

SEQ ID NO: 106019 - DNA, 122 bp, Homo sapiens
gcggtgggtcctcaggcccggagaccagggatggcgcccacagtgggaacctgggctgaccggctgcccccggggcccacgcctgcagtcgccccactgaagcccagacagacccccacacg

SEQ ID NO: 106020 - DNA, 122 bp, Homo sapiens
caattcccatcagaccccgccccaccttggcacaggccacagggagccggacacagggcccgctcatccctcgctcactcccacagccagcgctgcggagcaccgagggatgcccagccctg

SEQ ID NO: 106021 - DNA, 122 bp, Homo sapiens
agcatcttgatgtgtgcccaacacgcccaggggcagactatgcgatagccaggtctgcagcggtgtgtggcatctgggccagccacctttgttggccatgagctggctcatggccctgaccc

SEQ ID NO: 106022 - DNA, 122 bp, Homo sapiens
caggtgcctgctcagtgcctatgcactaagtcaaagaggcacaggccagctgtccagaagcggccagaaacgctggaactcacccacacaaaggataaacaagcagctgagcaaattctgat

SEQ ID NO: 106023 - DNA, 122 bp, Homo sapiens
cgagggccaggttgattccttgcagatccagggttccagtccctgcttggatagggaagtcgtttccaagacttttgacttttcctagtcgccggagccagttcacctcctccacaactttc

SEQ ID NO: 106024 - DNA, 122 bp, Homo sapiens
gtgttcgagcagggggaatggactcggaggtgaactatgagccgagattcattttataaacgggaacacagacacatggacacttgaagggccttggtggccagaaaactgaaggcaggttc

SEQ ID NO: 106025 - DNA, 122 bp, Homo sapiens
ggcacgaccactaccgcctccaattgccaattcagaagctaacacacaagccctccagttcgtaccctgaatatggtaattaagactaggaatggagcagttcagtctaaaaaatatcacag

SEQ ID NO: 106026 - DNA, 122 bp, Homo sapiens
acagctcctcagtgccccctcccctccacctcctctctcactgccagtgacccgctgggccgtggcaagctctggttaccttggctcgctggaccctgtctgcacccttcttggtccacccc

SEQ ID NO: 106027 - DNA, 122 bp, Homo sapiens
gtgatgggagatttctacaacctggagaaggcaacaaactgctcactaactcagtgatcccgagacaacctggctggtacaggcagctgcaaagcagacaggcctgcagagatgagctaacc

SEQ ID NO: 106028 - DNA, 122 bp, Homo sapiens
aaatgagtgacagcatttcactcctgcccttagcagagctgcttaccttccagaagacatcgcaggcagagcaaggagactcaacagtaccacatgatgaggtgagagcctgagaatagcaa

SEQ ID NO: 106029 - DNA, 122 bp, Homo sapiens
ctaacctcctctggaggtcctcccagtcctcccgtggctggcgatggtgaatcgagtttccgtctccagtttgccaaggcggacaaagccgacacaatgggcctgtccactatcttctttca

SEQ ID NO: 106030 - DNA, 122 bp, Homo sapiens
agagcattcagctcaaagtcttttctgtggggaaggagggatggtgaggtaagggagactcgtggggcctcaggagggtccaccagtggttgaaaatggtaatgatacaggtaaagagtagg

SEQ ID NO: 106031 - DNA, 122 bp, Homo sapiens
aagcaaatcgcccaaatggtttgatgagtgtggacagctaatccagacaattcccacctccgcaaatctgtttttcccacgggaggccaggtgggggatggaagcgattgcgttgcctctct

SEQ ID NO: 106032 - DNA, 122 bp, Homo sapiens
ccaagttgttcccaaaaacacctaggggaaaagatgggtgcatttttgcaggagtctagacggtagtatcactagtaaattggtgccagtcttcctatgttacagtttaaataaatgatact

SEQ ID NO: 106033 - DNA, 122 bp, Homo sapiens
gctgttgcagccgacgtggacgccttcaacctgctcctggagatgaagctgaagcggcggcgtcagcggcccaacctgccgcgcactgtgacccagttggtggctgaggacgggagcagggt

SEQ ID NO: 106034 - DNA, 122 bp, Homo sapiens
acttttttattataaatctttttttcagggaggagatatcaccaaacatgatggaacaggcggacagtccatttatggagacaaatttgaagatgaaaattttgatgtgaaacatactggtc

SEQ ID NO: 106035 - DNA, 122 bp, Homo sapiens
ggccgccttggggttcccagcggggaagtcttgggtgtgcacgtcccctcaaagccgtcccggttgtgtctgcacaagcgagccgcctggcaggccttgcaggtcttctcaaactgtccttt

SEQ ID NO: 106036 - DNA, 122 bp, Homo sapiens
aacaaaggcaactgagaagacagggcatgtccagtctggcctcccagataaacctcaatgcgtttgtttcttttggcgcagccacttcctttgtaacttggaaggaatgaaagtcacatcac

SEQ ID NO: 106037 - DNA, 122 bp, Homo sapiens
tagcttttggtacactgcaaatgtaagttatcagtagtattagtttcactcataaacccacgtaacaaaattctgaggaataataccaacacaaaaagcatgagaccaaatatgatgcattc

SEQ ID NO: 106038 - DNA, 122 bp, Homo sapiens
acgccggctgcagggggcgctgcgcccctccgacgcccctgccttcccctctgcgaggcgcgctggtcaagcagccagtcaacaaatgctccagggtgcagactgctcagctcggcgctggc

SEQ ID NO: 106039 - DNA, 122 bp, Homo sapiens
catcccggacgatgggcggccgggcagagatgctcctcacctcctagacaggatggcggccgggaagaggcgctcctcacttcccagactgggcagccgggcagaggggctcctcacatccc

SEQ ID NO: 106040 - DNA, 122 bp, Homo sapiens
cctggctgcatattcacatttgcaatcactcatcaaatccaatatcttattctatatgtacgagaagggaagtaatttacccaaagtcacatagtttaggacacatttgttcgttgtctacc

SEQ ID NO: 106041 - DNA, 122 bp, Homo sapiens
ctagggcctaaggcacaactgccttgccctgggctgaattctaccctagggcagagttttcggtggcctcggtgtactcttagtagtatttctactaaaaagccaacatagagggcatagac

SEQ ID NO: 106042 - DNA, 122 bp, Homo sapiens
cactggccacctggggatcgtagctggctcctgtccagttctcccaggtgacgcaagctgcggtgtgggggccgccccccgtgcctgaccccggcccctccgcacaggcccccgccccgggt

SEQ ID NO: 106043 - DNA, 122 bp, Homo sapiens
gaacctgggtccctcacccactacccctccccacccacacgtttcctctgtcatagcttccggtggaaagaaccttataaaccagggctttacagagggtgtggcaaatatgtgctgtgtga

SEQ ID NO: 106044 - DNA, 122 bp, Homo sapiens
tgttcccccgcggggtgcccccatcctctcagttcttactgcgccgcgatggccggatcacgccctgggctgggaagtgcacgccctgcatcctggaggtctccctgaccaccagctcctga

SEQ ID NO: 106045 - DNA, 122 bp, Homo sapiens
ggcgtacgaggctgagcggcagttgtgtctagagaatggcgggttctgcacctccgcgggcgccctgtggatttaccctaccaattgcccagtgcgggactaccagctgcacatttcccggg

SEQ ID NO: 106046 - DNA, 122 bp, Homo sapiens
gaaataggctaaatcctgaaataaataaagcatttcttattttctttttgatcagtgctacgtagttaactgtgaggaaagattttttagtaaagaacaaaactaatctccattcccagtgt

SEQ ID NO: 106047 - DNA, 122 bp, Homo sapiens
gtctcggatgccagcaggcgtcccaacccagcaggaactggctcaattctcagaagaaagcgatcggccccgaggcaggaaggccggctccggtgcagggagcgccgcctgcgggctgcttc

SEQ ID NO: 106048 - DNA, 122 bp, Homo sapiens
aaagagcaaaccaacaggtataaagagaccagccctcaaaacagatcaaagcaaacagcccgtggagtcctttggaaatcttggctggcagctcttgtaaataaaagtgcttctaaagcaga

SEQ ID NO: 106049 - DNA, 122 bp, Homo sapiens
tgaacaacgacagccccaaaataatatccataacacgcccggccgagagccacgccatcccgcaagaaaaggacttttcaagcttacctgcgtgggtcatgaacttccacggaaaacttctt

SEQ ID NO: 106050 - DNA, 122 bp, Homo sapiens
caccacagctgacatttattcatcacttggcaggtgccaggtgtgggtctacatactttacgtagtgctcacaagatccctagaaagtagatcttgtgatgatcccatttcactggtgagga

SEQ ID NO: 106051 - DNA, 122 bp, Homo sapiens
gggctgggggcggagcgcacctgtggctgcgcagcaggcgcaccagcgccttggcgatgacgcccacttccgccttgggcgccaggtggaagtagagctgcgccaccgccatcaccaccgcg

SEQ ID NO: 106052 - DNA, 122 bp, Homo sapiens
cctgccactggccctggtaggtgcctgcgggcggcggaggggtgggagaaagagtcaggacgtgccgctgggctccttgcgccccaagtcccaagcgcccctggaagcccaagcgtcaggcg

SEQ ID NO: 106053 - DNA, 122 bp, Homo sapiens
gctctgtgctgggcctgacacccagggtgcaggttgtttcatggtttgctagggagaagccgagtattcagaggtggccctgcggggaggcagcagggagcttcctcccagggatgcagctg

SEQ ID NO: 106054 - DNA, 122 bp, Homo sapiens
aatggtagaaagacacaagatttcgtgtcaggattattcaatgttattcttgattaccaccgaggtattcactggggagccatgtctaagataataaatgttgcataggtttccaacacctg

SEQ ID NO: 106055 - DNA, 122 bp, Homo sapiens
atgacagtgcataatttgcaaaataaaaaatgtacactagcataatatttgtggcatatccgtgtaatggaagattatgcaggcattaaaatatgtacacaaaaagtttggtaaaggaaaaa

SEQ ID NO: 106056 - DNA, 122 bp, Homo sapiens
cgcctcctcccgtgggtagccactgggggtgcgctaggcccacggggtggcccgcgcccgcgcccagccactcgtggtgcatcagcttctgcacttcgcggtacgcggcccctgcatgcaat

SEQ ID NO: 106057 - DNA, 122 bp, Homo sapiens
agcgcgcgcggggagggggcgggggtcacccgggtcggggccctcgagttcgatctgtcccgcagccggcggtcttgcgtctttcccgcccccagcactgcccccgagcacgtgcacgtgcc

SEQ ID NO: 106058 - DNA, 122 bp, Homo sapiens
gtaattacctgctgtgatccgaattctcattggttgggaaggggatctctcgccccgctgcggtaattacctgctgtgatctgaattctcattggttgggaggggatctcacggccccgctg

SEQ ID NO: 106059 - DNA, 122 bp, Homo sapiens
tccgcggctggttcgccgggttgaggcgggggtagcgggcggggccggcgctggggagcccgcgacccgggcggggagggcgtgtgtcgggggggcggtggcggcgaggcgggcgcgcggga

SEQ ID NO: 106060 - DNA, 122 bp, Homo sapiens
ccctcctgtgcctttgacagctgtgggtctcggagggttacagatggagcagtcagatctcgtggcatctctgagttagtaacttgaaatatggtgttatgagcaaagccagaaaggggctg

SEQ ID NO: 106061 - DNA, 122 bp, Homo sapiens
cacaagccagccccacatgtggaaccattggcttcactcaattctaggcactgcccaccgcgggcaccccgcctcaccctgcacccaggttccctccttccagcctccctccaccaggctgg

SEQ ID NO: 106062 - DNA, 122 bp, Homo sapiens
ctggcacccccagcccagccaagcgcctctgtttccaaacatgcctgttttaattagtgccgctctctgacaggtgaaccgggtttatgtgattttcgatctgcctaccaccgtgtcaatga

SEQ ID NO: 106063 - DNA, 122 bp, Homo sapiens
ctcctgacggtgtcagtccggtgtcacaagtagattcggcaatgccgttcactgggaacccgtgactgaaaagacaagaactaaggggagggcccgccacaccgcccgtcagtgccacgaca

SEQ ID NO: 106064 - DNA, 122 bp, Homo sapiens
tcgtagtccacgggcccggccagggtgaggcggcctgatcgcgggtcaagccgaaagaggcggcgcgcctccggcggggtgcgggcgccaaatgcgaacaccacgtcgccgttaggtccctc

SEQ ID NO: 106065 - DNA, 122 bp, Homo sapiens
cagagcgagtggaaagatttgggcgagaacttgcgcgggagccggactgagcggtgcgagcgcgcaggcgcggccgacggggcgggctgctactccggaatctgctaatcccagtcggtgcc

SEQ ID NO: 106066 - DNA, 122 bp, Homo sapiens
acactgctgtattagaatccatccagcctctgattcggaagcccttgcatttaaccaccgcgcagtactacaaggatgaaggagcacgtgggtcctcgtacatgattaataatagttacctc

SEQ ID NO: 106067 - DNA, 122 bp, Homo sapiens
ctctgcagggacgatgttcccagagtacacacctgggcctcgtgccagggccggcaccgccgttgtcggggcaatggcaaggcaaacagtcaacgtttgcctcactaaagtgaggctgcggc

SEQ ID NO: 106068 - DNA, 122 bp, Homo sapiens
cttttcccgcctttgcgggtgcgggtctcgtgttccaggcagcagcagctccgggaaaggcgggggggagctgcggagctgggcaggagacagggctgtgtttgggaaaaggaaaccgcact

SEQ ID NO: 106069 - DNA, 122 bp, Homo sapiens
ctcgctgcgccggttgctgcggctcctcgtgctggggctctggctggcgttgctgcgctccgtggccggggagcaagcgccaggtacgcgggactccggggtcggggaaccccgggccgggg

SEQ ID NO: 106070 - DNA, 122 bp, Homo sapiens
ggagaggcgagagttgcccgcggctgcccctacccctgcccatgtcgcccacactccacacgggccccacagaagccttcccatcctggcttttgttcaacctcggtgggcggcaaggtggg

SEQ ID NO: 106071 - DNA, 122 bp, Homo sapiens
ggaaagggtaacagagaggagcagtgacatggaacaatcccaagaatgaaagcagggcggcggggctgactcaccggatgactcacttccttgcccagggatgttctgagcatccacggagc

SEQ ID NO: 106072 - DNA, 122 bp, Homo sapiens
tcgtagaatctacccggactgaaaaaggtcctcaaatatccaggtggattttgaaaggcacgagcaaagagtgcagtgccctgccacccaggagggctccccagcaatcatcgcagggaaag

SEQ ID NO: 106073 - DNA, 122 bp, Homo sapiens
gctccccagggctccagagcccttctctacttctgaccctgctgagcatgggcctatagacggtgggagccagactgaagacttgagtcctggaaaggggaagtcagtcaccaggggcatat

SEQ ID NO: 106074 - DNA, 122 bp, Homo sapiens
gggcttgttctagtggctccgaaagccagtgggagcgagcgcgctttgcaaagccttgggcgccgggccttggcgcgcctttgccggatccttccggccacgggcggggcgagcccagagga

SEQ ID NO: 106075 - DNA, 122 bp, Homo sapiens
agcaccttatgagaccttatgagacagcctggcacagcataagcactgcatctgaagcatcgtagctgttaccttcagccaaaactctggtagctttgccttgggccaaacttaactgcatc

SEQ ID NO: 106076 - DNA, 122 bp, Homo sapiens
tttttatgtaaaggaggtgcaccaaagggttaacaggtggttgactctggaaaggactcccggagagcagctgctctgaattttctaatttcgctacactggtgatgtatcatgtattcctg

SEQ ID NO: 106077 - DNA, 122 bp, Homo sapiens
gagctggggcggcccataggcgagtacttcaatagccagaaggactttatggaacggaagcgagccgaggtggacaaggtgtgcagacacaagtacgagctgatggagccactcatccggca

SEQ ID NO: 106078 - DNA, 122 bp, Homo sapiens
gacgcttggcagtgtccatctccgccactccggattcgggatctgaaccggactccctttcgattggctgagggcaacagaggccatcgcctgtccattcagaatggcgctcacctatttct

SEQ ID NO: 106079 - DNA, 122 bp, Homo sapiens
atcgccggcgacctcctggaactctctcttgcggtttgcagccagatcacttcccatacacgcggcagccaagctcaggggatggcatcagactgaccctaggtggcgctcgaacacccgcc

SEQ ID NO: 106080 - DNA, 122 bp, Homo sapiens
agaaatgaaggcacctaactaccccaagtctagtgcatggacattcacagcaactttatgcgtggtaggtcggagtggctgcaaccaaacgcccatcgatcgtgactggtcaccaaattgtg

SEQ ID NO: 106081 - DNA, 122 bp, Homo sapiens
agagacaaaagcagccgatccaccagctgagaattcgtccgctcccgaggctgagcagggcggggctgagtaaatgccggcttaccatctctaccatcatccgggtaagcaagcttggatgg

SEQ ID NO: 106082 - DNA, 122 bp, Homo sapiens
aagaaggcaggccggcgggggctgtgcggcacggtgcttatacacaaggtgggcttccaccggggacgtggagactggccagccctttccagccttcccttgcctggcagcacccagtaact

SEQ ID NO: 106083 - DNA, 122 bp, Homo sapiens
acaagaaagcctgagtgatgtttgtgcaaggatatcagctgattttcatgtaaggagtttcgagatgtgtcatctggcaatgtagaattgaatctttaccacatgttcatttttctacactg

SEQ ID NO: 106084 - DNA, 122 bp, Homo sapiens
tttccgggttatgtgggcggtgccaaaataattatccaatgagcaacttcgtaggctgagcgggcaggagaattgctcaatgagcgactcggaagaggagccaataagcggagaggttgctg

SEQ ID NO: 106085 - DNA, 122 bp, Homo sapiens
gtttcacctttcaggagggaggcaggctccggagaccccctcctcagcccctccatcccgcgccccccatcctgagcctgcaggggccgccagctggtccaatccccccactcgccctggac

SEQ ID NO: 106086 - DNA, 122 bp, Homo sapiens
ggaccgagggtgaaggattttaagagacccttccttcatgctgtgtccagaagtcttgcccgctctcgcagccaggaaccaaaagtcctggtaggactgagaacagttcctaggctgccatc

SEQ ID NO: 106087 - DNA, 122 bp, Homo sapiens
gagtgaaaactacacgtttggctaatgtatgttattaaagtttgtgtgctaatgtctaggcggtctattttccacatggcataaagactagagtgcagacacaatggtcagagggggagaag

SEQ ID NO: 106088 - DNA, 122 bp, Homo sapiens
attgattacatttctcggttcaatgacctggcccaagagctgtccatcgctgagcctggccgccgagaagctctgtttgatggtggtggaggcggccccgctgtcagtgacctgtcccagtg

SEQ ID NO: 106089 - DNA, 122 bp, Homo sapiens
tcacttttaggcctgggcactgttcacaagcttggccaatcacaagcactcagccttacacgcaggcctgtttctgaaagatagtttcaattacggggtcaatatcttaggtagatgcaaaa

SEQ ID NO: 106090 - DNA, 122 bp, Homo sapiens
cccttcccagtcaaggtggtggcctgggccgctccacctcaccggtgcagtgacccaggacggcatcagcagcccagtgagcaccaggggtggcatagggcacccatgaggctgcgctgcac

SEQ ID NO: 106091 - DNA, 122 bp, Homo sapiens
tcccatttgatcctcacagcaacccccagacagggagagacacacgcacacacagagacacggtcagggcaaagtcacacaatttgtgagcaggaagcatcgcattgaatcccagcctttgc

SEQ ID NO: 106092 - DNA, 122 bp, Homo sapiens
cgcctgccttaggagtggagcgggaggccggagtgggcatgcgcgactttgtaggcgcaccgctactctccgtgtaggggcgctgctcgcctttctctgcaagccgagctaattcagtcttc

SEQ ID NO: 106093 - DNA, 122 bp, Homo sapiens
agcgctctgggaggccgaggcggagggattccaggagttggagaccagtccgtgcatatacgagactccgtctctccaaaaattataaacattagccggcgtggtggtgcgcgcctgtagtc

SEQ ID NO: 106094 - DNA, 122 bp, Homo sapiens
gcctcaaagcctcctcagttgtcggccctggaaggtgcccagcggcggcagcgccagacgcgccccgttagctcagcgtcgctgagcatccgcagccgccaccaggccccgcccagcggccg

SEQ ID NO: 106095 - DNA, 122 bp, Homo sapiens
tgacaagagggatgaccctttcctctttctcccttctggttggtggaggcacggggctggcggacggcatgtgctttcgtgaattcaggccaaatctgttatcgcaaacacgattacaactc

SEQ ID NO: 106096 - DNA, 122 bp, Homo sapiens
acctccgggccctctctgctcctgccgctggagaggatccggctggtcagaaacaagggacggggccaccccaggggctcatgcacccggcagaccacggtaaccgccagtggtgtttccac

SEQ ID NO: 106097 - DNA, 122 bp, Homo sapiens
tgtgcagttgccacactgggaagttgctctggccttggtgacagatgcctgtagcacgcacgcttctcctgctgtagcagaaaaaaaaaaagatgtgccatgtcagatttcgttagggactg

SEQ ID NO: 106098 - DNA, 122 bp, Homo sapiens
tatcggcaaaacattggaacgatgaaaagttatcgatctatagctttccaaccatctccccgcctcccccacacgtctggccctccgcccacctttccccctggagctggaaacttcgctcc

SEQ ID NO: 106099 - DNA, 122 bp, Homo sapiens
accgggcccaggtggagtccgccggcttctggagagatctgcgagacgaaatggtgtcggcgcagcgtcgccggcgcggcggggcagcgtggggaccctctgaccctgaaggtccccctgcc

SEQ ID NO: 106100 - DNA, 122 bp, Homo sapiens
tgtttatcaaggacctaccacgcaccgggcgctgaaggaatgtttatcaagcacctaccacgcaccaggggctgaaggaatgtttatcaagcaccgactacgcactgaaggaatgtttatca

SEQ ID NO: 106101 - DNA, 122 bp, Homo sapiens
cgctgggtgcgcgtgcgcatgcgcgctggcctccagggggtggcgggaccgagtgtgtgacgcacttgcgtgggagtacgaggctgacgcggcggccctgtccccgtaactgtgacacgggt

SEQ ID NO: 106102 - DNA, 122 bp, Homo sapiens
aacaatggagattcatgcccgtgtttttctgttttaatttgggtgtgaggtcaacttagtcggactagcttttaattctaagtttctctttaacctgtgattgatatgccacattgcagtat

SEQ ID NO: 106103 - DNA, 122 bp, Homo sapiens
tgttatcaagatttcctctgacccacgagcaatgaagcaaatgtctttcagtaaatgccgcgaagatatgccacggttaagagtcatgcttttgggtcatggaaatccccgagtgggtttgc

SEQ ID NO: 106104 - DNA, 122 bp, Homo sapiens
gtgggagcgcctctgccccgccgacccgtctgggatgtgaggagcacctctgcccggccgcgaccccgtctgggtggtgaggagcatctctgcccggccgccccatctgagaagtgaggagc

SEQ ID NO: 106105 - DNA, 122 bp, Homo sapiens
gccctgcgtcggccttggtttcaaaccgggctgcttttattcatttccagcgcagttctgcggccttttcaggggccgagcccctcgcgcccagcaaccgggcatctgcgttggggaccctc

SEQ ID NO: 106106 - DNA, 122 bp, Homo sapiens
ctgtgcctcagtttcctcaccagctgaattacagggcagctggcaaaatcaagtggccagcgcacagccggttcccatcctgtgccagttcagttcccaccttctgaggactttaagggtgg

SEQ ID NO: 106107 - DNA, 122 bp, Homo sapiens
tgtccaatttggagaaaacacccacacgcaggataactggcgagtgacgcggagtggctgcgagtccaagttatcactaacggatggggagcttgggctgggcacagtccagcgtactgaac

SEQ ID NO: 106108 - DNA, 122 bp, Homo sapiens
cgtcgctcctgattggtcagagtgtggcaaccggtggaccgccggcaatggcggggttttcggttttcaaatgaacccggcaggcgggaaagaaggctggtttaactgacccagggagaaag

SEQ ID NO: 106109 - DNA, 122 bp, Homo sapiens
tgtaatagtataaaaaaaatgtacgttgttaaaagaaaacaataaaatattccccattaccggattggttacataaatcacatccataaagccactgaaaagagtgagggatccagactttc

SEQ ID NO: 106110 - DNA, 122 bp, Homo sapiens
cgctgtcagggggcccactaacaagttcatctgttgctatcagggccctctgatgtgggacggcccaagggccagctgggccaggctctgcaggttgctgagcagcagaaaatccaggctgg

SEQ ID NO: 106111 - DNA, 122 bp, Homo sapiens
ctggacgcgcaccgacggcttggcgtggctgggggagctgcagacgcacagctggagcaacgactcggacaccgtccgctctctgaagccttggtcccagggcacgttcagcgaccagcagt

SEQ ID NO: 106112 - DNA, 122 bp, Homo sapiens
ggcgaggctgggcacacaccgacagtgcgcaggcagccatgccgaaccatgtagggacatcgggtacactcaggtcccttgcgccctaacaggaaccaagggccgtcccctgtagaaacgtt

SEQ ID NO: 106113 - DNA, 122 bp, Homo sapiens
cagcctcccctgtcgcggagcttccgtgtcgggggaggggcgcttcccccagatcacccgcggacatggcctgccacctggtagctgttaaaagagccttgcctggatcgtttcatgcaaag

SEQ ID NO: 106114 - DNA, 122 bp, Homo sapiens
aatgaattttgaaacctcttttgctcccccaaatacatggtgaatataagctatttccatcgggaacgtgagagatggggaaggaaatatttcggctgttttgaaaaagtgttccaggtaaa

SEQ ID NO: 106115 - DNA, 122 bp, Homo sapiens
tggtattaagaaatcggtaagtttttttaggtgtgaaaacagtagtgtaatgatgttgaacgacaaaaagaggccttatatttacaaatctatatggatatatgtttaggtaaaatgatatg

SEQ ID NO: 106116 - DNA, 122 bp, Homo sapiens
tggggactcacccgggtgaccgagcctccgccactgaggatccacaagagctgcttcccgcgcttcggctcgctcaccacactgcgcctgcgccgacccgcccacgcccagcgcaggtcccg

SEQ ID NO: 106117 - DNA, 122 bp, Homo sapiens
cttgcagagccctctgcacagcacaggagctgggcaaaatttggagaaaaggaaaggtcacgttcccaccttggccacccctctcaggtggggctggggtcttcccctacccttcagatgca

SEQ ID NO: 106118 - DNA, 122 bp, Homo sapiens
ctcaggtcgtgtcatttcttcacttataatggttgggttttggtctaccattttgctatacgttttcaatttgtctcatatctttttgtttctgttcctcctttgctactttcttatgtgtc

SEQ ID NO: 106119 - DNA, 122 bp, Homo sapiens
tcctccccagagcgccgccgacactcgccgggccgcggctcaggttttctgctgctcgcgcgaaagtggctcggggagctcctggccacaagctcagcacaccgatcctcctagggctgcgg

SEQ ID NO: 106120 - DNA, 122 bp, Homo sapiens
agttgatctgccaaggggcacacacgcttcagcaccgggcccgcctttctcacgccaccgcgcttcagcgtccaccggaccacctcacgggcaggctgcgcaggactctcagccacggtccc

SEQ ID NO: 106121 - DNA, 122 bp, Homo sapiens
ccattgtcagatttaccttgaggagctgggagactggtcactgactgcccaaggtgggaccgcaagttaatggtgacactgggcagcagtgtggcctggaggttataagggctgggattttg

SEQ ID NO: 106122 - DNA, 122 bp, Homo sapiens
acttcgcggaccgcctcaccggcgccattgcagccgactaactgcgtcatcagaagaccacgacggacgcccacaaaatacgtcaccaagccgaagcaatcaatcgctcagaaggaatccgg

SEQ ID NO: 106123 - DNA, 122 bp, Homo sapiens
aggtgtgtggctccgacctctgtggtcattgcctttggctgtgctcagctgctggttctccgtcccagccgggctcccttagtgccttcagtcacttgatggttaggtggagccttgcttcg

SEQ ID NO: 106124 - DNA, 122 bp, Homo sapiens
ctaggaatcagaacacaaagaggtcctggagggttccttgtccaagtgaggactagagggcgggagccacttgttccaggttccagggctaaccagttaggattaggatccaggccttctat

SEQ ID NO: 106125 - DNA, 122 bp, Homo sapiens
caacgagacggagaagcggctcatcaaaggcggcaaggccagcaacatggccgtggtgtacggcaaggaggcgagcatctggaaggtgagcgcggcccctgcgcgcgggaagcaccagcctg

SEQ ID NO: 106126 - DNA, 122 bp, Homo sapiens
agagaaaattcagcattagaaggagttaagagaaaagctttctgaaaaaggcttggtatacgtgctgtcttttaaaggcagaatcatagaaaatcaggccgggtacagcggctcatgcctgt

SEQ ID NO: 106127 - DNA, 122 bp, Homo sapiens
agtaccacggcatccgcaagggtgccaaccttgtttgcctggatgcctccagcagattcgcgcaaactgcaactggttttacatcaggaatactgtttgaccaaagagtaatttaggagcca

SEQ ID NO: 106128 - DNA, 122 bp, Homo sapiens
tttgcagtgagggcctggctgtgggggtcccctggccttgaatgcagtcactggtgtctgcgccctatccacctccctcaacgcaccgattcccaggcccaaggctcagggcctctaggctc

SEQ ID NO: 106129 - DNA, 122 bp, Homo sapiens
ttccctatttgaaggacaggccaaagatccagtttggacaggagagactatttctttcagcgtaatgctgtgtttcatttgaagtcttttttggctaagagccctttcccaacagagaatta

SEQ ID NO: 106130 - DNA, 122 bp, Homo sapiens
ggaaaggaggcggccggagctgagaggcccctccgtccttgaggagcaaacctggggctgcggagaaccggggctgtctgtcttctcgctttgggggccgggcgccctgcccctcgcccaga

SEQ ID NO: 106131 - DNA, 122 bp, Homo sapiens
aacagtggatttgtaacagcctgctctgcaatgtgaagtgatttggtgaacttggcgccgcgggtggattggcagctagaatataagcagccatgagcaatatgaaaagacgagcagggacg

SEQ ID NO: 106132 - DNA, 122 bp, Homo sapiens
gagggactggagagcggtccatctgacttctgtgggggatgggcaggagtcaggggcggacgcctgaatcttgtttctcagaagagccgagaggcctaggctcaagcttggggcgatccggt

SEQ ID NO: 106133 - DNA, 122 bp, Homo sapiens
acgccctagacgacgtgagggaaggcggtgccgggcggggcctgtgccaggctggcgggccgccgcagacagagctacccggagcaaccgttcaggggtgaggccggaagtcccatccgacc

SEQ ID NO: 106134 - DNA, 122 bp, Homo sapiens
gcaaatctcattaaatctgattaaaatctttcagtgactctaactgcccaagataagtttcgaactctataagcatactttacaaagtccttcaaaaggaccccgcttctatcttttagact

SEQ ID NO: 106135 - DNA, 122 bp, Homo sapiens
cacccgagtccttctccccaaaggccccctatgtctacagttgatcgtgactgatgtgaccgcgggcgggccacggagcctctgtctgagcctgtatttcatcagtttgatgtggagaaaac

SEQ ID NO: 106136 - DNA, 122 bp, Homo sapiens
ataagggcctgggccacgggtcaggagcagagggtgctgggggcacagacctgtgagggtcgtgggggtgaaggacctcaggctggaaagaccccaatgagtgagaaagccagatccccatc

SEQ ID NO: 106137 - DNA, 122 bp, Homo sapiens
gtctggcgcgaatcaggagcaaaagcccacattctcccgcaggaggccctacaaaaatggcgccggctccaccccaatgtgaccaaactgggcaacaggagttaacttcccagctcctctcc

SEQ ID NO: 106138 - DNA, 122 bp, Homo sapiens
tgcctggtggccaccggggggcggtgatgcgccgtgaagggctcccaggactgcagagctcgtagccgcccggccgcaggaagcctgcaagaggcgagcttgtttggcttcctctccttttc

SEQ ID NO: 106139 - DNA, 122 bp, Homo sapiens
ttttcctatagctcgagaggagaatgtggccactttccgaggctcagagtatctgtgctacgacctgtctcagaacccgatccagagcagcagtgatgaaatcaccctctcctttaagacct

SEQ ID NO: 106140 - DNA, 122 bp, Homo sapiens
tgcgcgcggagcccccaagggccctgggcccgtgtcgggggccaaaaccgagtgtgcgatcgggtacacagcagactttagaaagaagtggcgtctggtgttgactgatgagctcaatatca

SEQ ID NO: 106141 - DNA, 122 bp, Homo sapiens
gactgtgggccagaattcggaccttcccattcccactgcagggctcctgctggttcctcccgactcccataactctcctggtttaaactgtggcccagttcagagggcctggctagttggaa

SEQ ID NO: 106142 - DNA, 122 bp, Homo sapiens
atccataggataaaatactgcacgtttattaaaattcatgttgcagaacatgtagtaacacggacagacttctacaactggtgaaaaaagtgtacagtaagaatctaaccacgtaaaaatat

SEQ ID NO: 106143 - DNA, 122 bp, Homo sapiens
tcagtccttgttttcccgttgacttcgctgcctatgtgcagctaggctggaagcagcaatcgctgatagaaagcctgtggttaaagctcaaacgacatagtgtagtctcgactaattgaatc

SEQ ID NO: 106144 - DNA, 122 bp, Homo sapiens
tgctgcaggatgtttctgatccgggcagccctgtctccccgcctccccccttcacacccccgcctccctgagagaacagggagagctactcttccctggagctgcagaggacaacttgttcc

SEQ ID NO: 106145 - DNA, 122 bp, Homo sapiens
ttgaaatctgatggaatccagcttctattccacaggttgtcttcagtaagaatcaacgtccgaagatggaactcagttccagaagaattaattctacaatctgattctggtacacagtatga

SEQ ID NO: 106146 - DNA, 122 bp, Homo sapiens
acataccaccccccttcaaaaaaggcaaatggtgctgacaaccaggccccccaggatctccgtcagataattgtgcccccttcaagggcaaatttggcaatgtcacaacgctgctaagttgg

SEQ ID NO: 106147 - DNA, 122 bp, Homo sapiens
catgaggctgcccgagcctcacacccgggccagagggcacttggggggatctgggctgagcggcaacgaggacatgggccaccagcgataaccaggcctcctcaggaggcctctgtcacttt

SEQ ID NO: 106148 - DNA, 122 bp, Homo sapiens
tctgaagacagttactgatccagaagtgggcagagatgcccaatcagacaggaaaactgacggtccatccctgtggagaggtttctgacttctgaatatggtgatatatggctataaaccag

SEQ ID NO: 106149 - DNA, 122 bp, Homo sapiens
tgtggcggggttgctgctgttgttgaacctgggtgccgccatgcaggatgtggccctggacgcgctggctgtgcagctgctggagccggccgaactggggccgggcaataccgtgcaggtgg

SEQ ID NO: 106150 - DNA, 122 bp, Homo sapiens
aacagggatgtatgtattcatgtttacacatgtcagcttaagtatgttagggtgtgtgaacgtgtgtcagtgtgagtatgtgtgggcctgtgcacagaatgcaagtaagtgtatgtgtgcat

SEQ ID NO: 106151 - DNA, 122 bp, Homo sapiens
cttcctctctctgcctggccgggtaatgttccgttgtccagtggaggccccacgtttgtgcgtgcacctgccaaggggcattatagtgttcccacccttggctgttgtgagtggtgccactg

SEQ ID NO: 106152 - DNA, 122 bp, Homo sapiens
gttagatttgtatatgtatgtgtgtgtgagagcaaatttgtgaatgtgaatgtgtgtgaacgagtgtgcatgtatgaatgtgtatgtatatgcgaaagagtatgtatatttgtgtgagtgtc

SEQ ID NO: 106153 - DNA, 122 bp, Homo sapiens
gtgattaaataaatatttatctttattgtagccattgtatatttttaccttcagtttgtccggtttctgattattattttaaatttttcaatggcaacagttaatcttttttttttcccttt

SEQ ID NO: 106154 - DNA, 122 bp, Homo sapiens
caggagcgcgcttacgccttaaaagactcttttgttatgtaaactgacagttaaattaaacgaaggtaatggatactaaaggcgtaacaggtattgtaactattttactgttatcgatgctt

SEQ ID NO: 106155 - DNA, 122 bp, Homo sapiens
cggtgacggagtccatgtcgggggcgggccggggcctgggtgtgccggagcctccctgggcgccagggtcgtgggcgcgtcgttccgctgggagccaggcgttgtgtaccaagtcgggtgag

SEQ ID NO: 106156 - DNA, 122 bp, Homo sapiens
tttgtcctgtttaattaggaaataaagacggtagagctagtcggaaaatgaatagttaatcgtggaggaggagaaaacatagctcagtactttgactagaggcagctgggaaagtgacgtcc

SEQ ID NO: 106157 - DNA, 122 bp, Homo sapiens
gggctaactacccaattctttctgggaaggaaagaggcagacattaccagaggaagcaggcgatctcagttcaaacaactcgtcactgggtgcctgtgatgactttctgcacaagcaggaaa

SEQ ID NO: 106158 - DNA, 122 bp, Homo sapiens
tttgagtcaagccagaacaactggctacggaccaagtttatccggcgccgtggcgcccaccgcatccacgtggagatgaagttttcggtgcgtgactgcagcagcatccccagcgtgcctgg

SEQ ID NO: 106159 - DNA, 122 bp, Homo sapiens
caatgtcaacatccgcccagaggccgacacctccacaagcacagacgccgctgccgccgccgcagcagcagcaactcaggaaaccacagcaacagcccgagccacccgcagcgggagcagcc

SEQ ID NO: 106160 - DNA, 122 bp, Homo sapiens
tcactcatcacagcggatgtgggggtcagccgtgcttgggtcatgggagaggctcaatcacggttaatgtctagactagattaagacatgaggggttgggacatgagaggattctggtttca

SEQ ID NO: 106161 - DNA, 122 bp, Homo sapiens
atttggtaagtgcttttgtggttgtcgaaagaaaaagccatatacctgcttctgtgataccgctaagtcaccttcctgagaaggcagagcaaatgtaattttaaatcaaacacaaaactcca

SEQ ID NO: 106162 - DNA, 122 bp, Homo sapiens
ttttgacagctgaggcgggagcacgggaggcggagctggtggcagcgcagcgccccgccccggctccagcatcagccaatggtgacgcggcacccacagcctttcgcccaatcagcttgagc

SEQ ID NO: 106163 - DNA, 122 bp, Homo sapiens
aagacaaagctgggtggggactagtccctgggctgcagccgctgctacacatactcacaacgctgccgccgcgctccgtgggcaactcctactactgctgggctgggctgggctgggctggg

SEQ ID NO: 106164 - DNA, 122 bp, Homo sapiens
aggaggctgaggcagggaatggtgtcaacccaggaggcagagcttgcagtgagccgagatcgagacactgcactccagcctgggcgacagagcgagactctgtctcaaaaaaaaaaaaaaat

SEQ ID NO: 106165 - DNA, 122 bp, Homo sapiens
ctgtcaatggggtaaaagcccggatggtgcgcccaatgtcagcccgaagccaccagatggcgcgcggaacccgcaatgcacgtgcgccagcctcgcgtttgtccccgcactggccccaggcc

SEQ ID NO: 106166 - DNA, 122 bp, Homo sapiens
gagttgcgagtgaggaaattctggctcgtggcttcgattccttcatccgtacaatgggggcgacttgagacggagttcccacacaacgggtgctcgccgaagcgccgcatccctccgcactc

SEQ ID NO: 106167 - DNA, 122 bp, Homo sapiens
gagtcccgggacgctgtcctccagcgaggtggggaccggctatgtccctcagttccccctcggtcctcgggccacagggacattagactagggggtcagttctgccagccctgcccaggcct

SEQ ID NO: 106168 - DNA, 122 bp, Homo sapiens
cctttcccggctctttttacccggaacccggcgcgccttgaagaaggcaggcctaaacctcgtagctcttggggtcccggtaactacttaggtcccgaacttttttaagtatgcagaagaac

SEQ ID NO: 106169 - DNA, 122 bp, Homo sapiens
gcaggcaggttatccggccgccactccagggtcattaaatcagactctccagtgggacctcggaattcgtagcttagcaagctccccaagtgatgctgggagtaaactaacgtttgagagtc

SEQ ID NO: 106170 - DNA, 122 bp, Homo sapiens
acacagggctcttttggcctgaaggaggacactagcagcagagccggcgccggggcacaccgcgtgggaggcgccggggcacaccgcgtgggaggcgccggggcacaccgcgtgggaggtgc

SEQ ID NO: 106171 - DNA, 122 bp, Homo sapiens
tggacgggggggggttaccagagaaaccgtggacgggggggctaccagagaaaccgtggacgggggggggtaccagagaaaccgtggacaggaggggggtaccagagaaaccgtggacgggg

SEQ ID NO: 106172 - DNA, 122 bp, Homo sapiens
tactttaattaaagtttatgcagttttccaggagcgtcctgtacctcatttcggccctcacgtttcagggaagccctctccacagttacaggcagaaagggtgggccactgagcagcgtgag

SEQ ID NO: 106173 - DNA, 122 bp, Homo sapiens
ggccgacttcccaaacgccctttctcttgagggttggaagcgctgttctgtatttggccacgcgggggagctgctccgcacagctcaggactaagccacctcacgggaaacgccagcgcggg

SEQ ID NO: 106174 - DNA, 122 bp, Homo sapiens
cagacactaggcaggagtgagaccaactgctgtatcagatatacacctagcttataattacgtgtcaagagaaggaagattaggcagacatcagtaaccgcaagaactgaaatgtgatggct

SEQ ID NO: 106175 - DNA, 122 bp, Homo sapiens
gctcagcgaattccagctcagagcgggctctggcggcttccaggcagctccacaatgaggcggctgcgcttttccagtctgctcatcaaagcagagccagccttgtgtggcgcggcgtgccg

SEQ ID NO: 106176 - DNA, 122 bp, Homo sapiens
gggggcgggggcagggatgcacttttgcgcatgtgcttacagtcctgacgtaggaaggggcggggctttgccgaagggggcggggctctcgctgatgggttggctttcgtcagggacatagg

SEQ ID NO: 106177 - DNA, 122 bp, Homo sapiens
acgtttgcgtgcgtgcgcaccgtcggagggcgggacttccgccgtcctcctggtggtggtcgttttggttctgtgtggtgtttcaccaacttcggcctatggctctgtctgacgtcaccgaa

SEQ ID NO: 106178 - DNA, 122 bp, Homo sapiens
gggttacaggggtgagccaccgtgccttgctatttatgccatctatttcactgaagattccgcctctcatttcttgagtcattttttttaaatttccttaaattggacttcacatttttctg

SEQ ID NO: 106179 - DNA, 122 bp, Homo sapiens
aggctgaattgtggccctttcaccctttcttggggtggccagcaagcgcactgtgcagaccgtgtgcccagtaactcacagggagcagacacatgcatgttggagtaagtggggcctgctgt

SEQ ID NO: 106180 - DNA, 122 bp, Homo sapiens
cgaggcagtcaggggcctgcccaacccccccgctcagggaccccacgcctctcgcgacttcgtctcttcatctggaccctgaaactgttcccacgggggccacccaggactcctggacccaa

SEQ ID NO: 106181 - DNA, 122 bp, Homo sapiens
aggacttccttctggctgttccagtactcggcatcaggccgcccctgcggcgtcaccgcgcggtacacccccacgtcgctgtcgaagcgcgcgtactcctctcggttatagatgtatctggt

SEQ ID NO: 106182 - DNA, 122 bp, Homo sapiens
aaaacgggaaaggtgacatctctgaggagcgttggtcacgtgtgtcaaggcctggtgacgcgtgtcttatgtgcctccctgggcatcttctcagtacagttctcagtagaagcaggggcagg

SEQ ID NO: 106183 - DNA, 122 bp, Homo sapiens
actcgggtgcaccacggcttccggtgtcatggctgcttgaagtcccgggagtcggtgaggcggctgcaggtccctccctgcggagccgctggtccggctggcggagatgtgaccgcgggccc

SEQ ID NO: 106184 - DNA, 122 bp, Homo sapiens
atgcaaatccacagggtaacctaattatatgcggaatgaaagcaatgttgaacatgcaggcgcatgcagtgattttgagcagaacaaattttttttaaaatgaaggaacaaaagcgcacttg

SEQ ID NO: 106185 - DNA, 122 bp, Homo sapiens
ctgagctgagcggcttcagaaagtagagcccctctgtctttggtatcaaggggcggggaccgttatcatccactgaacaatcgagcacttactgcctggcaagccccttgagctgtgcgggc

SEQ ID NO: 106186 - DNA, 122 bp, Homo sapiens
ggaggagccaggagccatttgccttctcattggttgggacctggccctccctcttggccgcgccccctggtttcctgacaccgctccaaccttaaccttaagccccgcccgttcctccgaaa

SEQ ID NO: 106187 - DNA, 122 bp, Homo sapiens
ttcctcttacgatttcactaatggcagctcaaagctgctgagctctgccctgacggcatgcgcccccgcttctgtgagagcacgcttcctggcatgggggtcgaatcatgtcgataaaatgg

SEQ ID NO: 106188 - DNA, 122 bp, Homo sapiens
gacagtccctagactgtcacagcttggcgccatcccactgcttgacagaccatagttagccgttgccctttgtagcaacactgggaactttcctcctttcccgtcttctttgtgactcagtg

SEQ ID NO: 106189 - DNA, 122 bp, Homo sapiens
ccgccgctgccggacgcagctggggcttcagcaggcgcggccgaggaccaggagctgcagcgctggcgccagggcgctagcgggatcgcggggctcgccggccccggagggggctctggcgc

SEQ ID NO: 106190 - DNA, 122 bp, Homo sapiens
gtggacccctgtgtgaagcgtagcagggcacagagcaggcgagacgtttgcatctcacagcgggagggccggcgacatcacatgaagtgacaggcaggcccttggaagccggtgcttagatc

SEQ ID NO: 106191 - DNA, 122 bp, Homo sapiens
atctatggtatgcagccacccacaatacccctcctcagcataaagcagccagaaagatcacgtccagattccccatgattgaggaattgataaatagaaacagggaactgaaaccagctcca

SEQ ID NO: 106192 - DNA, 122 bp, Homo sapiens
ctcttggcagcgtcttggacacagtaactcaacataggcagacagcattcctgagcgtctcgctactccctgagctgccttcgtgacgctttttataccacagtggaatcgtctacttgtct

SEQ ID NO: 106193 - DNA, 122 bp, Homo sapiens
ttgaagccagtgctggatcttgggtctgtgctgctgacgttttagaacatgagaaagagccgcagtaggagccaagtatctgccagactgtgtcgggagaacctttatcatttctgtcagat

SEQ ID NO: 106194 - DNA, 122 bp, Homo sapiens
cattgtctctgctgccttgcatttctttgggccctgaatggtttttctcccttcatttttcgagcctttctctcagtgcagctgttcttcagggaggaggttactgggcagccttggccatt

SEQ ID NO: 106195 - DNA, 122 bp, Homo sapiens
gctaatgtcagcttcctggctgtgtattgtactatggctttgtaatgtggtaccatggggcgtaagcagggtaaagggtgcacaggacctttctgtatttattttctaaaacttcatgtgaa

SEQ ID NO: 106196 - DNA, 122 bp, Homo sapiens
tgaggggcaggagaggagtctagacacgcctggctaacgagggggcggctttggcctctgcgcgcttgccgggtgggtgcaggtcccctgcccctgccctccccctttctctggccttagga

SEQ ID NO: 106197 - DNA, 122 bp, Homo sapiens
gcacagttcttgtaaaaaatagatctggcacaagaggaacacaaatactggcaaataccacgtgtctcaagttatattttaagaaaccatacaatccatgatatttcacaaagttgtttatt

SEQ ID NO: 106198 - DNA, 122 bp, Homo sapiens
gccagcagcttttccagggagcccgtctccatgtactccatgaccaggccgacaggttcgcggcagatgccatacacaggcaggatgtagcgaaacttggccatctccatcttcttggcttc

SEQ ID NO: 106199 - DNA, 122 bp, Homo sapiens
gccttgcagcccgagacctcaggaggcccagccctcaggtccgcgccgcgcaggggcacacgtttctttcaagactcgcacgaagccaattctgtgtgtttggcacaccccacactccggaa

SEQ ID NO: 106200 - DNA, 122 bp, Homo sapiens
ttcctcatgctcctagcaagaccaccactccctgcttccatgacactactcatctcacaacggatggcctgacaaggcagtcccaacaagaagtccacaactggattggagtggtgtctcat

SEQ ID NO: 106201 - DNA, 122 bp, Homo sapiens
tcagcagaagcgccagtcagatcccctttttattaaaatcctcaaagtaaattccaccgacgaagtgtccacacattacagagagtatcggaacagccaggcatttaaagatgggctggagg

SEQ ID NO: 106202 - DNA, 122 bp, Homo sapiens
ctggcgggggagacttgaaaccgttccggtgctccgattggctctcttggagaaaaggggcgtggcccctccttactatgcggtgagaggacctaacaacattccaggcgccacggccacgc

SEQ ID NO: 106203 - DNA, 122 bp, Homo sapiens
gaggcgcaggagccctggggagagtggtccctgcccttccgcgcctcgagccatcgctaccgcccttcggaaccagtgcagcggccgatcagtaaacacagagactggggtctgtagagaag

SEQ ID NO: 106204 - DNA, 122 bp, Homo sapiens
ggtaactccccccaccgcaattctaattaacgaggctgccgctgagtgccagagtgagggcgtccacatgcgcgtgcacccgccgcctcatcgccaactcacgtggcatcgctgagtctcag

SEQ ID NO: 106205 - DNA, 122 bp, Homo sapiens
aagggggggggagactggcatattgcttgttccagcgatgtgtcttttctttcggaagctcggtggaaagtgtggctgtaattcttctgtcgtgtcttgtttcacagccgcctgtccagtgt

SEQ ID NO: 106206 - DNA, 122 bp, Homo sapiens
ggatgcggtggaccttacccactcctctggggctcttctatggctgctgggcactttcaccggtctcagaccctgcaatcagcaacagagcatttcactgtgcctgatgccgctgagcagag

SEQ ID NO: 106207 - DNA, 122 bp, Homo sapiens
atcggggccgctggcaggggccctccgcagccaccagggatggggctgtggggcagttcccgccccggtgcagccgccgccgggcagaccgcctggcttggctgcagccgcggcatctggct

SEQ ID NO: 106208 - DNA, 122 bp, Homo sapiens
catgggtgtcagcccgtccttggaggaacgtgcggcctgccgagcacagcccacgggtttcggttttcctgctcagcagccctctggaattccgccatcatcgtttctacttcaggctgctc

SEQ ID NO: 106209 - DNA, 122 bp, Homo sapiens
tgttaacagcctggacccaactttctgggggctcgtggagctggcagggagtgaggaggacgaaggctgcagccctcaccacaacccaacttactggtaagaagactggtggttcctgaaga

SEQ ID NO: 106210 - DNA, 122 bp, Homo sapiens
ccagatgtgttcagaactcctagtaatgtaatgcaggcaaaaaccatatttacatgaagtcgtgttttgaatatccttttccaattatctggaatgagataatagatccctaattggaagca

SEQ ID NO: 106211 - DNA, 122 bp, Homo sapiens
ccccggctgaagggagccatggctctgaggctgagtggttgagaatcaggtggagctacccgtcttctagacgacatcctagcaccacctccacccgcatgagtggggcctgctggcgtgga

SEQ ID NO: 106212 - DNA, 122 bp, Homo sapiens
cgccggctttcctggagaaagtgcccatccctctggcttggaggggcttctagttgttgccgcagctgctccttctgcttctgataggcatcccggagctgggccagttcctctgagagctg

SEQ ID NO: 106213 - DNA, 122 bp, Homo sapiens
gacaggcaacaggtgagatgttcttatggggcagtgcccagtgggagggtctcaccgcagcggtggaccttactgtggtggggcagagcatcgagatcaactccagctccgccactccagag

SEQ ID NO: 106214 - DNA, 122 bp, Homo sapiens
agagcgctccttagcagccaagggctgtagagcccgcaccacgtgctagggagcgcccagcgctgtttttctcatcaaaatccccaaggcaatagcagcagcaggggatgaataataggaaa

SEQ ID NO: 106215 - DNA, 122 bp, Homo sapiens
cggaggagtgtgtcgggagatgtagttccgcgagtcccgacagcaaagctgtcccggctccgctaatagattgggaccactactcccaggagtctgcgcgcccgaccggagcgtccatgcgc

SEQ ID NO: 106216 - DNA, 122 bp, Homo sapiens
ccttcaggggtcttttcaagggtctgccttggggagcagaggaagatgaagtgaggcagtcgttatagcaagggcacacccacgtttctcattttgaacagtgaagaaagcagatggaaagc

SEQ ID NO: 106217 - DNA, 122 bp, Homo sapiens
ctcgggagcccaggggagccaggtgctgggcggtgcgtccggtgccgccgcgccccttctcgccacctctggcctctccgccactcgggctttccggccgctctggatgcctcggttgcacc

SEQ ID NO: 106218 - DNA, 122 bp, Homo sapiens
agtcccgatttggtttcaagactaacggcagcaggaggtcacaggaggcttgaacctctccggggagacaaccgctgtgccggggaagaaacattttgcccatatgttgggctgcttgggcc

SEQ ID NO: 106219 - DNA, 122 bp, Homo sapiens
gggtggaacataatgtctaaacctgggccctacctacctggtgctcaaaagtggaatgaccgtccctagccaacccttcagaaaggacagagagctactcaacggactgctgtactcttaag

SEQ ID NO: 106220 - DNA, 122 bp, Homo sapiens
aaagtctgagaaactgtcacagtcaggaggcaccagaggagatgcaacagctaagtgtaacgtggcatcctggatggggtccggaacagaaataagatattaggttaaaacaactagtaaat

SEQ ID NO: 106221 - DNA, 122 bp, Homo sapiens
caaaaggccacagacagaacaattagtcatataggagggatgagatgacatttttactcccgaacttttctggtataaaagggccacccaatgagggtctgagagtaagtgtgagaaatttg

SEQ ID NO: 106222 - DNA, 122 bp, Homo sapiens
caatacgttatcagtgagatatcaaagcccggccaggcctctgcccggacccttctgggccgccccacctgcgaggatgggagtcagaaagcccagggcgggccacaacgtggtggcattaa

SEQ ID NO: 106223 - DNA, 122 bp, Homo sapiens
ttcagagtccagaccctagagtcagactgcctggctccaccacctaccagctgtgttgggcgttactaatctccctataactcagtttcctcagtgatgtggtttggctgtgtccccaccca

SEQ ID NO: 106224 - DNA, 122 bp, Homo sapiens
agcgaagccaacagggcagctggtagctctgctgagctcccgggccgcgaaagactgaaacgcctacccggcccagcaggggggttgggggcggggtctcggctggccacgcccctccctca

SEQ ID NO: 106225 - DNA, 122 bp, Homo sapiens
ggagagggcatgggaagtggggttttgtaggatgaataggagctccccaggtctgggctacgtggcagtgacaggaattgcatgtataaagctttggaggcaagagagagcatgaggccctt

SEQ ID NO: 106226 - DNA, 122 bp, Homo sapiens
ataattttggaggctggaagtctaagatcaaattgtcagcagggttggtttctcctgaggcgggtctccttgcagacggcccccttgtattgtgaccttgatttctgtgctcgtgaatcctt

SEQ ID NO: 106227 - DNA, 122 bp, Homo sapiens
cagtgcccccggggcccctggctccagtttgtacgcggcagccagatgccccaggtcaggcgcgggaaaggggctgggaagtaacgatagatgctggggccattcgacctcctcttctgcct

SEQ ID NO: 106228 - DNA, 122 bp, Homo sapiens
tgtcaatgtcatccaatatgaggaaatcactgcttgtcaattcccattacacttgcttaacgtttgttctccaactttctaaacaaattctttttttctgtgtcttcaaatctgctgcacct

SEQ ID NO: 106229 - DNA, 122 bp, Homo sapiens
gaaaacagagtgagagcctagacgctgttaagccctcaactgtcgccattgggtcctccccgccgaagcccattggtcggtcctttgcaaggggggtggtcttgatgtcatgctccaaatcg

SEQ ID NO: 106230 - DNA, 122 bp, Homo sapiens
gacagctgtcattcaagcaagcaagccaaaatatctgtcaagaacaagggcaaggccaggcgcagtggctcatgcctgtaatcctagcactttggcggctgaagcaggaggatcacttgagc

SEQ ID NO: 106231 - DNA, 122 bp, Homo sapiens
ctacaaaaaaatgtgcctccttcacaaggttgttgtgggaatcaaatgaatttggatttgcgaagtgctcaaacaatgcctggcacagcatgagcactggccacgggcatatcttctctaga

SEQ ID NO: 106232 - DNA, 122 bp, Homo sapiens
gaagagttctcccgaaggatctatgcactgaatgaaaacgtatccagcttccgccggccgcgcaggagttccgataagtgaagtgagcaggtcaacagtaggactggggcagaagctctgcc

SEQ ID NO: 106233 - DNA, 122 bp, Homo sapiens
ggtacagttcagagcttggcagcagcaatttaagacaaggaagctctgactagaacaagccgtaacatgttaagtctaaagcctaaactcttcagcagattactctccacacatgcatagca

SEQ ID NO: 106234 - DNA, 122 bp, Homo sapiens
agctgacagaatatggatttcctgcttgactaatgtcagcccacaaatagatgtggctgacgtcacttacaggaaccccttccttttccttacctcagcccctccaaggaggtgggtggggg

SEQ ID NO: 106235 - DNA, 122 bp, Homo sapiens
ctaagcctcacagtccaggccctccaccagcctgcctcaccctatcctcatttcatctcccgcaacctggctccggtgagtgctcttcgtagtcagactgggctgtttattttctgcaatga

SEQ ID NO: 106236 - DNA, 122 bp, Homo sapiens
ggacagagtgagactctgtctcaaaaaaaaaaaaaaaaaaagctgaggcgaacgcctctgcgccccctagaggttggagagtgcaaccaacaatgagtgtgaacacatggaaaagctcagtg

SEQ ID NO: 106237 - DNA, 122 bp, Homo sapiens
aggacaatcacaccatttttcaatccattattaaagaagagccatcagcctgcctttccacgagtaagcgggtggttttaagctttgactgcttttatctccctgcagttagcaggccctgt

SEQ ID NO: 106238 - DNA, 122 bp, Homo sapiens
ccagaataacaatctcattcaaggcatcacgacgttccttctcagacagccgggtcaaatcgacttccttccacacaaccagtgagtcatcctaaacacagtaacagaggtatcgtgctttt

SEQ ID NO: 106239 - DNA, 122 bp, Homo sapiens
tttagttacctttatgttttctggttgcttagatttacttgctttttttaagagcaaaagcgaggcttaagaaccaactggaaacaggggactgacgatattatataaaaggtaatggaaca

SEQ ID NO: 106240 - DNA, 122 bp, Homo sapiens
gggtgtgggagggtcaccccaacaggcgatgcccgagaggtgtccgggcctggctttccacgaggaagaaccagtcccctgtgccatctgcagggcttgccacacaatctggggacccggtg

SEQ ID NO: 106241 - DNA, 122 bp, Homo sapiens
tctctcccaagacttagtttcaggaactagaaaattctgattcagcttgggtgcaatggccgctcaaagggcgaggcttattcgaagcctcaaattcagaaaacccagccagaccttggaag

SEQ ID NO: 106242 - DNA, 122 bp, Homo sapiens
ttcctttatagctcagaggggtactggctaggatcccctagagctcaggaagccactgaacgtactcatttgtgaattcagtctgctagaagccaggcaaggcaaaagcactgtgtgaggtg

SEQ ID NO: 106243 - DNA, 122 bp, Homo sapiens
gtcagggaaggcctctccaaataacttccatgatatttcaagcccagagaacaaatgaaacggagatgtcactgctagaaataaggatattgagaagaagacttagcttgtaagagtataga

SEQ ID NO: 106244 - DNA, 122 bp, Homo sapiens
cactcacaatgttgtgccatcatcgctactatctaatttcaccactccaacgagaactcccgtcctcaagaacagtcactccccattctccaccccattcccccaggccctggcagccactc

SEQ ID NO: 106245 - DNA, 122 bp, Homo sapiens
acttgagagtctggggagtgccggggaccgtgcagatggactacatttccccgcaggcctcgcggcagacccttcccccaagtgcggctccttgccgccagggctgatgggaaatgtagtct

SEQ ID NO: 106246 - DNA, 122 bp, Homo sapiens
tgagaggccccggccgctcctggcgtagtccatcacatggcaatagtcctatttaagccgcgccgccggcgcctttcagcaccactagcgctggccagcaccccgcgctctttgggcggtgc

SEQ ID NO: 106247 - DNA, 122 bp, Homo sapiens
acgcaaggaagggctgggctgcctggctcgttgtcttggggagacgggcgggtgcaagcccgggatctgggctctgagagtagaggttggaggagcagcagggaaatgggagaccttcggac

SEQ ID NO: 106248 - DNA, 122 bp, Homo sapiens
taaaaaaacggtcaaagggccgggacagaagcatttgaaatgaaacacaagggccgggcgcggtggctcacgcttgtaatcccagcactatgggaagctgaggtgggcagatcacaaggtca

SEQ ID NO: 106249 - DNA, 122 bp, Homo sapiens
taatttatgcaactaacttatgtggtaggtagaataatgcctctcttccccaaaaatgtccgtatcctaactccaggaacctgtgaaaacaggagaccttgcatggcaagtgactttgtaga

SEQ ID NO: 106250 - DNA, 122 bp, Homo sapiens
tcgaactggcttgcccgtggcgggcttgtccaaagcacaggggcctccgccttcggtgcgcgttgttctcaggattagtgctgttgggagacaaagagccccagatacccgaggctgggagc

SEQ ID NO: 106251 - DNA, 122 bp, Homo sapiens
gggaggcaacccgaagcccccaggcccatgtccacaaagcggggaaacaaacagcagcaccgctgacctgtcccttggcctctccatgcctgtttgcctctagcttttcaggcatcggacca

SEQ ID NO: 106252 - DNA, 122 bp, Homo sapiens
agactaatctataacctctgcctgaacctcactctctctaaaagcaaccacttattccaacgggtgtggattgtttcagattacactattgtttctgaatctcgttgtaaagtgactgggtt

SEQ ID NO: 106253 - DNA, 122 bp, Homo sapiens
atccccagcagggatccctgggccaggtttaggctcggtctcaactctccctgtgctctacgggatgctattgtggggaagaaggggctaaactgccagccaagctttcagcgccagttaca

SEQ ID NO: 106254 - DNA, 122 bp, Homo sapiens
gctggtgaagtattcacatgctaattatggttctttttcattcaagccactgatggctgccgcttctagtcagccatctcagccccgcccccagaatttgttagttttctgacttaatgatc

SEQ ID NO: 106255 - DNA, 122 bp, Homo sapiens
cggccagcgcatgcccagagaggtcgtaaggaggacgaccgcccggagagaaaggacgcacgcttcccgccattttgttcagcttgccgggcaaccggcccctgctggggactacaagtccc

SEQ ID NO: 106256 - DNA, 122 bp, Homo sapiens
cacatggctatcatgaggggaagtctgtattgttgagttccaggcaccagcctctatccccgtccccatggttgctctgttcttgagccttttgagcaagcaccaggctgtctgaagaacaa

SEQ ID NO: 106257 - DNA, 122 bp, Homo sapiens
accgcagactcccggctgagtaccgcccggctgcaggcactgctgttcggcgacgaccaccgctgcttcacacggatgaccccggccctgctcctgctgccgcggtccgagcccgcgccgct

SEQ ID NO: 106258 - DNA, 122 bp, Homo sapiens
atcggccacctcctccctgtgagacggatgcaggtccttccctcttctcggcactgcccccggccttccatgagaagccgactccccacaccgagttttaaagcaaagcccttttcttctgc

SEQ ID NO: 106259 - DNA, 122 bp, Homo sapiens
aatggaacaaagcagtatgttagaatcatctgggggttttaaagatcttcatattcaggtcgttccccagaccaattaaatgagactcttctggtggggtccaggcgtgaacattttaaaaa

SEQ ID NO: 106260 - DNA, 122 bp, Homo sapiens
tcaggtcactggcagagagcctcgtgccgttagacgtggaacctgccgttgtgatgaacacgcctgcaacaattgtctgcgccatttctgtcacgtgtggctccagcgcctttgggaccaga

SEQ ID NO: 106261 - DNA, 122 bp, Homo sapiens
tgacatcggtctcctgaggttcctttcattcccaagccttttcgggttctctgttcgagacggtttgcttcttaatttgtcttccctcctgcaggtagctggggtgcagcttgctctccttg

SEQ ID NO: 106262 - DNA, 122 bp, Homo sapiens
cccgagctgctccctcacgtgtgtggcccaggcgagcctcaccagcgtacattagagaaacggaggtcgccgacctctttaccacagccgggccctgtgggtctgcctggagtagagccctc

SEQ ID NO: 106263 - DNA, 122 bp, Homo sapiens
gagcgaagctggacaggggcgggtgggcggctgaaggggccagttattagttctcctctccgtccccagacgcggggagaccgttccagggagcttggtgggggtagggacgaaaagtctgg

SEQ ID NO: 106264 - DNA, 122 bp, Homo sapiens
ggctccgacatccaccaaagtcctggcagctgctgggctccagacggtgttcccacaagccggggaaggtttttaaaagataaaagaaacaaacagcagcaaccacaatacacagagtcagc

SEQ ID NO: 106265 - DNA, 122 bp, Homo sapiens
cgggcaccgagatccacaggtccagagtctagtcgccacccacaccctgtcttttgggagcggtgcgcgccatctgcgcatgcgctccccatccctgccaggtccccggcggggtcagccgg

SEQ ID NO: 106266 - DNA, 122 bp, Homo sapiens
ggctgtcagtgcacggtgcctggcggtcaggtgccaaagaacgagcctcagcccacacctcgcactgcacgcggaagttagctcaaagcagatcacagacctagggggagagttaaagtaca

SEQ ID NO: 106267 - DNA, 122 bp, Homo sapiens
cccgccccgcacaagctccgccccgcatgcgcgccccgcctcgcatcccggatctacccccggaatctcgcgcgtctttcccaaagcatcggctaggactcagcccgccggaaacaaatttg

SEQ ID NO: 106268 - DNA, 122 bp, Homo sapiens
gttctgtggaaaccccctcatggttcagctggggcccgggcattgtccctgctcctcgcgcgcccccttacgcaggcaacaccggtggccagcatctggcatgtgggggcacaggctgcccc

SEQ ID NO: 106269 - DNA, 122 bp, Homo sapiens
aataaatcactgctccacggaagctttctggcctcgcctccctggacatctgtttgggggcgcaaaggctcctcccacaccgtcccccgccccctgcccccgttcttccctggaaccacatg

SEQ ID NO: 106270 - DNA, 122 bp, Homo sapiens
aagggtggctgggcgggctgggggaagatccctgggccaggacaggatctagggctcccgcgaagacacacatctcactcatggggaatggttttggggtgatggactgaaggcctgcaggg

SEQ ID NO: 106271 - DNA, 122 bp, Homo sapiens
gtataaaggcgtgtggctcaggctgagcggctgggaccttgagagcggccaggccagcctcggagccagcagggagctgggagctgggggaaacgacgccaggaaagctatcgcgccagaga

SEQ ID NO: 106272 - DNA, 122 bp, Homo sapiens
ctgaactgaaactcaggaaacctggttttccgagctttggctgtggtgtcctgaggaaatcggtccacctccgtgccacactgtgccggctgagaccagatgagaaaggggaggtggagaaa

SEQ ID NO: 106273 - DNA, 122 bp, Homo sapiens
tcaggaggacaatgaccatgccagagacggtttccaaatgaagctggatgcccacggcttcgccccggaggaactggtggtgcaggtggatggccaatggctgatggtgaccggacagcagc

SEQ ID NO: 106274 - DNA, 122 bp, Homo sapiens
tgtccggccctaatcctcgctcctcacggaggctctttgtcacagcgaagactgacagcccgcagtcttctggacttcttttatggggctcctggcggtgctattcattcagtcattgattc

SEQ ID NO: 106275 - DNA, 122 bp, Homo sapiens
actggcaatgctgagaggacccagaggagtatctcagtctccagtctctttatcttgcttcgcacaactccttgcttggttcagagccttgaagaggcggatacaagaggccctctgggcac

SEQ ID NO: 106276 - DNA, 122 bp, Homo sapiens
gtagagatcaggaacatttagtgatttttggccatcccctgaccttcctaaacatcataacgtcactgcatgctgggggactgacctgcaaagggagcttgtcaactttgatgatctagaga

SEQ ID NO: 106277 - DNA, 122 bp, Homo sapiens
tgcgggcgcgcgtgaacacacggctgaaggtcataggcagcgcatccaggcaacagcattcgttggcggatttttaaaggttcttagatcaagagggaaagcgtgtgaaaccgattccgttt

SEQ ID NO: 106278 - DNA, 122 bp, Homo sapiens
aatgattcagtgagcaaattttgcaacctctgaactggaaggcggggataccaagcaagccgtgggtagggacacctgggcagtgactgcatgccctggaggccacttggatcccaagtaag

SEQ ID NO: 106279 - DNA, 122 bp, Homo sapiens
ccccaaagaaaatccagttccccccgaagcaagagtcgctgttccaaaagtgaagcctgtcgtctgtgtggccggagtctgggtggcaagtgagaacaggccggtggaaggggtacttgtgg

SEQ ID NO: 106280 - DNA, 122 bp, Homo sapiens
aggccgtcttccctctcctggggatcagtcgttcacagaaccaaaaacaagttgcatggacgcgcgcgttggctgcagattttcttcacagccaggagaaagagcacgcgctctccagcccc

SEQ ID NO: 106281 - DNA, 122 bp, Homo sapiens
aaaaacctggatttaaactcgaatagttcaactccagaaccaatggttttaaggtaatcccgggtgactccacagcacccacagtttgataaagataaagtcacgatttcagcctcaaaagc

SEQ ID NO: 106282 - DNA, 122 bp, Homo sapiens
ggagaccgagactgagattgcctcctttctcttgcaatatccttttttggggactgagaacgggattttttccggcctctggctgactcattcttaggagatggtgattgagacttcctgct

SEQ ID NO: 106283 - DNA, 122 bp, Homo sapiens
cttatcctggggggcactgggcagccaaggggagggtgctgagcagggaaggggtatattcgtgtttttgagaccttggaggtaaaagaagagagattccagctgggggctggggctggtct

SEQ ID NO: 106284 - DNA, 122 bp, Homo sapiens
tgaagaaaatggtggaagtcctgggcaggaccttttcctcccttcaacaggggacccagtcgtcccctcctctctctgtaaaaatggagggtctgcctgaccctccagggccagggggtatc

SEQ ID NO: 106285 - DNA, 122 bp, Homo sapiens
ctcatctaaacccaattttctcccaaaggcccatctccaaataccatcacactggggttacgtatttggtgggaggagcaattaatctcatagtaatattatatacctgcccaaaaaggtag

SEQ ID NO: 106286 - DNA, 122 bp, Homo sapiens
tgggggcttcggggctgtaaaaccgccagaggtggctgacgcccggtcgggtctggggagcggagactcgttttgcctagtttcaggtgctcttgcaaggccaactgggtcgggaggcagct

SEQ ID NO: 106287 - DNA, 122 bp, Homo sapiens
agttatcggaggagcaaacaggggctaagtccactggctgggatctgagtcgcccgcctacgctgcccggacgctttgcctgggcagtgtacagcttccactgcacttaccgaaaggagtca

SEQ ID NO: 106288 - DNA, 122 bp, Homo sapiens
gtgcaagactccgtctcaaaaaaacaaaacaaaacaaaaacaaaaaaccatgctacttaccgaattgaggtgaaaattaaaagacctagggggtcacccaaaggttagaacatgaatcaata

SEQ ID NO: 106289 - DNA, 122 bp, Homo sapiens
ctggggcgccgagggccgcgacgtctgcgcagccaacggctcgggcggcgacgaggggcccgaccccgacctcatctgccgcaaccggacggctaccaacatgatgtacttgctgctcattg

SEQ ID NO: 106290 - DNA, 122 bp, Homo sapiens
cgcgaagacggtaacccgtgtgactttgactgggtgagcctcccgcgtgttagtaccccgcgaccttgactgtccctgcccttgcaggtgtatctgggaaccctggggtttacctctctgag

SEQ ID NO: 106291 - DNA, 122 bp, Homo sapiens
tggatgatgtgctgagttagggatgtttatatgccgcaaaggtttggttggtaggcttcgcgctaagattagcctggctttgtactgaaaagggggaaggacacatagtgacacagatcctt

SEQ ID NO: 106292 - DNA, 122 bp, Homo sapiens
agggctggagccacccaatccgaggttccactactaatagacattcattggcccttactacgagctgggcgctttatttcattcatttattcattcactgtgtgcagggagcgtcctgggag

SEQ ID NO: 106293 - DNA, 122 bp, Homo sapiens
ccgccatgggatccgcggtgacctacgaggggcggctgggtggtggccattgggcgacggcgcagggtcaagggccgggctctgggatcgtggggagaccgggggtcccggagccccccagc

SEQ ID NO: 106294 - DNA, 122 bp, Homo sapiens
acttcacttcccattgattgcccctaagagtcatcagaccaggaatccgaatgcaaacaacggttaagagttagctggcctttggatgtatttataaagaaaaagcctaaaatttgaccagt

SEQ ID NO: 106295 - DNA, 122 bp, Homo sapiens
gaggggtctttggcaccctgcctaggagtgatgagaccttaaataaagtgtttgtggacacgaagtgacacagaatctgaagggaagttagggaagcagttctgttactcaccatatcaagg

SEQ ID NO: 106296 - DNA, 122 bp, Homo sapiens
tgggttcaaaggggagagataaggcgcagactagaaacgctaggctggacccgggccaggcgcgccgcggggcagagatgggcggagcgggaacgggggcgggggcgagaatgggggggcgg

SEQ ID NO: 106297 - DNA, 122 bp, Homo sapiens
cgtccccgccttccccctgtacctgtgcggttggattgatcgatcataggttgcacgatgcgtctccgggcgttaatgaacctgggaggcggtcatggaaacggaggggaatgaaaagaggg

SEQ ID NO: 106298 - DNA, 122 bp, Homo sapiens
aaaggacgcgaggcggcgctgtcaccgcattctgtgaaccgcagcgctctgggtccctcccgctggtctagtatcatttcagtgaacgtcactctacattttttgtgtgtgtgtgagatgga

SEQ ID NO: 106299 - DNA, 122 bp, Homo sapiens
taagattagatttagatttagatttagattaagattagatttaagatttaaatctttctacgtattgtgatcagaatattgaggaggttgttttagctaagtactttttaattgtgaccttt

SEQ ID NO: 106300 - DNA, 122 bp, Homo sapiens
ttgattctgccgcagtggagccagcacagcggatgttttcacacccagcaagacaaaggccgtcgtctccgccatgacactgttccgttccaagcagaggccgggattctggactcctcgaa

SEQ ID NO: 106301 - DNA, 122 bp, Homo sapiens
tacccatggaggcagaggctcacctgggcacccttctctccagtggggccaggtggtccccgaggtcccggaagtccctgcagatggaagcacagttagttaacccatatcctagaatggcc

SEQ ID NO: 106302 - DNA, 122 bp, Homo sapiens
agcaagctagagactgaaaaacttccactagatttagtgtgaacatttttgggggcagagcggaaaagataccagaccagagaggattgaggggtaagtagtgaagtaaaaacagcaaatgt

SEQ ID NO: 106303 - DNA, 122 bp, Homo sapiens
tgttttcacctaaaccctttctgcttagttgtatctctgtgaaaaacttgtatacacaagcgtccatgtctcacacaaatattgatgtgattattcttaagtgttaaatcattaacacttaa

SEQ ID NO: 106304 - DNA, 122 bp, Homo sapiens
acgctttacacacgtgcggcttgttgtgtctcacaacatggcactgtttcaaagaatgcacgagaatggacagactctgtgcagtgaatctgcagggtggactagtcctcagccccgaagag

SEQ ID NO: 106305 - DNA, 122 bp, Homo sapiens
tcctgagctaggctcctgtcccgaccccttgccacccagctggagccttatgatgcgcagcgcgtccaggccacaggctaggggcccgttacagttcctgccttggcggaaactcgggccca

SEQ ID NO: 106306 - DNA, 122 bp, Homo sapiens
taaaggaaccccacacagcctgaccctgtaccttccccttccccagccgggattccaccccgatacctcccagagacatcctgagccacttacctgaatgcccacaggaactcctgagcaga

SEQ ID NO: 106307 - DNA, 122 bp, Homo sapiens
aatcttcctaagcctttggaagcgcctggttgaaattacagtatttcctttgctggctgccggccccctgcccgccccacccggagaccagcacggcaaggcaaaggcgcgctccactcact

SEQ ID NO: 106308 - DNA, 122 bp, Homo sapiens
agacggagctcagaaaggaggggaagaagagggatacgggcgactggaaattccctggaccggaggcagaggaaacgctccagggagtgaaaaagcctcacactaaagcacgtggctgagaa

SEQ ID NO: 106309 - DNA, 122 bp, Homo sapiens
cagcgtgcccaagtcccgtgacttagtgccaggacggtgctgtgacccgttatcccctgtcgggttttacctccccccgggagagctcagccctggatcccggcgggcggcggagcctctct

SEQ ID NO: 106310 - DNA, 122 bp, Homo sapiens
aacagatgtggtttgggatgacaagcccctgaaggctggacttggggcacctcttaggggcgtctccactgtcagggatgggtaggggaaggggacaagagagatactaccatccaccaggc

SEQ ID NO: 106311 - DNA, 122 bp, Homo sapiens
cttcgcgcgcccttagtgtcccattcacgtagcccacggctgagcgccggcggcactgcacggaacctgccaagctagaagacttgctgcgggaaaactcctaggacttctttcgcaaactc

SEQ ID NO: 106312 - DNA, 122 bp, Homo sapiens
catcagcgtcgtggtgaagcccagcagcacccgtggtggcgtgctcttcgccatcactgacgccttccagaaggtcatctacctgggcctgcggctctcaggtgtggaggacggccaccagc

SEQ ID NO: 106313 - DNA, 122 bp, Homo sapiens
atcagaaaggggaggccacccgggtgcccaccagcgggtgatgaagacagacatggaggacgacagcgaggaggaacctcaaacctcgtgctgtgtgaaaggagcccatctcgagaggtcac

SEQ ID NO: 106314 - DNA, 122 bp, Homo sapiens
ggccctgggaacggcgggtgtcggggttcgggcgggggcagcctcgtggcccctttatggcggcccggactcaggagagggggcgggcccggcacccagcggcgggccgcgagagctgcgcg

SEQ ID NO: 106315 - DNA, 122 bp, Homo sapiens
tcgggagcacgtcccttcagccttgcaagttcctgcaggggctgcagggtcaccagcctccggcatctgtggctcctgggctccctgacctcagcagcatgtggccatgtctgctctcctgc

SEQ ID NO: 106316 - DNA, 122 bp, Homo sapiens
ggaggggctgcgatctcttttaaagctagaccaattttacactggcaggggccgtgtgtgcggctctacattacagcgccctacaggatgcatctaaactagtttggtcagcttatccattc

SEQ ID NO: 106317 - DNA, 122 bp, Homo sapiens
ccgctgcggtggccgcttgtccctctgctcaggttttatatagcccgcgggcattccctccgcgccaccccgcaggaatgtcgctgcccttctcgagccatatttgggtgttgggcactaga

SEQ ID NO: 106318 - DNA, 122 bp, Homo sapiens
cgagccacgcagacggcttccctctgcatgccggagtctgtcctctccgtcgcagggacacggatgcttcgaggactctgtgtgccggagtctgtcctccccatcacagggacactgctgct

SEQ ID NO: 106319 - DNA, 122 bp, Homo sapiens
gcgcagcggctgcggggccgacccgcccaggatggaatcagggccccggcgcccccacgccgctcctccaggccgaacccctgcggccccaatcccccggcctcacgcccaccccgcaggtc

SEQ ID NO: 106320 - DNA, 122 bp, Homo sapiens
accaggttcacctgctacgggcagaatcaaggtggacagcttctgagcaggagccggaaacgcgcggggccttcaaacaggcacgcctagtgagggcaggagagaggaggacgcacacacac

SEQ ID NO: 106321 - DNA, 122 bp, Homo sapiens
ccccttctcttaaaggaacagggtgaccctgctggctggctccgcccttgggaacaggcacggaccacgccccttgctgggctctgtggccctcactctttagctaaatttccatctggaaa

SEQ ID NO: 106322 - DNA, 122 bp, Homo sapiens
aatggccaactaaacctaagtaagtgtctgagttacacctgtgaggctctggggagaatgcggcctcactggatttctgctcttttcctggagggaaataaccttgctgactcagatgggag

SEQ ID NO: 106323 - DNA, 122 bp, Homo sapiens
tctgaactccgcgcccgcttgctcctccagggcttagctggtcaggacttgaacattcgccggatccataaattgggtcatttttaacctcaaaaccgaaccgcagcctggggaggccttta

SEQ ID NO: 106324 - DNA, 122 bp, Homo sapiens
ccacatggggctactggagcagggggaaagaagctggggacaggtagacggaactttccgcgtggagatctttggccaagagaatgagcctcagctctgttctgtgggctgcactgagtttc

SEQ ID NO: 106325 - DNA, 122 bp, Homo sapiens
acgaaccccattagaaaaaagaaactccgaacacatccgaacatcagaaggaacaaactccggacacaccgcctttaagaactgcaacactcaccgcgaggatccacggcttcgttccttga

SEQ ID NO: 106326 - DNA, 122 bp, Homo sapiens
tggtttccagagcagatgcggaggcggcacgtcctcgtgcccttgctccagctgcgcacacgacctcagcctcctctgccccgctgggcgcgagctgcagtcctggcaccttctgctggggt

SEQ ID NO: 106327 - DNA, 122 bp, Homo sapiens
aaaaaagtaatagcaggatcatgctttgtttcttttcccctctggaatctcagtggatatcgtagtgacttactctatgtcaaatagtaatttttttttttagtctcagacctaaatttttt

SEQ ID NO: 106328 - DNA, 122 bp, Homo sapiens
tcctttccagagcccagtccttctttggtatttaaaacgtggatattccttctatgtttacgtgattcctggttaatcatagaggaaaatccatgttttcagtatcaaatgctgctttggaa

SEQ ID NO: 106329 - DNA, 122 bp, Homo sapiens
agaatacaaaagttttggctggaggaggagtgggaaaatagaaatgagttagttggtgaacgttgagtttaaggaaccctaaatacagttgagaatgtttagtaggcagttggttaaataga

SEQ ID NO: 106330 - DNA, 122 bp, Homo sapiens
ccacaaccaggaggatgcccggaggcacctggagtacctgaagtctctgcccagcgcccccgcctccaaggaccccatcggcccggggccctagcgcctgttccggcagacccccgccggtg

SEQ ID NO: 106331 - DNA, 122 bp, Homo sapiens
tcccactgcttggacatggcacctgagaggccctcagactcccccagcctccgcctagggcgccaggtaagagaaaaaaggctctgaatcatttgcattctcatttgaataatcacttgcat

SEQ ID NO: 106332 - DNA, 122 bp, Homo sapiens
ccttcatccctggctttcgcgctctagcggagtgggatctgcgaacacgtgaggcgggggcgcggtccccaggctgccgagatggccctgagcgacgaaccggccgcgggcggccccgagga

SEQ ID NO: 106333 - DNA, 122 bp, Homo sapiens
ctccctctgcttgcccaggtactccttccgccgcctcgatacacgggacgttgagcacaacgtatctcctggctacaatttcaggtgggcgtgagcttgggcccctcgctcatgttgtaggg

SEQ ID NO: 106334 - DNA, 122 bp, Homo sapiens
ggctctaagtaggtggaggggaagcagaggagggaggagctgggggcaataggtcacacacgtggcaggaggactcagcagggcaggcacctcgagagatcagcccccaagctcctgatcct

SEQ ID NO: 106335 - DNA, 122 bp, Homo sapiens
ttcagggcggcggggctggggacgggacacttccttgctgccgtgagcggggcccacacgcgtcccagcttggagccagcgcacggccacggccacacgcgctcggaaagcgaggccggcga

SEQ ID NO: 106336 - DNA, 122 bp, Homo sapiens
tcctgcgatatcagtctgtttcttttttctttttctttttgagacggagtcttgttctgtcgcccacgctggagtgcaatggcgcgatctcggctcactgctcccgggttcaagcgattctc

SEQ ID NO: 106337 - DNA, 122 bp, Homo sapiens
agccacacttagcgtggtaatgtggctttgtaccatgtcaacctagctaagcgggaactacgtttcccagaattccttgcctgtaggtttccggggttagcacacgccacgtgacctgatgc

SEQ ID NO: 106338 - DNA, 122 bp, Homo sapiens
ctggcgctgaagtcggatccggatccgttgctgtgcaccctggtcggggagagtccgatgcgcctgggtaggagcaccgactgcggggcctctaccgaccttactagaaagatgaaacctga

SEQ ID NO: 106339 - DNA, 122 bp, Homo sapiens
aagtggcggctgccacccacgtcaaacaagactggatcttaagaacatcccaggtagtcccgaggcgggcagggggtgcggcgccctgttggttggcgttacatcgcagagctcccggtccc

SEQ ID NO: 106340 - DNA, 122 bp, Homo sapiens
cggccagggggcgtccggggaggcccgggagggtcccgggctggtgggcagggccgggggcggcggcgtgggggcggcaggggccgcggcgggctcgggcgggctcgggcgggccgggccga

SEQ ID NO: 106341 - DNA, 122 bp, Homo sapiens
ccgcatcccctcctcagttctcccagactcctggggctgaaacccatcctggggactgggcggagcggtcacatcttaccacctcagctgtagaggtggccacgggctctggctgtcttctc

SEQ ID NO: 106342 - DNA, 122 bp, Homo sapiens
agtggggagaggagggccaggtgcatctcatttggccttcagagtcaggaagtcagatgccgcatcgttgtgaatttccccacagggatcctccgctggtcttctgaccgaatttccccaca

SEQ ID NO: 106343 - DNA, 122 bp, Homo sapiens
aagtccccactgccccacccccagccccagcgattttcccgagctgaaaatacacggagccgagagcccgtgactcagagaggactcatcaagttcagtcaggagcttacccaatccaggga

SEQ ID NO: 106344 - DNA, 122 bp, Homo sapiens
ggtaagagcccggggcttgggtggtgaccgtcccaggggtggcgatcccgagctccagcgcggaggcatgccaagggcagaggggtaacctggcggagtcccgagcccggatgtgcgggatc

SEQ ID NO: 106345 - DNA, 122 bp, Homo sapiens
aagagaggacaaaccccaaagagtgaccctaatggcctgtcttgaatccagctgggctgacgctaacaggaggcagtgtgtggctcgaagattcttgaacccacagcagcagctgcggccac

SEQ ID NO: 106346 - DNA, 122 bp, Homo sapiens
cgcagctccttgggcaccttccaccctgagcatgacgggatcaggttactgaggctcttacggaaatgttattcctgttaatgcgaggcagaaaacgcgagacccgaacggaataccccctg

SEQ ID NO: 106347 - DNA, 122 bp, Homo sapiens
caaagcatagttgtggatatgcgtgaatttcgaagtgagcttccatctctgatccatcgtcggggcattgacattgaacccgtgactttagaggttggagattacatcctcactccagaaat

SEQ ID NO: 106348 - DNA, 122 bp, Homo sapiens
tcatgctgacgtggcccctactccagggtttccagtctttctgctcctagactgactcagcgctggtcattaggtgctgtccatcaaggggaacttgccctgggcatggaaaatgctgacca

SEQ ID NO: 106349 - DNA, 122 bp, Homo sapiens
atgtgaatgtgtgtattcagttgtgtgcatgcaagtgtgtatcatgtacacatgtgcaggcgcatgcctgtgtatcatacatgtgctggcatgtaaatgtgcgtgcatatgtgggcaggtgc

SEQ ID NO: 106350 - DNA, 122 bp, Homo sapiens
gcacatctttttcttcagcaaatgtcactgtggtttcaaagcctatgtgtgatgtgcgatcgggcagcatttttaaagtatttcctgctcaaccatagggtgaaatgatgcaggtagtgagt

SEQ ID NO: 106351 - DNA, 122 bp, Homo sapiens
caggagagcaagttgctgtgggtcatccgtgaggaccagggcggcgagtggaagcacgggcggatcatcctgcccagctacgacatggagtaccaggtggggtgagcaaaaagggaatcttg

SEQ ID NO: 106352 - DNA, 122 bp, Homo sapiens
aagacaaagcgggggtctgagtgccgggcgtgcactgttgtgggtgcccttggcctggcccggtgcctccttcctggtcatgctcaggccttgacctttaatggcctggtcacctctgagca

SEQ ID NO: 106353 - DNA, 122 bp, Homo sapiens
agcactgagccctgcacggtgctgatgatgtcaccttcatgtgacatccagaggcatggccgaaagcacgcacgctggtccctgtgtctccaacgcccagtgcgccagtcgttctggggatg

SEQ ID NO: 106354 - DNA, 122 bp, Homo sapiens
atttccatttctgcgtatttcagccagagtgtaatatttcggtagtctacatctaaagcacgctcgtatatggatcgagcccttaagaagcaagatttgcagggcatcaaaaatagagcatt

SEQ ID NO: 106355 - DNA, 122 bp, Homo sapiens
tcttcctgacctctactgcccttgacctcattcccttaaaatctgtctaagctaggggttcgtgtgtagagcagtgagaggagtcagagccggtggatgttgccctgagaatttctgcatat

SEQ ID NO: 106356 - DNA, 122 bp, Homo sapiens
cctccggcgcctggacaaacttccttcctcccgggcccctgcgccaagcaagctgacaggcggctccctcgccggtctcctctgggctctggccgggcgagcttgctctctgcccctctcca

SEQ ID NO: 106357 - DNA, 122 bp, Homo sapiens
agaaccgaaatcatcccaagggccagaattcagtggtgaatctctcagcatatatgagtccgattgagctctggataggaatgagggctgtgtctttggagcactccccacatgctcccaca

SEQ ID NO: 106358 - DNA, 122 bp, Homo sapiens
ctttcgaaatttgaaaccctgtggccaccggccagagctgagtctggcttgtggggttcgcgggggcctcctgaaagaagggaaggaaagattgaaaataaacctaggctgatggtttgtga

SEQ ID NO: 106359 - DNA, 122 bp, Homo sapiens
gtgagccaatgggtgggcagcaccacccaccgcctccttcctcacaccagtcttgggctgcgcagagccccagccatgtgtgtgctgagtgcagtgtgaccgcgtccgcccgtctccccgga

SEQ ID NO: 106360 - DNA, 122 bp, Homo sapiens
gtgtgtgtgtgtgtgtgtgtgtgtgtgtgtgtgcctgcgtgcgcagctaggccaagcctgcgagcctgcctgtcactggagagttttagtttgcattcagaagaaaggaggaggggagacaa

SEQ ID NO: 106361 - DNA, 122 bp, Homo sapiens
tctagcttactcaattttttcctaacttcaactttcatgtttatataaccatcagggagacgtgctgactcacagtcagcctctggggcagcacttcccttttctttagttcttgaagaaac

SEQ ID NO: 106362 - DNA, 122 bp, Homo sapiens
gggaccccggcgccctgccttggccagccccgcgggcccctgaggccactctccggagcgcgccgccgctgggcttctggcgctgcctgaggcatcctccccaaccaccgaacctccggcgg

SEQ ID NO: 106363 - DNA, 122 bp, Homo sapiens
tccgggatgggggagggcacagtgctgggccgtccctgggcgcggggtcctgctgatgcccggtgtgctggcccctccctacagctgttcatcgggactctgctcttcaccatcctgctctt

SEQ ID NO: 106364 - DNA, 122 bp, Homo sapiens
ctctgagtctcagcacaatgcaggaggacatggagtcttcgggggcagataccttctgaacgggaagagacagccagcacagtgtttatgccactggttttaaagtcattttaccttggctt

SEQ ID NO: 106365 - DNA, 122 bp, Homo sapiens
aaggagggagaaaaggcatatgagcgtgtatgctccccctgcctctccccacacacacagcgagctcagaggctcacaatagcacaggctcctggactcccttttagggcacaataaaaggc

SEQ ID NO: 106366 - DNA, 122 bp, Homo sapiens
catctcgcaaaagaagtggtcgatgcaattgttcccacacagcggtaggagcatggtgagcgtggagcccaccatgctggtggtcagaccccccagccaggaggccaaagctagcccaaggc

SEQ ID NO: 106367 - DNA, 122 bp, Homo sapiens
tttgtgactatttgcctgtgaagtaacttcatcagctgaacccagctgctttgctctgggcgaagctgtgaagatgtgctcttatggagggccacctgaggagatggcacagtagcgtaaca

SEQ ID NO: 106368 - DNA, 122 bp, Homo sapiens
ggctggggtggggcaaggaccacaggcagagaacgcagccaggcctggagaaagtctaaccgtgggaaaaagggaacgaggagggggaagggaggggatgtaagtttcttggatctaagttt

SEQ ID NO: 106369 - DNA, 122 bp, Homo sapiens
catcctcccctaacccatctccagctctgttgctatccctgaggtctctagagctgaccgcggcatctcagaaaagggatggggaacctacaagtcgccgtcgcctgcctggctcattctgt

SEQ ID NO: 106370 - DNA, 122 bp, Homo sapiens
aaagctgggtcttctgactcccagctcactagccttcaatctctgagtacgtaaagtctacgaaggatggaataaaaaggattccagaatcactggagaaagctggtgtgcagccgaaccct

SEQ ID NO: 106371 - DNA, 122 bp, Homo sapiens
tggcaccaggtctggaggcatagctgcctgggccagccaaccccacctatatttcatggccgttggggggcaggcattgcgtggtgtccacatggactccaggggtcacgacagcaaagatc

SEQ ID NO: 106372 - DNA, 122 bp, Homo sapiens
ccggagaccactgtctgcgcccccgcacgcacgcacccacgtactcgcgcacgcgcgcgccggccccgcccaccgccccgctgtggcccctttggaccgcacgagccaccgtccgcacagcc

SEQ ID NO: 106373 - DNA, 122 bp, Homo sapiens
gcaagcctgggaacgtccccgggccctgttgtccgcggaggggccccaggactcccgccacgcaccagggggagaggctcccaccacagcccttgcccagagctcccagcgcagtgggcgag

SEQ ID NO: 106374 - DNA, 122 bp, Homo sapiens
ggcttagcttcatcatctcgtgcctcaatgctaaggggtccgctttgtctctctcggtcccggccatctccaacccaggaaggaatgtggaaaatggggcttgagaaagcaagtcagggtgc

SEQ ID NO: 106375 - DNA, 122 bp, Homo sapiens
cgtgtgcaccgagaggtgaaatggcggagtataagcggtatatgacattctagggacattcgactggcatgggaagaacgcctcaagggagcatgtgtacagctccagtgcgcacactgcgc

SEQ ID NO: 106376 - DNA, 122 bp, Homo sapiens
gtggagattctacttcctgctctatctggaaggagagggctttcggttcggcaaaaaagtcgtctttgtgggcgcctgtgcctcaggccacgtggaggccacatggaactcccattggggag

SEQ ID NO: 106377 - DNA, 122 bp, Homo sapiens
acctttcccaggttagaaacccctcttcagcctgtgcttcgcacgtttccttcagcgtgccgccattcagactgcgccacttacgtcccagtgccacgctgcgtggatcaagtgtcaacggg

SEQ ID NO: 106378 - DNA, 122 bp, Homo sapiens
gtgacgtcggatatgagcgacggcctcccctagccggcctcgaagcctcattccgtgctgcgccaggtcctaaggccggtctgcaatcgtgaaaggggtggagtgatacccgcccaagcccc

SEQ ID NO: 106379 - DNA, 122 bp, Homo sapiens
cgaaaagtaagttcatcacgatatcagggaagatgtgccgcctccaaagagccgtacatccgctgccagaagctgcataggcagtaatcattcatccctgggatccatgtctccttccaaca

SEQ ID NO: 106380 - DNA, 122 bp, Homo sapiens
gcagcatcgtcgggagtcagcggcggcaaccaagccagaggcctcgtacctacttccctacgctgagggtgcataaggcccagatccctgatttctccctgaacaggggcttctgctttggg

SEQ ID NO: 106381 - DNA, 122 bp, Homo sapiens
tgagccccaccagtccacactaggttgcaagcccgcagcacctacgccacggcgtcaaaccggaaaccagaaaaggtgaaggcatcggacgcccctcgccccagcccggccaccagcgacac

SEQ ID NO: 106382 - DNA, 122 bp, Homo sapiens
gatatgcagcgccgaggtttctgcgtcgctggtgcccacggtggagtaacacacgcagtccgttgaccctgtaaagggaaaaagaaggtcccaaatagcatcagaataacagaattgtaatc

SEQ ID NO: 106383 - DNA, 122 bp, Homo sapiens
tgacctcgtgatccgcctgcctcggcctcccaaagtgctgggattacaagcgtgagccaccgcgcctgtcccatttaaatatttttatagtaaaatttgctaagggactgattaagagtaga

SEQ ID NO: 106384 - DNA, 122 bp, Homo sapiens
ttcctccccggttttctgtttcatagattgtgttttgtcttttacgattctggagagcagcgtgtgcccctctcggctgatttcacggcccttgaggtcatggtggagagtgttgctaagag

SEQ ID NO: 106385 - DNA, 122 bp, Homo sapiens
taaaaagaagtggcggagcgagggctactgcacagctagcagagccgtggtgaggaggagcgcgcctgccccgagctctccacctcccccgcccgccagcccaggcggccccagcagcagcg

SEQ ID NO: 106386 - DNA, 122 bp, Homo sapiens
cttctgggcgcgccctatggggctgctccgggaggtggccgccaggggggcgcagtgtctcggaacgcgaggaccgcggggccagctggcgttgccaggctcgccgccgtggccgttgccag

SEQ ID NO: 106387 - DNA, 122 bp, Homo sapiens
aggcagactgtcggttacacatgttcaaaacgggggaagggccggggctgctgcgcttcgcgaggtcttgctcccttgggacctggtctcccatctgaccctccaggccttagcttgcctca

SEQ ID NO: 106388 - DNA, 122 bp, Homo sapiens
ggcccagggaagctagggagatgaatccaggagtccggcctctggggttgtagcaggggtcggggttagagggtggatgtggagcaggaaatgaattcgaggcgagggtcgggaaatccatg

SEQ ID NO: 106389 - DNA, 122 bp, Homo sapiens
ggggaaagctagagagtgactctgggtgatggtgctcggctcacagtcacatggcgtcgccgccagctgcacagagctcccagctagcttctgctgcccagaggcttggggggaaggaggga

SEQ ID NO: 106390 - DNA, 122 bp, Homo sapiens
ccgccacggctgccagcgatcgcggtgggttttgtggataggcgtttggccccctgcagccgctggcatacgtcggtggcacgcgtccatcctcaccgcaagctgcccgcaccttcctcctc

SEQ ID NO: 106391 - DNA, 122 bp, Homo sapiens
agactgtccaggcagccaggttaggccaggaggaccatgtgaatggggccagagggctcccgggctgggcaggtaaggagcgctggtattgggggcgcaggcgccggggtgagaggcctgat

SEQ ID NO: 106392 - DNA, 122 bp, Homo sapiens
ccgctggcggcgcgactgggcagcagagggagcccgttagcccttttataacctctaggccgcgatggcagcgccagggaggaggcgactgcagccctcgctacgtgagctcgatcacacca

SEQ ID NO: 106393 - DNA, 122 bp, Homo sapiens
ctcggtgatttcctgggtcagtgggtaaagccaccccctcactggcctctcactgcagatcgacgacatcgcggatggcgccgtgaagcccccacccaacaagtaccccatctttttctttg

SEQ ID NO: 106394 - DNA, 122 bp, Homo sapiens
ttgtggtttcaaataatgaactgtacaaaatgttaaaaaccagctgggctcagtggctcacgactgtaatcccagcactttgagaggccaaggcggtcggatcacctgaggccagaagttcg

SEQ ID NO: 106395 - DNA, 122 bp, Homo sapiens
ctgcgacgacttgtagttcttgacgagcaggaggctgagcaggcccagcaggcactcaagcgagttgaagacggtggagagcaccaggccgcgctggtagtccttcagctggcggcacttgg

SEQ ID NO: 106396 - DNA, 122 bp, Homo sapiens
ctgggaagtccacctgacagctagctcttcatcactactgctgcagttcctgcccatcctcgctctgcattcagcaaaagtgcagtgaagcatgtaacccagctttcttccttcctgctcct

SEQ ID NO: 106397 - DNA, 122 bp, Homo sapiens
tcctccaccccagccgggagaggcgtttatgttttataagaggctttggggctgcggagacgaacccccaggtttgccaggcccagctgtggttaattcaggtcacatattccaagttcccg

SEQ ID NO: 106398 - DNA, 122 bp, Homo sapiens
gcaaagccttgctttctgcatttctgccctgtgggtgggtgccatggaggggagcagcctcgcagaggaggcctaaagttttgagcggagtaaaggacagcgacaccttacttgcgcctttg

SEQ ID NO: 106399 - DNA, 122 bp, Homo sapiens
cagccatatccatgcctcttgttatttgcccactccccttcatacttcatgccattggagcgctcgctaacgccgaagccgttgcgcttgtcgttcttccactcgcccatgtaggtttccgt

SEQ ID NO: 106400 - DNA, 122 bp, Homo sapiens
gattagaccaagtaatgtcaagctcctggtcgccacctgaccctctgtaaagtgttctgtcgccaggactgcggtggtgatgattactgttattactactaacctgctgccgtacctctgct

SEQ ID NO: 106401 - DNA, 122 bp, Homo sapiens
gagccacctcgcccagcctggatgaaggtgttttcaaagccctacctccccctgttgggacgaccctctgtctccctccttggaccactggcggcactttccttggacctgctttataatct

SEQ ID NO: 106402 - DNA, 122 bp, Homo sapiens
ttatgtgtcagacactgtgctaacagctttttatgcgttattatcagttgatcctcactacgcatggtaagttttactgtgttcccatttgaggggtagtgtcatacagtggttggattggc

SEQ ID NO: 106403 - DNA, 122 bp, Homo sapiens
ccacggtccaggggcaccctcgccgcctgcagccagctcctcgctagggcagacggcgatcgccagcttctccaacagaggagccctggcctcacagggacactcactccgcgctgcagccg

SEQ ID NO: 106404 - DNA, 122 bp, Homo sapiens
tctgtgcgtgcagccccggtgggatgtaggctggagacagccctgagtcaggaagtccggcgaggccatctgggtccacgtggctttttggtgctgtccccgcagcttgaggcaaggaaggt

SEQ ID NO: 106405 - DNA, 122 bp, Homo sapiens
cagagcggggcggacggggcggtgccattggccggtgcggagtgaggggcgtgctcggggcgggacggagagaccggggcggcacctttggccgtgccgggcgagaggcggggagcggggcg

SEQ ID NO: 106406 - DNA, 122 bp, Homo sapiens
cggtaagaggcaaagggtcacagccgcactggcgtaacccgtaactgtacacgttccgggcggccaggagccagggcgcagacctccaagccggaccactcgagctgctaaagaaaaggcaa

SEQ ID NO: 106407 - DNA, 122 bp, Homo sapiens
acttctcccctgcccacaggagggccacacagaagagccggaagcagaggagcaagcccacgaacagcagcccccgcagcaggaagagtactgacccaccccggctgctcttgacacttcca

SEQ ID NO: 106408 - DNA, 122 bp, Homo sapiens
gagctgtggcagccggccgggggtcggcccctggggcaggtgggatgcctgtggggccggcgtaggctcaggctttgtctgggagtgccctgccccgagcactggcctggacacctgagctg

SEQ ID NO: 106409 - DNA, 122 bp, Homo sapiens
aaaaactccacacctaccttttccccagaagtgcagcctgcctgagactctaaagagaagcgaggaatgcttgagaatagacaggcctgccccagctcccagcctctctgtaggccgcccag

SEQ ID NO: 106410 - DNA, 122 bp, Homo sapiens
agccaggtctcggcgagcgggcggttgtcaggagtaacggggactgtgggcccgggtggacgccgcggcctggcctccgctggacgctcctggcgggctgcggctcctcctcgtccaggccg

SEQ ID NO: 106411 - DNA, 122 bp, Homo sapiens
gttaaagagtcaaggcagtttgtgggagtcgcgctggggacgttcaaggtgtctcctagccggtaaagtccctgggactgaccgggctggttgcacgcttactggagcgggcacatgggtag

SEQ ID NO: 106412 - DNA, 122 bp, Homo sapiens
acacagtacggtaaatgcggctctaggctcagactaaagcatccgcgcctcagcaggtgacgcacgcagacctggtctccaacgccacctccacgttccctgatacaccagagaaagatgct

SEQ ID NO: 106413 - DNA, 122 bp, Homo sapiens
agatgcgcagcgcggtgttgagcgagcccgtgctgttcctgaagccgtccacggcctacgcgcccgagggctcgcccatcctcatgcccgcgtacactcgcaacctgcaccacgagctggag

SEQ ID NO: 106414 - DNA, 122 bp, Homo sapiens
cgcgctgcggccaggcaggtaagttagccgtcctctgtgcctttgggccataccatttcccgggaatctttggagccctcaggcgtattgaaaagggggcatccccatttcccgagtgcgcg

SEQ ID NO: 106415 - DNA, 122 bp, Homo sapiens
acgagaggcactttccacaccagggatacggcagaatcccagggaagggtctcattggcccggctggcatcacaggcccctccctgaaccagtcaccagccagggcccagacaccctgattg

SEQ ID NO: 106416 - DNA, 122 bp, Homo sapiens
aggacactatccccaccctgctcaattctgtgtttaagtccttggacaattgagggttgacggagacacatcccagttcatcttctcttcgtctccatcattagcttcggtatgtgcctgcc

SEQ ID NO: 106417 - DNA, 122 bp, Homo sapiens
ggacaggagagcgggctcagagatgttaaggagcctgcctgaggccacacagctgggaagcggcaggctggggtctgaaccagggctggggcagtgcagagacacacgaggaggaaaataga

SEQ ID NO: 106418 - DNA, 122 bp, Homo sapiens
acgcaggctcctttcctccgagctggttgctaggtgatctccgaaggctgtccgaagtctcgcgagggcggacccgttgcctgatgacgagagttgggagtgtggctggggctgcggatctc

SEQ ID NO: 106419 - DNA, 122 bp, Homo sapiens
catcccacgcggagccacgtccagggctacacggtgcgtgggccgaggctccggcatcagcgtttcgggctgttcttatgcttgtggtggccacaggcctcttcctgctgcacctgccccgc

SEQ ID NO: 106420 - DNA, 122 bp, Homo sapiens
gacacaccagtggatataaacttccaggcaggtcagccagagggctttgtgcaggggctgcggatttgtgcatcactgcagatacgggaaggggcagggccctggctgtccggacgtgtgtg

SEQ ID NO: 106421 - DNA, 122 bp, Homo sapiens
cagccgccctctccgagcagcgcggagaagccgggggacgagcctgggaggcccaggagccgcgggccggcgggcaggacagagccgggggaaggcccgcagcaggaggttaggcgtcggga

SEQ ID NO: 106422 - DNA, 122 bp, Homo sapiens
gcacagttaagaaactgcaggagtccgggcggtttccaaggatgggtcaggggctgaaggcggtctgtgcaattggccccgggcttgccgagctggaagagcccctgagtggcactggagcc

SEQ ID NO: 106423 - DNA, 122 bp, Homo sapiens
ggcgccgcggggccgcgcgtccaggcggcgagcggaagtgggtgtgagagcggaagtggccggctagagccgggggctgggcggggaccgggcttgtcggtgaagcggcagtggcggcggcg

SEQ ID NO: 106424 - DNA, 122 bp, Homo sapiens
ttggcttccttcggaggagggtggacttcagaaactaacctgcctgctgctcctgggggccgtgaggctgtgcccggtgggcggtgggccaggggctgcatggggattcgatgtgcagttcc

SEQ ID NO: 106425 - DNA, 122 bp, Homo sapiens
ctaatgtgaacactgcagagtttacagctcagtgtcctgttagaatgtctgaaattctctcgctctgaaatatgtcctttccatgtccccagaccaggctttgctgacagcagctgggcatg

SEQ ID NO: 106426 - DNA, 122 bp, Homo sapiens
gaaaagctcagtgctcacttcactcagagctcagtgaagctgggaaaggaattttaagaacggttcatcagaaagtggtcaggccacagcggcctctttggacgaagacacacttgtagcat

SEQ ID NO: 106427 - DNA, 122 bp, Homo sapiens
cgggaggcaggagggtagcaggcagcacaggctgaggagcaccgccgccagccactggttcgagcaacaagcaccctgcaccaacagcatcatgtccatccctgctagggctgctcactctc

SEQ ID NO: 106428 - DNA, 122 bp, Homo sapiens
acaaaccaggtagatcactgcatccggttcctcctctttctgccgactctcccgggcaaccgttctgattcctggcatggagttgggggcgagctcatcagtacccagagcgcctggtgtgc

SEQ ID NO: 106429 - DNA, 122 bp, Homo sapiens
ccagagggcagaggcaggaggcgcagagcgagtaggagactcgaacccgtgagcagaggccgcgggtgacgagggaaggaagggcgaggccagagaggcacttactggggtccctccgcaag

SEQ ID NO: 106430 - DNA, 122 bp, Homo sapiens
ctcccctagtccagataccccacaacactggcccagaccaggtttctcattctagagactcgccacagttacagtgactggtcaggcagtggtgactgacacccatgagtaccagtgagtga

SEQ ID NO: 106431 - DNA, 122 bp, Homo sapiens
cctgggcgcgggacgggcgaagcgccgtgggttccaagctgagctgggtcggccctgcagcgccggagagcaaggcggcgcagggaagggagatggggcgggatgtggggaaagctgtcgac

SEQ ID NO: 106432 - DNA, 122 bp, Homo sapiens
ctcggggcgtctgggcagcctacgctttccggtgagttttccagttggttctttggaagccgttttgcggtgactggttttctgctctctctcactgctccgagtcagggcccacctccttg

SEQ ID NO: 106433 - DNA, 122 bp, Homo sapiens
gttggatgtggggctcaacctttcttccctgatgtttaaaatgtagacattgcacctgatcgtacctggggtctataactctttgacattacccaggtcaaaaaaaaaaagcatccaaacta

SEQ ID NO: 106434 - DNA, 122 bp, Homo sapiens
ctgcaaagggaggctgcttccggctggagaagaatggtgcactcagagcgcactctgctccggtacaggcgctgatccatggggatcccacagccagcacaatggactctctggctgagccg

SEQ ID NO: 106435 - DNA, 122 bp, Homo sapiens
acatgtttgttaactacccgactatatctgtgtctatttagcaaacaagtaaaatagatacgtgtatgtatacacacacacacacacacacacacaatttttcaaagctttcaaggaacaag

SEQ ID NO: 106436 - DNA, 122 bp, Homo sapiens
tcacacaataaacgccagctgtggtggaacgtgcagaggcgctgcgcagcccaggcgtgtcgcgcgcttgggaaccctcgccgctcccgcagcgcagttaacgtggacaagctggggcaacc

SEQ ID NO: 106437 - DNA, 122 bp, Homo sapiens
caaagacgggatttattgggggcccagtcatcacctggaagtcagaaggcgttgaagtatcgcggggatcttcatgatgagcaggaacagggctcatcatggcaggactgtgatagagtcag

SEQ ID NO: 106438 - DNA, 122 bp, Homo sapiens
ctccaagcgctttgcttccggaactccggcttcccaaggggtactgtgcagactgaccaccggcctcccgcctgcaggtcagaggctctgacactgtctggtttccaatgcttctggagact

SEQ ID NO: 106439 - DNA, 122 bp, Homo sapiens
agccatcagataccactcatcgtcatgtgcagactggccctagagctggaaaatggccaccgaggtcacgagagggtggaaataatatttcactctgtctcagtgttacgacaccttgctgg

SEQ ID NO: 106440 - DNA, 122 bp, Homo sapiens
tctgtgtcctgctcatcctcctgtcgctcaaggtcattgtctgtggaccccagctcagctcgggcctgcagccagcgacctggggggctggcccagagcaggcgccgcgtgcggccccacag

SEQ ID NO: 106441 - DNA, 122 bp, Homo sapiens
tgggggtagggctagggggtccgaacgaagggcaggctgtgcaggaggccatgaccaaggcggtgggtctgcccgcagctgcggcagcgcggcccagaagatgcgttgtgtttccggtagtt

SEQ ID NO: 106442 - DNA, 122 bp, Homo sapiens
gccgtcgccatctcgttctcgaagtccagggccacgtagcacagcttctccttgatgtcgcgcacgatctcgcgctcagctgcggagggcagaagcaggagaggagccctcactcaggggcc

SEQ ID NO: 106443 - DNA, 122 bp, Homo sapiens
tgaccgccatggtccagccggtggccctgctgtccaccctgctcgccatcagagatgacccgcagttccggctggcgtaacacagcctggggctgtgcagctgctccttccgccccaccggg

SEQ ID NO: 106444 - DNA, 122 bp, Homo sapiens
ttccagagccctgttttcctcatttggctaacttccctccctcacccaattacaagtgtgcgggtactttaaaaactttgagctttcttttcagctccaaaacaattgctctatcttctctg

SEQ ID NO: 106445 - DNA, 122 bp, Homo sapiens
cgcttcccctttttgaccagcttgcagaacacccgggccgaccgaaaacaggggtgggaacggccggaaacggaataggcggggagaaaacccggaagccaggagtcgaagccggggtagca

SEQ ID NO: 106446 - DNA, 122 bp, Homo sapiens
ttgggtggggacacagatccaaaccatatcagaaggtattcagtaaatgctagccagcagcgctgctagcagaagtagcacttatctaagtacaatttgccaagctgcaggagaggagaagc

SEQ ID NO: 106447 - DNA, 122 bp, Homo sapiens
aagaaataagagaatcccaaatcatatacagatggtacaactttcacttttcctctatgacgacgaaggcgcgcctctctccatccgctcacaccacacccccgccctccgaagcatagccc

SEQ ID NO: 106448 - DNA, 122 bp, Homo sapiens
gagctgtttcccattcagatggagggtgtcaagctcacagtcaacaaagggttgagtaaccgtttccaggtgaaccacacagtagccctcagcgcaatcggggagtccagctaccacttcgg

SEQ ID NO: 106449 - DNA, 122 bp, Homo sapiens
gtcgcattgcgtttcttgtatcgggaaatacttattgttggaacctctggagggagaccacgtttttcgtgccgtgcatctgcacagcggagaggagctggtgtgcaaggtaaagggccagt

SEQ ID NO: 106450 - DNA, 122 bp, Homo sapiens
gcaaccagacatggatcacagacatcaccctgctgggattccaggttggtccagcactggcgattctcctctgtggactcttctctgtcttctatacactcaccctgctggggaatggggtc

SEQ ID NO: 106451 - DNA, 122 bp, Homo sapiens
agggattcagaactactcattccagttcagcagattagtaagaaccagaatgcatggcctcgaacaacctcccggtgccaggagagtctctttgaagaactctgagtaacaaaggccacccc

SEQ ID NO: 106452 - DNA, 122 bp, Homo sapiens
tgtcaggattctactaacagtctcctcaaagctctttcaagttcttccttacatcttgtccgaaaggcaatgctcatgttttaggtttttattacaatggcaccccaaattctgttctactt

SEQ ID NO: 106453 - DNA, 122 bp, Homo sapiens
ttggccctgctgagtacatggccgatcaggctgtttttgtgtgcctgtttttctattttacgtaaatcaccctgaacatgtttgcatcaacctactggtgatgcacctttgatcaatacatt

SEQ ID NO: 106454 - DNA, 122 bp, Homo sapiens
tcgcgggggccggcgggcagaggacccttcctggggtgcctcccggctcctgtcccccagcgcggggcgtaggcacctgggactggccagtgaaagtcgacctcatcctatgtccaccgcac

SEQ ID NO: 106455 - DNA, 122 bp, Homo sapiens
gtgcccagagcacccgggcagatgatacccttgcgcccgattgccagttcttcctgagaacgctttgtgcctgccctcctgactccctgcccctgaactgcagacacagagtctgggctgcc

SEQ ID NO: 106456 - DNA, 122 bp, Homo sapiens
caccggagacgtagacgtcattgcggagagcacaggcggcgaattctgagcgagtgtagccgggcaggctgggcagtggggtccaccgctggctctctggatggtaggcatcggcgaagggc

SEQ ID NO: 106457 - DNA, 122 bp, Homo sapiens
tttgtggtactaggtaaaaagcatacacatcatggcaagggagaattcgaccttcaactccgacttcatcctcctgggaatcttcaatcacagccccacccacaccttcctcttctttctgg

SEQ ID NO: 106458 - DNA, 122 bp, Homo sapiens
ggctcaacgctctttcatgtggtggcctgcattttaggtcttaactgcataggctttcaacgccttggttttgcctttccttgatgtttatttgaccttgcccgaggggccagcgcttttga

SEQ ID NO: 106459 - DNA, 122 bp, Homo sapiens
tgtggctttgcctccctttagcgtgtccctccatgcccggccccaccccgaaccacaccacgctgaatgtatcttcaggactcgcacagctgcagcacgaagggaagcgacaacaccagccc

SEQ ID NO: 106460 - DNA, 122 bp, Homo sapiens
ccgcctacctcagggcgctgcctttgtctccagaataacctcctccttgggaggggctgccggctggtccgggagctgtgccctgtggctgctggtgaggaagccagaccccgcgcccttta

SEQ ID NO: 106461 - DNA, 122 bp, Homo sapiens
tgcactggataaaaggacccatcctgtggaacccaagttacatttgtcaagaataccagccgggcacggtggctcatgcctgtaatcccagaactttggaaggccaaggtgggcaggtcatt

SEQ ID NO: 106462 - DNA, 122 bp, Homo sapiens
aggagtcaatagagagtctcccaagttggtacatcaagaaaggcacggcaggatccagcacgtggacgaacaggcagcagcgggtgacgcggtggcaaggagccgccgggcgactgccgttc

SEQ ID NO: 106463 - DNA, 122 bp, Homo sapiens
cagcggcgtggtggagaatagaggcggctgcttgtcatgcagcccacggcgtggcggctgcgggccggggactggcggcggcgggcgaggcggcgcccacagcactcgggactcagctgccg

SEQ ID NO: 106464 - DNA, 122 bp, Homo sapiens
gacccctctttgttcccggctcgagtttctcagcctggctcgccggctcgccgctctgcacgcctccgccggccagctctgtcaaagcaaagagctgcgccccttgagttcgcccggccgag

SEQ ID NO: 106465 - DNA, 122 bp, Homo sapiens
gattctccctcttggatctggctctgccttagtccgacctagagggatcagcttcgcccacgcccactctcacccggaacctttcatctcttattgaagccttttaggcccattgggatgtt

SEQ ID NO: 106466 - DNA, 122 bp, Homo sapiens
cccgcccccgcgggccggcgctcacggtcagcagcccgccctcctggtcgtacacgtagacgagctcgctcccggtggacaggaagacctctgcctcatggcacagcacgcggggcttgccc

SEQ ID NO: 106467 - DNA, 122 bp, Homo sapiens
tggggcccacgtggggccctcgggcgggcgtggcggggcaaacagaggtttggactctctcgcttctgcctggctcaacttctccgccgaggcatccgtgccggggtcgggaggagccgggc

SEQ ID NO: 106468 - DNA, 122 bp, Homo sapiens
gtcatgtcaggaatggggaaactgaggctcagaggagctatggcactgcacaaagctacacggctccctggtcttctgtttctgttgagtcatgtgaaccaaaaagtatcggagatatgtct

SEQ ID NO: 106469 - DNA, 122 bp, Homo sapiens
ctggcctggcgggggctgacccccacctccctccaggacggggtggctgctgggcggagacgctcctcacttcccagatggggcggctgccgggcggaggggctcctcacttctcagacggg

SEQ ID NO: 106470 - DNA, 122 bp, Homo sapiens
gtgctgctgatgtagacaccgtcattatctgaataggggatgtgggcctgtctgcaaatgcgcctcttccactttctggagtcttctctctggaaaatgtagtaattgtgactggggacatg

SEQ ID NO: 106471 - DNA, 122 bp, Homo sapiens
agccgcagatgctgacacgggcaaccctgcccagtgtggggcgtcctctgaagtgggagccgcagggagggcctcacggaggcctctgtccacaggcagcggctcccggcacccaccgctgc

SEQ ID NO: 106472 - DNA, 122 bp, Homo sapiens
agaggcgcccacgcccgagaggagttaaggagcgcgtcgagggggcttcggcctccaacccgactttgtttgcgagctccgtgcagttaccagttccaaataacaagatgccatgttaatta

SEQ ID NO: 106473 - DNA, 122 bp, Homo sapiens
ccctgcagcctaatggcactcgagtgcccatggaagtggtcctgctgaagaaggtgagctcgggtttctccggcgtcattaggctcctggactggttcgagaggcccgacagtttcgtcctg

SEQ ID NO: 106474 - DNA, 122 bp, Homo sapiens
tatcaccacttaatttttcctaggagccttgctgctgttctctgtttcttacgagtagcccgcctggccggactacttatttagttcctttaacaaatacaactctcctgcagggtgcccag

SEQ ID NO: 106475 - DNA, 122 bp, Homo sapiens
cgctccaccatctccaggcccggggccgtcgctgccgccgccgccgccgcctccagcgcgcggggcttggacatcttcttgcctgcagcccggccaaggcccatggcagcgcgccccgcacc

SEQ ID NO: 106476 - DNA, 122 bp, Homo sapiens
cagcaaacaggcccgcagatgccgcaggtccttcggcaccgtctccagggccatcttcgccgatgggaagaacaacagggagatagacgaccacagcctgtgcacccgcaggaagtaaatag

SEQ ID NO: 106477 - DNA, 122 bp, Homo sapiens
tttgtttgtttgtttttttgttgttgttgttttattttcatttttcttgagatggagtctcgctctcttgcccaggcctgactgcaatggcacgatctcagctccctgcaacctccatctcc

SEQ ID NO: 106478 - DNA, 122 bp, Homo sapiens
gagagataactaagtcccctgtacacaaggttgtagcaagaactacgaaagttaacttcccggatggaacctcttgagtcaagaactccaagctctgggctaggctcctcctacgcctgtcc

SEQ ID NO: 106479 - DNA, 122 bp, Homo sapiens
gcgacctcagcgtggtcacaggggcccccctgtgcccagggaaatgtttcaggctttccccggagactacgactccggctcccggtgcagctcctcaccctctgccgagtctcaatatctgt

SEQ ID NO: 106480 - DNA, 122 bp, Homo sapiens
agatttttagcagtctctagaggattctatggcaggaccagaacaaggacccaaattttccggctcttggctggagcctccccataacctgcatgatccctagaccatgtccccagctggat

SEQ ID NO: 106481 - DNA, 122 bp, Homo sapiens
tggcccggggaccctcgggagctggcctggaaagtcgtggctgccttgggtgtggtccctcgggtccagtctcgcaggcgggctccaggtggactgtagggtaacgccaccaagatgctggg

SEQ ID NO: 106482 - DNA, 122 bp, Homo sapiens
tcaacaccttaaatatttcaccctactactaactgggtgggtagagtgggttttaatctccgcaaaatgccccatcccagaggaattatcactatttgtgttgtctggtagttccctaaaaa

SEQ ID NO: 106483 - DNA, 122 bp, Homo sapiens
tcctgtcctgcgcaattctatttgacctttgaactggcaaaggcttttttcttcctcttccggggacgttgtctgcaggtatggatgttgttctcttttccctgtctttatttccttaccaa

SEQ ID NO: 106484 - DNA, 122 bp, Homo sapiens
gcaaagggagtcaaacttagggggcaggcaaacaaacgagttctttccagcctctgtaaccggatcgctagagcgaaataaactcgcacaagtgtccagagatcgtagccagacagccagcc

SEQ ID NO: 106485 - DNA, 122 bp, Homo sapiens
tgggctcacttcctgatgttctgtctcacaaaccctaagctccagccatccttcaagcttcgtaggtactattttcttggtcaaatgctcttctgctattcgtttcctggatgaactcacat

SEQ ID NO: 106486 - DNA, 122 bp, Homo sapiens
gtctcccggaccgggtgcttgtctgggctggctggcctggcggctgctcacaacagcttccggtgggttccggtcgggttgcatcgtggagctttcacctacaaaaggggaaggaggcggcc

SEQ ID NO: 106487 - DNA, 122 bp, Homo sapiens
tccaagcagtatacttggtaaaagtcatcgccagtctctagtctcaataaaccaggggcacgatgcactgcagaaagctgcagggacctctgcccttgaacacagagtattgtccaaggttt

SEQ ID NO: 106488 - DNA, 122 bp, Homo sapiens
aacagcgtgacacattcccggtcggtgaggtgagacccaaacccttggcaaaagcagcgtcggagcccttgagaccgcatcccagatgctggggcaccatctgttcccatcggagaaccccg

SEQ ID NO: 106489 - DNA, 122 bp, Homo sapiens
aaaatgttttaactgttttgcaagactcaggtggtatctcgtttctctgtctgtggtgggcgcatagttggagtagagagttggcatacagggataaaaagaggattcaaattgaaaagtac

SEQ ID NO: 106490 - DNA, 122 bp, Homo sapiens
gggcaccgcagtaatcgccacctctcgaggagtgtggcccactcacctggatggattgcacgcatacacgtgcacatacacatggagctcacgcacacacaggcacttgtgcacagatgcac

SEQ ID NO: 106491 - DNA, 122 bp, Homo sapiens
agttaggtttcctaatcccttatagagggagccagacatgacatcagtacttacacaaaacgttttcaattataactgaggcaagtactacaaggaaaatcatagcacatggtctaatggag

SEQ ID NO: 106492 - DNA, 122 bp, Homo sapiens
tattcaacctctgtactatgatgacttcagctaaaatgggggaatgagtcctacctcctccgttttgtaggcacttaatgcatggttcctggcttatactctgtgcccagcaaacgtaagct

SEQ ID NO: 106493 - DNA, 122 bp, Homo sapiens
aaccttaactttaatgtctataaacactccccacactgccagcatgagcgatgcttatgacgaagttcaatttaacagcttcacataattctcagttgagtcatcagagattcagtaagatc

SEQ ID NO: 106494 - DNA, 122 bp, Homo sapiens
gaagggaggttgagctcaatcaggccccatcctgcttcacagcctactgaggagtccagacgccccgacccccggccagggacagccacgaggagtggtggccctcgggtttcggccgccca

SEQ ID NO: 106495 - DNA, 122 bp, Homo sapiens
aggcccctgaccattagaaggtgttattgctcccacccgggacagacgcacatccccacacgcttccagacacccttaaatgggaggcgcctctcacattgagaataagacaccatgaaaac

SEQ ID NO: 106496 - DNA, 122 bp, Homo sapiens
acagattacttttgtgtgcgggtgttcagttacgatttctgtggcgtcccagagatgctccggttaggttgccgtcttttttttttttaattttttttttagggcagcagacaggttgttgg

SEQ ID NO: 106497 - DNA, 122 bp, Homo sapiens
tcccaccaagacaccggacaagatgggcttcgacgaggtgagctgggccttccctggaggcggggcgggggctggagggcccttgtttgcaggggctgatctggctggggactctccgggct

SEQ ID NO: 106498 - DNA, 122 bp, Homo sapiens
tgtggccatccacccgcgcctcagccaccgcctcgctccgctccctgcgctcagcccctccgccctgcctgactggcacccgagccccgcgacccccgggcttcccccgcccgtagccccgg

SEQ ID NO: 106499 - DNA, 122 bp, Homo sapiens
ctgtggatatgtttctggttagggtgggccacaggagacattctcatgcagatttgagggcgggagcgaagcagcagacattttgtggctcgtgttattgtttatctgctggtttacctcct

SEQ ID NO: 106500 - DNA, 122 bp, Homo sapiens
ctgtgggcacgtcaggctcgggcagcagggcttcttccttctctgctacggggatggcggcggcctcaaagctgatgggctctggaagcatctggtccctggggcaagccatcttggccgtc

SEQ ID NO: 106501 - DNA, 122 bp, Homo sapiens
ccggggcacagcagtattgtggctgcagaccatgggatctggagccagaatagccatggccggggccggatgcaccttggcaaagcaagctgggcctcagtttcctcatctgtacagtgagg

SEQ ID NO: 106502 - DNA, 122 bp, Homo sapiens
acatttccttccaagcgttagtcctcggctctccatgcttggctccctagtgtcacacaccgtcctttctgggtggcctcttccaattcgccctcttctttctcctgggtgtctccatctgc

SEQ ID NO: 106503 - DNA, 122 bp, Homo sapiens
tgcccaatcatagctctttgatatcccagcccggctggagaaagttagatggtactccagcgtctcctccgggtccccggaagagagaagctgggctgcaccccatgttggcacgaacactc

SEQ ID NO: 106504 - DNA, 122 bp, Homo sapiens
acggacctcttcctctaggcgggctctgctcttctttaaggagtcccacagggcctggcccgcccctgacctcgcaacccttgagattagtaacgggatgagtgaggatccgggtggcccct

SEQ ID NO: 106505 - DNA, 122 bp, Homo sapiens
acatgttcaccaccagaagacaagagaacacacaccacaccaccatgtgacgccaccacacgcccaaccacacagacgtcaggcccacacactgagccctggcagggatgtggattccctgg

SEQ ID NO: 106506 - DNA, 122 bp, Homo sapiens
cacagtcccagttcagagatgttacgcagcttgcccgaggctgcggctaagactggggcccggggccccaggcttgactccacctcggggctacagagatcccaggcctcaggcacgggcca

SEQ ID NO: 106507 - DNA, 122 bp, Homo sapiens
aactgcttgattttgctgtcgcgccgcctaaacttggttttttggagttgctaggagggccgacttaactctttgtcagccgggctggttttcacccacctggtggcaggaatcctgtttgc

SEQ ID NO: 106508 - DNA, 122 bp, Homo sapiens
ccatcgaaatgaacttcatgaatggggcaggctggctgcaccgggacggaatcgtccacccgacccgaatgaattggcaggagccgcggccacatttaaagggccagagcgcgcgttccctc

SEQ ID NO: 106509 - DNA, 122 bp, Homo sapiens
actaagtaggttttcctagagtctgataatccccgtaagagcaccattccttccactgtccgattccttcagcctgctataactgagtgagcattaggtccatttttatttcagtcaacttg

SEQ ID NO: 106510 - DNA, 122 bp, Homo sapiens
ggcccactgacagctcccgcccccgccgcggccaatcagcggttggtgcacacgcccccccggccacagccaatccgcagcagccctgcagctccacccctcacctgggggacgccagcgca

SEQ ID NO: 106511 - DNA, 122 bp, Homo sapiens
ataaaggctatgagcctggcagtgacatccatgtctaaattatctttatacccctggcagcgtttagcttggagctcttagtaaacatgtagatagcactggattgaataactaaggaaggt

SEQ ID NO: 106512 - DNA, 122 bp, Homo sapiens
aagtctgggagggcgaaaagcaggcagagcccccagacagccaggcaggtgagggtcacgcgggccgggggcccccggcggtagagctgggtggcatgaactatgttcaggtagcggtcaaa

SEQ ID NO: 106513 - DNA, 122 bp, Homo sapiens
ggaccccaggcccgggcccagggaggagaaggagggggcgagcggccgaccctgcctgggcgccccacccaaggggggccgccacctacatctccccaccgccctcccgacccgggaagccc

SEQ ID NO: 106514 - DNA, 122 bp, Homo sapiens
aaatggaagaagtttagatcactacaggaatcttttcaaaatcaaaggctttttttaaaacgctgcataaaagactttagaaaaagtagtataaaccaactgccagcgtctgtgagtgaaaa

SEQ ID NO: 106515 - DNA, 122 bp, Homo sapiens
agcgagctggcctgggagcaagtgatggtgtttttcctgctgccctttgtctgggctgaccgccccccctgcctattgtcccgccgcttgtcccatttccaaaagctagagctaagcgaggc

SEQ ID NO: 106516 - DNA, 122 bp, Homo sapiens
gagatactggggatttgtgtgcctagagggacgaccgcgcgaggacatagccagcagccgcgtctcaagacaaagaggcggcccctgagaaaccaccctgcctgtacctcgaccttcgcctt

SEQ ID NO: 106517 - DNA, 122 bp, Homo sapiens
ctgagcccggtgcctgctggaattgtagtcctgcagccaggcgaccaaagagccgggagtcgttaagagactacaacgccccgcatgcccggcgaggtgcgcagcgccctgcctctctctct

SEQ ID NO: 106518 - DNA, 122 bp, Homo sapiens
attgtctggtgggccacctgctccatgagtgcacatttctgccaggaagaacaggcacagcgtcaccaagtggcggcctcatggcagcgccttttcacagtcccggggaaagctccactcac

SEQ ID NO: 106519 - DNA, 122 bp, Homo sapiens
cttccagaaccctgtgtaccagatggcggctggcctgccgctgtcaccccgtggccttggcgactcaggctctgagggccacagctccctgagctcacacagcaacagcgaggagttggcgg

SEQ ID NO: 106520 - DNA, 122 bp, Homo sapiens
ccaaatcacaacattctgtaactaattcaaaattctcatcccaatcactattggagagatcgcaactcttcagaattttttctacagaccacatgcaagtacaaactgtgagagtttctgat

SEQ ID NO: 106521 - DNA, 122 bp, Homo sapiens
acttttcaaaaacaaaaacaaaaacgattaagacttttgaggctccacattggcacaatccggaatgctgtttggaaatagatgttccttctcattaacaggttaaaacagaattctggatg

SEQ ID NO: 106522 - DNA, 122 bp, Homo sapiens
ttgaagtggtgaacatggatttttctcggcttcacatgtacagtcctccccagtgtgtgccggagaacacgggctacacgtatgcgctcaggtgagtgtgcacctgcacgtggggtcctggc

SEQ ID NO: 106523 - DNA, 122 bp, Homo sapiens
catcacctaggtattaagctcagcatccatgagctattctttttgatgttctctctccctcgactatttctttgcttttctttacaattttgccacctaaatttgcatctgtaaataataca

SEQ ID NO: 106524 - DNA, 122 bp, Homo sapiens
gttccttggttgagagtgctcgctggccttttgactcttgctgaatggcacagagtgggtcgtctggctggagccccccatacctcctccagaatcctgtcttggggatgctgggttggcag

SEQ ID NO: 106525 - DNA, 122 bp, Homo sapiens
ccgcttccgtattagacgccgccaatgaagtcccgcgagaattggaaggcggcagtgaagcggaagccattactctctggagtcgattgccccgagacacatgggccaaggaggggtcagcg

SEQ ID NO: 106526 - DNA, 122 bp, Homo sapiens
aacggctggtctcctggctgatgatggaacccgacttagagtgttatagatgaaagtgaacgggtttgaacggctggtctcccggttgatgatggaacccgacttacagtgttagagatgaa

SEQ ID NO: 106527 - DNA, 122 bp, Homo sapiens
ctcggtctgtcttgttcctcgtacactgggggaggaatggcagttttggaagactgtgatcgaggtcttgagtcctcttcataaggaaaatctcggggtaactgtcttttactgccagagaa

SEQ ID NO: 106528 - DNA, 122 bp, Homo sapiens
ggcacccagggctgggcgggcctgggctccttaccatggttccaatgctgtaggtcgccgcgggcccgatggtgtgatggtacgggtcggcagctgcgtagactctgccgtaactagggaag

SEQ ID NO: 106529 - DNA, 122 bp, Homo sapiens
agtgcctagtgagagtgagccccctgctcttcaaaacaacctcttgtctcctcttctgaccgggacagagtcaccatttgatttggaacagcagtggcaagatctcatgtccatcatggaaa

SEQ ID NO: 106530 - DNA, 122 bp, Homo sapiens
tacggtgagaacacgggcaatggaattgtggatgacacggatcttagagagcttggagaccgcgccgcctgtcagtggcgatgcgcagctgggacagctccaccttcaggtcgtccagctgt

SEQ ID NO: 106531 - DNA, 122 bp, Homo sapiens
gcgtcttccggaagctccacgcccctgggtacttggtttccccgcatggttccggaagagcgcggcgcagctggctgtgagcgcagggctatcccggcggccgcttcggcagccagggcggc

SEQ ID NO: 106532 - DNA, 122 bp, Homo sapiens
cggcggggaggatgctgaacagtagagggcgctggagacacgctgcgggaggctggcgctcgggtccggctgcgggccacaggccgcggatcgcgttctgccagcgccccacgcccgcaagc

SEQ ID NO: 106533 - DNA, 122 bp, Homo sapiens
tttcacctgggtcatggcctgccagaagggttggcttctcagcctcaccttttgctggggcgttcacttctctgccttctgccacgctctggccagctcccacagactccctcccctccagc

SEQ ID NO: 106534 - DNA, 122 bp, Homo sapiens
tccaggccaatccagagcattctcctcactgtccctctgaagattggagttactgagagacgtaggagatggcctgatggcaccgtgacctgcccagagtcacctggttggtggtggcagag

SEQ ID NO: 106535 - DNA, 122 bp, Homo sapiens
ttgtaactacatccttggtacctcctcttgggcattttacagtctcaacttgtctaaagtcgaactcatgactttcttccagagactcttgcctcttctagtgtttgctatcagtgaatggc

SEQ ID NO: 106536 - DNA, 122 bp, Homo sapiens
caagtgcttacctgtattaaccctttattccccacacatccctaccaggaaaggtactaccgctgccccatcttacagataaggaaactgaaagccagagagtttagcaacttgcccaaggt

SEQ ID NO: 106537 - DNA, 122 bp, Homo sapiens
gacgaagcttccctctctccctcactcgacaccactcacctcctgctgtgtggctccttacggctccatggctcagggttggggacccctgctgaagtgcatccaaaatgacccttcctaca

SEQ ID NO: 106538 - DNA, 122 bp, Homo sapiens
gactgtacatgggctgagccaggcaaccaccggaagggtgagtccttccccaggactcagcgggtgagagactccggctcacctcacggcggaacgcagacacctgagagcccgcaagcctc

SEQ ID NO: 106539 - DNA, 122 bp, Homo sapiens
ttagtaaagtggaatacgtagtaatttatccgttctcatgttctgtactatcagcacacacgccagcataaattaaaaacaggaatgtcatgtttcatttttcccatttttttagtaacgct

SEQ ID NO: 106540 - DNA, 122 bp, Homo sapiens
catttcccctatggccaaactgaggctgcgagaaccctgggagagttgcagggtgaccctcgccagcgcgtcaggggccacgccctccaccatgggctccgactcagctatatgtacacaca

SEQ ID NO: 106541 - DNA, 122 bp, Homo sapiens
tcccatttgtagcttattttgttttgaaaaattcttgagttccttttccttcacagataccgacttcattacttatcagctcccatacgctgcccctcacaggctctatttcattggtttct

SEQ ID NO: 106542 - DNA, 122 bp, Homo sapiens
cgttctcattggctgaggctgcatagaggggcggtcccaacagtgggcggggtagagccgcgccgcaggacggagggtctggacactttggggtcacgtgctcattccgtttccctacctcc

SEQ ID NO: 106543 - DNA, 122 bp, Homo sapiens
tgagtaggaagaatcttcctggctttcgagatccggtaccagagagtgactgtgagagtccgccctgctctctgggacaattaagggatgaaatttctgagggaatggagggaagacagtcc

SEQ ID NO: 106544 - DNA, 122 bp, Homo sapiens
cctcgggcacacagaacgtgtgatgggtggggcgaggggcgcagcgtcgatgtttgggggcggagggctttgatgagagaggagcaggtctgacccgcttggaagctttctggcctacacta

SEQ ID NO: 106545 - DNA, 122 bp, Homo sapiens
ggagaagatctacctgtacacgcacctgaagcaacagcccatctggtaaggccgagcccgcggcttcccgtcaccctcttactgacggggccagcagtcactccccgggatcacttctagct

SEQ ID NO: 106546 - DNA, 122 bp, Homo sapiens
gcccatgcgaagaggcactgttggcagaggagtgtactggcaccttgcaaagaatccactcggcaactacttacgtcgttgagccctgagcaggggattggctgaacctggaagtgggcgtg

SEQ ID NO: 106547 - DNA, 122 bp, Homo sapiens
gctattaatagatgatagatagatacatagataataggataaatagatggaatggataaacgtacagctaagatggattgatggatggatgggtaggcaaatatatatatagatgagaaatt

SEQ ID NO: 106548 - DNA, 122 bp, Homo sapiens
tgggcccggctcaggcccgtcgcggaggcgcggcgcaggggagcgctcgggtgggagtctcgctcctccaccagtttattgcgacgtagcatccaggcctaggcctccccgtccatccccgc

SEQ ID NO: 106549 - DNA, 122 bp, Homo sapiens
ggaaagggacgctggaatcaaaatacaggcccgagactcacgtggtgttcgtccctcacccgcaggccccggactcacgtggtgttcgtccctcaccggctgccctgggtccaggcccttcc

SEQ ID NO: 106550 - DNA, 122 bp, Homo sapiens
tgggtgccagtgagtgctggggcttctccgagcactatctcacacccaggagcgtgggcacgcatggcattcgcatgtgccgtcagtggacattaaacacagccatgaagaagccacgaaga

SEQ ID NO: 106551 - DNA, 122 bp, Homo sapiens
cttcagaacagatattgctcattttctggcagttctcagacgtaggaaataagtcagcaccgaagcagtggttaagccggagggctcggaagaacggcaccttttctttctcgaaaaagtta

SEQ ID NO: 106552 - DNA, 122 bp, Homo sapiens
ctacagggtggtggctaagagtacaatctttggagtcagattgatatggacttgtgtgctcgctccaccatatcagggggcctttctgagcctcgggcaccttttctataaaatgggataca

SEQ ID NO: 106553 - DNA, 122 bp, Homo sapiens
gctttgtgtggtagggagcaaacatagtattttgctcacccatcaggtgcacagctgagacgcctataacaaaagatagattaacaagagaaaaggccaggaacggtggctcaagcctgtaa

SEQ ID NO: 106554 - DNA, 122 bp, Homo sapiens
acccatttctcctttcaccatttaaaaatacccacacgacagatcttctccaaatggagacgagctcagtgcttgtttcagaagcaggatgccatgctggcctttcatgggacatgatttaa

SEQ ID NO: 106555 - DNA, 122 bp, Homo sapiens
accttttgtgagtcgctcccggctccgcggccgcggaggtgtggggacccgggcttgcgtcggagggggcggtgggctcacccatgggcctttccaaaagcaaagagaaacccaggaaaggt

SEQ ID NO: 106556 - DNA, 122 bp, Homo sapiens
ggtagtcgggcgggcactgggagaactgcagggaatgcagggggatgtcacgggctgccccgcgcccccaccccttgccccaggctggggccagctcaccatggagtgcagagtttcggggg

SEQ ID NO: 106557 - DNA, 122 bp, Homo sapiens
gcaggtgcaagaaggtgaaatccagcagccgcgccagctggttgcccgccaggtagagcacgcgcagctgggccaggcctacgaaggcgccgctgcgcaagccgcgcagccggttgctagtg

SEQ ID NO: 106558 - DNA, 122 bp, Homo sapiens
cccgccgggtcacccgcgtggcccgaggcggtggcctccctcccaatcccctccctccgccggagcccaggacctcggccccccccgggtatccctggcccagccgggccctcgctttccgc

SEQ ID NO: 106559 - DNA, 122 bp, Homo sapiens
actgccgatcgccgtgtttggtcgatagaatccccagtgtgcccagagagtgcgacccctcgcccggcccggcgagccccgggcgtgaaccgagctgagggaggatggcagcctctggggtg

SEQ ID NO: 106560 - DNA, 122 bp, Homo sapiens
caggtgcctttatatgtgcttggcactggggcttgtggatgggcagtcaagagcttaattcgtgggtttggcttgcctgggagcaagaagtcattttctctatgctgagctagagatcaagc

SEQ ID NO: 106561 - DNA, 122 bp, Homo sapiens
agtttgttctggagagagtgaccaggataggagggccatttaaggagagactgaaagaaacgaaccccgtgggaggatgtaatagctttcttcagttgtcccacaggacgaactcgaggggg

SEQ ID NO: 106562 - DNA, 122 bp, Homo sapiens
gggcgtcggcggacattagccgctaggaccttaggcgagaaaatgtggacgcatccccgccggccctgaggccagagaatcccccctcaactggttgcacctcatgtccctcccgcacacgt

SEQ ID NO: 106563 - DNA, 122 bp, Homo sapiens
gagccatacacgccacacatggtgcccacagccagcgtggcagctgcagggacgcgcacacggctgcaggagtcatagctctgctcggcaaagctatgctggtagaaggcctcataggccac

SEQ ID NO: 106564 - DNA, 122 bp, Homo sapiens
aaattcctgctttgggcagccgtggtggaggcctaatacggtgaaggggaggctggtgtccgcccaagtctgacaacctaggtgtggtgagcaaccttcttagtgcctggattttcttaaag

SEQ ID NO: 106565 - DNA, 122 bp, Homo sapiens
cactcacactcatacactcacttgcactcattcagtcacatagtcacacttgcatgcacacgctcacacactcagtcgcactcacattcacactcgcactcacacttgcactcacactcata

SEQ ID NO: 106566 - DNA, 122 bp, Homo sapiens
aatacaaaactttcttgaggtgaatctgtgactgagaaaatagacatctatttgaaatatcgtgtctaaagtactaaaatattgctggttgctaaccacttaaattgagtatttttcttcat

SEQ ID NO: 106567 - DNA, 122 bp, Homo sapiens
gactttcccacggttcactgtcacccccattgcacaggtggggaatccaaggcacagaggcgtctgggccagagtcccgggactatccactcattccggggttgtagggcagcatgtgtcag

SEQ ID NO: 106568 - DNA, 122 bp, Homo sapiens
ccaggtggcgctggagaaaggaacagcggaccccgcccaagtcattactaatgtagcaatcgtctgcataaacccaggccacggttcctattggctgagtcctctgagggtgacgtcatcgg

SEQ ID NO: 106569 - DNA, 122 bp, Homo sapiens
tagtctgtcttctcctctcctccccgcaggcgactccttccaaagagcgagagagaaatacgggtattactgttatcccccactgggttcaataccccttacatgtaattgaatattcgaat

SEQ ID NO: 106570 - DNA, 122 bp, Homo sapiens
cccacagccaggcattctgtcctgcctgatgatctagcccatgttttccacaccacctaccggtaactggccttttcatttctttcagggaactggggcatctcacagggcccctgcaacag

SEQ ID NO: 106571 - DNA, 122 bp, Homo sapiens
ccagcatggtgggtcctgctgctacagagctgcatgtgaacctggcaccgtcatgggtgccgctgtcaccgctgtccctggaagcagccatccctgctgctgccaccgctgccacagttaat

SEQ ID NO: 106572 - DNA, 122 bp, Homo sapiens
actgacgatgtcgttgcggcagccttccaggtgggggcgcagttgttgcagcagcatgcgcgacagcagcaccccaaagcctccgtggcagtagcggccgggggtgggctctccgccgatga

SEQ ID NO: 106573 - DNA, 122 bp, Homo sapiens
aggtcccgccccttggtggctgattgacagaagaagcgatctcacagtgctgagtggagccggatgaacaggttccaggcacgacccttggcaaggcgggcttcctcccaacggagtgacct

SEQ ID NO: 106574 - DNA, 122 bp, Homo sapiens
gcgaatgagggatgccagtatccccggagctccacaaaggggctgctgggaaggcactttcgtccgtggggggacccaagaacccctcctctgccgcgccattttttttccttccacacgtg

SEQ ID NO: 106575 - DNA, 122 bp, Homo sapiens
ctcctcaccctccagggtagcggctaccggagcgctgcagggggctgcgcctgcctgctccgccccagacctgtcggcgaaagggtaagggcacctctgctttgggaaagggggatatagag

SEQ ID NO: 106576 - DNA, 122 bp, Homo sapiens
cgtggcgcgggccgccgtttccgcaaacagaatcgcgtttggctgtgctggtgagtgtgacggctggaactccggcccttcctttctttgtgtttgtccctcggccgccgtggaggggtgga

SEQ ID NO: 106577 - DNA, 122 bp, Homo sapiens
caataatctttaaaccaggaatcatcagtttgctaataaaaggtatatggctccaagttacgtattttgtcagggtcctctggcattttcactagtcattttgctagtgtgtacaatgattc

SEQ ID NO: 106578 - DNA, 122 bp, Homo sapiens
ctcattcctccgcagggcgcaggacaggttgttgtccttgggtggcggggacacaaacaccgactggggcctgaccgccacctgccgcactccgttcctcatcttcaccgctggagtgcctg

SEQ ID NO: 106579 - DNA, 122 bp, Homo sapiens
ccaagcagtctctcccaccggaacccttagggtcgggaaccaagcctgccccggggtatccgggccaccagaacagggtcagcatcaaggcgcccaggcattggaagagctgattggttccc

SEQ ID NO: 106580 - DNA, 122 bp, Homo sapiens
atagctaggcaggaatggaggagaacctgcaggaaagaccaggctccttctacacaacaccgcctcccagtgccaaaatggtaattcacagctttgaaccagaggaatgctgagaaaaggtt

SEQ ID NO: 106581 - DNA, 122 bp, Homo sapiens
agggggcagctggcggccttccctgctgttgtcttcctgcagggtgagaggagcaggagccgagctccacccccacgccagccttgggcccggcctgggatcactgctgggaacgtgagagt

SEQ ID NO: 106582 - DNA, 122 bp, Homo sapiens
gcgaagggcgggcagcagggcagcagtgcagcagtgcagcagtgcggtgaggcgagggtgcgaggcggctaagcaagggatgggcccgccgtggcgagccgctgggccgtgttccgcctcct

SEQ ID NO: 106583 - DNA, 122 bp, Homo sapiens
ccatccatttgctcattcagcaggcatttgtcgaacacttgccgggtgctggcattgctccgaggcactggggaccccgcggtgcagacagaatcccgggcctctggcgctcgcactctggg

SEQ ID NO: 106584 - DNA, 122 bp, Homo sapiens
gcgcgcgcccgcgttctcctggcgggcttggtatttggcgcctgcgcgctgagtgcgtgccgctccgccgaccgaagaggctggtaagtcctcaagctggcaggtggtcgggggagcggccg

SEQ ID NO: 106585 - DNA, 122 bp, Homo sapiens
gggaggagccggatgcggatctgagaagagacggtgcgggcggagactctcgggcccgggcggggcgcagcagctgctggaagggcagcgagccgagggccgggcaagacgacatgccaggg

SEQ ID NO: 106586 - DNA, 122 bp, Homo sapiens
agcagccgcgccaagcagcggcggcctcggaggaagaggggtcgccgcccaggtttcttgcggccgccgctcttgtcgtcgcagtatttcctgttcggattatcttttgcttccccccagct

SEQ ID NO: 106587 - DNA, 122 bp, Homo sapiens
ggcggcggagccaggcgggccagcgaccctgtgcggcggcccgatgccctgtccctgccgcgggtgcagcgcttccacagcacccacaacgtgaaccccggcccgctgccgccctgtgccga

SEQ ID NO: 106588 - DNA, 122 bp, Homo sapiens
caagcacctcacaccgctctcaacagtactgctcagcctcccggcccgccgatgcgcaggcgacagcagccaacttgtaagtcaccgctggtcgcagccaactggaaggcacccagcgcctc

SEQ ID NO: 106589 - DNA, 122 bp, Homo sapiens
cccctcgcgcctgagcagctccggtcccgccggcgcagggtgcgggtacccgggccatgccggcccagagaccgccgcccccggtaccgctgcccactcgaagcccctggacgaccccgccg

SEQ ID NO: 106590 - DNA, 122 bp, Homo sapiens
gtagagcaaaacaggagagccttggctgacaaaaggagacacatcagctaagggtgatgtcggctagctgaaaatacacactaatctaatctggctgttctagatgaatctcaggaatgtgg

SEQ ID NO: 106591 - DNA, 122 bp, Homo sapiens
gtggccgcacctggcggggcggccgcagggctaatgctgtgtgaccgccgcggccccgcccgacaactggcttcatcccgccctggaggcctgtgggctcgttagccccgccggcgtgtgcg

SEQ ID NO: 106592 - DNA, 122 bp, Homo sapiens
gggggctacaaagagcctgagttgcggggggaacccattccctgcaggactcctggaaatcgccctggttggtgaatcagggcacaccccacccccgcaaccctccatggctcccaccttcc

SEQ ID NO: 106593 - DNA, 122 bp, Homo sapiens
gcactgggaggggctgagcagaagccacagcggggcagaacaaaggcctggagactggagcgagctgcgttcttgggggtggggggtggggcggcagctggagagtgggggcttccccagcg

SEQ ID NO: 106594 - DNA, 122 bp, Homo sapiens
agtacgctaaatgttcattaagcatgttcctgtctgggggagcccagattcctgactcagcgcctgctttctaaacaggaaacaaagaaacctggtttggttatgactgtggaagatttact

SEQ ID NO: 106595 - DNA, 122 bp, Homo sapiens
atcccagattacagtaatctattgcatatttcaaaatagaggcaaataatttgcgtatttcgaactttaaaaagacaaatatttaaggtggtggacatctagttactctgatttgatcttta

SEQ ID NO: 106596 - DNA, 122 bp, Homo sapiens
gggtccgcgtctgtgtctttctctcttcctatttctcaggacagtcagcgccgcggtccccgcccccagccccccatggcttctctgaggctgatggactctccccgccctgccggccgcct

SEQ ID NO: 106597 - DNA, 122 bp, Homo sapiens
ctttgttctctactgattctgtcagtttttagagcccataaaatagcttcatttctataccgtcttattcacattcagatttttcatatagcatgtcacacacagtataagacattttccat

SEQ ID NO: 106598 - DNA, 122 bp, Homo sapiens
gcagccccgaatctagcctacgtgagtgccggaccgctgagtggttgttagccaagatggcggtagcgatcgctgcagcgagggtctggcggctaaaccgtggtttgagccaggctgccctc

SEQ ID NO: 106599 - DNA, 122 bp, Homo sapiens
gaatttggtatcttctttctgaaatatgagtttctagatatacagagacttaccactgaacgggtttgcctgttaagttgcataagactctggatatttaggatataaaaaagacttaatag

SEQ ID NO: 106600 - DNA, 122 bp, Homo sapiens
tttctaactggacattcactgtcacagcagcatttcaacaccacgtcccttctccacagacggacatagaggtttgggaataaaatagaggtctgcagcatagtgcctggcgggagaccagg

SEQ ID NO: 106601 - DNA, 122 bp, Homo sapiens
tccgccagccaagagcctgtcggagcgcctggcagtgctgaagggcctggagccggacaccgattgggaggagcgcgaggtgcgacggcggcagtcggtggagctgcactcgccgcagagcc

SEQ ID NO: 106602 - DNA, 122 bp, Homo sapiens
acctacagcgtgagcggagggtggaggctgggataaggggtgtcaggagtcaaagctcttcgaagtcctagacagctctgactctgactttactccttggcagccagaaggactgactgggt

SEQ ID NO: 106603 - DNA, 122 bp, Homo sapiens
ccgcccttttatttgctaggaataacggccttatattctggactgaaacctactatgattcgagcattccctgccaatggagcactctttttggcctacgaatatagcaggaagttgatgat

SEQ ID NO: 106604 - DNA, 122 bp, Homo sapiens
cccccagagctctttgacaggctcccaggcctcccagtcctggacaagcatgtgcagtcacgggagctcagctcaggccagggctgggctgtgcacctgcctcccactgacccagacccact

SEQ ID NO: 106605 - DNA, 122 bp, Homo sapiens
ctctttgcaagcacaatcagccagatgacttgaaacagcgtactttaaggggagaagccacggacttagttcaccaatgacttctctggcagttctgtttcagatgaagacgggctgctgaa

SEQ ID NO: 106606 - DNA, 122 bp, Homo sapiens
ggcccccgcccttcgcgggtccgggggcggacagggcggactgggcgctcggacaccgggcgccggctcttgggtcgtgctctcctgcagcgcacacgctcactttctcacgctcgctccct

SEQ ID NO: 106607 - DNA, 122 bp, Homo sapiens
tactgtgtaagtaagtatgtgtcaaatgctgcagttggagcaaggaggctacaaaggaaacgaggtcaccagattccatgattttgtgatttgtagcctgtgactttcagtcgaattttagg

SEQ ID NO: 106608 - DNA, 122 bp, Homo sapiens
ggtctccaggtagaagctgaccagcttgtcggtgaggtccaaggcgtccatggacagcagcgcgccccgcgggatgcgcccgtagccctcgcgcagcggcaccgacagcagcttcagcttga

SEQ ID NO: 106609 - DNA, 122 bp, Homo sapiens
tgccggtctgtcgtgaggcagtgcggacggggaccctctgggattctgctggatctgccccgggggttacctttgggggctgggaccccagtcgaggggacacaaccgtccctggcagtggt

SEQ ID NO: 106610 - DNA, 122 bp, Homo sapiens
catttccagctcattttcctggttcccggagcttcaagacagacattgttttccaggccccgctcgcccggatgaatcacctcccggccactgcttcccaggcgtcatgtgctcccggggac

SEQ ID NO: 106611 - DNA, 122 bp, Homo sapiens
aagtgatcctccagccttggtgaggacggcctcaagacccacgtgtgcgggtaaagactccgcagcatgcggccgaaggacggcccggtgtacgggatccgtatgcagaccctgcctttgac

SEQ ID NO: 106612 - DNA, 122 bp, Homo sapiens
acaatgtctttctctgatgaacaataaatctagtcaatcacacagcctactgcatcagaacgtttcatagaaagatactggtatctctttctttggtggattgatatatagctgcattatct

SEQ ID NO: 106613 - DNA, 122 bp, Homo sapiens
ttaattatttgagccctaagtttctgacatgtatacttaaattttccaatattcataattcggggcttgtggaacatgtatattgggattgtcaagggtatactatttaaaccaagtagcct

SEQ ID NO: 106614 - DNA, 122 bp, Homo sapiens
cccacgttagaggagcagggccgcggagggaggcccgaggtgtcccagggactggcctgtcgctcccgcaggcagtgccggtacccaggccggtttttccacccttcctgcgacttcctttt

SEQ ID NO: 106615 - DNA, 122 bp, Homo sapiens
gggtgggagaagtcgaagccccggtcgaaggagctgatgccaagtgggaggagccagtgccgggtgggaggagctaagcgggcgaaaagcgctgaggttgagccgggacccatcttcttggg

SEQ ID NO: 106616 - DNA, 122 bp, Homo sapiens
gctctttccgctgccctagaaatagctgtccctggcccgaggggctcttgacccaccaggcgtggggctgtgccgctgggcctggcttggggcaggagcatcgagacctcccatttacagcc

SEQ ID NO: 106617 - DNA, 122 bp, Homo sapiens
ccgcccggccgccaggccgccgggcctccggggccctcgcgcatccggctccgaaagctgcgcgcagccatcatcagggcccttctggtgttagaagagaccccggcatcatcttttcgtcg

SEQ ID NO: 106618 - DNA, 122 bp, Homo sapiens
ggctgtggctgccctcttggtgcctctggggaaggaaggagggaaagggatcacggtggccgtcggagttccctcctgcagcctggccacccgtggcttcagaccgcacctgggggtgtccc

SEQ ID NO: 106619 - DNA, 122 bp, Homo sapiens
gctccgggccgcggcgcccaggtccttgcccaggtgcggagggtgcggccgggtggagtgcgtagcgcatggggtaagaggaacgctgagccccgcgcaaagcgggcggtgccgcgctcccg

SEQ ID NO: 106620 - DNA, 122 bp, Homo sapiens
agtctagcttaatagttttgagcatccattgtctttttatttgcgtgtagtatctgaatacgtcattgtaaaccaaaaagtctctgtgacgggtctcagtgaacgtagaggtttatctggcc

SEQ ID NO: 106621 - DNA, 122 bp, Homo sapiens
ttaaaggtcactgggagcgtttctgattcccggccacactttgcatttcaacactcagcccggaaagatgctcgttcggttgttggacctctttcactccctgcgtgtaagaaggtgaatca

SEQ ID NO: 106622 - DNA, 122 bp, Homo sapiens
ggcgcccagcggcggcgcgaacggcagctaggagggttgctccgggcttggtgctcactgcgacttcccgcgcagggcccggtcggactaggacccgcggcctgagagacgctggaggatgc

SEQ ID NO: 106623 - DNA, 122 bp, Homo sapiens
gccccaggagaggggtgaggccctgaccccaccggggtgtcatccaggaggaagggtgcccggggcgaggtcccccaggagaagtgcccaggcctgaggccttgaccccactgagatgtccc

SEQ ID NO: 106624 - DNA, 122 bp, Homo sapiens
taagggaaaaaaatccaggcaggattcatttcaggtcatgtgcactctgcagtgggcagacgtcatgatccttcatggagagccattgccggggcacgatcccgggctgctggagggaggga

SEQ ID NO: 106625 - DNA, 122 bp, Homo sapiens
gtgagccgctttcccctccttactgtcggttgcatcccttcgacactcccgaggccgtcgcgggccactggccctctgcagccatgaagacaaagcccgtttcccacaagaccgagaacacc

SEQ ID NO: 106626 - DNA, 122 bp, Homo sapiens
acacaggagaggacatcaagagaaaaaagtaagtgagagtctagcaggttcccggccccccgcctctgcccagtcatctacccaagcaccttcaccagggaaggaccctcacccttgtctcc

SEQ ID NO: 106627 - DNA, 122 bp, Homo sapiens
tggcaaatattgatacaggaacattccagagccagttggtttcatccaggctctcacaaccgcagccaaaggaagggaaaatgtcatatttgttgaaatagtctctaagagagccctccaga

SEQ ID NO: 106628 - DNA, 122 bp, Homo sapiens
ctacttgagtctgtactggaaggtcatttgaacttgcttcccatttatccatatgaaacacgagaatagcaatttaatttaccctatcacataggaatgccacgacaatgtgtatgaggagt

SEQ ID NO: 106629 - DNA, 122 bp, Homo sapiens
gccagcattctagccccggctttggaaaggactgggttgcccaacacatggccctgtacccggaccctgccagcgtccccaccccaagactgcccgaaaaccagtacccaatgagtggggaa

SEQ ID NO: 106630 - DNA, 122 bp, Homo sapiens
ccccgcgtcagtaataattagggggtggggggaaacaaagcgagggtgagttctgctgggcgcccgtggactcctagaggtcactgtcgcactctgctactcaagtgggtttccccagcccg

SEQ ID NO: 106631 - DNA, 122 bp, Homo sapiens
tgtcctccaaaatccattctcccttcttctgtagtgggaaggatttatgtggtctgtggccgcgcaggataagaactaacttcccagcttgcctttgcagccaagagaccaagttgtgttca

SEQ ID NO: 106632 - DNA, 122 bp, Homo sapiens
aagatgatatcaccccccaatcgcaggaggtgtacacctactctgtgatattttttccaacgtgcagggcaggggaggataatactcttcttcacagcacagggtgtgtacagccccactgt

SEQ ID NO: 106633 - DNA, 122 bp, Homo sapiens
ctgccctagagagacgcaggccccgccccccgccccaccccgctcgcccgggagccttcgcgactccccggctcgcctgtcccggcttgatggatctaccgaagagaaaagcgctggaaaga

SEQ ID NO: 106634 - DNA, 122 bp, Homo sapiens
agctcaaggaaaaaatacgtatatcttgagagatttggggtggggaaaacaaaagccttgcggagtagaaaaaacaaaggcttatttttataaatgtttaatgttttcaccccctggatgct

SEQ ID NO: 106635 - DNA, 122 bp, Homo sapiens
aaagcgggtgctttgactcttagctggaagcgtcaacgggaagctactctaaagcgctttcgctttcactctggtcccggacagtgggggctggttaaatcaagaaagggggttggggatgg

SEQ ID NO: 106636 - DNA, 122 bp, Homo sapiens
cgcacatgcacacacacatatgcacaccctcgcgcacacagacactcccgcgcgcgctcacgcccgcacacactcagggttataacaaaggaagaggggccagcgctgccttacttttgtct

SEQ ID NO: 106637 - DNA, 122 bp, Homo sapiens
tctgcactagttcgatccctagagacctgcttctccagttccgagaggccagcaaacagtcgccctccgtcacgttgggccccatattcccccgctgcctcacaacctcagtcacccggaga

SEQ ID NO: 106638 - DNA, 122 bp, Homo sapiens
gactgccagcaacttccgggcgtttacaggcaggcaggtcagtgatgtgtcctaagggtccgaccgacctagatacccctctttgattcctcctcttgggattagtgtccatctctggaagc

SEQ ID NO: 106639 - DNA, 122 bp, Homo sapiens
gtgcccgcccgctcgccctcgcagggcgccgcccggctcgttggcggccgcggcgcggcgcgccccatgcccgtgtgtggccatgtcctatccgcagggctacttgtaccagccgtccgcct

SEQ ID NO: 106640 - DNA, 122 bp, Homo sapiens
ccctgacagcccgcgggcgtacacacgctgacgcgcaggctgcggtcgcgcaggcgcagtcggggcgccttcccggtataggcgccttttaccccagcgtgtcctgagtctttggttcgcga

SEQ ID NO: 106641 - DNA, 122 bp, Homo sapiens
ctgccagccccagacttctgtggcagagcagcaggtacaggactgggggtctctggcacccgcaccagccacgttcccagaccctgcaccaggaccctaggtgagggcccagggcaagcccc

SEQ ID NO: 106642 - DNA, 122 bp, Homo sapiens
gcgccgggcggggcggggcggggcgggataaaggcgcggggtctggctgcgcggggtctgcgggcagctccaactctgggttcgtagtttgcgctgggtgcgcaggaaggtcagtgtggggg

SEQ ID NO: 106643 - DNA, 122 bp, Homo sapiens
ctgccaggatccatgctcacatgttacttcctgtatggaggcatggccagtttccagccccgcgctcttcgttccttcccagcctgcgccggagccacaactttcaggagcatggactgaag

SEQ ID NO: 106644 - DNA, 122 bp, Homo sapiens
aggcttcgttgttatcagccctaaacatgcactgagtctgtgccagtgtcatgctgtgcccggccctgtgcttcgttgcgttccttcatttaatcctcctgaccctcctctcctaagctgtt

SEQ ID NO: 106645 - DNA, 122 bp, Homo sapiens
cacctgagctacacgtttacccatggtctacaggagccacgagcaacacatctacccacacgggagccatggtctgctgttctccaggacgccttggttgtgggcagtccaggcctttgtta

SEQ ID NO: 106646 - DNA, 122 bp, Homo sapiens
gtgtgtgatcacctgacttatgacagaggtggctccactgaaattcagagagaggatggccggttcactgaacactgctgggataattcaatatccatatggaaaaaagaagtgaaccttga

SEQ ID NO: 106647 - DNA, 122 bp, Homo sapiens
accatgcctccaagccagcatccaggcccgtggtaccccaaccctggccctggacattcccgggaaccacgcctccaagccagcatccaggcccgtggtaccccaaccctggccctggacgt

SEQ ID NO: 106648 - DNA, 122 bp, Homo sapiens
cgcaagaacgcggagcagcaggcactcattcccgattagcgggagcgcaaagcgaaggggcggcctgcgacgttttcctgtaaagttgggcacacgcttcccacatgactcagcaattgcac

SEQ ID NO: 106649 - DNA, 122 bp, Homo sapiens
gaccggggcaggagcagctcctgttgggtattggatgacgagttcttctcataaggattccgtgatttcagaacgttcctactgttttcacgcagccaaacacgccctctccttctttgctc

SEQ ID NO: 106650 - DNA, 122 bp, Homo sapiens
gggcagcgttcctcctctttaccttagcaattttttgttttgttttgtttcaggagaagacggaaggagtatttcttggtcctaggaagtgtgcctgccttgctggaagacttcttttttgc

SEQ ID NO: 106651 - DNA, 122 bp, Homo sapiens
ctgcgcccgagcctctttgcgtgccgctgtctgtcgtcaggggtggcagggactgcacagcggtggcacagctggcgtggagatgtggaggaggcaacgtctgcagaggagcctgcaggcac

SEQ ID NO: 106652 - DNA, 122 bp, Homo sapiens
ccgctgtggtccctggagacgccggaggagatttccgtgacaacggcaagctggctgcaacgaagccgcccacgtaggcctccccggcctgctggaggagaggggatcccccggggcagagg

SEQ ID NO: 106653 - DNA, 122 bp, Homo sapiens
cagctactcaggaggctgaggtgggagaatcagctgagcccgggaagtaagctgagattgcgccactgcactccatcctgggtgatggggtgtgaaaccctgtctcaaaacacacatatgac

SEQ ID NO: 106654 - DNA, 122 bp, Homo sapiens
tggagggcgaaggtggcacctagatcctgcagtcacatggggctaatcaattttcctgcccgccagggttccatttgagtcatctgggttttattttgattcagcctctttaactggctgct

SEQ ID NO: 106655 - DNA, 122 bp, Homo sapiens
aatgcaatcatacaatatgtggtcctttgtgtctaacttatttcacttaatatgttctcacggttcattcatgttgtagttcttattgatatttcatacctttttatttgcctaaatcaatc

SEQ ID NO: 106656 - DNA, 122 bp, Homo sapiens
tgattgaccgtccatccctccacggagaaacacaaacacagctccactctttgggggagccgaggggaaggcagtggctcccatttctgagcctgaactcagtcactacccgctccccacct

SEQ ID NO: 106657 - DNA, 122 bp, Homo sapiens
tttgttggtcaaatccgatctgccatatcctgtgtaatgacaagtgagttgcattctcaccgtcactcctggggtctctccgcttcccctgagctggctcagcagtctgctccatgtgtttt

SEQ ID NO: 106658 - DNA, 122 bp, Homo sapiens
taccaggcaaaagaagtaccaggctctaggggcagactgctggattatgactcaagttgacgcaggaagataacaaatccagtcctctccccagaggaattgagacctaggagtggccttct

SEQ ID NO: 106659 - DNA, 122 bp, Homo sapiens
gtccctcctctgagttggacagctttgtggctgagatccccaagctcctgagccccagaccgtctctatcccagtgcaggccgctgccccctccccgggcttgtcagcgtgtgaagcggggt

SEQ ID NO: 106660 - DNA, 122 bp, Homo sapiens
gcaaccaggagacctggtaaggaccaagttgggaccctgactagacctcacctgcccaggcggcagagtataggagggatggggtcgccgcttgagctcaaacagactgggggttgggggga

SEQ ID NO: 106661 - DNA, 122 bp, Homo sapiens
ctgatctttttctagacctatgtgaaaattctatttcataaatcccaccaggtttccttccgaggccataccctaaatcaccttctgtcatgtcatcctcttctgtttcccagagctgcacg

SEQ ID NO: 106662 - DNA, 122 bp, Homo sapiens
tgcctggggagagggtggtgacacttggcgtcctgggctgatctggggcacactgacccacgggtggagctgaccttgtggtaggcacgggcatgactgggctgggtgcccgttttgtctcc

SEQ ID NO: 106663 - DNA, 122 bp, Homo sapiens
aagccaccttctggcttggggaagcccactccatggctgtggctgggagcccatcacttacgcgttcgacattgctggctactttccctcttttcctcgccctccgggaagctcttccgttg

SEQ ID NO: 106664 - DNA, 122 bp, Homo sapiens
gattctccccacagccaaccgtggccttttgaagtcgtctacaaactaccactgagaatccgggaaagaataactgacacttgtaggcttcgaggactctcagagtgatatgtgcctgaggt

SEQ ID NO: 106665 - DNA, 122 bp, Homo sapiens
aaatcaaaccaaacgtaggtaaaaggcctgatatcttctcagctgatgagtcaaatacttcgaagggaaaatatagtaaaatatttcaaggtttggaagacagcttggctgtgacacattct

SEQ ID NO: 106666 - DNA, 122 bp, Homo sapiens
acgcgtgggtgtcgctcgggggcgctcgcctcccccacccagcctgtcccgggccgcgagcgcttccagtcgggttacttctgggggacaagaaaggcaccgtctgaacggtcgagacgctt

SEQ ID NO: 106667 - DNA, 122 bp, Homo sapiens
ctaatggttctctcatgctcgaaccctgctgcggtacaaccaggggagctgcgtgtggggcgggcctctctggcatcaaaaggcgttggcgctgctaggagaggttgagcacatccctttct

SEQ ID NO: 106668 - DNA, 122 bp, Homo sapiens
ttggatccaccgaggggagggccatctccgaagcggctgcccatgggggggcctgttcgccggtcgcctgggcgactacctcccctgccccctaagaagtcatccctgaagcctctgtcatc

SEQ ID NO: 106669 - DNA, 122 bp, Homo sapiens
cctgccctcagcagtcccaggcccagaacacaggccgctgggagatgacggcggtgtctgcgtgggtgtgctgacgcctgatcccggatccccctccagacgctgctgtcttgacctcaccc

SEQ ID NO: 106670 - DNA, 122 bp, Homo sapiens
gcgctgtcctcgcccagcaccacgtggcgcccgtccctgagctgggccagcaggaagtggcggcagcaagtccggctcctggagggcgccgttagggatcagactatctcccgctcctcggc

SEQ ID NO: 106671 - DNA, 122 bp, Homo sapiens
accagcatcggaaatctataatcaacattcttcccaaagaaagtctcacccttggctgggcgcagtggctcacgcctgtaatcccagcactttgggaggctgaggcgggcagatcatgaggt

SEQ ID NO: 106672 - DNA, 122 bp, Homo sapiens
ccaaatccccagcacagctacatcgtagtgggactggcaccgtgtttacagagcacggcccgttgcaggcactctctatgaaagctcagcacccttgtgaaggtccaaagcaaggcacgtta

SEQ ID NO: 106673 - DNA, 122 bp, Homo sapiens
gaatatttataacttttgtatgagagagaattcacactcaacaagacactaccagcaccacgtttacagaggatgaaaacacttcacagtctcccagagccgatcgtcctctcccccgcccc

SEQ ID NO: 106674 - DNA, 122 bp, Homo sapiens
caagaccccagacctcgttggcccagcgtcccgccagctgcgcggcgggtttacctatcccgcttggtctctggaggctcgtcccggatgcaccatcgcccagaccctcttcctcttccttc

SEQ ID NO: 106675 - DNA, 122 bp, Homo sapiens
cgtatgccttcatcccccaggggtctgaggccacagtgagccggcagcgctcctactgtgcgctgaagggcaaagaagagggctcgaggagaggctggggcgaggagagaggaataaacctt

SEQ ID NO: 106676 - DNA, 122 bp, Homo sapiens
gttcgcagaaggaggcgggactctcccacgagcgcaaagctgcgagaggctgagcgaagacgggttcgcggacgtaagaggggcgtgtcgggcctgtcatcagcgcacgcgcaacactgccc

SEQ ID NO: 106677 - DNA, 122 bp, Homo sapiens
gcataagataggtcacaccctcaaatttcggctccacatctaggttgttgtccctccaaacgcctcagatccgccaagatgcaagggcctggatccagttgagcggcaaggtctttgagaaa

SEQ ID NO: 106678 - DNA, 122 bp, Homo sapiens
ctgaagtcttgacccatgtctctgaccccttatttgaagtttggagagcagaactgaggacggttagagtattactacagttgtggacacaggaaaggggttagtctccccccaccacccag

SEQ ID NO: 106679 - DNA, 122 bp, Homo sapiens
ggctccggaagccccgctcgcactcaagggggccacaggcacctgctgcccacaggaagacgcgtgtgggaaccagacgctccggcaagggcagactgcactcagcacagagcggccccggc

SEQ ID NO: 106680 - DNA, 122 bp, Homo sapiens
tggggctccttgagtcagggctgcgtctccctcagactgggggtccctgagtcagagctgcgtctcccctcagactggggcaccctgaggactggattgtgtctcccctcagactggggctc

SEQ ID NO: 106681 - DNA, 122 bp, Homo sapiens
caagctatggggaggctcacggagtcagcaggagacctgctgtaaaactcatctgtaaaacggagagccaggctggaagtgggtggtaccaggtgagcttgctcctcctgccctattcctgc

SEQ ID NO: 106682 - DNA, 122 bp, Homo sapiens
tgcccttcgccatgcgtccccccgatcgcggtgcagcggagctgcgacccggtgcctgcgcgcctgccccatgccttccagggaaatcgcctttaatattcttgtgtattttcctatcccca

SEQ ID NO: 106683 - DNA, 122 bp, Homo sapiens
ggggagaggggaaacacttctggcccatgtgagccgccgtctcgtgtggtgtctgaggggcgtctacctggagtcactgagccgacgaaagggaaaaggccagtgcctgtccgggaagagct

SEQ ID NO: 106684 - DNA, 122 bp, Homo sapiens
catgtccaggttgtccgtcgtgaacttgttgcagacggcgcactggaagagcttcagcgacgggtcgttggtctggatgaagctctcgcccaggttcatcagctcctctgacaccagctgcc

SEQ ID NO: 106685 - DNA, 122 bp, Homo sapiens
ccaagagcctcagtttgtcctcagtgacccagcttttcctctgcacccatcgtcagggtccggtggacttatcgaagtgtgttttcacaggacagtcagttcctcactggagtcctctgttc

SEQ ID NO: 106686 - DNA, 122 bp, Homo sapiens
atcctgcctctgggctccccaaggggcatgtggaggctgggtgcatgtcccgcctccacccggagcgggctcggctgaccgggcggggtctccctccccgcagagtgcagtgaagacaaccc

SEQ ID NO: 106687 - DNA, 122 bp, Homo sapiens
gatccatagtgacctggtttgcagagctggcagtttgcgccctgagtgttgtgcaaacatcgaaggcactcccctgttacccggctgcaggactctggatcggttacatctatgttgttgtt

SEQ ID NO: 106688 - DNA, 122 bp, Homo sapiens
catcatggaattccacaccttttttgaggataagatgtgcatatgcttcaactatgaaaacggtagacaatgttgtccagaaatggcatgtatcagctgctcttgagaaataaaaataaaat

SEQ ID NO: 106689 - DNA, 122 bp, Homo sapiens
tctgccagtattcacggcccgtgcaggccacgtggaagatggacgagcgggaggtgcacacggatgggcaccgtgtcatcatagagcaggactggaacgtggccaggctgaccttcaggccg

SEQ ID NO: 106690 - DNA, 122 bp, Homo sapiens
ctcttgcctcttttcgccggctgcctttctttaaatgtgcccgcctcaggcccctcccaccgcagccccgactccacccattgggtgctctcagaagaggggcggggactgatgggggagag

SEQ ID NO: 106691 - DNA, 122 bp, Homo sapiens
cctttataaggcggcgggggtggtggcccgggccgcgttgcgctcccgccactccgcgcccgctatcctggctccgtgctcccacgcgcttgtgcctggacggaccctcgccagtgctctgc

SEQ ID NO: 106692 - DNA, 122 bp, Homo sapiens
ctccaggcccccacccacccctgcacccgggcgcagatgctgagggacagtaaggacctccggtgccacccgggaggcaaatacttgcttctgtgtggtctgtgaagggctccactaagtgc

SEQ ID NO: 106693 - DNA, 122 bp, Homo sapiens
aggcatggtcctctctgaacatagcaagttatctttgctgaatgctagatgtacattccacgcatagaagcagagagggcattggtggaatttggtgcctctccaagcagtgctccttagaa

SEQ ID NO: 106694 - DNA, 122 bp, Homo sapiens
cccaggtctcccaggctctcttcctcatcactctttctctccagggtggccggcagctcccggtggtgccacggagccctccttgtggtcccacaagatggcgctgtgtccaacgctagccc

SEQ ID NO: 106695 - DNA, 122 bp, Homo sapiens
ctccgcgcgcagcactcaccatagctcgcgtgctccgccccggcttcgcgcagctccccgcgcccggctcccgattcccagctccgggttccctgctcccagcccagctgctcggacggctc

SEQ ID NO: 106696 - DNA, 122 bp, Homo sapiens
aatccatgtttctttccccagaggattccagatggagtgaactcagtagaggcggtgcttcgacggctgatgatcttgcggagaggagagaggagcattagttacggttttaagtcccggct

SEQ ID NO: 106697 - DNA, 122 bp, Homo sapiens
ggaaggccccgtgaggggtcgaacgcggaggcaggggttacctcttggggctttacaatccgtggcccctcctgtcctgcactgtggtcaccggtcctgtcatagatgctgttaatttaagg

SEQ ID NO: 106698 - DNA, 122 bp, Homo sapiens
gagggggcgtctctgggcagttggagagctgctcggccttgggcgggccagagcagggaacgggtcccggatgacgagtacgaagaggcccgaaggccttcccgaggcgggcggggggcggc

SEQ ID NO: 106699 - DNA, 122 bp, Homo sapiens
tccctctgatgtctgtctgctgtaccatgggtcctctaaaacagcagcatgctcccagctcgttcttgttctcagcttcccccaaagagctagagtatgcttgttccatcagcaccccaagt

SEQ ID NO: 106700 - DNA, 122 bp, Homo sapiens
gggacgccggcccgcaagtgactggcccttggcctgcggcgggcgtggcgacgggtggtgcgcggcgggcgcgcgggtcgagagagcgtggcggcgcggcccggagcgcagcgcgcggcagg

SEQ ID NO: 106701 - DNA, 122 bp, Homo sapiens
attatagtgtagaaaagaactggaaaccaggaactctggagttcatcagagttatggtgccgaattgtctttggtgcttttcacttgtgttttaaaataaggatttttctcttatttctccc

SEQ ID NO: 106702 - DNA, 122 bp, Homo sapiens
cgcggccagccccgggctcctctgggccacgcgtgtcacgtcaacactcgccgggctccacgaactggcgttgtcagatgaaacacggcacaactggtttgcatctcagatgaacaaggggt

SEQ ID NO: 106703 - DNA, 122 bp, Homo sapiens
cccaactcaccggccttggctagcagcaggttggcctcctggctcatgagctgggtgacgcggttgttgatggcatcgatggcctcctgcatggctttcacccgcagccgcagggccccatt

SEQ ID NO: 106704 - DNA, 122 bp, Homo sapiens
ttccttcctttcggaggggctattgtgcattggactttggtcagcggcttttaacctggacgctgctgtgctggtctctcacagctcagggcccagtttgtatgatgtcagagccatcttgg

SEQ ID NO: 106705 - DNA, 122 bp, Homo sapiens
tagaaagaaggctggatattgttgcaagacaattctcaatgggtttctcctgtttctgcacgtcttctgcaaggaattaccagctttgctctggaccatcttttcaaggatgttcatatagt

SEQ ID NO: 106706 - DNA, 122 bp, Homo sapiens
cccagatgtttatattttcctccatcggccccgccccccgaccatgaggggctctagccacgcccccaagctcaagtttctggggccggactagcccagcgcgtctgcctacccatagggat

SEQ ID NO: 106707 - DNA, 122 bp, Homo sapiens
caaaatgtgggaagtgatgaggggtgcttgtgggaatgtctgggggtgggtggaccccatcgtgatgtgagtggcctacagggaacacccaacaaaatgagttttaaaaaggcttgtccagg

SEQ ID NO: 106708 - DNA, 122 bp, Homo sapiens
cccagcccagcccgccagccccctggggaagcaagactcactcatcatggtgaggccgtccgggtcccaacttggcccaggaaatgacagcgttcttggggtgttacttccccctccatcca

SEQ ID NO: 106709 - DNA, 122 bp, Homo sapiens
tcctagctcgcaccggcgaccctggaagctgccccgggctgagggagcttcttccagccgcgcctcagcccaggcgactcccgcctgaggtccactcgaccttaggaccccccagacctcgg

SEQ ID NO: 106710 - DNA, 122 bp, Homo sapiens
gtactggcctagcctggccagctgctccggccggtagaagatgcctgaggcccacttgagcgctgcaccccgggccagctgctctgcccgctcctgctctggccactcaggtcctgggaagg

SEQ ID NO: 106711 - DNA, 122 bp, Homo sapiens
tctgcttggtggggtgggcagcaggtcctgggatgtgggcagagtcccaagagggtttaccgatgtcctgcatgacctcatgctgttagtgctctggctggcagggggaagggaggagggtg

SEQ ID NO: 106712 - DNA, 122 bp, Homo sapiens
acataatacacgctcaattaaagctgccgaatgaaagtgttcagaaacttgcacccatctcgcctgggtttcacctcccttttcctgtagggggaaaaccgatcctgaaccagtaaataaac

SEQ ID NO: 106713 - DNA, 122 bp, Homo sapiens
agctaatcatagttcccccaagaaagggcgacctcggcaagcaagttcacctccgtattccgatcacctggcacatagtagccgcccaaatggcaaccctgggattcgaacccaggtagttg

SEQ ID NO: 106714 - DNA, 122 bp, Homo sapiens
aatttgagggagaccctgctgcacatggttccagcggaggagaccccagtgctgagcccacgtgatgcctagcgaggcagcgctcaggggactgcggctgcggggccatgcccaggcacggt

SEQ ID NO: 106715 - DNA, 122 bp, Homo sapiens
ttctgtcaaaaatcccttcaaaaatttgagacctctcttcagccacaagagggcttcagtcgctgagttcctaacctgggctacatccgcctccacttcgtgcagcactatcttctggagag

SEQ ID NO: 106716 - DNA, 122 bp, Homo sapiens
ctcgccttcaccgtgacgccccactcttccgggcacgcccctgcccaaaggctttaaaggcgccgtgtgggacgtcactttaatgcgacctcatctttgtcagtgcacaaaatggcgcccta

SEQ ID NO: 106717 - DNA, 122 bp, Homo sapiens
agctgcggcttgtgtttctcattgatctcttgcccttctacctgtgctggaatcctactccgtcaattatcctcccatttaaaaacattacttacctcttcttttataccaggtccttcccc

SEQ ID NO: 106718 - DNA, 122 bp, Homo sapiens
cccactgacacacgctccctcgtgtgcagagacgggagaactggcaaacatgcaattacccggccccgcctgccacccccgctccccttccccagcccctcctgctccccttccttccctga

SEQ ID NO: 106719 - DNA, 122 bp, Homo sapiens
tccgagccccgacacaccctgctgcccttcggacgcctccacgtcagcgaccctctcccgcggtttccggaagcgcctggaaacacgaacttccggtctcttaggctccgggccacagagac

SEQ ID NO: 106720 - DNA, 122 bp, Homo sapiens
cccggcctcagcccccattgtccctggagctggcgaggtgtccggttgcggagccggcggcgtctctggaaatgcatcctgcatccccgcatggataacagctgcagctatgtcagaattgc

SEQ ID NO: 106721 - DNA, 122 bp, Homo sapiens
ttacttaccttgaatttgctatttccactttggttctggccatggcagctgccctttgggcgccttcaattgctctgtccaccttctccctagtttttgtatgtcttattggtataagctgc

SEQ ID NO: 106722 - DNA, 122 bp, Homo sapiens
ttctaagtgcttgtttcagaatgtcctgaatttacctacttccacagccttcctctcaaccgcattatttctaacagttgctaaacttagcctgaagtctttaacctaagactaaatccaaa

SEQ ID NO: 106723 - DNA, 122 bp, Homo sapiens
tctaaatggcattcactctttagtgggtcatcattgcttgttcttgaatcagtacacacacggaatcatcctattcatctccaagccacagaaggatgtatcagccctgtagctaaaaggat

SEQ ID NO: 106724 - DNA, 122 bp, Homo sapiens
cacagacaattcctggcgagcatataacacagcaccttggaagaattctgtgcctctccacgcccttccccaggcttcatagtctcacagtctggtaactactaaacaagctatgagaggga

SEQ ID NO: 106725 - DNA, 122 bp, Homo sapiens
gaagcagggtgcgtggtgggggtgaggctcagatcgggctccgacctcagaggcgtggaccgtggcctcggggctcggggcggtggcgcggagtgggcggtgacttcggcgggcgcctccca

SEQ ID NO: 106726 - DNA, 122 bp, Homo sapiens
aagaatgtaagcagtgattcatgcccaggaatttttttttttttttgtctgcaggctaaccgtatcttatttgttttaaatcgcagagcattagtggattaaaaattttaggttaacttact

SEQ ID NO: 106727 - DNA, 122 bp, Homo sapiens
caccgtgcgcgcgggggcgctgcgcagtccggcggcgctgatggattgcagaagtgccggcgcttgccagccgaggcagcacggctccgcggactttttttcaaactcccatcaatgagact

SEQ ID NO: 106728 - DNA, 122 bp, Homo sapiens
gtcacagaaggaaacacaagtgacaggacaacagcaggttcagaaggataagtgcagatacgtaggtatacacaagatgcgaccaaacagcacatcagggaaggcttcctggggaacagatg

SEQ ID NO: 106729 - DNA, 122 bp, Homo sapiens
aattcattgcttggcttttgcattgtcggactttaaaaaagtgtgtctgctgttgttgcccggactcgggaaatcttttttatggcaaccgcagacctgccaagtctctcttacttggaatc

SEQ ID NO: 106730 - DNA, 122 bp, Homo sapiens
ggatgtccactgtggtgtggtcgggtttcctggcagtcttagctgaattggtctgggtgccgctggggttggtgacgataaggctattctcgggggtcttgggggggccgggattggatggg

SEQ ID NO: 106731 - DNA, 122 bp, Homo sapiens
ttcctccaacagctgagagggggcgctggatggggcagatcaagaggaggtagaccataacgttgagtttaatagcccagctcagctcagggccagaagtgaactgttcatgagtaatttgc

SEQ ID NO: 106732 - DNA, 122 bp, Homo sapiens
aaaaaattttttttttttaaagaaaaatggttttcgtcttttttttttctttttgcagggcgggcatgttgagacttttggatatttctgcccccagctcgcactcacctgcggagccgccg

SEQ ID NO: 106733 - DNA, 122 bp, Homo sapiens
cttcccataatgggtgcttaatgaacgtgggtggaattgacaccaaatctaggatgctgccgctccgtctttgccagacagcgcctcagattgcctcatttagctccctgccctgggcctcc

SEQ ID NO: 106734 - DNA, 122 bp, Homo sapiens
gaggacctgccgaccgacttctacggggttgcccgttgctgcgcctgacagcggcggctgcggctacaccgcgctggacaccgctctggcttactcaagaactccccgttgcgccttctcca

SEQ ID NO: 106735 - DNA, 122 bp, Homo sapiens
cagtccgctccgggagagttagggctccgagccgagcgcgcggagcagctggggccggggcgcggatgctggaagttcacatcccgtcggtggggcccgaggccgaggggcccaggcagagc

SEQ ID NO: 106736 - DNA, 122 bp, Homo sapiens
tgcagcacacgaagggtccccttgcttgccccccgcgccagggagagagttcaggaaaagcgaggggagaggcccactgccactgccactcccacaggcgcccccgccctgggtcagctggc

SEQ ID NO: 106737 - DNA, 122 bp, Homo sapiens
gcctgttcggcctcctggcactgcgacagataccgagctgacagctcttcgttctctctccggagccgctcctcccgttgctggtacgatgtttctagcaccttgatgcggcttctgccaac

SEQ ID NO: 106738 - DNA, 122 bp, Homo sapiens
cagcaggctgtggggcgagagagggtgcacgggctggacgtgggcggcgctagctcccctcgccttcttaccctccccttcaaactctgccggacccagaggtcgtcccagcctctacctcg

SEQ ID NO: 106739 - DNA, 122 bp, Homo sapiens
ctttcttcctcggcttgtgcctaaggcctccagggcctacgagatggtgtttgcctgttgcggattctcagggccagaggcagtatagctgggggcctggcatttggggagggttcctaagg

SEQ ID NO: 106740 - DNA, 122 bp, Homo sapiens
actggtgcccggtctcctctatcgaaccctggtcgcggcggccaccagcgcaggcgtgggcgtgcccagtgccccagtgctggtgcagctgcgtgagtccacccgagggcagtgctgaggat

SEQ ID NO: 106741 - DNA, 122 bp, Homo sapiens
ttggcaggaaaagacgacaggggaatggccagcaccattctgactcaaaggggacagcaccgttttttaacccacagacaggtcatcctggggtgaacaaggcgccttctccaggtaagtga

SEQ ID NO: 106742 - DNA, 122 bp, Homo sapiens
ctgctgccttatttctgagttagcgctcttaagattgggcctcccagtttgaggaaggggcgggctgctgtctacctctgtgaatctgccctggaccaccccgggagagaaggagggctccg

SEQ ID NO: 106743 - DNA, 122 bp, Homo sapiens
ctcaggtgatccattgaaatagatagttgcgtttattttatagttgagtaaactgaggtgcggaaggtggaacaactcacctaagttcaccccctaagcctcaaccttagcagtgaaactca

SEQ ID NO: 106744 - DNA, 122 bp, Homo sapiens
cggccgtgaccttgcgggtctgtccccggctcctctcctttccccgcctcggaggccctccgccgctgcagcgccactcacttcccaccgggtctgaaatttgtgccccctccatcctccgg

SEQ ID NO: 106745 - DNA, 122 bp, Homo sapiens
ccacacacccctaccccgagacgggtgcagaatcagcagcggggatcatccagagactctcgcagtccacggcaggtgtcggagtgggcctcattccagagttgtggtggccgctccacctg

SEQ ID NO: 106746 - DNA, 122 bp, Homo sapiens
ggctgtggagaacccagcccagctgagccgagccacggccaccatggcggctaccgaggacgctcacgagaaccacagtacctccactgagaatgcagacaagtccaaccaggaccctcagt

SEQ ID NO: 106747 - DNA, 122 bp, Homo sapiens
gctttatcaggttctaggaggtcctttaggaagactctcaaaggcaaatccctgatcccccgccccacccttagccctgccctctcaccagagcaaaattcactggggacttttcccaccac

SEQ ID NO: 106748 - DNA, 122 bp, Homo sapiens
aggcagattagcacagggcatctggagccagcaaagcagttttagagcgggagcctgcttcggggatgcttgaaggtgggcactggggtcaggctgctggctcaggcccagctggtcttgca

SEQ ID NO: 106749 - DNA, 122 bp, Homo sapiens
tgtgtcattgccgtaccacgtgtcattgctgtaccacgtggtgttggtgtcgttgaacggcgggggccagcgcacacacttctgcctcaggtttcccatgaagagctgcagtcctaccagcg

SEQ ID NO: 106750 - DNA, 122 bp, Homo sapiens
tgcccccaacaaagagggcgtccaatgacgtaaaccaatccgattgctctgtgccagggccgggattcgctggcgtagccagtcagtgctgccccacagccgcgtgcgtctgacgtcaaggc

SEQ ID NO: 106751 - DNA, 122 bp, Homo sapiens
gccgcctgcggagcgcaggaaccttcacctcccgaggacaggcgccttcccctcgggacccggctcccctgctgcctgcgccgctctgtccccctgccgctgcccaagcctccagcaggggc

SEQ ID NO: 106752 - DNA, 122 bp, Homo sapiens
gcccgccggttggccgttcagccgttgccctggcgacgccgatgttgtggttccgcggcgcgctgggagtttgggtttggttggctgcagccagccagccgtgtaaaaactccaacgccggg

SEQ ID NO: 106753 - DNA, 122 bp, Homo sapiens
gcgttttcttaataaacccacagcaagacctagggcgggggtgaaccacagcgcatgcgccgtagggagcgacctcaacagctagggtgctgtttgggcggggcctgggcggggccagacgc

SEQ ID NO: 106754 - DNA, 122 bp, Homo sapiens
ggctgtaacagggtaaccggctgagggggacgacggcagcagcggggccgttacctgctccgcgctgttcccacgactgcgccaacgccgcagcgccggcgcgtccccatggaaacccgcgc

SEQ ID NO: 106755 - DNA, 122 bp, Homo sapiens
tccccatcttttcattttctccccttcttttcattttctccccttctccaaccccttcctcgacacacgttactagcacctcgaaggttggaaattccagcactctcctgaggcctcttccc

SEQ ID NO: 106756 - DNA, 122 bp, Homo sapiens
ccgagcccgcgggccaccctagcgctcgctctggctacgccgcctcagcccctcctcaagcgcacctggacatttaaccaacagctaagtccggcggccgaatgactgagccggcggcaata

SEQ ID NO: 106757 - DNA, 122 bp, Homo sapiens
cgaccaagtgaattcgcatctgtgttgtaggaaggtcctcaggtgattcacaaacgcattcgagtttgactgcggcaagggctaaggaaaaaaaaactaagcagtgaagggactgaggaggg

SEQ ID NO: 106758 - DNA, 122 bp, Homo sapiens
gaatttctgtccaactgcctgtaagagacttgtagaaatgtgctcagctgttcaaccgtgcgaggctccctgaccccgccacggcaggccgcgacgaacacggtgtcccgccacggaagaga

SEQ ID NO: 106759 - DNA, 122 bp, Homo sapiens
tcctctcctgagaaaaggtattcctggctcgggcattaaccagctccagccccacctgaacgaccagcagctccaccagtgcagactctggggtcatgggcccagggccaggctgtgcccgt

SEQ ID NO: 106760 - DNA, 122 bp, Homo sapiens
tgacatgtggcaaggaacggggaggatgcgatcacggagcaggcaacatgaaacagggaacgaccccaggctgaagatgggagacggagaagatactcagagagaaagctaggaatgtgtgg

SEQ ID NO: 106761 - DNA, 122 bp, Homo sapiens
gcgaaacaccttggagcggttggccggcagaaatgcccactgagcgggctgtgattcactcgggaggaggaaggcctcggagggcagccaatcgaagacggacccagggaaaagtcgctggg

SEQ ID NO: 106762 - DNA, 122 bp, Homo sapiens
tcaacgccagaagcagatgtcagcatctggatgggggtagcagaggcagaacttccagaacgccggccgtcagcacgcacccacctcccccatcacctatgcagccacagagggaggacacg

SEQ ID NO: 106763 - DNA, 122 bp, Homo sapiens
gtagcggggaattgaggaggggggtggccgaggggaggggctcgccgtcgtgggcggggccggcttgtcagggcctcagccttgggatgtcttcctggtgggttcatctcccgcttcaggct

SEQ ID NO: 106764 - DNA, 122 bp, Homo sapiens
ccgagagacttcctcttcgttaagtcggccttcccaacatggcgcagtctattaacatcacggagctgaatctgccgcagctagaaatgctcaagaaccagctggaccaggtggggacgggc

SEQ ID NO: 106765 - DNA, 122 bp, Homo sapiens
tcacctctgtccactgaggggccgctgcttgtgtcgggccctgagctgagcgcagggaagcggggaaccggggtgggcccagctgtctcggggtgggggggattgaggtgaaacactcctgc

SEQ ID NO: 106766 - DNA, 122 bp, Homo sapiens
ttgttaagtagcctttatccccagcgaatttgtgaaatgtaaacatcatggtttccatggcgtgttccatttgagatggcattttggtgtggtccgttgaagcctattaaaggatgtaaagt

SEQ ID NO: 106767 - DNA, 122 bp, Homo sapiens
ttatatgcgtgtttcatgaaaggctcaaacaagaaagtatatgtgaagatgacttttaaacgatgtagcattacccagacgtaaagttatataagaaatggaagatttggcatgccctggtg

SEQ ID NO: 106768 - DNA, 122 bp, Homo sapiens
taattttccctgtctctaaaggtattaaatccaccccttttgcccgcagagtatctgtcccgacggtcatccttcatgcctcctctacccctggaacgacctgtcaagaaaacaattgcaaa

SEQ ID NO: 106769 - DNA, 122 bp, Homo sapiens
cccagggcccctcccagctccagcgttaccctccggtctatcctactggccgagctgccccgccttctcatggggaaaacttagccgcaacttcaatttttggtttttcctttaatgacact

SEQ ID NO: 106770 - DNA, 122 bp, Homo sapiens
cccaggcttgccgagcagcagctcgaacccgcgccccggccgcactggggcggggcacgacggccccaagaagaccctccctgcagcggccccctgcggctccgctctgcttttaatcactt

SEQ ID NO: 106771 - DNA, 122 bp, Homo sapiens
atggcattttcctcccagaaatttgtgacattcatagccaaagtctgagttctggaggaccggggcactgtccattactgagtctccaggttgggagagaggaagagcttcccatatgtgta

SEQ ID NO: 106772 - DNA, 122 bp, Homo sapiens
atctcccacctgtcagcccaacttttggattccttgtcaccttccacactgcccgagctccggacatacagccctggtgcacaagggtcccattctttgcacaccaggggtataatggactc

SEQ ID NO: 106773 - DNA, 122 bp, Homo sapiens
aggttaactaaaacactaaggtcacccagcaagttagcagcgcaaagagaattaacaaaacggccgccctcgcccagttgagaacatcggcatctctcacctccgaagttccgagggtgccg

SEQ ID NO: 106774 - DNA, 122 bp, Homo sapiens
gccatttgctaagcgccaggtgggcccgggtgtgggctgggtgggcagcctggctcgcggcgtaaggggcaagctatccaggcagcagtgggctgagaattgccggcatcacctgtcatttg

SEQ ID NO: 106775 - DNA, 122 bp, Homo sapiens
ccacaagagcagctgggctgggggctaggagtcaggcccagggcctcagcttctgggaggcggccagggcttctcagcctagtttctgatccttttgggaggggggaggaaggttctgggcg

SEQ ID NO: 106776 - DNA, 122 bp, Homo sapiens
cgcgaggatccgtggttagaggcgccctcccacaccgcccacaggtctgcaaggtttgcacgcctccgctctgcaaggaagcaggtgcagttagttcccttggcctttcccagcacagggag

SEQ ID NO: 106777 - DNA, 122 bp, Homo sapiens
atcaatggcgtggtcgttttgagggacaagtggtgagagccaatcatcttggcgaacactcggagaaacaggggactagttactgtctttatccgccatgttagattcaccccacagggata

SEQ ID NO: 106778 - DNA, 122 bp, Homo sapiens
tgtcattgggctgggccaggctccaggacccacccagggagaccccacccccgtcggttccgtgccgcggctcactctggcctccggagttgagcagtcagctctcctactgggagtcaccc

SEQ ID NO: 106779 - DNA, 122 bp, Homo sapiens
ctctactaagtgtagacgcagggccccttggcctagcttcgatcgttcgaattcagagcacgtccttccgaggtgaaggaacgcgaaactccacccatccgattgctgttcggctgcgggcg

SEQ ID NO: 106780 - DNA, 122 bp, Homo sapiens
cacttggttcccatcttctccctctttcctgcactatatctaaacaaaccttttgacaaccggtaaactgggaattttgactgtaggatccacagttctaagatatttaaaatcttcccctt

SEQ ID NO: 106781 - DNA, 122 bp, Homo sapiens
gtactccgactagggggttgggaacccaataacagtggttgggcgggcgccttcctggagcgcggggagatgtaaagatagacaaataattttcccaatgagactgtagaagagagagcaat

SEQ ID NO: 106782 - DNA, 122 bp, Homo sapiens
gagggtagacatgaaacagcacaccctatcccaatggttaaccagaggcaatatcgctcccgggggagatttcgaaatgtctggtaacatttttgcttgtcaccactggaggagtgctactg

SEQ ID NO: 106783 - DNA, 122 bp, Homo sapiens
aaactggtttcgtcagctgtggggcagcagctgcaagaagagaccacagatgcttctcaccgtgcttcctccctgctttccattctccttcatatcgaaagaaggaatttgggtatacgtag

SEQ ID NO: 106784 - DNA, 122 bp, Homo sapiens
gaggacgacgctgtgagcggggtatcttacgagggactcggacggccgggggatgactgccgccgggaccaaggagctgggcggggaccgcagcagccgaggaggcgggagcccccacctgg

SEQ ID NO: 106785 - DNA, 122 bp, Homo sapiens
ggaggtgcaaacaagcgatcctgttggggcttcagggtacttcctcctgtgtgctttgcacgtagtaggtgctcagcgaacggaaacggggagactagttatcactctccaggcaagcccgc

SEQ ID NO: 106786 - DNA, 122 bp, Homo sapiens
gttcctgcgcctctacctgctgggccgggtgatgctactgcacagcaaaatcttcacggacgcctcgagccgcagcatcggggccctcaacaagatcaccttcaacacgcgcttcgtcatga

SEQ ID NO: 106787 - DNA, 122 bp, Homo sapiens
accccggctcggcacccatcctttcctaaccccaaactgcccggcgccccgggctctccgcgcctgcgccgcgcccgaggaccacccccgcccaaccccgggtccatccgatcctcggccct

SEQ ID NO: 106788 - DNA, 122 bp, Homo sapiens
ccttacagtcaaacactgcactggagaggtcgatgctgtccaagggattggcatcctgagcggtccgcgagtaatacagctgacatttcctttcgtcgtagaagaaccagcgggatttccag

SEQ ID NO: 106789 - DNA, 122 bp, Homo sapiens
ggcgcgaccttgatggagcgacccttggccgcggcgccgggactcagacaatgcacaatgcgccgagcctgggccgcagctcctcagcgcggccacaagcgctctattgagccggctggcgg

SEQ ID NO: 106790 - DNA, 122 bp, Homo sapiens
cattggacacccaggtggtgtcagagagaggaggccaggacacactgggtgaacatctgacgctccaagcttgttcatgccgctctcccagccccacagccgcgtgtgctcttcatagtaaa

SEQ ID NO: 106791 - DNA, 122 bp, Homo sapiens
gtagggcagaagttgggaacagaacaccaaccttacgtctttgtgtttattaagctgtatcgcatgacgttcacctccctaaacggtgtgcttggtgtgtcatgggatactgtgatgtgtaa

SEQ ID NO: 106792 - DNA, 122 bp, Homo sapiens
ccctggcagggctgctgcagggatcaggccagacttgaatgtgaaagggctctgaatagccgagtccagggtgggtgagggaaggtagcatcggcaacctgcgggtgggccctggccacact

SEQ ID NO: 106793 - DNA, 122 bp, Homo sapiens
ctccctgcatttagggaactgggttctgccttctctgggctgaggtgttctgttctctcccgtttgcctcacggcgtgcaggaagcgggcagatccagctgtggcaattcctcctggagctg

SEQ ID NO: 106794 - DNA, 122 bp, Homo sapiens
ttttcattactcctgcttgagactttgttcctctgtttccacgattccattctcaagggacgtgacgcccagatagctttaaaggcagttctagctttgacttttgcttctgttttatttat

SEQ ID NO: 106795 - DNA, 122 bp, Homo sapiens
gtgtcctgcaggcctcgcgcgctttctgcacaaggacatggcgggcagctgtgtggatgccgtggctgggggcccggcgcagtttgagtgtgagacctccgaagcccacgtccacgtgcact

SEQ ID NO: 106796 - DNA, 122 bp, Homo sapiens
tcagtcacagcttttcccatggggcctgtgggtggagtcgttcagggctgcggggtctaccgcaagcccagcctcaggaagaaataatggagtggaggatgtggcaatttggcctggccaag

SEQ ID NO: 106797 - DNA, 122 bp, Homo sapiens
agaaagcgccatacatgtgttgacttggtaccctaagatggggatggtccgccacatttgcgcgtctgttttgcatggtgtgtactgcacatcacaaatgccatgttggccttagggtgctg

SEQ ID NO: 106798 - DNA, 122 bp, Homo sapiens
aatatgctatataagctggaattcaaagcttacttctttgcgaactactcattcccagggcgtgtcccatgtatacgaactattcatgtgctatggtctgaacgtatcccctcagtattcat

SEQ ID NO: 106799 - DNA, 122 bp, Homo sapiens
gtaaataaagggggctttgctctcctaattgtgcccactgttctgtgcagcgcggaccggcgcatgcagcgagcggggctgcgagggcgctgctgtggccaggcgtctggcatgctgaccac

SEQ ID NO: 106800 - DNA, 122 bp, Homo sapiens
gaaaagaaaaatatgagtgttctcttttgtgtgcgcacaaacagccgagcgcggggaggtcgggcccggggtcacgcggctccgggctgcagctgccgccgtggggcggggggtcccaggcg

SEQ ID NO: 106801 - DNA, 122 bp, Homo sapiens
tgctgctaacgttcagccctgacgccatgtccaataggaacggcccttcactctcagaaacgcgggccggagaaaccgtggaggtcttttgcaccttgccgtttgcctcccaggttcaacat

SEQ ID NO: 106802 - DNA, 122 bp, Homo sapiens
cgtcagcagaggaggaaagtcctgcttcaggcagccattcagggagggacaggaatcacccgagagtgacctgccagcagcaggggcggccctcctgctctgtttgtgtccgcagcacgtgg

SEQ ID NO: 106803 - DNA, 122 bp, Homo sapiens
catccgcgtgtggtcactgcaggaccggtcatgcctggctgtgctgactgcccactacagcgccgtcacctcactggccttcagcgccgacggccacaccatgctcaggtcagcagtgggcc

SEQ ID NO: 106804 - DNA, 122 bp, Homo sapiens
cactgtcagagccagctcttcacttcacacttgtggtcctgtgaccactgtggtggcgaccgcagctccttccatgcatgacaagtcctgttaagcattgaatttgttattatgcactgagg

SEQ ID NO: 106805 - DNA, 122 bp, Homo sapiens
gaagctgcaaaccttcgcggcgagtgttacagctcttaaggcagcgcgtctggagctgttcgttcctcctggtgggctcgtgggctcgctgggctcaagaacaaagctgcaaatcttcgcgg

SEQ ID NO: 106806 - DNA, 122 bp, Homo sapiens
ggatgtctctggacacaaacttgcaggcagatgctgcaggaagaactagtactgaccaggcggggcaaccttacagccttacccatagacacagtctgtgagcatcagggaggccttacctt

SEQ ID NO: 106807 - DNA, 122 bp, Homo sapiens
tgtgcgcttctgcgtgccctcctgggtgtgcaggtccaggacccactttattctgctgggcggccaccggtccgtttcctggtaggcgcaggtagcagctgtcctgccctaagtgtgaacct

SEQ ID NO: 106808 - DNA, 122 bp, Homo sapiens
caaaccatctgcaccctcttcttccgccccagacgttatttatgtgtgtggctttgtgttcgttgctaaatgcggcctgtgtgaaggctgttaattaaccctttgagaaatgcgcttcccat

SEQ ID NO: 106809 - DNA, 122 bp, Homo sapiens
aacatagccgtgtttgattgtgtactgtctattgctatatttgagctacaaggacagactcgagtagttacacagaccagatggcccacgcagcctaaaatacagtcagttctcactattca

SEQ ID NO: 106810 - DNA, 122 bp, Homo sapiens
caggccagactcagagcacaaagccttctggtgccaagccctgtggtgggggagcctccacggtcggcatcgcgattggtcctcgccacccccaatttcgcagaagaggaaacggaagctcg

SEQ ID NO: 106811 - DNA, 122 bp, Homo sapiens
caggtgtgggaataggggtcggcgtcggcggcctgtgcagcaatggccaagatcaaagctcgagatcttcacgggaagaagaaggaggagctgcggaaacagctggatgacctgaaggtgga

SEQ ID NO: 106812 - DNA, 122 bp, Homo sapiens
cacagcgaggaaatcgccatctaaagggctgaacgctcaagaacggcgttgggtgggctccgcgttggagttgagtcccgaaggatgttctaacagcaaaggggagaaaggaagagagaagc

SEQ ID NO: 106813 - DNA, 122 bp, Homo sapiens
gagaggagtcctcgcaagtcggatggtggcagggaggagagcaagaggtggctgaaatctcgatggacagatgctgtggcaggggctgggcacaagcaaataaagtctggcttggttctggg

SEQ ID NO: 106814 - DNA, 122 bp, Homo sapiens
ctgctaacatttgccgaggactaaactatatgcttactataaagccctgacatacattagcgcatttacgcggtggctcgcgcctgtaatcccagctctttaggaagctgacgcgggagaat

SEQ ID NO: 106815 - DNA, 122 bp, Homo sapiens
gccccgcgcagaggaaggcgggagtggggggcgctcccaggtagccaaggggcggtacctcgtcgcagtggcgatggtactcctccatggtagcgccggctctccctggggcggagcgacac

SEQ ID NO: 106816 - DNA, 122 bp, Homo sapiens
tcaggtgatccaaatcacacagaccggcccgttctctcccctactggctgcctatgcagtcgggtcgacctcaagagaactggccccagccaaaagcggcacctcccggcctgccagtccct

SEQ ID NO: 106817 - DNA, 122 bp, Homo sapiens
gagatgtttggcctggtcactgggtttgtggtgagagtctgtgaaaagctgtaaggaacgcgctggtcttcagtagggtcaaatgctgctccttcaccatcgtcagaggctacttcatcaca

SEQ ID NO: 106818 - DNA, 122 bp, Homo sapiens
gcccaggcccagggagacgggatggagacacggggcaggaccttccttccacggagcctgcggctgccgggcgggtggcgctgccgagtccgggccggggcctctgcccgcgggaggagatt

SEQ ID NO: 106819 - DNA, 122 bp, Homo sapiens
agatgcattcctgaggttagaacagcagctgagcctgcaaagtcagggtctagggctgagcggcactagctggaccgtggaatgctggaacgcatggcttctctgccgcaacttctccaaat

SEQ ID NO: 106820 - DNA, 122 bp, Homo sapiens
aggaaggaagaaaggaagcacagattaattatttggtctcttactctcctctgcctttgtcgtccatctctttccacctctcttcatgcatccctttctccctcttccctttcaggatccat

SEQ ID NO: 106821 - DNA, 122 bp, Homo sapiens
gagactccgcgtcatcgggcgctggggctccgctaggtctcctgggggcatatgagtgcgcgcttcaactccgagcccccctcatctcccgccgctccacggtgggcgtttggggtggcagg

SEQ ID NO: 106822 - DNA, 122 bp, Homo sapiens
ggtaagaggaaactccattggataaatggcgaggaaacgtatactccctcttaaggaacacggtgtcttccttcgtctccgggttcccgagaccccagagtcactgacctccgtccctcagc

SEQ ID NO: 106823 - DNA, 122 bp, Homo sapiens
aaaaaaaaccatggtaaaatgatgtgcaaatgatgagcgcccccaaaccagaggggcaggcgcggccggagtagtcgtcagcgcgtgcaaaccggcgaggacggatgggcttcaaaacaaaa

SEQ ID NO: 106824 - DNA, 122 bp, Homo sapiens
ggttaaagcagcaatatatcaggaaatgtgagctttcctttttctgtattttatagcaaccgtaattttattccaaaattgatggattcattagaaaataaattgtattttaatgtatttcc

SEQ ID NO: 106825 - DNA, 122 bp, Homo sapiens
tatgagaatagaattggccactccagagacatctgcaaatgacactccatttttccttctcgcgctgcaaaatgtaccggtaaaccggacttcccgggactcgctgggtggccgacattttc

SEQ ID NO: 106826 - DNA, 122 bp, Homo sapiens
gtaaacacaaagtggggtacagaaacgaaaactccgggaagaaacggccagcacgggcctcgccgtgccggctactcaacacgccttcctgagagcacagaacatccacagccctatacagc

SEQ ID NO: 106827 - DNA, 122 bp, Homo sapiens
gcgtggcgcttgtgggccagctggagttccggctgggcgtgggcttggtgggcccccactcggagcagccggtaggccctgccggcccgggcaatgaggggcttggcacccgggccagcggc

SEQ ID NO: 106828 - DNA, 122 bp, Homo sapiens
ggtcgcggggccgggaggcgcgaggtaggcgggagccgcggtgaggaggacggtcgaacccgtggctgaggcccagcgccgagaagcggcaggcagagttcggggtcggggagtttatcctg

SEQ ID NO: 106829 - DNA, 122 bp, Homo sapiens
gggatgttaatacacacacaggtagcgaggaggccggcgtgttaatacacacacagggagcgaggaggccggggtgttaatacacacacagggagcgaggaggccggcgtgttaatacacac

SEQ ID NO: 106830 - DNA, 122 bp, Homo sapiens
accagctgggtggcgccgggcaagtccctctcccagctgtgcccctggagtgcacaggcccgtgctctggttctctgtggagactcccggaaggcagtctgagactaggtggagggtgcagg

SEQ ID NO: 106831 - DNA, 122 bp, Homo sapiens
cctctccattgagttttcctgcctcgggtgcctatcaatggtcctgctcggggatgcacacgcagctcgcggccggaggggggtagcagccgccgcctccaggtgcaggttctctccggccg

SEQ ID NO: 106832 - DNA, 122 bp, Homo sapiens
agggaggtccccgtgccttccaggatatctcaactatgttaataattccacagtcagagacgactttaggtacttcaaggttatcctccttgtttaaatgcaaattctcctaggaaggggga

SEQ ID NO: 106833 - DNA, 122 bp, Homo sapiens
ccaccagccctctttccagaaatttccttcttcatccaagggacttttcctcccagaacccgacacagacaccatcaactgcgaccagttcagcaggctgttgtgtgacatggaaggtgatg

SEQ ID NO: 106834 - DNA, 122 bp, Homo sapiens
tggggcatcctttctgaagatcttcgggccactgtcgtccagtgccatgcagtttgtcaacgtgggctacttcctcatcgcagccggcgttgtggtctttgctcttggtttcctgggctgct

SEQ ID NO: 106835 - DNA, 122 bp, Homo sapiens
gcgagccgcggcggagtaccgggatcaagctcggtgcgcggctgtgcggggaagccaggccggctcggacgcactgctagcgggagaagcctgccgctctgggatcccggtgggaggggagc

SEQ ID NO: 106836 - DNA, 122 bp, Homo sapiens
ctttcaacccttacaatgccggagggcgcaattcctgggtcctgtgaccttggtgaccgacgcccgggacaagtcagaaagacccaagggcgtggaaaacgctcctcttaccgataaacttg

SEQ ID NO: 106837 - DNA, 122 bp, Homo sapiens
gcaggcgccaggctacgcggctgctgcggccctgggccatcaccatcacccgggccacgtcggctcctattccagcgcagccttcaactccacgcgggactttctgttccgcaaccggggtt

SEQ ID NO: 106838 - DNA, 122 bp, Homo sapiens
caaactcctgacctcaagtgagccacctgtctcggcctcccaaagttctgggattacaggcgtgagccaccgcgccccgccgtaattgataagttttcaattgtgtgcagcttcaagtagcg

SEQ ID NO: 106839 - DNA, 122 bp, Homo sapiens
tctctctgccagcttctcttctatttgcaggatgagcacaatcagactgtctagggaatccggctgagggacccggaatagatagtgcctgatctcctcgttgagcccctggcacaagtggg

SEQ ID NO: 106840 - DNA, 122 bp, Homo sapiens
gacgggcacgtgaggaactgccaaggagcaaggggccccatgggccatgggcggggaccccgccacaggcaggggaggagagagctgcctgctaggtggggagacagctgggacccaggcag

SEQ ID NO: 106841 - DNA, 122 bp, Homo sapiens
ggcgtcaggccggcgggggcggggcctcctcgggcggggcggggcggggcggggccggcgcgagaggctcccgcggctcagttgcagaccccgccccctcggctcagccgcgcctcccgctc

SEQ ID NO: 106842 - DNA, 122 bp, Homo sapiens
accaccttacacaccttacacacacacaggagctaaaccagggacagcagacgatggggccgcatcctcactgcaggaggggaggttacaatcagcaagcgtcgggggggcgagaggtgcca

SEQ ID NO: 106843 - DNA, 122 bp, Homo sapiens
tgtgcggtgggggtggggaggactggacagtctggctgtgcgcccttttctccttttcaacgtcccagtataacttcaagggagcgcaactccagaggctccctggacgaagctaccgcccc

SEQ ID NO: 106844 - DNA, 122 bp, Homo sapiens
ccgcagtgagcccacgcttgctgtcatacttccatctcgccccatcccctgtgaacctaacgaggccctcatggactgacggagctgcgagagaagcctggcctcaccccagacgcctctga

SEQ ID NO: 106845 - DNA, 122 bp, Homo sapiens
cgcgtgagctacctcttccggggttcctgggtgacaagttccggatcaagaatcacaaagcgagcagtcattcttcctcttgccacacccacagggcccgcactaagagcctaactgaaatc

SEQ ID NO: 106846 - DNA, 122 bp, Homo sapiens
ggcgctcgtgattgcttcctgtgaacgcctcccaaggacgagcccagtgtagttgtgtggcgtgaactctgcccgtgtgttctcaaattccccagcttgggaaatagcccttggtgtgggtt

SEQ ID NO: 106847 - DNA, 122 bp, Homo sapiens
aggaaagaaaataggaaaagaaggctggaagcaagtgctggaagtatggctgcaggcacacgaggaaacctcacccactggtaaacacagctcagtctctgtcctggtagctaaccaatcag

SEQ ID NO: 106848 - DNA, 122 bp, Homo sapiens
cagccaaaattggctctctcggctcggtttttccccatctagggctacatcttctgggtgcgcatgcgtcctgcccgggtgcggttggctgatgattccgtctgccactggcagagccagcg

SEQ ID NO: 106849 - DNA, 122 bp, Homo sapiens
ttataaacaaatcttgtgcaaacctcccgggctcatccgcagtcccgcggagcggctagacgttgatgaaggatccctggtcgcctttggccgtctcgggctccaggcagcgccccttcctc

SEQ ID NO: 106850 - DNA, 122 bp, Homo sapiens
cgtggggtgcaacaaggggcagccacccacctaggaaagggtgcacagtgggggcacccacgggggcaggcaccggagggggtgcccacagaggatagaggacgccgagaagtgacctgggg

SEQ ID NO: 106851 - DNA, 122 bp, Homo sapiens
ccctgacctctctccacccccgcgttcacctccccaggcgtggcgttcagcaacggggagcgcgccaagcagctccggcgcttctccatcgccaccctaaggggttttggcgtgggcaagcg

SEQ ID NO: 106852 - DNA, 122 bp, Homo sapiens
ttactttggggtaaactctgaggcactgagtgcttcattttataaagatctgatactgagcgttctacatccatatcttgtttgatgatatggcttttaggactggaagatgatgatgccac

SEQ ID NO: 106853 - DNA, 122 bp, Homo sapiens
tccccaggttgcggaaccctcttgcactgctcccagcgcgcacctatttccctaatgaaacgcttcagattgcgttctaggtctcttcccgcagctgcgacaattcccccagccgggagcgg

SEQ ID NO: 106854 - DNA, 122 bp, Homo sapiens
cgtccccttctcctcaggagtggcgggccgcggaagtgacgtggtgcacgggcaggagcgcgtttgaatcggttcccgggtgatcctcgcgcctgccgctgctcggccgccgccgctgacga

SEQ ID NO: 106855 - DNA, 122 bp, Homo sapiens
gtggaagcacaccaggcctcttgagaactaaatgcagaactggaaccatcacttccactacgttttttttttttaattgagatgcagtcttactctgttgcctaggctggagtacagtggca

SEQ ID NO: 106856 - DNA, 122 bp, Homo sapiens
tgatgatgatggtgaagatggtgaggatgaagatggtgatgacgatgatagtgaagaagacgaagatggtggtggtgatgatgaagatgattaagaagttaatgaagatgattataaatatg

SEQ ID NO: 106857 - DNA, 122 bp, Homo sapiens
cctcatcaggagggtgagcccggggcaggggtgacccctgcctccacacccccctcctgccgctatcgccgtttaactggcgactccggtattgagctctgcccttgtcctgcctccggtga

SEQ ID NO: 106858 - DNA, 122 bp, Homo sapiens
caaggacatcgacctgttattaatgaagaaagtttgccatatgatatacctcaccgagcacgtatgatctctctaatagaaagtggatgggcacaaaatccagatgaaagaccatctttctt

SEQ ID NO: 106859 - DNA, 122 bp, Homo sapiens
ataatgccctgtaaccgcttcctcttaggaatgctagctttcacaattgtgcaaacggtacgcgaaacgtaataaactacaaaatatgtataagctaaaacagaaaacgagtataccacttc

SEQ ID NO: 106860 - DNA, 122 bp, Homo sapiens
tgcagtccgcacagccgcagcggttttctagatggagaaactgaggctcagtgacttgcccgctgcactctgtccacggccgctgcacacgcccccttgggctgcgctcccggaccttctaa

SEQ ID NO: 106861 - DNA, 122 bp, Homo sapiens
cgtctgggactctcatggtacgcagaccggcctgcaggcacctacagcggagggaacaaacgcaagctggcgacggccctggcgctggttggggacccagccgtggtgtttctggtgcgtgg

SEQ ID NO: 106862 - DNA, 122 bp, Homo sapiens
agcatcgtcatgattttgtcctgagagcagcaggtacccgggcggggtccagaaccgtgacgcgactgcagcgccggggcccagctcgtctgggtgctcccttcagtacctccttccgagag

SEQ ID NO: 106863 - DNA, 122 bp, Homo sapiens
tagggggcaggcgcctgcgggcagcggcggtacctgcggaagacgaggatgtcctggtagcgcgagcgccggtggtggagcagctgctccacctgcagtgacagggcctggccgggccacag

SEQ ID NO: 106864 - DNA, 122 bp, Homo sapiens
cccgcggagggcagagaaggcagctcctaccaggcgtccccgaccgtcccggctgccgggcgtctcctgctgcttcctgcagcccgcccggcgcgcccccgccccgaccccggagggcaggt

SEQ ID NO: 106865 - DNA, 122 bp, Homo sapiens
cacctgacctgcacccactctgcagggcagcgctcgccattgaatgacttctaggtgctccggggcacagagctacagcgccgctacaagcggtggtgcccgggccttggcaggaggatgtg

SEQ ID NO: 106866 - DNA, 122 bp, Homo sapiens
aagtagagacgggttctcaccatactggccaggctggtcttcaactcctgacctcttgttcgcccatctaggtctcccaaagtgctgggattacaggtgtgagccaccccacttggccccga

SEQ ID NO: 106867 - DNA, 122 bp, Homo sapiens
ttttcatttcatctttcatatttcaaaatacccctggggttggaggatccgaactacatccggttgccctaggacatgggaaattgaggctgtcggctgtcagccgtgcatttgggtgagca

SEQ ID NO: 106868 - DNA, 122 bp, Homo sapiens
agagacaatactatttcccacaggagtccattgggttcagctttgaaagaggaatagaatcgaggctcctttgaccatcaaaatgatgaactttacttatgtggtacccaatgccagaatgt

SEQ ID NO: 106869 - DNA, 122 bp, Homo sapiens
gggactcatctcctcaaacctgggggaccgagacctatgagaggtcacagcatgaggtgacggaagtgccatgtgcacagggttgatttggtggctctaattcttataacataaaagcttgc

SEQ ID NO: 106870 - DNA, 122 bp, Homo sapiens
gaatgtccctcagagctttccgtgaccggccagggcgcgtggctgtccggagcccctccacgttccccagcagcaggcccggctctctctgatcagcgagcgcggatgccggtctcctccct

SEQ ID NO: 106871 - DNA, 122 bp, Homo sapiens
agcaaagctttagggagactcacacgatgtgagcggggggcagttctagcttcctgattccgtgaagggcataccctcaagtgtaaatctattatttgctgccggttgaaatcttgttagtc

SEQ ID NO: 106872 - DNA, 122 bp, Homo sapiens
tggaaaatcctgttggtgaatgtagccagtgatgtcccactggcttccccagcacctgcgcgcgatgaacgcatctatctgtaatcttgactgggtctggggactggaaagaagggcaattg

SEQ ID NO: 106873 - DNA, 122 bp, Homo sapiens
ggcagctcccaagccaggcggcaccatgctgtccatgacgtacagcgagagtctgcggagcgtgagcagcaggtgccactctgaatgggccctgcaccccgtccgccagacggacacgctgg

SEQ ID NO: 106874 - DNA, 122 bp, Homo sapiens
ggaagaaagtttagatcttatcagaaaatatattttgatttcttatctgttggtatggttcgagtacaggcttctagatgaaataggactttatctccaaatgttgaatacattggtccatt

SEQ ID NO: 106875 - DNA, 122 bp, Homo sapiens
cgccagagcagcccctctgccttgggtgtcttggagatgacttggcgccccccggagccccgtcatggctgtggctgcgtccacaacactgcatcagcagagtcctggggaagccatttagg

SEQ ID NO: 106876 - DNA, 122 bp, Homo sapiens
cacaagtagatcgtcacctatacttctgaacaattggttacaaaccagggttcccatgaccgcctccttgggttctattaatttgctaggatggctcacagaacccggggaaacacttacct

SEQ ID NO: 106877 - DNA, 122 bp, Homo sapiens
gaccagcctggccaacatggtgaaaccctgtttccactaaaaaacacaaaaaagttagcccggagtggtggtgcatgcctgcagtcccagctacttggaaggctgaggcgagaggattgctt

SEQ ID NO: 106878 - DNA, 122 bp, Homo sapiens
gagcatcgatgcaggagctgtgtcgcgtgttatccccgtcacgtggagttgtgtgtcctgcgaggagcacagcatttcagggcctagagcccctctctgtactggagccgcctgtgtgtgtc

SEQ ID NO: 106879 - DNA, 122 bp, Homo sapiens
ttggggggtgggggctgacgccacggcttagccatgcagcggcctggcggggggaggctgcgctactccctccagagagataagaggagactcaagaatgtctgtggggagcaggggagggg

SEQ ID NO: 106880 - DNA, 122 bp, Homo sapiens
cagagaagaaagcaggcagcccaggcgacagcagcaagcgggggccacgtgggtgcggaacggtccgtggaagcgtgcgtgcaggcccctgcaccctgcaagaagccctttcgagccaggaa

SEQ ID NO: 106881 - DNA, 122 bp, Homo sapiens
taaactaacggtctcccatatacattttatctaatagctctgtcacccttcctgcacacccggggaactcgggtgcggcattctaacgcctgctcagcatgattccacattttctccaggcc

SEQ ID NO: 106882 - DNA, 122 bp, Homo sapiens
tcttcatgttcttccagccttttttggttccccgaaatttcctgtcaggaaatttaccaacgcggaaatttacccacttctgtcagaaaactgatcagccatgtcttcgccacacgtgatgc

SEQ ID NO: 106883 - DNA, 122 bp, Homo sapiens
caccaccggctccgtgtgcaggccccagacctgctgagccaggccccgcgtgtgatgccacgttccacagcaggggccaccggcagagccccccaggacccaccgctgctgctccctgcttt

SEQ ID NO: 106884 - DNA, 122 bp, Homo sapiens
gtcagcatgcagccccctgggcgctcagagccgcggggacgcgaccccgcacgcgcaaagcgcccaccgagacccctggggtggagctgtgctaatagaaacatacccacccccagcctttc

SEQ ID NO: 106885 - DNA, 122 bp, Homo sapiens
gctggcagggaaggatttgcccaagtaaagtgaaagtccccctctgtgtggcgggcttggcgtccccagcctcttccttgcttctggggctgtgaagtattggaaggggagctgtagatggt

SEQ ID NO: 106886 - DNA, 122 bp, Homo sapiens
gccggccgcccgcctctgagactccccgcctcccacggtcagctgctgcggggcagtggccggtgattgaatcggtcattcctccgcaaccaggcctccatcaaaaccctgcatgagatgag

SEQ ID NO: 106887 - DNA, 122 bp, Homo sapiens
gcttaccgtattgtaaggacacagtatgtaatatatagaacattcaaaatttgcctcaatcgactgcttatgttattggtaaggcttccaacagtagcctattagtagttaagttttggggg

SEQ ID NO: 106888 - DNA, 122 bp, Homo sapiens
ttccgttagctggctccacccgccctcctgggcgtggggactcgatttcttgggaggctgcgccttcctacttgtgggacagccagccttggaggttggaaaggtcgcaggcacacgggtgt

SEQ ID NO: 106889 - DNA, 122 bp, Homo sapiens
tacccccccccacagttacacacacacacacacacacacacacacacacacacacacacacgcagtgtgaaagatgcgagccatagcatctcgtaacatgaaggccatccagctccatcctc

SEQ ID NO: 106890 - DNA, 122 bp, Homo sapiens
tggggtcgccgttgtagttcccacacaggccacacatctgctggtagtagtttccggggacggtgacccgcacatagtacacaaggtcgtaggccacacgcaggccgaagtcggtctcaatc

SEQ ID NO: 106891 - DNA, 122 bp, Homo sapiens
gggcagatgctataaataaaatcagcgaaagtgtctgattgatggtaaacaggcctggggcgataatgagtctagtaattagggcctctctggattcaacccagccctttcgcccgcccccc

SEQ ID NO: 106892 - DNA, 122 bp, Homo sapiens
acactgcccacaattggcagaaatggtactgagatccaagtttctctcactctgaaaacccggtctgaatcactacaccaaggttctttaagtaatcttgacactgcttcactcctttaaga

SEQ ID NO: 106893 - DNA, 122 bp, Homo sapiens
aaggtgtgctttttccttcacagcgatctaattactactcagaaacacctgtgtatgcatcgtgctctcaattctccacctcctcgttccaccactgctgctgctgctgctgctgccgccct

SEQ ID NO: 106894 - DNA, 122 bp, Homo sapiens
gctgactttctccctaggtttctttctcctccttactgattttgggttttgtttctgattcgcccacagctggcggatttttccccatgaatggcgacaccaattaggaactcgcgggaaac

SEQ ID NO: 106895 - DNA, 122 bp, Homo sapiens
gttcgcagacatctgcaaacaaatactgtccaaaccgtggtaaacagccgtcttttatttcggcgaaagcctttgggccagttttcgtatgttgttggaagcactaaatctctcgctggcag

SEQ ID NO: 106896 - DNA, 122 bp, Homo sapiens
aaatgtgggagtcctactgagttcttacagctcactggaagttcctatactttcctgacccgcaggcacggcaggggacatcagcattcctgtatgattcctcatcctctcctagtgagcat

SEQ ID NO: 106897 - DNA, 122 bp, Homo sapiens
gatgaagaatgctctcctcccttcctccaccagccccggcctttcctaattgagactcatcgagccgtagccggctcctcagtacagtgacttgcacacaagctccaaggagccgcgcttat

SEQ ID NO: 106898 - DNA, 122 bp, Homo sapiens
gagtggggcctggggcccaatggctctcaagtgccccagaagatagctgcagatggcccacggactacactagggccatctgcaggttctagatgaccctttgcatgctgggaagccccagc

SEQ ID NO: 106899 - DNA, 122 bp, Homo sapiens
cggcaccggcggaaggagaggcggccccggcgcgcagaagccggcagaactggaggtgctcgcggcgggcgtgccgccccacccggccgcgtccggccccgccccgccccgcccctcgccgc

SEQ ID NO: 106900 - DNA, 122 bp, Homo sapiens
gagagaaagcagagctatttcaagagtgagccacagaagggaatccagaggccatctaagcgaggaagggtctacaggcagtgagtgaaggccaggagcagggcccaggccaggcacgacca

SEQ ID NO: 106901 - DNA, 122 bp, Homo sapiens
aacaacctctgccagctccgcccctgcagacggctacttaatttcacaaaccctttctcacggtcagggaaaccaaagcccagcaggacagcatgcctaagcccacagggggatttagtgga

SEQ ID NO: 106902 - DNA, 122 bp, Homo sapiens
cttgtccaattcgtaactttcggggttaaaggactcacgcgtagacatggttcttgggtccgctctcctcacagcttgccccctccccaccctctgcgggttggctgggttctttttttttt

SEQ ID NO: 106903 - DNA, 122 bp, Homo sapiens
ggtaaaaaaaaactaaggaactctgcataaactatgccctctggtaaataataatgcatccgtattggtccattaattataacaaatgcaccacattcatgtaagatgttcatactccggga

SEQ ID NO: 106904 - DNA, 122 bp, Homo sapiens
cacccacctctttgtacagtctctggcgtggtccagaacctcctgctctaaagagagaagcgtgggccggctccagacagttccatgtctgtccttttcattaaagtgcaaaacgtctcgga

SEQ ID NO: 106905 - DNA, 122 bp, Homo sapiens
ccaggaaacgggtcatttctttcgtggaaaaatggaaatgctctgaagcattttgggagacgtgctgtgaagcaggtgacaccagaagacaaggacactgggggctccctgccgggaggcgc

SEQ ID NO: 106906 - DNA, 122 bp, Homo sapiens
actatgaacgtatttgacatttttaatacaatttctgctataatttttgtatgcagtaggcgttactaataaacatttctgctgtgatttgtgtatgtttcaacactagaagtggaatttta

SEQ ID NO: 106907 - DNA, 122 bp, Homo sapiens
aaacgccgccgggcgcttctagtcggacaaaatgcagccgagaactccgctcgttctgtgcgttctcctgtcccaggtagggaagaggggctgccgggcgcgctctgcgccccgtttctgca

SEQ ID NO: 106908 - DNA, 122 bp, Homo sapiens
aacaagagcatgtgaaggaagcgcagcagctcctcgccagccagacagccagccccgcaccgcaggagtcgacatgcacggcagcctagacgccatcagttaaacttatatgtaggcttgtt

SEQ ID NO: 106909 - DNA, 122 bp, Homo sapiens
gaggtcggagcgcgggcaggctggatgggtggacggataatctatcatcttatgtaaccgcggagagagaagactaattgtgtaggaggctgacgtgcctgcctttgcttcagatgtgttaa

SEQ ID NO: 106910 - DNA, 122 bp, Homo sapiens
gcaatcatctcactcagctaccttagaatggcaggtgctatttatgccattttactcattcgaaactttaaacctgaagattacaacgagttaactaagtttacaaggaataaaggcagtga

SEQ ID NO: 106911 - DNA, 122 bp, Homo sapiens
ccaccacagtggagggggcaaatgggatggcgaggaaattgtatatgtggtttcgatagtcgatggagatgtcagggagtaaagacctctccagagattactctgatttgtgagacactgca

SEQ ID NO: 106912 - DNA, 122 bp, Homo sapiens
cggattgcccacggaagccagccactttctttgacagtccagcccacctcctcttctgcccggagaagctccaggggctgcctttgtgatcacagcatcttcacaaggaccaaaggaaaata

SEQ ID NO: 106913 - DNA, 122 bp, Homo sapiens
agcacttttatatctctgctcccaccaggctgctagggagcgcctctgcctattgggcagcgcggcgtctctcgcggcgacggtgacgcgctctggctctgacaagcctggctccccccacc

SEQ ID NO: 106914 - DNA, 122 bp, Homo sapiens
gacagccaatgagaattcaggggggctgtcttcagccaatgggcagggcggccgggaggccgggctgggcggccgaggcggaccctaccgcagtgtttgcacaggacccgggcgcagccact

SEQ ID NO: 106915 - DNA, 122 bp, Homo sapiens
ggcaaatctctgtggccggggttgagggattggttgtccaagaaaatatccttcttcttccgagtcggaagaggaggaggaggaagaacaccaggaatcatcatcctcgccgtagagtccca

SEQ ID NO: 106916 - DNA, 122 bp, Homo sapiens
atgtggtggctaaaactggcatggccactttgttaccacgttacgcctgaatcagcagaacgtggatcaatatgatcagaaagaatcctggttatgtggtatgtatcctgatgcagctgtgt

SEQ ID NO: 106917 - DNA, 122 bp, Homo sapiens
tttcctatccttggtttgagcccagctacacattaactctctgggtttgtctgtctgcgtcggaggaggggagggcagtgtccttgagtctactcagccaattgtccatgcatctttgggga

SEQ ID NO: 106918 - DNA, 122 bp, Homo sapiens
ggaagccatggcgtactcatccccatcgctctcgctcacgccttcctcctgctgatcccacgctggccccatggtcttgtatgtcgcagcggccacagcccgcgataacaccttcctccttg

SEQ ID NO: 106919 - DNA, 122 bp, Homo sapiens
attgtttaggtgaaagaacagccatcagttcctaggactaggcttgaaagtatctgccagcgagtctgtgtctgcagtaatccaactctcctctcagccccatgttcttctcatctcatgaa

SEQ ID NO: 106920 - DNA, 122 bp, Homo sapiens
tcggcccgccccgggccaggagcatccccagctccggcgtctgcggcctgaacccggtagcgaattcaaggtggaaaccgccagccggggctatcgttgattggctgaacgagaggaaaccc

SEQ ID NO: 106921 - DNA, 122 bp, Homo sapiens
caagaggccttacctgggggggccagtgtgcagagggccctagagctgagaggccgcggacggagtaacagctggattctgaggacgtggaagaggccacaccacgcagcagaaggaaggag

SEQ ID NO: 106922 - DNA, 122 bp, Homo sapiens
ccatacacccccagtggccctcagagtagctgcttttatgggctacagagccttgggaggcggtagatgaggaagagccctggccaatccctcccacagggtgagacagcatcactgacctc

SEQ ID NO: 106923 - DNA, 122 bp, Homo sapiens
cttactgacacattagatgattaacatttattgtcacctatgtgaagacattcttgtgtgcgtgtgtgtgtagaagaaaaagtatttaatgagcaacataacatatatcattcctgccattg

SEQ ID NO: 106924 - DNA, 122 bp, Homo sapiens
taagccttccggatgccccagccagttcaggctgctggtctcttgtccctaagcctttgccgaggtagtcggcttacttgatgccagcacaccaggccccccaccacccgctggaagcacag

SEQ ID NO: 106925 - DNA, 122 bp, Homo sapiens
tcccaggttccggatgaaatgccacctctgtgtcaactacatcgagatgcagacggaccccgccaactgcgactacgtgatcgtgagtggcgcccagcgcaaggaggagcgctgggacatgg

SEQ ID NO: 106926 - DNA, 122 bp, Homo sapiens
ggcgacacggaccggtgtttgcatctcggagcagccacacggctgacacggaccggggttcgcatctcggagcagccacacgggcgacacacaccggtgtttgcatctcggagcagccacac

SEQ ID NO: 106927 - DNA, 122 bp, Homo sapiens
gctccctgactcccctcactcccagattttggcagagccttgccccacggaaaggtaccccggccctacacatactcactcccccaggctggaggacaggggagctcctgtacggagttctc

SEQ ID NO: 106928 - DNA, 122 bp, Homo sapiens
tgtatccttgttcaaaacaaagtgcgattcggctgaagccgactgaccgcgattcagggccgccttgggtggggttttgaactgtgcagctggaagcagtgttttccgagaggcagagtggc

SEQ ID NO: 106929 - DNA, 122 bp, Homo sapiens
actgggttaagtagatgttatgaatactgtactaccatgtgaagtagcttctgttaccctcgtcatttacaagcgagcatatagaggctaagagagtttaatctgtcaatctacatggccag

SEQ ID NO: 106930 - DNA, 122 bp, Homo sapiens
ttctccttttcctttctttcctgtcttttcttcttcctttttaaatggagcacagataaacgtttctgatctgaagctttgcagtgtttggagaataattattctgtttctttaccatgcta

SEQ ID NO: 106931 - DNA, 122 bp, Homo sapiens
cgccaatgctctccctgtccttctctgctggagtgggggcagggcagattcaaaaactgccggtaggctttctagaggaagggatgaaacgtgggcccttccaatgctagtagccgatctag

SEQ ID NO: 106932 - DNA, 122 bp, Homo sapiens
ccaggcgcagtctggaggtgtccggggggatggacgccgggggcagggtcatgtcggggtcgttgcacactactgtcctgctggcagaaatgagggatagttgagcaaggatcctgccgggt

SEQ ID NO: 106933 - DNA, 122 bp, Homo sapiens
tgggcacagcgcatacagcgcagagctcccgggctcaagcgctgctcccgcctcagcctccggagtagccggggccacaggcagggcatttgtcattaatggggtcttttgagaccgcgggt

SEQ ID NO: 106934 - DNA, 122 bp, Homo sapiens
ccgggggcgcgcgtccgggaagcgcccctcctgccccgcccccggccccggccccggccccgccccgtgcttgcagtttcctataagtagccggctctcggtgccagcctcagcctgacttc

SEQ ID NO: 106935 - DNA, 122 bp, Homo sapiens
tccagtctaggggtggctgcagaacccggatctcggagttacacgttctacggagcggggcgccgggagacggcgggcgagaaaacccggcgtccggaagcccgtgctttctttgacgcaag

SEQ ID NO: 106936 - DNA, 122 bp, Homo sapiens
gcgggtcgcctgcaccgcaatttgcctccaggcaaacttccacctgaaatgtagggtaatcgaggcctgcccggaacttgtggaaatcaaaccaagggctcagtttcaacaattctggtaga

SEQ ID NO: 106937 - DNA, 122 bp, Homo sapiens
aggagaggagccaagtctgccaagatcaggacttgatggtgaagcaaacgctggcacagccgtgctggccccgggccacgcgcacatggccagggcgtttagcactcgggcctccgcaccag

SEQ ID NO: 106938 - DNA, 122 bp, Homo sapiens
gcctccatttcctacgtaaaaggtgagacacagaagccaatgcccacgccctggaccccccgttcagattcagtgagaccgtgaagcccagcatccacaggggcctgccgggggagggcacc

SEQ ID NO: 106939 - DNA, 122 bp, Homo sapiens
tcgtcttttgtcattgctttttaaatttactcctacagggagcctccttatactacactgcgctttgctcttttttttttttttttcctaagtcagacacatcttcaaagcaacccctgtca

SEQ ID NO: 106940 - DNA, 122 bp, Homo sapiens
gttcccaggggtcgccctggcgctccggccacaacttgggcggctctgtgcggcggccctcgcctgcgcctttgcgcgccacccaaaactttgcgcacactgcagccgccgccttcccgctc

SEQ ID NO: 106941 - DNA, 122 bp, Homo sapiens
ccctgcgccgtgccccgccccgcgcctcctgtcggcgcgtgcgcattgacttacccgtgccgcgcggacgcactactgtcatttgccgccaaaaccccgcactcaggagtcctggcgggtgc

SEQ ID NO: 106942 - DNA, 122 bp, Homo sapiens
tggctgagttcctcaaggtcaagggcgagaagagtggccttatgtccacctgaatgactgcgtgtgtccaaggtggcttcccactgaagggacacagaggtccagtccttctgaagggctag

SEQ ID NO: 106943 - DNA, 122 bp, Homo sapiens
accgcgcccggcctaaagcttattttttatgtgtatgtggaaagcggggagaagagtccccgaagatgggaacctagcgccacccagcccaaggttggccctcataaccgctctccgcttcg

SEQ ID NO: 106944 - DNA, 122 bp, Homo sapiens
cctggtcactgtccgatgcttcctcctgattaggccgatgctgtgcgtctttgacaagaacgccagggaagtgaaatggtcctttcttatcgcagcatcaggctgtgtgagtcggcctgtgg

SEQ ID NO: 106945 - DNA, 122 bp, Homo sapiens
agactgggttctgctaccctctagtggccagagctgaaaggactctcccacccaatcaatcgggaccttcaagcctttgggaataaacgaacagcctatttgatgaatgacaaaactgagaa

SEQ ID NO: 106946 - DNA, 122 bp, Homo sapiens
ggtcaccggcctgaccctggccgggctggccgccgcccctgcccctgctcggccgctggccgccatgctgtctgtgggcattgctctggctgccttgggctcgcttttgctgctgggcctgc

SEQ ID NO: 106947 - DNA, 122 bp, Homo sapiens
aagtgggcggttgttaggcagctgggttcccagacatcgcagttcatcaaagaagctgtgcgcacaggcctctagtggggagagccttgaggatggggtgtactccagcaggctagagcaga

SEQ ID NO: 106948 - DNA, 122 bp, Homo sapiens
aaaagaaatcctttctctaaccgagtttatgttttcagccaccacacaagacagccttgccggccattacactggtgggatggtgctgatcctcacatttctggcatctaaaagagtggctc

SEQ ID NO: 106949 - DNA, 122 bp, Homo sapiens
tcctttaaaagacctttaattagtcaagcctgtgcatccttcccagggagcttttcctgccgttgacattggtggtattcttttctgcctatgagttaggctgaccctgcctttttcaggca

SEQ ID NO: 106950 - DNA, 122 bp, Homo sapiens
gagagatgaggctcccggtgttgtctctggggaggctgagcctgagctgacactgctggacgaggatcccggctacctttgagaatctgcgaggaccgcgccccgcccccgggccattgctg

SEQ ID NO: 106951 - DNA, 122 bp, Homo sapiens
ggtttctttgccctcctagaatcgtctgcgtcacacttgtcccgggacccaataagggatcgggaccgtcctatccactcccatatcctcagctcctggcacatagcaggaactcaaaaccc

SEQ ID NO: 106952 - DNA, 122 bp, Homo sapiens
cgaccctgccctccacgtggctccctaaacggccactcccagggccaggagagttcaggccggcctgtcccctcacacctgcctcctgcagctgcaggtgcccctggctttcccctcgcccg

SEQ ID NO: 106953 - DNA, 122 bp, Homo sapiens
ccttcaccctttttctgacctccacaaaaattttaaaaagtttaaattcctgtgcttccacgcttatgagaaatacagcaaccatgaatagaggaagattatgttttcaacttgagaaaaaa

SEQ ID NO: 106954 - DNA, 122 bp, Homo sapiens
cgttgggcgggtcatgggcgtggccaggaatgcctgggtggaggagtggtcagggctggccgggtcgggggtgtggccgcggcctgctgggttggttgggggcgtggccagcggcttgcagg

SEQ ID NO: 106955 - DNA, 122 bp, Homo sapiens
cggacaccagcctgagacatgacacagagacccagcgccgcttgagggcggggactgggacgggccccgaggaccccgcaccgcccccccgcgtccccgcccccaagccgggcctagcagcg

SEQ ID NO: 106956 - DNA, 122 bp, Homo sapiens
gccttacctccctcagcttcaggatccttctgtctaggaaggatttagcttcttctttaccgaggggtctcccttagctttctggtcacttcaaggctttccagtttactcccaagaaaaca

SEQ ID NO: 106957 - DNA, 122 bp, Homo sapiens
tggggagacccagcctgttcggctccagggttcggagacatcctgggctgaaggcggcggcgaaccgaagaagccggcatattctgcccttcgcgaatctttttgcggtctgggcttgctgt

SEQ ID NO: 106958 - DNA, 122 bp, Homo sapiens
gccgggcatggtggtgcatgcctgtggtcccagctacttgggaggctgaggtgggagaatcgcttgggcccaggaagctgagacggcattgatcttgccactgcactccggcctgggcaaca

SEQ ID NO: 106959 - DNA, 122 bp, Homo sapiens
gatcgttgtggcccggagaacacagcaagctgattggccagagctggtcacgtgccccggcgggcgggggagggggcatgtcggggagccggggccgggggcggtcagccccactctaccaa

SEQ ID NO: 106960 - DNA, 122 bp, Homo sapiens
cattgccaccagtggagaagccatccagacgccacctgggctgtagcctctgccagcttccgtgctggagccagcttgtgcactcctgaaagctcctcctttcttggctcatgggttcagcc

SEQ ID NO: 106961 - DNA, 122 bp, Homo sapiens
actcactgggcgtcctcgccctccagcaggcggcggtaggtggcgatctcctgctccagccgcgtcttcacgtccagcaggatcttgtactcctggttctgctgctccatctcgcagcggag

SEQ ID NO: 106962 - DNA, 122 bp, Homo sapiens
gtcctgacccacatttgcagcctgaggccctgaagagggcaccagcgaggcacagaacagcgagaccacctccacagctgccttgctttgcacccttcttgggaaagggcccagccatctca

SEQ ID NO: 106963 - DNA, 122 bp, Homo sapiens
cccttctctgagagactagaagcagcatgcatctgacaattgtcaatttcaaaacaaacacgctccgggacttgaacgcagcggggcattcagtagcgaatgctgtctccttgagttagggc

SEQ ID NO: 106964 - DNA, 122 bp, Homo sapiens
ataaaataaatgtatttaaaacaaacaaagcaagacctttcgcgtttgaacagacttctacggttaagttttaactaaatttaaaacacaatgtaaaataggtaagtgtattagtatacaaa

SEQ ID NO: 106965 - DNA, 122 bp, Homo sapiens
gcctctcgccctttcccacccctgctgcacaccttgctgctgagtgaacgcgtcctcatgcgctggagccagtgctgccccttgggccgtcagccccacccctcaaagcctcctgaaaaggc

SEQ ID NO: 106966 - DNA, 122 bp, Homo sapiens
acctctccacctgggccagggttgcctcagaggccaagtttccagaagcctcttacctgccgtaaaatgctcaaccctgtgtcctgggcctgggcctgctgtgactgacctacagtggactt

SEQ ID NO: 106967 - DNA, 122 bp, Homo sapiens
ttcccccgctccggtgatttctatagctagagggctgatttactgcagaaacctccgtagcgccctcctcctgcctctgcaccgtcaggcccggtgggtccggctccagagcgccaccgtgc

SEQ ID NO: 106968 - DNA, 122 bp, Homo sapiens
cctccatggactgcggggtgttgcacgagtgtataagtctgcggaatttatcaaattgtacgccttaaacacgtgccgcttgctgaatgtcaatcacacctcggtaaagctgcttttaaaga

SEQ ID NO: 106969 - DNA, 122 bp, Homo sapiens
ccattgaaatagcttttaaattgttctttgggttaaccttgtagctgtgctttcttgatgcgtagaaacacgtgcatggaggatcaaacactgtcagaattgctgaaatcaatacacaaaga

SEQ ID NO: 106970 - DNA, 122 bp, Homo sapiens
gaaaacaggaaccaggaaacacgatttaaaacatgagagaaggaagggaaattcccaggacgatgatgaaaggaacaggcaggatgaaaattttgcaccaggcctagacagcagccagtcca

SEQ ID NO: 106971 - DNA, 122 bp, Homo sapiens
gaaggctggtgaggaagctgcctgacagcagcggtaattagcctccctgcacagtgcgcccgcggggttccagccaaggcgcagcgaagcagcggcccctgctcctgggtggcactgccaca

SEQ ID NO: 106972 - DNA, 122 bp, Homo sapiens
aataggtattaaataaatgtttgttgaataaatcattattatccactagtagctgagctacgtatttttccatctttattaatacagagggtggtatgttttaaaaaactaccaaaaaaatc

SEQ ID NO: 106973 - DNA, 122 bp, Homo sapiens
tcagtaagctagggcagggttttgatgggccagggaggagtccacgcgatctgattcacacgataaaagcatttcctgggccctgagtggagaccacaacgtgggagggcagagcggaggcc

SEQ ID NO: 106974 - DNA, 122 bp, Homo sapiens
taattgactgtcatcagaaatgcctgtcctgctctgcatctgcagtctctaaggtgtatgcgccttctccattcccccaggttttgagaacagagtgctgttttagagctggcagcagcatc

SEQ ID NO: 106975 - DNA, 122 bp, Homo sapiens
ggctgtggagacctgggccttctgcgatcaccctaggagttgatccagatatgtgcctcacgccctgatcactccccccaaattagtatccgcagagattcgaggacatgccgttgaccttg

SEQ ID NO: 106976 - DNA, 122 bp, Homo sapiens
tgcccagccagtttgcagggcctcctgggcagggcgcaagcaaggagccacgccaggagacgccaccggctttttcacctgcccctctgggcctgtggaacctgcctcgggtagggcgggct

SEQ ID NO: 106977 - DNA, 122 bp, Homo sapiens
cagtgaggatcaaagccaggagagcgagatggaagttttcctgctgcaacgcttaagctccggtgaacacaaggctggactgctcgccctgcagggctggctgagctctcccccactgctca

SEQ ID NO: 106978 - DNA, 122 bp, Homo sapiens
ccctatataatagagacatttgtatcttggattaaaaaaaatttaactgtgttctgtgaacgtttttaagaaaaaggaattagtaactgcattccagagttgtggctatggaaatagccaaa

SEQ ID NO: 106979 - DNA, 122 bp, Homo sapiens
ccccataatcctctgatcttgtggaagctcatttgtagtcttctagcccaaagaaataaccgtttttctgaaatgttaagcatccttccaagggtatcagagtgatatggagaaatatggta

SEQ ID NO: 106980 - DNA, 122 bp, Homo sapiens
agggctggatggactcatggagcctcagggcgggttggggaagctggcgaggccgagccccgctttgggcttctgggcgccctgacctcgctcccggaaccctggggactgggaggcgggag

SEQ ID NO: 106981 - DNA, 122 bp, Homo sapiens
ctcaagggatctttctacctcagcctcccaacgtgctgagattacagggacacgccaccgcgccagcccgaacatctttatcttaaacccagaaaagtgacaggagtgtctcccctacaaga

SEQ ID NO: 106982 - DNA, 122 bp, Homo sapiens
gaattgtctcagctgcgtccacacttccagggatccgtccggaaccgtcgccagcacctgcgtgcagctctgagctgggagccggcatcatggcagggctcacggtaccctcttctcagtgt

SEQ ID NO: 106983 - DNA, 122 bp, Homo sapiens
actctggcccagacaaacagataaacatatgaggtctcttaatggtgtttgtggctgcaccgtttacacaaaaggagatgttttggttatgacacatctccattttatactcagatggttac

SEQ ID NO: 106984 - DNA, 122 bp, Homo sapiens
gaaagggtctcccagccaggccttctagcggcccaaagcgggtaggcagagcgcagataccggggcctctttcgcccaccctcgccagggcactatccttcccaccggcccgatcccgcgtc

SEQ ID NO: 106985 - DNA, 122 bp, Homo sapiens
cgggtgcggagaggaggcgtggagagtgtgaggaagaagagaggcactctgagaagaagtcgaacaactaacccctcatttggcctggtttgggtgagaagattgagtcacttggggaaaaa

SEQ ID NO: 106986 - DNA, 122 bp, Homo sapiens
gcccacgtgccttctaggtgccgaatgtgtgttcctgtgatattgacgttgacatccctgcggattcagccacaggtttctgacaagctggaggaagcaatggtaattttggctttttcggt

SEQ ID NO: 106987 - DNA, 122 bp, Homo sapiens
cttcccccagtgccaccgagctggagcctgctgagtttgcaagtcatcacggagaatcctcggctccttcggagataccacccctgggcctactctgggttctgagatggcagccctagtgc

SEQ ID NO: 106988 - DNA, 122 bp, Homo sapiens
tgaatgaattaagagaccattaaagtatgctatttttttgtttgtttaactctgaaacagcgcactactgtgtgaaaaaaagtagaaataggtctacatttgtctgaatttagagacacttt

SEQ ID NO: 106989 - DNA, 122 bp, Homo sapiens
cgcgttttcggcgctgggacagagctgcctgctggagctgccgcagatcgccgtggtgggcggccagagcgccggcaagagctcggtgctcgagaacttcgtgggcaggtaagcgcgcaggg

SEQ ID NO: 106990 - DNA, 122 bp, Homo sapiens
gccgggcagctgcaggaggcagatcatccgggctctgtgcctcttgctacttctcctccacgccggctctgccaagaatatctggaaacgggcattgcctgcgaggctggccgagaaatccc

SEQ ID NO: 106991 - DNA, 122 bp, Homo sapiens
ttcctgtagtcccagcacttcgggaagctgtggcgggaggatcagttgagttcaggagttcgacaccaccctgggcaacatagcgagaccacatctctacaaaaaaaatacaaaaattagcc

SEQ ID NO: 106992 - DNA, 122 bp, Homo sapiens
tacctttcctcgacccaccagacccctcaaccacacaacccgagacgaattcccgcctcccgccccctcgactcccagcgcccaatagcccagcgagctcgaccaatcacccgccaaggcca

SEQ ID NO: 106993 - DNA, 122 bp, Homo sapiens
aaatccaatgttccagaagtgtttgtctgccaaaagtgccgggactccaagtttgacatccgccgttccaaccgctcgcggacgggctcccggaagctgttcctggactgactgctggctgg

SEQ ID NO: 106994 - DNA, 122 bp, Homo sapiens
aacaagtcggtcatgaagccgcgcagcagccatggcttttaaggataccggaaaagcacccgtggagccggaggtggcaattcaccgaattcgaatcaccctaacaagccgcagcgtaaaat

SEQ ID NO: 106995 - DNA, 122 bp, Homo sapiens
ccaggtagctcctctgtttgaaagctctaagcccttccactgtcctcttcagggctaccccgccacacagcctctccttgtcttgtcttccctttggcggggtcacacccgcacctgggtca

SEQ ID NO: 106996 - DNA, 122 bp, Homo sapiens
tgctctgacaagccttggtcctagcaaagtggctccctacaatttcaactgataggactgcgggattggggcggggcgtaggacaggaaggtggagccaagtgtggacccggggagcccagt

SEQ ID NO: 106997 - DNA, 122 bp, Homo sapiens
tttgcccacagtccctgctgtttccctctcctgacccttggcagccaccggtcggctctccgttgcctattctattctgtcatctcgagaatgctgtgtaaatggactctgtggcctctaat

SEQ ID NO: 106998 - DNA, 122 bp, Homo sapiens
gcgagcgagcaaggagcgagccacggagagagccggggagcgagcgagccagcctgcgagcgcgagcggccgcggaggctcgggacccggctggccgcgcggcgccgcagccgccccctccc

SEQ ID NO: 106999 - DNA, 122 bp, Homo sapiens
tgaatgtcatatgaatctgtaatcgtgcgaatatcagcatgaatcatcagattttaaattcggattctgcactgggtaaagggacttggatttgttcctttgtaaattagattatacattcc

SEQ ID NO: 107000 - DNA, 122 bp, Homo sapiens
atcagctgtgaagctgcaaggtctgcaggtctgaaggtacactgcccagtgtagtagccacgggccacatacggctactgagcacatgacatgtggccagttggaattgagttgtgctgtaa

SEQ ID NO: 107001 - DNA, 122 bp, Homo sapiens
cacaaagttacagggaagcaaatgcacatgcatgcacaaacacacatatacatatacacacgtgcacacatgcgtgcacacacatacacacaagtgcacaaacgcgcacacacacatacaca

SEQ ID NO: 107002 - DNA, 122 bp, Homo sapiens
gatccagcttgcttttccccttgtcttcttcctcagactttatgaaagtatttgcagagacgccttgtcccctgccatgagctgtaaatacttatgcagatgaagggtttgttactctagtt

SEQ ID NO: 107003 - DNA, 122 bp, Homo sapiens
taaaccttaaagactggcctccgcacacccggtttattaattgaagaatttcctcttacccggaatgggaagttcacattaaaatcgagcttgccctgagtggtagtgacacttgagaactg

SEQ ID NO: 107004 - DNA, 122 bp, Homo sapiens
gtcgctgtcatccggtagcccctggctgtccttcagagggggcacaggtggagaaagaggcgcagtccctggctgtggtccctggagtgggtatacacgtgtgagtgtgtgcagatgtggag

SEQ ID NO: 107005 - DNA, 122 bp, Homo sapiens
ccttctgctctccagctcctcccctcagtcagcccaaatactgatttccctcctaaggcacgctcctcaactccttgcaggtgccctggcacgccctgtacccccaccaaccttgtgtaccc

SEQ ID NO: 107006 - DNA, 122 bp, Homo sapiens
agggcgggagaggcggaatataagcttggtcacatgacccgcctaattggccagaggctgcggcggccctgagagactcagcgatgctcattggccagaagagggtgggggcttggcgctag

SEQ ID NO: 107007 - DNA, 122 bp, Homo sapiens
ataaatgtttccttctggcttcggtcaccaactaatgcagatgggtggggctctattcggcgcagctactcagtggtccaggttcctcccacgttttgggtctgtctccccgggagcctcgg

SEQ ID NO: 107008 - DNA, 122 bp, Homo sapiens
atgagaaagagaaatccatgacacacggacgacacaattataggagctgagggttcgagtcgtaatcctgttagaggccacgcatcccctacccatccctgaactctgtgttgatagcgctt

SEQ ID NO: 107009 - DNA, 122 bp, Homo sapiens
gcgcgagaagtgatactgcgataggaactgagggtgggtaaaggtcaacgaatgaccgaccgtgcgctaggaacaacctagtgtgggagaccgtgccttagtggtgtaccaggaggtgcaaa

SEQ ID NO: 107010 - DNA, 122 bp, Homo sapiens
tcccagctaggtcgcagtgggcgatggggatccccaagggtgggccgagagctgacggatcggcagcgctggttaaggccccgcacctgcagccccagtgaccttgaacgattccgctctgc

SEQ ID NO: 107011 - DNA, 122 bp, Homo sapiens
gcccgtgaaaagtactgcaacatctgcgtgcagttgtttttcctcaataataatgtccgacgatagacgtaaatagtccttttgactagagctgttttctggaatggctccaatactaagaa

SEQ ID NO: 107012 - DNA, 122 bp, Homo sapiens
aaactggaatgcggcccggctggcaggaaacggggtgcctgcccaggcctcgggaaccatcgctaccccagccccgcccaccggccccaggcagaggctcacgcgctcccggcttcgctgca

SEQ ID NO: 107013 - DNA, 122 bp, Homo sapiens
caggcctctctgccccagcatcactcaatctgctcagtcctcgactgctgcaggggaatgcgtgctcagagagagatgacacttctgaggtggcccccagctctgggtgcagaggagccggg

SEQ ID NO: 107014 - DNA, 122 bp, Homo sapiens
ccagtgaccacctcatagcttctaaatacctcctcttccaccagaactccaccaccaagacgacacgatggggcaataagtttgagacttttagggtcatgcaggcaacctttttctcaata

SEQ ID NO: 107015 - DNA, 122 bp, Homo sapiens
cctggggtggacgctccagtttcttcccagcatggcacactcctgtggcatttgacttagcggtggagggggcatcccccaagagtgaggtaagagaatacccatgtccctaaaagcagaca

SEQ ID NO: 107016 - DNA, 122 bp, Homo sapiens
ccgaagtgtttgggactgcagtgcccgggtaggggtagtcagaggccggcccctccactccgaggcccagatgttgggggggaggtcccaggagtgacggggtgcgcccccccccgcaagga

SEQ ID NO: 107017 - DNA, 122 bp, Homo sapiens
cggcgccccgggagaggcctgctggtcagggggcgctggtgcgcaggcgcgcggggccgccgtcgcagctaccttcctgcgccgattcggagagggccccctaatctctactcggcccgcac

SEQ ID NO: 107018 - DNA, 122 bp, Homo sapiens
agtacatttccctcccatcctattgcattcccctaagatccccaaattcctatgggaaggcgccacacacacacatgtatgctcacagagccacagccttgtctgctgtacccaccaacccc

SEQ ID NO: 107019 - DNA, 122 bp, Homo sapiens
gtcaggaggaacgtcgtgggggcggactctagggcggggccaggatgattgttatgagggcggggcctggggtggggccaggataagcgtcgttggggcaggtcctgggtagggggcaggtc

SEQ ID NO: 107020 - DNA, 122 bp, Homo sapiens
atcggacccaggcgaggcccccagcttatgacccgcccccatcgccgtgatcctcggggccggggacccccgactccacgcgaccgtgaccacatccaggtcccccaaaaacacacacacgt

SEQ ID NO: 107021 - DNA, 122 bp, Homo sapiens
ttttttaagccggtccgaaaagcgcaatatttgggtgggagtgacctgatttttcaggtgcgtccgtcacccctttctttgactccgcaagggaactccctgaccccttgcgcttcccaagt

SEQ ID NO: 107022 - DNA, 122 bp, Homo sapiens
gcgtggcctcacctcacctctgcccaacaaaccctgcgcgtccaggccagggtggtatcgcgagtcacctgggccccacaggcaccacgtgaccaggccaattcacctgtgtcctcgcccca

SEQ ID NO: 107023 - DNA, 122 bp, Homo sapiens
cccttggcgatcccagttctgttccccgagggggctggcgaggtgggcggggcgggcaggcgagactaggtctttccctgtttggcctccgtagccggcgccggcgggtcgttctgtttgaa

SEQ ID NO: 107024 - DNA, 122 bp, Homo sapiens
cccaccgccgggagaacttttcccaactccctggggaggccggcagcagggctgggaaggcgcctccttgggggcttctcttctcggcctctgctccacggccggcgccagcttcccgctgt

SEQ ID NO: 107025 - DNA, 122 bp, Homo sapiens
tctggccctggtgggccctctgatcctccaacccgccttagcctctcccggtctgacgagcggcgtgggaccctgagtggggcaccagctcccccaactcgccatgatttttcctttgaccg

SEQ ID NO: 107026 - DNA, 122 bp, Homo sapiens
caggggtgtgtgtgtatgtgtcacactcttgctgaatacgcccactgctaacaatatggacgcccaggtgccagaaaggtcaggcagtgtattcccctgcctccggactaaaaatatatcta

SEQ ID NO: 107027 - DNA, 122 bp, Homo sapiens
cggggctccagggctggcttcagcatcttggggcaggcagaggggattaggggtcgcgggcggatgagtcggccagacaagcggggccagtgagcagctaaaaagtcctctgctaggcttca

SEQ ID NO: 107028 - DNA, 122 bp, Homo sapiens
ttcatggtttccttgggggaaaatgcctgctgccctccgccctcccccccacccccgacccgcttgactgctctcttggacctaaccctagtttgatactgggccagaactgtgttgctttc

SEQ ID NO: 107029 - DNA, 122 bp, Homo sapiens
tagaaagcggttgttatttattccaggcaccatcacaaaaggcttccaaaaatatcgagccgagatattttattgtccagcctgtctgcagcctgtaattatgcgttcaagatgtttaatgt

SEQ ID NO: 107030 - DNA, 122 bp, Homo sapiens
gaaggcaaggctctgcctgggggcactctggctgctctcaagggccagaaaagggtcagccgtctgttctccatgccccccggcagggctcccggtgcctgcagcctttgcccactgttttg

SEQ ID NO: 107031 - DNA, 122 bp, Homo sapiens
ttgaagatctctggacatttgtccaggattaagcaaaagccacagcaagtttctttcactcgcatcagtgtgaagagaccaccaaacaggctttgtgtgagcaataaagctttttaatcacc

SEQ ID NO: 107032 - DNA, 122 bp, Homo sapiens
ccactgggccctgacagctcccaagggcctcagtctggggacggggtctggctgtgggagcgcggctggagcagaccacgggattggggctcgcgcccctccagggaacatgccgccgtgtc

SEQ ID NO: 107033 - DNA, 122 bp, Homo sapiens
tcagaaccagcaaccgctggaaatggcgtccgggcccggaagccactgtgcgcccacttccgttttgcttccgtagcaccgcacaagagggcgggccatttagcgtcacaagcagtggtttc

SEQ ID NO: 107034 - DNA, 122 bp, Homo sapiens
agggaaattacagcaagccgcttattctcccctcgtccggaaaagggtgggaaacgccatcgttagggcaaaggaattaagaacattattttatgaaaagggtagttgttagggggacgttt

SEQ ID NO: 107035 - DNA, 122 bp, Homo sapiens
tggcggccaggaaagcgacggtaagctagtctccacaaggaacaccctctccctccaccacggccgccagcccctcaaggaaagcccgccacccccacatcggccccctccaggtcccagtg

SEQ ID NO: 107036 - DNA, 122 bp, Homo sapiens
gcccttatactccaggaaatgtcttcatccattggccttcattagaaatcccctattttccgccgggcatggtggctcacgcctgtaatcccagcactttgggaggccgaggcggcagatca

SEQ ID NO: 107037 - DNA, 122 bp, Homo sapiens
cggggcgctcaggactgcgacaactctgtgggttaccgcgccggcctagcggcccagcgacgccccccagcggccagagaaggccgcgcttctcggggttggcccacccaaccgctctgcgg

SEQ ID NO: 107038 - DNA, 122 bp, Homo sapiens
agcagcggggaagtcatctacggggaccctctggcgagtctcagggagtgtcatcctccccgggcaggacacccaggcggagaaagggtctagtgggaggtgacacctgcagcctctggagg

SEQ ID NO: 107039 - DNA, 122 bp, Homo sapiens
acagggactaggccctgaacactgaggtctgaagccaatcacagtaaatcataatagccccggaccacctttggaaaaccattaagtcgacaactacaaaaccctgaagggccctaccgcat

SEQ ID NO: 107040 - DNA, 122 bp, Homo sapiens
cggtaacctgataagtccgaagcgttccagtgagggcggggcctcacgaaggcaacccttcgcgcaacctatcagaatcccccctagcaacgctgtgccccgcccatatgggtccggcctcc

SEQ ID NO: 107041 - DNA, 122 bp, Homo sapiens
atcagcggctccagatggacgcccgtaggcagggtcagtttaggaagaccggcaggcaggcgtattaggcgcgcgggctcccatcctcatggctatgggaagcaagtttccctcatcccttc

SEQ ID NO: 107042 - DNA, 122 bp, Homo sapiens
gatcctggggcatcttttctgggcgggggtgggcgtggaggcaggggatggaccaggtgacggctgccgcatgggtggagactatctggctctccatggtctgcttggctgtgctccagaca

SEQ ID NO: 107043 - DNA, 122 bp, Homo sapiens
agttctgccagtgtggcatcacggcaagttttctgtgttccagagatccatggctgtgcccgctccaaagtctgaatctgagctcttgagggaaaaggaggttcttcttgggcactctatct

SEQ ID NO: 107044 - DNA, 122 bp, Homo sapiens
accttcctcccaattcgtaccagcttaacgggtgtcacgataagagaatctcattacattcgagaaaaagagcacacaggaccagaaaccagagggcaactgcagtcccaaagacatcaggt

SEQ ID NO: 107045 - DNA, 122 bp, Homo sapiens
cacgatgtggggagtctcttgggaggagcagtgcttctcagccctttaccaacctccttccgagctccgggggcatctgttgggatatcggacccggttttgtgcgttctgggttagggact

SEQ ID NO: 107046 - DNA, 122 bp, Homo sapiens
ccgccgctgcgctcagcgccgccctcaccccgcccgccgcgccggccccgccgcacgtagcggtgacgccggccccttggtcagcctgccaggggaacagacagacccctcgctggggacta

SEQ ID NO: 107047 - DNA, 122 bp, Homo sapiens
tgtgggagggacccaggggaaggtaattgaatcatgggggctggtcttccccgttattctcgtgatagtgagtaagtctcacgatacctggagggtttatcaagggttcctgcttttgctgc

SEQ ID NO: 107048 - DNA, 122 bp, Homo sapiens
attgtgagggacccagtgttctaattcttgctagagtgtctacctccatgttaccagaggcgagtctgaccgggtactgacatgtgatataccattaagtgtgcagtgggttcttttagcct

SEQ ID NO: 107049 - DNA, 122 bp, Homo sapiens
cagggcaatcaagcccttgccaagtggaatcactctgcatttacatgggtggcttctgaacgtggccgtgatgaattgtgctccggcagggcctcggcagtgaaaaatggggcggtgcgatg

SEQ ID NO: 107050 - DNA, 122 bp, Homo sapiens
cgcctagagtgtctgtaccgcatcctttctgctacactgtttgcacacacacaaaagggccgaggagccagggttggtgttggatatgcccagtacgcgtgctgggtgttggaaggatgggg

SEQ ID NO: 107051 - DNA, 122 bp, Homo sapiens
catctaagccaatcagcaacggcctctgacgacgggcacctgcaggagccaatcggaaggcgcaggcagggtgtggggcgcggcccggtgccctgggtacccagctcagggccccggtctgg

SEQ ID NO: 107052 - DNA, 122 bp, Homo sapiens
tggaaagcgaggaagggcagggggaaccgtgtgcacttgtatagacgctagactgagtatcggattgataaaaacaccaaaaaactcgaattagtaatcagtatgtaaagttgcgagaagtg

SEQ ID NO: 107053 - DNA, 122 bp, Homo sapiens
ccgcgtctcccctctgtgtgggtctctccttgtgtcactggagttctggtgttactagggcgagtggcctttgtgcttcagcttgtgtgtgtgtgtggcctccagccggctggagtcaggac

SEQ ID NO: 107054 - DNA, 122 bp, Homo sapiens
acaggcgtgagccgccacctgggctccagggaaaattagagtgcaggaaagtggccacgccgtgtgttttttgttatcaggaggtttatagctaaataactatcaaaagtatcttcaaacag

SEQ ID NO: 107055 - DNA, 122 bp, Homo sapiens
tcaccttggtgatcttccccccgctgaagttggcaaagcgcttgagggaaagggttaagacgttggatgttctgtggatggtgaagcgcttgctggctggaaccttcttcttgcatctatga

SEQ ID NO: 107056 - DNA, 122 bp, Homo sapiens
tgcatgaagaaatggataactatgaagcaccgtccaaggcggaaaaaacccgccctaaaccgcaccccaagcaaattgcacacacggctttcccggagtggacaccagagggcgctgagctc

SEQ ID NO: 107057 - DNA, 122 bp, Homo sapiens
tggggtgccatggtgacatggtgacctcaccacctctcagtgggaagaggaggcttgtttcggttattctgcaggaaagtctgcaatagtagctctctcagaggaggggaaggaagggggtg

SEQ ID NO: 107058 - DNA, 122 bp, Homo sapiens
cattcgaatttcctacgcggcctccgtgcgattggctggttcgcggatggcgggacgacacgattggctagtcgctcacaagccccgtgccctggttggcccaagacagcgcggaagcgggg

SEQ ID NO: 107059 - DNA, 122 bp, Homo sapiens
accagcagagctgcctcagacagaaatgtcatatggcacgttagggggagttgccttatgcggtaccctggccgccatcctccctgcttcccaccgcccccagccctgtaaacctgtccact

SEQ ID NO: 107060 - DNA, 122 bp, Homo sapiens
tccgaattcccatgctactctttttgacgggtcactggtggctctataggcaggtgctgccgcggggttgtaattacccggccgagcctggtcgttaccgaacaccccctcacccccaagca

SEQ ID NO: 107061 - DNA, 122 bp, Homo sapiens
tgcgtggcctgatggagatgactgatgtcttaaggcgcctttccttctgtggcacctcttcgtgtgttctcacctggggacctggcagggcacatctccgctgtgcctactgcaaggcggtc

SEQ ID NO: 107062 - DNA, 122 bp, Homo sapiens
cttttattaacctttctgagtacaagtttaccatacacgcttcttaacatagggataattcgagcttgaaatagactttatccaggagatagctgtttttcctgggtaaaacaggtgacaga

SEQ ID NO: 107063 - DNA, 122 bp, Homo sapiens
catgtactatggcttttttggcaacataaggtacagagcacaggttaggtcatacacacacgcacactcacaccatcatcacacacacacacacgcacaccatcatcataatcactttctga

SEQ ID NO: 107064 - DNA, 122 bp, Homo sapiens
atgtttattcttttcaagaagaagaacctgttttggatcctcatttggccaagcacttagcgcattttggaattgatatgcttcatatgcatggggtgaggtctccttttgtttctgtttcc

SEQ ID NO: 107065 - DNA, 122 bp, Homo sapiens
aatgcagtgattaaaggacacaaggcctcagtgtgcatcattctcattgtggctttcaggcggctgtggaagacagggtggggatggtggcttcgggaggtgaggtgctctgggacttgggc

SEQ ID NO: 107066 - DNA, 122 bp, Homo sapiens
ccaaggccttcatgctgtctatggaattctttcaccaggtgttctgcaaacaatgtgggccgtttggctggacatgtggctctggtgtttgactttgggtggctggccaagctgagtcccta

SEQ ID NO: 107067 - DNA, 122 bp, Homo sapiens
gaatcagatggtcaaatttcacatcagcaccgagaggctgttaggagactccattctgctcgcggctgctccggctccaggtccggcttcccggcgtccgcgggtctccacccctccgcccg

SEQ ID NO: 107068 - DNA, 122 bp, Homo sapiens
ctcgatctcctgaccttgtgatccgcctgcctcagccttccaaagtgctgggattacaggcgtgagccacagcgcccggcctctagtctatgcttttgagggcattaggggaagtttgtgtt

SEQ ID NO: 107069 - DNA, 122 bp, Homo sapiens
cagtgcttatgagctgaaaatctcagaattgaggcaggcaatttctgagttcattcagaacgcagtgagctgtttgggagatggccacgtgcagaggcagacggcagctgacgcaggcttct

SEQ ID NO: 107070 - DNA, 122 bp, Homo sapiens
gacccggaagagagaaggaccagttgtttcaattccctgaaagcaattcctgatagggagcggctgggtggtcaaacgttagtgactaatcatcagccccacttgggaaagttgacaaattg

SEQ ID NO: 107071 - DNA, 122 bp, Homo sapiens
attcttaaggcagagggaattcagtatacaccacctttctgtttcccaggtcattgctgtcgttggacagcagaacgtcgagggcaagcggattccatttggcttcaagcaccggactctgc

SEQ ID NO: 107072 - DNA, 122 bp, Homo sapiens
ttgatggagttctgggaatcttagggcattttaagactccaattactatactgtgaagtacgtgtgcttgcttatgtgtgagaatgtatgcatgtttatgtataaatttgttaacaattcta

SEQ ID NO: 107073 - DNA, 122 bp, Homo sapiens
ttatttttttttttggctttacctggaggctggctgggctgggctcccccggctctgccccgcttcacatcgtggctgttgcatgggatccgagcggagcccgagcgccagcggctcgcggc

SEQ ID NO: 107074 - DNA, 122 bp, Homo sapiens
cacgcaaccacaggtgcagaacgggtcgggagttaagtgaccatgccagggaccagcacacgagagccggggagacccccaccaggtacgctgtcagcgagcactcccttccaccagcctga

SEQ ID NO: 107075 - DNA, 122 bp, Homo sapiens
tagtctcaattgcctggaactacaggcttctacagaaccggcaaatgggccagaacaaagcgactggtgagtccgcatagagcacagggagtcctttgttctatttttgcaacatttgtgta

SEQ ID NO: 107076 - DNA, 122 bp, Homo sapiens
ctcttgctcagacaatccttcattgtcggccccatacaaagcaatggcttcctgcctgctcgcctgtgcgaggtcaccaggtatgcaaattggggtgtaccaggcacagctgaggcccccat

SEQ ID NO: 107077 - DNA, 122 bp, Homo sapiens
tagctggcccgattgccggaaatttcactgcgcgtggctaggcgggagaggccactgtgacgcgccctgtattttcctctcgattagctggagggaagttagagctccgttttgcacctaca

SEQ ID NO: 107078 - DNA, 122 bp, Homo sapiens
ctcaatatattgggctttggaccacatgccttccttcccatagagctttctacaggcaggcgtccctccaggccccattccccagcctcctttgcacatccagcaccccctgcgccttttca

SEQ ID NO: 107079 - DNA, 122 bp, Homo sapiens
gccataaaaaggagggagctagtaaggaggtaaaggggaaactcaaaggggctcagccatcggctggttatgttttaaaccacttatctcaggtgcagcaaaataataccctcagtccaact

SEQ ID NO: 107080 - DNA, 122 bp, Homo sapiens
taatatagaaatgctaagtgaatggcagatactttaaggagcgaaaaatggaaaatttcccgggttacctccatatttgtctggtaaggaagggagcaacacctgagctggacctagtcaaa

SEQ ID NO: 107081 - DNA, 122 bp, Homo sapiens
tacttcaaaatcaacctaatgataaagcacaaaatacctaattatggctacaaagtagaacgtaaggattctttgtaaacactgtaaagacagaatttaggggccagttgggagagaaagaa

SEQ ID NO: 107082 - DNA, 122 bp, Homo sapiens
gattttatttcttctttgggtatagggttgaggggaaataagttttgagtgagaaataaacgttttagctgaaattgtatcccagaagtttgaaataagtagtagaagagggggaaaacaag

SEQ ID NO: 107083 - DNA, 122 bp, Homo sapiens
gccccagagatgcttactcaacccctatgtggcatgttgtttcctgtgcttccaagaattcgggtcaaggacattggagcgggtgatgggccaatggccactgttgggcaggggtaggtgca

SEQ ID NO: 107084 - DNA, 122 bp, Homo sapiens
cccccagctccatcttctttgccacctgggcggagatctgggggactgtgacctaccctgcggaagacacggaggggacgggccggccacaccccccgcgccactccggcaggcaccgggtg

SEQ ID NO: 107085 - DNA, 122 bp, Homo sapiens
tcctcagaatcgcgggcctggtccccacccccaacacgcttgtatgcccgcccctcccgacgccgccttgctgggtgccaagaaccaaccgaagcagccagaactcctcagtgaaaggcctg

SEQ ID NO: 107086 - DNA, 122 bp, Homo sapiens
tgttactgtttgagaaaagcaacattgaagctgatgctgatcttggtaataaatttgcagcgaatgcttataatcagacttggatgatgttgggcttctgagtttttttttgttttgttttg

SEQ ID NO: 107087 - DNA, 122 bp, Homo sapiens
aatggaaggtgaaaaggaatctgatgattttggagtccttagctaaaaactgcatctagccgagtactagcacctcttggagatgagttgtgttttttgagaactctgttaagtacatagtt

SEQ ID NO: 107088 - DNA, 122 bp, Homo sapiens
gctgccccccccccagcccaccctccctgggatcatacgcttctgcctgctgtgaagagccggggccacaggccccccactggtaacagagtccagggccttcaagatgcgctgggccgggg

SEQ ID NO: 107089 - DNA, 122 bp, Homo sapiens
gtcggagccccagatctcaccccctctccccaggcaccaacagggctggctggaagggtccggctggggaccgaatcagcacctaaagcaaaataacagctctgtggatttcctaaggagaa

SEQ ID NO: 107090 - DNA, 122 bp, Homo sapiens
cagccacatacaactgcttttagttcccctgaggtgtcatattttttccaggttgtttcccgttgctgggacactcccctaccaagcagtctttgcctggatagctcttactcaccttgcct

SEQ ID NO: 107091 - DNA, 122 bp, Homo sapiens
tcccacgtgggatttaacaggctccgtgttgagactagactgtagggcgggggtagagcccggagcctgtggcagcacttgcggtgagaggcaggggtggcttggccccgggaggcggtgga

SEQ ID NO: 107092 - DNA, 122 bp, Homo sapiens
tgtagggccctttagggaccacttctttccatctgtgcctcggaggggccggctgagagccgggctaccggcggaacttgtccttgcagcaaaaatgtgtttttctctccgcagagcacagg

SEQ ID NO: 107093 - DNA, 122 bp, Homo sapiens
ccaggcctcatcttcccagcacctcagaagtcagtagggccagccatgctggtgttctcccgctctcagccagggctcctcacatttgatgaaatctccagtcctgttaatgtgtctagaaa

SEQ ID NO: 107094 - DNA, 122 bp, Homo sapiens
cgcagcttgcacgctcctccgggtaagtcccgccttcgagggccgcgccgagccgctgggcgacctcgagttggatgctgcggctctctgagcctctactgagtcttccacaaagtagggcc

SEQ ID NO: 107095 - DNA, 122 bp, Homo sapiens
ctccatttcctggcccactttcaaaatggcagccggaaggaaatttgtgattagaagccgcgctgttcttatttaagagcgttagcgcaacttccggtattgttgcaagatggccgcgccca

SEQ ID NO: 107096 - DNA, 122 bp, Homo sapiens
ccgccaccgcgccccacccccgccacggccgccgccgccgccgccgccatcttagcgccgcgccacctcaacaacaactttatagacaggcgcagccacagggcggagccgcgggcctcagc

SEQ ID NO: 107097 - DNA, 122 bp, Homo sapiens
ggaaaaagcagacaaaaatcaataaatcagttacacagcctcctagaaagtgaaaagtgccgttcacaaaaacaaagcagcgaaaggatccagaaggtaggggaggcagagtcctggcagtt

SEQ ID NO: 107098 - DNA, 122 bp, Homo sapiens
ttccaagcgcagtgaaccgtccgcaaagcacgaggccggttgcgagctgcagaaagcccacgctcgccagcgggacccaaggaacgctagaactatacgtcccagaacacttagctttgttt

SEQ ID NO: 107099 - DNA, 122 bp, Homo sapiens
agcagaaacagggtctgagcccctttgctaaggcgaattgagtgggagggttggagactgcgctttaggctggtgtaccagagggcccaaggaaattggcccagtggggagggaaaagtaga

SEQ ID NO: 107100 - DNA, 122 bp, Homo sapiens
cagcgcgcatgggcgggctgtgcggacgtggctggtcctccaaaggtttcagatcccgtccgggccgctcagtcccttaaagctgtgtcccaaagcctaggggagacagcgaggctggggac

SEQ ID NO: 107101 - DNA, 122 bp, Homo sapiens
tgggacaaggaggccccagtgaggaaaccggaaggctggattgctgacagcacagcttcccggctccgctgagctggcattcttgtagctgaaaccctgaggaggccagccccctttcccac

SEQ ID NO: 107102 - DNA, 122 bp, Homo sapiens
gcgccaggcggcgcagaaggtcagtggccccggggctgggattccgcagccagcctggatcgggacgtgagtcctggtgtgactgacggggaatcggagcgtgtgtggagtgtgaacgcgtg

SEQ ID NO: 107103 - DNA, 122 bp, Homo sapiens
ctgccgctctgcgcggcgagaggtggcctgggaatggccgggccgggggtgggccggagccgctgtggcggcggcggcggctgggggcggtgagcgcggcgtggggctgcccctccccggag

SEQ ID NO: 107104 - DNA, 122 bp, Homo sapiens
cattggaaagcacatctctgattgagctcagacagtaacgacgacaatggttgacaatgacgtgctgcagcaggcccttgggtgcccgcactgggcggcagatgcccctgctgctgtgtccc

SEQ ID NO: 107105 - DNA, 122 bp, Homo sapiens
acctgtgcctgttttcttggggtgggagaagggctgagttattgacaagccttcttgcctcgccaggtacgtttcctgaggacagctgctctgtgaagcccactgccccaaaggcacctatc

SEQ ID NO: 107106 - DNA, 122 bp, Homo sapiens
actcttacttgatcagggctgagttctacgagtgactgtaaattctcagtaaaacagccccgttgggcctaatttcaaccacttaacccagaggttgcattcttgaagtgttctgccaaata

SEQ ID NO: 107107 - DNA, 122 bp, Homo sapiens
atttttaagccgtcgtcatactgccgacacatccaagcacccctggtcatattttgggaacgcacagccctggccgactccaccgtgagggcgcctgtgccggtgtcaccacaatatgcatt

SEQ ID NO: 107108 - DNA, 122 bp, Homo sapiens
tccttgtctcagtttccacagcatgacatccccacctcagcttccccagtgtgatgtccccgcctgccatcctgtcctgcagccaagagctcctctgggctcagccaggactgctgatttgc

SEQ ID NO: 107109 - DNA, 122 bp, Homo sapiens
taggacttggctctcccaagttattcttggtccacacttggccagcactaacagagcacacgtggcagtattcacaaatattagacatattttaattggaggtggcaacaggggagaaatat

SEQ ID NO: 107110 - DNA, 122 bp, Homo sapiens
gtttcttttaattcacgccgaagaagttgggggtttgatttctttcgccggggtttcgatcgagtcaacagctcactctgctgggctgctgtttgcacacgaagtccgtcataaaatcaaac

SEQ ID NO: 107111 - DNA, 122 bp, Homo sapiens
gaaacagggccgatttctcgaaaaccaccccccaccccggtcgctaaagacctccaaaagcgcccctcagcccaaaatggagccaaacctcgagaaagctgagataatacgcgggtccgcaa

SEQ ID NO: 107112 - DNA, 122 bp, Homo sapiens
ggctgtgtgacattttgcatgagtagtcaccactgcacacaggggctctccgtatttcctcgctaataatgactgagcatctctggttcacaggtcctcctccttctcttcagcttctttag

SEQ ID NO: 107113 - DNA, 122 bp, Homo sapiens
cgcagatcccaggggatccttggcgtttctggttcatgcccacggtgtgtctcaggcccacggggggcagcctaaagcggcacgaaagcttgaaaggggaggtcgaagcacctgtgtgatga

SEQ ID NO: 107114 - DNA, 122 bp, Homo sapiens
tcaggaccggcctaataaacatgtgtggcctcctcctctcgcttgctgggcgggcctttccgggggcggggttttgaagctgaggcttctgaggcgcccgcgtcgggtccgcccccgagcgc

SEQ ID NO: 107115 - DNA, 122 bp, Homo sapiens
gaccatgtgtgggacaccttgagagactcccaccagccccctggagctggagtctgaagccgctatctgcggaggcccaccctgcccagtagatggaacaggggctgagcccatcatgtcac

SEQ ID NO: 107116 - DNA, 122 bp, Homo sapiens
tccaggatggtaaacttttttttttaaagtctttccttcctctgatgtggctccagacttcgaaacaaaacaaaacagaaagagggaagttgctactctagaggtcagcatatctctaactc

SEQ ID NO: 107117 - DNA, 122 bp, Homo sapiens
tctgtgtccccagcaccgagaggcagcctctcagcaagtgtccgctcacggtgcccactccggctcgtgggtcatcgtagcttcacgcccatctcctccgaggcctctccctgaatgcccca

SEQ ID NO: 107118 - DNA, 122 bp, Homo sapiens
ggcctcccctccctcaatgctgatggacccctcttgcatgacggccctctctcaagcacacgctccccaaacctctcccaatgctggctgaccaaggacaggtctcagtgcctgtggcccca

SEQ ID NO: 107119 - DNA, 122 bp, Homo sapiens
tattctggccactttacagatgagaaaagtgaggccatagaggttagggaatgatgtgctcgaagtctagtgagtgctagagaggaattcacccaactccaaagccctcaactctaccccag

SEQ ID NO: 107120 - DNA, 122 bp, Homo sapiens
tccccacactgtcgctgacacgcccgcctgtcaaaggctccgaggcccagatgagcagggcgattttaaatgtcagatcctgccggccatccgcgaccgtcacctgtgcgtcttcagctcct

SEQ ID NO: 107121 - DNA, 122 bp, Homo sapiens
cttttgtggagttgtaccgtttgtttcttattgtctgagaagcagttaggagctttctcccggagggggcctctcaacccctggcttggcctcctctgacggggaggtaaccatattaggat

SEQ ID NO: 107122 - DNA, 122 bp, Homo sapiens
tttttcagtttaggccaaaatgcccacagggtggtggcgacgggggcggggcttggtgggcgggactgactaaggggcggggccagggtctcacaccctgcagtggatgcatggctgcgagc

SEQ ID NO: 107123 - DNA, 122 bp, Homo sapiens
gcccccagggcttggcacacagctggtgcttaggaagtgcttgctgactctgttctgtgacgttgcttaaatgcataatatttaaaagagggggctaaaataagtggccccttcagtcccag

SEQ ID NO: 107124 - DNA, 122 bp, Homo sapiens
cagactttaagctgtcagagaaccaggggtgggggtgcattagctccacaccccgccaagcgcagagccaggaacaatggaatactattataaagaccatgtgttgaagaccctgcatacag

SEQ ID NO: 107125 - DNA, 122 bp, Homo sapiens
ggtgcccctagacttctgcccgcagaagcgagcacagcgacgcctcctgtgcttcccggccggaaagagtaagcgtgcctttgttttcactcactgtgcgaccccacactcccatcgcccct

SEQ ID NO: 107126 - DNA, 122 bp, Homo sapiens
cctaggcaggagtgcctagtgcacgggtacatacataccccgtgcgtctccacacctgtgcgctcccacagatatgctcgcaatgcaggtgtaaggtccccctcacacctgcgcgcttccgc

SEQ ID NO: 107127 - DNA, 122 bp, Homo sapiens
gcggcctgagtcactgggcccggcgcggggtgggccgagccccccgcccggccagggccacgtggcccctacccggaagaaggcgcccacccccgcaaagggaaagccgcaagggcaagacc

SEQ ID NO: 107128 - DNA, 122 bp, Homo sapiens
acggagtttctccaaagttccagagaccctacttcggctccgggctgggaggccgcaccacgacctacccgttatcctcgttggaaacaagagcgacttggcccgctcccgggaggtatcac

SEQ ID NO: 107129 - DNA, 122 bp, Homo sapiens
tctgctgggcctgcagctgggagcacatttcaaaggccacgcaggccccgtaggagtagccggccacgcggtaggggccctcgggctgcacctgcctgatgcagtcgatgtagtaggcagcc

SEQ ID NO: 107130 - DNA, 122 bp, Homo sapiens
cacggggaagctgtaaggggaagtgagtgagaccaatcggagacgaatctctgccccgttcggcacgcctcccttaactgtcgcgaatgcaaaggcaactttacggcaggcagagggtgggg

SEQ ID NO: 107131 - DNA, 122 bp, Homo sapiens
gagtagagtcagcacttgacaagttagcacggttaaaatataatactagaactctgaggccgggcgcagagctgccctgtccgttccgggggtccatctccagcggggaagggcaggagagg

SEQ ID NO: 107132 - DNA, 122 bp, Homo sapiens
cctgggcaccgcgaggagagcttcccaggaacggtgacggcgacagccagggagcccacgcgactcctcagtaccagcaggccgcttctgctctgagatccacaggactggtgataaacggc

SEQ ID NO: 107133 - DNA, 122 bp, Homo sapiens
agaaccccacggccagggagggaggctccagggaacatatggctgtcaccatatgggagtcgagagggctgagaagacagacctccggggagagtatctgaggcttcctaaatgctcatacc

SEQ ID NO: 107134 - DNA, 122 bp, Homo sapiens
tcatcttcccaagagtcaattcttgcccctttgaaggtgatataacttctgttaggaaggcgtgttttagacttagaggtaagccattcttgggaatctacctaccaggataaagttgtcat

SEQ ID NO: 107135 - DNA, 122 bp, Homo sapiens
ctcacacggcttgcgggcctgcctggaagtcccacagcacagagagagccgtgttagcaccgcactgaccccagcccccggaggctgaagggggagcaaaccacccctgccctcaggccagg

SEQ ID NO: 107136 - DNA, 122 bp, Homo sapiens
atcaatccaaaactgaaaataaaagccttgagatgcagtttgctctgactttacaaaaatcgaattcctttctatataataattgaatttgaatctactcgagttatgtgaacacagctata

SEQ ID NO: 107137 - DNA, 122 bp, Homo sapiens
ggcgcagcccacccagacgctggtgggctggctttcctagtttgatgcgagagcaaactgcgttagtctcagtcctccctctccgcccctctcctggttttctgacactttaaatctgtctt

SEQ ID NO: 107138 - DNA, 122 bp, Homo sapiens
ttgatgttttcaacttttaggcccaggggtccatgtacaggttgctatataggtaaattgcgtgtcacgggggttgggtgcacagattgtttcgtcacccaggtactaagtggagcaccgga

SEQ ID NO: 107139 - DNA, 122 bp, Homo sapiens
gtgcacctaggggaagtaatcgcaatgggagtaaccaatgacgccatgaagcttctcgtgcgtgcttgaccctgcctctccagctgcgacacagatggcgcgcgggctcttgggttctgtag

SEQ ID NO: 107140 - DNA, 122 bp, Homo sapiens
caggtgaactcctccaccctgtccccgcccccgcccccacccccaaccaaaacaagcattcgttgtgggtggggactgcgactcctcccagattcagagctactgctctgggagggccgtca

SEQ ID NO: 107141 - DNA, 122 bp, Homo sapiens
tacaccaggggtttgccagggcctctcagatctttggccacaatctgaagattccactgtcggcttccccacttttgagatttggggactcacactggcttccttgctcctcaacttgtaga

SEQ ID NO: 107142 - DNA, 122 bp, Homo sapiens
gggaaggacagagggtaaaccagtgttcagctcagtgcccccattagcctccaacggagacgtcacggcggcacgggatccatgtggatccatgtcatgtggaaaatcctatctggagcaat

SEQ ID NO: 107143 - DNA, 122 bp, Homo sapiens
tggaccacccggaaatacctgtctaccgccaccaccgtgaggaatatgatgctgccctggcggttcatggcaaacatgaagagcaccagccggcaagggatgtccccaaacttccagtctga

SEQ ID NO: 107144 - DNA, 122 bp, Homo sapiens
ccggacctgcggctgctgggctgtgctgtgctggccccccggtgtgagggcggctgggtgcgcagaccctgccggcacatctgcgagggcctgcgggaggtctgccagcccgccttcgacgc

SEQ ID NO: 107145 - DNA, 122 bp, Homo sapiens
tttctctattttctcaacatcattgccaacacttcatgaggtctaaagatgttaagcttacggccgggcgcggtggctcatgcatgtaaatcccagcactttgggaggccaagatgggcgga

SEQ ID NO: 107146 - DNA, 122 bp, Homo sapiens
ttacaggctggagccagcgtgcctggcccctgacagagttctaagcatgtgggaagcatgcgaagtccacgcaagtccctgggctgggctgctagcctccctgcttggtacctggtggctgt

SEQ ID NO: 107147 - DNA, 122 bp, Homo sapiens
cctctgctctgccgctcccggtcctgggtgtgcgggagtcccgggggtccctctcctggacgcagaggaggaatttggagcaaaaggaagggaatttactgcggatggcaccggaacctgaa

SEQ ID NO: 107148 - DNA, 122 bp, Homo sapiens
cggtggccgggggtgggaggcggtgctccggcgagggccgggcgctgggtgcgagggggtcgccgggggccaccgttcggcactgggccgcagaccgttctgcagggcggagcggcggcgcc

SEQ ID NO: 107149 - DNA, 122 bp, Homo sapiens
tggggacagaagccttcaggaggtccacgagatccaccacatccctcgaccccggcccagcgctgcagggacttagaatgaactgccctccatctctcgatccagggtgaggagacgccccc

SEQ ID NO: 107150 - DNA, 122 bp, Homo sapiens
ttgtagagtgtgaaatataagtttaactaccaaataaggtctcccagggttagatgactgcgggaagcctttgatcccaacccccaaggctttgtatatttgatcatttgtgatctaaccct

SEQ ID NO: 107151 - DNA, 122 bp, Homo sapiens
ggcgtcaggcttcccagacagtcgtaaacgccatgtgtttacgcgactggagcaagcggacgccggccccgctccgtcattgcaggccacgcctccactgaaccagggccacgcccccgaga

SEQ ID NO: 107152 - DNA, 122 bp, Homo sapiens
gcggtaaaatgaaaaataagacattgctgatcatgttatagaactcggcgacagcaggcacgatggtgtagttgtcctcgcgccagtccacctccgagctgccagcctgcagctggtcccac

SEQ ID NO: 107153 - DNA, 122 bp, Homo sapiens
gcgggcgcggcgcccttgggcccgggtggctccgtgaggatctcctcaatcatgaagctgcgatagcggtgcggccggtggtccgcgcagccctcgggcgggccgaagcgcgcggcgcccgg

SEQ ID NO: 107154 - DNA, 122 bp, Homo sapiens
ccctgtggaggagaaaggcacatgagcagccaaagggacggacactcacacacacacacacgcacacactcactcctgcgcacacaggctgctccgcggacacgcttcacggagcaggtgtg

SEQ ID NO: 107155 - DNA, 122 bp, Homo sapiens
tttttttaaagtgttaaagttacttctacttctaacaaaaacagtaataggggcctgattcgccctcacaccttaagtaactaagggaaagaacaaaacacacaccctcacacatcacaggg

SEQ ID NO: 107156 - DNA, 122 bp, Homo sapiens
cagcctggtcaaacatagtgagacccctgtctctacgaaaaaaaaattttttttaattagcggggcatgctggcacacacctgtagtcctacctactagggaacctgaggcaggaggaccac

SEQ ID NO: 107157 - DNA, 122 bp, Homo sapiens
tgatctcatgattaaacggtgattcaatggctcttggaaactggcacctcagaataaactcgaaaacaccaagtgttccaaatgacatcatctttcaccaagatggctgcttttagcaaaca

SEQ ID NO: 107158 - DNA, 122 bp, Homo sapiens
cttgggccaagtgtgcgcagcgtggggtgtgtgtgctccagcggctcctgctgcggagggcggcatgaggcttgtttacctgtgtgctggcatctctggtggcccctgcaagggtggggaag

SEQ ID NO: 107159 - DNA, 122 bp, Homo sapiens
catggctgccgccactagcttcataaagccttaggtaactgatgccttttccagccccatcgtctccagcttcaggccctattcatctatcaaccccacaagcctgtcagcaagtggggcta

SEQ ID NO: 107160 - DNA, 122 bp, Homo sapiens
gtgcagttctgtttctatgcagggccaggcagcaggggatccgtggagacagaaagtgatcggggtgaccagggcgggtggagcagggagcagctgtgccatgggtggggggcttccttgtg

SEQ ID NO: 107161 - DNA, 122 bp, Homo sapiens
aaatatgtgtagttaagcagcagcccctgaccaggctagttgacactccaatgactcacccgggaacgtcttcttagcttttctttttacctttgtctttattcaacttcaaatcaaaacgc

SEQ ID NO: 107162 - DNA, 122 bp, Homo sapiens
gagcatcagctctgtcctccatgaagtgacgtggccctggtggtgacttggggactaaagcgtgaagtcagcagcagcccagacagacttcttagagcctttgcacctacctgggtaagttt

SEQ ID NO: 107163 - DNA, 122 bp, Homo sapiens
gcgctttcagcgcgtggttaggagcagaacttcccagtaggtcccaggaaaccaccttggcgctttgctcgcgcatcccttactgtatggaagtcggggccttttagggatttagattcgtg

SEQ ID NO: 107164 - DNA, 122 bp, Homo sapiens
tgggtatatggagttctcaggtgtcagtttctggggaagcgaactgtgggaaaaacatggcgttctcttggcttttgtagaatgtaggtcttcactgctgttcaaaattagggcctggggct

SEQ ID NO: 107165 - DNA, 122 bp, Homo sapiens
cccgggagttcaccttgtagttgaagccagggaatgtggtcaacctgagcaaaagcgccgcggagaccgagtggccgcctgcctccctccctggcagatgtcggttttctctgagcttctgg

SEQ ID NO: 107166 - DNA, 122 bp, Homo sapiens
tgcagcggcaacatccagcggatcagccaagccagtgagccggggtaccgagctggggggcgggagctgtcccggggacaggcctgggtgaggctgccgggacgcagggcccggctggggct

SEQ ID NO: 107167 - DNA, 122 bp, Homo sapiens
gcgggcggcctggcccggcagggagatgaggtcccctttcttaacagcaagctaacgcggcggtcccctggagctgctcagcgtcccagcttctaaccagctcctatggaatccaggtgcgg

SEQ ID NO: 107168 - DNA, 122 bp, Homo sapiens
gaagggtgggagaggtggtcatgaggattatgaactgacacgttcaatcacttaccacagcgcctggcagttaggggttccgtaagtgttggttattgctgggggtaaaggattgggggagg

SEQ ID NO: 107169 - DNA, 122 bp, Homo sapiens
aggtcgggcaagcagggccgcagagctcatagcggctgttggcagggcaggacagggctgcggggagatcagagagggtggatcaggcccgcgtagcaggggccgtcgaagagcgccctgtc

SEQ ID NO: 107170 - DNA, 122 bp, Homo sapiens
ccaggaactcccgcgggagggtcgggacggggcggggcttgggggcggggcggctcagcgcgcaggcgcggggccaggcgcctcgcgcggccaggggcgggcggccgcagagcagcaccggc

SEQ ID NO: 107171 - DNA, 122 bp, Homo sapiens
attggcgtcctgcacaccagtctcgttccaaaataatgcaggcgggggctggggtgggggcgctcctctcggactgaggctatgtctttcgctccttttgtcttttccaggcattagaactg

SEQ ID NO: 107172 - DNA, 122 bp, Homo sapiens
cccataaactcacgcagcagaaggaacaagctcagcccatggcccctcagagccaggaagcgccggggaggagggcagggccaggcagggtcatggggtgtgccggggagtgccgggagggc

SEQ ID NO: 107173 - DNA, 122 bp, Homo sapiens
gaaaccgcgggcggagggccgaagaagcagggcgggatcccagcctcaggtctgcatggacggtgtgccagtgaatctcttcaaaaaaggagaggtttgcttgtgtgcccatgagctgcact

SEQ ID NO: 107174 - DNA, 122 bp, Homo sapiens
aggcagggagcctcaaggtgcgcccagggagtggtgaatggaccagtttgactgctggggcgcaggatttgtcttgggaatcagggcagaaaggcaggtgtgggccagggctgggtaaacaa

SEQ ID NO: 107175 - DNA, 122 bp, Homo sapiens
actgaaacccagagcagaccaggagaaatgttggccgcagtgctttctcgtgaagtgatgcgtacttactggctgcaaagagaatatataatgttccaattaagaacttatcgccctgaaat

SEQ ID NO: 107176 - DNA, 122 bp, Homo sapiens
tgagtgttctgtgcctctagaaggatgcagactccgcttgaattggcagtctctccaagtcgtgaggaatatccatccagccatgtgccacgtgctgaattcatttttgtccatggaacagc

SEQ ID NO: 107177 - DNA, 122 bp, Homo sapiens
gaggttggttgtcttttcatatgttcagggccatttttatttcttcttttgtgagctctccgttcacatcctatgtccttgtttcgttttgttttgttttgcttttttctatggaagttctt

SEQ ID NO: 107178 - DNA, 122 bp, Homo sapiens
cggccttctgccagtaggggaggagtcgggggcggagcgggaggagtggcgcgggccccgcgtgggtcctgccagagatcacctcggccccttgaagaggcagccaagctgcggcggcgcag

SEQ ID NO: 107179 - DNA, 122 bp, Homo sapiens
ggcaggtaattggggtcttctgcaggggcatccaggagcagctttctgtggggaggggcccgtgttgagcacaggccagcacaggtccccatcggtggggatccttctgagggtggggagag

SEQ ID NO: 107180 - DNA, 122 bp, Homo sapiens
cccccgctcccccgtctcttcaaaatggatgaatcaaaccagccgaaaatgcgccaaagccgccgtgcaaccaaacccactagggtttgtgcgctcctccccaacacgcctgctcattggag

SEQ ID NO: 107181 - DNA, 122 bp, Homo sapiens
gtggccgtctgtgggggcctatgcgccttggccaccttcgaccggcagaagctgcagcgccgcctcatctccagcagctccttcaagttgttcttggagctggagccgcaggttggagacat

SEQ ID NO: 107182 - DNA, 122 bp, Homo sapiens
caccagcgcaatcttgttctcaaccaggatcccggacaaagacctagagatccaagccgacggcaggccaagctctggcccgagactgaggcttctgcttctcaggagatgagagtttaaca

SEQ ID NO: 107183 - DNA, 122 bp, Homo sapiens
attctaaaaacaaaagcatttaccctgataggaatcttcatgacctaggataaaataatccgcccatctcatgttataagaggacgtggatgtcaccttaaaaccgctcatacctcacagca

SEQ ID NO: 107184 - DNA, 122 bp, Homo sapiens
agctcaaggtggccaacagtgggctccaggtgcctctcaggtcattccacatctatctcacgacctgagccagtaaggggcatggataggacctcagacaggacttctgtgccaaccccaaa

SEQ ID NO: 107185 - DNA, 122 bp, Homo sapiens
caaggagttcaccacaggaccgcgccagggctgaaacgaagagtgcacgcaccgcccccacgcccgcacgtcgccacaccccttatgcgcatgcgcgcgtgagcaaaagtaacggtatgccc

SEQ ID NO: 107186 - DNA, 122 bp, Homo sapiens
cagtaagaatgaaagttgtctttatttcttacccatacaccaacagccgacgtctagccccgctgggaagggaccctagtccagggggtggtaagacatgctgtagattatccacaagcttt

SEQ ID NO: 107187 - DNA, 122 bp, Homo sapiens
cctctgctctccgctccaggcgctggcgcggcaaagagttggggcgcacgagtccgcttacggccaagtctcaaacttctggagactgcggatgccgcccgcgcttgcttgctggaggcctg

SEQ ID NO: 107188 - DNA, 122 bp, Homo sapiens
ccagaccttccaccccagccaatccacagcttagccttccctttcctgaggatgattggtcgatgagcctagcgatccaagccaagaccccaccctcacaccgcccccttcggttttccaac

SEQ ID NO: 107189 - DNA, 122 bp, Homo sapiens
gacatagggcaggaagaggggaggacaaacggggttcacatggggaccgtggcgatgacacggaagggacagccagttagagtctaggcccacttaggcgatgaagggcaggtgaagaaatc

SEQ ID NO: 107190 - DNA, 122 bp, Homo sapiens
gtgtgagcttccaggatctctccgctgcgacttcgggtgttagggtttttgggctctttccgggacccaagttccagggcaagaaggtctgctcggcggcccgcctcggggccccgcccact

SEQ ID NO: 107191 - DNA, 122 bp, Homo sapiens
cggtgggcaacctggttctcttccctgagagtttggaggtcggctccctgctctggccagcgtgttaggaacctgaccctgtggaaccgcactcctgcgccatctctgtcctcccgcctctc

SEQ ID NO: 107192 - DNA, 122 bp, Homo sapiens
ttctgttcagtggtcatgtgtaggtagcttgaaattgaccatggtgggatatttacatcacggaaatcagcaaatcctacagataaagaacattttcctccggaagtgccagttgttaaaca

SEQ ID NO: 107193 - DNA, 122 bp, Homo sapiens
cagtgcagggtcattctaggtgtcctggcttggcaggctcagggcaggacctgagagtgacgccgggagaatctagggagctggggcccatctgaggctgcccaaaacattctaaatctgcc

SEQ ID NO: 107194 - DNA, 122 bp, Homo sapiens
aaaatcccagttgtgccacacctaactgtgttaccctggacaagtcacttctctctattccgcatctataacacaggagttagttaatgtgcatatggctcttagaacagtgcccagcacat

SEQ ID NO: 107195 - DNA, 122 bp, Homo sapiens
cgtcacctgatggagaagctggctgctccggggtctctgtgtgtgggaagatgtgttcatcgtcacctgatggagaagctggctgctccggggcctctgtgtgtgtgggaagatgtgttcat

SEQ ID NO: 107196 - DNA, 122 bp, Homo sapiens
acagcatttggattcgcgaagctgtgcacacgtcatttttatcgcaaaaatgaaacctgccggtgccgttttaaacagcagagttggctcagtgtcccctcagtgctttctttggctttttc

SEQ ID NO: 107197 - DNA, 122 bp, Homo sapiens
ggtgtccccagcagggcagcctgcgagaagcgctgagtcatggcaggagatcatccgagccggcgtgtgaggaggaggaggaagagcgagtcctggcagcgctgctggtggcggagcggggg

SEQ ID NO: 107198 - DNA, 122 bp, Homo sapiens
gacatcgaagccgaagccattgctgccagggtacgaggaatagcctccgaagagagcagccgcggcgttgtcgtagtaggtggctttctgcatcgctgggtgaggcctgggcagtgggtggc

SEQ ID NO: 107199 - DNA, 122 bp, Homo sapiens
gagggcgcatcccgggcgcgcgggcagcggggctcgacggccgcccgagcaaggcagaggcgctctgggtcccagttgttggtttcagggtggtgggttctcagcgatcctcagagagggag

SEQ ID NO: 107200 - DNA, 122 bp, Homo sapiens
agaactcctgacctcaggtgacctgcccgcctcggcctcccaaagtgctgggattacaggcgtgagcccccgcacctggccctaaatgttttaatagactttagcccataattaaacctcct

SEQ ID NO: 107201 - DNA, 122 bp, Homo sapiens
accagcacgttatagaaaggctggtggtggccgtgcggcaggctgtggacgttcatgttccggatccactcgtgtcccatcatgcaggtggggtcccagccgtagatcacacagttatagcc

SEQ ID NO: 107202 - DNA, 122 bp, Homo sapiens
aggatgtgggtctgcaggaggggcctgggttgcgggagctggagtggacagctgaggcaccgcctcgccgggatggtgacgtctggagcaggggtacccaccgctgctgacgtgagctgatg

SEQ ID NO: 107203 - DNA, 122 bp, Homo sapiens
cctctcaagtggggaccccacacgatcacgtctgccaatgcagggcggccttgaattaggcgaggctcaatctaacgaaaaagaaagcggtggggaggtgaagggatcccaaaaagccctcg

SEQ ID NO: 107204 - DNA, 122 bp, Homo sapiens
gagcgctatgtgaccgagggccgaggtgcccgctgcaatgttatcatcacccaacctcgccgcatctctgctgtgtctgtggcacagcgggtcagccacgaactgggcccctccctgcgccg

SEQ ID NO: 107205 - DNA, 122 bp, Homo sapiens
ggcaggccccggtgcagccgcgccccggccgaaccctacatgtcctctgtactgtggacacgagtccgcggagcgccagtcacacccccgcacccctgcaagctcccgccgtagagggggct

SEQ ID NO: 107206 - DNA, 122 bp, Homo sapiens
cgcccccgcggcgcgagcccgggcctgagctgggacttgggccccggggcgctgctcctccgcaaccgatccaccgcatcctggcaactgagcaggctccgccacccctagagcacaggggc

SEQ ID NO: 107207 - DNA, 122 bp, Homo sapiens
ggttagaattctcgggggtcataggagaatcttaaacccacaagccagcagcaagcaccccgtcttcaggccctttgtgcaaagctgaggcttcagggaaccccaaaacgcaatccatgccc

SEQ ID NO: 107208 - DNA, 122 bp, Homo sapiens
cagggttctatctgcgcgatgattgatgcgggcccgggtttttctgtcagcctgtcacggcgcaggaatgtttaatgttctcattattggttacgctgttgtgtatatttctctgtcagcac

SEQ ID NO: 107209 - DNA, 122 bp, Homo sapiens
ggcccctgtaccaacgccgtagatcgatttctattttttcctttcttctgtaaacagtggcgcagggcaggtctgcccggatggctggcccacaggcccgccccagaatccctgatcgtcta

SEQ ID NO: 107210 - DNA, 122 bp, Homo sapiens
tcagccaaagctgatctctttccaggcaaaacaaaaagtataaacactttgaattttaatcgcagagcagtattacctaagtaattatacaatttcccttaagtttaaaacaaaatagcttg

SEQ ID NO: 107211 - DNA, 122 bp, Homo sapiens
cactttgggaggccgaggcgggtgaatcacttgagttcgagactagcctgggcaacatggcgaaaccccatttctactaaaaatacaaaaattcgccaggcatggtgacaggcacctgtagt

SEQ ID NO: 107212 - DNA, 122 bp, Homo sapiens
tgtgcccaggaggtcgaggctgcagtgaactgtgatcgcgccactgcactgcagtctgagcgacaaagcaagaccctgactctaaaaaaagaaaggaaaagagaaaggaaagaaggaggaag

SEQ ID NO: 107213 - DNA, 122 bp, Homo sapiens
gccgtcttgagacggggctggcgagaagggcccctcacggagttgccatgggcgtctaaccgcggcagccaggcccctctctacgtgagaccccggcccccctcccctttctgcagcccgcc

SEQ ID NO: 107214 - DNA, 122 bp, Homo sapiens
aggagccctcccggcctcagagcaggtgcccttgccggctcaacaggtggcctggtcctgcgctttctcccggggccaacggaacattttaatgacggggatttgaggcacctcaggcagcc

SEQ ID NO: 107215 - DNA, 122 bp, Homo sapiens
gtaaggagtgggatttaataaaaatttgttggatgagtaattgaaagaatgaatccatggcgatagattcagctgcacctgaacatgagcagagtcataaatttactttaatcaagtgctag

SEQ ID NO: 107216 - DNA, 122 bp, Homo sapiens
ttgtgactctgctagctctcagtcttccctctgtcccgtatgtactgaaattccatgatgcgcattggtgtgagtctttcatctgttgtgctggatatttagggtggccctttcaaaatgga

SEQ ID NO: 107217 - DNA, 122 bp, Homo sapiens
cagcagtgattccaaggcatagtgtgggggggccagatataaatagcagaacacaagtagcgtagtgtgccactgccaagctactgctgggggtgtttataaaaagaaaagcattcctgtct

SEQ ID NO: 107218 - DNA, 122 bp, Homo sapiens
cgggaacgctgccgtggtagccaataagaagacagaatgccgttgcactacgctagagggcgggaggaggcggagaggaaaccaaggagtgaacggggatcgggcggcccaatgaggagggc

SEQ ID NO: 107219 - DNA, 122 bp, Homo sapiens
gagtctgggttggaggaagtcacctggtgtccgcagaggcgcggccaggttctgcacaggcgctgtcccgctgggcactgtcctcttcctccaggcctcctcccggggagaaaggggactgg

SEQ ID NO: 107220 - DNA, 122 bp, Homo sapiens
ctcactatcctcactccatccgcggagccaatggctgggaccgccaggagctcgttcgcgcgagtcacacgatgtcggcaactgcacagaccaatcaccgcgccgagaaggcggggcgggag

SEQ ID NO: 107221 - DNA, 122 bp, Homo sapiens
ctgaagcacacagataggaagtcacctggccaagattacacggccagggaatggtggggccgcactttggatctgatcagtctgactccagaataatctcacccgccacacggcacagcctc

SEQ ID NO: 107222 - DNA, 122 bp, Homo sapiens
ggggaggagtccaattagtggactagcccaagactgaaacagctgattttcgagaacccgcgcgtgagccccggaaccgaaactagcttgaggagcctggagacgccaagggctccatggga

SEQ ID NO: 107223 - DNA, 122 bp, Homo sapiens
tggactcttttctgaacacaggatatgaacaattctctcagagatgcacccagacccacccggcttctgcctgcgggcagcacttccgagctgcaaactcccgcccggtcaccaggagaaaa

SEQ ID NO: 107224 - DNA, 122 bp, Homo sapiens
ccccgtcccgcccctccggactgcccgcgccgccgccggtcacctcctcgcagctgagcgcgtcctcccagggctgcccgagcgctggattccagcgagtgccacccacgtgtaaacatcct

SEQ ID NO: 107225 - DNA, 122 bp, Homo sapiens
acggagtcgggccgctgggcgcctccgggatcgctctcactttgcactcggaagcgggcgcggggattcgggctgccgcgtgtagcctataaatagcaaactttttgaccgaagcaactaac

SEQ ID NO: 107226 - DNA, 122 bp, Homo sapiens
tgttggcaagtgttatctgtaaggaccgtagtgaataagctgggcttgggcttgccagaccggaaggtatctgtcacaataggtgtgactgtatgtaataaaaccttatgggcagggcatgg

SEQ ID NO: 107227 - DNA, 122 bp, Homo sapiens
ttcttttactgtttaatgcttttaacattaacccacaccccgctgaccccatttcttcaccgccacttctgcctctgttgaccaaggacatccaggcggtcatactccaggaagcagtagac

SEQ ID NO: 107228 - DNA, 122 bp, Homo sapiens
atgctggccagcagcgtacctttccaagtcacaaagcagttcatcccgccctcaaggagccgacagggcagcccagagcctcccactgacaagtgtggtcacccactcaagatactgggaaa

SEQ ID NO: 107229 - DNA, 122 bp, Homo sapiens
gttcccgagtgctgtcactggagggcgatgtctccaaacagtctctttccccactgggaacggcgccgcccgagggttcaggtcaagcacgagtttccaaattcattcaattagtagggcaa

SEQ ID NO: 107230 - DNA, 122 bp, Homo sapiens
gggcggccccgcccctgctgggatccaggccaacgctccacaaatgagagagcttgagcgcgcggcgggcgccgctgggagaggccacacggtggcgctagcgcccagcctggccagcacca

SEQ ID NO: 107231 - DNA, 122 bp, Homo sapiens
gcctgcgccggtcgcagccccaagtccattgcatccttcatcaaccgccggtcttgtacccgtctgacagaaatttaattcaggctggctcctgaaaataattattgtattttaagagtagt

SEQ ID NO: 107232 - DNA, 122 bp, Homo sapiens
agtgtctgttattgccaaattcctcattcaaacccatatataagaatgctttaactgaaacgcagaagtcaaaaataagacatttaaacagtaatctcctgtctctcttaaagataaatgtg

SEQ ID NO: 107233 - DNA, 122 bp, Homo sapiens
cgcagatgcccctccatccggagtgggccttgcccggggttctgttgccgagtccagattcgcagctgtcttttcctctagagtcaggagaatttctggatttgcgggcgccttctcccctg

SEQ ID NO: 107234 - DNA, 122 bp, Homo sapiens
tttcaatctataacagctgcaagaacaactcttctttccaagccagctctcctaaattcccgttgttagagttggtatctatatttagctagtgggattaaattgcaaaggcttcaagctgg

SEQ ID NO: 107235 - DNA, 122 bp, Homo sapiens
ttgatatgcttgtttttctgttgatttgtaatacttttttccggatatgtgtcctttctacgatatatatgtattgcatttcccttttttcaatctgtagcttgccttttcgctcttttaat

SEQ ID NO: 107236 - DNA, 122 bp, Homo sapiens
ctgggactgacagcagggaagccgagtttccacagttagttctgacactgactctttgatcgggggcacatctctgtaacctctgagcctccgtgtgttttctcaacgttgtggtggaaaag

SEQ ID NO: 107237 - DNA, 122 bp, Homo sapiens
tttcttgtgaagttctgggtaagcctgtgataaccccttctttcctgccaccagcgtgtccgtggtagtgagaacggggcgagagtgcccagagtgtgcccttgtcacagtagaaacttggg

SEQ ID NO: 107238 - DNA, 122 bp, Homo sapiens
ccattctaggtttacccagttgtactgtgttgtttgtcataggccgggtgaggtggctcacgtctgtaatcctagcaatttgggaggcgaaggcgggtggatcgcctgaggtcaggagttcg

SEQ ID NO: 107239 - DNA, 122 bp, Homo sapiens
gccaggtccacggaagtggtccttgtaactctctccctggtggcagcctctggtgcattccggcaggggcagcccctcctcatcacagggaccctgtgtgccaggccccagctgcgttgccg

SEQ ID NO: 107240 - DNA, 122 bp, Homo sapiens
atcgctggaggcgtggagccctgttgcactcgaataatggcctctctttgagatgattcacgtctagggaacactggaaaatgctggattcacagtgcccctttgccttcgaaaaactttta

SEQ ID NO: 107241 - DNA, 122 bp, Homo sapiens
gcaacaaaagacaagcccgggcaaggccagcgggagctctgccggccagagttgctgatgcgaggcgatgcacgggtgtggggagggtgtttcagggctgcagggaagtgggaggccccaac

SEQ ID NO: 107242 - DNA, 122 bp, Homo sapiens
gcctgcactcctcagccgttgggttgtcgatgggactgggcgcagtggagcaggggatggcgctcgtcgaggaggctcgggccgcacaggagcccacggagagggtgggaggctcaggcatg

SEQ ID NO: 107243 - DNA, 122 bp, Homo sapiens
gccaccgagcgcagggcttgtgggtcgtcacagcataattcagccttgagccacgagacacggagccgacaggtgtgtagctgagccatcctcccccacctgtcagtcaccattcttccacc

SEQ ID NO: 107244 - DNA, 122 bp, Homo sapiens
tcccccagccatgccaccatccagggctcagaagactggattaccagctgccagcccacacggtgggctcagcagggcctgtgcccttgacctctgggggtcaggctccccatctgtcaaac

SEQ ID NO: 107245 - DNA, 122 bp, Homo sapiens
catcccgcccttcgcatttcattcattcgctgcaagcagctggagcttggcaagctgacccgcgcaagggagggctgcactccctcagctgtaattaaaatctttccaagattgtttgcctt

SEQ ID NO: 107246 - DNA, 122 bp, Homo sapiens
tttctcttttatccataattattggacttatttaaaactaaaaaattttttcgccatgcacggtggctcacgcctgtaatcccaactttgggaggctaaggcgggcggatcacaaggtcagg

SEQ ID NO: 107247 - DNA, 122 bp, Homo sapiens
gggtctcctgcagctcgtagcggtgcttcaagttgtgcttgtggtgatgccgcttcaccccgtgcggcttcctgggctccagggctgcagtcgcccccgccaccgcctctcggggagagccc

SEQ ID NO: 107248 - DNA, 122 bp, Homo sapiens
ccgcccactcattcacgcttgagttgtacctccacacgcagtcatagagccgggagccatcggacccacctgccaggacgcatgacaggcagaagatcagcccactcaggtgagtcacccac

SEQ ID NO: 107249 - DNA, 122 bp, Homo sapiens
aactcccttctctaattggtcaaggggtgtggtcaccatgcgcgtcaccgaacaacattacgagttattggttgagattggaagcaggtttcgccaataggaagcgctcttaaagcggcagt

SEQ ID NO: 107250 - DNA, 122 bp, Homo sapiens
gggctgtgggaggcatccaatcagacaggccgccgctgagggccaggggaggagggctgccggggttttatttcagattcgagctaagaccatgaaatggaaggcaggaggaaaagtgagtg

SEQ ID NO: 107251 - DNA, 122 bp, Homo sapiens
ggacgtctgcatttcttcaatatttggcttgggaagcattggccagaactcacagcacagcgggtgaggaaggagcagtgggatgagacagagcatgacccagagtcctcaggaggaacaga

SEQ ID NO: 107252 - DNA, 122 bp, Homo sapiens
gggggcgtggacacgctgaggctatactacaaagccccgggcttgaccttagtggaaagccgagactgcgtccaggttgctggactacaccgggggcacggtcagaggtctttaggggaggg

SEQ ID NO: 107253 - DNA, 122 bp, Homo sapiens
cggaatggccacggaatggtcagacaccccgtcactcctggctggtgggcggggccagggcgcctgggggcggcgaattggcggatggggcctcgggggcggggcagcggctcctgtcagcg

SEQ ID NO: 107254 - DNA, 122 bp, Homo sapiens
gttgaaaagaacaggactttaggaaatcccaatctttagaaagagccagaagaccgggcgcggtggctcacgcctgtaatcccagcactttgggaggccgaggcgggcggatcacctgagat

SEQ ID NO: 107255 - DNA, 122 bp, Homo sapiens
gggagcctgttcagaaatttctcagcagtcatcctggagcctacaggcagagttgggaaccggggcccaggaaggactatgagtggtggtggagcccccctggagtttgttctgcagtcccc

SEQ ID NO: 107256 - DNA, 122 bp, Homo sapiens
ggagctgctcaccattcaccaggcgctggagcaggccgtgaggccgccagacgcacccctcgacctctctgtgaaacgtgcgcccgccaaggggccccaggctcttggagaggcgtgggggc

SEQ ID NO: 107257 - DNA, 122 bp, Homo sapiens
cagggcctgacaccagcatgtgctccgccagcagcagcgtggtgacatcatcatcgtcatcgtcaccatcctcaactggggagtttgcatctgactcaaagtcgaactcgccctctggaagc

SEQ ID NO: 107258 - DNA, 122 bp, Homo sapiens
gacatctgtctgtccctggaacagcctgatgtgggcagatggtcgtggaggctgaaaacccgggtgttggccttggcgtcaaagtttgctggttgagtgacctacgcaagttaagccctctg

SEQ ID NO: 107259 - DNA, 122 bp, Homo sapiens
cccaacactgcggtgggggtgcgggagccgtccgagcgcgtcctgcaccgcgaggagagccgggcctccctagctctcgcaagcccaggaacacagtccgagtcctacaactccgaggtctg

SEQ ID NO: 107260 - DNA, 122 bp, Homo sapiens
ggggcacaggttgtgagaggtgcccgggacggcttgtggggcacaggttgtgaggatgcccgggatggcttgtggggcacaggttgtgagaggtgcctgggacggcttgtggggcacaggct

SEQ ID NO: 107261 - DNA, 122 bp, Homo sapiens
actcccctcatgatgacatgatcttgcaccagtgttttatatatatatacacacacacaccgagtcactggcctaacctgtttagtctcctggagaatttaagtggcagcaggggagagctg

SEQ ID NO: 107262 - DNA, 122 bp, Homo sapiens
ggggcaacgcaaagatgtacgtgcaaaatgaaacaggctccccagaactgacgagggactcggtttgggaatcatcgcctcggggcctcgggaatcaacccgatacccgggattgtggattc

SEQ ID NO: 107263 - DNA, 122 bp, Homo sapiens
ttcactctgggcatgtgaccaaaaattggcccaattaagcatctacacattggctgtttacgggccaaatcatcactgggcagaactaggccatagggtgcaaaatatagaaaaaagtggcc

SEQ ID NO: 107264 - DNA, 122 bp, Homo sapiens
gagtttagtaacttgcataaaaccacacaactatttaatcttctttattcctcaggaacacggcctcaagaacaaccaagcacttgatacagagttaactctaactcatatgaaccaatcag

SEQ ID NO: 107265 - DNA, 122 bp, Homo sapiens
atactgaggccacaaaaagctctgctgttttttttttctcgtggtctttctcaattccaacgtggtacacaggtacctggcgtgtgtctgctcagacagtggatggcccttgttcaaagact

SEQ ID NO: 107266 - DNA, 122 bp, Homo sapiens
atggatacctcgcaaagcctgacactagtttctggataaaatgcaggcgatggctgctggcggatgccggcagacacactcaaagacccttttggactttccgagtttcccattctcctcta

SEQ ID NO: 107267 - DNA, 122 bp, Homo sapiens
tctccctactagaatgtaaattcctccatgacaaggaggtttgtttatcttttttgttcacggattatttttcccaggaactgcctgttgcattgtaggcacccagtaaatagctattgaat

SEQ ID NO: 107268 - DNA, 122 bp, Homo sapiens
aatacatattttcttcaaatatctaattcaaaggacaaatggagaaaataaagttttgaacggtaagaagagagggtttaagttggtatagaaaagtatttcctggctgggcacagtggctc

SEQ ID NO: 107269 - DNA, 122 bp, Homo sapiens
ggggaagctgggaaagacgaagtgggaggaagtgcagttcgcccccctccaggagtttggcgtggttttgtaagcgcacggttgggccctgtcctctgctcagtctccccgaccttcccctc

SEQ ID NO: 107270 - DNA, 122 bp, Homo sapiens
cggcgcgggaggagcgctgactccgcgggccgagccctcccctgccctcctctgctcctccgtaactcctgagctgtggcctgcctttctgctgcctccacgtccctactcttcctttctgc

SEQ ID NO: 107271 - DNA, 122 bp, Homo sapiens
aggcagggagcggaaccgtcttcaggaaatttcgggagttccggggtcaggtccactccccggctgttgttgtgttgttggcagggcagagggtctaggatgccagcctgctccgggctgcg

SEQ ID NO: 107272 - DNA, 122 bp, Homo sapiens
ggaggacgtcagtggcatcgcctcctgcgtcttcaccaaatatggccaaggtgtttgagccgggctgggtgggtgtcggggccccgggcactgcacggacgggaagggtggccaggggtgtt

SEQ ID NO: 107273 - DNA, 122 bp, Homo sapiens
aggcgcaggatggacgcgttggctgtcatgatgtaggacctcctgacctagaaccatgcccggcgcagggagaacaacgagcttacggaccgggtgcgggggctgctgtgcgagaaagccta

SEQ ID NO: 107274 - DNA, 122 bp, Homo sapiens
gtattttctgtataatcgtgtgtgtgtgtgtgtgtgtgtgtgtgcgtgtgtgtgtgcgcgcgcgcgttacactgtgcctgcccagcacataggcagccgtccttaaatgcttgcaaagtatt

SEQ ID NO: 107275 - DNA, 122 bp, Homo sapiens
tataatctacgtctaggatgtagatttgtattgtattcatttttacaactgaggtaattacggctcaaggaattttaaccaatttgccaagatttcttaacatatttcggtagtgccagaac

SEQ ID NO: 107276 - DNA, 122 bp, Homo sapiens
gagcctgttcagtctcctcttctgaatacgagggcttgcaggagggaccaacacaaaattcgtttccgggcacacggacgcctgaggtaagagggccggggtcggggaaggcaaagaggagc

SEQ ID NO: 107277 - DNA, 122 bp, Homo sapiens
ccactgcagagtccgaagccccgagtgctccctgggaagaggagagccgaggacactcttcgcccctgcttgccactgggggccgcagtcaccttcagcataggggagtggggagacgcgaa

SEQ ID NO: 107278 - DNA, 122 bp, Homo sapiens
tgagtgtgttaatgggtcaacagacagacttcaagatccaccacctggtgcatccaagcccgctgtttctcacataggcccgaaagtctcacataggcccgaaagaaggatcacaccctcat

SEQ ID NO: 107279 - DNA, 122 bp, Homo sapiens
gccaaggccagcttgctgcggggatgctcagcaagttccttagcctgcagggacctcttccggggaggactgaagtctttctaacaattctcacccccgtgggcagccggccttccgggtag

SEQ ID NO: 107280 - DNA, 122 bp, Homo sapiens
gagacaaagataatgcatctacattttcgtcttctgttcttttattggaaataagtggcacgccccattgccttctagtcgcctccccgaagcgaagaggccgaagcgaagaggcctggtgg

SEQ ID NO: 107281 - DNA, 122 bp, Homo sapiens
aagcaggctttgacctgaagcgtcatccaggggcaatatggaggcagccatacctaaaaccgttgtgaagaaagctacacaaagggtgatctgaaataacctttgcgtggcttcttaagcct

SEQ ID NO: 107282 - DNA, 122 bp, Homo sapiens
gcccaggagttccttctgtcccggctctgttccgtctcgccccgaggttcacgccatcctcggagccccagcctttcacccagcgcctccaagctttggaccttgacttctgcaaaactaga

SEQ ID NO: 107283 - DNA, 122 bp, Homo sapiens
tctttggcaatgctgtttaaaaacaaagttactattacacacagcccaggatattgacttcgcattgcacataaatacatttatataatactttttctttaatatagaagccatagccttga

SEQ ID NO: 107284 - DNA, 122 bp, Homo sapiens
gcctcataaccccggctgtcctgtggctgcactgtgacgccacacagggcccacacagggcgcccgcacacgggacgtgcacacagtacattcacagagcacttagtgacagacggcaggtt

SEQ ID NO: 107285 - DNA, 122 bp, Homo sapiens
cagaggaaacttctgcccggccgtggctttccatcccccacctgccccaccccctgcaaacgccactgattaacttaaaacaaactcggctgcgtgtttgtgcgccgttgggtagcaggagg

SEQ ID NO: 107286 - DNA, 122 bp, Homo sapiens
tccccacccctaacccttcgcaggaaagcccaaccttgcaggtgtataaataggcactctcgaagcttcgtgctgtagcctggccctccctctttccaaaatggacaagtccctcttgctgg

SEQ ID NO: 107287 - DNA, 122 bp, Homo sapiens
gctgggcccttagccttatggttcaccctgttttttaagatcatccacgggcttcattcccgtaaccgctcttctagctggccaaggcggcgggaagaaaccccaccctcttgcgcaaacgc

SEQ ID NO: 107288 - DNA, 122 bp, Homo sapiens
tcagcttgtttcatcttgctgttttagaaagaaagcgctttatacactgtaagctagtaacgtcaacaaaaacgatacgagattgaagggctttgtcctcattcaaaatctggaaatgttat

SEQ ID NO: 107289 - DNA, 122 bp, Homo sapiens
cggttgtgagaacttggtgggggggcccctttccttccttcacgtggatgagggcagagccgtttcggcggatgcttggaggccacgggcccctcgcgtaccccttttcctttttgctgatt

SEQ ID NO: 107290 - DNA, 122 bp, Homo sapiens
ggaagggtgggcctcacgtggagcgggagaactgggagctgcgcgtgcgcagactggagccggttcattcataaagaaacagaaaggaacccggggtcctaaaggcgtttgcgcatttacag

SEQ ID NO: 107291 - DNA, 122 bp, Homo sapiens
cgaactcctgacctcaggtgatctgcccacctcggcctcccaaagtgctgggattacaggcgtgagccaccacgcccagccgagagtactaatttatcaagaaaaaaaagctggccactggg

SEQ ID NO: 107292 - DNA, 122 bp, Homo sapiens
gagagagaaagagacagagaaagaggtttctgtaagtagcccggacaatgagaacaagaccggctgtatgccaagcacgggatcccggccaaaacacatatcattagcttggaccagctata

SEQ ID NO: 107293 - DNA, 122 bp, Homo sapiens
gctggaaaggccctttggagataatctcaccaccctccgtgggcgggaaagaaaaacaaacgggagccgtctgagatttatgactcttacctgcggcggagatcctctgccaccgctgcccg

SEQ ID NO: 107294 - DNA, 122 bp, Homo sapiens
caatcaggcgggccgggctcggaaatagtgggcatgggtccctgaggcgcggggattggccgctctgtgtcatgtgtcctcggctcgggccaaccagcgagggaggcaaagtcccatcccgc

SEQ ID NO: 107295 - DNA, 122 bp, Homo sapiens
attgctaaataaaatgatttgtgagaagtacttagcatagggaacatagtgatgtatctccgccttgccagcgttcagacgggcaagatttcccactgagtgccctgttcccgtgtttaggt

SEQ ID NO: 107296 - DNA, 122 bp, Homo sapiens
aagttgtatgtgcatggtgtctacactcacggtgttgtgtgtgcatggtgtctacatgcacggtgttgtgtgtgcatggtgtctacatgcacggtgttgtgtgtgtatggtgtctacatgca

SEQ ID NO: 107297 - DNA, 122 bp, Homo sapiens
ctaccccaagcgcagcgccggggaggccttcatcatctgcggcacgctgtacgtcaccaacggctactcagggggtaccaaggtccactatgcataccagaccaatgcctccacctatgaat

SEQ ID NO: 107298 - DNA, 122 bp, Homo sapiens
agagccttctcagccttgcatcttctaagtgtctggagaatgcagggagggctgccttggcgtttgctcactaggtctctccttcccgcgccttgaagtgttaatcactgtcccagctagca

SEQ ID NO: 107299 - DNA, 122 bp, Homo sapiens
tcaatcatccagctttgcccttgaggaagaagcagccatacacagtctgtaaacaaaggacggggctgtgttccaggcaaactttgttgtttacaaaaacaggcggcaggctggggttggtg

SEQ ID NO: 107300 - DNA, 122 bp, Homo sapiens
aggcatagattccgcttgcgcaatacgtggtaagaaaccagctgtgaggggctggcccaacgcagagcggcgcgaggtccgcttggcatctacaacaatcgaggggctagtccagaagttca

SEQ ID NO: 107301 - DNA, 122 bp, Homo sapiens
gacccaggcaggtaagaggctggtacaacaggaagctctcctgagggcgttatggcatctcgctgaagaggaactcctacccacagctcagttgtgtgatgtggggaggtgggtgcactttc

SEQ ID NO: 107302 - DNA, 122 bp, Homo sapiens
tggccagggtctccaatttaggctttcaacattatctctaaagaaggttatacattatgtcggctccactggctgatgggatcaaagaccctccttgtatatccttaaacctgtactctatt

SEQ ID NO: 107303 - DNA, 122 bp, Homo sapiens
ccggaacctccgcgaaggttctaggcctttgtggcgtcaccgtctccttgcggaagcttccgccggcgccgaataaaacccgccgcggaggagccggtggctctagtgcggtggagccaggc

SEQ ID NO: 107304 - DNA, 122 bp, Homo sapiens
attttcctgcccaagggaatcaccgacccggagggtgtattgccgcctgacaacggcccacgtgtgcccagcactgggctgcctctcgcatttggcagccgggtcctgctggcgcctctgcc

SEQ ID NO: 107305 - DNA, 122 bp, Homo sapiens
tgtgtggggagggcctggggagcgcctccccagccgggcagcgcttccccagccaggccccgcagctggaccccggctccgtccagcctgggaaaggactccacggtttatgctgaagtggt

SEQ ID NO: 107306 - DNA, 122 bp, Homo sapiens
gtcccaggcaggcgctggggatgcctggagccctcctctgcccctgaagcccttctagggcggcgacaggggtctggttctccacccacctgccttgcccaaggcccccggtgccacccctg

SEQ ID NO: 107307 - DNA, 122 bp, Homo sapiens
tggccggtagcaccataaaggccataatttggtgtgtgggtgtgggggtgtgtgtgttaacggcattggtttgattcacacttctgatgaaagaagcctgtttaaaaaagaaaagaaaaaag

SEQ ID NO: 107308 - DNA, 122 bp, Homo sapiens
catccgtgtgagtgctgggggtgggactgtggggaagaggaagggagactctgtgccacacgggacctctgtgtgactttgttcatctgatagtttggttgttctgcacactctttgaccgt

SEQ ID NO: 107309 - DNA, 122 bp, Homo sapiens
ctggacgaagcttaagaggagatacagagagtacacgaacccggtcctcatactaacccacgggttacaaactcggttgtgctgtagatttgtagaaaatcgtgttgtgaaagaatggcact

SEQ ID NO: 107310 - DNA, 122 bp, Homo sapiens
ggaccaccctacacagagaaggcccagcctctgagatcccctcccccagcccctgcccaccgcactcctgaaacagatctgccaggatgctcatcttcatgactatgggacaagaaggggga

SEQ ID NO: 107311 - DNA, 122 bp, Homo sapiens
ctcagctctgcgcactgcctgcctagtgctgttaatggcggcagggtggctgggtgaggccggtgactgctggctttctcacacttcctgacaatctgcatgactcagcagaggcagccata

SEQ ID NO: 107312 - DNA, 122 bp, Homo sapiens
ttcctgtcttgcagattgttgatggagtcgtgcagagtatcaagctcatcaccgagggggcgagcaagcgcattgctgagtttgcctttgagtatgcccggaacaaccaccggagcaacgtc

SEQ ID NO: 107313 - DNA, 122 bp, Homo sapiens
tccccagtttcctggcgatgagccatttattgtgtctcacaccagcctcatttccaactccgacttcctacttagaatgtggcagtggctttgtgagtgagaatcctgatgagttttccagt

SEQ ID NO: 107314 - DNA, 122 bp, Homo sapiens
aagaaccatgcaagccgcgcgtgactgggcgtaatgcattcacaggttctcccctggacccggcctccaccaccgccccagctccatgggccgcagccttggctcctggtaataggccgctt

SEQ ID NO: 107315 - DNA, 122 bp, Homo sapiens
gttagctgggcaggagcctcctgcttcccaggtgaagctgcagccacccagctgtgtgtgcggacccgggcatttctgtgctcttgggggccagggacaggcagggtccccgcctcctgggg

SEQ ID NO: 107316 - DNA, 122 bp, Homo sapiens
gtaaggctcaatttcttcaaaggtcaagcctgctcgcccgagcactgtttccccctcgtccgcttggtgtcctactggtgctgagccccacccatcctccgagatcccaacttcatctccga

SEQ ID NO: 107317 - DNA, 122 bp, Homo sapiens
aatcattgatttggattgactaacctttatgaaccttctctccacttaaagccttggtgacgcccattaaagtgaatttatcacagctcttaaaactattcaaactctggagatgcccttcc

SEQ ID NO: 107318 - DNA, 122 bp, Homo sapiens
taaatactccttgctgattgaacggcaaccagctgcaagagtgaatgcatggatgccgctcgtgggcctgggtttggagatcttagaaacaaagcttccttttgccacactcatgccttctt

SEQ ID NO: 107319 - DNA, 122 bp, Homo sapiens
ttgaatccctgaaattgtcccccaaattacagatgaatgcacataggaacacttttttctcgtggcagcatttatggatttgctagattctcaaaaaaagaacagaagaaaacaaaaagtaa

SEQ ID NO: 107320 - DNA, 122 bp, Homo sapiens
tcttctcgtcgaaacaaccaagggtctcaccccgtatttccttcttataggaacagaggccgccggccccgggcctaggtcagtcagagggcggggcctcagggctcgccccagccgcgcgc

SEQ ID NO: 107321 - DNA, 122 bp, Homo sapiens
aactccttggctcaagtgagcctcctgcctcagcctccggagtagctgggcttccaggcacgccccaccacaccagactaaggccttgagtgattaaaaagaaaatcttttcctgtgtaggc

SEQ ID NO: 107322 - DNA, 122 bp, Homo sapiens
acaacagctgtctgacactcctctctcccagagctgcccagcttgtttcttggcttacgtcgtcccttcagttattattatttattttctcaaaacctagggttaatcagtaacttgcgggt

SEQ ID NO: 107323 - DNA, 122 bp, Homo sapiens
cgagcgagcctgtcggccgaggagaccacgccataccaggattttccagcaggtggcagccgacgcacgccagagacagctgggcgcctacactttgaactcaaggttcttccaattaagtg

SEQ ID NO: 107324 - DNA, 122 bp, Homo sapiens
gcctctggcaggatgtgtgtccagtcccccgaggggcagaggcactgcggtgtggacacacgagggctggggggcaggggcagagccgaaccctgcagccaggcaaaagcgggaaaggcctg

SEQ ID NO: 107325 - DNA, 122 bp, Homo sapiens
gctgctgtagcaaggtgccatcaactgggaggcttaaaccacagaaatgtatggtctcaccgttcaggagtgctgggattataggcatgagccaaggattgcctttccttgaaagtgactca

SEQ ID NO: 107326 - DNA, 122 bp, Homo sapiens
gaggaatgaatgagtcaacacatgcacagagttagaactgtgtctggcacaaaataaacacggaaatagttgctgttacatttattcttctccccaaagctcaggaccttgggcaaggtcat

SEQ ID NO: 107327 - DNA, 122 bp, Homo sapiens
cccggtggaggaagccgtccctaggtggctcctgccgcatttaagcctcccttaccttcccgccgtcccagccacccaacctcagcccagagggagaggagagggacaccgcccgctgcggg

SEQ ID NO: 107328 - DNA, 122 bp, Homo sapiens
agctgggggacaaagcccctttacgtcggggtgggattccccttaaagccactgccaagacggaacaggatgggggacagagagggactgggggaaggcgccaaagcccgggaccgaggagg

SEQ ID NO: 107329 - DNA, 122 bp, Homo sapiens
gggtccccatcgcagcattcatgggtgggcttggccgagaggagaagctgagtcgaagttcggctaacaagtatttttttaagatagatcagtggagtcaaagcagttcagctacacatctg

SEQ ID NO: 107330 - DNA, 122 bp, Homo sapiens
aatgccttccgctccgcgcccgccaaggtcgagttaggaaagacttggaacagaattaaacggctttggggaagatgagtcagccgggcggggctgcagctgccagtgaaacccctgccagt

SEQ ID NO: 107331 - DNA, 122 bp, Homo sapiens
tagtcaagtccattttttgtggctgatacatcaacggactatcctcatttaatggaagaacgcatttctgaacgaatctctttcttgctgtctgattatggatcttttgaggagaaatagca

SEQ ID NO: 107332 - DNA, 122 bp, Homo sapiens
tcactcctattcttaccattcacacccacaattttatttatttcaaaattgatggttgatcggcaatgctctagaccatgggctaagagttgtggtatataaaggttcacagacacatgctg

SEQ ID NO: 107333 - DNA, 122 bp, Homo sapiens
gcaatgggcttcagcgctcgagcacgcgcatgcgcgggcctgtatctccagaggattcctcgggtcacctggacgccagcatctcagccacctgcccctctgggtcccttcttgcccttgat

SEQ ID NO: 107334 - DNA, 122 bp, Homo sapiens
tccgtccgccattgctggggactgactgactgactgaggcggcggcggctgctcgggctgcggcggagaccctggccacggccacgcgccccgcgcaagcgcccagcggtggcgccgagggg

SEQ ID NO: 107335 - DNA, 122 bp, Homo sapiens
cttaacccaggaatataaaataatcttgccactgctaggactgcaaacaagctcagggaacgctgtgggtgtcaggcagccaactaattagtgttttgtgaaaagaaaggaatcaagaatga

SEQ ID NO: 107336 - DNA, 122 bp, Homo sapiens
gcagtcgctcctgattggacagtggtgtctgcagctcgacaaggtggactctgggccagtcggctctgcctgtgtgtcttgcgtcctgaaatgcaaagcaggggctgtggggaaatctcacc

SEQ ID NO: 107337 - DNA, 122 bp, Homo sapiens
ttatttatagctccgaattaaaggttcagagtttgcctagcaacagtgggcagagaatcccgtgagaagagccacaggcgctgctccaataacaaagaacggccaaggcggaaataaaaaat

SEQ ID NO: 107338 - DNA, 122 bp, Homo sapiens
agccagggtgtggcgaggcccgtcagggcggtcagacctagggaaacctggcgtacttggcgcagatggggctcgactcttgccccccgtggcttctagcccgcccttccctctcgaggcct

SEQ ID NO: 107339 - DNA, 122 bp, Homo sapiens
cccctgtacctctcagcatgaccagcgggcattctgcacaccgggagacctgggctgtcacgacggcggggtgcggcgctactggcacggagcaggaggccggggatgctgctggatgtcct

SEQ ID NO: 107340 - DNA, 122 bp, Homo sapiens
agaccaaaattgtttccctatcagtttgtgagcaacttgagggcagagccctaaatcattcgagtgtgctgacctctaggggggttagtccagtgcatggtctagaattgctcaaatcggcc

SEQ ID NO: 107341 - DNA, 122 bp, Homo sapiens
gagggtggcagtgggaggaatgcccagtaacatacgtagcattttagcaaaagtaaatgacgtgctattttctccctatatgaaagtgttaaaatagtcccttttttttttttttttttttt

SEQ ID NO: 107342 - DNA, 122 bp, Homo sapiens
gtacctcaaaaaaagactgcagcttcttaaatggtctttccagagagcatgcatagtgcgcgaaaagtggctcatttaaatttttttgctatgttgggaggcctaataaccacatttgattt

SEQ ID NO: 107343 - DNA, 122 bp, Homo sapiens
cccatgaaggaagctctcaaaacactgcggtggggtaaggtgttggcagtgtggattcaccgtcccagcaaggagctaccttagggtcaaggatgagttctgagaaataggagaaaagaaag

SEQ ID NO: 107344 - DNA, 122 bp, Homo sapiens
ggctgattatctttcagggaacagataataggcaaataggtcagtcagagaggggtgaggcgaatgtcaattaagctcttggtgggggctggggtgaggctgaatccaagtctttagagcca

SEQ ID NO: 107345 - DNA, 122 bp, Homo sapiens
gcttctgctttcctgcgggcctcttccgagtcccccggtctctcaggaatgaagccccaacgctgttggcaagacccaccaggccttcttcagacagacacatcgagggacccgtcattcca

SEQ ID NO: 107346 - DNA, 122 bp, Homo sapiens
cttctgccccgccctgccggccgtggtggccctgctgctgcactacagcatcgacgaggccgagtgcttcgagaaggcctgccgcatcctggcctgcaatgaccccggcaggaggctgatcg

SEQ ID NO: 107347 - DNA, 122 bp, Homo sapiens
agcggggctgggtgccctgtgcgcacagcagacacttcatcagccactcaagtaggcagccgagccaggagggccctctgggcacctgggcctctccgtaggaaaaggagcagggacccact

SEQ ID NO: 107348 - DNA, 122 bp, Homo sapiens
taagaatttgttcaagaacctgaaaagagtgtgaaacatcttaggctagtgattgaaacacgtgtccacacaagggagcagttgtccttgggtggtgtcacaagggctctcccaaagaactt

SEQ ID NO: 107349 - DNA, 122 bp, Homo sapiens
gcgataagactttacttcttaggggcttaaataatgaagtcagtaaaagaggactgaaaacgaacataaagaagagctttagctttgacgcaaagaattacatcagtgcttgacaaaaccga

SEQ ID NO: 107350 - DNA, 122 bp, Homo sapiens
ttaaaaccacagactggggaaggcggccgggtggggaccggcgtggcgtcctgcggaccgcgtggagtttggggtgtctgacatcgttctccacgtggctattttcagcgttctcccgggga

SEQ ID NO: 107351 - DNA, 122 bp, Homo sapiens
cctaggggctggattactatgctgggaggtcttagattcctgggatttagtgcatgctcgcgcctcacattttttgggtgaccttcacctctctgtgcctcagtttctgaagctgcacaatg

SEQ ID NO: 107352 - DNA, 122 bp, Homo sapiens
cgtgtgtgcagacatcacacttgcacgcacagccccccgcgtgcacacaccccaggcacacgtgtgtacagacatcacaacacttgcatgcacagccccccgcgtgcacacacaccacaccc

SEQ ID NO: 107353 - DNA, 122 bp, Homo sapiens
tcgcacatatgtggggcagagcagccaccctgcccccagcagcagccgtccatcgtcagacgtgatcatttcctgaggcctcgagtgtgtcagggtgtttgtgcctcataacaacccacagg

SEQ ID NO: 107354 - DNA, 122 bp, Homo sapiens
ggggcagtgagggagggatccctaagtgcagggcgcacacacggggcggagacctggaggcggcagcaccgcgcccccagggctctgcccagctagccactcgcagcacagagaagcgcgcc

SEQ ID NO: 107355 - DNA, 122 bp, Homo sapiens
gcgcgaggaccccgggacctgcccccctccccccgcagccgcgtcgccgctcgctccgggcgcctcctgctctgcacttacacgctcggcagctgcggggagcccggcagccacgctctccg

SEQ ID NO: 107356 - DNA, 122 bp, Homo sapiens
gaatgaatggggaggccgctgaacccacccggcccatatccctggttgcctcatggccagcgcccctcagcctctgccactgtgaaccggctcccaccctcaaggtgcggggagaagaagcg

SEQ ID NO: 107357 - DNA, 122 bp, Homo sapiens
ctcggcagcacggccttcctcccatgcacacggccgcaggaggccgaggagtcccgtgcccgggatggaagccccagcctcactctgcacaggcgcagaagcaacggtgctttcctgcgcca

SEQ ID NO: 107358 - DNA, 122 bp, Homo sapiens
ggggcatcaatatcgtctcatcactcaggcgcccttagcgaatctggacagatcgaggggcgcagtcttggcttccggaccaggactttctttttttgagatctatttagctagtttagaaa

SEQ ID NO: 107359 - DNA, 122 bp, Homo sapiens
cttctttcctctacccttggcatgcagcaacttagctcctagcagaaagtggttccaaatcgggaagctgggagccaatataaaaaatatccctccaacttttgacatgcagatatatggtt

SEQ ID NO: 107360 - DNA, 122 bp, Homo sapiens
gatacgacacaaatggaaacatttctgcatacgagttcttctctgtaaaaatggcgaccccgcgatgcagcgcctgagtgccgcgcgcctgtgacccgcgggtagatttcttaccacgtcct

SEQ ID NO: 107361 - DNA, 122 bp, Homo sapiens
ggaagcgccaaagggggaggtaacggagcggcctacgttgtggcggttccctggtgaatgcgccctggggttgaggcgtctgcgggcgttcggacgatgccgtgacgcggcacggcgacact

SEQ ID NO: 107362 - DNA, 122 bp, Homo sapiens
aattgtagagcttctctaagcatttgggacatctattatgtctcttatcccagagaaacccgtgtcattattggccaaagcccatgtcttccccagggcatgtgtcctggctcctaatatat

SEQ ID NO: 107363 - DNA, 122 bp, Homo sapiens
gtgcctgcgagaaggtcgtggctgcgtggacagctggcgtgctgggaactcttcggcctgcgccatgctccccccaccctgccaggctctgggccctggaaggctgaccctggaacccacag

SEQ ID NO: 107364 - DNA, 122 bp, Homo sapiens
agccaatcgcttttctctgtcgtgcagtcggctcctgggattggccagggacgggacaggcgcggaaccactgcgcgcacaggcggagcgcggagacttgtccgtcacgtgcggccgcccgg

SEQ ID NO: 107365 - DNA, 122 bp, Homo sapiens
cctcggtcagtcggcctgtctgttcctctctatagctcggtcaaggagtgtgatgactggcgagcagatggctgccttccatccatcgtccacccccaacccgctggagaggcccatcaaga

SEQ ID NO: 107366 - DNA, 122 bp, Homo sapiens
cgtagtctccggctgggcacagcgttccgcccttctcgcggccccgggcgcccacccatccgtcatggcccaggcctgggccaaacagcggggcagctggttgcccaaactggggtaaggag

SEQ ID NO: 107367 - DNA, 122 bp, Homo sapiens
tcactgcaaatgaactcctcaaagatctggtgtgccctggaggccagcttggtagctgatcggatcttcttgaactcctcacaggccagccagaactccaggttctcctcactgaactctgt

SEQ ID NO: 107368 - DNA, 122 bp, Homo sapiens
gggtttcctcagggagccaacctgtatttccaccggggagggatggtttctacaggagggcggcttccttgggaactggacccaagatgttgccttcctgaagccctgcagggatgacagtg

SEQ ID NO: 107369 - DNA, 122 bp, Homo sapiens
cgcattccccccactgagcagtgtactcagaacaaaaccaccccgaagcacctgggccctcgcgaggtcatgtcggtggccgggcagcgcacgccctgccttgcgtggtttctcacggctgc

SEQ ID NO: 107370 - DNA, 122 bp, Homo sapiens
attgcaaacccacctgcccctgggaagagcgaagtgacaaaagggctctcactggcagtacgaatctgaatgctaatgacaacagaggttttgaaaaacattgacccccaaatgcttcagca

SEQ ID NO: 107371 - DNA, 122 bp, Homo sapiens
aagtgatctgcccacctccgcctcccaaagtgctgggattcaggcatgagccaccatgcccggccttgtttctcaattgggctgccagacaaaacagaaggtgcccagttaaattagagttt

SEQ ID NO: 107372 - DNA, 122 bp, Homo sapiens
cgtgcgcctgcacctgagtctgccgtgtttgctggtgcctgcgtgtgcacaggtgcctctcgggcctcctggtctgtgtgcccgggagcacggacacagatccaccatgtgtgcctctgcgg

SEQ ID NO: 107373 - DNA, 122 bp, Homo sapiens
gaggcgcttggcagcagcccgcgccaaccagcattcctgagatgtttgagaattctggaacgcgcagacagagccgacgtcactgcaacacgcggcgcctccgccggcccgtataaaaggcg

SEQ ID NO: 107374 - DNA, 122 bp, Homo sapiens
tgggggtggcaacagggcctaggaaacattttagaggcacttctcttgcctgaaagaaaacgttcttcccctttttgtctctgatgaatctttactggatctttgggacccagctgagtcat

SEQ ID NO: 107375 - DNA, 122 bp, Homo sapiens
attacaagaaaatacaaaacaccatttaaattgggtttagatccttcatttgcatgaaaacgatagttaattgtgtccctgtgatgataattagtgttcagctaagaggaccttttcattgt

SEQ ID NO: 107376 - DNA, 122 bp, Homo sapiens
accattatgacgcatgctgtggggtcttcatacatgctctcaatcatgcattggtaccatcgagtatgacgcgtgctgcaggatcttcatacatgctccctatcacacttctgtaccattat

SEQ ID NO: 107377 - DNA, 122 bp, Homo sapiens
gaggttccctctctgatggctcatgatagggtgcagtcttgggtgtgcccagaatgttctcgactactagggaagagcatgattttagttccaagcctggcttcctaggagttgccctggtc

SEQ ID NO: 107378 - DNA, 122 bp, Homo sapiens
aagtgagcagcgagacctggagtcctgtaaccaaaacacctattaaaactcccaggagagcgatgatgggtgaccgatggaactcctggctgctttcatgaccggagctgggcggccgcctc

SEQ ID NO: 107379 - DNA, 122 bp, Homo sapiens
caagaatgtaatcacacctgaccagagacccttatactgtcaaaagtagctatttacagccgagcacggtggctgcagcctgtaattccggcgctttgggaggccaaggcaggaaaatcgct

SEQ ID NO: 107380 - DNA, 122 bp, Homo sapiens
gcatggacaccaagcgctgcttcgccaagtgcttcgatgactaccaaggcagcctgctggcgggccagtgtgaggaggcaatggtgtccttggtcacttgcctctgcagaggttatctaagt

SEQ ID NO: 107381 - DNA, 122 bp, Homo sapiens
cactaatggaaatattggtgacactgcggaatgcaggcacttaagcacgtggactaccaccgacagcctttcatgagagcggacggctgatggaggctcgggtcacggcccttaacaatagc

SEQ ID NO: 107382 - DNA, 122 bp, Homo sapiens
gtccgactgcagcagacacgcgcccaggtcctccttcaggcccgcgcacgcgccgccctgcggcttgtcctcataatacttaggcatgacggcgcttcccctccgatgcggacgcgactttc

SEQ ID NO: 107383 - DNA, 122 bp, Homo sapiens
acatcactgtagtctctgtttctgtgatcactgtgcctcttcttttctgtgtgtaatcttcgtttgccagtctcttgtaaggatattttgaatgaatttagggcccacctggataatccagg

SEQ ID NO: 107384 - DNA, 122 bp, Homo sapiens
tgtggtttccatagagctggcatttgttcaacaatgtatagtataagcctgaataataaccgaggcagtttagaagggaagagggcaaaggcaaaaacaataataaaaaccttagaaaaaag

SEQ ID NO: 107385 - DNA, 122 bp, Homo sapiens
gtagtggagctctggtgaacttctctcggctgttctcagttcctccatttatcgtttcttcgtcatgtcgggacgcggcaagcagggaggcaaagctcgcgccaaagccaagacccgctctt

SEQ ID NO: 107386 - DNA, 122 bp, Homo sapiens
agcctcactgcaacgttaaagagtccttctttgttcagccccagtcggggacgcagggcgcggtgttcctccgcgctcgccgcgcagtccctgcccccccgcggctttggagagctgccatt

SEQ ID NO: 107387 - DNA, 122 bp, Homo sapiens
gggggcaagactggccccgggtggaccagatcaccaaagccaaactctcgcatcttcctgcggcagcgcggcccctggcctagacctctgggcactctacagccgggtcccatctcctccca

SEQ ID NO: 107388 - DNA, 122 bp, Homo sapiens
cccactatccggtccctgcggtcagtgggtgcagcaggggtcgcagtccaaacaaccaatcgcgacgcggctgcggggcgggggccacagcgctccgcctcccccctccaatccgccctccc

SEQ ID NO: 107389 - DNA, 122 bp, Homo sapiens
atggctcaggaatgatctggacccaaacagtctgacatcactgttaattgggctgctcatcgctgggacctacaatccatgtggcagaggagtcagggtgcccttggatgcatctgccaagt

SEQ ID NO: 107390 - DNA, 122 bp, Homo sapiens
gacccctttgtggaggtggagatcattgggctccctgtggactgcagcagggagcagacccgcgtggtggacgacaacggtgaggctgggccgtggctccgtcacacctgtgatggaagtct

SEQ ID NO: 107391 - DNA, 122 bp, Homo sapiens
gagaagagtaaaaaagagtccttggttatctcaccgccgtgcctcaggattctttctcctcgacgctggtacccgtgcggggaaacagagggtgacgcttggctggtgcccagctcccctgg

SEQ ID NO: 107392 - DNA, 122 bp, Homo sapiens
cctggttctcccatcctgtggaaaacctccgaactccttcaaattctcaagggtgagagacggatttctaaatacccagggcttccattaaggtaaaaaccattaagaagataaaaaagtca

SEQ ID NO: 107393 - DNA, 122 bp, Homo sapiens
gcccttcttcaatgaggaccagatgaagtgcgtggcccagtgtggctgctacgacaaggacggaaactactatgacgtcggtgcaagggtccccacagcggagaactgccagagctggtgag

SEQ ID NO: 107394 - DNA, 122 bp, Homo sapiens
gcacggcctcaggggtgcgtccgctggcccgcagcagacggggcagggtggcatgtggggcgggtgcggggggcggctgcgtgttgggcctcaggatgatgtgcacgttggagcccccgaag

SEQ ID NO: 107395 - DNA, 122 bp, Homo sapiens
aaaatagaaggtttatttaatccactcttgctttccattgtttttttccctttatatgttcgtggttgtttgaagggaatggaaagaaggctagaaggaatccgtgcccttcatttattcca

SEQ ID NO: 107396 - DNA, 122 bp, Homo sapiens
gtcgcacacctaagcagcaagtcattattgtactttgtggttggatatcgtgtgtgtgcacgcgcgctgcaagcgcactttcaggcacttcttagtccctatctctgactcttttccgagtc

SEQ ID NO: 107397 - DNA, 122 bp, Homo sapiens
ctctctcagactggaggtggacagcccactagcacacctggggtcgctcaccaaagagctcgtctgccagccatgcctctaggtagaacaccaaagggtctctcagttcctgcaccggaaac

SEQ ID NO: 107398 - DNA, 122 bp, Homo sapiens
tttcttcagccactccaggctggggtcctgggggtctgaggctcccagtgacgaaggacacgacgagcaccggctccttggcccaggcattcttgaagaaggtgcggagtctcgcggccatc

SEQ ID NO: 107399 - DNA, 122 bp, Homo sapiens
agtgagttttgtgtgatggagtgggaccaggctctctgatccaaccctctgctagcaactcggctgtcggtggggtggcgcgcgcgtattctcacggagtgactaggagagggggacgaggg

SEQ ID NO: 107400 - DNA, 122 bp, Homo sapiens
gcaggaagaagaagagcgccaggtagagcagcaagttgagttcccactccatgctggaggcgccggcgctcgctggccctgcgcgctcggcgcgggctgcagctggagggcgagcgcgccgc

SEQ ID NO: 107401 - DNA, 122 bp, Homo sapiens
ctcaaagaccgtctaggaggcagcgagcaggtgagcggaagccgagagtcaccggccggccggtaccggtctgacgagtcaccgagcagattgcagctgggcttaggagagataacatcagc

SEQ ID NO: 107402 - DNA, 122 bp, Homo sapiens
acggagcaatggaaatgctgaagtgtttgacgtgactctgtaaactatggttgaagttcccgtgacttagaaaagtgacagtttcttttgttagtaaaagtttggttggcagtacttggttg

SEQ ID NO: 107403 - DNA, 122 bp, Homo sapiens
tggaggaaaagggcggggcctgcaagcctgtctcttggcagcaggctctggcagccaaaccgtccaagctagcgcctggagcgcagtggtttctgggaattgtagtgtaactggaaggccct

SEQ ID NO: 107404 - DNA, 122 bp, Homo sapiens
tgccaacgtctcccagagctacacagttcctgagtctcatgccaacgtctcccagagctacgcgggtcccgagtctcatgccaacgtctcccagagctacacagttcctgagtctcatgcca

SEQ ID NO: 107405 - DNA, 122 bp, Homo sapiens
cagagtgagtgtggccctgacagcggggagggggcgggcaggccggccccaccctcctgacggtcaccctggtccctgaagctgcctggatatggtcgccatgcaggaagccgcccagcacc

SEQ ID NO: 107406 - DNA, 122 bp, Homo sapiens
ggtgagtgttacagctcttaaggtggcgcgtctggagttttccattcctcccggtgggttcgtggtctcgctggcttcaggagtgaagctgaagaccttcgcagtgagtgttacagctcata

SEQ ID NO: 107407 - DNA, 122 bp, Homo sapiens
ttagggtaacctgttatacagccttgagtaatcaatgtactctatacttataatttctcacgtaagaaacaagtaaaccaagagaatctgttcccaaaacaaggcctacaagagagtccatt

SEQ ID NO: 107408 - DNA, 122 bp, Homo sapiens
ctgtcctctcgccgacgccgtcgtgtccggtcactactacttgaccaggagcgacttcttcgtcgcttatgctttcggctccgatagtgttcacggtaactcccccggctgcctcgctctga

SEQ ID NO: 107409 - DNA, 122 bp, Homo sapiens
gcccgatttcagtgatctctcgacaccaggtctgcagctctgggtcgtctttcacagccacgtctgtcttatagtggagactcacgattccttccacatacctaccaaccaacggagcaggg

SEQ ID NO: 107410 - DNA, 122 bp, Homo sapiens
ggagcggcctgcgccgcaaggcactgtggggtatgtaggccagagtcatttctcctgaggcgactctccgcgtcgggactacaattcccaggacgcaccgcgcgacaactcttcgcgcgcgc

SEQ ID NO: 107411 - DNA, 122 bp, Homo sapiens
tgcttggccagtgcctggccctgctgcggtgtgatgggcgcctggccctgctccttgaggcgccgtagggtgtcaggctgggctctcaggtccttcttggtgcccaccagcaggatgggcac

SEQ ID NO: 107412 - DNA, 122 bp, Homo sapiens
tattaaacatcctcctggctgggtgtcattttcttgcttctccttttgtattctgatctgcgcatagatctgctgctgctgaaatctagaacaccagcgcgaaaacagatttgaagacaatg

SEQ ID NO: 107413 - DNA, 122 bp, Homo sapiens
aggttttcctttgtttcttcagttttttgctgacgttggggtcactggctaggcggcgggcggcctccgtaatctgggactgaatggcaaactctcgttccaggcgttccagctcagcttcc

SEQ ID NO: 107414 - DNA, 122 bp, Homo sapiens
gtggccatgtgattggctcccaatgctgggctggggctggcaaccgccctccggcctccacgcagcgcctgtgaaactcttcattcagcagaactggggaccagatgcctctatgccccacc

SEQ ID NO: 107415 - DNA, 122 bp, Homo sapiens
actgagcaaatcagtaattgcaaaagggtttttcggagaacaaacccaaagttaactgggcgatcagattcgtttccccagataatagggagagttgtgcactgactttagcaatcccgggg

SEQ ID NO: 107416 - DNA, 122 bp, Homo sapiens
gacgaagatcatggtgaacagcaggtactcgccgatgagtgggatgaccagtgaggtggacgggatgatctcggtgatgagcagcaggaagacggtgagcgacagcagcacggagatgcaca

SEQ ID NO: 107417 - DNA, 122 bp, Homo sapiens
aagtcctcccttccgctgggaaaaaaccaggaaatttctaccaacccatccgaaatctcccgggcattggtgcccaagttgaggtcccgatgccagaagcagtcccactgcctgtggcccgg

SEQ ID NO: 107418 - DNA, 122 bp, Homo sapiens
ccttcctaccctgccatccatcacctgcctgagccgtttgcacagctgcccctttgcttccggctgctgtttgccaagatgtcccagagacattctattccggccccgtacccccacccccg

SEQ ID NO: 107419 - DNA, 122 bp, Homo sapiens
cataacctggtgaatgaacaaaccaactctgatatatccaaacaatagcatactactcagcgatagcacattcaacaacatagataaatcttgaaaacatcacgttgaatgaaagaatccag

SEQ ID NO: 107420 - DNA, 122 bp, Homo sapiens
tcgtcacgctcttttgtctcagctggcagaggataaaagccgccgcggctgccttaggaacggcgctgcctcgtctctgctacccctggttgggcggccctgcgaagcagctccttcgggca

SEQ ID NO: 107421 - DNA, 122 bp, Homo sapiens
atcactccagtagccgtttccgatacagcatgtgcggcctctttagccttgagcgggctccgcggctgcctggcgggcttggctagtgcctgatccttctctccgcagagcccatgccaagc

SEQ ID NO: 107422 - DNA, 122 bp, Homo sapiens
tggcatctattgaaatgcccatatggttttggtactttattctatttatgtgatatatcacgtttattgatttgtgtatgttgaaccatcattgcatccctaagattaatcctacttgatca

SEQ ID NO: 107423 - DNA, 122 bp, Homo sapiens
gcccaccgccccgagggttcggggcagagccagagcataggccaagggccaagctcgggccgagagcagtggccgcagcgcccgggggctgaacccacggcgcgctggcagcgcgggccgag

SEQ ID NO: 107424 - DNA, 122 bp, Homo sapiens
gtaaataagataattgggggcaatctaagcaaagtcttcaattgtgtttctgctaaagtacgtgaagtacatgccactttctcagtaggaaagactgttggcagactgacaagatgaatcat

SEQ ID NO: 107425 - DNA, 122 bp, Homo sapiens
ggcttccacactacacccagactacaccaggagaaacagaatcatagttcacaacgcaaacgaatgccaggaatggtcagtgagtcaaaggaccagtcaaaaacaatcacacttgtgactag

SEQ ID NO: 107426 - DNA, 122 bp, Homo sapiens
agatctcagaatcaggaagtgagtctgtgaagccctgactcaagactcctgaggcatgtacgtcagaaaagccaactcttatcatttgacccaacccgaaggcaagtgtcatttttacagat

SEQ ID NO: 107427 - DNA, 122 bp, Homo sapiens
ttctatcttctttcagcccagcaactgagcacaccttctgtcattcagggcctgagggggcgggtccttaaacatcctccaatcagggacgctgggctgggacccgtccaatcaggcacgca

SEQ ID NO: 107428 - DNA, 122 bp, Homo sapiens
ccttcctgtctgtaagcctcagtctaggacaaagcccacacagctgtatacccactctcacgagtccattgctacttctcaaaagtttaaaaagtaaacaataggaaggcaccggactgctc

SEQ ID NO: 107429 - DNA, 122 bp, Homo sapiens
tgacctcctcgtgcatcaggaagtagatgctggtcagcagctccttggcccagatgaccacgctgacgccgacggccgccttcagggtccggaactggtggaagcggaagggatgggccaca

SEQ ID NO: 107430 - DNA, 122 bp, Homo sapiens
gttccgcccacccgcggccacgctgcgcctgcgcaaacccggccgccctcttacaaggcgcgcccgggttttttttgtgtgtgtgtcattacagggcgccggagaaatttaatctacccagc

SEQ ID NO: 107431 - DNA, 122 bp, Homo sapiens
agttcatgtctccaccccacattctgcaggtgactattatcggatacacacttgggatcccggatgtcatcatgggcattactttcctggcagcagggacaagtgttccagactgcatggcc

SEQ ID NO: 107432 - DNA, 122 bp, Homo sapiens
ctggtcgtcccgggtgagccgtgccaccttgacccccgggtgctgtctcttgaccagctgcgagcagaagcgctgcagcagcccggccacgcccttcccgcgctcccagggcgccacgcgca

SEQ ID NO: 107433 - DNA, 122 bp, Homo sapiens
aggtgcggtgggggagggggattgggtcagaaaggcacgtgactcctccgcgctttgtttcgtaaagcctgagactccccgagtcttccgacttctccctgacatggccctcgtttgggctt

SEQ ID NO: 107434 - DNA, 122 bp, Homo sapiens
ctgggattacaggcgccggccacctcgcccggctaatttttgtatttttaggtttactggcgtgagcaaccgcggccggccccaatactacactttcttgtttactgtgtagtccttatctt

SEQ ID NO: 107435 - DNA, 122 bp, Homo sapiens
ccattcctgccagcctgacaagccaggcctcagtttctccacctcccccggcccatcccccgttgggctgagccatcctgcctactgaggcttctcttgggcttccggccccgctgcctggg

SEQ ID NO: 107436 - DNA, 122 bp, Homo sapiens
ccgggagggaggggattggccagcggctggtccaggtgtcatgtgacaccgcggacgagccggggcggggatccggcagctaggccggggggtggggggggcggtgcggaactagaggtcac

SEQ ID NO: 107437 - DNA, 122 bp, Homo sapiens
aggccgcgcgcctgggggcgggctggagccacgtaccggggctgggggcgctgtgtgttccgcgactgccgcggcccggcaccggaggccaggagagcgttcccaacaggctccgcggatgc

SEQ ID NO: 107438 - DNA, 122 bp, Homo sapiens
gccagctgggccggggtagggacacaggactcacctgcacggtgacccctcctgccaaggcggcccaggccccaaggaggcacagtgcggagagcaggaaggcattcatggcagcagtgccc

SEQ ID NO: 107439 - DNA, 122 bp, Homo sapiens
agacttcgttcggctgatcgatgaaggagacaagctggcccacggggaggtcaatacaatcgatgcggacctcgacgaaacggaagaatctcgcaggttcctgcgtgctgggttccactcaa

SEQ ID NO: 107440 - DNA, 122 bp, Homo sapiens
agggcggcacgtggtgccagttggtgaccatgagctgcctcactcctgaggaagagtgttcgggctctgggctttgatttaacctgcctgtctgtctctctgagttgacagccggggcctcc

SEQ ID NO: 107441 - DNA, 122 bp, Homo sapiens
gtttgtgttttgttttatgttttttgacaactttcccctccttgtccagtttggggacagcgccctccgcgctggacaggaaggggctcttcttctccgacagggaggctcgcttcctgtgc

SEQ ID NO: 107442 - DNA, 122 bp, Homo sapiens
tgcttttggcatcttggcaccgctgctcttatggctcagtgcctttggaaattggaatcccgtctgtgaaaactggttaagttagttgcgtttgaagccagatacgtattagtgaagcttca

SEQ ID NO: 107443 - DNA, 122 bp, Homo sapiens
tgcctcatcaatttctacacctttttgaaaaatagatcattttacattccttttcaatgacgggaaggagttcacatttttaaaaaacatatatccatttcttagcatatgtgcagaatgac

SEQ ID NO: 107444 - DNA, 122 bp, Homo sapiens
ctgcccgccgcggctgtttacaccgcagaggctgtttacaccgcagaggctgtttacacccgctgagcagcacggccgagccggaagaagcctcccgtgcctgtgcgctaacaggctatatt

SEQ ID NO: 107445 - DNA, 122 bp, Homo sapiens
ggtgcgcgctggggagcggacgctgcatcccctttctgctgcaggaacctctcatcagaccgcctgagggaagcggcgcccggagacccgccccggcccggtccacattctccccaggaagc

SEQ ID NO: 107446 - DNA, 122 bp, Homo sapiens
atgatctagtctggataactttcaacaacaaagttctccgtcttctgcagattttaaccacggtgtaaattgttttgtttataagttaaaacaagcatttgtccctcctggccatatagtgt

SEQ ID NO: 107447 - DNA, 122 bp, Homo sapiens
ggtgatctgcccaccttggcctcccaaagtgctgggattacaggcatgagctaccatgcccggcctaaaaatggtagtttggacctactctgtttctgacttggctggttcacctctcctta

SEQ ID NO: 107448 - DNA, 122 bp, Homo sapiens
ctctgcctcttaacagctgtgtgactttggacaagtgtattaaccactcagtgtctcccacggggttgctgttagcactcaatagatgggtagtattagtatggttgttggtgtttgtttta

SEQ ID NO: 107449 - DNA, 122 bp, Homo sapiens
gtgaggatgcgggagatcagggtgctggacacaccccctttcactctcggtggtggggatcggggctctggacatgtcccctttcactctcggtggcgggatgtcccctggaaagacgcact

SEQ ID NO: 107450 - DNA, 122 bp, Homo sapiens
cgcatttgtggcaggttgtttcgctgaagtccttgaaggacatccagaccctcacaaatacgtatgatggctgaaaagaggaggactttttttactttccagaaattgtaaatatttttctt

SEQ ID NO: 107451 - DNA, 122 bp, Homo sapiens
ttcaagccccaccaatcttaatcccctcttgcatttgatcctttactacttaattagaggcgtgaaaaacccacagagcaaatcccaatccttgggttatgaataaaggcagcttttgctgg

SEQ ID NO: 107452 - DNA, 122 bp, Homo sapiens
cagctcaaccccacagtaggcaaatgaggtgatgtcaaagccttggctggggcccagccccggtaacctcccactctccctcccctgtgtgctccctcgctcagattcacacacacactcca

SEQ ID NO: 107453 - DNA, 122 bp, Homo sapiens
cagctgagaaggtggcgacgtaggggccatggggctgggccgggtcctgctgtttctggccgtcgccttcccttttgcacccccggcagccgccgctggtgagtggggttcctggcggtccc

SEQ ID NO: 107454 - DNA, 122 bp, Homo sapiens
cggctacctcaggctaattctccattcgctgcgtggattcgcccccgggaggcggccccacgtttccagcctgtggatcaacaaggcggagaaccacctttgcaccctcgccgggaaaccag

SEQ ID NO: 107455 - DNA, 122 bp, Homo sapiens
cagtggcagcagggagacctggggctgggacaagccagccctagggggcgtgtctgaggacgcggagggaggagacgcgggcccgggtctgggaggaaggtgggagaatcttccttccaaag

SEQ ID NO: 107456 - DNA, 122 bp, Homo sapiens
ccttgaccgccaggatttcttaaaatgcccctgcagagatgtgaactagtcttaatatcacgagaaaatgtcaatttagtagaattctatatttgcagcacatgcaataaaaaagcaggatg

SEQ ID NO: 107457 - DNA, 122 bp, Homo sapiens
ctggagttccggccccggagcggagcttctgccgagcagaggcggggcctggggactgggcgttaacatccggctttgacgtaaggagagccttaagttcctgtttggacaccttcctagct

SEQ ID NO: 107458 - DNA, 122 bp, Homo sapiens
agatacataaagctgccatctgtccatagaacaatcttggacccttagccagtaaaggcacggtagtccatgctttcccaactgacacaccaattcaaaccagatgaagcctaagaccacct

SEQ ID NO: 107459 - DNA, 122 bp, Homo sapiens
tctggaagtggacaggctggattcctcgctggtcctgccacgtctctctgagcggaggcccgggttcgctcagttcccatccagggtattcagcacacctgctccaggcagccacgcccccg

SEQ ID NO: 107460 - DNA, 122 bp, Homo sapiens
ggtttaggcaatcaggtgcttcacccgcttctcattcccgcgcccttagctgaggcttctcggtcctctgaaagtgccagcggcgtcagaggttggaatcaatgctttcctgacatcatcgc

SEQ ID NO: 107461 - DNA, 122 bp, Homo sapiens
agacctccaggctgggactttctagaatcctggggtccagtgctaagcttgtggtggctgcgtagatgaagagatgggacatgtggctctcaaggccctgaatgggctcactggagctggtc

SEQ ID NO: 107462 - DNA, 122 bp, Homo sapiens
agacccagatcctgaagtggctgctacccctggctgcatacactctgcaaccttgacttgcggtctgccgaatgctgccctgggagggatctcacccactcagtccccctcccccaggtcct

SEQ ID NO: 107463 - DNA, 122 bp, Homo sapiens
gcggcggcggcgggagcagcatggattggggcactgagctgtgggtaagtccaatcggcccgcctctaagttcccctttgctggggtccaggcaccccccttttgtccccaatgtatcttag

SEQ ID NO: 107464 - DNA, 122 bp, Homo sapiens
tcctagctgcaaacagggggatgcagggaaggaggccagcagagagagggagttgaactccgttctgcctccaggagcctatccagctggcccagctcagtgtgattccaaggaactcagga

SEQ ID NO: 107465 - DNA, 122 bp, Homo sapiens
cctgcaccagccctcgcttgtacatggcgcacaggatgaagagcgagtctgccgaccactcgatgtgctggatctggtctaggcacgtgtacagctgaaggatctgaagggtgttcacatcc

SEQ ID NO: 107466 - DNA, 122 bp, Homo sapiens
gggagggacgctggctgggagggctggccatagtctccctcacctcgcacttgtggatgacggagccgtaggccttggactccgtgcggtcgccgtaggtgcctgagcgcaggccccgggcc

SEQ ID NO: 107467 - DNA, 122 bp, Homo sapiens
tgccaggttgcactacttttaacagcaaacggaacagcccaaaggccaacacatagaaaacggttcgacattcaccatgcagcggacaccaggcagccgctagaaggaacggggcctggggg

SEQ ID NO: 107468 - DNA, 122 bp, Homo sapiens
tttaaatgtaatatgatgtgtgcaacacaagagttgaacccagcctagagctcagctaatcgtagctcaccaagcttagctccattctacaagctggtgcaggtttgccctacctgcttttc

SEQ ID NO: 107469 - DNA, 122 bp, Homo sapiens
ctatcaggtcctcgcgctgccgcggcatccaggcgttcaggtattccaccctcctactaccggctcctttgccctagaccttgagttgggggtgggaagcagcttttttttctggcgtattc

SEQ ID NO: 107470 - DNA, 122 bp, Homo sapiens
tttcatgcatagcatgtgagctctggagctaaggagacctaggctctgcccctcactagccgtatggccttgtcccacttctgtgaaatgaggttacttagcagtgtcttccttgctgaaca

SEQ ID NO: 107471 - DNA, 122 bp, Homo sapiens
taactttttggaacaactgaaaaatattggccttttaacatcccaagcctccataattgacgtatccaggatgttatttcctgccccccattaaaattaatatttaggtagtattaaatacc

SEQ ID NO: 107472 - DNA, 122 bp, Homo sapiens
tccccaatctactccatcacaggaaggaagggggatgaaaggcctggaatttaactgtcccgaactttatagaacatacacccatggcctaaagtgttccctgggtttattatgctagagac

SEQ ID NO: 107473 - DNA, 122 bp, Homo sapiens
aacgctgcggacccagctcgctcctggtagcaagacccgaactgtaaggaacaaaaccctcgtgaaagaggagcaaacctttcacttcgctgcgttttaagacgaaagttagggtgggtttc

SEQ ID NO: 107474 - DNA, 122 bp, Homo sapiens
cacaggccataaataatccagtccaaccccctggctttacagatgaatcaggcccagagacgccaggcgacttgagcaaggccactcagctgtcaagagcccgggtagaaatcagtgccctt

SEQ ID NO: 107475 - DNA, 122 bp, Homo sapiens
ttgtccttaccctcaaagaagtcataatgtgttgggaaactgggaaacaaatatgttcatcgtttcatgcgcttattaaaaatctatttggggggccgggcacagtggctcacgcttgtaat

SEQ ID NO: 107476 - DNA, 122 bp, Homo sapiens
agcacttaagtctcagtgagcaaacaaggaggagtcagccttggtcacttccccctcaagcggccagagagcggaaacacaaagccaggccagtgtcactccagggattgcgggaacctaga

SEQ ID NO: 107477 - DNA, 122 bp, Homo sapiens
accaagttcaggtcaaagcaggcagggatgggtgtgctttgacagggagagcggctcacacggccgactcgggccctgctgtgcagcttcctcgagaccacgcaaacaggcaaggagaaggc

SEQ ID NO: 107478 - DNA, 122 bp, Homo sapiens
agccaagaagcaagcaggcaggcaatgccagcatgcaggtggcggggctggcaggggagccggcaggagggccggacacccggagccggggaactgtaatgttcagggaatttcaattggca

SEQ ID NO: 107479 - DNA, 122 bp, Homo sapiens
tttaaggttctcaaagttatttatgcaaacactgaatcagtaacatcgcaaactgctgctcgcttcccagtgccaaatttttacagtcagccaaggcttcctgcatagagacaattgaaaaa

SEQ ID NO: 107480 - DNA, 122 bp, Homo sapiens
gctccagtttgggtaaatccagctcgcgttttgtctctcgctcaactgtgcagggtccagcgaaggcagagccccagcttcactccctgaggtctgtcctggggagacactgctgctccggg

SEQ ID NO: 107481 - DNA, 122 bp, Homo sapiens
ccgctctgtgcggcaggagtccaggggaccccgcgtggggcaagggagttgtcaggggctcgagagcggaaggagccccgtgaggagcgaccccagggctggcagagagcggcgaggcgcag

SEQ ID NO: 107482 - DNA, 122 bp, Homo sapiens
gcatggtcggagccactcctgacagtcctgttcctgctctgcctgcctccctggcaactacgactgatcgtgtgtcccactcagttccagccaaggaaactaagttctgctgggtagggcac

SEQ ID NO: 107483 - DNA, 122 bp, Homo sapiens
ggtcaagcccggtctgctctgctgagacttggcacaccacgcctggggcgctgcggctcccggcccagcccaccgtgccagcccctccgcagcggcctccaacacccggactctgcgcacac

SEQ ID NO: 107484 - DNA, 122 bp, Homo sapiens
tggcttgcttctccctggacataactactgagtaattggcaggcaggccggactgacctgcgccacacacagagccagagcccgctgccaatgcttcaggcccaagggctgtgctcctgggt

SEQ ID NO: 107485 - DNA, 122 bp, Homo sapiens
gtgaggaggacccaggcgaggtgcctgggtggagggcaaggcttccatgttggccaaagtcgtggaacgcttggacctggggaaccgcaaggcccagctcgttccgaggggaacccaaaggc

SEQ ID NO: 107486 - DNA, 122 bp, Homo sapiens
agagaatgtcctcatatccttctgctggggagagggacctgactccctagtgctcacgggcgagggccagctctctgttggatgagccccccactgcatcagtggcagcagttgtgggtgtg

SEQ ID NO: 107487 - DNA, 122 bp, Homo sapiens
aggtttaggttaatccgaagcacttcccaacacagcaacagtcccctgtgtcaggcaagtcgggtgtctcctgtttcttacggcagtctctgcaggcagcctgaactctaggactggccagc

SEQ ID NO: 107488 - DNA, 122 bp, Homo sapiens
gtggggaggaaggcggggcctgaggctgtgcgaggcgagtcggtgtgtccctggctgggacggaagttgcaccacaagtacaattagtttcagttttgtttcttttccaggcacccagcaac

SEQ ID NO: 107489 - DNA, 122 bp, Homo sapiens
agcttatcaagagtgcaatacaagtcagtgtcttctcttttctacttaaaagaaaattctcgtttttatttattactttattgcaaggagaagcagacaataagtaggagtcttatgaggcg

SEQ ID NO: 107490 - DNA, 122 bp, Homo sapiens
aaatgagggcaatttatttaacaaacataacaacatttacttaatctatgcaaatctattcgtaagattttataaaaccaccatttttccccatacccttaaaacacaaaattctggcttta

SEQ ID NO: 107491 - DNA, 122 bp, Homo sapiens
cgccctcactgaggcgcggagccggatccggaggcgccgagccgcatccggagccgcgcacgcgcaatctgcatgaacgaaggccagtgcttaaagacgtgccattcattgccagaactcga

SEQ ID NO: 107492 - DNA, 122 bp, Homo sapiens
agggaacttctgtggcttgccgccgagagtcctggagaaagtaggtttggctggcggccacgccgacccgcaggagtcctgcccctttgaagcccttccctcttttagatctgccgggttta

SEQ ID NO: 107493 - DNA, 122 bp, Homo sapiens
agcggggcgcggagggcgtgcaggctgagtgccgcgggacaggcgcgacattggtgctggcgttggcgtcacagacccagggctgcggcgtgctttttggctttcagtctgagatcggcgat

SEQ ID NO: 107494 - DNA, 122 bp, Homo sapiens
gaagcttcaccgactcctgcccctcaggaccctgtgtgtgcataggatgacgctgggccccgtgtggcgcacacagacctgctccccagagccaggcaccagcacaggtgcagcacgcgggc

SEQ ID NO: 107495 - DNA, 122 bp, Homo sapiens
aattaaatcgggaagagaattattatgaaattaatgatcttaggtataataattgtactgcggttatgtagcagaacatctattcttaggagatacatgctgcaatgttaaagggttaagtg

SEQ ID NO: 107496 - DNA, 122 bp, Homo sapiens
cttgccaattagtgggccctgcgctactttttcccttctcgatgatttatttccatgatgcgtattagggaaaataccttaaaggaaaaagaatgttagcatcattggaaatcccgctccta

SEQ ID NO: 107497 - DNA, 122 bp, Homo sapiens
gattggttttggcaccagtgggatgtggctttatagtctttgtgtggccctgttagctgacgtcaatgttgacccagatttgagggatcctcagtggccaaattcttggatgtttgcagtga

SEQ ID NO: 107498 - DNA, 122 bp, Homo sapiens
gatgagaggctcctccagaggtcgctgttccccaggaatccattactagcgtccgcaccgcgaggccagagctcccactgttcccctggctttgcttctatgaggcttacgcggctctgcat

SEQ ID NO: 107499 - DNA, 122 bp, Homo sapiens
cagaccccttgtgggacagccaagggcctagtcagggaaattccgaaagcaagtcctcaacgtgccccgcaacgaggcttcaaattagctagggtcttccccctccttaagactaaaagata

SEQ ID NO: 107500 - DNA, 122 bp, Homo sapiens
ccaaagcctgagacaaacatctctgtaacccagagcggggaagatttgctttcctttacacggtttatgtgatcatttccacgaattccctctgagtcatcttccatctttctctgggacat

SEQ ID NO: 107501 - DNA, 122 bp, Homo sapiens
aacatgtatgtgtatgtgtgtttcacacattgtcagcataaagtaagttcttactgttatcgttagacttacacagatgaatagatggacaaataggtaggtatgtctgttcagaatgatat

SEQ ID NO: 107502 - DNA, 122 bp, Homo sapiens
aggcgtagcgcttgccatgcaccttgctcatgatgttcttgtcgtagtagtagcgcagggcgcggctcagcttgtcgtagttcatgttgggcttgctcttgcgctcgccccaccgccgcgcc

SEQ ID NO: 107503 - DNA, 122 bp, Homo sapiens
ttccagccttgaggagtccttgggtgacactgagtcaggcagagatgagctgtccctgcccggccccgcccgatttgcaaatttgtgagcaaaataaacatggtctttgttttccgtcacta

SEQ ID NO: 107504 - DNA, 122 bp, Homo sapiens
ctaagagagatgctggaatggcttcccgtcggaacactgaactctttcgagcagtttttacggaggcgtttgctacgtgttctcagggcggcacaggagcatctcgcctgcacatgggaagc

SEQ ID NO: 107505 - DNA, 122 bp, Homo sapiens
tctaagcccagcctaacagtaggagttccctaagaattgcagacattgtgtcctagaatgcgcttcaagtttatctagaactccagagcactttagcccatgggggaggcataatggcaaag

SEQ ID NO: 107506 - DNA, 122 bp, Homo sapiens
gcccattgttccccacgctcgcctcgccgcgtgggtagtgtgttcgggtgaccctcaagccgggtgcccaggccccctttaaagtgtgagctctgcaacccgcaaatgcttctgggcatcaa

SEQ ID NO: 107507 - DNA, 122 bp, Homo sapiens
tcaatcaatgaaggaaccactaaacaaatatacaaataaagtatgttggatgcgactaagcgttctctaactgtaaaaataatttgtgaggcaaaaaaagctatgatatggccaggcatggt

SEQ ID NO: 107508 - DNA, 122 bp, Homo sapiens
cgcggccgcctgcgcgctggccgcctgcgcgctgccagcccgcccgcccgccaggggctccgccgccctcgcctcggcctcgttagcccgccaggagccccgcagctcctccgggagcccgc

SEQ ID NO: 107509 - DNA, 122 bp, Homo sapiens
tcctcctcctccctcctccctcctccctcctcccccttcctcctcctccccctcctcccccgactggccccgcccccactgccggccccgcccccactgccggcccgggccccacccacgcc

SEQ ID NO: 107510 - DNA, 122 bp, Homo sapiens
gaaagattttgctgtctaacaaaacattttcttgatgttagtattcgattccacaataagcggtatcttttattctagtgttctctgtgggtagtaggtatgaatttgccctgtgactctca

SEQ ID NO: 107511 - DNA, 122 bp, Homo sapiens
agccctccgaccccaatcggaagcctaactacagcgagctgcaggactctaatccaggtgcgttggaggggttctgggctccaggaggtttgggggagacaggcgaaggctgcgtggggggc

SEQ ID NO: 107512 - DNA, 122 bp, Homo sapiens
gcgcgggagggactggagccttccgcccgagtgttccccagcctcgtggctggccctgcacgggcatcgcctcgcctcaaccccacagcagcctttcaggccgtcctgtttgggtgggttca

SEQ ID NO: 107513 - DNA, 122 bp, Homo sapiens
tgtatcatcaaaagagagttggggattatctgttattttcattgtccttgccacttcagccgctatttattcagagctgctcatggctctggcttccttgttttatttcttctgccaacccc

SEQ ID NO: 107514 - DNA, 122 bp, Homo sapiens
tttcctcattggtatctctgtctgtgtctgtaacagtctgtttgcctgtctcattttctccgtctctgtatctacatctgtgcctctttgtctccatctctgtctctctgcatcttaatctt

SEQ ID NO: 107515 - DNA, 122 bp, Homo sapiens
tctccagtccccctgattcctgcgcgtccagggtggagatgtgacatccttgctcattctcgtgagccgttctccaccagagacagagcgtcgcacagataccaccttccccatatgcgggc

SEQ ID NO: 107516 - DNA, 122 bp, Homo sapiens
gtcgccgcgctttggggttttggctgagactcaaattggcaggagggtctctagaccaaccgaggtgcatggggagcagaagagtgagactggggagctggggctggatttgggggttcctg

SEQ ID NO: 107517 - DNA, 122 bp, Homo sapiens
gaggagcgcctcttcccggccgccatcacatctaggaagtgaggagcgtctttgcccggccgcccatcgtctgggatgtggagagcacctctgccccgccgccccgtctgggatgtgaggag

SEQ ID NO: 107518 - DNA, 122 bp, Homo sapiens
cacccttagggaccgtgcctgccaagctgcctcccgggcgccccgccaccgcgggctcgacgctgcaccctgccaggaccagggccaggacagccacttatcacctccccgctcaggccccg

SEQ ID NO: 107519 - DNA, 122 bp, Homo sapiens
aggccccacgtgagtgtgagcgaggccccagcccacccctgtggccccaagaaggctctgcgacaaaatatccatgagtgccgcccacgaaggcattaaaaccaacgaccttctcaaaactt

SEQ ID NO: 107520 - DNA, 122 bp, Homo sapiens
ccggaggcgctgggagagcagccaggccgcctagggcggggcggggccgggctgcacccgcgggcagtgaagggatcaggagtgcaagcctggggagtcagacctccccctgcctcctctgc

SEQ ID NO: 107521 - DNA, 122 bp, Homo sapiens
gaggcggcttgcctgtggcaatgggaaacggtcatgtgtgggggcgatgtgccagcgccgcgctccgggccgcgctccagctaccgagaagccagaggcgacgactccctggtccaggtgtc

SEQ ID NO: 107522 - DNA, 122 bp, Homo sapiens
ccttactgggttttgcagagagacctggtgcatgtgtgtgtttctatgtgtgtgtgctcgcgtgcacccacacgcctttgcttctttagataaatccacagagtcacatgaaatcagtgaca

SEQ ID NO: 107523 - DNA, 122 bp, Homo sapiens
tgcagtcttccacgtcggcataacgaagataaaactatctgcttcatagggtccctgtgacgacaaaatgggtacggtgaaacgtcctaaagtggtggtggggtgctattagccgttggaat

SEQ ID NO: 107524 - DNA, 122 bp, Homo sapiens
agtacatcaaggcgcacgccagtggcgctctggacgagggcaccgggcaggtgtatcccacggaaagcactggcttctctgacaaccccagactacccagcccggggctgcacggccagcgc

SEQ ID NO: 107525 - DNA, 122 bp, Homo sapiens
ataacttttccctagagtgtaggatagagattaacactggtgtttctctgtgttccttggcgggctctctgattttcagcagctccacatgagatctgctctaaatcacttttcacaatcga

SEQ ID NO: 107526 - DNA, 122 bp, Homo sapiens
actttctgggggtggccgatactgaagttcggctggcggccagtattgataagctactggcggttgggtcttattttctttaacctgcgtttgaggttgtagtgttacgggcacctgacctg

SEQ ID NO: 107527 - DNA, 122 bp, Homo sapiens
gggccagtctcgcagggcaggggtcgattccagtctggcctctgctcgggccctgggtcccggtgcagggttactcccccgcccccctcgggccacttcgccttccgcggggtgtcatctgt

SEQ ID NO: 107528 - DNA, 122 bp, Homo sapiens
ttccttgcacatgccaggaatatcccagagtaatacttaaaacatttccttactataggccgggcacggtggctcacatctgtaatcccagcactttgggaggccaaggtgggtggatcacc

SEQ ID NO: 107529 - DNA, 122 bp, Homo sapiens
cccgccaggggcactgatcctccagcttcttgcttgctccctcgctccctttctctacctcggacattcccaggacaattagggctgaagttttcgggagaagcagccccgagcccgtggga

SEQ ID NO: 107530 - DNA, 122 bp, Homo sapiens
cgggccggccatcgggtgtgtggacctgcagagacccaggattgtgtgggagtgtgtccacgccagccttgtcctgcctggcacctggtgctggcctccccactcccttcccatcccttccc

SEQ ID NO: 107531 - DNA, 122 bp, Homo sapiens
agatattataattttaaattagccacattgtttctttcttagtggtatataaattaatggcgtgtcatacaatggatgtgtctaagattggatgaaatatggtacaggccaggcacggtggc

SEQ ID NO: 107532 - DNA, 122 bp, Homo sapiens
gtgacgagaaggagggcgggaagggtcagcgcgaggcaacccgccctcgacacccgccgacgggcgctcgctctctcacccggctctatagcagccgggaacaccgacgagaagaaagccga

SEQ ID NO: 107533 - DNA, 122 bp, Homo sapiens
gcccttgtttgcagctaggaggaaccactcccttttccaggatccttaacagtaagtacacgagacagcagcattctgaatggcaggaggaaggcaggcgatcagcacagggctggaatcat

SEQ ID NO: 107534 - DNA, 122 bp, Homo sapiens
cggagaagtcagctgaacgaggcctgctgtggttttggagggtcaggctgagatgcaggccgtggtctgggtctggtgcaaggcccaggtggcagcgggaacgcagcaggagtccaccctgg

SEQ ID NO: 107535 - DNA, 122 bp, Homo sapiens
cgagccgtggccgctgctggacgacagggagccggggctggtggcggcgggcggcgagtgcgccacgggcatggacatggagcggctgtgttgcagcgcgccccctgccggcagcagcgcca

SEQ ID NO: 107536 - DNA, 122 bp, Homo sapiens
ccacgcttcttccctcggctcccaccacccagaccgtctgggcccccaagacttggaccacgcaaaactctaggactgtccaggatggggatgcagtcgccacaaccagatacacacgcact

SEQ ID NO: 107537 - DNA, 122 bp, Homo sapiens
ccctggcatcctgtgtcttctctgctctctcagggccaccttctgagcaacagatccccacggcagccccagagagcggagtgggggtgggggggatggctttgtcaacttgttctcattct

SEQ ID NO: 107538 - DNA, 122 bp, Homo sapiens
gcctgcctcggctccggaatcaggctgtttccttctagacctcccatgggggattcaagccggcgtccgggtcaaagaacagggacaaagtcctcctgccacgggggaccatctgcaggcaa

SEQ ID NO: 107539 - DNA, 122 bp, Homo sapiens
agccccggctgggagtgggatcgctgagaacagctcgctcccgaagaaggagcaacccagcgcgcaggcctccgagacgtggaaacgcaacaattaccgtcaagacaaatccacacccgctc

SEQ ID NO: 107540 - DNA, 122 bp, Homo sapiens
acttttaaatgattcgaatcttgaggtttcaaactgaaccgtcttgtgccttttgcccggcgggcatttctgcggggaccgcgggtcaccttctgaatttttaccttcataaacagcaagga

SEQ ID NO: 107541 - DNA, 122 bp, Homo sapiens
agggtcgtggccgctgacgccccgcccccggcgctcaggtgcgcggcgtcgcgtccggcccgccgctgcagcctgccctgcgccagccgtcctctgccccgctcccgccgcagaccacagcg

SEQ ID NO: 107542 - DNA, 122 bp, Homo sapiens
ctgagtgggggcctacacgaggtcagggggctgggatgatggcctcacaatgtggcactgcggagacaggacagcctgagtggggcctacacgaggtcagggggctgggacgatggcctcac

SEQ ID NO: 107543 - DNA, 122 bp, Homo sapiens
acccccatgtctcactctgagccttagggagttggtgccacctagctacgctcactgacacgcatctcatgctgtgctaggatgttgtccccatgttagtgtgccctctccagggagactgc

SEQ ID NO: 107544 - DNA, 122 bp, Homo sapiens
gaggccccagacaaatgtgcccatacaacctctcaggaatggggaatggaagggagggctcgcctccaccgtgttgctgggctcaagagaaagtggcagaaggaccatggcggggatagtga

SEQ ID NO: 107545 - DNA, 122 bp, Homo sapiens
caggttgccagtctgacctagacactgacttagaacctggctccattgttatttccctcacgggagatattgatcttccaggttctatccttctgggctcccacccagccctctctcttcac

SEQ ID NO: 107546 - DNA, 122 bp, Homo sapiens
atatttaatttctgacatatcacggcgaaagcacagccagggcaattttactgacaaagacgaggggatgctttgtcagcactatagtggacaagagggcaaaggcagactctatgtagaca

SEQ ID NO: 107547 - DNA, 122 bp, Homo sapiens
gggatccccagagtcctagaatggggcctccaaattttggggtcccccaaagggggaagtcgttacttaaaaaatagagaattttctgggagtctggccagcacaggagctgtgggccatgt

SEQ ID NO: 107548 - DNA, 122 bp, Homo sapiens
acaggggacgcattcagcaccgaggtcagcagcccatcccgagccccccacacccccgctcgtctcccactctgtgtcctctccactggccttggggtagatgagctgcccccgtcctttct

SEQ ID NO: 107549 - DNA, 122 bp, Homo sapiens
ctcactgacctctgcttggcagttttaggctgctggcaagtgctctgcaggcagagcccacggagtactgttctcaagatgaagcccacaggcttttgtcttgatgctgcagtcagcactga

SEQ ID NO: 107550 - DNA, 122 bp, Homo sapiens
gcttcagcatgcatattattaactagagttccaaatttgtttccagttctttttttctttcgtatgtaaaattaacatacaatgaaattttttcccattgtatgtaaaattaacatacaacg

SEQ ID NO: 107551 - DNA, 122 bp, Homo sapiens
tagggaataatgtcagaggctctgggaaggctctccatgcaaaaacctttctcagggattcgaagatatttttaacaaataagatgaagtataaaatttcacaagtggaattcagccttaaa

SEQ ID NO: 107552 - DNA, 122 bp, Homo sapiens
ggggagcgtcggggaagaaggaggggcccgccccgtgagactgcggccaggtcctgcccacgtgcctgctctgctgggcttgcagccaggccacctccctggcccggacccctcagggcctc

SEQ ID NO: 107553 - DNA, 122 bp, Homo sapiens
caccactgcactccagcctgggcaacacagcgagactccatgtcaaaaacaacaaacaaacgaacaaaaagaattgtggaatgctgctcatccataaaatgctaatatctaatgggcatttc

SEQ ID NO: 107554 - DNA, 122 bp, Homo sapiens
tttccctttgcaacttgtcaccattcccagctcatgcatgctttagtcgccaaattctgacgcggacggagggccttttcagaaggtcatctcttcccacccaaaggagaagtctcattaga

SEQ ID NO: 107555 - DNA, 122 bp, Homo sapiens
tctgtctcctgcttctctgttccttcttgccatgggagaacattccaggatagaacgcttcgttttctttctttctttttttttttttttggagacagggtctcactctatcgcccaggatg

SEQ ID NO: 107556 - DNA, 122 bp, Homo sapiens
gccctgtagagcatccctgctgggaactctggccagcttgagcgatgcagatcctgagagcgctccggggtaggcatttgcccctgtggaacgccttgtcagagcagtgcacagcaggcccc

SEQ ID NO: 107557 - DNA, 122 bp, Homo sapiens
ctcctcggggactggggttggacactgtcgccgctttgctaaagccagaacatttcaggccgagggctccagctgcagacacggcctagtacacttctccaccggagggtctgtagtctctg

SEQ ID NO: 107558 - DNA, 122 bp, Homo sapiens
acctacccctctgatgggaggtggggcgaggaccggaatattaaggatctttaaaggaatcgacttcagctctgcagaaagattagcaatcagtaaagatttggggatgaatgggcacctag

SEQ ID NO: 107559 - DNA, 122 bp, Homo sapiens
cgacccatccactccccaccacaagctggcaggtaaggcagtctgggaggttagcagaaccggaaattcaacccagagaggttaggggatgccccagtatgacccagcaagtccccacccta

SEQ ID NO: 107560 - DNA, 122 bp, Homo sapiens
ccgagcccgcccgcagcgcctggggcctggggagtgggtggtagggtaggactggtgtcacgaagacgccccgagggcaggaggccctaaccactcccttggcagtggatgtggggagtggg

SEQ ID NO: 107561 - DNA, 122 bp, Homo sapiens
ttctacttaatacctctccatgccaaccccgttgtcatttcccagcggccgcctctataacgggcacttttcagggacaaagaattggtccgttaatgttcctcaaattcgaacgcgcctag

SEQ ID NO: 107562 - DNA, 122 bp, Homo sapiens
ttaaccaaatgtcctgaaaagcttataggctgcttctccctttggccttatatttgcaaacgaactcattttacaaactggggctccaagcctagatttgctcaaggcacataactgggaag

SEQ ID NO: 107563 - DNA, 122 bp, Homo sapiens
gacatggtggctccagaggtgtccctgctccctgggagccagctgcaggagctgggggcacggcaggcgcgccggggggctctgtggcacgcagcgaaggctatttaaatgctccgttggag

SEQ ID NO: 107564 - DNA, 122 bp, Homo sapiens
aaaacggtaacggccgggcggcgcgtccgccgtcctggtgaagggggttagcgtccgtgccggcctctcctgtggaaatgttcctcttcagcagccaggcctgttcctggggacctgcacat

SEQ ID NO: 107565 - DNA, 122 bp, Homo sapiens
ctgagagcctggtctggcccctcacctggcttcttcttggcggcctcctggatctggatgcgctccagctctgccaggcaggggggctctgtggggagagaagcagcctctgatgggactgt

SEQ ID NO: 107566 - DNA, 122 bp, Homo sapiens
cggggggcagcagcgggggtgggacgtggtggtggtggtcggggctgccgccgctgcccgcgctggacgtactgctgccgtcgcccacgtcgcgggcccccgcgccgggcgcgccacccgac

SEQ ID NO: 107567 - DNA, 122 bp, Homo sapiens
aggggcaggttgttccttgcatgctaagccaggccatgtgaagataatgaagtcccgcctcgggctaccggacaccgtttgtaccatcaggccatcctgtccaagtctcctggggtctttgc

SEQ ID NO: 107568 - DNA, 122 bp, Homo sapiens
cgtgtctgtaagggtgtttttggatgagattagcaattgaacctttaaaccaattcctcacgtctcccttctatttgttgtgtctctggagaaccctcatacagttgtatcaaagatacaga

SEQ ID NO: 107569 - DNA, 122 bp, Homo sapiens
ggaaaaggtggcagagagggcagtactgagtatgtcagaagagccctcctggttttttagcgatttgaacccactagacaatgtgtgcacatagggaatgtcctttaagaatcatggatctc

SEQ ID NO: 107570 - DNA, 122 bp, Homo sapiens
acggctgcccctgcccacactgggcaggctgctcggccgcagctacggcatccccaggctcgccaccatcctcaccaggtgtcccatctgggcccttgctgggcgcctctgccctgggctgg

SEQ ID NO: 107571 - DNA, 122 bp, Homo sapiens
gggcggatctcgcggcgcaggcggcggcggccgaggtggggtcgcgcggcggaggcggctcgagcttcgtgctgcgcgctctctcttgggctcctcgctcgatcttactgccccaaaaatgg

SEQ ID NO: 107572 - DNA, 122 bp, Homo sapiens
aaaaagccaggatcctttccttggcgcggccacccgagccactccacccgtcgcgccaaccgcctttccaggtggggaccaaagcccccactctccgctggcatctcattgaagggcacccc

SEQ ID NO: 107573 - DNA, 122 bp, Homo sapiens
ttttaccttccttgagagcagatggcctgaataagaagagaaaatgtggtccagaagggtcgggaaaggacaaaaagtgaaagattccctagatagctgcaaggagcctggggagaggggag

SEQ ID NO: 107574 - DNA, 122 bp, Homo sapiens
atcgcccccacggggggcggctatcccagccggaggctctgcagcagggctctaacggggcggaggagagaaggagaggcagggtcagcccaccaacgaggggagggagggttgaggggaag

SEQ ID NO: 107575 - DNA, 122 bp, Homo sapiens
agtgagtgcccctccccgacccccagctcaggcccgggcctgaacccgcttcgggtcctgcgcccgcctagaaagcgggaggagctgagtgacagtccccacccacctgtggacagcccctt

SEQ ID NO: 107576 - DNA, 122 bp, Homo sapiens
aacgggcttgggaggtgagcgaagtcccgaacgatgacgggtggaacagttagcggccttcgggcggttggtctcgttctaccagagcttgctgtcggaagagagaaatggtggaatgacaa

SEQ ID NO: 107577 - DNA, 122 bp, Homo sapiens
atgttcactaggtcctcctcccctctatggccctccttcctcccctgtctgggacccccacgacagcaaggccatggctgtgtcaccacctgttaggagaaggacaggaacctcaaggacct

SEQ ID NO: 107578 - DNA, 122 bp, Homo sapiens
gtattcccatgctatgaatgcaccacaatgtttttagccattcacttgtcaaaggccttacgtattgttgctagtttggagctgttatgaataaagctgctgaataaatttatgtacaaatt

SEQ ID NO: 107579 - DNA, 122 bp, Homo sapiens
ttgagcctcagtgatcctgtggccgaagttagcgccttgacgtgggacaaccggacacgtcgccaggagagaactgaggcgccttctagcagttgtgacgccaaaatcacgtctccggagac

SEQ ID NO: 107580 - DNA, 122 bp, Homo sapiens
tttcacttttccccccttttctttttaaaaatttttttgagaaagcactttagaagaaaccgagtctctgggctcagatttcattggatctctcatggcttagaatggtttattcgtagaca

SEQ ID NO: 107581 - DNA, 122 bp, Homo sapiens
cacacacacacacacacgccagacacaatggctgggtggggctgaggaactggcttcctccgcagagatctcaatctgggccctgagttcccaccccagaatcacaggaacacacacttgga

SEQ ID NO: 107582 - DNA, 122 bp, Homo sapiens
ccggggcacagggagagaaacacaaagggcaggagatcgacggcttagggagctggaggacgagaggtgggaggggctccacgacgccaatcacaataagcagggagccagtcagattagga

SEQ ID NO: 107583 - DNA, 122 bp, Homo sapiens
atcagtttcagagggcgaaatgtggaatcgctcctttgtacctcgaaggctggtttaaggcgtggggaataaggggaaaacagcgtcgggccatatcccattgaagagtccgaaactcaagc

SEQ ID NO: 107584 - DNA, 122 bp, Homo sapiens
gtgaggactttgcaatctgtaaagctctgtgtgtgattaaaggatcgtttttatttctcgcgaagcggtttggcactccctcgggctcctccaggccacacggacacacacggacataagca

SEQ ID NO: 107585 - DNA, 122 bp, Homo sapiens
gatacagggatccagttttgttgtgaggagtgctataggctggacactttggaaaaatcccgagtgcactttgtggacactgctggcctgaaatagtggggcacactggcctgagagctccc

SEQ ID NO: 107586 - DNA, 122 bp, Homo sapiens
cgtcacctctaaagtcacagcttgaagccttgcgaaaggaactggccctagaccccaccccggcctataaatcaccagggcgcagcctcagtgcctgggggtcggcagcagccagcgtcagg

SEQ ID NO: 107587 - DNA, 122 bp, Homo sapiens
tagtcccatgacagttccactgcacccaggtagtatcttctggtggcactaaagcagaatcgcaaaaggcacagaaagaagcaggtggagagctctatttgcatgacttattgctacaaatg

SEQ ID NO: 107588 - DNA, 122 bp, Homo sapiens
agtagcaggtgccagctgtgtcggacatgaccagggacacgttgtacagggtgggtttaccggtggacttgtccacggtcctctcggtgaccctgttgggcagggcctcatgggccaccacg

SEQ ID NO: 107589 - DNA, 122 bp, Homo sapiens
agctcccagccctaggattagacccgcgaccccagaccagtcgcgtccagctaagtcctgcgactcccccagcccgccccctgccccgcaggaacacaggaccggcgcgcggagagagagtg

SEQ ID NO: 107590 - DNA, 122 bp, Homo sapiens
attggcaagatagaagctagggatgggcagctccctggacagggcagccaggcaggatgtcgaatctggtggcagaatatccagcccatcccagggctcagagagttccagcttcttctctc

SEQ ID NO: 107591 - DNA, 122 bp, Homo sapiens
tttacggcatgttcagaagatgaatctaccattacgctgactaacgaagtctagtcatagcgatagcggtgtcttagcagcagaagtgatggttggttaactgagcgtgttttagacgccat

SEQ ID NO: 107592 - DNA, 122 bp, Homo sapiens
atccgcttccacgtggccagcacggtgcagacctacagcgccatagaggaggcgcagcagcgtctgcgggcactcgaggacctgctcgtgtccatcggtctggactgttgagcccctggctg

SEQ ID NO: 107593 - DNA, 122 bp, Homo sapiens
ccaccagaggaccgtgagcctccggcaagtgatcaaatactgagcccgaatttcggcagccgtaccaacgcaatcctgggagcccattccacccactccgcagcccctctcccacctcacct

SEQ ID NO: 107594 - DNA, 122 bp, Homo sapiens
acaacagcactggaaggcagatgccaccactagctcatttcacacgtgtgggaactgccccgggagaggttaagtgatgcgtccaaggccacacagggataaccggtgggacaggatctgaa

SEQ ID NO: 107595 - DNA, 122 bp, Homo sapiens
agacagccccgaaacaccaggaatccgtccccggggctgggtggagcaggcagggctggccgggagtgagcaaccaggtgctgccaatttcaccctggccacccctgtcccaggcaacgcag

SEQ ID NO: 107596 - DNA, 122 bp, Homo sapiens
ttgtctggtcctgggctggttctggcccctgacccagcagagcccagggcatcacccccgcgaggcggacaccctgaccctcatgagctacgcctgtggctggctcggtgtccccctaaaat

SEQ ID NO: 107597 - DNA, 122 bp, Homo sapiens
tctgttcacagctgtctgcagagctcctactgtgtgctgagcctgggggtaaacagggcacggacacgtttgggaggggattacaggccgggtttccacactttttggtccaggcaaaccca

SEQ ID NO: 107598 - DNA, 122 bp, Homo sapiens
cctcccacaagaagctggtggagcagagtgttccctgactcctccaaggaaaagagactccgtttcgcggtctgctaagtaatgggtgtcttcgcagacactggcattaccgcttgaccaag

SEQ ID NO: 107599 - DNA, 122 bp, Homo sapiens
tgtagcaactgtgtgtcgacctcatctgctggcagctgcacgtatcggaccactgagccccgaatgaagcagttcttcactgataactagacaaagatggacaaatatgaaaacacccttaa

SEQ ID NO: 107600 - DNA, 122 bp, Homo sapiens
actctacagcacttccgccttccgtcgcgagggcccgcccctctccagccacgcccccaccgcaggccgcaggtggattggccacgccctcggaaggctccacccacactgcacacactatc

SEQ ID NO: 107601 - DNA, 122 bp, Homo sapiens
tggagggagctaggaaatcatgcgggtctctggttccaaatgagaatcacctggggggttcgttataatacgtgttcctgagtttcctctttacttaatgggttagattagcctttccaagg

SEQ ID NO: 107602 - DNA, 122 bp, Homo sapiens
gcaaggattttcggaagtcagagatggccctggaacaactctggagaaacgggacctgcccgtcagcagctggacttctggcctgaggagaggccgcagcacgcggaagagaggcgggagca

SEQ ID NO: 107603 - DNA, 122 bp, Homo sapiens
gacattttccattataaatgttaagaatgatgagagcctcagcaggacaatgcccggccccgtgatggctgtgtcactgcacggggcgggctcccatccacgccccttctcagaagagtcgg

SEQ ID NO: 107604 - DNA, 122 bp, Homo sapiens
acgacttttcgtggaaaggagggagcaggcagccagcggccgccagccctgcgccgccgccgacacaaagagtgcgggcgattccgcgagactgatttatgacgttttacagccctataaaa

SEQ ID NO: 107605 - DNA, 122 bp, Homo sapiens
tgaaaaaggcacattagataccacactgcaaagcaggttatagctgtggagtcttaagcccggggaagcatagtctatgtccagactcactgagaagtaaagttgaatcattcacttcaatt

SEQ ID NO: 107606 - DNA, 122 bp, Homo sapiens
atgggtcaaggacgcgatgcagcatctggaccgccaggctgctgccctaactcgaaatggcggcaccttcgagaagcagatcggcgaggtgaagcccaggaccacccctgccgccgggggaa

SEQ ID NO: 107607 - DNA, 122 bp, Homo sapiens
ttaaagtttctttccaagcaagttaacatggaagtccaccagtaagcgtacgcttacctgcgtgctgggagttcctggagatggtgccttggcagctttctgaagcttcctctgcccagatg

SEQ ID NO: 107608 - DNA, 122 bp, Homo sapiens
ccgcgaaagtctgcagcttcactcctgaagtcagcgagaccacgagcccactgggaagaacgaacaactccagacgccccgccttaagaactgtaacactcaccgcgaaggtctgcagcttc

SEQ ID NO: 107609 - DNA, 122 bp, Homo sapiens
tgatgaaggccacctggatgaagagcgacagccagctcagcaggtacatgaaccacatggcgcccccacccgcccgctccccggccaccgggacgggcctgcgcgcttcggctccggcgaca

SEQ ID NO: 107610 - DNA, 122 bp, Homo sapiens
agcctcgcaccggccaatcaaggagaacctcaagaacaacttcctctatgacttcctctacggcggtgtcggcctaacagctccacgggagtgtggacgaggagctgagcaaaaaaattcca

SEQ ID NO: 107611 - DNA, 122 bp, Homo sapiens
ccgtgggtagcgcggggttactggaatgggactccctgaggaagtcccctgagaagtcgccggcacgctccgccttccttcttgcttcccatttctcgttttcttctcagccttcatagttt

SEQ ID NO: 107612 - DNA, 122 bp, Homo sapiens
gacttccagcatgtcatatccgtagctcctttttttttttctctattagattacttctaacgccttttgaatatgtgcacgctgccatacagtttaggcagccaaatgttatcccaattttg

SEQ ID NO: 107613 - DNA, 122 bp, Homo sapiens
tagcctgcgcctcagaccgagtccgggcggagtttgactgcagctactgaggccggcagccggcggcggcgggtgcgcagcgtctgggttcagaagaaagccgcaggtgggcgcagaagctg

SEQ ID NO: 107614 - DNA, 122 bp, Homo sapiens
aaagagagtctcttcccgaggaaaaagacggaatcttgaaatgagagaaaacgaacagcacgaaagggaagaaacctcgaaaaattacgccagagtggggactacaaggaggaaggggaagt

SEQ ID NO: 107615 - DNA, 122 bp, Homo sapiens
ctccactccgccttggagggggctgcggaagcccggaggtgacacgggctctgggaggggcgtccccaacgtgggggaggggtgacaggggcctttgaagacagcgcgggactaggaggggg

SEQ ID NO: 107616 - DNA, 122 bp, Homo sapiens
ccatcccacctgcactgccggctgcgctgtcgcctgctcacaccgtcccacccgcaccgccggctgcactgtcacccgctcacaccgtcccacctgcaccgccggctgcactgtcacccatt

SEQ ID NO: 107617 - DNA, 122 bp, Homo sapiens
aaatcccaactgacaacagaataaagcaaattctaagtcaactaagcgaaaaagtgtcaccgcaaacagaaagaactttgcaaactgatgcaacatttcatatggctcctgaacctaaattt

SEQ ID NO: 107618 - DNA, 122 bp, Homo sapiens
ctctgtcgcagacaccggtgcccagggtacacgctgccgtggcctcggcttgagagccctcgagaaactttagaaactttcccagagctgtcagtgaagcccggggcggtcatctctgcttg

SEQ ID NO: 107619 - DNA, 122 bp, Homo sapiens
gcccttctctgcggggttggcaaggaccaccacgggaggacggtaacagggccctggctgcgggttggggtggggctgtcctgatgcacgcagacagctggaagggtcttggttttctgaaa

SEQ ID NO: 107620 - DNA, 122 bp, Homo sapiens
gagtagacgacgaacagcaccgggggcgccgagagcagcaggatgtggaagagccagaagcggtagtgggagaccgggaaggcgcggtcgtagcaggtctggcgacagcccggctgcagcgt

SEQ ID NO: 107621 - DNA, 122 bp, Homo sapiens
tcccccagaaagttaaaagaaaaacggggagagcttttaagtgaaaactaaatgtgctggcgtcacacttggaaatgcaaggatgcagaagaaatggtaagatgtgggtgggtagtatccca

SEQ ID NO: 107622 - DNA, 122 bp, Homo sapiens
gcatgcgcaatccagaccctggagttgctaaggccccaaggcagagagaggctcaggctacggagaaagccaatcagagggctccaagactgataagttagccaatccagattcgagggtga

SEQ ID NO: 107623 - DNA, 122 bp, Homo sapiens
taaatgtctctttttcttccgcctccccacccccccgcccccctccgcccacctgcagctcggattaaatagtgaattaaagtatagcacagcagggactctcccaggagcctcatgaggaa

SEQ ID NO: 107624 - DNA, 122 bp, Homo sapiens
gcatacagcgtcagtgtgataccagtaatttgacaagttctcatcccttaggtcatcagccggtacaccagagcaagtgtgctatattgaaaataaaataataggacaggctgggcacggtg

SEQ ID NO: 107625 - DNA, 122 bp, Homo sapiens
atctctcacagggaacacacaagcctcagccgctgccccccgagcctgccccggcctgcccgctcacagcccccgcggtgctgaccctctgacccgcgcactgggctcttgcctcacggact

SEQ ID NO: 107626 - DNA, 122 bp, Homo sapiens
ctggcttttgagcctgagtaaatagcagaagccaagactcagaggggtaaacttcaaaaacggcagtgttaaaatctaagggcagtgttaaaatctaaggtgtgatggtggtgtgttgggag

SEQ ID NO: 107627 - DNA, 122 bp, Homo sapiens
ttcctgttcctttttgctgaaaattcatgtgtgtatccacgaatgggcagtaagtggtcccgtgtaaccaccatggggaaccacagtgcattgttcccgtgggatgtgtctcaggagcctgg

SEQ ID NO: 107628 - DNA, 122 bp, Homo sapiens
ggcactgggctggggagccgcacagccccctttcaccttctcgactcctttccaacccctcgctctggtggatcccagccccggcccccactcccggccctgttccccgctctccgccccgg

SEQ ID NO: 107629 - DNA, 122 bp, Homo sapiens
tctggaccgccaggctgctgccctaactcgaaatggcggcaccttcgagaagcagatcggcgaggtgaagcccaggaccacccctgccgccgggggaatggacgagtctgtggtcctggagc

SEQ ID NO: 107630 - DNA, 122 bp, Homo sapiens
ggtgggagggggtgggggcctgccgattggattctttcgcgtgtgtgtagaagcggccgccgccgccgccgcggcggagacgacaacaacttgctggttttcaggttgggttaacggcatgg

SEQ ID NO: 107631 - DNA, 122 bp, Homo sapiens
ggaaacaggttccactgcggacaaaggagggagctgggtcctgcttcctcctggtcttgtcgatgaggatttttagaccgtggagactgcgctgccctgccctgcacctaccctcactctcc

SEQ ID NO: 107632 - DNA, 122 bp, Homo sapiens
accctggctcaacctgttacccgccctgccggcaagccggggtcactgcagtccccgtggcgaagcagggtcagctcagctcaccgcaccccactccatccagccctgcccatctctacggc

SEQ ID NO: 107633 - DNA, 122 bp, Homo sapiens
attaggctcttcctcagctgcgccgagggcctggtttctattcatttgagaagctgtgtgcgcccctgtatggtctgttctttcctttagggctcgcttttaacagtgagtgttgttgtggc

SEQ ID NO: 107634 - DNA, 122 bp, Homo sapiens
tgttcagatttgaggtgaaaacacagcttggaaatgatgcagctgcctctgagtgagatacgctaaccaaaaatcctaactgcagggcccaaatcctgtagaaaattttcctcttgatcctc

SEQ ID NO: 107635 - DNA, 122 bp, Homo sapiens
tcgctcctcctgcgcgggccaggtgggcccctgccggtctggcacccctgacccccgggacggggagcagccctgctgcagtagagacctgcctgcctctgcaggccaccccagagcgggcg

SEQ ID NO: 107636 - DNA, 122 bp, Homo sapiens
aggcggctgctgcgtcggcggccgcggtgccgggcgctctcagggttctggagaagcaggcggaggcccgcccccggcccagctcccggagcccccgccgccccgcccaccccgggcggaga

SEQ ID NO: 107637 - DNA, 122 bp, Homo sapiens
catgtggaagccctcacgggttcattcacaggttcatacccctaggagcagacaggaaggcggcaggtctttctcatgttgatgtcagggaaactgaggcagaattgaagcaagtgaatatc

SEQ ID NO: 107638 - DNA, 122 bp, Homo sapiens
ccagagctgaaaggactctcccacccaatcaatcgggaccttcaagcctttgggaataaacgaacagcctatttgatgaatgacaaaactgagaaggcctagagagaaacaatgcctttgag

SEQ ID NO: 107639 - DNA, 122 bp, Homo sapiens
ggtgggcggggccaatatttggacaaaagcatttcccagttccaaactgcctgggaaacccgcaattctatatgtaatcattttctctgtgccccaagggacatgtccattgtttttactgt

SEQ ID NO: 107640 - DNA, 122 bp, Homo sapiens
cttgaaggagggtcaggtctagagacagaaataagggagagaatagctcccgtctggagtcggaagggagatgtctttcgctacagcgtgtgaatgttgctttgcttccaaacacaccatgc

SEQ ID NO: 107641 - DNA, 122 bp, Homo sapiens
gtgtgcgcagtgattaattgggagttttctagctgtggggaagtcagtattagcagggcacggccgacagacccattttacagacgggaattcaaggaacagtgagactaaggcgcttctag

SEQ ID NO: 107642 - DNA, 122 bp, Homo sapiens
tatttcttatcgttctggaggccggaaagtccacgatgaagacaccagctggttcccagccggtgggtgaggacccagcctctgcttccaagatggcacctctgggctgcatcctcacgtag

SEQ ID NO: 107643 - DNA, 122 bp, Homo sapiens
ccgaagcacgcgagcgtgattttggatggaggccggcgggcgactttgcctagctgctgccggttcctgtaagggacatttttttctgagtaaatggcgattcctctttcatgtagcatctg

SEQ ID NO: 107644 - DNA, 122 bp, Homo sapiens
aatattccccactttacctctttcttcctttcttgataacctgccccacagtctttataacgctgaagcttgaagtgcatcccagtggttctgcttcttttattgaatcttgactgctacat

SEQ ID NO: 107645 - DNA, 122 bp, Homo sapiens
gtaatcccagctatttgggaggctgagttgggaaaatcacttgaacccaggaggcagtggcgaggtaagagaccagcctgggcagcatggccagaccccatctctactaaaaaatgacaaaa

SEQ ID NO: 107646 - DNA, 122 bp, Homo sapiens
tccatccctgcaggtgaggcagggcaaggtcacccggcaggggaagttcaagcccaacagcgtcacatataggaccaaatcaggcaacatcctgctgcacaagtcgaccattaacaggtgag

SEQ ID NO: 107647 - DNA, 122 bp, Homo sapiens
gcgtcttcaacctttcttcactcttttgagccactcctgcgtgtccacacagcttgtgaccgcgtaacagacccagcacaactagggcgacagcaaaagaggcggagccagggtgtgtgcag

SEQ ID NO: 107648 - DNA, 122 bp, Homo sapiens
agaggaagagacaggctgtgaatgaaaaagtcgtttttcggggcgaaaagggcaagctgacgaatgctctctagtaggtttttggtaaaaatgtggttctatatttccaaacctttacaatt

SEQ ID NO: 107649 - DNA, 122 bp, Homo sapiens
atgcattttcttcgtgcagctctaaagcaagattgtttgttgttataatgacggcctttccgtctttacttacaacatcctgttctcccaggacattaaaggctgggctgagagacaaagct

SEQ ID NO: 107650 - DNA, 122 bp, Homo sapiens
gaggtccccgccgaggttccccccgaggttccccccgaggtccccccccgaggttccccccgaggtccccgccaagctccccaccgaggtccccaccgaggttcctgccgaggtccccccga

SEQ ID NO: 107651 - DNA, 122 bp, Homo sapiens
gcctgggtaatacaataaagcagcggtcctcaaccttttcgtggaagacaatttttccaccgtgcggggcgggggcggggccataatggatagtttcggaatgaaactgttccacctcagat

SEQ ID NO: 107652 - DNA, 122 bp, Homo sapiens
atatgtctgtgtactttatatatgtgtgtgtctatatgtgtgtgtatctatgtgttcctccggagctgtcttcattatccagcttctgtgccaggcctatgattttggcctttatttttcat

SEQ ID NO: 107653 - DNA, 122 bp, Homo sapiens
gcgggatgccgagctgatcgagccctggaggcccagcctgggcgagctgctggccaggcccgaggctctgacgcccagcaatctgttcctgcttgcagtcctcggggccctcgcatcagcga

SEQ ID NO: 107654 - DNA, 122 bp, Homo sapiens
gtgtttgtcgagggtggctaagtctcagctgaggccgaccagcaccaccagacgtcatcccgttgtgacttctacctccacaccagatggcttcttcccacaccagtcaaaccagggtctcc

SEQ ID NO: 107655 - DNA, 122 bp, Homo sapiens
cgggacacagagaggtacaacgggacgtggagttggatcgagctgtctcgtaaggaatatcggaaggggtggggacactactgggagatggcataggtccaggacactaattaggctttggc

SEQ ID NO: 107656 - DNA, 122 bp, Homo sapiens
ttgcaggagctcgctctccgcccgggctccggctccgctccagccgtccggggggcgccgcggcgcgcagagcgcagcaccccgactccagccaggagcccccgcccccccggagcgcagga

SEQ ID NO: 107657 - DNA, 122 bp, Homo sapiens
gagggtgctcctaacaactcacgccagctggccctgtgatcggcctgccctctccacgtgcggttctactgtccacactggctgccccacgcagggtgtgcgccgaaaggtgtgtctcagaa

SEQ ID NO: 107658 - DNA, 122 bp, Homo sapiens
cggcccggagcccaggcggggagagtgtcctggcctgggtggaaccctgggaggcgggggcgtcgtggctggtgtgccccactggcgctaggccgtggattgcttggtttccagaacatctc

SEQ ID NO: 107659 - DNA, 122 bp, Homo sapiens
gggcgagaggacttgtctggaaactcggtccacagtgggtccgagagcttctgtgtgactcgtgctccttgctgaattaggaggttagggagcagtgcaaacaggaaacgagaccctggccc

SEQ ID NO: 107660 - DNA, 122 bp, Homo sapiens
gcctggaggaaggtgtttagggcatccgtgcttgccgagaacccaggctttcctagtggccgctggcagcggagggcagcgactgggagctccctctccttccctcccgggcccattgccat

SEQ ID NO: 107661 - DNA, 122 bp, Homo sapiens
cttcgggcactacgcggggctggaaataccacgcactgccccttcgcctagacccccgctcgggccactcgggttctgccttcaaagctagtagctgccccagacttgggggtggggggagg

SEQ ID NO: 107662 - DNA, 122 bp, Homo sapiens
ggcccgggggctgcgcgccgatgatgtcagctccggccaatcgcaggcggcgacacacagcggccccgcctggcgtgaccgagactctccatcacggcccgcaccattggctcaattcgaac

SEQ ID NO: 107663 - DNA, 122 bp, Homo sapiens
cacagggtttcaccatgttggccaggatggtctcggtatcttgacctcgtgattcacctgcgtcagcctcccaatgtgctggtccagggattacaggtgtgagccaccgcacccagcccctc

SEQ ID NO: 107664 - DNA, 122 bp, Homo sapiens
gcccttctcctgtctgcccctctgagtcactgcctcacccacagccccagaaccttcatgcgggctgttggcgctcccctgctccagcactgcagcacatagcctgcccttgctgaacctct

SEQ ID NO: 107665 - DNA, 122 bp, Homo sapiens
acgcggtaatagggccctgtgattgctctattaacctttagacctgtctgagggactctccggctcgcagccccgctgcgctggggcctccaggctctgacgccgactcccaactcaggcct

SEQ ID NO: 107666 - DNA, 122 bp, Homo sapiens
gtgcctccaccccaggcaaggcagtttcccccaggtagccataggcctgcagcacagatccgtagaccaggctgggcctctgggtgctgtgtggccttgccccgctcctcccctctctggat

SEQ ID NO: 107667 - DNA, 122 bp, Homo sapiens
acccagaggcattgctaaaatttgaaggccccgaaaagctttgagaacacacccgtgacacgtgcgaagtctacgggaaagagaggcggcggactcgccaggggaaagctcatatccaggga

SEQ ID NO: 107668 - DNA, 122 bp, Homo sapiens
ccgaatctggggtcaaagggcagtttgacgctcgtttctcctgcggggccgaaggagtgccggaatttcagctaaaccctggttacaaggacttcaagccaggacctgatcggcctgcacgc

SEQ ID NO: 107669 - DNA, 122 bp, Homo sapiens
attgcagcattgtcttgtctttgtctccagcctgccagcctaccgtgcagattttggactcgccagcctccataatcatgtgaaccaattttttaaaataaataaaaataaattacacacac

SEQ ID NO: 107670 - DNA, 122 bp, Homo sapiens
agccggcttcaggaaacttagaatcacagcggaaggtgaaacagaagcgtacacgtctcacgtagcagcaggcaagagcgagctggggaaaccgccatttatagaaccatcagctctcgtga

SEQ ID NO: 107671 - DNA, 122 bp, Homo sapiens
acgttctcgcgccgcgccctccgctcagctctggcgcgactgcccaggaccctggaccgccggtgtcctccgttctcgacgaagctatcccctctggctgctccagccaggcggcccctgcg

SEQ ID NO: 107672 - DNA, 122 bp, Homo sapiens
gaccgtggaccgtccactggggacagcttagtgcctcctggtttaacttcagctgctctgcgggcccttatgaccggcatggctggctttgtctggggctgtgagcttctgactctcctcag

SEQ ID NO: 107673 - DNA, 122 bp, Homo sapiens
tagtaatgtgtatgtatcatacacacatatctgtcacgtataaatatagattcatcattacgtattttacagaattaaaaccagtgaaaaaataattacattgccagcattaggctcaataa

SEQ ID NO: 107674 - DNA, 122 bp, Homo sapiens
cgcggccacaaagggagcccgggaggcggaatctttccacatgcctgatcaatgggggcgcggagacggcggcgcaaacaggcctgagacagccgcacaaagaggaggcccctcggtcgctc

SEQ ID NO: 107675 - DNA, 122 bp, Homo sapiens
cccccaatggttacctccacagaggctttgcgaagggcgctcactgacttaggtgaagagcgaaggctcaagactgtgccgctttatagtggccccttgacgtccagaagttccccccagcg

SEQ ID NO: 107676 - DNA, 122 bp, Homo sapiens
ggcactggtggcatcatccaggataagtacacacggtttccggatcaatgctcgggccaacgccactgcctgtcgctgaccccctgacagctggctcccagcctcgtctacctctgcagagc

SEQ ID NO: 107677 - DNA, 122 bp, Homo sapiens
gtggagcggaaaggcacacgcgagaggggtgggcggggagcagcagctgctacttcctcccgccctgccgcccgctacgcggccttcgggcgccccttcctctgctcaggatggcgctacac

SEQ ID NO: 107678 - DNA, 122 bp, Homo sapiens
attcaacattacagcattccttttcattcactctgattactgcagcagcccaagggtctacggtctgcccccgatcatctcttcatgctgggttgttctccaaatgcacctggaacctcttg

SEQ ID NO: 107679 - DNA, 122 bp, Homo sapiens
tgttagagatgaggatgccccgcccttcggccccagagcaaaggatttccccgcttccggcgtggcccaaagaatcaagacccggtcagcaatggagcccagaacctctggcccccgccagt

SEQ ID NO: 107680 - DNA, 122 bp, Homo sapiens
aactcacaaatggtgtgctattcttgggcaagaacagggacgctagggccttccttccaccggcgtgatctatccctgtctcactgaaagcccctgtgtagtgtctgtgttgttttcccttg

SEQ ID NO: 107681 - DNA, 122 bp, Homo sapiens
cacccttgtcgccgccgttccggtaacacctctccaacgctttcgatgcttctacttcttcgggaacaagacaagatggcgcccgatttgtctcacccggaagtaaagaataataacatccg

SEQ ID NO: 107682 - DNA, 122 bp, Homo sapiens
gccctctgcgccccgtctcgtggtcactgccgccctccctcccgccacacctgtgatgatcgctatggagccgcgcctcaggtggcattactataaacctaagaggagaggcgcccgttcga

SEQ ID NO: 107683 - DNA, 122 bp, Homo sapiens
ctttaggaaacctggcagaaacctttctactctggccaggcaaggggagggagggaagagcgtcagtactacagccaggccatctggtgcaatgctgtgactcattctcttcagagccatca

SEQ ID NO: 107684 - DNA, 122 bp, Homo sapiens
aaggccgtctctaaaacaagcctatgtttgggggcaacggctccagagaggggcccctcccgcattcctgctggggtgggggtgggtggctgcctgcagggccctgacagatctgggggagg

SEQ ID NO: 107685 - DNA, 122 bp, Homo sapiens
cgcccacaggctgggccaatcacagtgccgcacttttcatactgcccgacaggcggtgggcgggccgctggtgactgttacccaacaggcgccgcggctgctccggtggcgccactgactcg

SEQ ID NO: 107686 - DNA, 122 bp, Homo sapiens
ccggggccgagggcttggggttcggcccgggccttggtcttctcgccccgctggcgtccgcggtaggcttccaaggggcgtgtttgagagtctgggaccaggacctcagccagagggcgcac

SEQ ID NO: 107687 - DNA, 122 bp, Homo sapiens
tgcagcctgtgtactgggcttttaagcttcccaggtgatttttaacgtttccaggcatgccgccaaagttaagaattgctcttctattggccaataacaaagtctacctttgttatgccaaa

SEQ ID NO: 107688 - DNA, 122 bp, Homo sapiens
atggagggcaaagggctggaaaactgggatcatttatcagtcagggtaaggggatgaactcgtcaggatgtggaaaccgtattattcagtgagtcagtatgtcatggggtccttcagaccag

SEQ ID NO: 107689 - DNA, 122 bp, Homo sapiens
aggagagtaggaaatgcgccgtctgcgaggggcgccctgcgtggacccggggcctcggggcgcgtccacttacccgagccaggagagactgggccccacggtgttagccccgcgctcgggct

SEQ ID NO: 107690 - DNA, 122 bp, Homo sapiens
gctgccaggacaagccttgctgtaaggatgcaggatgcgaatgggagaggcaccaagggccgcagagaaggagccgtgctgcactgggctgccgtgaagacgaggtgggcggcctcggtggc

SEQ ID NO: 107691 - DNA, 122 bp, Homo sapiens
gccaccttcctccgcagctggttccttaatgaatgggagctgcgctgagcccagcaactccggagcgccagccccaactctaactttgcctcctcctcctcctcctcctccggctcctcctg

SEQ ID NO: 107692 - DNA, 122 bp, Homo sapiens
cacagctgaggagctgagcagcaatacggggcggggtgcagctccgctttccccagagtgcgcaagtgcgctaaggcgcccgcccacgcagtgggcgggctacgggagctgcagaggccgcc

SEQ ID NO: 107693 - DNA, 122 bp, Homo sapiens
tggttttaacacgaccgggcacgactcacgtttcttcagagcgtagtttgtgacaggcaccgtgctcagcgctatgcatgcgttaactttttcgcagacgggaaaactgggcaacagggagg

SEQ ID NO: 107694 - DNA, 122 bp, Homo sapiens
tacgggtctctggctctgcctcccagtcccggctccgactcagcccagcctgggtggggccgttggccgttgggagcaatgcccccgcattgcatcactgccacctggccctgcccccatct

SEQ ID NO: 107695 - DNA, 122 bp, Homo sapiens
gagaagaaagtctgcatattattcatattttcttcttgttactgatgctccactgcaaagcgaaagagactgcaataaatataagccttaactcaccaaatatgtattaagctctaaccaag

SEQ ID NO: 107696 - DNA, 122 bp, Homo sapiens
ctcggcactcacgcctcctcgccggcggcgggccttcaccacagggttcgggggggtgggcgacacctcctcatcatgggagtccgactgtgagtttgacttttgccgcgccaaaatctgcc

SEQ ID NO: 107697 - DNA, 122 bp, Homo sapiens
gaagaacgcccacgtcacctcccggtgttgttacacccacaatcaccacactctgacccccgcaaagaccacagaggagtaggaagagggctgccctcgtactccccaagccacccccgcct

SEQ ID NO: 107698 - DNA, 122 bp, Homo sapiens
ggattgagtttccttttatgcttctggtttggggggtttctatgtttcagggtctgtggtcgcactctgaggtctttcgaagtcttcttcatgaattttgggtctctgagttgtccatctcc

SEQ ID NO: 107699 - DNA, 122 bp, Homo sapiens
gcctggccgatgggttttccttcagtgctgctgcccaagccatcctcccccagtacagagcgctgctgggtcccaggtcacctacctgaccccagatggtgccttctgagttctccacctgt

SEQ ID NO: 107700 - DNA, 122 bp, Homo sapiens
ggcaccgaactgcgtgcagcctgaccctcccgaatggggtggtaggtgagggccgcgggacgccccgggcggcgggctgcgaggacggccgactctgcccatcccgagggcggctggcttcg

SEQ ID NO: 107701 - DNA, 122 bp, Homo sapiens
gaccccgcgcacgcggccccgccccgcgcgactccccggctgcaggcgagcaggcgcgcgcgcacttacctcccacgccccctactgccagcacgggtcggccccgccctgtcccgcccccg

SEQ ID NO: 107702 - DNA, 122 bp, Homo sapiens
aaaatccatatgtacttggagatccagctgttgccccctgtttaaaacaaaagaccacctcggggggtcaattaaattaaaaaggccctccaaccaccctaaatgggataactaagagtatc

SEQ ID NO: 107703 - DNA, 122 bp, Homo sapiens
gagataaggatgaagtatggattaagccaattgtttagcctgtgattttgaatgccaaaccgaagaatgtgggcttgatcctgtagacaacagaggcactgaggacttctgaattgcgaatg

SEQ ID NO: 107704 - DNA, 122 bp, Homo sapiens
cttggaggaacagttcctgatgggtgtccggcttatactcttgtggccagaaggagctgacgtaaacccttgggggctctgtgacattgatgagaggggccaagctccagaagagggccccg

SEQ ID NO: 107705 - DNA, 122 bp, Homo sapiens
atccctccttggccgcactggcctaatgctgtgtagactatgttgacagatcataagccacgcgcgctctccctggctctccgtccccacgtcagaaggcactggacttctgtgttccgtct

SEQ ID NO: 107706 - DNA, 122 bp, Homo sapiens
gggctcggggcggggctcggggcggggctcgacagggttccacaccccggaagtggccctcgccccgcccacccgcctaccaggtctacccgcgcgggccctggcttgttttcgcgtctgtt

SEQ ID NO: 107707 - DNA, 122 bp, Homo sapiens
tcgtcgtcatcatcctcccccacgatgaaccattctggcttactcatgggacctgggccccggtgttgtcaaaacgacccacgggattcttggcagaatagccgcgcatccttgctgagtca

SEQ ID NO: 107708 - DNA, 122 bp, Homo sapiens
tcagatctagcagtaatgtgcagcaccccagtgtcctctaggacacacctaacacgggaccggatcccttgggacacagtggtgtgctccacaacatacatttaatgggctggtgcaaacct

SEQ ID NO: 107709 - DNA, 122 bp, Homo sapiens
tgcccccatcccctaaccctccaccctccttgttttaggagacattactccctagtgctacggcgctttcaactgaaattgttggtggctctgaaaagagcctttggtttaagttggcgcac

SEQ ID NO: 107710 - DNA, 122 bp, Homo sapiens
aggaggaggacttggtggggctggaggctggggagcgggggttcctcctctcccgtctcacgcgtttaagtcagacggcgacccgggagaggaggagctggtgcaccccatgccaccgctgg

SEQ ID NO: 107711 - DNA, 122 bp, Homo sapiens
cttcccgcagctgtccggagaccacacagggccctgcaatcagctccgaggcagaactgccgctgcgctcacctcccccacgctttcgcctcttccccacccctgagctgggctaagcagac

SEQ ID NO: 107712 - DNA, 122 bp, Homo sapiens
ctgagagcagacaaaagcacgcgctcttctccaccgccacgccggtcctacccaaacccgcgagttatccgtattctccttcaggagtcatagtcaggccagaagagtgcggagggacgggg

SEQ ID NO: 107713 - DNA, 122 bp, Homo sapiens
gtaagagtaggtcacgtggcagggcttcctgtatgctgctgctgccgggtgtccatggcccgcacccccaagctgccactgcagcagtcagagtggcagctgaaggctcggttcatgccgtg

SEQ ID NO: 107714 - DNA, 122 bp, Homo sapiens
tctccaggatcttacccgcaatgaggaacacaatgccgaaggggaaatacctgggggcggcggggcagccaggctcaggaaccaggcaggcagacacaccccggccccagccccgcatcgct

SEQ ID NO: 107715 - DNA, 122 bp, Homo sapiens
cgcagggcaacgaaggaggcgggggtctctggaggttacttctattagcgtcaatacgggcgaaatcaggggacctagcaggagcctgaaaacttcaagccaaacaaacagtgagatcacac

SEQ ID NO: 107716 - DNA, 122 bp, Homo sapiens
gtatctgctccctcttccaacccgctctgcaaggggaaccggtggttgcatcctggtccccggccgagtctttcctgtagtttattctcatgctgccatctataggtgctttcatattatca

SEQ ID NO: 107717 - DNA, 122 bp, Homo sapiens
ggcctcggcggccgccggcgccgcgcagcgctgcgcacaatgagccgctggcccctcccccggtccgccaccctagcgcaacctgcagcagcagccgccagcacccggatgacggccgcgcg

SEQ ID NO: 107718 - DNA, 122 bp, Homo sapiens
atggcacaggattgtcggctctgaaggttccctagcaaaccacaccggcctcctgctctccgggtgaacacctcggcatccatttggaaagcccttaaaatgaccagatcactggttctctg

SEQ ID NO: 107719 - DNA, 122 bp, Homo sapiens
ctagaaccttccccttgggacccaagtaaccaatgatagcgcagcaaatgaggaaccaaccgtcaccccacagtggaaaggctcttagatgatcattttgaggggaggttggaggggggaca

SEQ ID NO: 107720 - DNA, 122 bp, Homo sapiens
agaggcgcagtcacggagacgccgagggcaccgccccctccgccggacacccgggcctggcgtcccgcctgcgccccgcaccctccgcgcctccgtcgcctgcctcctggggcccagagccc

SEQ ID NO: 107721 - DNA, 122 bp, Homo sapiens
cccacgtggtcataaatcccctcgaagtggcgggaccccatggtgcggccgtgcactgggcgccgagttagccgagctccggggactgcgggtagcgcgccccgccccgaacctccccgccc

SEQ ID NO: 107722 - DNA, 122 bp, Homo sapiens
actgggggaggaagaagggattccccggaggttctcgctacagtcgggtaagggaagcgccgggctccctgggaggagagactagggctggggtaccctggacgccgcggcattggcgaatg

SEQ ID NO: 107723 - DNA, 122 bp, Homo sapiens
ttgtcatggtgacaagggcactgcttgtgcaggtgctgtattgtgagggagacacacatgcgactcaaatgatgaggggaattaaggaagatctgcagccagccctgaagctgcagcaggag

SEQ ID NO: 107724 - DNA, 122 bp, Homo sapiens
gggatcttcttatccaagcacaatagtcctgttaccccatcctcagagcgcatttgatcgcgaggtagatgactgggtgggaagctcgaatatttcccgcagccgttcctggggttcacacc

SEQ ID NO: 107725 - DNA, 122 bp, Homo sapiens
ccctgcaggcaagctttagaggcagcgataaacaaacaggctgactgaaatttagggaaacgcctgtatctggacagcctcttcaaatatttgtcaccccctccctgctctggggaaagaag

SEQ ID NO: 107726 - DNA, 122 bp, Homo sapiens
attccaaagttttaaattttcccattcgtgtcatagtttgggtaccctactcctcagacccggggcgagccttcggctgtgactcagcacataaaaaaccagaacgccggaagtattttcct

SEQ ID NO: 107727 - DNA, 122 bp, Homo sapiens
tattaagtaataatgcttgtattagtaatgggtaaagaagtctttctttgttacattaaccgttagtaaaagatgtactttgacatttctgatgtaaaacctatatgtaaatattgtaattt

SEQ ID NO: 107728 - DNA, 122 bp, Homo sapiens
cattttcacgcgaaccgccgcccccgcccggtccctcccgcccccgcgggccggcgctcacggtcagcagcccgccctcctggtcgtacacgtagacgagctcgctcccggtggacaggaag

SEQ ID NO: 107729 - DNA, 122 bp, Homo sapiens
ggctgggaccacaggtaagaggcacctggggaaggaggcacccatgctggagtgcccacccgtcctgggcaaggccctggccttctctgggcttcagtgtactcctttgagccaaggcaata

SEQ ID NO: 107730 - DNA, 122 bp, Homo sapiens
ggctacagatggagaaggatgagtcattccagcagccatggccaagggaactcctggagacgtagggactgtttatgtggccactcaccatcatgcaggcccccaatgggggtgaggcaagg

SEQ ID NO: 107731 - DNA, 122 bp, Homo sapiens
ccatctgccgaccccgtgtgggtgtgcccgcctcctcaccctgacagcagggtgttgccacgcgtgtaaatccctgccgtctggcaggtggcctgggcctcgagcaagctggtgtcatggat

SEQ ID NO: 107732 - DNA, 122 bp, Homo sapiens
agggccgcggctcgcggaggaatctctcttgccctttagtcccgggcaaggtgttgcggccggcgccattttctcgagccgcctgtttcgggtgccgccatgttggtgaggagaaatcaccg

SEQ ID NO: 107733 - DNA, 122 bp, Homo sapiens
ctagaacagtgtctggcacagagacaatgctcagtaaaagcttgtgcttacacaagtgttcgatggaatgactgagtggcaagggtaacacaatgacctcattgtgatggtgtggtgctggg

SEQ ID NO: 107734 - DNA, 122 bp, Homo sapiens
tttctcgctccactatggtggccagtgagactctcaatgtttaaggtgctccagaactgtcgaatctctaaatactctaaataaagtactgtctaaccacctgaaacataacaaagctattc

SEQ ID NO: 107735 - DNA, 122 bp, Homo sapiens
aggggggagggctctttgccgctgggtgcggtgctcacatctggatgacacgagtgtgtgcgagtccgcccggagctcgagggggcacccagctggaccagggcttcccctgcaggagtcag

SEQ ID NO: 107736 - DNA, 122 bp, Homo sapiens
cacagggggcttggctggattgactagcggcgggtctgggggcgcggccggattgactagcggcgggtctgggggtgtggccggattgactagcagtgagtcttgatttcagcattttgcta

SEQ ID NO: 107737 - DNA, 122 bp, Homo sapiens
tgcccagcctctactctgtcttttctggcaatagaatctctactttcctttggggaacaccgtccctcactctactcttcataacttgagtggactgatcccacctcccagttctagggtga

SEQ ID NO: 107738 - DNA, 122 bp, Homo sapiens
tccttacacacaaaaggctcagtgcattaaatatttgcctatcacctgtgtgctgtgtaccgtggccatgcctcgctctgcactatgaacaactcagacctgtcccttcacggtctgattag

SEQ ID NO: 107739 - DNA, 122 bp, Homo sapiens
ctcctaatgcccatcactaacaagtgacacggaggcaggggaaacagagagtgccgctaccgattcaggtcacgcaaaggagggaggctctttcaaggtcttgctccaacttcacgttttca

SEQ ID NO: 107740 - DNA, 122 bp, Homo sapiens
tcttgctgactgcccggaacctcttaacttcagtgcctctgagtcctgccctctctgcagcgagctgggatttgctctgcaccatcccctgccctggcagcgccacagaccagcacgtgctg

SEQ ID NO: 107741 - DNA, 122 bp, Homo sapiens
acattccctgggaagatgacatttaagcttaaacattaaacatgaaagttgaaaaagagacgtaaaacagtgagtagagaaagttgtttcagaaagagaatacagaaagggcaaagggcctg

SEQ ID NO: 107742 - DNA, 122 bp, Homo sapiens
cgctcgctgtgggactgctgatgcacgggaagctggggattggtcctgcttcatggaagccgtatctctcagcccagaactcactgggctcagacatttggcaaaagtgcctccagtttgcc

SEQ ID NO: 107743 - DNA, 122 bp, Homo sapiens
tgtggggaggccctcctgctgccttggggtgacaatctcagctccaggctacagggagaccgggaggatcacagagccagcatggtgagtgtggggccctctgctcccaagacacaggaagg

SEQ ID NO: 107744 - DNA, 122 bp, Homo sapiens
cagcatcataggagtttccctgatgatgattttatcctggatttttcatgctttccctcacgcctttcttcttaaatagatgttcacattctctctgctcacagcctggtgagcatgggagg

SEQ ID NO: 107745 - DNA, 122 bp, Homo sapiens
gccgcgcgtacagcccgggcatccaggggtgagtgcgcggggaggccgcgggggcgggggcggggcccatggtcctggccggcgcccgcggtgcagacacccgtcccaggcgcccgggcttt

SEQ ID NO: 107746 - DNA, 122 bp, Homo sapiens
gtcactgtgtgccaagttgggggtggggaggcaagggaacagcacctgtggggctcaagccggcggtctagggcgccagctctctgctgcccactgtgtcagtacctgcttattatagatct

SEQ ID NO: 107747 - DNA, 122 bp, Homo sapiens
cgccgctcctctttgttgttctcagtagtttcacggtcgccccggctgagcgcgttgggtcggctggaatgtgttgccttagggtctaagtgaaagttgtaaattgtttgtctaaatttatt

SEQ ID NO: 107748 - DNA, 122 bp, Homo sapiens
gttgtgtggaagggacccagtgggaggtaactgaatcatggggtcaggtgtttcccgtgccgttctcgtgatagtgaataagcctcacgagacctgattgttttataaaaaggagttttcct

SEQ ID NO: 107749 - DNA, 122 bp, Homo sapiens
ttcctatcctctaccttcccaggcacatagttgaatacatgaatcaggctgagccagtcgcggtaccacatccactagaacagttattattgacagcagtgtacatatcaactaaacaaggc

SEQ ID NO: 107750 - DNA, 122 bp, Homo sapiens
ttaaaaaccggctggagagctgcatctctggaaagtctcactgagaacgaggccggcagccggtccccacttccgccccaaggtcctgccctccggctgcctctgctcccaggcagctgcag

SEQ ID NO: 107751 - DNA, 122 bp, Homo sapiens
agggccgtggggaacctcctcagccgcactgaagccaggccaactggaaggaaatagaaacgtcagccagcgacagttggtgtctggtaatgtagctgcagtgagaagatacagaactgcta

SEQ ID NO: 107752 - DNA, 122 bp, Homo sapiens
gtggcaggagctcagggctcctagggatgggggccaggcagaggacccaacaccactgcccgctccccgccagcgcctcccctgtcggccccgcctcccccgtcactcaccgatgatcatgg

SEQ ID NO: 107753 - DNA, 122 bp, Homo sapiens
actgatatggaaatgcctgatgaccatttgagtggcagcctcccagatctgtaaaaatcacgatacagaggcagcagggactgatgagagtctctgaaaccaggcactgtagatccacatat

SEQ ID NO: 107754 - DNA, 122 bp, Homo sapiens
cggagctcaggagattccgccgggcaccgtctgccgcccgcctctgcgtgcaagcctggccgggacccaggcgcagctcgctcttcttgagtgtcttgtcttgctcactcagcccgcccgcg

SEQ ID NO: 107755 - DNA, 122 bp, Homo sapiens
ggctgactctcattctcaggaccaatcgtattcgaatgagcagactggctttcctctgggcgttgcttcatttcagtctacactggcagggaacgctcacattttcgtcattgtgacgatct

SEQ ID NO: 107756 - DNA, 122 bp, Homo sapiens
acctctgcgcggggaggatgcggcggcggtggccgttcgggacgcagggcagggacagggcggcgcgcgggcctcgggaccctctgtttgaagaccgatccccttccccccccaccccactc

SEQ ID NO: 107757 - DNA, 122 bp, Homo sapiens
cttccctccctccaggaacatcagctcccagctcagagtcatcggcctcgcttacagggacgtcacactacccgctctgtggggggcatcgtgtggtctggacttgctgagcagaaagtagc

SEQ ID NO: 107758 - DNA, 122 bp, Homo sapiens
agtcaggatgactgggaagtgggggcttggagagggcgcagtgaggtgcttttgaaccaacgcagacctacagggccgacttcctgagggcgaatgtcgctttgctgcagcggggcacgggt

SEQ ID NO: 107759 - DNA, 122 bp, Homo sapiens
gaagtgcacctgccggcttccagtccaagtgatgcaggcgatgctcctctgagtgcatttcggtgcagtcctgtaacgggccccaggggcgcaacttgaaccatcgcaagcatcgaaaagtc

SEQ ID NO: 107760 - DNA, 122 bp, Homo sapiens
gggaagccagtggcgctccctggcggccaggccgggctggagccacatgcgtcgggggagcgggggtcagtcccagccgttgtctttgatcatgtggttgagttcaatgatgtacttcccct

SEQ ID NO: 107761 - DNA, 122 bp, Homo sapiens
actggagccgtgaatatttggcgacgtcatcaatgaagtatggccgtgtccagccataagcgggcattgggccggatgtgctggaaactcctcggagcgggagagcaaagcccttggcagca

SEQ ID NO: 107762 - DNA, 122 bp, Homo sapiens
ttgcacgcgggctgagggggctagagacctcgcgacttttactcccccgaccccgatctccgactcctgactttggaagcccccaaagctgcttttcggttgcctacaaagtgtcggtcatt

SEQ ID NO: 107763 - DNA, 122 bp, Homo sapiens
tgccgccttggggtgccccccatggttgagacacgcaccccactacccacgtggaccccgcgcaggcgctgctgagtaggcacttccgtccgtggaaggacccaggccccctgtctcagctt

SEQ ID NO: 107764 - DNA, 122 bp, Homo sapiens
aaaaaagaggtgcgcacatggtccaggaagaaggcgttctcggggcagcggggggcgtggcgcaggacgaagcctcggatgagcctggggtggggggccagacagggttgggggtgaggggc

SEQ ID NO: 107765 - DNA, 122 bp, Homo sapiens
ttttgctgtgccatgactccgcgggcagggctgacgtgtgcttggggcaagggatttctccgttgaagctgcggcagcggggtgcaagtttggagacgcgcttcttcgggacattacggcgc

SEQ ID NO: 107766 - DNA, 122 bp, Homo sapiens
ccaagaccccacggagcgccacgcaaggctgcagagatccagggaacagcgtgctgtgcgcggggaggtggtctggcgagatcggagttgagatggccagggctgaggaacaaagtgtccag

SEQ ID NO: 107767 - DNA, 122 bp, Homo sapiens
aaaggttaaacgcagggctgcggagctccgttgccttcctcgtaattctgcgagactctgcgatatacttttcagggagcatcacattagctgtcacacactgagtgtcaaccaaagccacg

SEQ ID NO: 107768 - DNA, 122 bp, Homo sapiens
aactctgttttggatttgggaggtaaaccaatctttaaaacgagtgcctagacatctccacgccctgccaggcaagttcggaaatctgcactgactttttccacacgagctgtcctacgtga

SEQ ID NO: 107769 - DNA, 122 bp, Homo sapiens
gtccactcagtccaccacccgtattagaatgtaagagtttttttccttgggaaaagtgtccgacagaaccaaggctcggtaaaggatactaataatgtaataatataatattaacaaacatc

SEQ ID NO: 107770 - DNA, 122 bp, Homo sapiens
cgggagggtggccggggcgcggggaggggacggcttggggggaagtttaagacacgcccacgtaagggacccaaaataaccgacacacagagtgcccgaaatcagacaggaagccaaataat

SEQ ID NO: 107771 - DNA, 122 bp, Homo sapiens
agaaaaatgaagctcggaaaagcagttaatttgcccagggtcacacatttaattattgcccgagcttggctaagaaaccaggtcttctgactcctaagcccttgccttcttcaggccacata

SEQ ID NO: 107772 - DNA, 122 bp, Homo sapiens
caatacctaatacaatttcctgaaattgtttcatgtcacacgttaaaataatatgaaacacgttaaataataaaatggtatgaaggttttgtctgaactacagtgatttgtcttcagatttt

SEQ ID NO: 107773 - DNA, 122 bp, Homo sapiens
gaggtgtggagggagaagtacgggagggaacccgggctgcgcacggcacttgcgggctagcgcgagttccgggtggatgtgggctcggcgggccctggtgaggggcttagtacccagccagc

SEQ ID NO: 107774 - DNA, 122 bp, Homo sapiens
tctgtctggtcttgcgccaggtcttcaaagtgcagatctttacgatcgtgatggtctcagcggaaatgcatccttccctatcgcaggtatcgctccgactcccatcacactgacctccattg

SEQ ID NO: 107775 - DNA, 122 bp, Homo sapiens
gaggatatctgggtgcttgttcttcggggggcgctgtctcgaggatatttgggctgcctccggagtcgcagtgttatcggaaagtgggtgacgtgcggatcttcttttttttttgtggctgt

SEQ ID NO: 107776 - DNA, 122 bp, Homo sapiens
cagggagcaggagggtccacacttgcgtggggcaggggcggggtctacacttgtgtggggcgggggcggggtctacgcttgcgtggggcaggggcggcgtctacacttgtgtggtgtctaca

SEQ ID NO: 107777 - DNA, 122 bp, Homo sapiens
acccatctctactaaaaatacaaaatttagccatgcatggtggtgggcacctgtaatccccgatactcgggtggctgaggcaggagaatcgcttgaacctgggaggcggaagttgcagtgag

SEQ ID NO: 107778 - DNA, 122 bp, Homo sapiens
tgctctttgtgactttttaatgcctttcagatgtgacgactctccatacgccttctcacacgtgacccgtgactcatgggccgaggcctctgcatttgggacccccacctccacctccccaa

SEQ ID NO: 107779 - DNA, 122 bp, Homo sapiens
aacaattttaactttgtttattggccacacattcctttcctccctctgacttagctgatacgctccttcctttatcttcccaatgagtcggccacatttattaagagcccaccatattttaa

SEQ ID NO: 107780 - DNA, 122 bp, Homo sapiens
tttcacgtcgccgctcaacctgctgctgcttggcctctgcatcttcctgctctacaagatcgtgcgcggggaccagccggcggccagcggcgacagcgacgacgacgagccgccccctctgc

SEQ ID NO: 107781 - DNA, 122 bp, Homo sapiens
gggaaggaagtggggaaacgcagaaacacaaactctgcactctcccttgaagttcagaggcgctgctgtgtctgggggtgcgcatcttctcgcaggcccggcgtggggagggagccggctgg

SEQ ID NO: 107782 - DNA, 122 bp, Homo sapiens
tcctctggggcctgaaggggctttgggtgaagcacagctgtgttttctctagggacccaccgtgttcccatcctcccccattttggcccagccactgcctgtgcaagtgtcacccaatcctt

SEQ ID NO: 107783 - DNA, 122 bp, Homo sapiens
cgagcgctcaaaccaaacagcccagccgccatgacagatggtgctgcagggtctcaggggcggggaaagaaatgcgactgtgcgcagctgcagtgggtgcgagcgcgacaatcatcgccccg

SEQ ID NO: 107784 - DNA, 122 bp, Homo sapiens
ctcggtctagtgcttactcagtcctgggccatgctgaaattgcatgcatacaaggtatagcgtaatgagaccgttttcagtgcagacagctgagcccccaggcacttgctccgctgagtgtt

SEQ ID NO: 107785 - DNA, 122 bp, Homo sapiens
agtctttcaccacaggcaactacagctagatgcattttctcaacaggctgtattttcagacgacacctgtcccacccaccaggatgcacagcgggaccagcgctgcccgcgcctctcacggc

SEQ ID NO: 107786 - DNA, 122 bp, Homo sapiens
aaataatcttccttcctttaaggacttgaacaccgatcttgggagacaaaatgcatgccacgctgtgagctggtaagtctcaagtcaagttctgtaggggttcatgcctggtaagccacaca

SEQ ID NO: 107787 - DNA, 122 bp, Homo sapiens
ggtgtcgccgccaggccaggaccgaggccgcactcacctaccggcgcgcgggaggcgagacgacctcacctcggcggcgcccaccccaaaccgccaccgcagagccgctcgctcttaaaaaa

SEQ ID NO: 107788 - DNA, 122 bp, Homo sapiens
ctttctggtttactcatatgcaccatcccctttttaaataacagaactcctgatttttggcgagcagatggctgcctcgttaaagactacatttcccaacctcccttgctgttcaatgtggc

SEQ ID NO: 107789 - DNA, 122 bp, Homo sapiens
tccctgtccctcgaacaccacgactagtcaccaagtcaaatcaatttaccctcttaattccgctcagacctctccccttctcctcatccccagaagtgacagtccatgcctctatccactga

SEQ ID NO: 107790 - DNA, 122 bp, Homo sapiens
agtccattttgatctagggtgacgagggagagagctacaatcacccttctccgccatgagcgcctccaccgcagtggagtggccagggtcaaatccggtgtcatttactagctgaaacctta

SEQ ID NO: 107791 - DNA, 122 bp, Homo sapiens
tagcccgccgccgcacgatggtgttacagcgcacgttgaccgaacctaggatgtagcccgcgctgtgcgccaggaacggtctgcagtccagcagcaggcacttgccgccgctcggcagcccc

SEQ ID NO: 107792 - DNA, 122 bp, Homo sapiens
agactaagaaaagaaggtatgtaatgattaagagcataggctctggagccaaaatgctagcgtctggatcatagctccattactagctagccatgtgatcttaggcaaattaacttctctgt

SEQ ID NO: 107793 - DNA, 122 bp, Homo sapiens
gagggcagcggtggcgcccggcaaagttggagcccttgcggtaccagaaagcagcgagagcgagacctgggagccagggcaggggtggctgaccccatgctcagcctctaggggacggcagg

SEQ ID NO: 107794 - DNA, 122 bp, Homo sapiens
gccttttgtaactgtgtatcccatcaagctctcaacatgtggcaaataaataaataatcacggaaagtgagaggatagtaatttctatactccttctttctcttcttctgaaaaatatttct

SEQ ID NO: 107795 - DNA, 122 bp, Homo sapiens
cgtccttagcctagcgggtggtgcggggcagggaagttccggacagcgaagagccacgttcgagctctaatgattctctgtgtccccagagaggaagtgtgaagtgtgacggctgacgagga

SEQ ID NO: 107796 - DNA, 122 bp, Homo sapiens
aagggtggtaggaggatccttggtggtggatataaagatcataggagttgaaatattattcgtggctctcacttgggaaatgatcagaacaaggtggctgagcagagatcacacagcttgtg

SEQ ID NO: 107797 - DNA, 122 bp, Homo sapiens
gtcagcgccggggctggggacttgtaggacagagtccgaagctgcacaacgcagcagggacgcggcccatgtaggagcctcggcccggaccgacccaactccccgtctttccagcgcgctct

SEQ ID NO: 107798 - DNA, 122 bp, Homo sapiens
gggcgctgcgcggaggactacatggaatctcgactttgcagcttgaagtcattttgttggcggcgctggttaccggctacctccgcgcgggcacttgattgtaacagaaagtagttccggcc

SEQ ID NO: 107799 - DNA, 122 bp, Homo sapiens
tcattcttttagtgaccagaaaagccctgtaggacacttctctgattgcctagcattttgcggcttgctcccactactcagccacactactctccttgcagtaccttgaggcacgttcttac

SEQ ID NO: 107800 - DNA, 122 bp, Homo sapiens
ggttaggtttgctttctggtagagaaagttgatctacaatgaacaagaatgggagtagcacgtagaaagaggcagagattccaaacagagaagaagggagtcctggcagccgtccagttctt

SEQ ID NO: 107801 - DNA, 122 bp, Homo sapiens
agaagaaatcagtgagtgaagtgaccacttggccctggccttgcaaaccactgcagagtccgaagccccgagtgctccctgggaagaggagagccgaggacactcttcgcccctgcttgcca

SEQ ID NO: 107802 - DNA, 122 bp, Homo sapiens
tatcaagacttatttttaaaggaagtaatgaaattggaaagactgaaatagttttcaaaacgtctgaacttttatgaatgaggatgcaaacacagtagtaggataaagtaccgtgaagtggg

SEQ ID NO: 107803 - DNA, 122 bp, Homo sapiens
cctttcatgataggaaagcactagccatttagctgctatggctcctagtaggcactggggcgtttaggaaatagagtagcaaaattgacaccatttaatttagcaaaacctaaacaaacacc

SEQ ID NO: 107804 - DNA, 122 bp, Homo sapiens
tctctgttgcagccacgaattggggtctgggtcgcaggaaagcacagggctgaagcccagcgtcttggggccatttatactgaggcagtcagaggcaaagagtcccaagaattcagaaaata

SEQ ID NO: 107805 - DNA, 122 bp, Homo sapiens
ccactgaattaaaacggagcgtattcgttctctgccccaccccgcaactcctgaaagcggcgcaactcaattacttgatccttatatgccccacgcgggactcatactacgtttcccgtgaa

SEQ ID NO: 107806 - DNA, 122 bp, Homo sapiens
gcttaatcccttagagatgggtcctttaataataatcctacctaacaatgctgccttctacgggagtagcctgtgaataaccatcttcctggggccatgttggtttctgttctacttccagt

SEQ ID NO: 107807 - DNA, 122 bp, Homo sapiens
aggcgtgagtcaccatgccaggcctaggtttccttcagctctgatctttgtagcagtctccgggaagggggtcacaggccggggcactgattacaccctccccaccgcaccctgtgccccgc

SEQ ID NO: 107808 - DNA, 122 bp, Homo sapiens
ggcctgggctccgggaacccgcacattgcgggcgggagaggcgcagggtgcctgggacgccgccccgctcgcctctctcctggacgccgtcgccctgcctccccgcggggacacagcctccc

SEQ ID NO: 107809 - DNA, 122 bp, Homo sapiens
ctccggagacagcgccacgggtgtgggacttttcctcctttccaattggcaaagtgatcccgggcaagtcattgtccgtcatcccaggtatgcctctataaggtgtgggacagctcctggtt

SEQ ID NO: 107810 - DNA, 122 bp, Homo sapiens
gccaggctggtctcgaactcctgacctcaggtgattcgcccaaagtgctggggctataggcgtgagccacctgcccggctattttcagttttggatagtatgttttgacatacactctgttt

SEQ ID NO: 107811 - DNA, 122 bp, Homo sapiens
tccttgcaaggcacatgctgccacacagccagccagcctcccccaggagcctctgagtgacggcagccacttctctgaagctgtagctgaggctgatatctggctgggggtgggggaggatg

SEQ ID NO: 107812 - DNA, 122 bp, Homo sapiens
tgtattacaatttctttatccattcatcgttaacagacactttggttgtttccaaatcttcgcaactgtgaataatgctgcatgaacttgagagcgatttctgagatcctgatttcatttcc

SEQ ID NO: 107813 - DNA, 122 bp, Homo sapiens
cctcctctctagcactccccagcctgagagtggtagtactttcctgctagtaactatcatcgtgttgcctcatcatcccctagttggctttttagtcatttgaatcctttgtaatttgttcc

SEQ ID NO: 107814 - DNA, 122 bp, Homo sapiens
aacttgctgggcagcatttctgtggatactttgagagaaaaatgccctagttgagcaccccgcaccatggccataagcatccaccgggctcgaagtgcatggcccgcagctgaccactaggg

SEQ ID NO: 107815 - DNA, 122 bp, Homo sapiens
tttttttttttttttttttagacaaagcctcactctgtcgcccaggctggaatgcagtggcgcaatctcggctcactgcagcctacgtctcttgacagtccacggattaaagctattctcct

SEQ ID NO: 107816 - DNA, 122 bp, Homo sapiens
tggggagaacgtgagtaaaagcacaggaacagcaaagcgttcaggaacgttcgaggctgacgcaaccggcgcaggaaggtggtgtgtggtgggagagtgggaggagacagtggaaagtttag

SEQ ID NO: 107817 - DNA, 122 bp, Homo sapiens
gaccgggacggctcagagatccagatccaaaggacttttttccccctaggtctccagagccgcaaaccctcgcccggaatagctcagtgtttagagaggagagacttggacaataacgctga

SEQ ID NO: 107818 - DNA, 122 bp, Homo sapiens
tgttctcagccaaaacaccgaagctaagccaccctcgcggcttcaagagcttggagagctcgggttacccacccgaactccgggctccgggtcccgccgcgatgccggctgcggcgcggggg

SEQ ID NO: 107819 - DNA, 122 bp, Homo sapiens
cagggcagcactgtctatctgtccatgaccatgaggttgggggtgcccggctggcagctccgagggacccagagtctgagcctgctctgaggcacccggggcagttggctgggccagcccac

SEQ ID NO: 107820 - DNA, 122 bp, Homo sapiens
tttacctgtgtttccactcggcctattttttccttctctcctatagggagcatgattgagcggatattagtgtcgtgcaacaaccagcaggatctgcaggaatgggtggagcacctacagaa

SEQ ID NO: 107821 - DNA, 122 bp, Homo sapiens
ttctgcctgctccatggaaccagaggccagggtctgcagcccctctttgggtggctgcagcggcccctgaggagctcctactttaactcagaaggggcagggctccagccacatctccctgc

SEQ ID NO: 107822 - DNA, 122 bp, Homo sapiens
atgatggtgggggggtggtacaaggggcgccccttcgctgttttaaaatctgatgcttcacgcatttttgcttctgcaaatacttgggttggtttggagagccggcgggctggggcaggtgc

SEQ ID NO: 107823 - DNA, 122 bp, Homo sapiens
agccgggctctcctaaatagaaggttccaaccaatctcaccaggccaaaggggattttcacgtacagactttgaatttagtaggccctgagcgttcatcttcatccgtccttctcagccgga

SEQ ID NO: 107824 - DNA, 122 bp, Homo sapiens
tgggcgaatacggagatgtgcacccggctgagcaggacccaggaaaacgccagcgcgctccgagcacaccttgaattcctacgggctctcagctcccgggagctgcagagcctcagccaccc

SEQ ID NO: 107825 - DNA, 122 bp, Homo sapiens
ccttgccccttaaagtcacaggccccctagcgcgaaatcccacgcccccctggacggctgcggccgcactcgccaccagggggcagaggccagagaaagggctatttcccggacccgccccc

SEQ ID NO: 107826 - DNA, 122 bp, Homo sapiens
tcctaggccagcgaaccttactgaacactggcgaggactccgcctctaggaatagaatcgcggggtaggtggggtcgtctggaggtagctggctccgcccggcccgcgggcgagtccggaat

SEQ ID NO: 107827 - DNA, 122 bp, Homo sapiens
cctgccctcacgctgcacggcacgctcacctcatagtggaagtccatgcaggtgaggtctcgccagcaccggtccccccggatcttgatcaggccctgcaaggaagagagcagagggagagt

SEQ ID NO: 107828 - DNA, 122 bp, Homo sapiens
caaaagcgcgaagtttgaggatagcctacctagaaacaccgactccaaggaaggagtcagcgttccgaagtagagatttaagatttcacttatataggcagaaactgagaggttttttagca

SEQ ID NO: 107829 - DNA, 122 bp, Homo sapiens
catactaaactaagctgataaaattagttaactacttgtttcaatacttctggcatttatcgaactccttggcttcctggaaatgctcattaaacattagtggactgaccaagtacagtcag

SEQ ID NO: 107830 - DNA, 122 bp, Homo sapiens
ttatccagttcatcctcctgcctcaaggaaggacgcccttcaacccattcagggaacacacgtcgctgccgttttatgaagagtatctgaaggcagcgtcacaatctcctaaaacgcaccca

SEQ ID NO: 107831 - DNA, 122 bp, Homo sapiens
agagatgactgcctagaccagggtgttaattgtcacagatggtgagacgtggtaggatttcgatatgtgtgaggtagacctaacagatttgctgatggatcagatatagagtaggaggaaag

SEQ ID NO: 107832 - DNA, 122 bp, Homo sapiens
ttaacctcaagtgacaataatgccgagccaggcaggagctggacctacaatcttctgatgcgtggtcagacacgttatcccttgcgccactggcctaccacgctactccttcagtcgccgtt

SEQ ID NO: 107833 - DNA, 122 bp, Homo sapiens
caggtcacgagggctggccggggttcttccaccccgccccgccccactctgctccgcggacgtcaggcccacctgagcctctgctcccgcttgatctcctctgctgtgaggttgaagaagtc

SEQ ID NO: 107834 - DNA, 122 bp, Homo sapiens
actccgcagcccaacttagaggccgtcgccgctttccgggtggggggcgcgcccggccgccgatgctacctcaggcgctccgcccccagcgaggccccgaatccttgccccgggtccccggg

SEQ ID NO: 107835 - DNA, 122 bp, Homo sapiens
cttcctcagccactcgctgcggccagcgtgaaaggggaggggaaaggggcattcctggcacggtcaggtgtctacggacagcaatcttagttaattctcaaaaccccggaagatccagaaat

SEQ ID NO: 107836 - DNA, 122 bp, Homo sapiens
aggcaacagcacgtggtgtccgggccagggtccttggtttgctgtgagctctttggtgtccgtggcccctacccaaggatccagataccacccggggtcatgcaggggagctagcatgggca

SEQ ID NO: 107837 - DNA, 122 bp, Homo sapiens
gccgcgggctcggcgtgctctcctccggggacgcgggacgaagcagcagccccgggcgcgcgccagaggcatggagcgctgccccagcctaggggtcaccctctacgccctggtggtggtcc

SEQ ID NO: 107838 - DNA, 122 bp, Homo sapiens
ttgcgaccaaagggtttttttttttctttcttttaatggaaagtgttatttttaagtccccgtcagcctgcgagtgcatgtgcagcaattgtcctgtgcacatttgaataatgtctctgcat

SEQ ID NO: 107839 - DNA, 122 bp, Homo sapiens
aagacattaaaagaaggtgatttcagacaagaaatctagcgcaccattcaggtttctcctcgtgtcgaggcattgcttctctcccttcctgcctcttcctgccagacttcaccgtcacagct

SEQ ID NO: 107840 - DNA, 122 bp, Homo sapiens
ctcaggcaatctacccgcctcggcctcccaaagtgctgggattataggcgtgagccaccgcgcccggcctaggtaacgatttttgcgcgctaaacggttcttagtaacctgcagagtgaaag

SEQ ID NO: 107841 - DNA, 122 bp, Homo sapiens
gccggcgttgggttgtgcgagacgctaactgtaccctccgggtttaacgctgtgaggcagcgcgcggaggaactggggataagcgccccggagcccccaaacagagcgcggccgctggggga

SEQ ID NO: 107842 - DNA, 122 bp, Homo sapiens
tgtttctccatttcacggtctggtgctcctgaagtttaggttttgcttggccaattgttccgttttgtaaagctcagaccagtgtttttgtgttccttagctttaaacattgttgtggtgtt

SEQ ID NO: 107843 - DNA, 122 bp, Homo sapiens
ggcgatcggacgcctgcccgggccgcaggagcaatgcggcgcacatcagggtgccggtcacgtcgcctgtctggcggcccctgtgcccggtcctgttcgtcgaatcaactttgccatctggt

SEQ ID NO: 107844 - DNA, 122 bp, Homo sapiens
tcacacgcctcccgctcctcctgttgtgtgaccgctacgcgcgccgctaccgtgctctcccggctccaagcgcagaccaagagttccgctgccagcaaggctgctctccgcgtgccgcaaaa

SEQ ID NO: 107845 - DNA, 122 bp, Homo sapiens
tggtgacccactcctcgggttttcacagggagacgtcaggtagcggctgggcctgaggctcgggggccgggtctgggctgcagtgaggctcggccatctccggctttgctgcgccaacaaga

SEQ ID NO: 107846 - DNA, 122 bp, Homo sapiens
ttcagatatactttcgaatcccacccctttcaggggcacaaagaccaactcaaatctgatcgcagcattatcaatcaacttattccctccccaccgggcacctcctaagatatttttcacca

SEQ ID NO: 107847 - DNA, 122 bp, Homo sapiens
gccctcagtacggtgcctggcacgcagcgaggactccctaaatggaggctcctgctgtcacgaccctcgcccggggaaatgcctgtcttctccatttagaaagtgacagctgacggcaggcc

SEQ ID NO: 107848 - DNA, 122 bp, Homo sapiens
cttagttaactcacctgaaaaatgggaacaataatacaagccacagttatgagaattcaacgagataatgcatgtacagcacctggcacatggtaaaacgctcaataagtggtagttagtag

SEQ ID NO: 107849 - DNA, 122 bp, Homo sapiens
ctggggcgaaatgcaggcccctaatgcccccggtctccccgctgatgtgccaggctcagacgtcccccagggtcccagcgattcccagatcctccagggcctctgcgcctctgagggcccaa

SEQ ID NO: 107850 - DNA, 122 bp, Homo sapiens
cccgggcgggggaggggcggccccacgacaatgaccgcattgaggctgcgcttggcctcgcgcctctcctcgaacagcccagcgtcctctggaccgtttaaaagaaaacataaagaggactc

SEQ ID NO: 107851 - DNA, 122 bp, Homo sapiens
agatgcgcttcaggtcacacagctaattggttgtgcagccagaaatgaactgcaggcttccggagcccagatccagctgtccttaactctagggggcaatgtgcttcaggtagcccctcacc

SEQ ID NO: 107852 - DNA, 122 bp, Homo sapiens
ccaaagggggcacatacgccatcaacccccatctcaccgaggatcagcgcttccctcaaccgcgactctcccgaaaggccaggcagaaaaccaacgtgttcgcccctgactacatcgccggg

SEQ ID NO: 107853 - DNA, 122 bp, Homo sapiens
agttgctccggaggaaaacaggcttgctccgagggtgcacgtccttactgcccgtgacgtcgtggtgccttgagggcacccttctgggaagatccttgcagaggccatgtcccctctccacg

SEQ ID NO: 107854 - DNA, 122 bp, Homo sapiens
gtgagtgagtcgtgtgtctttggtgatccagcttgcagaggtagcaggcaaaggctgctgcgggggaaaaaaataacagaaggcgagagggacccagctcttgctgggtctgcggctgtcgg

SEQ ID NO: 107855 - DNA, 122 bp, Homo sapiens
acttcatcccttcccatcgcagcctccgctcccatgtgggcttctcacttttcaatcgctcgatctcctggaagcagaaagaaaagcaagtggcagcggctccaggaagctcggcagacccc

SEQ ID NO: 107856 - DNA, 122 bp, Homo sapiens
cctgtttcccggtccccgccgaataagttgtgatcactgcagaaaaggtgtcccattgctcggggccgcaggcgtcagagagcccagggcaagtttcaggggctaccggggtccctggctac

SEQ ID NO: 107857 - DNA, 122 bp, Homo sapiens
gagcgccgccggccgggaggcgaaggatgcaggcggctccgcgcgccggctgcggggcagcgctcctgctgtggattgtcagcagctgcctctgcagagcctggacggctccctccacgtcc

SEQ ID NO: 107858 - DNA, 122 bp, Homo sapiens
ttgatgttcacaaaagcacccaagttacggcttatatggaggaaataggatggaagagaccggttgtagagtcagacatatccagttcacatattgggtaaattgtttaacttctctaaacc

SEQ ID NO: 107859 - DNA, 122 bp, Homo sapiens
gctgggagtgaggcttttgttccataacaaaaacaagcgcctgagtggcaaggctgccagcgcccagcccagccgagcaggcataaaggagcccgcgtcgcggatgtttgtgacctgtcatt

SEQ ID NO: 107860 - DNA, 122 bp, Homo sapiens
gagagggggttgtcagcaggaaagggtctggaagagggatccagggaggaggagggcgagcgtaaaggtgaaaaggaaggatgcttgacttcagggccaaaggagcatcagctctggtggcc

SEQ ID NO: 107861 - DNA, 122 bp, Homo sapiens
gcggcaggtcctgcgtgcgctgaaagtgcggctggaggcgcggacggctttccggagccccgagagaggagctaggaatgactttggtcgcagcctctgtaaccccgcatgacggcctctag

SEQ ID NO: 107862 - DNA, 122 bp, Homo sapiens
agctgagatgacctcgtccagcgccacaaggccttggcgccatcccaccgggctgaggtgcgtgggcagcactcaccatgctccccctgaaaccacagtcacagaccaactgtggtggccca

SEQ ID NO: 107863 - DNA, 122 bp, Homo sapiens
ggagaggctctccagccccgcggcggcggcgatgcctcctcggcgcccgtctcctgtctccgacagcatcacttgctaggacagcatcgttactcagggagaaggagagggagggcgggagg

SEQ ID NO: 107864 - DNA, 122 bp, Homo sapiens
catctggtccccgtttaacaaccgcttcatgaactcctgctgcttgggcttcatagcattcgcctattccatgaagtctaggaacaggaaaatggttggtgacctgagcaggacccaggcct

SEQ ID NO: 107865 - DNA, 122 bp, Homo sapiens
aacagagttacggggtggtgccactagacaggttggttagaaaaggcctctcagaggaggcgatgctgaggcaggggcatgaaattgaaaagacattctattctggaagggcattccagagg

SEQ ID NO: 107866 - DNA, 122 bp, Homo sapiens
ttgtctatagtaacctcttcagtccctgaatcctgcaccttccgtttttctgtgcttgtacggcctactgggcttcctccctagccagagagctcttctgcagtggtgcggccttcccggga

SEQ ID NO: 107867 - DNA, 122 bp, Homo sapiens
cccacgacagagtaggtccccacaccagggaggccacactcctcattcatcttcacatcccgagatctccactgggcaggcaaccggcccgccgtgtatgaggccctgctggcggggatggg

SEQ ID NO: 107868 - DNA, 122 bp, Homo sapiens
aaaggaacatccttctccattgaaagagaaattttatttctctgggagaaaaaattacaacgtgtagtcactaggatgcattatgaacctgttattgcgtgtgggatttatgatcaaggtct

SEQ ID NO: 107869 - DNA, 122 bp, Homo sapiens
gtgggtttccaggccatgatagcgacaggtctgcgggacgctggcgcccggcccgagcgtcgttgtcactccaagtccacagcctctagagccaaggcaagggacctcaccaggaagggaga

SEQ ID NO: 107870 - DNA, 122 bp, Homo sapiens
agaaccaggtccttggttggggtctgggtgtccgccccgaagtagagctcagggtgtctccgttcgcagacatacaatgtggacagacaggtgccagacagcgcagccacagccacggccta

SEQ ID NO: 107871 - DNA, 122 bp, Homo sapiens
aattgctgggtcataaggcagctctttgtttaaccctttgaggaactgctaagctgttttcgcaaagcggccgtgccgttttacactcccaccagcagtacgagggttctagcttctcctaa

SEQ ID NO: 107872 - DNA, 122 bp, Homo sapiens
tggagtgggaagacaggccaaaaatgaggaggcaagaggtaacagcaagatagagtgactcggtctcagtggggcaaagggcagattgatgcttacctttcaggaaagctgtggcatcactg

SEQ ID NO: 107873 - DNA, 122 bp, Homo sapiens
ggccgagtacccgacagggggtatcctgctgcagaccctgcttcaggatcacccaccctccgcctcccaatagctcgggtttttttttgcggtcgtggcggctgctgctcctactgccgcaa

SEQ ID NO: 107874 - DNA, 122 bp, Homo sapiens
taaattgaattctgctgctctctccccactctccgccttcatttccttctttcctattctcgtcaaaagattgtttcctctgattgttatcaaccacctgtgtctggtttgaccgttatttc

SEQ ID NO: 107875 - DNA, 122 bp, Homo sapiens
ctgataatgcgcactgatgcccatttctttcctaaagggcctcatctattttatccaggacgtgtaaaatacatgtttcaaaatatccagcattagaacatggatatacagggattccctca

SEQ ID NO: 107876 - DNA, 122 bp, Homo sapiens
cttgaccgggaccataaatccataactcgatttccctaaagaaggatccaaagctgtgctcggctgcttcctgcccaaatccaaatggccgctctatttccaattctgaaagacaaatcaca

SEQ ID NO: 107877 - DNA, 122 bp, Homo sapiens
tcagggggcaacgtggactgaaggacatgcctgcgacaaggaaggctcacctttgcaggccggctctgtgtcgttccagtggggttctgtgggatccacacattcgatggcattggggggcc

SEQ ID NO: 107878 - DNA, 122 bp, Homo sapiens
gtttgcgcgcacggggagcgacagcagaagttcgaaaatcgccgaggggggagccagcgccgcagcttcctgcccccggcccagccctctggccccggcggcctgcagcctgacttcctccc

SEQ ID NO: 107879 - DNA, 122 bp, Homo sapiens
ctcactacagaaagccgtggagaacaacaaaaaggaaaaccaaccccgagtggtctctgccgagcccagatgcacgacgggacctcaggccaagcccacgccaagtcggccccaagggacta

SEQ ID NO: 107880 - DNA, 122 bp, Homo sapiens
tcattttctctgctaaactatgaggctttatttacaaaccttgaagtaatggtaaaagcacgatggaaatgtggtggtaattatcctccaacatgaagcacgctgatttcctctgaatttgc

SEQ ID NO: 107881 - DNA, 122 bp, Homo sapiens
ccaacctgagaactgtcccaggcggccgatcaaaccccgaatcggctcatcgagatgaaccggattaagttgctgctgggaaaccaaggtgaaacccacgttcagtatcagcgacatcaggg

SEQ ID NO: 107882 - DNA, 122 bp, Homo sapiens
ccttggtgtggcgagccaggcagaggcagttttgggtggtggtctgcaagggtgccagggcgggtgtcagggaggaccggctgatctggagggagccacgagcccctcccttggggagtgct

SEQ ID NO: 107883 - DNA, 122 bp, Homo sapiens
gcatgttgctgctgtgtaagccgcccgggcggtgttactgtgtacacagcccaatagcggcgactcacacaaggcctcacctcacggggccgcagctggtattgaaggaaatgacaaaagac

SEQ ID NO: 107884 - DNA, 122 bp, Homo sapiens
ataatttgaaaattacactttactttctagtatcagttctgtgaaaagaaaagccttgaacggaaccatttcctttgcaaaggaaacagcaagatccaagtctgcagcgaaagttctttctc

SEQ ID NO: 107885 - DNA, 122 bp, Homo sapiens
tgttctttctactgcagatatcatgctgcttccttgctcagaaacctttgttgacttttccgtttcctgcagaataaaatcttttagacttggcttccctctagccttatactttttcctta

SEQ ID NO: 107886 - DNA, 122 bp, Homo sapiens
aagaagagcagcaacagccggaaagaggacgcctctccacctgctccaagcgccgcccgccggaatccagctctccaccttgggttaaaacccgagacccggagcgcggcaaagggaagcgg

SEQ ID NO: 107887 - DNA, 122 bp, Homo sapiens
cgtctgaagccgcgccccggcgtcgcgttgcagccttaggtccagccgagcgccgactcacgccccagccccaattgggcggccggtttccaattggaagggcttctgagcctcagtcttcg

SEQ ID NO: 107888 - DNA, 122 bp, Homo sapiens
gtcctccccagctatgagaatacaactgcacacccaggaaggccagtttgggcaaattcccgggatccatattcttcctgagacatggctgcagagttgtcaaacttcctgaagaaatattt

SEQ ID NO: 107889 - DNA, 122 bp, Homo sapiens
taatcagtcacgtaagacgttccgctaaccaatcaccctcttcctttcttgatattgacccgccctatttccataccagaaggaagtgcggcaccttagtgatcccgagtttaagccgagag

SEQ ID NO: 107890 - DNA, 122 bp, Homo sapiens
gggagtgaagggaagcagggccggctcgctggtgaagactccggctttctccattcccaccgaagaccttcctgaaggctgggctgtcaccccagcgtccccggccctggcaccggcaccag

SEQ ID NO: 107891 - DNA, 122 bp, Homo sapiens
gcccgtgcccctagcaggagccctggtgctaccccctgtgaagagccaagcagcagggcacgcctggctttccttggatacccactgtcacctgcactatgaagtgctgctggctgggcttg

SEQ ID NO: 107892 - DNA, 122 bp, Homo sapiens
cacgcgcagcccctcactcacggcagacacgcagccctgcccgccctcagccccagtggccgcacctcccggaaggcgtcccgtagctcccggacaccgatcatgtctgccgtctctgccag

SEQ ID NO: 107893 - DNA, 122 bp, Homo sapiens
ctaagcagctttaaaaaattgttatatagttataccttctttgtgcttggcatggaaatgcgtccataatataataagtaataagctaaattgaaggccgtgtatatgctttataatactat

SEQ ID NO: 107894 - DNA, 122 bp, Homo sapiens
cttctgggcccgagctggggcggctgacgtttctcggtcttgtgggcatcattgaccccccgagagttggcgtgaaggaagcagtccaggttctctccgagtctggtgtgtctgtgaagatg

SEQ ID NO: 107895 - DNA, 122 bp, Homo sapiens
ctcttcatttctgtacttaatgtggacttggatcaaatagggcatgaaccagcattggtccgtggactgcattttgactagtattggtttaaagaagttgttcgtttactcctcgaggtagt

SEQ ID NO: 107896 - DNA, 122 bp, Homo sapiens
ggcaacgactactgtgaggtgacagagaggggacagggagggcccacacggaagagggggcgggggcagggatgcacttttgcgcatgtgcttacagtcctgacgtaggaaggggcggggct

SEQ ID NO: 107897 - DNA, 122 bp, Homo sapiens
cttgtgatctaatttcaagactaccagcctttttgttggtgttctcaaatatgcctgcatcggagcaataaccagtggcaattttcatatggactctctcatcagtacaataggcaataacc

SEQ ID NO: 107898 - DNA, 122 bp, Homo sapiens
acgtctctgggagtgacgcgccggcgcgggcgcggtgcgggtgagctggtcggcgcttggcgctgcctggaccaatcgcttggcagcgcatctgaagctgttgtgatcgctggggcgacccg

SEQ ID NO: 107899 - DNA, 122 bp, Homo sapiens
agaatgagaaacggaggtaaagaaaggaaaaaacttgcctaaattcacaggttgaagttccggatcctggtctcagctcagcctactttggtgcccaaaggggaataggaaggcaaacaccg

SEQ ID NO: 107900 - DNA, 122 bp, Homo sapiens
actctgcaggctgcgggccgggcgggcacagtcagcaggcgttggggccacggttaggcccgcagggcaaggctggcactcaccggttccccgccacgtccagcacgtgcagctctgtcgtg

SEQ ID NO: 107901 - DNA, 122 bp, Homo sapiens
cccggccgctggcttatgcaaatcacttaggtacatgcaaaagtatcccttctcccggagcgccattggcccggggaggtctcgagctcattactatgcagagaggagagccgccattggcc

SEQ ID NO: 107902 - DNA, 122 bp, Homo sapiens
catttcagcgctttgactcggggtgggggttctgggtgactggggccctctggcactcaccgcccaaagaatcctggtactgaaagggggaagggtggggggaagaggaagtagcagaagag

SEQ ID NO: 107903 - DNA, 122 bp, Homo sapiens
gtgaagtcctcgtgcttggtgcgctgcgtgctcaatctaaaaccatcacagtcgcaactgcgcggcacagacaggtgcgagtggagttcgggaaggggaggacggctccacagggacagccg

SEQ ID NO: 107904 - DNA, 122 bp, Homo sapiens
aacccagaagggaaatggttaaactgagcttgttattgcctcggagagcctaagagcacccgcacacttaattctactccctgtctagaaaagctgtcagggagtcgtttggaattgcaatg

SEQ ID NO: 107905 - DNA, 122 bp, Homo sapiens
ctttgggctggcaccccaaacctggtccctgactccgggggccacgccctgctgcctgcgcgcacaccttgctatagacacagccaccacgctgcaccatgtaacgggctacctccaggtgg

SEQ ID NO: 107906 - DNA, 122 bp, Homo sapiens
ccgctggggagcgctgtctatgcggctgcggttgggcgagggttggagggctacgctcggcggggactctccggtggacggcgagccacttccgtggccccggggcgagaagtcggtcggat

SEQ ID NO: 107907 - DNA, 122 bp, Homo sapiens
gaactgaaacttggtttaaagcaggacttaaactctttactaagtttgtacggttctttacgtaagactctgttgaaaaaaagaacaggcacagcattcacataaatgaggcaagactcaat

SEQ ID NO: 107908 - DNA, 122 bp, Homo sapiens
ggccagcagccgcgccggaacctcggcccacgtgacgcgggcgcgcgcctatggaactgacggtggagttcagcgaagaaggtgccgcagagaattcgcaaacaccaaccgtaaccagagca

SEQ ID NO: 107909 - DNA, 122 bp, Homo sapiens
aactggaggctgctcctatgagtccattccctcacacgatcatgcattcacccacagatacgtgagcaacgtgtgtgctcgatgtcagaggaaatacagcggctggctcaccccgcccctcc

SEQ ID NO: 107910 - DNA, 122 bp, Homo sapiens
ctgtttgcaagcgatgagcaaggaggtgaccccaagcagctggaagcagtctgcagccaccggcgtggtggtgaggaagcggtccagagtgttcaccgtcaggcacagcgactcgaaggaga

SEQ ID NO: 107911 - DNA, 122 bp, Homo sapiens
gggaaccagccagctggctgtatcggaccattgggccgtgcgtcccgcgcgagcagagagcgggaaacgactgggagcttctgctcactggtcccgtcccagaaaaaggaaggaaaaagcca

SEQ ID NO: 107912 - DNA, 122 bp, Homo sapiens
gcgcccggagaccccggcccagcgccgccggagaccgtgaggcccgcacttcaaagaccccgacccccgggagcccaactgttgacccaaggctcaaagttcccagcctgacccctgaccct

SEQ ID NO: 107913 - DNA, 122 bp, Homo sapiens
cggtcccactccagtcccacaggccgggagcagcaagggcgcagcctgcctggggctctgcggtgaggggctgcgtgggaggcctcagatccctacagggggaaacatcctaactgcactca

SEQ ID NO: 107914 - DNA, 122 bp, Homo sapiens
tttttttccattcaagataagctgtcattggaaggaatagtggtacaaagagctgaatgccgaccagctgccagtgaaaactacatgcgattaaaaaggttggtgttttgtaactccagaat

SEQ ID NO: 107915 - DNA, 122 bp, Homo sapiens
ggattacaggcgtgagccaccgcagctggccacaaactctgcactgtgactcttgggctgcgtcattctgtgtcgtgaggggagctcttccgtgcattgtgggatgttccgcagcatccctg

SEQ ID NO: 107916 - DNA, 122 bp, Homo sapiens
cttctctcccccgttccagttgctgtctttgtgaatttgaccactaggaacctcacacaacgtttatcctttttatcacaggattactacacttagcaggatgtcccccaggctcatgcacg

SEQ ID NO: 107917 - DNA, 122 bp, Homo sapiens
ctaatggctggggtagatccgcggagatacttgaataccaggccgaacgcttccccaaggcgtgttgtagacaacgggcccatttgagcatgtgcaaagaacaaatttcatccatttttctg

SEQ ID NO: 107918 - DNA, 122 bp, Homo sapiens
gggctgggaagtcccacagagggactgccccgcacagggccggggcagcctggacaaagccggtgtggtgacaggccaaaccgacgcaaaaggttagtccaccctgctggtctctccaaggc

SEQ ID NO: 107919 - DNA, 122 bp, Homo sapiens
acgctcactgagctcgaaccctgcaggctcatcctgtgctgctgtggaaataaagtgtggcgaggaagcagggctgtgggcagggaggacctggcctgtgttcctgtgaggctggggtcatt

SEQ ID NO: 107920 - DNA, 122 bp, Homo sapiens
tcagagacaacgacagagtcagccaatgacagagtcagccaacgacagacttagagacaacgagagagtcagccaacgacagagtcagccaacgacagtcagccaacgacaaagtcagccaa

SEQ ID NO: 107921 - DNA, 122 bp, Homo sapiens
gctgcacggcgtccaggtggcctcgctcgcacgccaggctgagtgcggtgcggccgcgctcgtctcgcaggttcactgcagcaccctgctcgagcagcagccgcacgaagcgcgcgcgcagc

SEQ ID NO: 107922 - DNA, 122 bp, Homo sapiens
tatggcccttcgtgacccagtgcagcagggatgtgggaaccagtgggtgtgaagctgtgacgggtcacaagagggctgggacgtctcacagcttttacttatagcctagagcctggggaagg

SEQ ID NO: 107923 - DNA, 122 bp, Homo sapiens
actcgcacgtcccccacagggccaaacacccttactttcctctaaccacacccgtgcattcggcacaatgcctttcttagcacgttctgggtcccttgatccagagaacaatctgcctgact

SEQ ID NO: 107924 - DNA, 122 bp, Homo sapiens
atctggaggacacgcacaacacccgcgtatggcagccaaatggggtggagttagggcttgcgataaaacttgccttaaatgcaaaaatgcagctcaatccacgactgagcaagactggtagg

SEQ ID NO: 107925 - DNA, 122 bp, Homo sapiens
tgctgtcaaaacaaccaaaccacggggctgggggaggcggggcctcagtaggcgtctgcacgctagctgaaatagagcaaaatgcccgacttttgggggcggggctcctggcaacagcactc

SEQ ID NO: 107926 - DNA, 122 bp, Homo sapiens
gcggcgtgagtgcggcgttccggccgggcgtcccttcccctcccgccccggccagcgttccgcaccttgacgatgcccttgatgtagccgtgccgctcagcgaaatccacggcgcgcaggcg

SEQ ID NO: 107927 - DNA, 122 bp, Homo sapiens
tcagccccattctccactctacacagcccagggcagcctgcagccccagccagccttcaccggctcacaatagacagttgtcctgcaggtccctatgcctgtttacctggcacctgtgtccc

SEQ ID NO: 107928 - DNA, 122 bp, Homo sapiens
gttggtcaggacagattttgatccttaagttatgagtatgtgtatttgatccttaaggtacgagtatgtgctctgaagccaggcttcatgtgaaagctttcccctggctggaaggtcatttt

SEQ ID NO: 107929 - DNA, 122 bp, Homo sapiens
ataaagttagacaagagaaactcatttacatgaaccgtacacacttaccctgaaggtaaccggacgagctacaccagcaaaagaaaattcttcctgtctgagaagtactaatatagcacaag

SEQ ID NO: 107930 - DNA, 122 bp, Homo sapiens
aaaaaaaaaaaaaaaaggacaaaaaaaaattctataattatggaaaaaggaaagcaagggcgttatgatcacaggattcatgatgtgctgagttctagttcaggggtcctgggaaagggatg

SEQ ID NO: 107931 - DNA, 122 bp, Homo sapiens
ctcggtccccgatcggctgctccacgtttagctttttttaatttcccccccactcctgttcgctcgcaccgtgtttgctgcctgcaagtctccgactgcagaccggccgcttgctccacact

SEQ ID NO: 107932 - DNA, 122 bp, Homo sapiens
gtggactaaatgctcccattttacagatagggaaactgcagcttcacaacgatctattggcgggtctagggtcaccaaggggtgggtctccaatccatgtctttggggtgggatccaggcct

SEQ ID NO: 107933 - DNA, 122 bp, Homo sapiens
agcttggcgcgccagtgcctcggtttccaggcaccgggaataacagaagccagctgagagcgcctgcgcggctgtcggttgatggggaggtcaggtctgggaaactaggccctggggttttc

SEQ ID NO: 107934 - DNA, 122 bp, Homo sapiens
tgcccgcttcctggctagacctgcgcgcagtgcgcaccccgggtgacgtgcaagggagctcgctggcctctctgtgcccttgttcgtccgtgaaattctggctgaatctctccccccacctt

SEQ ID NO: 107935 - DNA, 122 bp, Homo sapiens
agcccagaagggcctggtcctcggggaacatctgctccaaacacaccttgatctcctcctcgttaaagccccggatctccgtcatccggtccaccaggccccctgggatctggccagatgca

SEQ ID NO: 107936 - DNA, 122 bp, Homo sapiens
aaactgagttggtagaaatgcgaagcgtcagggttcccgccggcttcgagcctttcttggcgtatttgtatcttgagctgatttctgcgtcagcccacatctcgctctgatccgcacgcccc

SEQ ID NO: 107937 - DNA, 122 bp, Homo sapiens
tcaccttcactcgtcagctgaccatgttgcctcctatggtgtgaacttctaccagtctcacggtccctctggccagtacacccatgaatttgatggagacgaggagttctatgtggacctgg

SEQ ID NO: 107938 - DNA, 122 bp, Homo sapiens
cttccacctgcaacgaccatctgtgtcacagaatacaggaaagatatcttgacattctaccgcgttctattttcatttttttctttcaagcgtgtacctttcacttctgactcagtttggta

SEQ ID NO: 107939 - DNA, 122 bp, Homo sapiens
gccccctcccacaggttaagtgggggctgagagctccagcccgtctcccacctttagaaccgcaatatacataggggtggaggagtactaaattatgcgttccattccatctttgctgaagc

SEQ ID NO: 107940 - DNA, 122 bp, Homo sapiens
tgcggaccctgctccgctattacaaccagagcgaggccggtgagtgaccctggcccggggcgcaggtcacgatccctccccatcccccacggacagcccaggtcccgggtctgagtctccgg

SEQ ID NO: 107941 - DNA, 122 bp, Homo sapiens
acccacattcggctttggggagccgccccacccccaactaattgtttgccagaaaggaaccgtaggatagatgctttgtgagacatctacggggccatgttagaacagaaagtcgcgacagc

SEQ ID NO: 107942 - DNA, 122 bp, Homo sapiens
atctattgtttttgactgactgtttggaaagccagagaattgagtgcagaggactagctgcgtattaaaggcagaaactccacatttgtgcttagcaatcatttaccacttatctgggtgac

SEQ ID NO: 107943 - DNA, 122 bp, Homo sapiens
caaaaattatctgggcatagtggcgcactcctgcaatcccagctactagggaagctgaggcgagagaattgcttgaaccggggaggtagaggtttcagtgagccgaaattgcgccaccgctc

SEQ ID NO: 107944 - DNA, 122 bp, Homo sapiens
ctcctcattccctgtcaccctcccccactcctagcccctcggagccaacggagccttgcgcgtttctggccggtcctcccaagagagaatggtgcaaaagccaataagcctggaacacacgc

SEQ ID NO: 107945 - DNA, 122 bp, Homo sapiens
tctgcccattcgtcaccacgttgagaccgggaacgccggaagaggcggggcaggggctgccgtgagcggaagcggcgccattcgtcttccgagcgctactgccagctgatgccgggagctaa

SEQ ID NO: 107946 - DNA, 122 bp, Homo sapiens
agggattaaaaagccccacgtggttgatctgggtttatacttgcaacctccagttccccacgtatgttctttgcaaaggttggcctctagatggatgcaagtaagggaccctctggggctcg

SEQ ID NO: 107947 - DNA, 122 bp, Homo sapiens
ggcggcgtggagacttgagtcgtttgcaggatggctagcagcgctggaaagccctaggcacgtgcgtccgccaaaggccggacagcggccgggagcgctggccggtcccgattttgcctgcc

SEQ ID NO: 107948 - DNA, 122 bp, Homo sapiens
acatctattttttttccttagtgccttattaaaaacttctaattccacatcctgttataccgtagtcggcattttctaatttatgatagtgcaatttggtaacattccaaataccttaagtc

SEQ ID NO: 107949 - DNA, 122 bp, Homo sapiens
gctcagcatgaggcagcggggagggcccaggaccagagccaggcaggaacacaggtggcccggcagggaaggctgctctggccctgccttgcctccccacccagtattgcccagcccctcag

SEQ ID NO: 107950 - DNA, 122 bp, Homo sapiens
acaggagcacctggcaaaagccaggcccacttcctgctcggctccgcccagagcagggggcgggcggataggcgattccctccaatcacagttccaaaaggagggggctgacaacatatcct

SEQ ID NO: 107951 - DNA, 122 bp, Homo sapiens
gcagtacatcttaagcccaggtagcacatcaattggagttccagacagttccccagctgccgcctcagatgtctctacctggctgtcccacaggtgcccatcactccacccggcatcccagc

SEQ ID NO: 107952 - DNA, 122 bp, Homo sapiens
gtggtaaagagaggaaatgacaatgtactgaaaagactgggctgtaagtcatcacagcggcgccctgaaacccgatatgtcaggcaagctggtgggatcctgggatccctcatgtaacggca

SEQ ID NO: 107953 - DNA, 122 bp, Homo sapiens
atactggcctgctgccggctgctgcgctccctaaaccagacaggtgtgcagtgggctcaccggcctgacctcggccactggctcaccaggtgagagcgtaggcccgtggccacaggccagac

SEQ ID NO: 107954 - DNA, 122 bp, Homo sapiens
ccctggccctcctccgccttcccaccctcttctctccccgcctccactacccaagtttaccgtggagcaccaaaagaacagcttggtttagggggtcttctttgaggaggggtaacaacggg

SEQ ID NO: 107955 - DNA, 122 bp, Homo sapiens
actcattagtaatttgatgattaacacgccccacctcagcaggtgtgcaaggtgcgggggcggacacaaagactgcggcttccggagaggacggctagggggccgcctttgcaagtgctctc

SEQ ID NO: 107956 - DNA, 122 bp, Homo sapiens
tagctgtggcgaggcgagagtgaccttttccatggatgccttcgtgcgcatcctgcaacccgagagctatgagctctggaaacacaggcaagacttgactgttgtggattacatggagccca

SEQ ID NO: 107957 - DNA, 122 bp, Homo sapiens
gggaacacacagtgtggttgcgtgattgccagtgcacacggggggaacacacagtgtggccgcgtgattgccagtgcacacggggggaacacacagtgtggctgcgtgattgccagtgcgta

SEQ ID NO: 107958 - DNA, 122 bp, Homo sapiens
acttcctctcaccctttagcccagaactgctttgaatacaccaattgctgtggggcggctcgaggaagagaagacaccagtgcctcagaaactgctcggtcagacggtgatagcgagccacg

SEQ ID NO: 107959 - DNA, 122 bp, Homo sapiens
caagtagatccaacagtatcttcaacaaataagggcttatttatttttttcttcaaataacgaagagtctgaagatagctagctgctggcatcaggtcaacagctcaactatgtcagagtga

SEQ ID NO: 107960 - DNA, 122 bp, Homo sapiens
agaattactgtaacatctttctgattttaggagaggtagcagttccctttttagtctaaacgctattttttttaaagctcagccaagagaatccattataattttcaaatgtgtgtaactta

SEQ ID NO: 107961 - DNA, 122 bp, Homo sapiens
gaggccaaggtgggctgattgcttgaactcaggagttcatgactagactgggcaacatagcgagaccctatctctacaaaaaattaaaaaatttgccaggggtggtggctcatgcctgtaat

SEQ ID NO: 107962 - DNA, 122 bp, Homo sapiens
cgacagatgaaaggagtactcagacacaggtacgcagtgaaagagcggctaggggactgccgaagagtcagcagtctcaataaactggagctgctcacttttattcagtacagacataatgc

SEQ ID NO: 107963 - DNA, 122 bp, Homo sapiens
agtatttctgagacacctagtatttctgagacactgcctgtgactgaccagcaacgtcagcgccatgcccttccagacatggaggccaaagtgacaaaagttgccttgcaacgtagtcctgc

SEQ ID NO: 107964 - DNA, 122 bp, Homo sapiens
gagatttacggagccagtctctgcttgtttgcactcgcagaaaacctgggccctcagttccggtgatggctctgagactcgctgcagctctgtttgtgttgaggactgatttatatttaaac

SEQ ID NO: 107965 - DNA, 122 bp, Homo sapiens
cacagagcggctgaggaagcctccttagggctgtggatggggtggcggggcaagggctgccgtggcgccatgcagcagtgggcatcgggcctcagccacacccagcagggaggccaacagca

SEQ ID NO: 107966 - DNA, 122 bp, Homo sapiens
aaacctgtcagtttagcggaaggctacatgttatgtggcacaaaaaactccctaggtccacgattgccttgggtggaggaagggctattgccgctgttgtggctgttttttaaatgcattcc

SEQ ID NO: 107967 - DNA, 122 bp, Homo sapiens
gcggccgggctaatgcggggcggggtgggcggggcgggactcggctctgatgccccgccgcgccccaggtttgggttctataaatacatgaagatggacaaggaggagggggatgaggatga

SEQ ID NO: 107968 - DNA, 122 bp, Homo sapiens
ggggcccaccttgctggtacacacatcatactgacacagagctggtcatgttgttttactcgcatgtagtgtcacatgtaagtcacacacagacaaacctgaggccatctcacatgctgcgt

SEQ ID NO: 107969 - DNA, 122 bp, Homo sapiens
agtcggggttgaatttcgagaggggagtccgaggacctggggcctgatttctttttctctcgccatgcttcttcgggctgtgtacatgtgtggtggtgcctgagaggcgatacagggaatgg

SEQ ID NO: 107970 - DNA, 122 bp, Homo sapiens
aaatgcttaagccagttggctttcagtctcatgccttatttcctccaaggcatgcctcaacgcattgtttgtctcattgcttaaatatgtccagaaggaatgatcatgtatctaatagacta

SEQ ID NO: 107971 - DNA, 122 bp, Homo sapiens
cactgcttgtgcctggcccagagcagaggctccgagtggtggcaccacttctgtcattgtcgggaccatggctgcccctcctccccctcctgctaaaccaacaagggctgttgactgagggc

SEQ ID NO: 107972 - DNA, 122 bp, Homo sapiens
ctctgtaacttctcaatttttctgtaaactctaactactctatattagtctttaaaaaatcgcttatcttacgaatgattttgaataagcgttttgggaatgttctagagatgaatctcctc

SEQ ID NO: 107973 - DNA, 122 bp, Homo sapiens
tgcctgtaggcgcaactacttgggagactgaggtaggaggatcgcttgagtccaggaggtcgaggcttcactgagccatgatcgcacagctgtacgccagcctgggtgacagagtgagacct

SEQ ID NO: 107974 - DNA, 122 bp, Homo sapiens
tggccggaggtgacagtaggcccgccccgcgaacacctccagtgcggcccacatagtcagcggtctcttccaggtcggagtttgtctccccgaacccaggcgtcccaaagcagctgggggcc

SEQ ID NO: 107975 - DNA, 122 bp, Homo sapiens
cgacgtgggaagcaagcgggcagtaggggttggggaaactcctgacttttgatgaactttcgtagatctggtttctcctccagacgggtctgcagattcaagaactcccgatagcgacgatt

SEQ ID NO: 107976 - DNA, 122 bp, Homo sapiens
ggaaatgaagttccgcgtctaggggcgggcccaccagtcccaattgacgcatgagctcttcgcctggcgcattgacttctggatttgtagtttttttggataaatgcgaactgctgagtact

SEQ ID NO: 107977 - DNA, 122 bp, Homo sapiens
ggtatgagtttaaagttaacgccaaagacaaaggcatccccgtgctgcagggcagcactacggtgattgtgcaggtggctgataaaaatgacaatgaccctaagtttatgcaggacgtcttc

SEQ ID NO: 107978 - DNA, 122 bp, Homo sapiens
cattctcactcatccattcccctctattatttctactttgaataacttcaaaataaaatacgatacaagatcagatttgttttagtaaataggctaacaagatataaaatggaacgtaaaag

SEQ ID NO: 107979 - DNA, 122 bp, Homo sapiens
ctccctggcccagttggtactgggtgcttctccgcagcggccgccagggggagcctgggccgagagctctgggaaatcgaacaactcgttgaggtcttagttatggtagaaaaccttgaagt

SEQ ID NO: 107980 - DNA, 122 bp, Homo sapiens
agggaaagatccttagagatatcccgactcatgcgaacccaagaattttatcccccttctcggggattttgaataagttcaattccccagctgtggcttagagacagggttaacataaactt

SEQ ID NO: 107981 - DNA, 122 bp, Homo sapiens
cccaaagcatgaaggttactcggctctgaaacaatgtggtctgcacgggagtcaccattccgaaaaacacacgaatcagaaggcgacccttctgtcagagaagtcatccaggagtgacttgc

SEQ ID NO: 107982 - DNA, 122 bp, Homo sapiens
cttgccgggacccagacatagtttggtctaagtggcctgggatgtggctggggctggaggcggcctgttgaggggtgggtggagggtgggggggttggtgtgcgatttggggaggcccagca

SEQ ID NO: 107983 - DNA, 122 bp, Homo sapiens
actcccgcggcggcgggggcgggcccgtgcctgctgtgccccgacttcccacaccagccgcgcccaccgcaggtgggactcaggttcgccctctgggccaggtccttcacgaggagggagct

SEQ ID NO: 107984 - DNA, 122 bp, Homo sapiens
gtgaaaacggactaatacagcttcttacaaatgcactcacagagcagagtgcctgccccccgagacggcctggtagcggctcctacggagtccgaggtggcctttctgcctgtgcctcccca

SEQ ID NO: 107985 - DNA, 122 bp, Homo sapiens
gaagtcgctgaggggtggtgaagcggttgggaaagtgtcggtttatcttcgcgccccttgcgttcttgccgcggcttgcctgggcaggtaaagcgcgattgcgagagctcggcaaccctgcc

SEQ ID NO: 107986 - DNA, 122 bp, Homo sapiens
gcgcgtcatcgcccgcaaagccggccttcaccagcccagagccgttgtcgcacaccagggcggtggtctcctcgtcgtcacacatcttggcacagcttcagggggttctgcaggttgaggag

SEQ ID NO: 107987 - DNA, 122 bp, Homo sapiens
ggggagaaagtaatattttgcagcacagtacagggtaaactgggtccaggtgggcgtagccgccgcgacaccttcacgtgaccgcggacagcttaaggaccccgcatccagtgcgcctgcgc

SEQ ID NO: 107988 - DNA, 122 bp, Homo sapiens
cagacacatactcagcatcttgctgactttttaacatacctcttaaacaagtctgatccacgccgggcacaatggctctcgcctgtaatcccagcactttgggaggccgaggcaggcgggtc

SEQ ID NO: 107989 - DNA, 122 bp, Homo sapiens
gctcctgatttgtgatgacgtccctggagggggcggctcctggagatcaggccaaaggggcggccccatcctgctgacgtcaggccccaggtgcggacgggtgccagtgcgcaggtgccggg

SEQ ID NO: 107990 - DNA, 122 bp, Homo sapiens
agcagatccccacctgtttgactctgctagggctgctgtaacaaagtgccgcagactgagcggcttaaacaacaaaaatttattgtctcgcaggtctgggggctggaagtccaaaatcaagg

SEQ ID NO: 107991 - DNA, 122 bp, Homo sapiens
ccgcgcacacccagctcacaccatccaatccggaggccatgggccgacatgggggctgagcgtttgaaatgagcccggaccaccagatgcatgggtccgttcacacgaaatacccagaacag

SEQ ID NO: 107992 - DNA, 122 bp, Homo sapiens
acctcaagtgatctgcccgcctcagcctcccaaagtgctgagattacaggcgtgagccaccgcgcccgaccccagcagccccaccttgacagccagttaccacataggtctcatgctatgag

SEQ ID NO: 107993 - DNA, 122 bp, Homo sapiens
tccgccgcactttgtaaagcgccaagccttcaaggttattattattctctccaaacctgccgggagcagcggtgttgttttgggatggaggaggaggctgcgggagcgaaaggggtgggttc

SEQ ID NO: 107994 - DNA, 122 bp, Homo sapiens
accagggtctcatattttttattttttcttctaaaaaaaaaaacaaacccaaaaaacaaccgttcaattgcacctcccaggtgcactcccaggcttgccaggggctttccagtcgcagaccc

SEQ ID NO: 107995 - DNA, 122 bp, Homo sapiens
acatgagccagaacctatagggagggaggttggggcgccagccccgcccccccaacgtgacgcaaatctcccggacagaggcttaggagcccgggccccagtccctgcagtggctgtaacaa

SEQ ID NO: 107996 - DNA, 122 bp, Homo sapiens
ctgggggaggagatctgggtagggttggccctgccccattccttgattctggaattacatcgcagtcagttggtcccctccaggacccaagggtcccggttttctgcccttcctccctcagg

SEQ ID NO: 107997 - DNA, 122 bp, Homo sapiens
cgcgttaccttcgtcttgcccccgcagtggcagcacacggtccacaggtacttgagcgtccgccagagcaagatgatgaagaggcccccgaagaaagtcaccatggaggaggccaggaaagc

SEQ ID NO: 107998 - DNA, 122 bp, Homo sapiens
gatgtgccactgttgggaggttgtgagtcactgggatgcctccagggatgatcccttccacggctgcaggaagtcctcctggagccacgcccacgatgcctggcggatatctgtatgtggca

SEQ ID NO: 107999 - DNA, 122 bp, Homo sapiens
gagaatggggcctgaggcgtgaccaccgccttcctctctggggggactgcctgccgcccccgcagacacccatggttgagtgccctccaggcccctgcctgccccagcatcccctgcgcgaa

SEQ ID NO: 108000 - DNA, 122 bp, Homo sapiens
tataccctgcagattgaccatgaattgtcacagcagtggagggacccatgtgccttaacacgtgccttgggagggtatgaatgagggaccagctattagggatgatacttacatagaatcct

SEQ ID NO: 108001 - DNA, 122 bp, Homo sapiens
gtactttggcaggaacaggagcaatttcatcagtgtgtaaggactcctaggtggaaagtccgggtaaatggcaacatggttccagtttattccattgatgttttagagttgctgacagatgg

SEQ ID NO: 108002 - DNA, 122 bp, Homo sapiens
cgccgcacgtggacccccggcacgggcacgctcacgtgcacccgtcctttcacgccaacgcgtttcctgctgcccccacccctgcaccactgcacgtcccagaccccggcccagcctccccg

SEQ ID NO: 108003 - DNA, 122 bp, Homo sapiens
ggaatagcagtagcaactgacatgtgggcaggtgagaaagagcctttgttcttaaagactcgacttagagccacgacaaactgaaaggctctagcattagcatacttatagtgattccagag

SEQ ID NO: 108004 - DNA, 122 bp, Homo sapiens
aacccacacttgttgagggcctatataggaccatgaactggggacacaaactcaacctcacgatagcactgatgaggcatgttctactaagctcattttacagtgaggaaagagaggaccag

SEQ ID NO: 108005 - DNA, 122 bp, Homo sapiens
tattggctctgggctccagcgactccagtgaccttgctcaggaaacaggcccgggcaggacgaggagggcgggagggatctgtttgcctggcagagtgggtgtggggaagacggggccaagg

SEQ ID NO: 108006 - DNA, 122 bp, Homo sapiens
cctctgtccattctcaagccacgtcacgtctctatgaccaggctcttagatgcccaaaagcgacattgggagaggaaactgtcagcccccagcgtggctcctgtggcttctgagaagcccca

SEQ ID NO: 108007 - DNA, 122 bp, Homo sapiens
gacattcccgcattctgaggctcgctcccgtcccgtgccgctgttaccggcctccggccccggctcatacaagcaggagcacatcgctcttttatgaaagcccttcaacatttaacgtttaa

SEQ ID NO: 108008 - DNA, 122 bp, Homo sapiens
ccagcattccctaatcgaagtcccaagtggtctgaaaacttagacgaaagataaatgggccgcagtaattaaccactgcaataacagatgttatacaggaaacctgtgtgtgccagagctat

SEQ ID NO: 108009 - DNA, 122 bp, Homo sapiens
ccacgtggcgctgacctgcagcatctatgtctatgcagaacttggcagggacagaatttccgtgaaagtcagcatagcacagggtgattaaaagtgtgggtgctagaatctaactgctaagt

SEQ ID NO: 108010 - DNA, 122 bp, Homo sapiens
aaatgatatatttcttagggatacataccatggcagagattggctcattgttgaccaaggcgttttccctttccttccttgcagttaagtgtagccatttgactcagttctagccagtggaa

SEQ ID NO: 108011 - DNA, 122 bp, Homo sapiens
ctctcccctgcttacagttgtgggattccaaaaaagctactgtctctgtttcttatctggcgctggggcaatgactcctgccttacacagccattgtgtgaatactaatccatgatgtcata

SEQ ID NO: 108012 - DNA, 122 bp, Homo sapiens
tcggtccgctcccggcgtcgctctcgcccgcggactgcgtggggggcaggacccccgcgtcgcccccagttctctccaggctgatcctgggtcctggtcaagcccccgcccccccagattca

SEQ ID NO: 108013 - DNA, 122 bp, Homo sapiens
gtaagaattaagtacaaaagacgctcaagaggctgcgaagagcaaacacacacacacaaacgtgcaacgaagccaagttaaaaggtaaacaggccgaagaggggggatttaggggagggtgc

SEQ ID NO: 108014 - DNA, 122 bp, Homo sapiens
tgagctgggaaatgctttctcctcagaaaaaaacagcccagccggagggcatgtcccggccgaatgttcgcctgatgcaccgcccctgggatgaggccgctgcagaaccagagcagctgtgc

SEQ ID NO: 108015 - DNA, 122 bp, Homo sapiens
aagactgccttccacaaagacaataggcttttcccaactgtaaatgactacatcacaagccgcacctgtcagttaatcagtgcatttaagtctttgccagcggatgttgaaatgatgtctgc

SEQ ID NO: 108016 - DNA, 122 bp, Homo sapiens
gtcaccacaaattggaactcagagcagaaaggccttgtcgggcgggaggcaggcctgctgcgaggctgtgcacacagttccacttccaaaggctgaggaagccagggtgatattcagcagcc

SEQ ID NO: 108017 - DNA, 122 bp, Homo sapiens
gtgactgagaatctagcacttctccacttgtagctgcactttaagtctcagcagaagatacgatcgtctgcctttataggcctcagatactgaagattatttttggtagaagcaccgtgtag

SEQ ID NO: 108018 - DNA, 122 bp, Homo sapiens
cagcagtaactgatcattcgatgtggcggtgggatctgcctgcagtgctatgacaagttccgtatggatcagtgcatacgggtggcttgggggtctcccgacagtcacagaagggggcttag

SEQ ID NO: 108019 - DNA, 122 bp, Homo sapiens
ccttccaacgatggttatttggggtgggcttcattctggcaggagagggaaggagggactcggccacacacgctggtaggccggtggttaggagtcccccacaggaccttcccatcccctca

SEQ ID NO: 108020 - DNA, 122 bp, Homo sapiens
gccgggaaagcgagcctgggattggagggaagagggcggaggcggcccggcagaaaaagccgcaaatggcctcgaagcatggggaggtagtgctttcgctgaagttctgccgacgcttttct

SEQ ID NO: 108021 - DNA, 122 bp, Homo sapiens
agcagcagcagcaacatctaagtgagaggcggccatgaggactggaccgagccccgccggcgcggcccgcacccggagactactcgacctcttgccggttgcctcgcaggctccgaccgggc

SEQ ID NO: 108022 - DNA, 122 bp, Homo sapiens
cctccatccctctatgaagaaaaatgcaagttgctcttctgcgctccaaatacaccgagacgaaaacaagcccaggtgaagctgcagctggggacacgagttaatgtgagtgcgagcccagg

SEQ ID NO: 108023 - DNA, 122 bp, Homo sapiens
tcctgcgtgaccccgctgggagaggattctggaagctcaagcctggtttctttgggacatcgccccatggacctctgcccttgctgattttgtgtggaatcctttcgctgtaatgaatctca

SEQ ID NO: 108024 - DNA, 122 bp, Homo sapiens
tctagtgccgggaggcagaaaaagtgaaaagtgtcaagtatccagggacaacagtgcagccgccccgggttagccactccaaggaggtccacccgtgcattctgccagccgtggcctcggcc

SEQ ID NO: 108025 - DNA, 122 bp, Homo sapiens
cgtgaggctgagcgcaggaagcggaagtgccgatcggtggggcggaaccatgcaggaaggcggaagtggcttcgctagggagcctcccggcgtggagatggcgggagctggtcgcggagcag

SEQ ID NO: 108026 - DNA, 122 bp, Homo sapiens
gcggtgggtgggtggggtgggctggcatgggtgccggtgctcccagcgctggggccggagcgcggaacgcttccctaccgctcccccggggctgacgcacgctctcacggcgcgcgcatcct

SEQ ID NO: 108027 - DNA, 122 bp, Homo sapiens
cgccctccgccgtcaggctggatggagggaacccagggagacgacttgggcctgaagcctcgccaatttcaggtgaggaaacagggccgtggaggagacaatgtggcgatcacaagcaagcg

SEQ ID NO: 108028 - DNA, 122 bp, Homo sapiens
accacagagctggttttctgaagtgatgtgtcataaagtcacagtacccttgaaggtaaccggaaatcattgttttcacagggaaaaaggcaaccggaagttacaacttccactggagaata

SEQ ID NO: 108029 - DNA, 122 bp, Homo sapiens
ttgagtattttattgttattctttgtggttattatatttcctcttaacaagctctttcaccgagttactataacgtccaaccagatgaccaaaagagtgaaaaatatgtaaaaattgtattt

SEQ ID NO: 108030 - DNA, 122 bp, Homo sapiens
agtgcagaacgccatagcgacggatgacgcctgccggggaatcgccgtagcaaccagagacgcgctagatccaccaccaagcttgcaagcagaagaggcagcaagtgatgctgaaggctgtg

SEQ ID NO: 108031 - DNA, 122 bp, Homo sapiens
acatctaagctttataaagcaagctagtggctgccctttccaatacctcactcagcacaccgtctgtcacccaaacaagcatccaatgaggaaaatgaacacactgctccttgtgagcttat

SEQ ID NO: 108032 - DNA, 122 bp, Homo sapiens
tggttcaggattccggacggagcttcttgtgcggctccttggtcatccttcgcatcgcgtcgcgcccacgtgagcctggctgcctggcttcacgccaccgaggactgtcccagggccacaag

SEQ ID NO: 108033 - DNA, 122 bp, Homo sapiens
tcagagtttgggctgcctcagcaagatgcagactggtatctgcccttaggttaaaaattccggccagacatagtggctcacgcctgtaatcccagcactttgggaggctgaggcgggtggat

SEQ ID NO: 108034 - DNA, 122 bp, Homo sapiens
agcccggcctttttttttgagatggagtctcactctgcctcccaggctagagctcagtggcgcgatctcagctcactgcagcctccgccaccacccctcagcctcccgagtagctgggatta

SEQ ID NO: 108035 - DNA, 122 bp, Homo sapiens
ctcccaccccaaactgacaactctttccccagcccaataagaatgaacacagggaggccacgattcaaccaagtacaaaggcagcttgctttattcttgagatgcagggggggaaggggtgg

SEQ ID NO: 108036 - DNA, 122 bp, Homo sapiens
ccgcctctttgtttaactcagcccctacaccagcagccaggagctgcctacgaggagggacgaaggctggccaggcctccactctagacaggaagtctagtctagagtctatatggtcccag

SEQ ID NO: 108037 - DNA, 122 bp, Homo sapiens
cactcggtcagtaccgtgtagatatcagggcacggttagtgctgcaccacgctgatgctccgtcagtactgtgtagatagcagtgcatggttagtgctgtgccacgctgacactcagtcagt

SEQ ID NO: 108038 - DNA, 122 bp, Homo sapiens
ccctgagggcccccacagccttcagctctggctctggcgggactaacctggcccggccaccgaccagagattagacaagactggtggatggttaatgccactgacgtcagggcctggccggg

SEQ ID NO: 108039 - DNA, 122 bp, Homo sapiens
tgttgggcctgctatttttaaggcattatgctagactatatagggcaggggttctctgaccggtagcatcagcaatacctggaaactgctggaaatgtacattcttgggactcggcccagaa

SEQ ID NO: 108040 - DNA, 122 bp, Homo sapiens
cgcacgtggcctcccagggttccaggagcccctgagttagccgagcgtgcgcgtgggtgtcgggggtgcgcaagtctccagccttgcagagacggaggaggctgccagatgtgggggcggtg

SEQ ID NO: 108041 - DNA, 122 bp, Homo sapiens
agtgggcagcgtgggtcccggctcagtgctcgagctactggaggcctgcccgcgcctgcgcgctctcggcctgcacctagccagtttgtcgcacgccatcctcgaagcactggcggcgccag

SEQ ID NO: 108042 - DNA, 122 bp, Homo sapiens
actctttcaacctcttgcggattcccattatctatcttaaactacactcccatcgtgcaacggaaaacggacagagctcctgcgtgcaccgaagggacttcgagccaatccattgtcacagc

SEQ ID NO: 108043 - DNA, 122 bp, Homo sapiens
tgggctcgcggggtgggggtggccgggggcggtggccgggatcggtggacagctgccgggcgcgtccctcccagactgggctcggctgagcgtgtgcggagcgagacctgggcaaccggggc

SEQ ID NO: 108044 - DNA, 122 bp, Homo sapiens
ggctgcggggccgccgccgagcgagggcgaggagagcaccgtgcgcttcgcccgcaaaggcgccctccggcagaagaacgtgcatgaggtcaagaaccacaaattcaccgcccgcttcttca

SEQ ID NO: 108045 - DNA, 122 bp, Homo sapiens
tgcctggaagccctaggtctgaggggtctggctttctccactcacctctcctctcctcggcgttgccgcctttgccacaagatgaccccaatgagcagggcggctgtccccaggcctcccag

SEQ ID NO: 108046 - DNA, 122 bp, Homo sapiens
tccctccctgggctggcctctgtggggcttgggagtggcctgggcagctcacacctcttccgctttcctcccgtggtccctacttctcctttctgggaggcctgggccaggtctcccacttg

SEQ ID NO: 108047 - DNA, 122 bp, Homo sapiens
tgcctccacggctggcatacagtagctctggttttacccatgagggggaagcccagcacccgtgccctcgatcacatcgccagttcacaaacacacatgcgcacacgcacacgccgcccgcc

SEQ ID NO: 108048 - DNA, 122 bp, Homo sapiens
gcaggccaggctttggcccagatacagcatttggccccctaaggcagctctgccttggggcgctcaagggagagggcagacgcctttccgcagcagagaccccttgtccacattttatggaa

SEQ ID NO: 108049 - DNA, 122 bp, Homo sapiens
gggtcagaaactgttcaggtagcagctgttgtgccctcccttggccccgccgctcggagacgccccgccccctgccttgaacggccgcccggccccgccccagcgcccacgtgactagcata

SEQ ID NO: 108050 - DNA, 122 bp, Homo sapiens
ccgctaacgccctttctggtgagtttggggtcctggccggggggtggggggccatcaccccgggctcgggcccagttggctttggggcacctgagcctcagcagacagcagggcttgaggag

SEQ ID NO: 108051 - DNA, 122 bp, Homo sapiens
tccaccagccctgggagtgagtctgaggcagggattctcagggacgctgcctgcatgccccggaggagtagcgtgtgtgtgtgcacacgtgagcttgtgagtgtaggcttgagaccgtgctg

SEQ ID NO: 108052 - DNA, 122 bp, Homo sapiens
tggcggccatggccctgcatagacacgagctggaatctgcaggtggcagccaggacgctgcgtgtgtcgagtgcacagtgtggcttggtgccaaccatggcgagggtggagagccccgtgcc

SEQ ID NO: 108053 - DNA, 122 bp, Homo sapiens
gggcactgcctgggttgcttggacagaagcctcagagctggaaggagctgagaaaccacacgctccaatgctcacgccccataggggaccgaggaaccgcagaagggaccgcacctgccccg

SEQ ID NO: 108054 - DNA, 122 bp, Homo sapiens
gagggtgaggaaggcagaccacctaatgacctggccccgtggaatttggcctccctgcttcgtggcacttattcagcagtgctccactgtggaagcagggtgtggctgggtctggcattaag

SEQ ID NO: 108055 - DNA, 122 bp, Homo sapiens
gctccactttaaattattttttaaaacttctcctctcaagcttttccatgatagctgccacgatgtcaaacataaaatttaaacttcacagcaggacttcacagatggagaatgctgttatc

SEQ ID NO: 108056 - DNA, 122 bp, Homo sapiens
ttctccagtaggtaatggggcggcgcccggtgggctgcaggtggggagggctcccagcgccgccagcggccacccggggcgccggctcctggagggagagtggcctagaaatatccaaggaa

SEQ ID NO: 108057 - DNA, 122 bp, Homo sapiens
atcaggggaaggagggaagggaaaagtatacatcctgccaccttcttctccaattagctgcgttgacactctgggcttccattagctttctagaaagagtccttaggaaggagagagaggct

SEQ ID NO: 108058 - DNA, 122 bp, Homo sapiens
tggaacatccctctctttggcattgcaccagcccctaatgacagcctggggcacagtgaacgcctgcccaggtcctttatgctggggctgcatgctacacccagctgctgtgagtgttgact

SEQ ID NO: 108059 - DNA, 122 bp, Homo sapiens
tgggccgccgccgcccgccttcttgttggccgcacccccgccccgcgcccgccccgcgcccggcccggcccggcgagaaagccttaattggtaaaattgcccaggagcccgggacgggtgcg

SEQ ID NO: 108060 - DNA, 122 bp, Homo sapiens
ggtccctctgcgagctggtgcttcccaggaggccgggggcagggagctccggcactgccccgagcccagtggaactttgtgttctccccgcaggcggcttcctgagcagggtgggcggacac

SEQ ID NO: 108061 - DNA, 122 bp, Homo sapiens
ttcgcactcagaaaagttccacatctcgtggggaaataattacagtaggtaacatgaaggcgtcaagtatgaaaaggtgtttgaggaggcacctggaggttgtggccagcataggaggggag

SEQ ID NO: 108062 - DNA, 122 bp, Homo sapiens
ccttctctagactcgctcttcacgggagcgcaaccatggatcacgaaatgcctctaaaaacgacaacgcaattcaacccaccacaaaatgcttgtttttcttatcctctctcctagactccc

SEQ ID NO: 108063 - DNA, 122 bp, Homo sapiens
gagcacgaggaagcccctgagagaaagactctggcctggattgggtcgaattaagcccgtcgctctgctcagtaccaaaatgacagcgccaatgtggcagccatctttgtacagacgggaag

SEQ ID NO: 108064 - DNA, 122 bp, Homo sapiens
atggctgaaggcggtttggggtgttgccagtagcctgcccttccgcagtggctaaggatccggtgttgcggtgatacatgatgtgacctcttcaaccagtgagtcactcacccccagataac

SEQ ID NO: 108065 - DNA, 122 bp, Homo sapiens
cgcacaacccgacgccggcaactgtctccaaacacccgagagccagggcgggagcatgagcgcctacggtgttccttggggtggagccctcgcagtgtccagaggatttgggggctcctgcg

SEQ ID NO: 108066 - DNA, 122 bp, Homo sapiens
gtgcccagggccgggccactttgcacttgagtgcacacagtgactctccaagcagaccgccgagtccctccagtcccgcagagtttccgggtgtcctcagccacaggaggtgaggctggagt

SEQ ID NO: 108067 - DNA, 122 bp, Homo sapiens
gttcagtttcctgaacaagctgagcatcctcccatctctttgccttggtaggagccagttcgtcttcttggagcacctatccccttctttacttgattcctaaagaactcttagagtaccct

SEQ ID NO: 108068 - DNA, 122 bp, Homo sapiens
aagtagctgagaggctaaaaatagaggagtttcagttgggcagggagtgcgtctgccgcccggtttccctggcaacgcctggctctggcctgcttccatctcggctgcagccgggcaggcgg

SEQ ID NO: 108069 - DNA, 122 bp, Homo sapiens
ccgggaggcgaacgggctggtgccggcctgtgcttagcaagtcaagtcagaagccagggccgggatcctggaagaggaggaggaggcgtttctagtcctgggcgccatggaggacataggct

SEQ ID NO: 108070 - DNA, 122 bp, Homo sapiens
gccccgagtgcagacaatcccggagggggaaaggcgagcagctggcagagagcccagtgccggccaaccgcgcgagcgcctcagaacggcccgcccaccctgatttctcattggcgcctcct

SEQ ID NO: 108071 - DNA, 122 bp, Homo sapiens
cagtgaagctgtcattcaagcacagtcagggcccaggagagggcgcagggagggcgcaggcgcgcagggagggctgggcatgcgctcggcggggcctccggctctcggggacgcgcgcgggc

SEQ ID NO: 108072 - DNA, 122 bp, Homo sapiens
ccccaaccagagggagtgcccatgcgtggtgtcccacgaaggcggagctgggcatgagcacggccatggtcctgctgtcagagcaacctcattccacggggtgagcatctcgcaccttggtg

SEQ ID NO: 108073 - DNA, 122 bp, Homo sapiens
gtctcgataaagtttcagggattatggtcctttaccctatgtacttgagggtgtgtatatcgtcagaacaaagagaaagtcatttcttggatcatcactgcacaaagttgaaaatcaggaaa

SEQ ID NO: 108074 - DNA, 122 bp, Homo sapiens
tcttttgggcgccagtccaaaaatcgcggtatctgattggcgaggttggagggggctgaacgaccctaattggttagttggacctcgaaccagactttcatctggaggatcgggcgaggagt

SEQ ID NO: 108075 - DNA, 122 bp, Homo sapiens
gggaaactcccatccgaagggacaacatatacaaagctgcagaagcgtgacatatttgggcgatcccaaacactggggaaagagctgtggtcattaagtctggacagctaggcaggagctag

SEQ ID NO: 108076 - DNA, 122 bp, Homo sapiens
ataaaattctctcttgtccttggaaagagcacactgcttactctatagttaattctttcacgaaaccattatttggtaacatagttaaccttaccctgattaatctgtttcaagtgtgaatc

SEQ ID NO: 108077 - DNA, 122 bp, Homo sapiens
tccctgcaggcccagaatctttccgctcctatcactagtgcatcaaggatgcagagtaaccgccatgttgtttatattctcaaagacagttcagcccgaccgtgagtgccacatgctcttcc

SEQ ID NO: 108078 - DNA, 122 bp, Homo sapiens
ctgcgcacctccctgtgggtagcattcccgtcaccatgcgtttagtcccctcctctagctcgctgacattcagctaagattgcagtgggtccacgttggcgcccgtgagtctgttctgggta

SEQ ID NO: 108079 - DNA, 122 bp, Homo sapiens
cgggcgggggtggacgttctgggcccagccctgtcctcagaggctgctggggcagaagcccggggctgggggatgccggggatggatgttggggtgggtgcctccgagaccagaggagccct

SEQ ID NO: 108080 - DNA, 122 bp, Homo sapiens
ataggagagtgccctcgctttagggagatccacacaatagtatttagggatgatgggcatcgtagccaaaaatgaatatgtctgtaaataaagacaaaagctgatgaagcaaatgtggtaaa

SEQ ID NO: 108081 - DNA, 122 bp, Homo sapiens
gggcgggccgtgcgctttgtgacgtcagccgccccgcctctcggcccgcctatccgcgcacgccagccccgcctcgcgcgcgccgcccgtgcaatccctgcttaagagaccccgcagtgggg

SEQ ID NO: 108082 - DNA, 122 bp, Homo sapiens
tgaataaactctctggacctcaatttcctcttcagttatgtagattgcagtgagaattagcgataaggagaataaagtgccgggacaccagtttatggcattctgtaggtgaccgagaaatg

SEQ ID NO: 108083 - DNA, 122 bp, Homo sapiens
ggtgtggttgttgaggatgatgccaatgatgaagagcaccagggcgggcacgccgatggccgccagcccgtacaggtagttccgggccggcgagcaggggcagtggaaggccaccacagaga

SEQ ID NO: 108084 - DNA, 122 bp, Homo sapiens
gagtctggtaagtgtcggatggtagaaccagggttgggactcgggacctccaacagcatacgatgtggtgggggtgggcagcctgggtgggggtgggcattactctggggctggattcagct

SEQ ID NO: 108085 - DNA, 122 bp, Homo sapiens
gccccgggtggccccgccgccagcaagcgacctggcggctgtgtcctgccgcctcctccgcgaagcccctgattgcccagcccgctcagacccaggcccagactctcactcactcgccccgg

SEQ ID NO: 108086 - DNA, 122 bp, Homo sapiens
ggctgggcttcaagaggcctttgttcccagcatcctggttagcaaccccagttcctctttcgtgcattgtggttccctgagaaaacgttaacccagcccccagcacagtcaggccagccctg

SEQ ID NO: 108087 - DNA, 122 bp, Homo sapiens
gacgctgcttggtgacctcgccacacgaaaggaccatgattcctgcagggcggaagcaaccgatgagcagtaacaactcttcacggggacacagacaggtaaccggggcacaggtgtcctga

SEQ ID NO: 108088 - DNA, 122 bp, Homo sapiens
atgcccattgggcaagggcaccgcaaggctcagaaggaggaggcagtgggctaggagaatcgagagatcagaattttaaactcagcccagccattaacatgcctcaagtactcctatcatat

SEQ ID NO: 108089 - DNA, 122 bp, Homo sapiens
ggcggggaaccgggggaggggcgcgcggggcgggaaacgggggcggggcctccatgcccacgtggtctccgcggcaccctcccaagacccttggtcctggttcacaagagaaccttaaaaag

SEQ ID NO: 108090 - DNA, 122 bp, Homo sapiens
gggtcggtggtcgggggtccaggccctgggcaaggggtcctgggtcgggagtctaggtcccgggtccatggttgggggtcagaggtcgaggccccggggaaggcataccgggttgagatttg

SEQ ID NO: 108091 - DNA, 122 bp, Homo sapiens
gggagtctgcccagcacctgccccactcccagcctccggcttcagtgcccacctggctcccggggagctgagcccctgaactccctgccaggccagagtgacagcccgggtgaccgaccagg

SEQ ID NO: 108092 - DNA, 122 bp, Homo sapiens
ctctcacccgctgccgggctggattgtcctccacttgtgcttatctggtcctcgatgccgcgctccgacgtcttatctgagggagccttccgttaatgaaggctctataaacatctgacaaa

SEQ ID NO: 108093 - DNA, 122 bp, Homo sapiens
ggtgggcctcgagcaaagccgctagaggtggggtgcgggtggtcggcctcaggcgagccccggggcacagcccggggcgggaggcggagcttggcggccgagatctccgcgctgcagttagc

SEQ ID NO: 108094 - DNA, 122 bp, Homo sapiens
cacggcgccccgtacgtgcagatcaagagcagcacgcgtgtggacctgcaggtgacacggcgccccgtacatgcagatcaagagcagcacgcacgtggacctgccggtggcacggcggcaag

SEQ ID NO: 108095 - DNA, 122 bp, Homo sapiens
ccacacacctaaacacacacattccccacagccctgtggcaagagggtcagcctctcttccgaaaggaaaatcaaacaaaatccagggaaactgatgagatttccttgaaagcaacatgttc

SEQ ID NO: 108096 - DNA, 122 bp, Homo sapiens
gggagccgggagggccggcagctcccgcgggccgagtttcccgccttgggtgcgaggacgcgtggggccgcgctgtgcccggggaacactcaccagcatctctagcctccacctccctctcg

SEQ ID NO: 108097 - DNA, 122 bp, Homo sapiens
gccatgcagctgggttaggaggcatcaagccggcctctgctgggttagatggcaccaagccggccttcacaggacgttacctttacagagctctgtgagcaagaggaactcagcctgccccg

SEQ ID NO: 108098 - DNA, 122 bp, Homo sapiens
tagttcttatcctgactattgtctaggcagaaggaagctttttgctccatgcttactggtcggccacattaggatgttggattgcaggtttgcctttttcagcatttgggccccagccatct

SEQ ID NO: 108099 - DNA, 122 bp, Homo sapiens
tggcccagcccccgcgagttcgggacccggggtttccggggtggcagggggttcccatgccgcctgcgaggcctcggctcgggccgctcccggaacctgcacttcaggggtcctggtccgcc

SEQ ID NO: 108100 - DNA, 122 bp, Homo sapiens
ccgaccgtgcctgtacgacccgtcgcaggtgtgcttcaccgagcacacgcagagccaggccgcctggctctgtgccaagcccttcaaagtcatctgtatcttcgtctctttcctcagctttg

SEQ ID NO: 108101 - DNA, 122 bp, Homo sapiens
gctcctctcggggggcacagtgaagccggcagggaaaccaaacagcctgagcgtctttttcgggggctgggattgagcagctgcgctgcgatgatccgcttccacgcacaaggccacaaaca

SEQ ID NO: 108102 - DNA, 122 bp, Homo sapiens
ctcagatctcggtggcctcaccgagtgcggtgtgggacgccgtgctgctggcttcacttccgcatgctggcctttctcccccggctgaggccacagcctgggaggtgacgtttcggagtgtc

SEQ ID NO: 108103 - DNA, 122 bp, Homo sapiens
ccttgcgcctaacagcagtgaggcgcagaattggcccacgccctcacctgcggcttgcttcgcaggactccaccccaggataaaagttcccctcgggtcatcttccagctgccctcaaaaga

SEQ ID NO: 108104 - DNA, 122 bp, Homo sapiens
ctccgtgaaggccagcgccagtgagtgccaggggcgggcaggcagggggccggcccagcccgcgtcacccggcagcaaacacgcagggtgagtgtgcgggctgcccaggcagtgcagagcgg

SEQ ID NO: 108105 - DNA, 122 bp, Homo sapiens
gtgagatcacagatttggaggtcggctttgatccctgatccccgcctcaggctgcagatgcgagtctgtttccagctccacgggtgggcggtgcacgtaatagacttagtctctcatcccag

SEQ ID NO: 108106 - DNA, 122 bp, Homo sapiens
aatcacaaaggcccctggaacagcagcctgtgcacgctcagccgctcctgaggtcagctgcgagcacgttgatggggaaggctctgaacgtgtttcttctcagagcctctaaatcacatctt

SEQ ID NO: 108107 - DNA, 122 bp, Homo sapiens
tgaagctggcggtgtcgcggtaacgcggtggaaacgcgtgttttgattcgatgtctgtcccgatgctgggtttcacggtgaggtctggtgtcactctgcattgcctggcttgggcagtaacc

SEQ ID NO: 108108 - DNA, 122 bp, Homo sapiens
tatgagctgtaacactcaccttgaaggtctgcaactttactcgtgaagccagtgagactacgaacccaccaggaggaaggaacaactccagatgggccgccttaagagtaacactcaccgtg

SEQ ID NO: 108109 - DNA, 122 bp, Homo sapiens
ccctgcgctctggacggcccggcgcgtggagatcgctgcagcatcccacgggcctcctcccgcagcaccaccagcagcagcccccgctggttccagggcacgtaggccttggcggccagcag

SEQ ID NO: 108110 - DNA, 122 bp, Homo sapiens
gtttcgatttgttacagacgttaacaaattcctttacccaaggttatgctatgacctttccgcagtttactttgattttctatgtttaaggttttggttgttggtagtagccgaatttaact

SEQ ID NO: 108111 - DNA, 122 bp, Homo sapiens
gtagacagctgatgaagctgttctcccactgttcccctaggtggatcatccaaagtcaatcgattctgaactctgaggtccaagttctgccctcccccttcactctccccacaagtgggcgg

SEQ ID NO: 108112 - DNA, 122 bp, Homo sapiens
gtttccccaggccttgcttctatagtgcctacttgattattttagaaaaaggaaaagcaacgtgactgttttggttaaccagtagaaaattcctgacttggtgtgttttggtgattaacaaa

SEQ ID NO: 108113 - DNA, 122 bp, Homo sapiens
tgcgccggcggttgctaggcggcaagaaagcgccggctctgtgtggacggtacgcggaggcgcgaggagggaggcgcctggcgttgccgcggcgctgggaaactgtctttgcagcggcgact

SEQ ID NO: 108114 - DNA, 122 bp, Homo sapiens
gggtgtgtgtccttgtgtgggtcactcaacagctcctagctacagtttcccttccgagggcggggataacattcgtgtttacagaggggtcgggatgatccctagcacacagcacaggggaa

SEQ ID NO: 108115 - DNA, 122 bp, Homo sapiens
tgacccacccccgtttgcgcgctcgcagtcttcgccggcgcagtcaccgcgcagggcggccgcccggaggtagctaccacggcctgtgtcaacgactaaagctccagtacagcggcgccctc

SEQ ID NO: 108116 - DNA, 122 bp, Homo sapiens
gccaggtcaccctctcactctgtgcctcttagttatcttgcatgctctggtctttgcatacgctgctccctgcaccaggaacctccatccccatctttgtctgcttgtcgaacttcagaaat

SEQ ID NO: 108117 - DNA, 122 bp, Homo sapiens
tgtgggcagaaccaagtctcggtagttaggaagatcttggctccaaagtttaacttgcagcgtcccggccgggttcacagcgcatgggacagggggggcggggcgatgcggaggcggagcgg

SEQ ID NO: 108118 - DNA, 122 bp, Homo sapiens
caggttccctagcactgccggcccgcccgtgccacactcgaattctcacagggcctcagccgcctccccgcagagcagggcttggaacctgcagcccgccatgcccgagcggcccacccccg

SEQ ID NO: 108119 - DNA, 122 bp, Homo sapiens
cccaggtgggcaccacgtctgaataatgtatgaagcctctggttgcgtggaggatgggagcgcttcgggcagcatctgtgggcagagacttcagggatgtgaggtacatctgggcatggcta

SEQ ID NO: 108120 - DNA, 122 bp, Homo sapiens
agtctgaacaagagccccatctcagactggattttattttttcatcagaaaatgtggtatcgatatctgtaattttgtcttacagctcactgccattaaacagttgtgtgggatgtgaataa

SEQ ID NO: 108121 - DNA, 122 bp, Homo sapiens
ccccagtgtcgccacaagcacctcctgcaccccataacatccccccagtgtcaaggcaggcgtctacccccacctcagtgcctgacactccgcggggttcaatacaagaacctcctgcaccc

SEQ ID NO: 108122 - DNA, 122 bp, Homo sapiens
ggaggcagaggggtggagcgatagaagccggcagggaggaaggggtgggcagggggagggcgagaagccgccgttgacaattacgtctgggtccaagcaaacatgaggcagctgccagccgg

SEQ ID NO: 108123 - DNA, 122 bp, Homo sapiens
gtcactgccaacaaccgcagtgaggcgagccgcgctcccgcggctccagccaccagtatacggccaccgactcctgattcctagtcctctacgttgggcagcaagaactcaacatgaagata

SEQ ID NO: 108124 - DNA, 122 bp, Homo sapiens
ggacgcagatgctgctggcctgagcgtccccggctgtctcctgtctggtgtgggtgctgccgccgggaggccttggccccacggggagatgaggcatcacacacgcagccacaacacgggtc

SEQ ID NO: 108125 - DNA, 122 bp, Homo sapiens
tcactgcggccggggaaacccactcccaggactcagcccggaagaggccctgaaggggagcggagactgggcgctggggtgggggcgggggcgccgagcctcaacttcccgcgtctgctgga

SEQ ID NO: 108126 - DNA, 122 bp, Homo sapiens
accttgtgatccgcccgcctcggcctcccaaagtgctgggattacaggcgtgagccaccacgccccgcccccagctgggttgtttcttaaggattcaaaatccaaaggtaggtctctagtga

SEQ ID NO: 108127 - DNA, 122 bp, Homo sapiens
cagggctgggtatgtgtcccggagccaggccagcgtggtcttgttggggtggaactctggcgtcttctcaggtgggtaaaggaaccagcgctgggggcatgagcagcagtgtcacccttgcc

SEQ ID NO: 108128 - DNA, 122 bp, Homo sapiens
gaaaaacgtacattttatagcctctactgggcgcgaaaaggaagctgtgcgattggcttacgttttatttttatttagaccaataggactcgagtatgcaggatacctattttgattgggca

SEQ ID NO: 108129 - DNA, 122 bp, Homo sapiens
tcccctgctgataggtctctggttgctccaggaccttagagtcctttgccgtgttcatggcgccatctagtgataatgagggggaacttcggggttcaaaaaagattcctcaaccttgggat

SEQ ID NO: 108130 - DNA, 122 bp, Homo sapiens
cggcagtcgggggacccgcgagacacggtgcggccacatgctggctctggaccagccattcgtttctgactagcaggacacttcacgtgtaggaggcatgcaataatagttgttggaaaaaa

SEQ ID NO: 108131 - DNA, 122 bp, Homo sapiens
catcaagccctagcagctttcaggggaaaggtcaggctcctcaggcagtgctcacagcctcgtgatttggcctctgggccatgatcaggctcctcaaagtctccctggaccctagacttata

SEQ ID NO: 108132 - DNA, 122 bp, Homo sapiens
acattaaagagctagaatagcaaaacacaatagcaataacctggaaacaacccaagtgcccgtcgaaggaatagtggatgagtggaccaataaactgtggcatattcacaaaatggcatatt

SEQ ID NO: 108133 - DNA, 122 bp, Homo sapiens
cactctgtctctgtggatttgttatcgtggacattccataaaatgggaccagaccgtatgcggcctcttggctctttcacttagtgtgatgttctcagagctgaagcaccgcgctgcagtgc

SEQ ID NO: 108134 - DNA, 122 bp, Homo sapiens
gggtgcaactggaggcgcgacgggccaggcccaggagcagcgggaggagcgcacctggggcgcgcgggcggaggagggccggggagggacgccggaaggactgggtagggacgcccggagga

SEQ ID NO: 108135 - DNA, 122 bp, Homo sapiens
ttccacaaatttatattttgctttgtggatcctgaatgtccagggctatcttttctttaacgctttttttttttttggcatttcttctcaattgttttacccgtttattgtctatttttcta

SEQ ID NO: 108136 - DNA, 122 bp, Homo sapiens
caagtgtgtttgggcaacgctagagagaaatttcccaaatccgagttgctctggggacttcgtaggagacagagaggcccgaaaccagtgcccgctgtgcgcggggttggggaagctgcagt

SEQ ID NO: 108137 - DNA, 122 bp, Homo sapiens
ccgccgccgcgcacgcgcacttcgcgcgcctctgttcccggacggcccccagagcgggaacgccaggctgcgagctgctggcacctgtctgcctgccagacagaccctgggctccggcctcg

SEQ ID NO: 108138 - DNA, 122 bp, Homo sapiens
ggcgtaggaccctctgagccaggtgtgggatatagtcttgtggtgcgccgttttttaagccggtctgaaaagcgcaatattcgggtgggagtgacccgattttctaggtgcgtccgtcaccc

SEQ ID NO: 108139 - DNA, 122 bp, Homo sapiens
ctccgcaaggccttggcggtagatgctgccttccgagagggcaatgctgcccgcctgttccgtctgctccagaccctgccctacctgccaagttgcgctgtgcagtgccatgtgggccatgc

SEQ ID NO: 108140 - DNA, 122 bp, Homo sapiens
ggctgaggcaggagaatggcgtgaacccgggagaatggtgtgccccgagcctacttcccgcgcagtcctccaagacgcggcctccagcaggggtcgctgcttcgctgccgccctggcctcgc

SEQ ID NO: 108141 - DNA, 122 bp, Homo sapiens
caagatccgcccaccttggcctcctaaagtgctgggattacacgtgtgagccactgcgcccggccaaaaagccattatttttaagtcactaaaaattctgggatggtctaagatggttggtt

SEQ ID NO: 108142 - DNA, 122 bp, Homo sapiens
ggcttctgtcctccagaactgtgagacaatcaatttctgctgtgtaagccacctggtctgcggcactttgttatagcagccctagaaaactaagatggaactcgccggctggtcactgtctt

SEQ ID NO: 108143 - DNA, 122 bp, Homo sapiens
cactgtgagagttaccggaagctcggcgttcgtgatggtctagggggcttccgaggcgatcgggcagtgtcagtcttcagccgctaagccgagaagatctgggaaggagtcagagagccttg

SEQ ID NO: 108144 - DNA, 122 bp, Homo sapiens
cctcagggtgtccgtgccgctgctgaagacgctggaccacgtgctcacccacggctgcttcgacatcttcaccacggaggaggagtgaggctctgcttttcatgacttcctttccgattaag

SEQ ID NO: 108145 - DNA, 122 bp, Homo sapiens
catttagatagggccaggtgtggctgaggccatcgagtcattcctccggtgaagtatgcccgtgcgtcggggtgcagggcacggggtgtaggacaaatgctaccaatgcccctgtcgggaac

SEQ ID NO: 108146 - DNA, 122 bp, Homo sapiens
gagggaaatttcctcttctttctttccaattagaatgctggcctttcattgcttgctcttcgcagtgctgttactacttgaaaatacagctccctgatcataacctgctgcagatacatttt

SEQ ID NO: 108147 - DNA, 122 bp, Homo sapiens
cacatgtttgtgtgtggcgttgctgggatgtgccttgtgttgctacacaaacagcgatcccgaagtctgccagcaagatagatggcctggagtccagaacagactggattagtgaaagctac

SEQ ID NO: 108148 - DNA, 122 bp, Homo sapiens
tctccccaggcagcaacacttgccacaccccagctgttcctgtcctcatctgccaccccgcgaagaatttcggctctttgacagaacagcaccgagcagggcagccacccctttttcctcat

SEQ ID NO: 108149 - DNA, 122 bp, Homo sapiens
ggggcgccagttcgcagagacccgggaaaatagctcccaccttctcgcccttccaaaaaacgggcgctcacgagaaggcgatccccacggttcctcccgctcacaccttccctgacagcagc

SEQ ID NO: 108150 - DNA, 122 bp, Homo sapiens
tgtcgcgagaggcctacgggcaggggcaggtgggcagggggactgtgctgggtctctggccgcgtctggacggcaggcgacactttctccacaaaaagcgtcaagaaaccacgacacttggt

SEQ ID NO: 108151 - DNA, 122 bp, Homo sapiens
gtcccgccggcccggcggtgctgcctttctggcagaaccttactgggtggtatacgcatgcgacttcccggtggccatctttactgtgggctgaagcctgtgcgcttactcgcgcatgtgca

SEQ ID NO: 108152 - DNA, 122 bp, Homo sapiens
tacaaggaggacctgggtttgcagaggggaaaattttactttgattaggaggctttgcagcgtggggaagacacatttaccatagaccctagtcacgtgctgccgcctgggcatgttatatc

SEQ ID NO: 108153 - DNA, 122 bp, Homo sapiens
agtgttaccaccatcaccaatattaccctcactataaaactgttcaaaggtaaacttcagcgaacttcttgaccaaattatcagaacctcctgaattagtgagatctgaattgatacttttc

SEQ ID NO: 108154 - DNA, 122 bp, Homo sapiens
ccgtcccccgcggaggcggctcccgcttcaggcggcggagcaggggtggcgggcaggggccgagcgcacccccagatctcggctctcgagagttaaagctcggcccccgcctgcacccccat

SEQ ID NO: 108155 - DNA, 122 bp, Homo sapiens
agaaatacgtacatgggagcgctcagctcaaagccccagggtttctgggactcgcgtgtccggggtcggggtcccaggtgggtacaggtgggagggcgaacctgcgggtagggtgggcccct

SEQ ID NO: 108156 - DNA, 122 bp, Homo sapiens
gagatcaagtgacatgcccaagaacaacaaagctagtgaacagtagaaccagaagacagacggtgccaaggatgaagagaaaacattggagagaagtgtagctactctctctcttctctttt

SEQ ID NO: 108157 - DNA, 122 bp, Homo sapiens
ccgagcgcggggaaatgaaggcagccgccgggcaggaaagcgagggccccgccgtggggccgccgcagccgctgggaaaggagctgcaggacggggccgagagcaatgggggtggcggcggc

SEQ ID NO: 108158 - DNA, 122 bp, Homo sapiens
cactgcctcttcactaaggatgtcgcctccccgagagtactcatcctctgggcctcgccccgtgtcactagggtccccgcgggcccccacatgcactcggatgcccctcccatcattacaga

SEQ ID NO: 108159 - DNA, 122 bp, Homo sapiens
ggcggcgatgcgctgtccagggtagccgggtccctctgcccggcgctatctcggcgcccgcgccggttacccccacccacacccacgcccggcgcgcgcacacccgcccgcgcctccccgcc

SEQ ID NO: 108160 - DNA, 122 bp, Homo sapiens
taacgaggtccggcaccatgtgctaggtcactcccagtgcaaggccacacttgggccatccgagcaacccctcctcacgtcaggggtcaccctccccaccacccattgccccaccatggccg

SEQ ID NO: 108161 - DNA, 122 bp, Homo sapiens
gcttttcatgtggctgaaatagctctgtgcctctcccggtattgagaactgctcctggctcggggctggaggggaacttaaaccgttaaggctaagtgttaaagagaattcctgtcatagct

SEQ ID NO: 108162 - DNA, 122 bp, Homo sapiens
actcgccaggagttggggaaggcagtggggcagcggggccaggcgtggcactggccactccgaaggccagcagtgcggtctgcagtggctctctctcccggcacttgggcctccgcttaaca

SEQ ID NO: 108163 - DNA, 122 bp, Homo sapiens
taagcacccctcacacaaggagctgaaggtgatttacataacataggattcaccggtccgcgattatcactgtgggtgaactgggcgccctggaatgaataatactctagtgcaagtactgc

SEQ ID NO: 108164 - DNA, 122 bp, Homo sapiens
ctgagaaaaagcgggagtggtttaccattctcctcccccacctttcaccagagaagaggacgttgtcacagataaagagccaggctcaccagctcctgacgcatgcatcatgaccatgagac

SEQ ID NO: 108165 - DNA, 122 bp, Homo sapiens
ggcggagcggagcagagcaaagcgcacaggaggcccgcctctgctcccctcccccgccggcgaagattgacacagctcgagcacccgccccaaccaatgagcgcgtcctggggcgggccctg

SEQ ID NO: 108166 - DNA, 122 bp, Homo sapiens
actacagaacttttaagccatacaacctacttcaaaatgaagctgctagtcagtcacattcgacattcattatcttcactggctactcgtccacactcagaacgctgttcactgacaaaaaa

SEQ ID NO: 108167 - DNA, 122 bp, Homo sapiens
ctcgggagggagctgctttctgccgaggctgccccagctgtgcgtctgtctttttccacacggtaggctacacacaacccagctgtaccagcatgtgccagagacacgctggccaatcgtgt

SEQ ID NO: 108168 - DNA, 122 bp, Homo sapiens
ttcccggcagaaggctccggcccgtccaggccgcctccagcaccaccatgcacttcgtcccggcttccaggagccctggcagaaacggagctcagctgccagtctggcgtcctcgaacatgc

SEQ ID NO: 108169 - DNA, 122 bp, Homo sapiens
agccccaagttcctgtcccaccacccccacccccaccaccgctgcctcctcgccgggggccgtggacagggcagctcgcaagtcggccttgctgggccttggtttactcacctgtaaagtgg

SEQ ID NO: 108170 - DNA, 122 bp, Homo sapiens
gggcgcggggagcactgacctgcggcgacgagtccggagcgtctccggtgcggtccatcgcgggcaacggcccctacgccccggccccggcgcccctagaccgctgccctgggccgcgtgcg

SEQ ID NO: 108171 - DNA, 122 bp, Homo sapiens
tgtgttattggaggttgtgtaaccccctagctttgagcctggtctcagatgttccttttccgttctctgtccagccgttaccgcccccagtctgtaataaaagcctatcagccgtgcacttt

SEQ ID NO: 108172 - DNA, 122 bp, Homo sapiens
tccccaacttccagacgcccccctcagcggcccggggggtgggcgcgggctccacgtgcgcgccgcccgtgcccactcggacagggccgggccactcacccggcccccagcggcgctccgct

SEQ ID NO: 108173 - DNA, 122 bp, Homo sapiens
gccggctggccctgggtgtctgggccggggcccctccaagcccacctgggagagcactcccgcctccccccaccccggggcgcccaccaccccggcctccgccgccgccctgcgacagcgcc

SEQ ID NO: 108174 - DNA, 122 bp, Homo sapiens
atagcacaaggataacctttcccctgccctctgcatgggtcttcccgacattgttatgctcgcctgtcttgtgctattagatcagctttcttattgcatctatgcattgtggaacattctgg

SEQ ID NO: 108175 - DNA, 122 bp, Homo sapiens
gggcgggtcctcagctgggtgggggcggggctaggtgtggaggcggggctctgagcagatcgagggccgaggcgagggtccttaaagctcatctatttcaccattactgatcggctgctata

SEQ ID NO: 108176 - DNA, 122 bp, Homo sapiens
actcgcgagcttgtctgatactgggatggaaagtcacagtccgcaggctggagtgaggcgcgggaagatgcctggtccttgcctcgcggacttggcagccgcgtcctgcgggtctgtccact

SEQ ID NO: 108177 - DNA, 122 bp, Homo sapiens
gggctggctctgaactcatctcccacggggatgtttcggtaaaggagtggcttctggggtcggagtggcatttggagagcgaggctggattggcttaggctggcctgggcaggtaggtggct

SEQ ID NO: 108178 - DNA, 122 bp, Homo sapiens
aatgtcttcttccgcactggtggggggggtgtaactaaagcctggaggctgctgtcgcgacgcctttgcggctagagcttcttttactatcctgagtcagagcctcccgaagccacggagga

SEQ ID NO: 108179 - DNA, 122 bp, Homo sapiens
gggaggatccacctttgggaatgcctcaagcagttatttctgagacactcattatatttccggcaatttggaatctggaaagaaggagtcaataagcaaacaggttaactgctagacctagg

SEQ ID NO: 108180 - DNA, 122 bp, Homo sapiens
ttcagttgccatggagacaagccccagtcctttcattccttctggtacctctctctccaacgcaggcggaaaggaggcggcttagcccaaacatgctgggggaggggctggcggcctcgacg

SEQ ID NO: 108181 - DNA, 122 bp, Homo sapiens
cccaagccgataaagaaaaacccagcaccaccctcctggctaagccattgttctaaaaagcgctggtttcttggcagagctgaaccaggcttggtgtgtaaaccacgcgtgccacacctggg

SEQ ID NO: 108182 - DNA, 122 bp, Homo sapiens
tggactcccctccccctggcagccccgaggggtgaggagctagtccgtcggagggagccacggggctctgactcatccgtcgggccggaaccgaaccccaagccccagggagaaagccccgg

SEQ ID NO: 108183 - DNA, 122 bp, Homo sapiens
ggaaggcggggccgaagcccagccatcgccaacttggaggggcggggcagaaccagggggcggggcctgcgtggtgcgtgcgtgcgcgttctggaggaggcgccgccgccgctcccgaggcc

SEQ ID NO: 108184 - DNA, 122 bp, Homo sapiens
cttggcaatgggagatggagggaaaatgaggtccgtccttgctttgactctcgttgggctcgtactgtggtcttctcatggtccccagagtctgccctatctgtatgtctctcctggttgtc

SEQ ID NO: 108185 - DNA, 122 bp, Homo sapiens
ggcacgggcacccgcagctccggccgctgtaggtagagctgcaggagaaggtctcggcagcgcctgcccagcacgctggaagaggtggagcagggctcaccaggcggacggggccccagtga

SEQ ID NO: 108186 - DNA, 122 bp, Homo sapiens
ggggagcaggcaggtgctgagaacccggggacagtaggctgagctgggaggaaagggggccggacagggaagtccaaagacaaggagctgtgtttaccctttccacgtcctccaccacaccc

SEQ ID NO: 108187 - DNA, 122 bp, Homo sapiens
ggtatcgctctccacaaagacaggcgtctattcccgaccctcgaggtcaggcaaaggccacgagtctttagagtttggatcgatgctaaaagctgctgcgctcccctgcaggccccagcctc

SEQ ID NO: 108188 - DNA, 122 bp, Homo sapiens
ggtccaaggttcctcccccacgcccccctccccagtccctggctgcgtccccagccctgccgcagaaacactccccatgctcaggaagcctgagtcctctcaggccctcccctacctggttg

SEQ ID NO: 108189 - DNA, 122 bp, Homo sapiens
catgcacgcgcatacacacacaaatacactgaggcacgatgggagggttgttacttctgccggcctcccactgcagccatatcaggatgccccagaggcaatagtcagcattttccagagac

SEQ ID NO: 108190 - DNA, 122 bp, Homo sapiens
agaagcaattgcaaatagtctctcaatgtggaagctgagaagtctgagtctgaaacaacacgaggagtaaagcccccatgtctccccctcagctcctccagggtttggaaagaggaaggaag

SEQ ID NO: 108191 - DNA, 122 bp, Homo sapiens
cctgtccctggacttggcccagccctagatttaggcagccacctctgccctctgcagccccgtagcagcccgtccagccccaccaagggccgcacctccagacgtcactgcccttagagaag

SEQ ID NO: 108192 - DNA, 122 bp, Homo sapiens
atgccatgtgccccaggatctgtaagtaataaactatttctagcctgtgtctctcctaatcgttgtaggggtgctccgcatcttgaagatcttaaagtaaaacagatacatttgtggaaact

SEQ ID NO: 108193 - DNA, 122 bp, Homo sapiens
cgctccacttcccttggaatctggggagctcagccgcggcgacttgagccgtccggaggacgcggacacctcagggccctgctgcgagcacactcaggagaagcagagcacaagggcacccg

SEQ ID NO: 108194 - DNA, 122 bp, Homo sapiens
taaatacataaagcttatgtagaaatgaaaagtcttaaagcatgtctaaggaagactattcgaggtggtataaggaaaccagaaaaatgtgatattctagagaccacaggaagaaagcattt

SEQ ID NO: 108195 - DNA, 122 bp, Homo sapiens
tgagggtcagagggtgtaggggccatttgctgtgtgggttcctgaaggtctggagggtctcgagtcccgagcatgcccgtgtgtgcatgttggggtgacctcaccccctagggcaggcccaa

SEQ ID NO: 108196 - DNA, 122 bp, Homo sapiens
ctctgaaacgttttttagtgttccctgaggtcaagactatgtttacaatagtactgtgatcggctgaataatgctggcctgcaaagatgtccatgttctaattcaggggaccagtggatgga

SEQ ID NO: 108197 - DNA, 122 bp, Homo sapiens
cagtctaacgttatggcttctctaaagctatgtaaggtcatgaaggtcaatgccaagccacgccctggcccgaaacacgtggagacttgatgcatttttgatgtggacgaaagggcccgggg

SEQ ID NO: 108198 - DNA, 122 bp, Homo sapiens
cttccgcttcccgtgctgggggcggtggcagggccggtgggcggtggcggctcccggtctcggctcgggcacggccctgggcaggccgcccgccagccgcaggggcgctcctgagcttcgcg

SEQ ID NO: 108199 - DNA, 122 bp, Homo sapiens
ccccaagctggggaggggaggcccagcctgcgctggccacagtcgtctggaggctgcggtcgccgtcctcccccacacccccaacctgggccggcgcgtggagcagagaaagttcgcggtgc

SEQ ID NO: 108200 - DNA, 122 bp, Homo sapiens
ggcccgcccgctgcaatagagcctcctctgtcccctcggggcttagagaggtgaggcaaacgctttcagccagaggcagtgagaagggttccctccacggccagcagtctgagctcagataa

SEQ ID NO: 108201 - DNA, 122 bp, Homo sapiens
cagcatcagtcgagccccgcccactcattctaggatgaagcctagcctcacgcgccgccccggctctgcccccaggccctacagtggagcctcgtccccagagtcccgctccaagcccatcc

SEQ ID NO: 108202 - DNA, 122 bp, Homo sapiens
ggaatgtgagtaaccggcaagtgaaaagacagaaatgcagaggcactatgtgatgtattacgaaatgccatatggattaaacattgaaatgcacaaacagactgaaatcgccaagagattga

SEQ ID NO: 108203 - DNA, 122 bp, Homo sapiens
gggggttgcgcgtctcgctccttttgtctgccgggagccggctccgccgcggcggcggagcgagcggccgaggcacttaaaccttccaaggtgaagtaagcgccgagtgtgaagttactttc

SEQ ID NO: 108204 - DNA, 122 bp, Homo sapiens
ctgggtgtatccccgcgtctgggtccctctgtgtttgctgttggcatgggtgtctgtgaacgccctctccaggttcttgtgtctgaataccgctatttgtggatccttctgtaggcgtctct

SEQ ID NO: 108205 - DNA, 122 bp, Homo sapiens
gagcgctggatggggactcagaatccgcagcatgttgacagcaggattacccttcggagccgtgcgcgctggatggggactcagaatccgcaccgtgtgtgtgaccactgcatggtggtttt

SEQ ID NO: 108206 - DNA, 122 bp, Homo sapiens
gagcccggccccatgggatcccatgtctcttggggagatgggccccaagttccaataggacgatctggagcctcccacgggaagaaggccggcggggacgggctgctacgtggctccaccgc

SEQ ID NO: 108207 - DNA, 122 bp, Homo sapiens
tacatacacataatctgatgactccctcactgcattcactactgctatcatggaaccaaccgtcatctcctctcttgcctggattattgcagtatcctcctgtgctatctctactccctgta

SEQ ID NO: 108208 - DNA, 122 bp, Homo sapiens
tgctttctctaagaaacaggaatgaagaatattcttatctctacccattaggcctgaggacgactctggacttggttgataaaacaaccaaattagaaggagaagcggggcctcagcacccg

SEQ ID NO: 108209 - DNA, 122 bp, Homo sapiens
caggtgtggctgctgtacggagggcccagccggcgagtctcgcgggggctttgcaggacccgggctgtggtcacccgtactgcatgcagcaggcttggctccgcgactctcgcctccctcca

SEQ ID NO: 108210 - DNA, 122 bp, Homo sapiens
accgagaaaaccatctggtttttgcacttagataaagtttaactttcctgccacactggccgagttgggctttcagacatccctggggaagtgggaaaacggggatgtggaaggggaggaga

SEQ ID NO: 108211 - DNA, 122 bp, Homo sapiens
tgaagcaacaggccaaggccgccgaagatcccggatgccgccccctcctctcagactgcgcgcctgattgggcagttctcagtcaagcgctctgattggatatgggtccaggcttcacgccc

SEQ ID NO: 108212 - DNA, 122 bp, Homo sapiens
ccccccttcctcctccggccggccccgcccccagcctggcacaccctctccccccctccccgacaaagcttgccttgtgtcccccaccctgcgtgcacctcttgggccccacggaacctcgg

SEQ ID NO: 108213 - DNA, 122 bp, Homo sapiens
tataagaaatccatcatgaaggaggaagaaaagaacgagaagctggcgagcatcctgaaccggacagagacggaagccacactgctgcagaagctcaccacccagtgcctgaccaagcaggt

SEQ ID NO: 108214 - DNA, 122 bp, Homo sapiens
cgggtcaaacacaaggcctttctgtccatgatccgcctgaaaccatggtttccttgttttcgcctttatcccttctgccttgccagtcctccccgccagcggggccgagagcccggcgactc

SEQ ID NO: 108215 - DNA, 122 bp, Homo sapiens
tttatagcagcggctggcgtctgtggccctttaaaggcgctcgagctggtgcagtcaccgcggatcgtgtgaaagcaaagggccggctggggaacggagtccacgcggccacgcgagtccgg

SEQ ID NO: 108216 - DNA, 122 bp, Homo sapiens
aagttacagtcacaattaggaaataactcctcagaaaagtttccacttaactctgagcagcgctcaaattaccattgtgcttaacggggcctccatctcttggctggctcagacctttccaa

SEQ ID NO: 108217 - DNA, 122 bp, Homo sapiens
ggtgtaattattagccccattttataattaaggacactgagcacagagaggttaggaattcggttaaggtcccaagctagaccgtttattctgatgccaaaactcatactcttaattgttaa

SEQ ID NO: 108218 - DNA, 122 bp, Homo sapiens
acaatcccttgtgtctatgccctggttgtttctggagctggtgttcccgctgtcaacacccgtcttcctggtcatcacatttgctttcttatctagcactgaacgatggatctacccatttg

SEQ ID NO: 108219 - DNA, 122 bp, Homo sapiens
aagtactaattcacaacctgttttctagaatatgcggcgcccttcccccattttatgctgcgcagagcaaggggatgtggcgcacctagtggtgaatcctcagaattggagaagggagtaat

SEQ ID NO: 108220 - DNA, 122 bp, Homo sapiens
ctcggaaccataacaagaatatgaaactagcaagtccagtgtgaggcagaacagagacgccgtcatggctctcaggaggctgagcgggaagcgcgtggctcgggcccctaacggcacctgga

SEQ ID NO: 108221 - DNA, 122 bp, Homo sapiens
catcagcagggcacagccaaactcgaccaaggggcacctggtgttaaaaggcaaagaatccggttctccacaatccagtgccaaagatacattcaccccgaagggtctgagaagacctggac

SEQ ID NO: 108222 - DNA, 122 bp, Homo sapiens
cattcccagcctctctgttggtggtatctgcctgatctccacctagtgtcattgtgggatcgtggccacacatgggccttccagggctgtgctgttggtgaccagtggtgcttgtaaccctg

SEQ ID NO: 108223 - DNA, 122 bp, Homo sapiens
ccctctgtacttcccgtataaccagtgctcctacgaaggccgcttcgaggatgatcgctccgacagctcctccagcttactgtcccttaagttcaggtagtgtgtctgcttgtccttcccct

SEQ ID NO: 108224 - DNA, 122 bp, Homo sapiens
cctagaaaggcctccagagaggggctgtgaggctcaccctctgccgcgctcaggaggacccgccggctcagccctggcccctccactgcagccatgggtggcgcctccccctactgcctgcc

SEQ ID NO: 108225 - DNA, 122 bp, Homo sapiens
acagagcgaaactgtctcaaaaaaaaaaaaaaaaaaaaagtaggggattagagctggccacggcttccccagaaacctgcagttactggagtaggaagaggcctcggagaatccctggaagc

SEQ ID NO: 108226 - DNA, 122 bp, Homo sapiens
gacaggaggactatctacccacccgtccccacggccctgaccctctgacctcaccctctccgctgatttcttcatgttagttcaacattaacccagaggggtcaggacagacaattcctcag

SEQ ID NO: 108227 - DNA, 122 bp, Homo sapiens
agataaatctttattttatgtagtgaaagcaacaatgtataatcttctcttttctacttacggcttgttaaagagaccggtaactggttctaatgttttgaaatctgcatgcttaccaatga

SEQ ID NO: 108228 - DNA, 122 bp, Homo sapiens
cgcacatgcgcgtacacacacgcacacacacacacacacacacgcacgcacgcacgcgcacgtgcagagcccccaaacagcctattggctttggtttccttcagtgaaatctgggatcaaga

SEQ ID NO: 108229 - DNA, 122 bp, Homo sapiens
atgccttggaaaagtacctcacaactttctgtggcccagcaactgttccagcaccccatgcggtctaagtgcttaatgtttcttagtctagcatgtaagtattaattcatgtttgctggttg

SEQ ID NO: 108230 - DNA, 122 bp, Homo sapiens
tccctctcctcggcagagtgcccctggatccgctcataggtgggtgaccccagtgtggggcggcacctcactcctcggtcagccccacaggcacgggtcgggcacaacagggggcggctaca

SEQ ID NO: 108231 - DNA, 122 bp, Homo sapiens
tgatatcaagagggtcatggcggcgatcgagaaagtgcgcaaatggtaagcggaggcgcccgccgccagccgcctccccggccgccccgagcccgagcgcggctccagagagccgcggggcg

SEQ ID NO: 108232 - DNA, 122 bp, Homo sapiens
ccatataaggtaaacaaagctggtcgcccaatgaagaggcggcgggggcgggcgctgggccggggaggccgggggcggagccgggggcggggcgaccgggcggtgtttacagaccggcacat

SEQ ID NO: 108233 - DNA, 122 bp, Homo sapiens
tggccaacatggtgaaaccctgtctctactaaaaatacaggaattagctgggcgtggtggcgcgttcctgtaatcccagctactcaagaggctgagttaagagaatcgcttgaggccaggca

SEQ ID NO: 108234 - DNA, 122 bp, Homo sapiens
gcagttatctaaatgatccaccgggctgatgcctgaggagtctcactcccatgctggtgccggctgttgagttcagccggggctgttgactgtcgtacctacaaatgggctctccagcacga

SEQ ID NO: 108235 - DNA, 122 bp, Homo sapiens
ggcccaggaatgcaagtcaacagccttgagtcttactagaagaggggtgtggacaccgggcgcctttccagggtaacccaagtaggtggagtttgtggtaaggcagaaaaaggctaggactt

SEQ ID NO: 108236 - DNA, 122 bp, Homo sapiens
tccccagcagcattgcatgacttgggagtttattagaaatgcaaattcttgggcccccaccgcagaccccctgaatcagaatctggaggagggagtatctgtgtttaactggccctgtgggt

SEQ ID NO: 108237 - DNA, 122 bp, Homo sapiens
ggtaaagtcaagtaagaaggaaggttggggcagtcggggtgaaaacaggtgtgttctctccggggccccgggactgtaatcctatcggatgactatcaacattccaggcacagtttgcatat

SEQ ID NO: 108238 - DNA, 122 bp, Homo sapiens
gggctgcggtcccagccggggaaagggcgagtcgcggcggcgaatgcctggggggtggggcgaggggggctgagagggactaatatgtccgccttcctgttcaaacaaacggagaccgccgg

SEQ ID NO: 108239 - DNA, 122 bp, Homo sapiens
cccgcctctcccctccccatcagacccatcccccacggagctttgtgtgagggatctcatcgctgtgactcctcggagaccttggcagcctcgcacgccggggcaccgcttgggtcagaaag

SEQ ID NO: 108240 - DNA, 122 bp, Homo sapiens
gcgccttggctgtggccagctccctgctaaggaaggagaccaggaagccaccctaacactcggccagacccgctggctcccaggccctgagaggacagagatgaccacatccctgctggatg

SEQ ID NO: 108241 - DNA, 122 bp, Homo sapiens
tgggacgcctgggagcgcgtcccaggtcccgcaaccacagcgccggccaccgaggcttctcgccgaccgacaggtctcccagacccgcacccgagcccgggtgcctaaagcagcagcgcgcg

SEQ ID NO: 108242 - DNA, 122 bp, Homo sapiens
ccagaggatgcctggataggtgccccctggaacggcgtcaaagagcctgaaggagacccccgggcagcagcgccgggctcgaggctggaggtgtgtgccgtggtgccaggatggaaaccagc

SEQ ID NO: 108243 - DNA, 122 bp, Homo sapiens
cgtcaagccaactgttccactgttccttgtctgtcttctctaggggcggaccgcggaacccgaggccatgtcccatgaaaagagttttttggtgtctggggacaactatcctccccccaacc

SEQ ID NO: 108244 - DNA, 122 bp, Homo sapiens
agtgaagctgacactggcagaagacacagacattgtttccagacccttcagctaccttgccgaatacctgaatcatgattgggtctaagagcttaggcaatgccaaatgccacatgtgtagg

SEQ ID NO: 108245 - DNA, 122 bp, Homo sapiens
cccgcgcggcccggatgttggcgtccggaagtcctccctggttcacgttccgcttccgcgcggccttctgggagttgtagttcacatggcggcgcctggtgtactcctggccagcgcctcaa

SEQ ID NO: 108246 - DNA, 122 bp, Homo sapiens
cacagcgtggatgccccgatttcccaggtccctccgcaaccctcagtagaactcccaccgcgccctgggctgctgggggcctccccagccgggtcacagtgcacctgaacgccccggtccgt

SEQ ID NO: 108247 - DNA, 122 bp, Homo sapiens
tgtgatcctatttcagtaggctgattggagcagcctttacttggaggtcgagtccctccccgagggaatccgtgtacagttacactagcggtcgctgccagtgctagcccattcaggatagc

SEQ ID NO: 108248 - DNA, 122 bp, Homo sapiens
caacttctaaaaccaacttaagaaacctaaacgccaaggcaaagcaacgcccttatatgccgggaattcggacctaattgaagactgaaagcgcgcataccggaactttggtcctgcttctt

SEQ ID NO: 108249 - DNA, 122 bp, Homo sapiens
tctcctccatggtcctgtctgtcagcgctgttttgggagcccgccggtgaggccgggccacgctcagacacttcgatcgtcgagtctgtcactggtgagtagaccccagaggagctcgtgta

SEQ ID NO: 108250 - DNA, 122 bp, Homo sapiens
aaacccaggaagcaaaacactgagtgctgctctggagtcagagagacctaggtgaaagtccgagattctagtgttttcagctgtgtgactgaggtaagttactaagcctctctgtacctcag

SEQ ID NO: 108251 - DNA, 122 bp, Homo sapiens
tgcaggttgctggagacccaccaggcccaggcctgtgcctagtccaaagctcagccaacccgtgcagctggtggtatcactggagcttggcaccctcgcgccaatcccgggcctcacgtggt

SEQ ID NO: 108252 - DNA, 122 bp, Homo sapiens
gtccgaatgggcctggggtccggcggcggagagtgacctgggcggggcaggaggtggcagcgggggtcctcccggctcaccagagagacgagcggccgtgctcctagagaggcagggaaccc

SEQ ID NO: 108253 - DNA, 122 bp, Homo sapiens
ggttacgcctcactttaaaaaacagtaggtatgacacagcacaccagaacgaccactcaccgaggtggtcctaaattcaaacgacagatttaagcttcctctcgtgatttatctcgcgctgc

SEQ ID NO: 108254 - DNA, 122 bp, Homo sapiens
aacaactgacttagcctctccgagcctcagttttccctcctgtgaaatggagataatgatcgaatccccctctagtagtgcctcagatctgacaaatgcttcatctggacaagcccctcatg

SEQ ID NO: 108255 - DNA, 122 bp, Homo sapiens
cgcaaatctaagttccttcctcgtagctcacattccacaggtgaagtcacttgcccaagacgaggctggaatgtcagagcctggattcaaaccctcatctggtggcctcccaccttacccta

SEQ ID NO: 108256 - DNA, 122 bp, Homo sapiens
gtgtgtgtgtatggtccgtccgcagactcttcaagaactcgaatgccattctccctccttcggatggacagcgccccgcgtgcccgcacacacccggttcacttacctgaggcatctgcgga

SEQ ID NO: 108257 - DNA, 122 bp, Homo sapiens
tgccgcggccccgctccgggaagggacgacgctccgggggtccccctccgcggccgggcacgcccgctggagcatcccccaaccccgctcccgccctgtcccgcggcgccccggccccgcgc

SEQ ID NO: 108258 - DNA, 122 bp, Homo sapiens
gacagaccacatctgcaaagggccacagggccacgtggacagacccagcactgagaggcccgctcagcggggcgtggctcaaacacggcccgtcctcctaagaagggggacacgtttccttt

SEQ ID NO: 108259 - DNA, 122 bp, Homo sapiens
gggaggaaagagactccatgcagtgattatgtggaggggatttgctatgtctcttccccccgcttctttctttgtcctctttctcctggtccccttcttctgcatttgtctgggaggatcct

SEQ ID NO: 108260 - DNA, 122 bp, Homo sapiens
gcaggctgttaaagacctcaagtcattagcatcagctgctgcactaaaggggcaagtcagcgcctctaagtggcttagcgcacaaacgaggctcccgagacggcctcggcaactccatcccc

SEQ ID NO: 108261 - DNA, 122 bp, Homo sapiens
ctgggaaacagaactccagacacaacgatgccaagattccttctcattccttgactgtctcgcaggatttcttccatgcactttctggtatcacctgctttgtgaactgcagcaccactccc

SEQ ID NO: 108262 - DNA, 122 bp, Homo sapiens
agtgaaagcgtgacagcttcatatattcaccaaatatttctggctcatctgcttcctacccggcatctgatagaataccatctcttgactcccttatagttggatagggtcatgtgactctt

SEQ ID NO: 108263 - DNA, 122 bp, Homo sapiens
caaacacaacctgcgggccctcgcgccggttccccacaagttgccctccacacctgaccccggccctggccccagcgcaggctccgcgcagttcccgcgcccaagtccccaggaggcggcag

SEQ ID NO: 108264 - DNA, 122 bp, Homo sapiens
gtatatagatctgtgtgtcacaaaggtctatatgacaaaactgagacaaagacaaactgacggattcttccagtttttgtggatggctctgggctggggcattcctttaacacacatgcata

SEQ ID NO: 108265 - DNA, 122 bp, Homo sapiens
ttaccactgtcacgggtcttctgtatcattggattgtgggtcacccgcttcttttccggtcgaaccacagtgcagccttcgtcgctactgctgccgctttctccgggctctgggtcgcaggc

SEQ ID NO: 108266 - DNA, 122 bp, Homo sapiens
ctgagtcggggggtccttgctggttgttgcggctgagggggcccctgggctcgggcggggcgcgcagccgccacctgccccagcaggaggagccggccacgcggcgcttggagcctcagcca

SEQ ID NO: 108267 - DNA, 122 bp, Homo sapiens
aacgttcatttataccaaagcagaaagcagaccccccagctgaccccgcctgcagccctccggccaacccctaccctgtgcccgcctgcagcccctcaatgcctgcccctagcttccccagc

SEQ ID NO: 108268 - DNA, 122 bp, Homo sapiens
agcagccacatgtggctgatgtctgctacactgggcagcacagatgtggaacatttccatcgcaaagaaggttccactggacagtgctaagagctggcaattcgtgttttttttttgagatg

SEQ ID NO: 108269 - DNA, 122 bp, Homo sapiens
cgctgccactcctgactggtttttgtatttttggtggagatggggtttcgccgtgttgaccgggctggcctccagctcctagcctcgggtgaagtgcccgcctcggcctcctgaggtgctgg

SEQ ID NO: 108270 - DNA, 122 bp, Homo sapiens
ccacttttttctctgagaactgtagaagagttgactcaacagcccagcagggggttggcacgctggtttctaagcggctttaatgcacaattcaccagggtcaggagctgaccctcaacctt

SEQ ID NO: 108271 - DNA, 122 bp, Homo sapiens
acccataggatcatctgacatggggctcccaatccccttgaatttcctgggtgacaggagcgtcttttgttctaatgaggcgactcctggtgggctcctggacagccttggggtggggggtt

SEQ ID NO: 108272 - DNA, 122 bp, Homo sapiens
ggaatctgcatgcttaataagcgcggcaggtgagtgttagggtcaggtgagtttagggagcgctgcagtaaagggatgcaccactatgttcccaacgatcaacagggatcatttcagtcagt

SEQ ID NO: 108273 - DNA, 122 bp, Homo sapiens
tggtgcgcctgcatcttgcggatgatctcctcctcgttctcggggactgtggcgttctcccgcgggaacagcagcgggtggttgatgatggccgtcaccaccaccagacacacgcggaagag

SEQ ID NO: 108274 - DNA, 122 bp, Homo sapiens
gacagcatgccggcggcggggctgctggcgcttataccggctgggctgctgtaatgcgtgcgggaagtttcatcatgcctgcgaggatcaaccagcgcgtgcagaggcggggctcgcggggc

SEQ ID NO: 108275 - DNA, 122 bp, Homo sapiens
agggttggaaaaaagagaagatgttttctatcttggacctttacctaaaataggcaccatcgtgctcagtggccttgcttgtaaacttctacaggagggtgagttggagagagtgagtgtga

SEQ ID NO: 108276 - DNA, 122 bp, Homo sapiens
gcaattcaactcgcactgcgtatgcaaatcaacttactgcatatgcaactcaactcactgcgtatgcaactcaactcgcactgcatatgcaactcaactcgcactgcgtatgcaactcaact

SEQ ID NO: 108277 - DNA, 122 bp, Homo sapiens
catcctctgtctccctcaccatattattcactgttgtcatttgagaattaaattgacaagcgtatttttttttttttttttttttttttttttgcttttcagaaagtgtgtagtgtcatgga

SEQ ID NO: 108278 - DNA, 122 bp, Homo sapiens
agattccataaagtcggggtgcttgagggcgtagggccgagaccgtcgcgggtactgaggcgcctccgtcgtctctcccactcgccgcccgctttccaagacatatgtcccgcttgcagccc

SEQ ID NO: 108279 - DNA, 122 bp, Homo sapiens
aagtagataataaccagaacaagaacctgaacagagccagtcggagaagaagtgtaccaccgtgggaaagacagtagactgtatagttatctccaagatggggtatgaccctaaaactatac

SEQ ID NO: 108280 - DNA, 122 bp, Homo sapiens
cctgtaccctcctgaagggaggcccacagtgccagtccacaggtcgatgcagccttggttcgctgcctctggtgctgactgcaggggcctggccaggccatcatgatcaccagtggtgggga

SEQ ID NO: 108281 - DNA, 122 bp, Homo sapiens
cttggagtgactggcgacagaatacgttcgtgacggaaccggggtctgaggagagctctccgcctgcagaaatgagtgaacagactgctgcattagatacctcgtcgccacgcaataaggcg

SEQ ID NO: 108282 - DNA, 122 bp, Homo sapiens
agaggattgccgaagggaggccttcctttcagtggacccgggtcaagaatacccacattccgaagggctgggcacgaggaggcatgggggacgctaccttggactatgactatgctcttctg

SEQ ID NO: 108283 - DNA, 122 bp, Homo sapiens
tggaaggggaggcgagcgtggtcccatcagcgccacccgcctggcgcctcctccggtgcacggggctcacctgagccatctgagcacatctgagctacctaggtcagcgcatgaggaggtca

SEQ ID NO: 108284 - DNA, 122 bp, Homo sapiens
gctgaattgaatttccaggtatagcctggctttgactttcctgagagtttacagaagtcccgtttggggaggttattggcaaggtcatgagaagcatggggctcaacatagttgggccgtgt

SEQ ID NO: 108285 - DNA, 122 bp, Homo sapiens
aggatataagagtcaaccatctgaatctctctctgtgcactgaactgacctggggactgtcgcatgaaccgtgcagtggctacatctttttgtgcagactttgggaaaatgatagaacacat

SEQ ID NO: 108286 - DNA, 122 bp, Homo sapiens
agaatgccagccagggagcacatacctttctaattgagtaataggctaagaggacctgtgcggagctgaagacagacgcctcaaatcgcgggggcacagggagagcggtcagatgtcctgca

SEQ ID NO: 108287 - DNA, 122 bp, Homo sapiens
agatttataaccctggaaattaaggacccaagtaaccaacaacagctgcatacaagtgcacgtcttagatctgctgggttactaacagctcctagacctcaaaccaaggggtatatgtgtcc

SEQ ID NO: 108288 - DNA, 122 bp, Homo sapiens
atccgacttcacgggcccattgctttccgccggccgcggccttgctggccctctttcctccgtccctgtgtgcttaaaacccagctcagcgacctagctagctgtccaccaacctcccattt

SEQ ID NO: 108289 - DNA, 122 bp, Homo sapiens
gagacccaggcactccctccagccctgccatactcccattggcaggataccctcaggtcccgccctagctccgtggccattggctgactgagtgagcgctcaggccccttcgggacaactac

SEQ ID NO: 108290 - DNA, 122 bp, Homo sapiens
tgggtcgtgctctcctgcagcgcacacgctcactttctcacgctcgctccctcccggcgccgctttctgacgggcgaacaaggtgcgggaaaactctctccaccagcacgccgccgtttgga

SEQ ID NO: 108291 - DNA, 122 bp, Homo sapiens
gcgagcgcgtttttgtggcgcctgccccgccccctcgctccaagcccgcctccccggccccgcccgccatggctcaaccttcatccgctcagaggcaaatcagcgcgccaaagtgggagtga

SEQ ID NO: 108292 - DNA, 122 bp, Homo sapiens
gcttgatggcggtgtcagaacggcaggtgctcctggctgtggacccaggctgctagggcccggccccctccagtcccccaaccccacctcactcccgccaccgtaggtatcctggagttctt

SEQ ID NO: 108293 - DNA, 122 bp, Homo sapiens
cgtagttgctacggttaccgctatggttaccgctaccgttgcagtcaccgttgccgctaccgctgacgtcaccgctaccgttacagctaccgttgcttttgccgttgccgctggctgtaccg

SEQ ID NO: 108294 - DNA, 122 bp, Homo sapiens
ctcaagcaatcctccctcctcggcttcccaaagtgtagggattacaggcgtgagccactgcgccctgccaaaagagggctttagggcaccccagaacgcgagatccccctcatctgtaatct

SEQ ID NO: 108295 - DNA, 122 bp, Homo sapiens
gggccgcagcggggccgggcggcggcgggcagggcgcggcaggtggggagctcccggcgccgctgctctccagctcccgccggtgcgcgctcctcaggtgcctccacaacgccgaggtcccc

SEQ ID NO: 108296 - DNA, 122 bp, Homo sapiens
gggtcaggaaactgtggcacacagaggttatgaaatatgcctatacttgcaaggcccatccgtggtaacactgcgatttaaacctgggcatcctggctttagactctgtgctcctaaagcac

SEQ ID NO: 108297 - DNA, 122 bp, Homo sapiens
ccgggccggggacgggagaaaggcgcggccgggaccctgcactgtgccgcgcggcgcttgcggctggaacttggcctggaacgcggtcttctcggctccagtttcccgcccaggccccgccc

SEQ ID NO: 108298 - DNA, 122 bp, Homo sapiens
gcggagggtaacggatgtagggaggcatttagtagggcttgttctctaaccacctctctccgagagtttcaaagggagtgggatctggggaaggttgaggcctcaggcctgggaactaggaa

SEQ ID NO: 108299 - DNA, 122 bp, Homo sapiens
tcacacagtggaagttccctgctttcagtccctgaatagcaaaggctatgccttggccatcgctgctggaagagacacggctcagtgttggatgaatgtcctgactgttttcgccccagaga

SEQ ID NO: 108300 - DNA, 122 bp, Homo sapiens
gagagctacttccaccactcaataaaaccttgcactcattctccaagcccacctgtgacccgattttacctgtatactagggcgagaacctcaggatagagaaagccctctgtccttgcaat

SEQ ID NO: 108301 - DNA, 122 bp, Homo sapiens
cttgattttcaagataatgatcaacccagctgtgctatgcgctctttctgcactgacctgcgggtacttcgaacttcgacagtccctcctcaggccctagtccagaggtgacgtgtctgtgg

SEQ ID NO: 108302 - DNA, 122 bp, Homo sapiens
ttaacatatcctgtttttgatacgtaaggtttatgttatgacccatactgtaaaatgtgacgcatataattacagtggtatatataatgcagtaccagaaaacttttgtgtgttttttttcc

SEQ ID NO: 108303 - DNA, 122 bp, Homo sapiens
aggagttatcactgctccccagggccttgtggctgggcatggtgccactgggctggatgtcgtgctccaggcagtacagctcccagcaggcattgcccatctgcactccggcctggcccaca

SEQ ID NO: 108304 - DNA, 122 bp, Homo sapiens
gctcagtccatgcaggatgctgcacttttccacctgcagctgtaacaggacaggtgtgctcgagatgcaccctcaggcctcactcttttctgagataggtggctaaagaaacgttctccatt

SEQ ID NO: 108305 - DNA, 122 bp, Homo sapiens
gccatgaatgtttcaaggcagctgtgaaaacacctggctacttgtctgacacaaagactacgtccattaaggaagattcaagatttatttctatgggcttgaaccagaaacaatggcagtga

SEQ ID NO: 108306 - DNA, 122 bp, Homo sapiens
aggcgcagtaggacactgggcgccgcttagccgactcttactcctcctccccgcaatcgtcgggtggttagttgcacagcctcgcgcatgggcacttttgttatttttcattatgtagtctg

SEQ ID NO: 108307 - DNA, 122 bp, Homo sapiens
caggcaaatgtgtctccagagataacactccttagtataacaataaaaaccatctttaatcgtttgaacccaggaggtggaggttgcagtgagccgagatcgagtcactgcactccagcctg

SEQ ID NO: 108308 - DNA, 122 bp, Homo sapiens
agtggaaagaggccacacgtgataaaattgtatagaacacacacataccagacgtgcacgcgcgtacacacacacacagtagaagtaaaactgaagaaatcaaaataagattggtagattgt

SEQ ID NO: 108309 - DNA, 122 bp, Homo sapiens
aataaagaaaaacagagaaagccaaagtctcccatggaagggaacccaattaattgtcttcgatttcagaatgagtttttttcctgctgtagaagaagcgcacgggaggcagcagagacagc

SEQ ID NO: 108310 - DNA, 122 bp, Homo sapiens
aaccagtgggctgcttccgctgaagaatgctgccggctccgtgccggaagcctgctggctcggtcatcttccatttgtaacaagaagattgattttagtgaacctaatcttcacaatgcttc

SEQ ID NO: 108311 - DNA, 122 bp, Homo sapiens
cggagagagggggatgggcagggagagaagagtggtaatcgcagtgggtcttatactttccggatcaagattagaggctctgctctccgtgttcacagcggaccttgatttaatgtcataca

SEQ ID NO: 108312 - DNA, 122 bp, Homo sapiens
cctaactttttacaggaacttggagtcagcgatttgcccaaatttcacaactacaaagggcggagctgagtgagacctcaaagccccatgactccactcttggatcaccagcctctatctcc

SEQ ID NO: 108313 - DNA, 122 bp, Homo sapiens
gtgaaaagaattgattcagatgacagaccaactaccagacacagcagccagacgaagagccgtttatgcagagctgctttagtctcactagataaagaaaggaaggaaatcagagactttat

SEQ ID NO: 108314 - DNA, 122 bp, Homo sapiens
aagtggttttctgctttcgatgatgcaatcattcagcgacagtggcgggcaaacccctcccggggcgggggaggtgtgagcttcacgaaggaggttgacaccaacgtggccaccggcgcccc

SEQ ID NO: 108315 - DNA, 122 bp, Homo sapiens
gtcccggaatgaggccaggtctcctccgtcctccctctagaccagaatggaaacgaccttcggacccgccttttcagccgtcaccaccatcacaaaaggtgagcccttaagccaaggccagc

SEQ ID NO: 108316 - DNA, 122 bp, Homo sapiens
gcgtctgccagtcccgccacagattcatctgggatcttcaaacagacaagcccttagagacgagggatcaaggcagccgattagagccaattgcttgctttggggacggccagtccttccag

SEQ ID NO: 108317 - DNA, 122 bp, Homo sapiens
gctatttttttaggctagacgtccaggaacagacttgctccgtcaaccacagggcatgggcgtggggaaacagtagaccacaggctgacggggaagaacacgcctgttgacttgggactttc

SEQ ID NO: 108318 - DNA, 122 bp, Homo sapiens
cagagcgctggtagatgagggggttggcattctccaggaggccgccgccgaccccgccgccgcctaccatcgcggaaccaccaccgctgatcctagcaggcgtgcgcttccgctccaacccg

SEQ ID NO: 108319 - DNA, 122 bp, Homo sapiens
ttcccggccccgcggccattgcagagtcatgaagtcatcgcagctgcgcctgcagccaggcgggaacgggaacgggaactggctggccgcggtcccttctgtcccccgccagccggaaatgt

SEQ ID NO: 108320 - DNA, 122 bp, Homo sapiens
gcacctgtagttccagttactcaggaggctgacacaggattgcttgagcccaggagttcacgatcacccttccaaagaaaaaaaaagactcgtacaaatgttgattctggcctaatatgctg

SEQ ID NO: 108321 - DNA, 122 bp, Homo sapiens
cgtacctgtctcggagggtcctacgcccatggagtctcgcttattgctagcacagcagtccgagatcaaactgcaaggtggcagcgaggctaggggaggggcgcccgccatagccgagttag

SEQ ID NO: 108322 - DNA, 122 bp, Homo sapiens
gtcagcgctgccccacctccaggaaggaacctgggctgcgtgtggctggcggtctcctagcgactagagcggcagggatctggaacctcagaagctggagaggtggcacaacagagagggcc

SEQ ID NO: 108323 - DNA, 122 bp, Homo sapiens
cagaaatagaggggcgttaaatccccttttttctaatttccaatctgaggaggaaaataacgtagtaaagggacgcaagagcaaccttgcttcttccacaacaaggcccaggcgccgccttg

SEQ ID NO: 108324 - DNA, 122 bp, Homo sapiens
tggggccggagggacaggactaggctagttttattctactacttgcttctaggccagccccgtggagggggtcggggcggccaggcctcctgcgatcagggctgcgtggggtccatctcagg

SEQ ID NO: 108325 - DNA, 122 bp, Homo sapiens
ctaagcgttttcctatcgatatctgcaggtaacagatggcacgctctcaaacagggtaatcggaggagggtctaataaaggaactattttcaacagcggagtaggcgttagggactccagta

SEQ ID NO: 108326 - DNA, 122 bp, Homo sapiens
ttttttttgagacaagagtctcgccctgtcacccaggctggagtgcagtggcgcgatctgcgctcactgcaacctccgctgggaacttagcgctggggagcatctagggagtggtaaagggc

SEQ ID NO: 108327 - DNA, 122 bp, Homo sapiens
tgaagctctcaaaggtaataaaacatttgcatcactccctacccctctttagctgggggacgaaagggagggggaagtgggggaccaaaatgagaactttgagggacgtcactccgaggctg

SEQ ID NO: 108328 - DNA, 122 bp, Homo sapiens
cggggcgggcggggcctaggggcggggcttgggggccggggcggggccttacggggagggcggggcttgggggcagaggcgggggccttacggggagggcggggcttaggggcagaggcggg

SEQ ID NO: 108329 - DNA, 122 bp, Homo sapiens
atcagaaaatgagtttatatagagcgagtctattttagtcacactagttaaatatgacaccgcaaaattcttacatggtctatttatgtgtgtaatgggattggcccaaggcattcggcagc

SEQ ID NO: 108330 - DNA, 122 bp, Homo sapiens
cgtgcttcctctttgctgttagattctagaacgcagattcctgggcgacccccgcagtggcggaggctgatgtgggctctagccttgcccactgaccttggctgttttatctcctcattgag

SEQ ID NO: 108331 - DNA, 122 bp, Homo sapiens
ggggtcccccagcactgcgggccgcccacgctgcgcttgaattcccggggggacctcagccgcctacccacgggggcagggcttgggacctgcagcccaccatgccccaaccctgccccaca

SEQ ID NO: 108332 - DNA, 122 bp, Homo sapiens
cagttacagaggacatggggttcacaggccaagcgtctgccttgccatcagcttgtggcgcgtcctccaggcggttcccactgtgatttccccagtcactgggcttcactgcccccgtcgtg

SEQ ID NO: 108333 - DNA, 122 bp, Homo sapiens
agcagccaatcagaggcatcgcctctgtgacggatgggcagccgaacccttcagtgcagccgcagaaaagaagggggtgggccccaggccgcgccggcaccggggggtggggggccgggggc

SEQ ID NO: 108334 - DNA, 122 bp, Homo sapiens
ctccccatctttctctgccacacacgcttccctaagccgcgcgcgccgcaaactcagtctcggtccccgcaggtgatgtcatgcccattgttttggtgcgcccaaccaatcggactcgccgc

SEQ ID NO: 108335 - DNA, 122 bp, Homo sapiens
catctcctccaaagccatggggatcatgaattcctttgtcaacgatatcttcgagcgcatcgccggcgaggcttcccgcctggctcattacaacaagcgttcgaccatcacctccagggaga

SEQ ID NO: 108336 - DNA, 122 bp, Homo sapiens
gagaggaagcaacccaaatgtccattagctgataaatggataaatgaaatatggtacgtccgaagaatggaatatcattcacccatgaaaaagaacgaagtccagcaccaaaacgtgctaca

SEQ ID NO: 108337 - DNA, 122 bp, Homo sapiens
cccaagcgaaacctcccaaaagcacagggagctccccgggttggggaggcccctgggcaacgcgctcctgcagtttgctagggcagtcacttgcccttgatttgctcttagagctaaagaga

SEQ ID NO: 108338 - DNA, 122 bp, Homo sapiens
tacggaaagaagtttccccactgagttaatctgcagtggctggaggtgaccttctggagacggcgattaatcacgggccgtggcgggcgccgcgccacgccgggccctttgggggaatacta

SEQ ID NO: 108339 - DNA, 122 bp, Homo sapiens
ctagtcccagagccaggaatcaggggcagccgggcgagtcccagggcaggggtcctccgccgccttgcacctgccctgctgggcggcaccgggtcagtgccctgccccctcctgcgggtccc

SEQ ID NO: 108340 - DNA, 122 bp, Homo sapiens
ccccgaggccacccagttcagcctgcagtgggagagctacgtgaagcgcttcctggacatcgccgactgccgggagcgctgccggctgccatctgagctggacgcaggcagcgtgcgcttta

SEQ ID NO: 108341 - DNA, 122 bp, Homo sapiens
aagcaaggaaaacatcacttacaggttcttcacatcggtgatgccgcggaacgccttcctcgggatcccctggatctggttttcactcaaatctctaaacaagaagagaagaggcacactgc

SEQ ID NO: 108342 - DNA, 122 bp, Homo sapiens
tgtaggtagcgcccttccattggtcaaaaatggaaccggggttgcgggagaagccaaacgcggcgagtcttgctaaagccgtcgccgtagcaacgcgcggagccgtctgggagaggcctctg

SEQ ID NO: 108343 - DNA, 122 bp, Homo sapiens
cccacaggcccctcccgtggatggacctgcagggttgcctcccctcatgtcgcccccagccgcacctgaaggccccctcagttggccctctcagcccaggccccaaccagcaggaagcctgt

SEQ ID NO: 108344 - DNA, 122 bp, Homo sapiens
cgagtgggtgcggtcagggaagaccggcggcttctgtcccgagggatggattccattaggcggcgtttctcagggtgtctccgaggctggttgcatcacaatcgtgaatacctgctaattac

SEQ ID NO: 108345 - DNA, 122 bp, Homo sapiens
cttagtctgctttttctcagcctgcttctgaagtagaagactgtgaggagggaaaatattcgaagcgatgtccctagtattgtgggatcttgaacatacagcataaaatgatagggcggtct

SEQ ID NO: 108346 - DNA, 122 bp, Homo sapiens
cctggggcttttgctttttcttctttttgggtttttcaatcgtctcctcacacgctctgtcgcccagtctggagtgcagtagcgcaatcttggctcactgcaagctccgcctcccgggttca

SEQ ID NO: 108347 - DNA, 122 bp, Homo sapiens
gactttactcattctttgtcaatatcttttctttctttctttctttctttttttctgagacggagccttgctctgttacccaggctggagtgtggtggcgcgatctcggctcactgcaacct

SEQ ID NO: 108348 - DNA, 122 bp, Homo sapiens
ctccacctgcggggaaggcccgggccaggattaaacaccctccctacgccctggggccgacgcagggcagagctgagcctggcaaccaggagccctctgttggaggagtccagggtttgagg

SEQ ID NO: 108349 - DNA, 122 bp, Homo sapiens
ctccctcggccggtcttctcgcctgctggctctccggggtccccgctccgcgtgcgctggcgtcccggagccttcccggcgcaggtcccacctcctgcgccgccctcccgtgccgccctggc

SEQ ID NO: 108350 - DNA, 122 bp, Homo sapiens
cctttttaggggccggagcggattttgccggttcaggcatggtaagacacagtacaaacgcggcttagccaagaaaagaagtaagagaatgggcgggcctgattcttttataaccaccttat

SEQ ID NO: 108351 - DNA, 122 bp, Homo sapiens
aattcagtggagaaaggatagccttttcaacaaatgatgctgggaaactgaatatccttacgcaaaatcatttgcttgaaccttttccacaaaatgaatcatagacttagatgtaacagcta

SEQ ID NO: 108352 - DNA, 122 bp, Homo sapiens
aattacaatgtaaatgttgatgcctgcctggaaacgtcaaatgacaacaggtttacagaacgaattcagtggttgtttgcagctctggaatcccaggctgcagagttgagatcgaagaggtg

SEQ ID NO: 108353 - DNA, 122 bp, Homo sapiens
cggggacaggcgggggtgcggggggcccgggagccagccacttgcccccgggggcaggggcgggcccgggcggcggcgccatgttctgggggcatcaaccctccggggcagccaaggacgca

SEQ ID NO: 108354 - DNA, 122 bp, Homo sapiens
tcaagagaaggtgtgatcactttcccacaggaatgatgaagtcaggagaccccagctagtcggttcaccaggatatgccaatcatggcacacttgtcccagttctgggagccaaagttttgt

SEQ ID NO: 108355 - DNA, 122 bp, Homo sapiens
ggagggtgcgccgggtcccccagcagtgccggcccaccaacactgcactcgatttctccccgagccttagctgccttcctgccggccagggctcggacctgcagcccgccatgcctgagcct

SEQ ID NO: 108356 - DNA, 122 bp, Homo sapiens
gcagtgaccgaccttgtcttgccagccagctgggcctgggcagcaggaagcggcaagtcccgtgggcgggcgaccggcatttgtgcggtcagcagagcggaggcatccccaccaggaggccg

SEQ ID NO: 108357 - DNA, 122 bp, Homo sapiens
tattctctttcctttgctccccaaaatacctcttcatcttttctgtgttcccaatctcagcggccctagctggagacctcatcagtcaggcacatagctaattccttatttcccacattcaa

SEQ ID NO: 108358 - DNA, 122 bp, Homo sapiens
ctgagccagaaggatggcaggatggtctctcacatgcacagagacctgaagcccaaatcccgagaggcacccagccgaaacggcatgggagaagcggcccggggggaggccgcccccgccag

SEQ ID NO: 108359 - DNA, 122 bp, Homo sapiens
cagttcttgccgtgcatctccctcccggtggccctggcgtccccgtgcacggcaaagcgccggaaggcctcctccagggcactgagctcaggggatgcggctgccccctcaccagcaccctc

SEQ ID NO: 108360 - DNA, 122 bp, Homo sapiens
ccgtctctcgctcgagtgaatgtggcgcggcggcgcgggacgcagtctcggcccctgccgcggccccgcaagctcgtgaggagacggagctgcctcctgctcccgccccctgcgcgtctcgg

SEQ ID NO: 108361 - DNA, 122 bp, Homo sapiens
gttactccattcgaaactatgtccctcccagtctccatctgtgaagtggggataaggcagcgacctcccgtgcacgcattcatggagaccgcgtgtgcccagtttggttttgttagcggcgg

SEQ ID NO: 108362 - DNA, 122 bp, Homo sapiens
cagaaaggggccgctgtgaggaatggcaccgatcagcaggcaggaagcagatgtcccaggcgaccccggggcatggtggccacagaggcaggactcgcaggcccgcgccctctgggacgccg

SEQ ID NO: 108363 - DNA, 122 bp, Homo sapiens
ctatggttaaagatggggctagggtaagctttttgttagtgagccagagacgggaaaatgcgtatatgtgggatgtatgggtttcttattaacagatctgtgagttaaactcagggcgttgc

SEQ ID NO: 108364 - DNA, 122 bp, Homo sapiens
ctgagatgttaaatggactatttacctctgcaggcacaaaacccacaaccacatctgccccgtagcgctagcgttggcggtagtgttctttcgaaggaggttgtgggcttggagcttagagc

SEQ ID NO: 108365 - DNA, 122 bp, Homo sapiens
tagttatattttgttgatagaaatagattttattagatcaatagaatcaggcaacaatgacgtggtcagcaagacattctgagaagtagccatgatgaagagaaagaagtcatcaagttttt

SEQ ID NO: 108366 - DNA, 122 bp, Homo sapiens
ttctgtttatgagggcagcgagtttaagcagttcactcccagggcagtaatgtcaaaaagcgtttggatgacgaccaagtggaataaatatcttgtaaaatggcatgtttaatagtaaaaat

SEQ ID NO: 108367 - DNA, 122 bp, Homo sapiens
ttcaggcttgatagcaagaccctactttactcatctgccctccacgctccgcggctccgacggtgtttgctgcggctcctctgctgcgttgagtccgtctgtgcactcagatggcctgtgct

SEQ ID NO: 108368 - DNA, 122 bp, Homo sapiens
cagatgagctagtgaaaacctactcatgccccaaacaatgtagtaaacacaaattgagagcgagcaacaaaatagcccgagagttcaatataatgtggaaattcataatttagaaacaaagt

SEQ ID NO: 108369 - DNA, 122 bp, Homo sapiens
acgaacgccataagactctttggggaaagcacagaaaccagatggactccagccttgctacgaaatactccaaagatattcccagttcatagagcgtggttacaaaatcgtcagtcctctcg

SEQ ID NO: 108370 - DNA, 122 bp, Homo sapiens
gtgaagggataaactgtggtacacccaaacagtggaatactattcagtgctaaaaagaaacgagctacaagccgtgaaaagaaatgcaggaaccttaaatgcatctttctaagtgagagaaa

SEQ ID NO: 108371 - DNA, 122 bp, Homo sapiens
gtttcttttcctatcattgtcgagcccttagaaccccaggatcgagggagggaaaacaagcgctcaagcactccctcgttggtcccaggacacaaggcctcgtccatctcacaaggcctcgt

SEQ ID NO: 108372 - DNA, 122 bp, Homo sapiens
cctcctgttattttcttatcagagagcagaattgtttctaactactcttgctggtgaacccgtgccccagttcctgctcccacaggcacctagagtgcagatcgcgagacaacatagggtag

SEQ ID NO: 108373 - DNA, 122 bp, Homo sapiens
gcatctgcgaggacacttggaggcaccacgcaaagcatatgtttattgtggcactattcacgatagcagagacttggaaccaacccaaatgtccatcaatgatagactggattaagaaaatg

SEQ ID NO: 108374 - DNA, 122 bp, Homo sapiens
gcccttacccgcccccactcagccctatttccgggataggccccggagcgtcacaggcaccgccctctcgggctaccattggctaccagattcccgaggctccgcccagtcacgtgaagagc

SEQ ID NO: 108375 - DNA, 122 bp, Homo sapiens
taatcccctcccccaaccccacaactctcttatccttttcaaaataaaaaagaatcatttcggtctttggtggaaacccaacgccctgccaagacatttgcattttaaattctttctctgag

SEQ ID NO: 108376 - DNA, 122 bp, Homo sapiens
agtgggagatgggtccgggaagggaatgtgtgtctggggtttgggcttctgttcctcttccgatttgtcatcgaagcggcacttccgtctgatggaaaaggtaaactaaaacagcagagagc

SEQ ID NO: 108377 - DNA, 122 bp, Homo sapiens
gcaagtcctgcctcttccgcctgcagcctgctaccctgcactgccggctcctgcggaccccgcttgccaccttgctgctgcagctgccccctgggcgcccgacgcccaccccacagctcctg

SEQ ID NO: 108378 - DNA, 122 bp, Homo sapiens
ccttcagacaggagagacaaagggacacggaggggctgtgccctgccctcccaccagtggcgatggtgtccctggcaccccagcccccaggccaccctccggaagccaacttggagtttcct

SEQ ID NO: 108379 - DNA, 122 bp, Homo sapiens
gactgcgcctggcgcactcacttccgcgtcccgccgccctccggcccgcgcgcgccgatccgccgccgccatcggacaatgggccgccagccccagctgccgtgaacttcctgccgctgctc

SEQ ID NO: 108380 - DNA, 122 bp, Homo sapiens
gaacgcttctcaatgccgatctagagaactgaccgtcgagcacccgcacggtgtctggaacgcgtctcaatgccgatccagagaactgactgtcgagcacctgcacggtgtctggaacgctt

SEQ ID NO: 108381 - DNA, 122 bp, Homo sapiens
ctgcaatcattggccctcagagctggattgtattagaatggtggcttattcctccactcacgcatgacctatacaagtttcccttatatattcgacaaaaaaagaatgtccaagaaaaagca

SEQ ID NO: 108382 - DNA, 122 bp, Homo sapiens
tcaagatgacagtcaatttacaactcagctctgcccttcatggtggcagcctgcaagtcgcgagtcacgcagaccccgcgcctcctcctctccatagcatgcactccaagtcccccttaaag

SEQ ID NO: 108383 - DNA, 122 bp, Homo sapiens
ttaaaaaagaaaaaacaaaaaaagcaaactgtctcatgaaactcttgtttccatgttgcacgctctgccaggttgtgatgtaatgtatttcttactctgggtcacagtcacaaaaccttgaa

SEQ ID NO: 108384 - DNA, 122 bp, Homo sapiens
tgtggaaggagccacactggcacttcaatattgtcacttcaaggtgggctcctaatatggcggggtgcacttcttggtgtcccggtaacagtggctgggccaggtctgactggatattcctt

SEQ ID NO: 108385 - DNA, 122 bp, Homo sapiens
gtgcagcagccaccaccttcaccagatccttggggagtatgtctgtgcaggcagttccagcgcacctcaccccagccctcggcagtctacaccggggttgccctcaatgctttagaattggg

SEQ ID NO: 108386 - DNA, 122 bp, Homo sapiens
ctcagtacagttacaactgcctcaaacttgaccccaaagtattgaaagctcctcagagagcgggccagcagcgctgcgcatgcgcgctcccgggcgtgctcccgcgcgtgcctgcgtatttg

SEQ ID NO: 108387 - DNA, 122 bp, Homo sapiens
actttccccacttgtccgacctgctgcccaggcgtcgaggaaatcgattgtctcgttggccgagtgtggtgctgacttggttcctgtcccgcaggcctggaggagaaacccaccattgcgtt

SEQ ID NO: 108388 - DNA, 122 bp, Homo sapiens
acctgggctcccatccccacagcagaggagaaagaagcctgtcctccccgaggtcagctgcgttagaggaagaagactgggcatgtctgggcagagatttccagactctgagcagcctgaga

SEQ ID NO: 108389 - DNA, 122 bp, Homo sapiens
aggctgtgagcagggtcccctcggctgagtggcagatgtaggctcactgctctgcagccccgaggggctggccagctcagagtgcagaagagttcctctccatgggtctagtcacccatccg

SEQ ID NO: 108390 - DNA, 122 bp, Homo sapiens
tgggcgtcgctgcacctgcggggccaaaaggctccaggccggggcgaggtgagcggcgggcgtcagagacccccggctcgtccctgtacagatgtgtgtgtgtgtgtgcggcctccctgtgc

SEQ ID NO: 108391 - DNA, 122 bp, Homo sapiens
ctttcaaaaactgcgccctgcaagctgcccgggagctcctgactgcagatggtgcttggccgcccaggctccccgcagcctcccgccacctcggcgctccactgcgcagcccgagggacggc

SEQ ID NO: 108392 - DNA, 122 bp, Homo sapiens
tctgcagaggctccaaagtaacaaaaacaaaacacacacacacacacacacacacacacacgagctctgttcaaggtgccacgctgagctgaggataggcatggagatacaaacactcacaa

SEQ ID NO: 108393 - DNA, 122 bp, Homo sapiens
tgcaagtacctgatgttccacgttgagatgatgtatttacttgctctttttgttcctctccgtgagagccatgcatattaattgcttctagttggccatcttggccaccataaaggtacatt

SEQ ID NO: 108394 - DNA, 122 bp, Homo sapiens
ctaagggggaggggcagtgaaaatctctaggatgcgttgtctatgctagaatcttaaaaacgagagagactcaggcatacagaggatgcatattgagagctgatgtgaagttggaggagggc

SEQ ID NO: 108395 - DNA, 122 bp, Homo sapiens
caaatttggacaatccacttgaaattcagccagtcagtaccaatcatgtcttcaaacacccgtgagccacgtaactacttatctctgaatatttaatacatcagaccacaaaggcactgtgt

SEQ ID NO: 108396 - DNA, 122 bp, Homo sapiens
ttctcgctgtccacaaagtccttgcttgtgaaaatcctatgcccaagaaattggccttaccgaatatttctacactctaaataatgactgttcacatgaggaaaggattcagcattaggaat

SEQ ID NO: 108397 - DNA, 122 bp, Homo sapiens
cccccctggtgcccacgggaggcagggcctggcgggtggggggcagccgggaagccgccgcgtggttccaggacgggcggaaggtggccttccaccctccaccctccaccctgcctggcctg

SEQ ID NO: 108398 - DNA, 122 bp, Homo sapiens
tccaagaaaggcggtgctgggcccggggactggaactcggtaggcgaggatcccctttgacgcccccctacagtttcccttcaaacacgtaggtctcagctggtaccctggctgcgctactg

SEQ ID NO: 108399 - DNA, 122 bp, Homo sapiens
ccttagcgggcgggcaaaatgggcgccggtactcgggaggcgcctgcccaggcgcccgggcgccgctcacagagtacgtccgcctgcggccccagagcgccgcctccctgccgcccccgccg

SEQ ID NO: 108400 - DNA, 122 bp, Homo sapiens
ggcttccatccaagtgtttcttgactgcctgtcatgggccaagtctctgggtgcaggtaacggaaacctaattcagactgcctcaggcagaagcaggcactgactggaaagatatggaggtg

SEQ ID NO: 108401 - DNA, 122 bp, Homo sapiens
ctgttttggaggctcattccatttgaaagctgggtcagcatggcaactgggttatgctggcggcaaagcttaccaggccattatcaggagatgtctgctgtttctagggatgttccactcat

SEQ ID NO: 108402 - DNA, 122 bp, Homo sapiens
ctgcgtgcaacgcgctggggggcggggcgctgcgagggggcggatctgtgcccatcgaagcggcccgaggcagctcgagttctgagatctcgctggctcttctcctctcggattttcggggt

SEQ ID NO: 108403 - DNA, 122 bp, Homo sapiens
tatagacatgtgtagaaggtgttcccagctttccgcaacgctaggggagtgcggtaagagcgcgtggctggctggctgtccccggagcgtgcatgatgcttcggaggaaacatttatttaag

SEQ ID NO: 108404 - DNA, 122 bp, Homo sapiens
taccgggtatttttgaggctcgagatttattaagcactgactgagccctgtcatattccacgtccttggcagggcaccgaaaaggatgacacaacgaatgcagactactctggagaagcttg

SEQ ID NO: 108405 - DNA, 122 bp, Homo sapiens
caggacattaattttgctcagtgccatgcgaaaggcagatacctgtatcctttccttgcccgtctctcccaccatgcctggtcacccttggctctctatatgctcacccctaggaactcctg

SEQ ID NO: 108406 - DNA, 122 bp, Homo sapiens
agatctggaaggttcaggggatccccaggctggaaggagcctggtttctaaataggacaccgatgccgaccatctttttcaagttaaactttggaaagttccatttgccatgcaaactaccc

SEQ ID NO: 108407 - DNA, 122 bp, Homo sapiens
atttatttattgcattttgttttaaatagagtctggggaaatgggagaaaacgctgaaaacgcacaagcactttggttggttaaattagggttccgccaagagccggagcggtgtgccaagt

SEQ ID NO: 108408 - DNA, 122 bp, Homo sapiens
tgctgcctgagtccgaaggaggccctgactccaggtcgcccacggcaggagtgggccccacggagcttctgtggacccttgacccgccaccctcaggtggaagccatcaggctgcgctggat

SEQ ID NO: 108409 - DNA, 122 bp, Homo sapiens
ccggctcccagacctggctgagcccggcggccgccaggggacgctgtgcccaggggttgccgccgctgccccgcaggtttcggctttttccaaattagcctagggacacaccgcgccactag

SEQ ID NO: 108410 - DNA, 122 bp, Homo sapiens
ggaggctgaggcaggagaatggtgtgaacccaggaggcagagcttgtagtgagccgagatcgtgccgctgtgctccagcctgggcgagagagtgagagtccatctcaaaaaaaaaaaaaaaa

SEQ ID NO: 108411 - DNA, 122 bp, Homo sapiens
gaaaagcattttacaaacaaatacaattggggaacactgatcagacaaggctcaacaggccgctggattccaggagttctcagagccttcagctctctgggaggagaggccacgacgcacag

SEQ ID NO: 108412 - DNA, 122 bp, Homo sapiens
cgcgacactttgaccgtagccgttcccgccatcttgcttcctggcaagtgcccttttcttcgggaaattgattattctggttcaggttcaacgtttggccgagtctttaagtcccagattcg

SEQ ID NO: 108413 - DNA, 122 bp, Homo sapiens
cttggaagttacacaaaaccattctgagatggagagagactggcacaataatcagacaagcgatacctgaaaggcagagttctgcctgtgaatttgagaagctggaatactgaattggattc

SEQ ID NO: 108414 - DNA, 122 bp, Homo sapiens
aggcgggcgcgggggcggtggcgccggcgccggaggggcagggcaggcggaggctggagccgctccgcgctgagtgagtcaccccgccgccggccggagaatccctcgcggggactcgggag

SEQ ID NO: 108415 - DNA, 122 bp, Homo sapiens
tccccctgacacgccaccacttcagccaagaggcagctactgagctgggcagctcagcaccgtgaggccagagcatgggggaagggcataggctcagtgagctgcaaggaacacctgcctca

SEQ ID NO: 108416 - DNA, 122 bp, Homo sapiens
ttagttataaaaccggagaaccaccactccctctacgagcctcccgaaatcccattagcccgggaacctgtggaggtccttactggcatctctgcttttcaggctcccacccctccattctc

SEQ ID NO: 108417 - DNA, 122 bp, Homo sapiens
cctctttctcatgactttttaatctcctgctcggaagtctacgaggacgcttccgggtcacgcggcgcggacaccaggagtcatgtgatgtcaagatggcggcgccgcggtagcaggatccg

SEQ ID NO: 108418 - DNA, 122 bp, Homo sapiens
tggccgcctggcttccaagaatccagagggccgggcctttctacagcaaacatcggtccccgcagggctggtctccttccccgaaggcttcctggaggaggcagtggagcggggcctggaag

SEQ ID NO: 108419 - DNA, 122 bp, Homo sapiens
ggtaaaaacataagcttggagctatgcaagacttaagggcgagagcaaaggcatcctactcgaaatataagatgaatgtctacaaatgtgtgctgggctgctctaaatatgttgaaaacgtg

SEQ ID NO: 108420 - DNA, 122 bp, Homo sapiens
cggactcggacagctcgcaagccggcgccaacctgggcgcgcagcccatgctctggccggcgtgggtctactgtacgcgctactcggaccggccttcttcaggtgagcccgcggggaccacg

SEQ ID NO: 108421 - DNA, 122 bp, Homo sapiens
gagaggagggggcgcatgcagcaaggtaccgaggcagggacggaggggcgcctgctcacccggtcataggtataggcaatgtccatggaggagatgcccaggaagtgaacgaagggtgcata

SEQ ID NO: 108422 - DNA, 122 bp, Homo sapiens
acagtgtacttttactagtaaaaagataacccatcagaaaatttcaaatttctcttgagccgagtctcaaactggaacctagtttcaattgtttcccttctcacgtaaaatatactaatgaa

SEQ ID NO: 108423 - DNA, 122 bp, Homo sapiens
gggcccgggacccacaggtgtgtccggagctggccccagacacaaagcgccaagaattggcggggacatctcagccggcggggacacaccccggagtccgaggtccccgtcaccagggtgca

SEQ ID NO: 108424 - DNA, 122 bp, Homo sapiens
gccctagcctcgttcgggccccgccctagcctcgttcaggccccgcccctcgccccgccccgcccctcgcctctacctaagttctctgagccgccaacgggtgcatcccttctcccggttct

SEQ ID NO: 108425 - DNA, 122 bp, Homo sapiens
ggaaatcccggggggccgccgggccctcttcgacagctacacaaatctggaacgggtggccgattactgcgagaacaactacatacaggtgcgaagcatccccagctgggccgcgtcgggga

SEQ ID NO: 108426 - DNA, 122 bp, Homo sapiens
agctcttgaaaaaaacagttgaggtatttcacataaaaaactgaacaatcaggttagccacgcccaaaatgatgatgaaaacgtggaagattaatttaggccatgtcagacgctcttcttgg

SEQ ID NO: 108427 - DNA, 122 bp, Homo sapiens
ttcagttcgttctcttttttagtgagattctcttgaagaaggaagcagtgtactgatttacgttttgacacaagctcttgtcacagcctggcactttcagtgagtctgccttagtacagggc

SEQ ID NO: 108428 - DNA, 122 bp, Homo sapiens
tgccaggcattttgaagcgtacagaagtcaaaaatccagagtttagatccaggaatctttcgattttgcttaaatctagaaatccacttattggaagatgcattgaggttttactgtgtgca

SEQ ID NO: 108429 - DNA, 122 bp, Homo sapiens
tctccgtcccagacgtcaatctgcagggtctgcacggccaggtagcgggcaaagcagcgccgctcacctggcttcaggaacccagggcccaccatgtacctcagctggaagccaggagaccc

SEQ ID NO: 108430 - DNA, 122 bp, Homo sapiens
tgtcacccaaactgaggtcatataatttaaaatataactccaaagttcagtaaggtatggcggagaaacctctggtgcctgtatcacatgtcctcaggccttctctgctttccgccactgct

SEQ ID NO: 108431 - DNA, 122 bp, Homo sapiens
ggctgcgtgacccgcccacccgcccaccgggtgaggggccgcggggccgggctgaggtggcgtgtgggtggccgtgcccctctgcctggagccgcctcaaatcaactttattgacagtaggc

SEQ ID NO: 108432 - DNA, 122 bp, Homo sapiens
cccggttcgccggctgcggtacgcctcctgcgcgttgccgaagtccactgcgggcaccggcggccacactgcctcggccgacccacgtcctggcatggctgctgggcccacggcaggctgtt

SEQ ID NO: 108433 - DNA, 122 bp, Homo sapiens
tgtatctgccacgtggttactgtcctctcccacatgacccttacagcagtcatgtgtggacgaatctgttcccttaatacttgcttatcctttaactttcagagtgtcactctcttgtcatt

SEQ ID NO: 108434 - DNA, 122 bp, Homo sapiens
ggaagttttttcctggctgacagccgcagatgatgaccgaagacaacgtcttaactgagacgggccaatttggcaaatggactgctttcctccccagtgcgggcaccttcctcctctgtccg

SEQ ID NO: 108435 - DNA, 122 bp, Homo sapiens
gtagagggttggatttatctggaaggtgaattgggcgggaagaaaagtcaagagaatgtgcgcttggattggagaaaaatgttgcaggaagggaacatcctcagggcaaattgcatgttgag

SEQ ID NO: 108436 - DNA, 122 bp, Homo sapiens
ccggccctgctcccgcgacggctcggggctccccacacctggggcctttgccttccacaccgagttcatccacgtccccgtcggctgcacctgcgtgctgccccgttcagtgtgaccgccga

SEQ ID NO: 108437 - DNA, 122 bp, Homo sapiens
gaggtatccacatgcggccagtgtagcccctgggcgcgggggaagcccaccgtatttctccgacatgtctgcctcttgtctcaaccctgcctgggggcctggggtctgctctttctgtctac

SEQ ID NO: 108438 - DNA, 122 bp, Homo sapiens
ctggggccccagaatcggtatgactcgctagtcagtgaggcggggtccgtctgggataagcggttatgtcaaccagtcagacacaggagctttgattctgcactttgcgcgagccactcagg

SEQ ID NO: 108439 - DNA, 122 bp, Homo sapiens
catcgctccggtccggagaaggagccctccaccctccacgctccattcgctgtccccttgcgggcccctgtgaggaaccccagccagaggcaccaatggccgccactgactttcaccctgtc

SEQ ID NO: 108440 - DNA, 122 bp, Homo sapiens
ccgttgcggcaggtcccgcccccggcccgtctcgcgcttccattggcccgccgcggcccccgccgctgtttgtctcggcttccccgccacccattggcccgctcgggtcctcccaggaagtt

SEQ ID NO: 108441 - DNA, 122 bp, Homo sapiens
ctgcctccagcacccctggctcaacccctaggcccggctgtggctccacctccagctctccgtgccttaagggaaaagcgggacagctcccaccaccctgctgggcgccagttctccacaac

SEQ ID NO: 108442 - DNA, 122 bp, Homo sapiens
aaggggcagcctcaagcgctgttgtatctgtcatcgcctacagggagaataatttcacagcggtcaaggttctttcccgtcctgttttacatttcgcacaagaagggcgggtagcaggcagc

SEQ ID NO: 108443 - DNA, 122 bp, Homo sapiens
gcgtcccagagacggcggtgacagagccgggacacgtgacagtcacagggtcacattctgcggtccacgagtttgggaccgggctggtcacgtgacgcggtgggggcaccatggggtgatgt

SEQ ID NO: 108444 - DNA, 122 bp, Homo sapiens
gctttgtgcaattaacatagattatttccttgcttcctcacaacaacctgtgaggtaaaacgtgttatctccattctacagatgagaaaactaaggtgtagggaagtgaagaaatttgtctt

SEQ ID NO: 108445 - DNA, 122 bp, Homo sapiens
gcagggcctaaccaccgtccctgcacctcaacctgcagggccccaactttgagttctccacggagacccatgaggagctgctgtacaacaaggagaagttgctcaacaacggggacaagtgg

SEQ ID NO: 108446 - DNA, 122 bp, Homo sapiens
ccgtggaccctgcaggccacgccggcttccctgactgataaacccagagccaggccttgccggtgagaggccagggactgctggctgagcttctccagcgctgctcttcactcccctggatg

SEQ ID NO: 108447 - DNA, 122 bp, Homo sapiens
aatgaaatgtcctaccaaaaaggggaaaagtaagccaacagtccccaattaggcacaaaacggacacatctcacaggctctaaaggaattctatatcctatagaccagcagttactcacctg

SEQ ID NO: 108448 - DNA, 122 bp, Homo sapiens
agcacctgcgtaagcacctctcggccagggtgaggccaatggagtaggcggggcattttgcgtgctacattctaagaagtattggttgtgatgtgatgggaagaacacaggtcaggaattag

SEQ ID NO: 108449 - DNA, 122 bp, Homo sapiens
atgcccacctctaagctctgaaacatgcttgggagaaatctcctgcataggaaccatagacggagatgtttctgcagtatttaaatgacagttgtttacccccacctctcaccactcatcat

SEQ ID NO: 108450 - DNA, 122 bp, Homo sapiens
ctcctgcagcagctgctgttccttcctcagctgctcttgtagggctggcttggcgtacagcgtgtggcggcgtctcttcctttcttcttctagttgccacctccatttttggtcgcggcgct

SEQ ID NO: 108451 - DNA, 122 bp, Homo sapiens
aggggtgtgcgcgtgggtgtgtgtgtgtgggcgtgtgtcgggggaggggagggctgaggtcgactgggcagtagaggcaagttgcccaaattcgctaacttccatcccgcaattccgctgaa

SEQ ID NO: 108452 - DNA, 122 bp, Homo sapiens
aaccaaagaaaattaaaaacttttgcctggaggcactgctgcgcacagcctgtggctagacgaggttcccgtgggtttgcctggaggcgttgctgcacgcagcctgtggctagacgaggttc

SEQ ID NO: 108453 - DNA, 122 bp, Homo sapiens
cgtttgcccaacggccgcccctcccccacaccgtcaacgacgcgatggcctgggcgcgtgcgcagaggcccccctcaaaaaataaaatgccctcaagctgggaaattgtcccccagttcccg

SEQ ID NO: 108454 - DNA, 122 bp, Homo sapiens
tgcccctcgtggagcctccggagggaccaccagtgctctcgctccaggtaggcgcctccccgtgcctggctgtttctcaggcctgttacctgtggcatggctgctgttcccatgcactggag

SEQ ID NO: 108455 - DNA, 122 bp, Homo sapiens
ggccagggagaacaccagtacacaggcacgcaaggctgagggggttgctggggctccactcgcctgtgggacccctggcccatcatgccaatgctgcggcccaccattcactgttcccagca

SEQ ID NO: 108456 - DNA, 122 bp, Homo sapiens
gtccctggctgaccccacaggccagtgtgatgtcgtgggtccttggctgaccccatagcccggcaccatggcgtgggtccccggccgaccccacaggccagtgcgatgttgtgggtccctgg

SEQ ID NO: 108457 - DNA, 122 bp, Homo sapiens
ctgggtgcacttcctggtatcccagcatctgacatgtgcctggcgcgcagcaggaactcacggctggctgtagcctggatgcatcagagacgatggcaaacccttctcacacgtgccaggtt

SEQ ID NO: 108458 - DNA, 122 bp, Homo sapiens
gaagtggatgcgggtacccccaggtgcaggggaggcatgcaggcagccccagcaggcaggcgctgggaggcggtgggaagagtcctggagtttcccacaatccttttctctgcaaggaacag

SEQ ID NO: 108459 - DNA, 122 bp, Homo sapiens
tgcttctccaaggggtgaggtctgtgggcaaaggcggccagcggtcaggtgcctccacggcgggggcactggcttgtcccttggaagagccggtctccaaggggcccagggaaaggcccggc

SEQ ID NO: 108460 - DNA, 122 bp, Homo sapiens
agggcgcaatggaatattccattgcccctcctgtcctgggtctgtgttgcggggaacgctcgcgcggttgccagagaaagccccggacgtgacggatttgcgcgaccccaagcagcccgccc

SEQ ID NO: 108461 - DNA, 122 bp, Homo sapiens
ctgctctctatttaaaataaataaatagggtgtccgttgggctgctcgggtcggattccgcggtgccagcccttccccatggccgaccctgagaagttgcaggtttcttcgccgcccccgcc

SEQ ID NO: 108462 - DNA, 122 bp, Homo sapiens
ccagctggcctaggccccgccccgcccccgcagacagaggccggaggctggctggtgcagcgatgtttaatggcaattcgtataaaccaagcccatgcacaagtagaaagtgcccgtggagc

SEQ ID NO: 108463 - DNA, 122 bp, Homo sapiens
actaacggggcctttacttgggagatcagccctggcatgatcaaagactgcaaagccaatcgagggtcctggggcactcagagagtaggcatgtctttggggagtcagataagctgattggg

SEQ ID NO: 108464 - DNA, 122 bp, Homo sapiens
tctgtatcatttacctgggatcaagtgactttctccatcccgagaataagggctcggctccgttttcaggcctcttctgatctccggagctaattggctcaggtgtaaaccaagccagcagg

SEQ ID NO: 108465 - DNA, 122 bp, Homo sapiens
tggaggaggaggctgggtgggggctggcgttggctccatctctgttcccactgtgagttccgcccctaactcgctggtaggtctccgtcctctctgggcctcggcttcccatctgtgagggt

SEQ ID NO: 108466 - DNA, 122 bp, Homo sapiens
ggctggacgtggttttgtctgctgcgcccgctcttcgcgctctcgtttcattttctgcagcgcgccagcaggatggcccacaagcagatctactactcggacaagtacttcgacgaacacta

SEQ ID NO: 108467 - DNA, 122 bp, Homo sapiens
tttccgggttcccctggacggagctggatcctgcttctcgccaaggcaggaagtgagtttcgcactgcaattccgggcggtgtcacgagtgaaaagttttgtttttttttttttcggcggag

SEQ ID NO: 108468 - DNA, 122 bp, Homo sapiens
acacaaacagctggagaatccctgcagtctcacactccccatggcagtccctaagaagctcggctttcccatgaccagacatctagaaacagaatgagtgaggcaggggaggcgtacggtat

SEQ ID NO: 108469 - DNA, 122 bp, Homo sapiens
acgtgtgggggcggtggaggcttgaggccgggaatgacagcaatgatggagtcggggaggcggcccaggccatgccaggaccggagccctgggggccaaagcacccattcctccctactccc

SEQ ID NO: 108470 - DNA, 122 bp, Homo sapiens
acactcactgtgtgtttaggcatagtggggataaagcagggaaggtggcccagttctttgcgggtgaggatcagagctagagattaactggaaagaaagaataaacaatcatttattacagt

SEQ ID NO: 108471 - DNA, 122 bp, Homo sapiens
ccgtggccgggtctccaaagcagccggtgcgtggctactaccgtggcgctgtcggtggcacgtttgaccgcctgcacaacgcccacaaggtgttgctcagtgtcgcgtgcatcctggcccag

SEQ ID NO: 108472 - DNA, 122 bp, Homo sapiens
aaataacccttctcttcctcctgcaaaaatatggtatcaaaaaccaagttcttcagaggtcggtcacatattaataacactgggcaacatttaccggagaagtacatattaagaaacattct

SEQ ID NO: 108473 - DNA, 122 bp, Homo sapiens
gtacagttttttatggtagcactaattacagaatcaaaactttaggaagatccatgtgcccgataggatcaagcaaaaggaaaaaagttaacaggaaataagactcgtagatcttgagaact

SEQ ID NO: 108474 - DNA, 122 bp, Homo sapiens
gtgtgagccacagaagcagagtagcaggccaagttccagcatcctggctgccaggaccaccgtgcaggcttaagaagctggagctttaggatatggagtgtccatcacttggcatctttctc

SEQ ID NO: 108475 - DNA, 122 bp, Homo sapiens
accttagctgttgctaaggggtggggcgagggagggaaaggattcctggtgtgtccactacgggattccacgtaggtatggagtttccacctggggctatagggagcacaggggttggcaca

SEQ ID NO: 108476 - DNA, 122 bp, Homo sapiens
gagaattgctgaccagaagaacaggagaagcagggagggaagtgaccttaagaacacacacggcccgcgcatcccaccccaccagagtctttaacccaaagcctctgggtttctctagcagc

SEQ ID NO: 108477 - DNA, 122 bp, Homo sapiens
atgatatcaccagtgttatctggaccaaagtaccaccagtgcaaggtatttgcaataagccggtcatccataatcatcatgaggtcgtcatttgcttcatggtatggattcagagtattcgc

SEQ ID NO: 108478 - DNA, 122 bp, Homo sapiens
ggcgggtaatcactcctggctcaacacagcatcccgggcggagcggatgccagatcccaccgctaagagcctgggctgggaaagcaatctttccaggcagcccccagcccggtgcgccggcc

SEQ ID NO: 108479 - DNA, 122 bp, Homo sapiens
atgtagatccccaggacctacctctatattttgattcagtaggtctggttttggtggctgcgatttgcacttcggtggagattttccactgcctttctccagcttcacttcatactagacca

SEQ ID NO: 108480 - DNA, 122 bp, Homo sapiens
aaggggcgagaacgggagctggtggttagcaagcagacgcagttttacgcgcccctgctacgggcaggagcgagtggccctgccttctctgccagcgcgggttccctgggggtgaggaaagt

SEQ ID NO: 108481 - DNA, 122 bp, Homo sapiens
gctttccgctgttcgactctggcaggctcagccaatcactgaaggagggaacgatttgagcgatggagccactctggccgagttagagctgagattatcctgagttccttttactggtgttc

SEQ ID NO: 108482 - DNA, 122 bp, Homo sapiens
tgcgtcatcatgtaggtgtagaagctggggtcggctgggtgcggccaggacatggccaggcgctgccgcttgtccttcatgcgccggttctggaaccacacctgcggggagagacgcgccgc

SEQ ID NO: 108483 - DNA, 122 bp, Homo sapiens
aatccttggcgggactcccaggtcagccacagacagtgggttcaggctggggcctggagacgtggggcagatgactcctggggtctgcaagttcgtgactacctgctgggtagactgggtga

SEQ ID NO: 108484 - DNA, 122 bp, Homo sapiens
cgccgcgccggtcggcgtcttatttacgcgtctagggcttcttccggggcggggcctttgcgtcatgacgtcgcccgctcttggaatttctaagcttaacaattggggtcctggtataatgc

SEQ ID NO: 108485 - DNA, 122 bp, Homo sapiens
gagggattccagtcaggtcaaaccgccccagcaggttgttgtcctttgtcatggccctctcgccctcatacacctggatcagcaccccgggttggttgtcagagtaggtggtgaaaatctgt

SEQ ID NO: 108486 - DNA, 122 bp, Homo sapiens
aggcccagcgagaaatcgagcacagcagctgctgggccaggtgctaagcccctcactgcgcggggcttgcgcgcccaccggccggccgctccgagtgcggggcctgccgaggccacgcccac

SEQ ID NO: 108487 - DNA, 122 bp, Homo sapiens
ttcgctaattgccttaataggctatatttaaaacccaagtcaggcagctcaaacaggaaccgctgtgtgtgcgtaactcagctgttggtcagtttcctccccgcccaggaatttcccccaag

SEQ ID NO: 108488 - DNA, 122 bp, Homo sapiens
tgaggagcgcctcttcccggccgtcatccagtctaggaagtgaggagcctctctgcctggcggcccatcgtctgggatgtggggagcgcctctgccccacctccccgtctggaatgtgagga

SEQ ID NO: 108489 - DNA, 122 bp, Homo sapiens
gggagaggagaaaagaggatggggagggagtcagggcacggggagaaatgatgaaagggccggaggttgtcacaagaacagctggaaatggcacccagcccttcccaggcccttcctagtaa

SEQ ID NO: 108490 - DNA, 122 bp, Homo sapiens
accgcccggggtgggagagtccgtgcctgggggcgtggtgagccagggccggtgctggggcgcagagcagggcggctcagattccgggaggggcggggagatcgggttgctgggcgatcctg

SEQ ID NO: 108491 - DNA, 122 bp, Homo sapiens
agcttccatatataaaattgttcttgcttcctttccttctgatctgtatttcttcaaacacggggatggggacattttttggcttttcatttacttttatacattaagcactataaatctat

SEQ ID NO: 108492 - DNA, 122 bp, Homo sapiens
tttttcttaccacgaagcgttgatataaaggaagatgctcatgttaagaaacacagaacacgcagcggcgggaagaaaggagcttattatcctgaagtgaccccacagtgtggcctcctcca

SEQ ID NO: 108493 - DNA, 122 bp, Homo sapiens
ggcgccgtctggcacttgcgcgccctatatagcggtacggtgccttccgcaggttcaaagcgtatgcacacgcgtcggttaaacgccccctattagcattcacagtacatctagttgtgagt

SEQ ID NO: 108494 - DNA, 122 bp, Homo sapiens
agctcacctgcctagtaccgcccgtgagaccagtgaccaccgaagccgggcgagggcccacgcctcccctcgccgtggtttctgtggttaactccgctgcactgaacacctcccctcctccc

SEQ ID NO: 108495 - DNA, 122 bp, Homo sapiens
tccaggctccttgagctggcggcaggcccgcaatcccccgttccgtgcccagatgcacttcggaatatagaacagctgggacttggaaagataatatgtggcacccacctgctgtaggttac

SEQ ID NO: 108496 - DNA, 122 bp, Homo sapiens
atctgtggtctctgactcatggctgtgtcctgcgaggcctccatcttgaccagacaccttcgatgcatctcaggagcacctcactatgctgcatgagacttgcacacagccaggccctggtg

SEQ ID NO: 108497 - DNA, 122 bp, Homo sapiens
ggccctgtgccaagagaatgggcactgtgtgccccatgggtggctttgtgacaaccaggacgactgtggcgatggctctgatgaggagggtgagtgtctttgcccatgcgtggaagcgacag

SEQ ID NO: 108498 - DNA, 122 bp, Homo sapiens
tttgagagcaaaatgtactaatactttgaatccgccaagcagacacgatctgggtttgaccgttctctccgggtaaaggtgaaggctgaccacgggggccgctctccctccaggccccagcc

SEQ ID NO: 108499 - DNA, 122 bp, Homo sapiens
caccgcgggccgccgagccccgctccgggatccgccggctgcctccatcccagaagagtgcgcagagaattaaatctagatatttacatgtttaatggctaaaggagcctgtcttctggcag

SEQ ID NO: 108500 - DNA, 122 bp, Homo sapiens
cctgattgcccccggggcgaggtccccggctggagcagggctgcagaagccgggaagcaacgccgaggaccgagccgaccgatgggcgcatgcagtgaggggaaccggggccgccatgccgg

SEQ ID NO: 108501 - DNA, 122 bp, Homo sapiens
cggccccgccgcgatttgcatgcgctccagtcacaaaggttcaaggtcaggagcgccgggcggggctggtcttcgccccggcggcgggaattcctcgccgcccgcgcccgggacgcccctgc

SEQ ID NO: 108502 - DNA, 122 bp, Homo sapiens
tgagcttgggaggcggaggttgcagtgagtcgagatcgcaccagtgcactccagcctgggcgagagagtgagactgtcttggaaaaaaaaaaagtataagtttttgcttccaataacatttg

SEQ ID NO: 108503 - DNA, 122 bp, Homo sapiens
gcgcccaggcaggacttggggagtgaatgaagagtgaacaaatgaatgaatgcgcggcaacgggatcttcataaaccagaccctcctcggggatctaatgcgaacactcccgaggcccgggc

SEQ ID NO: 108504 - DNA, 122 bp, Homo sapiens
gattgcagacggagtctcgttcactcagtgctcaatggtgcccaggctggagtgcagtggcgtgatctcagctcgctacaacctccacctcccggccgcctgccttggcctcccaaagtgcc

SEQ ID NO: 108505 - DNA, 122 bp, Homo sapiens
ggggttgttgtgtccttcctgcagaacccgattggcctgggtgagctgagggaacgggggcgtggtttgattccgcgggcgcgagccacgttggacgcgccgcagcgtcgccgaaaggtccc

SEQ ID NO: 108506 - DNA, 122 bp, Homo sapiens
gggagtgttcggaagaggtccctaagattaacaaaatcaagggcgcagagactgagacagcgcctttttggtgaccaatgtgtccaacgagttttgttttcagttgcgcagcacccaccttc

SEQ ID NO: 108507 - DNA, 122 bp, Homo sapiens
cctcctagtcgccagatcacaggcccaacgcatccctttccggagggatttaggaagtctcggcgttggtccaggaacgacagtcccaccgcgcctcacatggcgcattacccagcgactcc

SEQ ID NO: 108508 - DNA, 122 bp, Homo sapiens
ccgctcttggcttcggcggcgccgctgtagcttggaggcggtacttcctccagcatttgccgcgagttattggcaagttcccctgcagtttgggctgtctctgtggctggttctgcggcgtg

SEQ ID NO: 108509 - DNA, 122 bp, Homo sapiens
ggttcgccaccagcggatccaccagaaagccaggcatgccaaacaccacgggaaggacagcgacaaggaagagcggggtgaggaggacagcgagaatgagtccacccacagcggcaacaacg

SEQ ID NO: 108510 - DNA, 122 bp, Homo sapiens
gttatgtatgtatgtatattgatttgatttttcgtgtgtggcatgtgtgtaggaggtgaacgagaggagagtgggaagggcaaagttttctctgaatcatccaaacttgcccagcctagtgg

SEQ ID NO: 108511 - DNA, 122 bp, Homo sapiens
tgatagggacggtcactctgggatcagcgccagtgataggagtggtcactctgggatcagcgccagtgatagggacggtcactctgggatcagctccagtgatagggacggtcactctggga

SEQ ID NO: 108512 - DNA, 122 bp, Homo sapiens
tgggagtgaggagggcagagccaagccagggccgagttcccagaggcaggccttgggcctcgtcttacctgtggtccagcctcctgggccgctggcgctgggtagcccgtgagcctcgtgag

SEQ ID NO: 108513 - DNA, 122 bp, Homo sapiens
tctactcctcccaacgctgcatgtctgccttgcgctgggccagctccggggagggagtggcgcatgtgctcctgcagccggtacggggccacagacagccacagttcaccaggacgtagaca

SEQ ID NO: 108514 - DNA, 122 bp, Homo sapiens
gggaagcggaaaagggggggctccagtggggccaccggggagccaggggacagctctgatcgagagcctggccggccccctggggatcgggcccgaaaatggcccaataagcggagaagaaa

SEQ ID NO: 108515 - DNA, 122 bp, Homo sapiens
gctgccaattgggggcgtggagaaaggaggtctcattctcattctggatatttctattgccgcattggtcagctggtgcattgtttgaggcaacactgtccaatagaactttctgatgataa

SEQ ID NO: 108516 - DNA, 122 bp, Homo sapiens
atgacaccaaaatacaaagtaaaacatgcagtcagccattcacgtgatcgagagctgagtcggagatgtgcagcccaaataccacaacgactcgctgcatttttcactttccgtctaatgtt

SEQ ID NO: 108517 - DNA, 122 bp, Homo sapiens
ttaatctcacatactcagcaaactcacccgtgggtcgctagggtggggtatggggccatccgagctgaggccatctgggtggtggtggctgatggtactggagtaactgagtcgggacgctg

SEQ ID NO: 108518 - DNA, 122 bp, Homo sapiens
ttaatgacaaaggcgcagacatacagggtctgtcactcacccgtgctcaggtggctgctgcgcctggagaacgcgctgcttgcggattcctttccttccctttgagtttctttactgatata

SEQ ID NO: 108519 - DNA, 122 bp, Homo sapiens
aactgtgttcttttccaccatccacaaggactttaatgtttcatataattaaccctttaacgtactgatgtggccgagaggaaaaatgcaatggctgaaaaattttggagaagttaggtagt

SEQ ID NO: 108520 - DNA, 122 bp, Homo sapiens
gagggactgaagcttcttttttccctaattgttacctaattggaactcgcccagagggaacgggtggagaatttgagagcggtcgctgcagttagctgagtttctttttaattccagggtcc

SEQ ID NO: 108521 - DNA, 122 bp, Homo sapiens
ctctccattctcttctactctaacaagccataaatctcggaatatattctgggtttggcccgagtacatctttacgtagatattttatctatcttgctacaataacaaccacatgccccaga

SEQ ID NO: 108522 - DNA, 122 bp, Homo sapiens
ggggcgggtcggtggggaggagggtgcgggggaagggggaatcgaaggcgccattggaaacgttgtaaaatgcttggagcgccctctgctggaatatattggtaaaacagcagtagtgacga

SEQ ID NO: 108523 - DNA, 122 bp, Homo sapiens
gaacctacaaacctgcgagagtgaaaggcgctttccgcccaaacaactttccctttcaaccgtgcaaacccggattaggtaaaaccacggaaacagagaaaacagcccccacaatagcctgt

SEQ ID NO: 108524 - DNA, 122 bp, Homo sapiens
ggtcttctcttcctccacacagtaggtttctaaaaagtttttatattctggatctcaggtcggcggcaaagaactggaagtagtcgtgcgtgggcagcgggcgcagctgctccttggtgagg

SEQ ID NO: 108525 - DNA, 122 bp, Homo sapiens
aaaatgtcagtccccaagggaaaacttaaaaaaagaatcgtgctgtcatctctgttcctgcggggacaggcacccatttgtcggctcacttcattgctccgtcggccgggctactatttcag

SEQ ID NO: 108526 - DNA, 122 bp, Homo sapiens
ggagcagatgccccgcacccccgaccgtggcgagcctcccatgaagccgttgtccacccccgtcccccgcctcccggggactgacagatggaaagcccagctcagtctccctgctctattgc

SEQ ID NO: 108527 - DNA, 122 bp, Homo sapiens
ttctcccagaaagaaacaagactacgtaataataataggaatggtaccgcgctgccaatgcggagcagccttgcacctgaggccagtaaccagaggtttttgtcttcgctgtggcctgcagg

SEQ ID NO: 108528 - DNA, 122 bp, Homo sapiens
cctcctgagaccaaggagcatttccctctctggcgatgggcacgggagctcctggcaggacggcgaccgtccggtgggcccggagaggaggcagctgctgcaccctcggcgctggctctcag

SEQ ID NO: 108529 - DNA, 122 bp, Homo sapiens
attcttcttcctctgcacgtcaccttttctgcttctgtgcacttatggctaatccatgaacgcagctcttacatccagagttctctacaaacagcccagcataactggtgtttctcagcctc

SEQ ID NO: 108530 - DNA, 122 bp, Homo sapiens
acgcccgtggccccatgtcctcctgatactggaagcatctgaacagctggtgagccacctcgggcctcagcctggactctggtcgcctggggtcctctgggctgacagcctcctcctcctcc

SEQ ID NO: 108531 - DNA, 122 bp, Homo sapiens
cgctgggggcctggcctctgccctgagactctcgggttggatggaaatcctggcacaacgcggagaacctcccggataccttggctttgccgagagatatcagcttcaggtcatcaccgcgg

SEQ ID NO: 108532 - DNA, 122 bp, Homo sapiens
catataggagttcaaaggggctaaggcctgtggggcttcggggtgctgcctggagccgtgcgaggggaaagggaagtaaggttacccacgattggcgcttctcgagagccaatttgattagg

SEQ ID NO: 108533 - DNA, 122 bp, Homo sapiens
tggactagcacttctgaagatcccaaggccaggtcccgtgacttccttgggaagctctgccgtgcccccaccccaccccaccccaccacagcaggccgctggagtcctgggaccaccccggt

SEQ ID NO: 108534 - DNA, 122 bp, Homo sapiens
ggccgccactttccgagttggagcggactccgggcgcggcggccggggactggggcggctcgggtctgagcaggaaggggtgcggaccccaactaagtcctagttttgtgctacctgtttgt

SEQ ID NO: 108535 - DNA, 122 bp, Homo sapiens
tggagaaactgagtcacaggaggattggttaaggtcactccatgagtcagtaactttgctcggaatgaaaacccagaaggctgactcactgcattctaggtggtgagcgctcagccacagtc

SEQ ID NO: 108536 - DNA, 122 bp, Homo sapiens
tcctgaggccggtgcctctgctctgccgaaccccccggccctcaaaaaggaggcccaggacgcccccgggctggacccccagggagcagccgattgtgcacaaggggtcctgagacaggtga

SEQ ID NO: 108537 - DNA, 122 bp, Homo sapiens
cagcgcccacgcccctccgcttcagctccggggagccccagggtgggctgctggaaggcgcgactgcaacttgactttgcctcactgttgttgctggcagaatacgtacaccaatgcggaca

SEQ ID NO: 108538 - DNA, 122 bp, Homo sapiens
ccccgccctcccggtcgtcatcaggcgccgctctcgcgagagctggggcgccgcgagcctcgggcctcgcccacacgcccggcccgccccgcctccagatcatgccccgcccacatgcccgc

SEQ ID NO: 108539 - DNA, 122 bp, Homo sapiens
gcctctgttcctctcgtgaccgtggatggttgggagcagcctgtggtccctcattccatccggttttgagggcctcaccgctgtctaaaggtgcaggttagacatcgggagaggcgaaggag

SEQ ID NO: 108540 - DNA, 122 bp, Homo sapiens
aacgggtcataatattttgtatttggcttgctctggtttctgctggagcttttaaaaaatcgcttcttcctcttctatacacctaaacgcacacttctctccccttcacgtccagcaagtaa

SEQ ID NO: 108541 - DNA, 122 bp, Homo sapiens
ccttgccggggcactgccatccgttgcagcctgagacttgggatagacctgcggctctcccgttggaggcgcgggtggtgctgagcggctggacggatgctgcccgccggggttcggcgcgc

SEQ ID NO: 108542 - DNA, 122 bp, Homo sapiens
ctccctggatggcaaaatctgcctgtggtgcctccctgagcttctcaagctcattgagctcgggatggctcatctgacagagcctgactcagccccggagggctctgcaggctgcaggacag

SEQ ID NO: 108543 - DNA, 122 bp, Homo sapiens
ccataaccgtgatttgaggggacagcccagagcaccccacagctgcctgcagcacagcgacgtgtcctgataaaacatccttcccaatttacggggccgcgcttgactaatctgcctccgcg

SEQ ID NO: 108544 - DNA, 122 bp, Homo sapiens
gcaagagccgttttctccagtccgggagtcgcggggaccttcatggactctctcgtgctccgtaatgggaggcttctgcccctaacaaacatggccgcccactctgtcccaccccgcccttt

SEQ ID NO: 108545 - DNA, 122 bp, Homo sapiens
ctcagaggtcccctcgttcacaggggagccccaggcggtgggttctctgagtgccatccccgcggcgaccacgcaggggagcccgcgggctggctttggtcacctaggaaaccgacgagggg

SEQ ID NO: 108546 - DNA, 122 bp, Homo sapiens
gttaataataaattcatataaggcctaacattggagccttcacaccatcagtatattaagcggccgtgcgtcattcatctgctaaaaaaaaaagaaagaaaaagaaaaagctccagagagct

SEQ ID NO: 108547 - DNA, 122 bp, Homo sapiens
ccccgccccctttttggagggccgatgaggtaatgcggctctgccattggtctgagggggcgggccccaacagcccgaggcggggtccccgggggcccagcgctatatcactcggccgccca

SEQ ID NO: 108548 - DNA, 122 bp, Homo sapiens
gccagatgggcattctccaggcacttctgcgagtactgctccgagaggacctccagttcccgctgcaccgactgcagctcctccaggtactggcgccgcagggcctcaacatccgagttgac

SEQ ID NO: 108549 - DNA, 122 bp, Homo sapiens
cctggtccaggaactggaggagtttgctcatgctggacacggggatgccaaacgactgcacgaacagcagcagctgctgcggctccaggtcctgcagggctgagggtgcacgcgctccgtaa

SEQ ID NO: 108550 - DNA, 122 bp, Homo sapiens
acttcctggggtctcctggtcactgcccttcctgtgcatagtttgtcatctttttagctgcgaagacgccttcgtgggtctgcgtccggagcaaggcggttacccgatcccggcagtgagcc

SEQ ID NO: 108551 - DNA, 122 bp, Homo sapiens
tgtcgttcttggatttcgcttccaatgtatcgctccacagtttgtgatgtctaagaaccccggccgtgcaccgacgctgggcatgctgcccccgcccccgtcgcccagctcgttaatctaga

SEQ ID NO: 108552 - DNA, 122 bp, Homo sapiens
ggagaggccgggggcgatggagacgcggatacatcaacagaagtttctcacctaggaatgcgaggggcgctcccgcatctcctgcacatctccacccctgcgcaggaggagatccccaggct

SEQ ID NO: 108553 - DNA, 122 bp, Homo sapiens
cccaggcagcctccctgacggccacgcattggggctgcatcaggcatttcaggacgtgggcgattgtccagttaacgttttgttttgttttgttttttgcggaacgtatgtcgtcaggcggt

SEQ ID NO: 108554 - DNA, 122 bp, Homo sapiens
ctgcccccacccgtggccggcccgtggagtctgaggccgagaggagtggctgggaccggccgccgtggtgtgggtaagcgggagtgggatgtaacgcgcctgcgcagggttctcgccccgcc

SEQ ID NO: 108555 - DNA, 122 bp, Homo sapiens
aagctgttgttcttttggatgctagacttgtatgtggttacctagttgaacctacttattcgtccaaacaatatctcgactatcttgtatttcctaagcagacaatcacagctttggcaaat

SEQ ID NO: 108556 - DNA, 122 bp, Homo sapiens
ggagccttgcttatatacccaactagtatatgcttttagtcacaacgaagtgggaagtatcgtggtagctcatcctatcagaattaggttgtgacttagggttggaaagttataggcttact

SEQ ID NO: 108557 - DNA, 122 bp, Homo sapiens
agacattttatagaaatgcactttgaaaatccctgtcctgttttgttccaatctaatgatcggtgcatgcagcccccagtcacgtaccccctgcttgctcaatcaatcacgaccctctcaca

SEQ ID NO: 108558 - DNA, 122 bp, Homo sapiens
tgtcctaggtcacacctgctatctcagcatgattattaacagtgccccctttctcgaaaccgtctgtttggatctggccaccccatgtatgtgtcacacaggtctctttgaaacttttgtca

SEQ ID NO: 108559 - DNA, 122 bp, Homo sapiens
acagattgttgtttatcttctttttataactttgcatttcttcagtggttatggtaaatgcgtgctgaatctgtaattttgaggctgccttattaaagatttttaaaaatatgcagatgccc

SEQ ID NO: 108560 - DNA, 122 bp, Homo sapiens
aaacggtttcgcaactcacttcgggaagcaaatgcgctgccccccaaaacataaagttggcgaactgtgcctgaccccgctggggttttggaatgcctcgtcctcacaggaaaaaaatccag

SEQ ID NO: 108561 - DNA, 122 bp, Homo sapiens
ctgtgggcccaggaactacatttcctagaaggatgtgctagatactcgttcgcgtcgggacgcaagcaccggcccgaactcgctctaggaaatggagtctgacgcctgcgcggcgcaaacgc

SEQ ID NO: 108562 - DNA, 122 bp, Homo sapiens
gccaactgcctggtaggcgctgcccccggccgcaagctggggcgcctcctgtcgggagcccgctgatagtgagggccaacccggcgccatccagtttaaagaggcatctgcgcgccacacgc

SEQ ID NO: 108563 - DNA, 122 bp, Homo sapiens
gaaacctggtgggagaagatgagtcagacggagccaggagcccgcggccggtgacgccagcggtgggggaacacaatgtcctgtgggtgatcggtgagcgagcggacggtggatttctcctg

SEQ ID NO: 108564 - DNA, 122 bp, Homo sapiens
gttcctgtaggttttaattgaaagagttccctttcaattaaaattaggggcactaagtcccgaggatccatcccaatgacctcatctcaaagctatggttgcccatgagttcctgttcaggc

SEQ ID NO: 108565 - DNA, 122 bp, Homo sapiens
acccccagatttacaccaaaccccattttcttttggacggagctcgccgcagcacgtgaccgcccacatgaccgcctccgccaatctcagcagtcctcacaggtggtctcgctccgcagggc

SEQ ID NO: 108566 - DNA, 122 bp, Homo sapiens
ggggacttcctcccatctctgtccagcatgcgtgtactcctcgcagttccatctacctcgcgggtgcctctggtgtctccagaggtctccgaccccagcccgcccccagccctcccgcccag

SEQ ID NO: 108567 - DNA, 122 bp, Homo sapiens
ggatcgcagctagccttagaatttgggatggcactcaagtagaagtctgggaagaagttacgcagggaacaaagatgacattgttcgcagtccctgggaattcttaacagtaaagttctgta

SEQ ID NO: 108568 - DNA, 122 bp, Homo sapiens
taagagctgtgacactcatcgtgaaggtctgtagcttcgctgctgaagccagcaagatcacgaaccaaccagaagaacgaaactacgaacacgtccaaacatcagaaggaacaagctttgga

SEQ ID NO: 108569 - DNA, 122 bp, Homo sapiens
cacaggctatgacagggcttgaggcattattatgatcaacttcaattttgactaaataaacggaattgtcaaaaaagtgacttagggccgggcatggtggctgacacctgtaatcccagcac

SEQ ID NO: 108570 - DNA, 122 bp, Homo sapiens
gcagatcccgcctccttccctggccaaggagccgcccctccggggtagctgtgcgctgggcggcgctcggaccccttggcagccgcaggtgcctccccagcccagcccagctcagtccagcg

SEQ ID NO: 108571 - DNA, 122 bp, Homo sapiens
tggactgtccttgaattatttcttgatcaagatctaagaactctctcttgaggtccagatcggcacccctttctggtaacaatgggattacaggcaagagtcaccatgcctggctgttgttg

SEQ ID NO: 108572 - DNA, 122 bp, Homo sapiens
ccggccagcactaccgcctgagctccgccttctgtctgatcagctgctgcattagattctcgtaggagcgtgaacacttttatgaactgtgcatacaagggatctaggttgaggtctccttg

SEQ ID NO: 108573 - DNA, 122 bp, Homo sapiens
agacaaatagttcctgttctcaaaagcttgtcatcaaacactgcagatggtatgaaaccacgtcaaaggcaatgtgataaatggggaggaataatattcacccatttctctagcatttgcca

SEQ ID NO: 108574 - DNA, 122 bp, Homo sapiens
gggcggcccttcgttcaaactctcacctgttttaggcacaactgcactgtggggccgaagcgtgtgctgctgaggggattaacacagcccgctcgctgagcgcttcagttcgcaggcggcgg

SEQ ID NO: 108575 - DNA, 122 bp, Homo sapiens
atctcccatttttttcgggtaactgaacattgtccatgggagaaaaacgatatttaattacgtacaggagtcccacaaaatacgagactaaaagttgaagtcagatgattaaagcctacatg

SEQ ID NO: 108576 - DNA, 122 bp, Homo sapiens
gtgctctaacttaccaaacacgtggcagccggcagaacgaaaaggaaaataaatgaactgcgacgaaataaagcaggcctttccgcagtcggccacgtccaacagccacttggttcctagcg

SEQ ID NO: 108577 - DNA, 122 bp, Homo sapiens
ctcggtgatcacccgccagcccactgtcatctcccacctggtccctgccaccccgggaatcgcccaggcactgtcctgccaccaggtcaccgaggcggtctctgctgaggccccagggggcg

SEQ ID NO: 108578 - DNA, 122 bp, Homo sapiens
gatataatcagggattataaaataatttcagctcgatacttgctgattcagtacacaactcgtttggaaatattccaggtggaccgacctgtgcttattctgctgacattattataaacatt

SEQ ID NO: 108579 - DNA, 122 bp, Homo sapiens
catgggggctgaggtggctgctactcaccagtggtgccatcggccgtgagggggccataccgcttcttgttcgcaattccaaacagagtgaatctgtacttgtggtcagggtccagtgagga

SEQ ID NO: 108580 - DNA, 122 bp, Homo sapiens
ctcctcctccaggctggcccccggctcccgggtgccccttacctgcaggcgctccgtggccggctgccacatcttccagccctgggttttggcagaggagacgctggcgagactgtcgatcg

SEQ ID NO: 108581 - DNA, 122 bp, Homo sapiens
gaccagacatgtctaaccagctgacaacaaaaaccaggtacgcgaaaagaaagcaagccacgagcatttatacacgaacatcggaccttattgagaactgaaagcgggagcgaggataagga

SEQ ID NO: 108582 - DNA, 122 bp, Homo sapiens
atgttttttgcattaacagcaaggtaccccacccagctctgctaggacatctggcacatacggtagccattttaattaataaacattgattacttggccgggcctggtggctcacacctgta

SEQ ID NO: 108583 - DNA, 122 bp, Homo sapiens
agagggggaggtggtctagtggggtggagttaatccctcccacgcgcggtgccgggtgtccgccccctctgggtccgagaagcttccgcccaaccctttccaggtgccgctcccctgcgcat

SEQ ID NO: 108584 - DNA, 122 bp, Homo sapiens
acagtgaatgtgtttactctccagttcaataaatgcagtgcctgaattcaaagcacagaacgagaatgctaagtcatgattgttttctaagctgagggtccctatcctttaatgcaaaccac

SEQ ID NO: 108585 - DNA, 122 bp, Homo sapiens
gtgaagctgtcgtagtctgtggacgtgatgcggggcttgaacgtcttggagcggctgatgcggtcggctttcttggcctccctctcaggattatgcatcctctgcatgtgttcccgtagttt

SEQ ID NO: 108586 - DNA, 122 bp, Homo sapiens
ttccttgtcccagttgctgcttcagtagaaaaacaggaaagcaaatacatctttcaccttcgtctttgaactgcattgcccactgtcttgcagtgccctttgcttagctttgccatctgtgc

SEQ ID NO: 108587 - DNA, 122 bp, Homo sapiens
aggtcttgaaggactttgtaaaatacaaggatgtaatttaggaggagtagcttaataggacgttgacacattagcgttaattggtttatcagaatagccaatcattaccaagtttctggagt

SEQ ID NO: 108588 - DNA, 122 bp, Homo sapiens
cggaaggaggtgctggctgggaaaggccagcaaaggggcaactccttggaaaagtggtcccgttgaaaaggggaaaggctggggatgggtgcccggctgtgggaaggggacatagagttgaa

SEQ ID NO: 108589 - DNA, 122 bp, Homo sapiens
ccgcaggcctctgcgccgagcgcctgcgcaagcgcgacgtcttagctgtgcaccgcgcgacggcaatgcctcagggtcactgtccgcctccctgagggcgcatgcgcactgctgtgcatggc

SEQ ID NO: 108590 - DNA, 122 bp, Homo sapiens
cccgatagcaacaaacgccttgaacctggtgcgctggccagcacgggtctgcttctgcaccgacataatcttcaaaacctcgtccttaagagaggcccccaggaaaaagtcaatgatctcag

SEQ ID NO: 108591 - DNA, 122 bp, Homo sapiens
ttggctgttaagaaacataatcaattactggagcactccatttctcaatcaccttggatacgcaggcatttactacaaacatggccctctatttagagcaattcacatgtaaagcactccat

SEQ ID NO: 108592 - DNA, 122 bp, Homo sapiens
cgtcaagcacagatgccagccatccaggcgcctcccaaccgctccaggagccggggcgctcgtctgcactcacctccagcctgttagatgagctcccgtcaaccccagactttcagcaaaag

SEQ ID NO: 108593 - DNA, 122 bp, Homo sapiens
tgccagctccccacagcgcgccgaactccccagtatgagcgaacctcaagtcactgccctcgcgcttgtcgagcgaactctcaaggcttgcaggtcgtctccaggagtcagagaggtccgga

SEQ ID NO: 108594 - DNA, 122 bp, Homo sapiens
tggcggcctccacggcccgccccggcgaccaggccactttaaggcttccggccacacccccgccaggccacgcccctcatggccaaggccacgcccctgcccgagccgcctgctccacctgc

SEQ ID NO: 108595 - DNA, 122 bp, Homo sapiens
gggaagctcaggaagcttgtggtccagcccccttcacagatgaagacgctgcggcccagacgggcactcatggcacttgcagtcagtgtcgaaggccccttgcttttcttcagcccccaggc

SEQ ID NO: 108596 - DNA, 122 bp, Homo sapiens
ttgtagtaccggtagtaacttcttcgaaatgctccgaaaatgccactagggctgaagtcccgcgtcaagatccagcttggcaactcccccagtttgacctccagaagtttcttgtccttcac

SEQ ID NO: 108597 - DNA, 122 bp, Homo sapiens
aagtaaacaatccataaggttcaaactgcaaaccattctgagcagcataatgaattcttacgctatccattccatcctgtctaggatgtgaatcctccctttgtccagtgtatccatgctgt

SEQ ID NO: 108598 - DNA, 122 bp, Homo sapiens
aagcgctgagtggaattctggggggtgtgcacgcacgtgctttttacctgtgtttccactcggcctattttttccttctctcctatagggagcatgattgagcggatattagtgtcgtgcaa

SEQ ID NO: 108599 - DNA, 122 bp, Homo sapiens
gggcagggtggggcggaatcgggagggatgcggacccggtggaacgcactgcgcagacggcgccggcgcccgcacacagctgttgactagtcttccagctctcccctggaagtcgtccaggc

SEQ ID NO: 108600 - DNA, 122 bp, Homo sapiens
cacgtcgctgggccgcaccgggaagttggcgatctcctccatcttcccgcggcagaagggcggcagccgcacgccatggaactcgaagtacttgctctcgaactcccccggggtgctggggg

SEQ ID NO: 108601 - DNA, 122 bp, Homo sapiens
gcctcaatgacgacctaagctgcacttttccccctagttgtgtcttgccatgctaaaggacgtcacattgcacaatcttaataaggtttccaatcagccccacccgctctggccccaccctc

SEQ ID NO: 108602 - DNA, 122 bp, Homo sapiens
aagagatacaaaaaatagtcatgatatgcatatatattgcaataaaccatgatttctgtgcgtggtgggatggtaatttttaatttccacattgaatatttctgttttctacttattagttt

SEQ ID NO: 108603 - DNA, 122 bp, Homo sapiens
ttacacatttggaaaggtcttttaaatggcagtgcaacactgcataaacagcctgagatgcgtactttgctaatcccttatagtcccaaagatctacttttgccttttagttatttttcatt

SEQ ID NO: 108604 - DNA, 122 bp, Homo sapiens
ttcccagaattcccagcttctgattttctcctctgcccagctgcacgtaagaaacagaaccgtagaacaagtactgggctgggggttgtagagcttggcacctatatctgtgccagtctgtg

SEQ ID NO: 108605 - DNA, 122 bp, Homo sapiens
ttagcacccgggccagcggctgcggagggtgtactgggtcccccagcagtgccagcccaccggctttgcgctcgatttctcactgagccttagctgccttcccgcggggcagggctccggac

SEQ ID NO: 108606 - DNA, 122 bp, Homo sapiens
cgggaccggcctggggagggcggacttgtgtgtgtaggggggtctcgggccctttgtccccgccgggatccagcctgcgcgggtgggggggctgcggcacggcggccgggccccgcgccccc

SEQ ID NO: 108607 - DNA, 122 bp, Homo sapiens
tccgtcgtggggggaggcacagtgagtccactggggcacggcagcgtctaagccacaagccgagcacataagccaggtcctaacggagcctatgtgtaagtccactactggtgcaaggttgc

SEQ ID NO: 108608 - DNA, 122 bp, Homo sapiens
gcaggaacttgtacttgcgggccgggtccagccccgagacggcgaccgctcggaggtctccgctcacaggcactgcctggggctgcccctgcgcgtccctgtactgtaccaggaaggagtca

SEQ ID NO: 108609 - DNA, 122 bp, Homo sapiens
atagttgttcctgggagtgcaaaggcagagagcagctcctgttcctgcctgcccagtacccgtccccttccataagttaacagcagcctggtatggctcaggggaaccacctcgctccacag

SEQ ID NO: 108610 - DNA, 122 bp, Homo sapiens
ctgaaccctgatgcaaggaggggctggaggtcgcgggcacgtttcttttgggttgggcggcggaggggcagctctagggcctggagcagggctttaccagaacagtccacccctcccgcccg

SEQ ID NO: 108611 - DNA, 122 bp, Homo sapiens
accccaccacggcctttaaagggttaagagaaacccccacggccttccctccacccagctcgctgggcccggaggctagctcgctcactcgcagctcacagagtctgctgccatctccgcgc

SEQ ID NO: 108612 - DNA, 122 bp, Homo sapiens
ggaccagggtgcggcatcactcggcctcagggacccctctgccctgcccagcactggccccgacccgtgctcccgccgtctgcccagagcaggacctcaacctcctggagggcacagggagc

SEQ ID NO: 108613 - DNA, 122 bp, Homo sapiens
acccccagctagattgtaagctccttgagggcagttaccatttcacacacagcagtccctcgccaaccatgggggttaggtttctgaaaacccctggggcaggagaagtcaggcttcaggaa

SEQ ID NO: 108614 - DNA, 122 bp, Homo sapiens
gctgggcagcggtggcccctatcccgcggcctgtcctctctccctcccagagccctttggcggccgcactcagaatgagacaggactggaaatgctctagctgttcctaggtcctcagggac

SEQ ID NO: 108615 - DNA, 122 bp, Homo sapiens
ctgggaggagccggaagacaaacgctgaggccaacgccccctcacccctgggaggggtggcgcatgtctgcgcgcggggcggaggcgggcgtctttggtgctgcggccccggagagcggcct

SEQ ID NO: 108616 - DNA, 122 bp, Homo sapiens
ggtcctgcccctcacccctctcgcggggggtcgacctgctcgtggatggggaccctggcgcgcctgggctcccatccgggggttccccgacccaggtcccggtcacccccagcgcagggccc

SEQ ID NO: 108617 - DNA, 122 bp, Homo sapiens
atccccaaatctaaggagttcagccaggatctcggacatatgggtacccatatgctgtgccgctctgtggcgaggctttgattcactgcctgccagcctcaagcctttctctggcatccacc

SEQ ID NO: 108618 - DNA, 122 bp, Homo sapiens
ttccgcggacaaagtctcttgtttagccacagaaccctgggcttggccccaggcccgctacgtccgggccgtgtggcctcagccaggttacacaaaagctctgtgaccctgtttggtcagcc

SEQ ID NO: 108619 - DNA, 122 bp, Homo sapiens
cccgccgtagggggccgctgctgagctcgtggtgcagcgccagcagcagatctaggaggccgtcgagccccgggcagccgccggcctcgccccgcgccagctgctccagcgcgcgcagccgc

SEQ ID NO: 108620 - DNA, 122 bp, Homo sapiens
tgctccacagcccttttcaggacccaaacaaccgcagccgctgttcccaggatggtgatccgtgtatatattgcatcttcctctggctctacagcggtaaggagagtggggagtccaccttt

SEQ ID NO: 108621 - DNA, 122 bp, Homo sapiens
ggttctggatctttcccgccagagcttacctgaaccactttcgtgaattcctcataaacccgcttcttaaggtgcgccgccatgcctacccgcgggccctctcagcttccgtacactaggag

SEQ ID NO: 108622 - DNA, 122 bp, Homo sapiens
tctttcatcctgcatgtgctaatttccttgattaatttggagaacatctgcatataattccgtgatcttttcgttggcaaaacctcacagctttgcgcaagacttggagagttcacattcca

SEQ ID NO: 108623 - DNA, 122 bp, Homo sapiens
cttcctcccgaccctcgcaggctgagcacatcaaaaggcaggcttccttatgggtgctttcgttgaaattcagcattgtggccagtcttgaaagtacaaaaaaaaaagagggcaaatgtgct

SEQ ID NO: 108624 - DNA, 122 bp, Homo sapiens
cactgccgggctcccagcccctgccccgcgctgcctgttctttaagtttgttttcttaggcgccctgcccagggaacatgaccctgaacggggaccccttgaacacccagggccagtcacac

SEQ ID NO: 108625 - DNA, 122 bp, Homo sapiens
cactataggcaaccatcattcttatgaaggataacataattacaactaaaatgaagacaccgaaagaggtgcacaaaacaagccatcttgtcagctggagatgaggggatcaataaattgta

SEQ ID NO: 108626 - DNA, 122 bp, Homo sapiens
cggatgagaaggtcctgggcgcctgtggagtgacctcgtccagaccgccgcagacccgatcggcaagttcttggaggtgcaggaaggttctccaaggagtaggaccagaaagggatgagagc

SEQ ID NO: 108627 - DNA, 122 bp, Homo sapiens
ttactaatttattccctatccttttcagtcaccctagaatctaggatttaatggtacagtcgggggcgggaggaagggctaagggtaaacaaggcctccaagttgccttctttcccaaacta

SEQ ID NO: 108628 - DNA, 122 bp, Homo sapiens
ccttgtgacagcaccagatccagggcgaggtcgtgctgctggtcctcagagtacacgggccggtagttctgcagctgcagtgcgccgccgcacacctcctgcacacgcaaagggcagcaggt

SEQ ID NO: 108629 - DNA, 122 bp, Homo sapiens
tgtttttaggcgtgtgctgtaaatggcatggagatatatgcatatgtatacgcaggcacacgcaccgtctacacttccacggaacagactaattaacagcggctctggcagatgtgtcagag

SEQ ID NO: 108630 - DNA, 122 bp, Homo sapiens
tgcaaacaccacctccgtccagtgcaaaaacatttcgtcaccccaaaaggaaatcccagacgcattagctctgccgttcctcactcccccaccttcctttccagtccctggcaaccatcgat

SEQ ID NO: 108631 - DNA, 122 bp, Homo sapiens
acgactgcctgcggcttcaacatcctacagtgaaatgcccggcctggcctcccggggagtcggaaccataacattgtttgctccccaccatggcagggcagacgtgtgcttggtgtgtcagt

SEQ ID NO: 108632 - DNA, 122 bp, Homo sapiens
ttgtcttcagtgtcgcagtagccacctctaaactcgcctcctccacccagggtgttttgtcgtagcctaccgtgggcgtggacttgacatttatctgggctcacaagcctgcagggctgtct

SEQ ID NO: 108633 - DNA, 122 bp, Homo sapiens
ctgagagaaccacggagtgctggagaggagcccgggcacagctgaagatgctgagctgagcgttgacccggatgcagaaacccccaccccaggtctttccaatggcgaaagtcagggcaggg

SEQ ID NO: 108634 - DNA, 122 bp, Homo sapiens
ggttgtggggtttaggtcaccggcaggggtctggagtccctggaggttagggcttcgacccgcgcgacacctggggccctaggtctgagcgggggcagtgcgtttctggccccgcttcatcc

SEQ ID NO: 108635 - DNA, 122 bp, Homo sapiens
tgcaaatgaaatcattttccctcactatccagttcaatgtttttgcttctggttccatttcgatggacagaaaaattattacttctgcttgttctttggacagctgtccctaaaatgtttat

SEQ ID NO: 108636 - DNA, 122 bp, Homo sapiens
acagacaattccacagataatttcagcaaaacctgagaaatttcataacaaaagaaaccccggccccagccacacacacacacacacacacacacacacacacacacacacacacacacacc

SEQ ID NO: 108637 - DNA, 122 bp, Homo sapiens
cggaggccagcccctcccggaggctcgggaggagggttttggggaggagcgccatgcagacgcagccaggactgagaacggcttccgggccttcattcccaccagcatcgccttctctccac

SEQ ID NO: 108638 - DNA, 122 bp, Homo sapiens
gcgcgcttgcctggctagggtccctgtgaaggaatgggatcccgaggtgcttgccaggaccgtagcaggcggaagctgctggcagcgcgaacgggcggctcccgccggcgtgggtgggggaa

SEQ ID NO: 108639 - DNA, 122 bp, Homo sapiens
gagaatcaggctgcagggacaaagcctcattaagggttgccatcactttgaggggcccagcgggagtcactgcaggactgctgaagatgcaggaaaagagcagcctgcccactccacccccc

SEQ ID NO: 108640 - DNA, 122 bp, Homo sapiens
tgcctgctacgtcttcaccgagcagctgggccgctttgccctggtgggagaggccctcagcgtggctgccgccaagcgcctcaagctgcttctgtttgcgccggtggcctgcacctccctcg

SEQ ID NO: 108641 - DNA, 122 bp, Homo sapiens
ggagacacgaggcccagaaagaggcggggcctgcgggaactctcactgcaatctgggtcacggccaggcccagaagccgtcctcagagctcatttgcccggactccaccgtttcaagctggg

SEQ ID NO: 108642 - DNA, 122 bp, Homo sapiens
ccagtaccacttattgaagggactgtcctttccccattgtgttcctcttaacacccctgtcgaagattagttggccatatatgtttggatttatttctgggctctattctgtttcattgtta

SEQ ID NO: 108643 - DNA, 122 bp, Homo sapiens
ttacattgcacaaaccttattgaacattaccattggttgagaatctgttctgaattcttacgtattccttctgttaaaaaaccgacccttcaaattgtcacccatttcctctcagaaaacac

SEQ ID NO: 108644 - DNA, 122 bp, Homo sapiens
actccttaaaaatcgtgtcagatagggcttgttaaccttactttgtagaggaggaaccaacgacttggagttacgtaacttgcccaaggttaaggtggcacagattggactgtaaatctgtc

SEQ ID NO: 108645 - DNA, 122 bp, Homo sapiens
atgaaagtttggccgggattttctggccacctccacctggtgaatccagcagctggtggccgatggagtttggggcagcaggtggggccctcaactgttgagacaacctcaactgcacccca

SEQ ID NO: 108646 - DNA, 122 bp, Homo sapiens
taaacaggtaagctctccagagaaccagatcagccacgggtcgggggcctcctccgcgggcgccttccctggacacgtatttactgagtggtgaacggcatcgtgcggcctcacttgcttcg

SEQ ID NO: 108647 - DNA, 122 bp, Homo sapiens
cgattcggctttgctacaggaggtgcgggcgttgctgcggcgccacgaggcctttgagagcgacctggcggcgcaccaggaccgcgtggagcacattgccgcgctggcccaggagctcaagt

SEQ ID NO: 108648 - DNA, 122 bp, Homo sapiens
tgccggggcttgttcctcctcatggctttgccctgacgtaattcaaacatggcaacagttcgacttcaaaggcgaacccacagacctcccagacacaggctcccgggccacgagaaaccggc

SEQ ID NO: 108649 - DNA, 122 bp, Homo sapiens
gacctgagcagcgggaccatggtggacgtcccagccctgatcaagacagacaacctgcaccgctcctgggctgatgaggaggacgaggtgatggtgtatggtggcgtgcgcatcgtgcccgt

SEQ ID NO: 108650 - DNA, 122 bp, Homo sapiens
acctcccctgatattcaggggaaagagcacgatattgctcccaatatcgcagtctgtgtacgcccactctgtgatattgttccctatatccggggaggtggagagaatgatactactcccag

SEQ ID NO: 108651 - DNA, 122 bp, Homo sapiens
tctctgagttggggcaaacttggctgtttcattttgatgaacctgcctcttgcttatccacggaacagtctgctacaacagcctgcttgaatactttgcatttcggaccaaccacctccaca

SEQ ID NO: 108652 - DNA, 122 bp, Homo sapiens
ccacctggaccctccttacctgggcgtcagtaagacgccagagagtccatgcgccttggacgggcctggcaggtcctgacctgaggaatagactttaattcaggatctacgatcgccctgcc

SEQ ID NO: 108653 - DNA, 122 bp, Homo sapiens
ccagctacaggcccaggtttccaagtttctggagcccctcttccagcctggcaagcatggcgtgttgtaggggaaggacatgaagcctacaggcagcagaacctgtctgggtatgttctcta

SEQ ID NO: 108654 - DNA, 122 bp, Homo sapiens
gggtgccttgtctgtccccacaccctggtcccagcctcgtgtgtctctgggcaggaacatcgccaggcggggcctctgggttcccagcgccttagcccagggcccgccagctgccagcgaag

SEQ ID NO: 108655 - DNA, 122 bp, Homo sapiens
tttatagggggagactgatgaagagacgactatccccagaccgtattttaactactatggcgctgtgtaagaagcaacctgagaagtgtggatgaaaagctacaggtagagccctgggccca

SEQ ID NO: 108656 - DNA, 122 bp, Homo sapiens
aagcggcctctcagtctttggtggaaccatcactaggccccaatcccttagtccctcttgcgtcgaggctgcaaaatggttccattcgccaggagacgctcctgagagaagggcgcgcgcgg

SEQ ID NO: 108657 - DNA, 122 bp, Homo sapiens
ccctgtagtgacgtccagccggtctcttgctcagtaagcagatctgtaaacatgactcaccgccgctaagcaggtccatcattaatgcagatgcactaactatcttagagctccgaagactc

SEQ ID NO: 108658 - DNA, 122 bp, Homo sapiens
cgcgacagagcggcagcactcaccatagccaaaggagtccgctgccggttgttaggcaaccgacgtgtacactgactcggcgccgttcccaccgccccgcgcgcgcagccccgctccccatt

SEQ ID NO: 108659 - DNA, 122 bp, Homo sapiens
ttttcagttagatatacttctgcataaagagtatatatacagtgtaggataaaggcatatcgtacatggcaatgctgttaaacatggtaagactgaggttctgcaggattaaagtcagatta

SEQ ID NO: 108660 - DNA, 122 bp, Homo sapiens
gccgtcgccgccgttgcccgatcgagccccgcggcggccgccgtgtcccccgccgcgccccgtccgcctgcaccgcctatggcagagcccgtaggcggtccccagcaaccgccgagcagcat

SEQ ID NO: 108661 - DNA, 122 bp, Homo sapiens
gttgtgaattggggcggtaattcctccccgtaggtcgccgtgaagatgattgcatgagatcgtgcgtgtgaacgtttgttgacagctgttacttgagtccgacagccctgggggccgtgcat

SEQ ID NO: 108662 - DNA, 122 bp, Homo sapiens
gtcccaggcctcctgttaggcagagcagcctaatgggagcagtgtgactcatggacctcacgtgcttcctccagagatctcagggagcatcatggagtccccttccagaccttgcctctggg

SEQ ID NO: 108663 - DNA, 122 bp, Homo sapiens
aaagcctccggtcagggacctagaagccgcaataaaggtttaaatgctgtaacctcaccacggccactctccaaccccgtcacccaattcgtctgatacctcagtaactcccatacgactaa

SEQ ID NO: 108664 - DNA, 122 bp, Homo sapiens
aggcggggctggctgcacgggccgttagggtgcagagccaaagctttggcagcctctccacgctccctccactccctctgcagggcccctgtacgtgatcgtggagtgcgccgccaagggaa

SEQ ID NO: 108665 - DNA, 122 bp, Homo sapiens
ggtgcactcctgagttcagattaaatgtttttcagtacaatccaatttcttcctgacacacggactagaaaagcccagtccatgtgtgcagacagacagacacacacacacacacacacaca

SEQ ID NO: 108666 - DNA, 122 bp, Homo sapiens
tggaatgtgagtgcctagtgggccgcttctggtaagcagacctggctctgcgggatgaaccgaatgccggattaaggtgcccaatgcccacacactcatcagaccccagaaaaggtgttggt

SEQ ID NO: 108667 - DNA, 122 bp, Homo sapiens
ctctggcctgcctcctggtgggcgtgagtttcttagcactgcagcagtggttcctccaggcgccaaggtccccgcgggaggagaggtccccgcaggaggagacgccagagggtcccaccgac

SEQ ID NO: 108668 - DNA, 122 bp, Homo sapiens
ggatttcttcttttataaattgcttgataatactttttgcccttcacctcttagggtgatcgactttatcttcctgattttcaagggtcatctgcattttaaggacagtgatttgccttatc

SEQ ID NO: 108669 - DNA, 122 bp, Homo sapiens
tccgagggtccgacaaactggggatccagtgggccgccaagagccgaacctgagcccctgcgcgccagcagtccgggttccgaggctccagggtccgagtcggcacaggccggcggagcggc

SEQ ID NO: 108670 - DNA, 122 bp, Homo sapiens
gcggtggccaatggtgggacggcatccccggagtacagggctgcctctcctcgacttcgacggcccaagtcacccaagctccccaaagcggtgcctggcggctccccgaaatccccagcaaa

SEQ ID NO: 108671 - DNA, 122 bp, Homo sapiens
cctgttcgccctcaggtctctggactacgaggccctgcaggggttccagttccgcgtgggcgcttcagaccacggctccccggcgctgagcagcgaggcgctggtgcgcgtggtggtgctgg

SEQ ID NO: 108672 - DNA, 122 bp, Homo sapiens
aactcctgacctcaagtgatccggctgtcttggcctcccaaagggttggggttacaggcacgagccactgtgcccggctaattttatttaaccagccacatgtgactagtggatattatatt

SEQ ID NO: 108673 - DNA, 122 bp, Homo sapiens
ctataccgaccacgggtcactctgcgctgcgatctgtaacctagtcagttctgagatgcacggtggctcaaacgcacttagcatggtgacttgccactcgcactggcccaggtctggcaccg

SEQ ID NO: 108674 - DNA, 122 bp, Homo sapiens
tccatcctttcagcacccagggccccacgatgcaggccgctcacccgttggctcccacgacgacagcagcctgggtagaaatagagctcacggcccaagttgaagcagacgcggtctccccc

SEQ ID NO: 108675 - DNA, 122 bp, Homo sapiens
tggtcccccatcgggtggcttttgttcctctctccaggcaagcctgtgcctggaagaattcggctggcaggccccactgggaggacaggcggtactgcctcctccccgcccccagccccagg

SEQ ID NO: 108676 - DNA, 122 bp, Homo sapiens
ggtcagaaaggggaggtctgcaaagcaaggcctcagaatttggatttaatgtcccaagcacggaggccactgttttgaccgagatgctcctggaagccaaggcaccatgagaagcccggtaa

SEQ ID NO: 108677 - DNA, 122 bp, Homo sapiens
ggcgggggcgggtccactacgcgcttctgtgtgtccgtgtgtgccctccccacagaaatacgatctatttcgggatcgcttgatgcccgataacattccctagatttgctgttacccagggt

SEQ ID NO: 108678 - DNA, 122 bp, Homo sapiens
gaacgcaggttttggaatggtcttaaaagatgtgagggtgttaatctaggaaacttcccccgtgaaaagattggtctagtattaaaaagtggaggcacacctgggttcaaattctagctcca

SEQ ID NO: 108679 - DNA, 122 bp, Homo sapiens
gggccccggtcggtgagggtccccagtcggtgagggtcccggtcagtgagggtccccggtcggtgagggtcccctgtcggtgagggtcccggtcggtgagggccgctctgccacacaggttc

SEQ ID NO: 108680 - DNA, 122 bp, Homo sapiens
tccatttctttgtttaagacgccaagaacctgaacaccctccaccagtaacaacctgtcccgcaacaacttgtcatgtgctcttgacctaatcattagtccctctggtctgagtttctttgt

SEQ ID NO: 108681 - DNA, 122 bp, Homo sapiens
agccgagtatatctgtgtgggtctatctcgtggctctctgacctgttccacagacctgttcgtccattcttccatcaacagcgcaccaccttgatcactgtggttttacgctaagtcttgag

SEQ ID NO: 108682 - DNA, 122 bp, Homo sapiens
ttaaggggtcttcccttcccactcccactcctctttctgtcctagaagcaccagaaactccggctctagccttgcgcatggtccagcgagacttcccatacaggcagcgcacgccacccacc

SEQ ID NO: 108683 - DNA, 122 bp, Homo sapiens
gccgcgcaacacaaagggcggctctgtcggagtctggaacaatgggtcgccctttcaccgcggctgctaacctcttggcagccaccagcagaccacattctgctgtgcggatcgggcaggac

SEQ ID NO: 108684 - DNA, 122 bp, Homo sapiens
tcgcgcagcccttcggcgctgagcccgaggccccgtggggctcctcctcgccgtcgcccccgcccccgccacccccggtcttcagccccacggctgccttcccggtgcccgacgtgttccca

SEQ ID NO: 108685 - DNA, 122 bp, Homo sapiens
ccgcccccttcccaaggccacagcgagttgctgggcttcaggggctccaggcggccagggcggcggagactcttgctcacggcctgggcgcggagacgtgggggcgtagcccgcggcctcgg

SEQ ID NO: 108686 - DNA, 122 bp, Homo sapiens
acctctgaccctcgcggctctgcgtccattctcaggtactgaaagttttccgggctcttccgcacccgcggatgtggcgaagccgcggggcagctccgctcgcgctccagtcgcaggatgtc

SEQ ID NO: 108687 - DNA, 122 bp, Homo sapiens
catgtgtttttgcatcttttatcttatgaaaacaatgatctatctccctatctagatgatcgctcatgggaaggggccaactcttcactttttcttcctctttggttcatatcaacggcagc

SEQ ID NO: 108688 - DNA, 122 bp, Homo sapiens
ccaaattcaacttccactgtagcccttcttgctaaaggtgtgccttatgggagcatcaagcgtgggattttaaaaattaactttaataatgttcagtttggccaagcaactcacattcagaa

SEQ ID NO: 108689 - DNA, 122 bp, Homo sapiens
tggatcctgaacacgccaaacctgagtcatccgaggcaccttcagggaacttgaaacaaccggagactgccgcagccctggcaagtagcggcagcgtagtgagttctgtacccaaggcacag

SEQ ID NO: 108690 - DNA, 122 bp, Homo sapiens
cccccaaagcactcctggctactgctctgggtcagtctaggccccagaccccttgggaggcgcttagagaattaccttccaatcaaagggctttttctgcttgcggcttctccacccttgtt

SEQ ID NO: 108691 - DNA, 122 bp, Homo sapiens
accttttcactcgcaatcacagcgacggcaagaaatacccagagctcgtgctggatcaagcgctggaccgcgaggagcagccccagctcaggttaaccctcacagcgctggatggtgggtca

SEQ ID NO: 108692 - DNA, 122 bp, Homo sapiens
atccagcttttatgatgttcacttgctcaaacaggtgatgatcaaatgaaatgcatagcacgatgatgggttgcattgtgcaaaggtggaaaccaacttccattcatctgaacacagttatt

SEQ ID NO: 108693 - DNA, 122 bp, Homo sapiens
agccaccggaaagcaagctggcgctccaggatgcaattcccccacataggcaccaggtgtcgctgtgggcttgttgtcccggctacccccaattccaagaacctttttttttttttccctcc

SEQ ID NO: 108694 - DNA, 122 bp, Homo sapiens
tttattgatgccccgggagccaatgttttttgtgtcattgttctatataaatgttgttctcgccgggagcaaaattacacaaaacatgaagtctactaatagaatcaaatatgctacattta

SEQ ID NO: 108695 - DNA, 122 bp, Homo sapiens
ttttgttcatgtttagttacagaaatgtcgcttagaataggtctagataaataacagtgacgtgtcaaattttgctagtgatgcgatgattcagtttggtgcaatcagtctgaagacaaatc

SEQ ID NO: 108696 - DNA, 122 bp, Homo sapiens
gcatagggcagtatacaaggacctggtgcttctgctgcagaaggaccgcctgctcactcccgggcagcttagagcaaggggggagctgaacttcgaacaagatgagctggtggacggaggcc

SEQ ID NO: 108697 - DNA, 122 bp, Homo sapiens
atcaaaaacctggcacacaggttaaaaaaaaaataagtacaaactgagctggtgtacactcgagtcactgctttgtcctgccataaaaaggttcaagtggggttactttataataagtttct

SEQ ID NO: 108698 - DNA, 122 bp, Homo sapiens
ggcgcctcccacgccctccctcacctgcggccttcggggcaactcgaccgcgcctgggcgcgccccacccgcccgatttccccacggcactccgcgcccccccagccagagccggtgtccct

SEQ ID NO: 108699 - DNA, 122 bp, Homo sapiens
cattttcacacacattttcaggagcccagggcgcagcctcacaccgaacgccgcctctgccgtcccctcacttgccccgtgcccccaccgcagggctgaaggcgacggaaccgagcctttgt

SEQ ID NO: 108700 - DNA, 122 bp, Homo sapiens
gctgagccctgggtctgtgtgggcagggaacggcagtgatgcaggagctgcgtccaccaccgcccgggccgagggcgactcatgggttctgaatggaaccaaagcctggatcaccaatgcct

SEQ ID NO: 108701 - DNA, 122 bp, Homo sapiens
aaccgcaaggcccgcttcatccacgatggctctgaggacacctccgaccagtgtcagtgacggctcgggtgcctcatgcctgtggaggggccaaacttacctcctgcccatccaggtcaacc

SEQ ID NO: 108702 - DNA, 122 bp, Homo sapiens
ccaaccagtttaagagctcattctagcgagcccttcccgtgccctaatcagtggcccttgcgcacttacgtatccgtctctcgacctccaagcacccgaggtatccctttctccccccttag

SEQ ID NO: 108703 - DNA, 122 bp, Homo sapiens
tattacttgcgcattttatggatgagaaaacaaaaccttagaggtgttaagtaacacagccgtgatctcccagttagcaagtggcagagccaagattccaacccaagccattcactccaaag

SEQ ID NO: 108704 - DNA, 122 bp, Homo sapiens
atcctgtgtcgtttcggcaggtctgtgttctgttaaaatatggaagaattaagagaagaacgaagaaataagggcagaaactccactggggagtacttgtctaaccctgaaaaagttcaagg

SEQ ID NO: 108705 - DNA, 122 bp, Homo sapiens
caccggaggaggggcttcacgctgcctggggctggaagagcttgtgtgcgagcctgtgttcgggagcatgagaatggaagcgtcgcggccagagccccggccaggtggagcaggtgggtccc

SEQ ID NO: 108706 - DNA, 122 bp, Homo sapiens
cccagctccccgcgcccctctctctatccaggagagacgcattggacagccaggagggctcgacgtggaaggaaaggaagctgcaattctgggacaggggcagacgggagaggaagtgaacg

SEQ ID NO: 108707 - DNA, 122 bp, Homo sapiens
gtcctctttgagaagtaaaggcaaaactacacaattaaaacccaacagaattccaattgtcgatagaagggctgttccctattacacaaaaaaggaatggagaccaaatccgaaagtaataa

SEQ ID NO: 108708 - DNA, 122 bp, Homo sapiens
ggcgggtctgggaggccgggggccaacaatgggctcccgcacgcctgtttcatgtaaatccggggccccagccctgcgagccccggcccagcccctacacccccgcccttctccaaatgttt

SEQ ID NO: 108709 - DNA, 122 bp, Homo sapiens
ctgcgcaggtgtgaacgccatgctgaggaaagtggccgtagcggctgcgtccaagccgcacgtggagatccgccaggacggggatcagttctacatcaagacatccaccacggtgcgcacca

SEQ ID NO: 108710 - DNA, 122 bp, Homo sapiens
ctggggacctgctcagcggggagtccctgtaggctctgccatcatcagcaccaggagagccgacccctcccgggacccctcccggctgggcggccccacagacccgctggaacccagcagcg

SEQ ID NO: 108711 - DNA, 122 bp, Homo sapiens
agaggggcatggttaggtgggattccaggcaaatgagtggtggtctgggtgccagcgacccgggtgtctggaaacatgggggactggtgggcagggaagagctccggatatttggttgagat

SEQ ID NO: 108712 - DNA, 122 bp, Homo sapiens
ggagaacctggaatgcggggctggccctgcccaggggtacccgcaccgactgagcgtccccggcgtgtaatgaccgtgtgcgcctgggataatcccttttaggagaaagcaacttctccagc

SEQ ID NO: 108713 - DNA, 122 bp, Homo sapiens
cttcctaacacgtaggtgccttctctcctcagtcatcacccctccaaaaacagtcctggacgaccacacgcagaccctctttcaggtacctgagggcctccctggggtgctgcggggcgggg

SEQ ID NO: 108714 - DNA, 122 bp, Homo sapiens
gagtaaatgtatcaccctcctgagtctccaggtcccctgcacgtggacacgactcagagccgtcacaagaaagcaaatgaagatcttaggccaggtgcagtggctcatgcttgtaatcctag

SEQ ID NO: 108715 - DNA, 122 bp, Homo sapiens
cagaacactagaacacaaaatgcctggtgaggtgtctgagccccagcaccaggaagtggtcgcctcacaggttggcaaaaaatttactgacaacagtataggtttgaaaaaggaaaatttct

SEQ ID NO: 108716 - DNA, 122 bp, Homo sapiens
ggctcgcacctcccccattcccatgcccagggctgcactgttcacagactagcccagggccgcagtcaggaccagcccagcagcccagccacagaggagccagcgaacctctcccggcgcct

SEQ ID NO: 108717 - DNA, 122 bp, Homo sapiens
ccccccgccccccgacgtccagcccgtgattgacaagctggccgagtatgtcgccaggaacggcctgaagttcgagaccagtgttcgtgccaagaatgatcaaaggtcagaagaagaatttt

SEQ ID NO: 108718 - DNA, 122 bp, Homo sapiens
gcggtgctaaggaacacagtgctttcaaaagaattggcgtccgctgttcgcctctcctcccgggagtcttctgcctactcccagaagaggagggaagcacaggtgggtttctttagctctgc

SEQ ID NO: 108719 - DNA, 122 bp, Homo sapiens
acggggccccggaagcctggctccccacagggtcgaatggaaaggggcagccgcatgtggcggtgggttctccgcagctcggagactggagacctggatgcctggccaacagggaggaactt

SEQ ID NO: 108720 - DNA, 122 bp, Homo sapiens
cgggcgcccgcccctccttcatccgcgtcatctcctggctctcgggacctccgggacctgcgcgtggaaacaggttttcccaggtcgtcacacgggaaggcctgggctaaggagctgattaa

SEQ ID NO: 108721 - DNA, 122 bp, Homo sapiens
gagcgggtcccgggccgcgccggtgtgctccttaacccgcggcgacacatggttcgagcacgtgagcatgctggtaatcatgctcaactgcgtgaccctgggcatgttccggccctgtgagg

SEQ ID NO: 108722 - DNA, 122 bp, Homo sapiens
tttcccttttttggggaagcgactggcccatagtgtgtaaccattctaagctaggtacaccgaggtacaaatgccttctttaaagaagttggatagggccgggcatggtggctcacgcctgt

SEQ ID NO: 108723 - DNA, 122 bp, Homo sapiens
gcggaagaggtgggctggtggaggcggggtcgagatggcggcgcctttgaggattcagagcgactgggcgcaagccctcaggtgaatccaggcccagaacagagtcagaggaggcgggtagt

SEQ ID NO: 108724 - DNA, 122 bp, Homo sapiens
gcatgatccgtagggtcacatgtgtggctgcagtccgtgtctctttgtgcatgcccaacacgaacgccactgtgctgccaactcagaaagcagctcttcttggtgactgtgggccgcctgga

SEQ ID NO: 108725 - DNA, 122 bp, Homo sapiens
acaggttcctaaagtatgggcggatgtgctccctctcgcccaccgccaggagccgagccccggcaggtgagcggtgcaaaacacgcacccagctgcccccagcttcctccgtccccgctgag

SEQ ID NO: 108726 - DNA, 122 bp, Homo sapiens
ggctgctgttgggaagggactttttccggcagtcccatcagctctcaggttccccttttgcgagaggagaaagctccccatgttccacgatcctgtacgtgcctaatcctgtcacccacagc

SEQ ID NO: 108727 - DNA, 122 bp, Homo sapiens
ggtaggcgcgatgcttatctgacgtgtgtgtgttgtcggcactgcggggccctcaggaaacgatcagcggagtggtttccctctgagcatgtccttgtggcctgcgtttatttagcacagcc

SEQ ID NO: 108728 - DNA, 122 bp, Homo sapiens
cattaagatgcggataatagcactgcgtctctcacagggtgtcatggacattacaaggtccggtccacgcaaggtctttgtgagcagtgctgggtgcatagtaagaatccatctgggtttgc

SEQ ID NO: 108729 - DNA, 122 bp, Homo sapiens
ggggcttctgggatgggacaggcctttttgagaagctctcagcattccctgcggtcttgtcgcttcttccctctgcctgcttcaatgtctccctgagtctctgcgtccctcccacgccaccc

SEQ ID NO: 108730 - DNA, 122 bp, Homo sapiens
gtcctctacgggtcactgaggccgcggggcccgacctgcggcctctcagaaccacggcaccgcccctgcccgccccagcgccactccggcacctccgcaccaggcgccctagctcgggactc

SEQ ID NO: 108731 - DNA, 122 bp, Homo sapiens
ccctcccgccactgagcagccgttcattgggcaagggctggtgacacaagatggcggcgccgaacaaggaaggaccctgtctccggggcaaccgggaagccgacccggcgcctgattgctaa

SEQ ID NO: 108732 - DNA, 122 bp, Homo sapiens
caccttatttcctttctaattggttggctcgtcaaagaacaattttaaccaatcaaattgcgcctttcacaattctaccgatgactataactagcttcttattcctccatcgagcccattct

SEQ ID NO: 108733 - DNA, 122 bp, Homo sapiens
atgtacagggactggcgggggcaagaggagaacagcaaccagcatttccaggagcgctggcggccgaacggggggcctgacccagcgagctccccacccacgcactgcttgcagggacccgg

SEQ ID NO: 108734 - DNA, 122 bp, Homo sapiens
gggggctgtctgtgttgaatcttgaagaacatatagaaatctgtttaccaggtagacagacggaagtgcattccagatgaaaggaacagcatctacaaatgcccagaggtacccaggtcaga

SEQ ID NO: 108735 - DNA, 122 bp, Homo sapiens
agcccagaaaccaagggcgtggcgggactcacaggcagggagcggtgaggcagagctgtccgctggagcgagcccctgctctagggccatggccctcggggtccgttcatgcagcaagccac

SEQ ID NO: 108736 - DNA, 122 bp, Homo sapiens
taaataaaatagaaataaaacttggggctgtgcggcggagccgtgggggtgcccgctctgcggtggtcggctgaccctgggatgccctggtcagaataacacggggcccagggtcagatgtg

SEQ ID NO: 108737 - DNA, 122 bp, Homo sapiens
tcataaggagcacctggcagtcgtggacgatggtgaccaccggcgtctccttgctgacggcgcccatggataccatcatggcatattccagatcggcgtagccttctcccttcccgattctc

SEQ ID NO: 108738 - DNA, 122 bp, Homo sapiens
agataggagacacccttcctggaaagacaacagcttggggacattacagataaggctgggcgggtgtgcctagctagcccagaataaaaggatcaccgagagaagttaggaatcgaccttcc

SEQ ID NO: 108739 - DNA, 122 bp, Homo sapiens
ccactccatggctacaaataccagcctcatgctgacgactcccagacatttctctaggcccgacctcaaccctgagctccaggctcatctgtcagcagcctgcttctcctcctccccagggt

SEQ ID NO: 108740 - DNA, 122 bp, Homo sapiens
agaacaagatttgtactaataccaaaggttctttctctatgtctcctcctctgcctccctcgttcttcccttttttctagttcttcacggttccaaagctttactatgaacctgggcatgtt

SEQ ID NO: 108741 - DNA, 122 bp, Homo sapiens
gtcaagcgcaatgagctggctgccttggcacgaggggcgctggtgggcatggctcagctgcgtgagctgtacctcaccagcaaccgactgcgcagccgagccctgggcccccgtgcctgggt

SEQ ID NO: 108742 - DNA, 122 bp, Homo sapiens
ggccggacgtggcgcacaggaagttacgcacgggaggcggtacctggttgtggagggtgacgccatgggtggggcggagcgtctgggatgcgctgggagcctaggatccccgacaggtaacc

SEQ ID NO: 108743 - DNA, 122 bp, Homo sapiens
cccctgacagctggctcccagcctcgtctacctctgcagagcaaagggccaagatgagaacggtatagccacatgtgtgcacgcatgtacatgcacacagacacactcatgcattcacgcac

SEQ ID NO: 108744 - DNA, 122 bp, Homo sapiens
agagagaacaccatgtgacgacagaggcagaggttgcagtagctaaggaataccaaagaccgctggaaccacctgaagctaagagaaacgcatggaatagattcaaccctagggtcttcaga

SEQ ID NO: 108745 - DNA, 122 bp, Homo sapiens
gcacgcggccaccgagctggaggaggcggcgggcgtgagaccgggaatgcttggggcccccgccttcctcgcagccatccagcactcggtgcacgccccgcgaggccagcggctgctccctc

SEQ ID NO: 108746 - DNA, 122 bp, Homo sapiens
cagaatgtgcctctgccacccatctattgggtggtgcaatatagctcactgcagcctcatcgggtttcctgccaggcttcctggggactgtgctatctccatggtgtttatgggatggtttc

SEQ ID NO: 108747 - DNA, 122 bp, Homo sapiens
aaaaagattgacaggtatggtttgtgagagacctatttgtaattgtcagggtgacgttggcgagaggaggaggagtaaaaactgaagcaggaaaagcagctcgatgtgtctgtctatcagtt

SEQ ID NO: 108748 - DNA, 122 bp, Homo sapiens
ggaagaagtgaagggataattgtgcttacaccagttagcttttcacacttctctctctcccggtgcagcactgccggtagggggagcagtgagctccaagtttccaggaataattcaaaaca

SEQ ID NO: 108749 - DNA, 122 bp, Homo sapiens
tcttgaaataaccgactcctggaatgccatttcagcttcaagaccaatagagagctaaatcgagtggtatttctgagttgacaaaagaaaaatttaattaaaactataagtgaccttcaaat

SEQ ID NO: 108750 - DNA, 122 bp, Homo sapiens
aggaaagggaactccctgaccccttgcacttcccgagtgaggcaatgcctcgccctgcttcggctcgtgcatcgtgcactgcacccaatgacctgcgcccactgtctggcactccctagtga

SEQ ID NO: 108751 - DNA, 122 bp, Homo sapiens
tggactgaggccaggtcatctgcagggtggtgttcaaattcatggtacaatgtcagcaggcgcccagatgggaaaagagagggacgtgcacctgggcacaagaagctgcaggggcccctccc

SEQ ID NO: 108752 - DNA, 122 bp, Homo sapiens
ggccccgcgctgacagtgtgcaggatttgctcttacacagctctttctctctgtccctgccggtcccccgcagacgaatcggcagccgaaacaggccagagcttcctgttcgacgtgtccag

SEQ ID NO: 108753 - DNA, 122 bp, Homo sapiens
gctcacgcacgcgcagacagcccaggccgtgagaggttgctccagtctgtgctctctgaccgtagtcagtagtcacggcgttagatttttgcggtttttgatctggaagccacacatcctta

SEQ ID NO: 108754 - DNA, 122 bp, Homo sapiens
ggtctcagcccaacaccctccaagaagaaattagaggggccatggccaggctgtgctagccgttgcttctgagcagattacaagaagggactaagacaaggactcctttgtggaggtcctgg

SEQ ID NO: 108755 - DNA, 122 bp, Homo sapiens
tttttcttttgttcgaggcagcacacccgtcccaggcacaggccttcattcctctgtggacgtggtcttgtgccgcagaacaaattgtgcgcttaattgaaaagtatataaataaaatctga

SEQ ID NO: 108756 - DNA, 122 bp, Homo sapiens
attgtattctagcttcaaattttgttagtaagagactttcatattcctttttttttttttcggtctgttgttgaaatgttcttttcaagcctagtgttttgaagcctagtattttgaaaagt

SEQ ID NO: 108757 - DNA, 122 bp, Homo sapiens
attttctctttttctctctgaaataccagtgttcagaaaatgttgtctcacttttaaagacgtctgaaaattgtgataaatagcaataaaagaggcagaaaaatcccagtgtctgtgtcaaa

SEQ ID NO: 108758 - DNA, 122 bp, Homo sapiens
cgagatccagagtgatgtgctaaccataaattaactgcagcttgcctgcttcagcaaaaacggagattcaggccagcagctggatatgggggtctctcttcagactcttctcgtttctgaga

SEQ ID NO: 108759 - DNA, 122 bp, Homo sapiens
ggaagatatcatcctttgatcaaaaacataagatcctttcattttccccactatagtcagcgcttcaatttcaaaggccactcgctgtttctgatctgttatttatcagtcaggcagactca

SEQ ID NO: 108760 - DNA, 122 bp, Homo sapiens
tcgtgacactctggatcccgaagctagagcagacagtgccctgccggcgccctgagcagtcggggacttcatgtggttccctttgggcagaacaggaggctgtccctttacttcagaggcct

SEQ ID NO: 108761 - DNA, 122 bp, Homo sapiens
gtcccagctctgcaaagggcagctggaaatggatttaaaatggcaacgcggaccaatcagcgctgccgcgccaaagcagacatttacacgcgcctcctccacatgcacagcggaacctggcg

SEQ ID NO: 108762 - DNA, 122 bp, Homo sapiens
tttgtgtctgcctttgctggagcacctccccgggatgcgtttgtttataggatgttcagacgaatgtcagaacccactgggcggttcactcactgaggggggcccgcgtcccctccatttct

SEQ ID NO: 108763 - DNA, 122 bp, Homo sapiens
aggaggcgccacagacctgaggttttgcagaggcgggacagctgccagcacccagggccccgccctggcgacacggaggtgctgcggccaagagggttcccctttgggttcactgctgctgc

SEQ ID NO: 108764 - DNA, 122 bp, Homo sapiens
cacttcagaaaaacatgtgacagggaaacgcacaggcatgtgtgtacacacttaactattcgaggtcgttaaacctggacgcccatcctttccctgtcttccactccagagtttaccactgt

SEQ ID NO: 108765 - DNA, 122 bp, Homo sapiens
caggagctctggagacacagatggtcagaccttgggtgccttggtcctcactttctatgacgagggaggagggaaaggaatgggggagtctttcccctctccacatccttgtatccactcct

SEQ ID NO: 108766 - DNA, 122 bp, Homo sapiens
ggcacgagaatgttgaaatgaacaagagccagctacaaccctgatgttcccctagtctagcgagagggactgacgcggaacagagacactttccattgaacgcggttgtgtcaagacggagc

SEQ ID NO: 108767 - DNA, 122 bp, Homo sapiens
acatgataccacactcggctattttttttttaatttttatttttgtagagacaggggtctcgccctgttgcccaggctagaaactgagtttcaaacgtttaaaaagaccttgtgaaagtccc

SEQ ID NO: 108768 - DNA, 122 bp, Homo sapiens
aaagagacttgttatgaataacaaaagatgctcttatcaccatctctcaggaaattacaacggtttaagaagctctatgtcaggaacttgggacaagaccaagtatatatttcttcttatca

SEQ ID NO: 108769 - DNA, 122 bp, Homo sapiens
acgaggtcctgtatttcaggatgactcactctgatgcctcctcccctagctcgtgggccacgtagataatgtcagggtaccccatgcagctggagatgttattttggggatagtagaagagg

SEQ ID NO: 108770 - DNA, 122 bp, Homo sapiens
tgacctcttgatccgcccgcctcagcctcccaaagtgctgggattacaggcgtgagccaccgcgcccggcctacatcaatgtttatccagtttttgtttgtttgttttgacggagttttgct

SEQ ID NO: 108771 - DNA, 122 bp, Homo sapiens
tcccagcttctccccgcgggacactgagtaaccacacagggaaaaatcatcacgcagccacgcagaagcctccagacacacacgcctcagtgggtgtagatgtgccgctccctcgtgaggga

SEQ ID NO: 108772 - DNA, 122 bp, Homo sapiens
gcccttgcagggccccaggctccgtggtggatgtgaaggtaacacagactcagattctaccgtcaggggatttccatctagcaaggagagaaggcaggttcatgatggtccattacacacag

SEQ ID NO: 108773 - DNA, 122 bp, Homo sapiens
attcttaaccattacattctattttaggtatcctgaagcagtttatgttgtttataccggcgatgttaatgtcaacggtcaacagatactagaaggtgctttcagaagatttaacatcagat

SEQ ID NO: 108774 - DNA, 122 bp, Homo sapiens
cggctgcggtcaggtgacccggtcgcctggccgcagtgagtcaggctgggagggcggggccgcgccggctgctgcggctggcacttggccctttaatccccttcgtgggcccctcaacctgg

SEQ ID NO: 108775 - DNA, 122 bp, Homo sapiens
gaggagctggcgtcagcacccaagggaaagacaagatcagcagaggcgcaggcggagccgcgggccccaaaaacaggatgtcgagtcgtcattcagcaccgtgcagccctgcgaggcctggc

SEQ ID NO: 108776 - DNA, 122 bp, Homo sapiens
ttttttgtaagtggtcttgtgagttaataaagaagcaatgtgattggatgggaagaacagcggattgggagtctacaatgtcaaatattagacctaactaatcacacactaagctaaagatt

SEQ ID NO: 108777 - DNA, 122 bp, Homo sapiens
agctgtgtggagcgtagtgagcaggttctggcggcagcgccgggtctgctgcaggtctcccgcattcaccggctgtggcacccagcgccaggccgcgcaaaatccagaaatagcctccagca

SEQ ID NO: 108778 - DNA, 122 bp, Homo sapiens
accgctggcggcggcaaccagagcctctgtcttgccagttgcgcactctgagacatctctcggtgcagagtggttccgaagccccagcccgctgggtcgctcggcctgagggctcaggtgat

SEQ ID NO: 108779 - DNA, 122 bp, Homo sapiens
ccgtcttcacagcaacgcgccgggtctcaccacggcggatgccgagggacaatattaccgcgtccgtggccgccggactctgcacgcatgtccaacagcccccgtccccttccccgcagcca

SEQ ID NO: 108780 - DNA, 122 bp, Homo sapiens
cttggctcccttgtcagcagacatcctggcctcttgttttgctgaccaagtgagaggggtcgggtcgtgctccataaatgaggttgaacccgcgaagaggaaacgcaaacccatctgactga

SEQ ID NO: 108781 - DNA, 122 bp, Homo sapiens
atggcctgcttatcttgaaggcacttggccaggtgccataaagtgctaactctgactgcccgactatgccattcaccccacctacctctgtgcaggagatgtgacatttagcaaatcagtat

SEQ ID NO: 108782 - DNA, 122 bp, Homo sapiens
ccgggctgcgggcattctttggcccggtggccagatttccgggatatgtagcaagctcctcggggaggaggttctggaggaacgtctggctgctgcggttgaggcgtttggagttcttgtgt

SEQ ID NO: 108783 - DNA, 122 bp, Homo sapiens
ctctcttgaagcctctgtttaggaagcttccttatgcaggttccctaccactacaattgacgttttgtatcaaccaagaaacctaaataaaataaaaataggaagtataaaaaaggtcatga

SEQ ID NO: 108784 - DNA, 122 bp, Homo sapiens
tgattgcatgttcatcgggagcaactgaggggcgaagtcggcacccagcggtctgagttccgtggacccatcggctgaggcctcgtctgcccaagatcacacgggatacagtgcagccacag

SEQ ID NO: 108785 - DNA, 122 bp, Homo sapiens
ccctgctgaggtggagacaggtgaggtaccttctcttcatcagcttacactgtaaacacacgtcctttccatggcccaggtagtgctgtgagtttcacacttttttctttttattggtgatt

SEQ ID NO: 108786 - DNA, 122 bp, Homo sapiens
ccgtagattccctggttggagtcccgtttcctggtgccgggatcagggctggcggtggggcgggggtggcggggcgggggtgcgggggagccggctggggcggcggccaacagacgccgctg

SEQ ID NO: 108787 - DNA, 122 bp, Homo sapiens
agtctctgttacagtctgtctttctgatcacccagtatctgtttcacttttcctttcatacgtggaacacagccaccctgtcatgcatatggaaatattccacccatatttccgcttgagaa

SEQ ID NO: 108788 - DNA, 122 bp, Homo sapiens
tttgggatagggagggtcctttcttcctccttggggtaaatgcgatttagcagcctttaccgacctacccaaccccagggccattttgtgggaggaggttctctcgtgctagacaagttccc

SEQ ID NO: 108789 - DNA, 122 bp, Homo sapiens
tactgattgaattggagacaattacaaggactctctggccaaaaacccttgaagaggccccgtgaaggaggcagtgaggagcttttgattgctgacctgtgtcgtaccaccccagaatgtgc

SEQ ID NO: 108790 - DNA, 122 bp, Homo sapiens
tctggagaaagggtttttcgggtgcctgagctgcttctggaacaaactttccctcatggccggtccatcggccaagccctgccgtccactttgcccagaagggagcagaaaaacagtgaccg

SEQ ID NO: 108791 - DNA, 122 bp, Homo sapiens
gcggtggctgcagccacctgatccagctgcagctttgcatggagctggcgcctgtgccggcgcctggaactgcccaccccactacagcagctggcgggcttggctgtgtgcagtggctggac

SEQ ID NO: 108792 - DNA, 122 bp, Homo sapiens
agagagaggccaggagggaccacttgctcagtcgagaacgggaagagctcctgagaaggacgggtcaggaaggagagatctgactgagcgacaccatcctcatccatgaaggtgcacgccca

SEQ ID NO: 108793 - DNA, 122 bp, Homo sapiens
gctgccaggaaaaaattactaggaatgtatagtgtcttaaaataagatgatgagaggccccgtgaaatgaaaacactcaaatcttagtgctggaattaccgtgaggtaatgagagaatagtt

SEQ ID NO: 108794 - DNA, 122 bp, Homo sapiens
gggaggtgaccgcagccacgggctgggacttcacaggtgtgggctgggggcttttccggacgctgtggcagaggaggcccgcgcgccgcacatctgctgggacccttagctcgcccaggatt

SEQ ID NO: 108795 - DNA, 122 bp, Homo sapiens
caggagtatagctgttctggggactctgaagcaacagtgtaaaatgatatggtagtctaacgtattctgatttagaaagatgtccaagacaaagaaagtgcagaacaacaagtactgcatga

SEQ ID NO: 108796 - DNA, 122 bp, Homo sapiens
cttctcccacgggcaccctccagagcctcatacgcacgtgaccttgtttgatacggtgtccggaatgtggtgctaagtctaaagttttaacgcattaaaggacagcatctgggggagaaagg

SEQ ID NO: 108797 - DNA, 122 bp, Homo sapiens
ggcaatatttgctgagcatccaggaggcccccgtttattcatttatcatccagcaaacaccgcgaggcggctgccagctggggccgggctcggtgcgggctcccgggtgggggcgggcatca

SEQ ID NO: 108798 - DNA, 122 bp, Homo sapiens
cacagggtcaatctggagataaactcaccgctgcagggggcggggaaggaggtgggaacacgctcattgacaacttcatttccatgagaatggttgctgtggtgattgctgcgtcttcccat

SEQ ID NO: 108799 - DNA, 122 bp, Homo sapiens
caccttagccctctgatgccaggcctggcccgggcccctgcccgcactcttgggtcgggccgggcagcaacactcccctcagcaccccaagccctgactcggagtccaggaggctccgcact

SEQ ID NO: 108800 - DNA, 122 bp, Homo sapiens
tgtctggctaccggaaaggctgacgtgcagccgacgtacaaaagcggcgccggtgagggtcgcggaggggccggaacgcccacgtgtggcgggtggggacgggaggtggcgcagctgcttgg

SEQ ID NO: 108801 - DNA, 122 bp, Homo sapiens
gaaattttctgaatgctttgcagataaaattgatcagatgcaggccagattgccagctgccggggccgcgtgcgcctgtggaggccccaccagcgcggggcaccagcgcctcggggtccggg

SEQ ID NO: 108802 - DNA, 122 bp, Homo sapiens
ggagcctggagcctagaagaggaggagataaaaatcatcacagtgaggtgtctccagggccgagctgaggccctggcccaggaagtctcaaggctgtagcgtggctccatctttggggtcca

SEQ ID NO: 108803 - DNA, 122 bp, Homo sapiens
cgggggtcactggcagggctcggcgcgggggaagctggcaggggttgcggggggtgctggcgggggtcggggggagccggcggggctcggcgttgggggaactggcgggggttgcgggggga

SEQ ID NO: 108804 - DNA, 122 bp, Homo sapiens
tttgcggcatcaccgatcaaccgttcagtgtccgtaaaggcgacatagcttggagtggttcggtttccctgatcattggcaattatctcgacttttccgtgctggaaaacacccacacaaga

SEQ ID NO: 108805 - DNA, 122 bp, Homo sapiens
taggttttactctgctttgtaaagcagaaagaaagattgcaatttcaggagagaaagaagcgcaatcctttcaggacaggagagaaagaaaagcaatccttcaaaaataatttggccatgtg

SEQ ID NO: 108806 - DNA, 122 bp, Homo sapiens
ttgttttgctgtaaaggaatatctgggcaatttatacaaaaaagaagttcatttgtcttacggctttgcagtctctacaagaagcctagcaccagcatctcctcagcttctggtgaggtcct

SEQ ID NO: 108807 - DNA, 122 bp, Homo sapiens
tgttacagaagcaagcagataaccaagcaacttaagcagccttacagagcagtcagtcaacgtctctacaaagcctttttagatgtctgcccacagaaagaatccaaatttaattcctaagc

SEQ ID NO: 108808 - DNA, 122 bp, Homo sapiens
atgattcacatacacacatgaataacttaattctttgaatagttcttagaatgtccatcacgaaaacttaaaaatacattgagaaaacccctaaaacaatatagaatatactttgtactttt

SEQ ID NO: 108809 - DNA, 122 bp, Homo sapiens
tggaaagaggatgggtaccaggcctgagattgtgggagtggcattaccctctgggagtctcgggcagatcaccatcttgggctccccctgaccccatccctatccccagttgttagtgcatc

SEQ ID NO: 108810 - DNA, 122 bp, Homo sapiens
aaagaaatggctcagattgcagtaccaccggcccatttacagttgtgcctccctctttcccgcgtgtccaaaaccacccatcctaaaccaattccgggcccagctccaactccactagacct

SEQ ID NO: 108811 - DNA, 122 bp, Homo sapiens
aaagtcacaatgtgtattgtgaggtccgctttctgctgcaccaacaagagtgctttcacacgcacaggagggtcattaaagattaggccttttacggcagggagtggtggctcacacctgta

SEQ ID NO: 108812 - DNA, 122 bp, Homo sapiens
ccttaggcctccaagtgtaagccctgtcttccctctctgagctttgctgagacttagggccgcctgctttctctctgacccctgctttcacagcctcgagagggcaaggagggggccagacc

SEQ ID NO: 108813 - DNA, 122 bp, Homo sapiens
cttctctgatggctttcagcatcctctatctactgattattttgattgtgtacctctaggcggaaacctctcctgaaatgcagatttatgtagcatattgataatgcctacaggaaagtgtg

SEQ ID NO: 108814 - DNA, 122 bp, Homo sapiens
gtccgtggcgctgtgtccgcaggcgcaggggcgcaggtgttctggagatgatgtcgttcccgctgctgtgtccgtggtggtttgtccgcaggcgcaggtgttctgcagatgacgcccttccc

SEQ ID NO: 108815 - DNA, 122 bp, Homo sapiens
gcttcacacgcgtttgccgggagatgcggccgcttcgccctctgcagtcaagatgctgggcgcgtcgaggactgggtaagattcaggccgcttccttctgtgcgtctgggaccaaagctcag

SEQ ID NO: 108816 - DNA, 122 bp, Homo sapiens
tgctcacataggtctgtgtcctgaagcttggcagatgagcgaacttagccagcacacccccggccgtgaagcagggaggtgaagcggggagagcaacgagccccacccgggtcttgccagct

SEQ ID NO: 108817 - DNA, 122 bp, Homo sapiens
gtcaaagaaagaggtgacagacggcacctggaaaatcgggtcactcccacccgaatactgcgcttttccaacgggcttaagaaacggcacaccgggagattatatcccgcacctggctctga

SEQ ID NO: 108818 - DNA, 122 bp, Homo sapiens
gcatgaacccccggggaactgtgctcactgagcgagggagccccagaggctcacacagagcgggctgggtcttaagacgaggggacgatcaccgatgtgagttccggacactttgtccactc

SEQ ID NO: 108819 - DNA, 122 bp, Homo sapiens
catggctgcctggggaaggccctcctcaccacaaatgccagcagagcctcgggaccctggcgctcgcctgcctcccctgatggtattggccagaaccctggctcgccgagacactaacccca

SEQ ID NO: 108820 - DNA, 122 bp, Homo sapiens
gcaggaacccgcgctcggccccgcggttcctatccccagtctcgcagggctggggcgcctcggagccctttgtccataaaagagctgatttcctgggtagagccgggcgctgcagcttcccc

SEQ ID NO: 108821 - DNA, 122 bp, Homo sapiens
accgcggcgaccagctcaccgggttctgccgtggggagggagcagaggccaggatgcacgcgtccttctgaaggaacagggtctcggtctccggaaaggagaaagaatctagagttcatagc

SEQ ID NO: 108822 - DNA, 122 bp, Homo sapiens
cataggcggttcggcgcggaaagcgggaggtggaggggcggcttggggcaagcgcgcgcgcgcagtgcagaagccagccccccgcggctgaggtactcaaggtgcccaaaggcggggtagtg

SEQ ID NO: 108823 - DNA, 122 bp, Homo sapiens
ttgttttcccatctgtaacctcattaggatgtccacaccagcgggctccacacgcacatgcgctccggcaggttcccctcggggacacacacgcacactggcattgccccctggccacacgc

SEQ ID NO: 108824 - DNA, 122 bp, Homo sapiens
gaaacgctacccggccgtcttccgagctccgctgctggtggtggagttggcatctcatttcgcaggcgggagctggggatcgttcacgtgttactctgagatgaggccttcgccctgcacaa

SEQ ID NO: 108825 - DNA, 122 bp, Homo sapiens
aagactcctattctaaggtctccaggagcaaggccaaaaggaggttgtcagcagtatgcacgccgtgaaggaattccagacttaagcaacagactgagaagcatgaaaaaatgttttgtcaa

SEQ ID NO: 108826 - DNA, 122 bp, Homo sapiens
ccgatgagtcagagggagtgatactgatcaccatcgtcccagtgtgtctacggatctggacgcttgacacctggggatgcctgcatcccatattttcccatatgttgggctgatatttttaa

SEQ ID NO: 108827 - DNA, 122 bp, Homo sapiens
ccaagcttaaagaaatagcgccatttgtccttttcccctctaaatgcggctggccagagccggggcagtggcccaccttagcatcttcttcgtgtgtgtgtgtgtgtgtgcgcgtgtgtgtg

SEQ ID NO: 108828 - DNA, 122 bp, Homo sapiens
aaaacaccactcccagccccagtggacagagtcctcaagtggcagccctgcaactctgagcggatgccgagtcctcaccgggaacccgggcgcggctggtctgtgctattggcgcgggtagg

SEQ ID NO: 108829 - DNA, 122 bp, Homo sapiens
tgggcgacctgaaagtgctgcggattggccaagcccagcacggccagtccagtgaacacacgcagggggcccggatggcaccgtttggcgccgaacccctcggcctctctccgcctcccgcc

SEQ ID NO: 108830 - DNA, 122 bp, Homo sapiens
tctaccatcggcatggtgagcgacaagcccagggcctgctcccactatcttcatccttgccggcaccactgccacctcagcacttctccaagcccactacctgcactattacacccaactgg

SEQ ID NO: 108831 - DNA, 122 bp, Homo sapiens
actgtaaatgtctggctttgcctgcagcatttcaaggaagacttgactgctgtgcgttgccgccctccgccccgctcccctgcacttacccacccacctcgcctgcgctgatccgcagacgc

SEQ ID NO: 108832 - DNA, 122 bp, Homo sapiens
gaaagagggagctcaactcagactggggtgtacttaccaagccagcacacgtagacacagcgacagaggaggagctgtcatttctgataaatccctgatagaagcattgctgcacctcgggt

SEQ ID NO: 108833 - DNA, 122 bp, Homo sapiens
aatcggggaccctggacgcccagctccctttcccagcgcttcccgtgccctgaggaaagccgggactttgctgctgcttgttctccgtgtgatttgtctgggatctgacctttgctctgccc

SEQ ID NO: 108834 - DNA, 122 bp, Homo sapiens
gggggaggcgcaagcagctggaagcccacggcggaatgggccggtgctcggagagctgttcggatggcacgggagctgattgtcttgacgttaagttcctcggtgaggagagaacagaagtt

SEQ ID NO: 108835 - DNA, 122 bp, Homo sapiens
gtcattggagaatgggagtttcggaatctggctgccgagtgacagcatccctgaatcatgcgttccctgcttgtcccagctttccttccatcctccaccccagggaggatgcagggactggc

SEQ ID NO: 108836 - DNA, 122 bp, Homo sapiens
gcaagagcgcacctgagctgaggttgaagtggggggtagttttctaggccgttgccagggcgatgccacctgagctgggcgccaggcacctgtcgtctggggaacagtgcaggcggggacct

SEQ ID NO: 108837 - DNA, 122 bp, Homo sapiens
accacagaaaatggggaaggagggtaggttgtttagaagcctctggttgctaacggaaaccgaggcacgtggactgcaattatgcattttcattggtcctcaggatcacgcgacaggaagta

SEQ ID NO: 108838 - DNA, 122 bp, Homo sapiens
cgccgccgggcgatgcgcgaggcctgctgggctgacgtgacgtgaggctgggctgcggggcgccggaggcggaggcgggggcggggcgccgggaccgactagggcggggcgcggggtcgggg

SEQ ID NO: 108839 - DNA, 122 bp, Homo sapiens
gcgctgcaggactcctcttcctcctgagggatggtaaaggatggacacactgccccctcccgagcatttgagggtctctgccctgcccatctgttacctgtaaatgttcctttgaggagctg

SEQ ID NO: 108840 - DNA, 122 bp, Homo sapiens
agcgtttgcttggctgggctaccacctgcgctcggacggcgctcggagggtcctcgcccccggcctgcctacctggtgggtgaaaactaaatgattcattccttacaggccgcacagtgccg

SEQ ID NO: 108841 - DNA, 122 bp, Homo sapiens
gtgaagctgaagatgggagctctcatcttccctaacccagagccaaccttggcctctctgcgtcatttgctgccagtgccctgtgtttgtttttgggaagagagggattttcaggcatcccg

SEQ ID NO: 108842 - DNA, 122 bp, Homo sapiens
gtggctcttaagttagaccctggggtggaggtggagctgggctggtaccaacaccacaggcgttttaagcttcagtaggagcagggcctgaggtctgacctggaacgtgaagggcaaggaga

SEQ ID NO: 108843 - DNA, 122 bp, Homo sapiens
ccttctatggctacctcctcagtctcccatggtcctgcaggctccctcgccgtttctgagcggccataaacgtttgtccctcttgagacgtggtgtggtggataaaaagtagggctctgggg

SEQ ID NO: 108844 - DNA, 122 bp, Homo sapiens
caggtgtgattatatcacaatagtaagagataactaacttttgttcaggaacctccttatcgctgcttagaaatttgcatttctgaccatcagtagattgcaggtcctactcattagggcat

SEQ ID NO: 108845 - DNA, 122 bp, Homo sapiens
gctcccggaggtacgtggcgcccctgccaccctgagagctattttctattcccaggtggtcgcgttatcctcatcccccgccctgcaccttcgtcatcagctttgcctctcccgtgtccgtg

SEQ ID NO: 108846 - DNA, 122 bp, Homo sapiens
aaaaaaaaaaaaaaaaaaggctgccctttctagatcaggaggtccagcctctggaaacctcggagggctgcttgatctttcttttctaattcctgacaagttagaagacctttggcttctga

SEQ ID NO: 108847 - DNA, 122 bp, Homo sapiens
aaaggaatgcacagggaggaaatgccaatccacgcgaggaccacgaagcgaagcgaccaacgccaagccaagcatggaacgccaagtcaagagaccaacaccaagccaagcgacgaacgcca

SEQ ID NO: 108848 - DNA, 122 bp, Homo sapiens
gcggtgacacacacccgctcccaactgaccacgcccacacacgctggcttcagccgcacacgcacacagtagccacgcccccttatgctccagccttgccagcacccgccctcgccacgctg

SEQ ID NO: 108849 - DNA, 122 bp, Homo sapiens
gattaggcagcatagaggccacgtgttcattccctcaatcagaggctgattgatggacgacgggggggggggcgggggggagggtgacagcctctgattgacgggggggggggggggggcgg

SEQ ID NO: 108850 - DNA, 122 bp, Homo sapiens
ttcctgagaattgtgtttttctcatttcatgtggtaggacttctaatggaaaacccgcctcgcacttttcttggacgacatctcaaatgcccctcactttggcctctcgggcaccagacaac

SEQ ID NO: 108851 - DNA, 122 bp, Homo sapiens
gttgttcctgactgggcgcggtggctcatgcttataaggcacttgggaggcagaggctaacggatcacctgaggtcaggagttagagaccagcctggccaatatggtgaaaccttgtctcta

SEQ ID NO: 108852 - DNA, 122 bp, Homo sapiens
agcggtgcagtgacagggactgccactggggtcaaaggagcacagctccaggaagcagggcggccgaggcgccgctccgtgcgcgctccccggcgggaccccgcgcccctgcacgcccctcc

SEQ ID NO: 108853 - DNA, 122 bp, Homo sapiens
ctacagtctgctggccctgcatttttgataatcagtgcttggcatgtgtttccctgttatcgctacaagccaagtcccaccccttctcccaggctgccgtccaacagcccctccccaaaggc

SEQ ID NO: 108854 - DNA, 122 bp, Homo sapiens
ctctcaattaggaagttatggaggctttcctaggcatgtcaggatttcctgctagctccccgccccttccgccccaacacacggtgtctgcagcctgtgctttggggaattttgggaatttg

SEQ ID NO: 108855 - DNA, 122 bp, Homo sapiens
cctccgcccatccaggatttgctggggagctcctaggtgtcaggcgatgtcctacgagtccgacgcgcctttcacggagctgaagtgccaacaggtggaggtgggcagtcggcaaacagcca

SEQ ID NO: 108856 - DNA, 122 bp, Homo sapiens
atggttgtcattaccacgaataatggatgcgcccaggcggccaaatggaacattgatgcccggagtcaaagcccccgcacatctttcaggtgcaattatctgtggcctggcctcggcggtgt

SEQ ID NO: 108857 - DNA, 122 bp, Homo sapiens
ctggatacacccgtgacctcaaccaaggcccggagcggggccccaggtggaagtgaaggccgctgtgctgtgtgtggggacaacgcttcatgccagcattatggtgtccgcacatgtgaggg

SEQ ID NO: 108858 - DNA, 122 bp, Homo sapiens
cagggatttccaggcaccacatgtgctcctgggctcctcagcagcctcgaagatttgcaccgggactctcggctaccgaggtggagcagggcatgcgtatgtgtgtgtggtggcggggtatg

SEQ ID NO: 108859 - DNA, 122 bp, Homo sapiens
ctgcggacggcagggtaaggggcttctctgcccccgccccccactgcacacaaggccaggcgctctggggcccagcatccagggctcaaaaccacacccgccttggtgggatggcgcctcgc

SEQ ID NO: 108860 - DNA, 122 bp, Homo sapiens
gtgtattctacaagactggtagaactgtattcaaaatgagttgagtaccaggggaaaacgcgctctccattgtcaaaaagaaatggttggtagagctttgatttttttttttcctttaaaaa

SEQ ID NO: 108861 - DNA, 122 bp, Homo sapiens
ctttcctggttctccagcttgcagacagtatatggtaggacttttgggccttcatggtcacgtgagccaattcccgtaatacatctcctcttatatatctatataaatgctattggttctgt

SEQ ID NO: 108862 - DNA, 122 bp, Homo sapiens
cacccaacctagcagcaaaacagcaggaatttgagaaacagtgtcggggaagaggacagacgtgaaaactgtttattcatacagaggaggttccaagccacgaggcgcccgtcgaaaagcac

SEQ ID NO: 108863 - DNA, 122 bp, Homo sapiens
gactcttcaaggacaggaatcgctctcctccaactctttagacgtggatagttttgttctcgtgttttacgtggtgcctgatggtaatgcgattctttaacaccaagaatggggccgtcatc

SEQ ID NO: 108864 - DNA, 122 bp, Homo sapiens
ggcaaacaatatattgccaagaggtaggggagggaggagtgtcagagaaggaaaaaacaccgtagtttggagaattgaagacttgcaagaacacggggacaccggaaataaacctggccaga

SEQ ID NO: 108865 - DNA, 122 bp, Homo sapiens
ctatctggagctgtgcagcttcatcctgtgtgagaatggagctcagaatgaggagtgaggcgtccattcctgtcacctccagtggggtcacaggtgcttccccaatacttgagcttccatag

SEQ ID NO: 108866 - DNA, 122 bp, Homo sapiens
aagataaactggcatgcagtctacactgaggtacgggctgtgtgggccagcacagcatgccgtggtcctaagcagggaggtgtccttcctttcccctgcctgttggggctgcgcttccctgc

SEQ ID NO: 108867 - DNA, 122 bp, Homo sapiens
catcaccatcacacaccgggacacagagttacggacaagccgtgacacagagccaatgcccgggcagcagccatccccaaccacaggctcacacaacacacgtgatcctatgtgtgggcact

SEQ ID NO: 108868 - DNA, 122 bp, Homo sapiens
tctccttcagtaaagaaaaaatattaggaacaatgtgttcatatgaatataccactagatcgggatgcattttactggatattgtgtctacaattgttacccaaaggagtcctaatcatttt

SEQ ID NO: 108869 - DNA, 122 bp, Homo sapiens
agttcaggcttcaccgaatgcaggccctatttcaccatcctgggacttccaggtaggcaccgtgcaccccggggtagagccaggtgaaccaggtgagcagggaagggggcgtttgcgttaag

SEQ ID NO: 108870 - DNA, 122 bp, Homo sapiens
ttgccgcctcttccagtcagccagctcctcgtccgtgagagttttctgcacgtactccatcgctgacaaaagccccgccagctcactcacgatgctctggttggaaaccaaaacaaagtcag

SEQ ID NO: 108871 - DNA, 122 bp, Homo sapiens
ctgatgtcctgcagaacagaacaatgggagtggaaagggtggtttattttctcaagaaatcgactacatttcccaggcctgatatacatctcaatgggactgtcccacagaggaagagtctc

SEQ ID NO: 108872 - DNA, 122 bp, Homo sapiens
gcatctgcaaccattattatctgcttatacgttcacctcattccagaaacattcccgaggcgcggcaaacgtgtgcccatcccatccccggcaggacagggcttgtcaggcgctgggcaccg

SEQ ID NO: 108873 - DNA, 122 bp, Homo sapiens
gaggcgaatcagaggaagaatatcggcttctcttcccttttggatatttgcgtcattgaccgggactggcccactcttcctctgcctcacgcctgctttgaccttagaagacagacggcagc

SEQ ID NO: 108874 - DNA, 122 bp, Homo sapiens
gggacttcaaagctgaccgttaagaagccttagttttttttccccatgaaaagccacgtacggctctcactgtcatgagaatgccatgctgtgaggaagcccaagctagccgtgtggagaga

SEQ ID NO: 108875 - DNA, 122 bp, Homo sapiens
tccgtcgcggagagcattatgggattggtagtccagactgaggcgcagataggggttcctcgaagccacagaactacatttcccagcaagacccgcgcagcagggcacgcagactgtgtgcg

SEQ ID NO: 108876 - DNA, 122 bp, Homo sapiens
catcctggtggaactgctgttaccggtccacagcgcccaggccgagccggcagggctgggcgggaggcttgaaaaagaaggagaagcgttcacttctcctgggccacttggaagttcgaaat

SEQ ID NO: 108877 - DNA, 122 bp, Homo sapiens
ctaggtattatatgaactacatctcagaactgtattttctttctgaacaaatctatcaaacgtccctgagatattggagtatctatcttcttactcctcccaatgccttccccccagctact

SEQ ID NO: 108878 - DNA, 122 bp, Homo sapiens
ccgcgcatccaagattcccgcggacccgttgcaccgtatgcccgcgccagagacgctctgcgcccgcgctgggttccacccgccccggccacctgctgctttccgctcggcccctcccggga

SEQ ID NO: 108879 - DNA, 122 bp, Homo sapiens
agacctgctcataggcggcgctggttcccgggctctgggcgcccccgggggcagcttccgcgccctggaagccgctccaggactgggcacctgagcctatgttctggctgatgggcttcagc

SEQ ID NO: 108880 - DNA, 122 bp, Homo sapiens
gcagctggacgccgcacgccttgtccgctgcaacgctcatggggaggtgaggcccggccccgcttggaagggggacaccagggcctgaggcccaggccacgctcacacctctctgctctcct

SEQ ID NO: 108881 - DNA, 122 bp, Homo sapiens
gctctccattgtcaccgtgcgcagaggctactgggggaacaagatcggcaagctccacaccgtcccttgcaaggtgacaggccgctgcggctctgtgctggtgcccttcatccccgcgccca

SEQ ID NO: 108882 - DNA, 122 bp, Homo sapiens
ccgcgttagacgtggcctcctcgtgtttttcactaacacgttatggaaggttttactacccgaaggcataaaagcaccaccgtggggaagggccgttttgaataaacaactttattcaaaaa

SEQ ID NO: 108883 - DNA, 122 bp, Homo sapiens
ccaggcagaagccctcgaagcctctggcggcaaaaccctgcaggttcacgaactccttctcgccaccaggcagcacgttgtagagctccttggcatgcagcaccggcgtgaggcctgcccag

SEQ ID NO: 108884 - DNA, 122 bp, Homo sapiens
gccccaaccgggagcagccaatcaggaggctgaggtggtccttcccagcctgccagcactcggctcttgggggaagaaccccctccaccctcacacacttccttccaaggcgctaggggacc

SEQ ID NO: 108885 - DNA, 122 bp, Homo sapiens
tccattcctccacatcgtcaaggttttattcctggatcaaacaggaccatcaaacctcagcgtttgttctcctgaaaagcatatgcactgagttctgctctgtaactgtgttctttgtttct

SEQ ID NO: 108886 - DNA, 122 bp, Homo sapiens
tctgcggccacgcgcgctccgatggctgccaggagctgagctcagggtgggcggaggaagcggttagacgccccgaaactgagctgcacgtttctaaggtagggaggaggaagatgccccca

SEQ ID NO: 108887 - DNA, 122 bp, Homo sapiens
tgcctggcaaacacaaaggcggcagattactcagggcctgggaggggccaggcagcacggcgggtgagggggctaccacccttttgcaccagcacctggtcactgaggccggagtgcagggc

SEQ ID NO: 108888 - DNA, 122 bp, Homo sapiens
cacttttgcgggaagctagcgttgcatggaacattaggccgcacccgcctctccaggtcccggctgggctctggttgctcactcactgctgtgaacctggctccctccgaagcatggcaaag

SEQ ID NO: 108889 - DNA, 122 bp, Homo sapiens
cacttgcttaggactggtgacctctttatcccttccaatttctcccttttgcaatgggaacgtctatcctatgcctgtcccgctgttatattctggaaacatacaaagatcacttgttctgt

SEQ ID NO: 108890 - DNA, 122 bp, Homo sapiens
tgttagcaccagaaatagttatctgctaagaaaacgaaaagtgtaatgctggctttaccccgcgacgctttaaaaaactccaaaaacccagcgtgatggggggtaggtttgcctagacacag

SEQ ID NO: 108891 - DNA, 122 bp, Homo sapiens
atcagctcgatgtagatttgagaggtggctggtgatgctgtgtactcagcgccccgaactcggcctcttcagagtgcttcagatgttgattcattacaccttccaccagctcagggaggatg

SEQ ID NO: 108892 - DNA, 122 bp, Homo sapiens
ccttagagaaaaaacatgacaaatgttttcccttcagactttcaaaaggtggtagacgctcggttaatctcttcaggattgggagggcctacaacaaaaagatctagctgtgttaataaaga

SEQ ID NO: 108893 - DNA, 122 bp, Homo sapiens
cagatgtccgtggggaactgtaaggcatcttatagggatcctacagggggcatccactgccggccgacgacacgtggtggaaaagtagctattatttacatgcgtgttgcagtttttgataa

SEQ ID NO: 108894 - DNA, 122 bp, Homo sapiens
cagaattccacatgatcaggaggcacatgatgtcggcgtgcccagcaggggtgacggtgacgcccatggcctggccgaggtggtagccttttgctgctgtaaagcgactcgtgttccctttg

SEQ ID NO: 108895 - DNA, 122 bp, Homo sapiens
tcacactcatgttgtgggtctgtctgcctcaggagatgcggtttgcctttctgtctgagacgccccaaaccctgagctctccttcccaaggctggaaaaaaaatcgggaaaaacggcggaat

SEQ ID NO: 108896 - DNA, 122 bp, Homo sapiens
ccctgcaacgttagctcgcgaccccgtgtttgggagtgacaacagcgagtcagggcaaggcggccggcccagctcacctgcgggctgcagtcagcccggacgccgagacccgtgcctaaggc

SEQ ID NO: 108897 - DNA, 122 bp, Homo sapiens
ttggcctggggcccctccgtgccgtcgggatttgtgggacgcgctgaaggaagaggcgggcggctccgacagaaaacagccagagcgcaccactcacctgagtgccaggtaaacacctgggc

SEQ ID NO: 108898 - DNA, 122 bp, Homo sapiens
ggtgggtgtggacctggtctccctggggatactggaagggcctctgggagatatttagggcgcagcctggacatctataccatgcactggcaaacatacaaacaacaaaaaaacagggtatt

SEQ ID NO: 108899 - DNA, 122 bp, Homo sapiens
ctttcgtgagcctcccaagtgtgggggacgcccactcagagggacgccccggaggcagggcggttgtggggccgagtccgctcagaactaaggatggtgggtggagaagtggccgcttagag

SEQ ID NO: 108900 - DNA, 122 bp, Homo sapiens
ggacccagccccatctgggacacgccctgctgtcctgttctaggtcactgttggtgcttccggacgggcacgggacgcctggatagcggcactcaccgcagcctctggaatcggaaaatgac

SEQ ID NO: 108901 - DNA, 122 bp, Homo sapiens
tattattctcttctagcccactaacctccgccttcctgccagccatgtgatcagcaagtgcgcagcatccaagttaccaggggctggagttgagtccagcccctactaaggccttgtctgag

SEQ ID NO: 108902 - DNA, 122 bp, Homo sapiens
cattgccctggatgggctgccatcccttttcaggagttcaaaaccacatactgagcccatcggtccaaaggaccatcatctcatttgatccaagcacagggcaagggaccacatggacaatg

SEQ ID NO: 108903 - DNA, 122 bp, Homo sapiens
gaagccctgatcctggtcgggtccccgctccgtcctcagggtcggggcggtggaaagaggcggcagggcaggaagtcccgcccctgcctgggcttgggcactgccccatcccacttctgagg

SEQ ID NO: 108904 - DNA, 122 bp, Homo sapiens
ccctacacagccatcccgcctgaggaataggctgatgtctccaaatgtctggccttggggcgggccacccacattctgagcctgtgcctggagaagcttacagcttccaaagggcgctgaga

SEQ ID NO: 108905 - DNA, 122 bp, Homo sapiens
ctcaggcgatctacccgccttggcctctcaaagtgttgggattacaggcgtgagccaccgcgcctgacttgttaactgtgttcacaggagcattattgacagtagacaaaaggtggaagcaa

SEQ ID NO: 108906 - DNA, 122 bp, Homo sapiens
ttttcattctgaaattgcacaggatgacacatcccctgtctttctgtacattttagtcaacgtgccactgtggtgacatgcatcaatcaggcatctcggggcagcatgccctccagtgccag

SEQ ID NO: 108907 - DNA, 122 bp, Homo sapiens
agtaaaagcaagtgtattagtaaaataaaggaataaagaatggctactccataggcagagcggcccgagggctactggttacttgctgttatggttatttcttgattgtatgctaagcaagt

SEQ ID NO: 108908 - DNA, 122 bp, Homo sapiens
ctaaattactaagcgatgaccctcctgcagctttctaatccaaatcaccaaaaacaatctcgccgcccaactttgccaaaaagcaacttaacgccagccgactccgccatgttttcccagtg

SEQ ID NO: 108909 - DNA, 122 bp, Homo sapiens
agaattagaggcacaaaccaccacgcctggccaagcaagcatatttcagagatgatgaaccgagagaaaaacaaaaatcataaggtgtaatttattgttcttacatgtcaatatttgaggtg

SEQ ID NO: 108910 - DNA, 122 bp, Homo sapiens
ttcaggtgatttgccctcctctgcctcccaaggtgctgggattacaggtgtgagccactgcgcccagctggtgtatttgttatatacgtataaacttgcggagaaaggactgttttgaaact

SEQ ID NO: 108911 - DNA, 122 bp, Homo sapiens
ttatttgtaataaaatatacaaaaatcacttgccagcagtagaaaaaggaccgactataccgacctttctgattagtaaacagttgaatcaaggactctggattctggtttcaattgccctg

SEQ ID NO: 108912 - DNA, 122 bp, Homo sapiens
catggaaggaggacccatggacaccagtgcaagagctcatctttccggccttccccgcctcgtaccctcgccagctctggagtaacaagccctgcttccgctgtaaccttctttgacccctc

SEQ ID NO: 108913 - DNA, 122 bp, Homo sapiens
gagtgtaaagttatacatcttaatgtatgttaatgtatgtaggcgcctctagagttcctccgagatgcagccgcagagacctcatcagtccatgcccttaactccgtccgccttctctgaac

SEQ ID NO: 108914 - DNA, 122 bp, Homo sapiens
cgcttacacaaaattgtaaatgttttaatttccttcaagtttcctactgcctcttcagtccgctagcctgatactgcaatcagtgtcgcttcaggcaacttctcctttctccgccaaatttc

SEQ ID NO: 108915 - DNA, 122 bp, Homo sapiens
tttctcaaaattttctgggttccactttggtggtgggaatggctggagccagcagtaccacgtggccggggagccctgagctggtcctgtgcccatatggactccgctttctatttcacccc

SEQ ID NO: 108916 - DNA, 122 bp, Homo sapiens
gagggtgtaactctcatgaatggattaatgcctttcttgcaagagtccattggccagaaccgtgagctgaataaacatctgttgtttacaatttacccagtctgtggtattctgttacagca

SEQ ID NO: 108917 - DNA, 122 bp, Homo sapiens
caggctggagtgcagtggcgcgatctcagctcactggaacctccaccttccaggttcaagcgattctcctgcctcggcctcctgactagctggaactacaggcacccaccaccatgcccggc

SEQ ID NO: 108918 - DNA, 122 bp, Homo sapiens
cccatgggactccaaggttttggtgacagctcgcctgagccccagggggtgccgagattgcggcgaggagagccgcagcacaaggcaaatccacgcggttggtccccgctacgcccccgtag

SEQ ID NO: 108919 - DNA, 122 bp, Homo sapiens
gcccagaggtatttatgagcgtttattcgtctgatccgtttgtttgggaaaaagagcaggcgggcagggcaggccagagaccgactcctttctggagccagatccctacgaatctgtctgtg

SEQ ID NO: 108920 - DNA, 122 bp, Homo sapiens
acgtttcgtggtaccacatcactatcctccagccacaatggcctttctcttcctgcccagcgtccacttactatggtctttagcccatggctggcattcagtaagtactggggggtgacaga

SEQ ID NO: 108921 - DNA, 122 bp, Homo sapiens
attccccctcccttctcaccgaagatctaggtcttccaggctctctttctaaatcttccacgagagtcactgcctcctctccattttctggacattgttcctgtacccaattctggatctcc

SEQ ID NO: 108922 - DNA, 122 bp, Homo sapiens
agtgacaaagtgggacttgaacccaagcagcctgatgcaaagtctaggttctgaatctgtcgctgcatagctggcaacagcctggagcaagaataatgatccctcccccacccctgcccatg

SEQ ID NO: 108923 - DNA, 122 bp, Homo sapiens
gggcgcggggctgggccgctctggctggcgggcgagcagagaggcgcctcggtggcggtgcgctgtccagcatttcagcaagcggcggcagcacccgcggggaggcagagggtgcggggccg

SEQ ID NO: 108924 - DNA, 122 bp, Homo sapiens
caaagtgctgggactacagatgtgagccaataaaccacttcaaaataaacctttcttgtccgggcgaggtagctcacacttgtaatcccagcacaccaggaggccgaggtgggtggattacc

SEQ ID NO: 108925 - DNA, 122 bp, Homo sapiens
tccggaagagccacggtgtgaggctggcatccctggggcacgacacaaccaggatgtagacgaaatagatgcaatatctggaggttctcctataggtgtctctggcctcctggacacttcac

SEQ ID NO: 108926 - DNA, 122 bp, Homo sapiens
atgaaaggcacagcgttttttgacctcgacttcaggcctgaccccccactctctcggtcccgtacctcttctgcgggatgtaactctgtgggaaccgctcctttattctgatgattaactgt

SEQ ID NO: 108927 - DNA, 122 bp, Homo sapiens
agggctggttatcacaagagggacgagataatgctgctcccacaaacacactcgctttcccgggggtgatgtggcaccattgagctatcgtggtaaaccgcagctgacatggccaccccgac

SEQ ID NO: 108928 - DNA, 122 bp, Homo sapiens
ggctgggctgtggggggccgggtcctgggctgggagtggattctcggtgcttccccccagcggctgccacagtggcaacccggggctgaatcctgtgagaccttccctgactcagtgccctg

SEQ ID NO: 108929 - DNA, 122 bp, Homo sapiens
ctccagcctgtagttcatggtggtaaacccaacaaatgacctttcacttttcctccttcccgctttggtcctctgagaaatacaaatcctaagaagaatgaatggccattttgcctagtcct

SEQ ID NO: 108930 - DNA, 122 bp, Homo sapiens
gaggcccagcatggcgcccactgcaattgctcatatgggtgtgacctgagttcacagggtcgccagagtctggcagcttgggatgcatggtatgcagaaggctgctggatcctctcttatat

SEQ ID NO: 108931 - DNA, 122 bp, Homo sapiens
gccgcacgggccgggggatgcacgctctggaggtgaggaccaggcaggagggcctcgcctcgaggcgagatggccgcacggtctctagcccgcagggctctcagagtcgcaggcggtgacgc

SEQ ID NO: 108932 - DNA, 122 bp, Homo sapiens
gattcgggggtcaagggccctccctcaagtttctccaggagccagggatagatagctgggcgattccgaggtccaggggaagggaaatggcccttctctggctctcagctcagggccccccg

SEQ ID NO: 108933 - DNA, 122 bp, Homo sapiens
cggcaggggggtgtattggttataatttgtggctcgttgcgttcttgctgggattcgtgacgagtatctggttctttaacaagtcaatgcttttgttttttagtgcgttcaagattcaactt

SEQ ID NO: 108934 - DNA, 122 bp, Homo sapiens
gggcttggcggcccggctcccatggcgcccgcgcgcttcccgccgaggcagccagcgcagcgcccgcagtaaccggagcccgcgttctagctcagtgagaatcgctaattattaggtcttcc

SEQ ID NO: 108935 - DNA, 122 bp, Homo sapiens
agaaggcggcttcaaatgaacatttgcaaaatgtaattaggaaggtaaatttcctggcaacgaagattacataatgcgtcccacagccaaacacccacctggtggaatgtggttggaaaact

SEQ ID NO: 108936 - DNA, 122 bp, Homo sapiens
ccccagaatgctgagttgttttctattgaacttagaacacgaacccagcctttttctcaacgacatccttctcccaagacacaatgtggcccctcatgccaacgtgtgtgaactctactccc

SEQ ID NO: 108937 - DNA, 122 bp, Homo sapiens
gagattctaccaactcagcctcccaagtagctgggaccacaggtgcaagccacccacgcccggctagttttttgtatttttttgtagggactgggtttatccaagttgcccaggctggtctc

SEQ ID NO: 108938 - DNA, 122 bp, Homo sapiens
tcttccaatctaattaccggtgcatgcagcccccagtcacgtaccccctgcttgctcaatcgatcaagaccctctcttgcgcgccccctgagagttgtgagcccttaaaaaagacaggaatt

SEQ ID NO: 108939 - DNA, 122 bp, Homo sapiens
tgctcggtccctgcaaagcccccgggagcgtttctactctcccctgagcccacgccatcccgtcactcctaggaaacttttcgcgcagaaactcctggagaacagccccggccgccaggtac

SEQ ID NO: 108940 - DNA, 122 bp, Homo sapiens
ttgacagtagctgagaggcacatgggattagcgacagcggggaaagacacatccggacctcgcaggggctagtcggccgaagggccgcggccgcccggcggtcatttctcttcacgtccctc

SEQ ID NO: 108941 - DNA, 122 bp, Homo sapiens
cccatcgtggccacaaacatggccaggaagcccagcaccagggagaccaccattagggctcgagtggcctgcaaggccgctgcgggcgaggggaaagggcgccgtcattgctggaaatgcag

SEQ ID NO: 108942 - DNA, 122 bp, Homo sapiens
gtcgggacgggaatgcttcccgctgaggccggtttctgcggcctcagcgcgctccgcctccgctctggatagtccctgcctcttcagttgcgccttttgagcagaaccccgccttatgctga

SEQ ID NO: 108943 - DNA, 122 bp, Homo sapiens
gagtcgaagaagagaaagaaccgaagagacagcggcggcggcgcagagcccggggccgcgcgatgaagctcccacatgcccgcagctgcccggcccggccggcgagctaatcatccacccca

SEQ ID NO: 108944 - DNA, 122 bp, Homo sapiens
agatggtcttcctttgcattaattattttcatgcgctttgcactcagctacactggtattcggagaaaaatgctgccatgacaactgccacaacagatggtatttgatcagtctctaagcta

SEQ ID NO: 108945 - DNA, 122 bp, Homo sapiens
tcttcggtccctggcccagctaatccagactccctggggaccccttgacttggaaagtctcgcgcgcgcccgcggcccctggctgcgggctgcctcgagaaaagttggcgacgctcccgtcg

SEQ ID NO: 108946 - DNA, 122 bp, Homo sapiens
cattattacagggaaaccttgggagagagaagctcagcttaaaataacagtgggaggagtcggggaatctaggacagacacactcgtgtactgtacaacggggtcaagtctcaatgtcgggg

SEQ ID NO: 108947 - DNA, 122 bp, Homo sapiens
acaacaggtgtgttcttctcgtcctctttagttctcaggctgaagcctcagatcctgaatcggccaccccgggctcgcagagggggccctctcccctcggggcagcagctgtcctcctcttc

SEQ ID NO: 108948 - DNA, 122 bp, Homo sapiens
aagagggtagattctgacttctttcctgtacactttgtttagcctcttggttgtattttccgagacccaggagtttctacatctggccaaattttctgtctggatacagatactgtatctca

SEQ ID NO: 108949 - DNA, 122 bp, Homo sapiens
caccatggcatattggccgtagtgttcacgcagtcatggtgaatcaccatggcgtattggcggtagtgttcatatagtcatggtgaatcagcatggtgtattggcgctagtgttcatatagt

SEQ ID NO: 108950 - DNA, 122 bp, Homo sapiens
tgtgtgcgcacgcattcgtgtgtgtgcgtgtgcatgtgtgtgtgcatgtgtgtgcatgtgcgctcacacacgtgagcatctgtgtatgcatccagagggaagagtgagtcgagctagtgggg

SEQ ID NO: 108951 - DNA, 122 bp, Homo sapiens
gtggagcaatcaaggcaccaggaaacactgtgctaccctgcaagtcactatcctggtgtccgctcctggcaaccaccaccagccacttaacttccccgtgccttgcttttctcacctatgaa

SEQ ID NO: 108952 - DNA, 122 bp, Homo sapiens
ccttttcgcgctcctactccgagctcaaggagcagcagcagcgcgcggccagccccgagccggccctgcaggaggacagcacgcactcggccacagccaccgaggacagctcgcagggcccc

SEQ ID NO: 108953 - DNA, 122 bp, Homo sapiens
actataatctactgactgactgttactagttcagcacatctatgatctacatcgcatgttcgtaattaatacagaattggaaatgactccttgttagtatgcccaaaataattttgaattgt

SEQ ID NO: 108954 - DNA, 122 bp, Homo sapiens
attgagggcctcattaccgggccgagaattggaagcctcttttccaagctgttcatatagcggagcctctgtaccgggctgcatagaaacgtaatttatagactcgtttacaggctgcctgg

SEQ ID NO: 108955 - DNA, 122 bp, Homo sapiens
gatcgaattccggtgatgcgagttgttctccgtctataaatacgcctcgcccgagctgtgcggtaggcattgaggcagccagcgcaggggcttctgctgagggggcaggcggagcttgagga

SEQ ID NO: 108956 - DNA, 122 bp, Homo sapiens
ctttcctaactgtcttggctttagcaaggagcttctcgaatttagagcctgactgccttacgactgtaaaggggagatgattattaggattcagtaagatacacataacatcatttagtcca

SEQ ID NO: 108957 - DNA, 122 bp, Homo sapiens
cttgatttaaaaaaaaattttcaacaagagaaaaccaaggctgctaactgttgctgcagtcgttggaacaacaggatttctttgaatgttctctgtatcaacttatcccctcaaactctcac

SEQ ID NO: 108958 - DNA, 122 bp, Homo sapiens
caggcggcggggtgaaggtgtccagggcctgaggcggcaaagtgccgccgccgtcagccccgactgccacccaccaggcacccggcccatccccggctcccatctagggatccacacccggg

SEQ ID NO: 108959 - DNA, 122 bp, Homo sapiens
tttggaattcagacacggtgaggaacgagctggttcatagtccagctcaaacgggcagcccgggggcaaatgaagacccttgagactgccatcccagccctgagctggattccccataggct

SEQ ID NO: 108960 - DNA, 122 bp, Homo sapiens
gccttggacagctacagacctgcaattcctttaatccctttccttgtgtcaggcataatccgggaacctgagttgattctgctctccctctgctcaaagtccagctctggattgttgtgttg

SEQ ID NO: 108961 - DNA, 122 bp, Homo sapiens
tgacttccctacatagagccctgtgcagacttaactgagcccctgtgacactggatgtaccgcccctccccattctgggagtgcctcaggccccggccaggttttactgggctcaggtaaaa

SEQ ID NO: 108962 - DNA, 122 bp, Homo sapiens
tcgcgagcccccgcctcctccgcccccatgaacccccttcccacaagggggttcccactgcgcacgcgcagtgtttaacggccggtcaggaacccaacaattagtcccttctcgtccgagag

SEQ ID NO: 108963 - DNA, 122 bp, Homo sapiens
ggtatcttattgccacaaagagtctgttccatcagtcttgtgatctctattttaacggctcgtcacgtgtctaagccacagaagggaggggttataatgaggcatgtctgactctgccattg

SEQ ID NO: 108964 - DNA, 122 bp, Homo sapiens
gaccggctgggtgcagtggctcacgcctgtaatcccagctctttgggaggctgaggcgggcggatcaggagttcaaggtcaggagttgaaggccagcctggccaacatggcgaaaccccatc

SEQ ID NO: 108965 - DNA, 122 bp, Homo sapiens
agtctgactgttgccacggtgatgaagggagacatccaagtgctggtttcagtactgaggcgaatacagggaatttcaacaggctccaggtcttactatgcagcctgaagtgggaccatccc

SEQ ID NO: 108966 - DNA, 122 bp, Homo sapiens
ggccagtgaggcctgggcgcctccgggcccaacctcgagctcgccatttttgaacccaagcggggaaggttggtgctcatgctatagattatgttaaaggttcctttaagcactttaataca

SEQ ID NO: 108967 - DNA, 122 bp, Homo sapiens
gagccgccgattggctaggagcacttgagcagcggaagcagctggctcgcgcggggactgcggtgagggggcgagccgtgaagatggcggcagtggtggaggtggaggttggaggtggtgct

SEQ ID NO: 108968 - DNA, 122 bp, Homo sapiens
gtccgtgctggtgacacagcagtgaccaacgacagccccgtgttgtcctcccggagcttacggttcagtaagggacacagacacgttcccagtgctgacccagaatgggcaggtctgggatg

SEQ ID NO: 108969 - DNA, 122 bp, Homo sapiens
tgaccttagtttcagttcttatatttggaaaatgaaaatctttcaaattgtaactaacttcgtagctgtaattcctttgtgagtcatttattttgctgatctttgtgctatatttctgtagc

SEQ ID NO: 108970 - DNA, 122 bp, Homo sapiens
gagctcacccgaagcccccgcagcctccaggaagcgtggagatcattgttccgatggagacggttcctgctgtggacgctcagtgagtgttttctccctgtgatgtttcctggctcaggtga

SEQ ID NO: 108971 - DNA, 122 bp, Homo sapiens
tggttctcttttgttagttttattccggtcatgccaatgagcacagattcacagcccaggcggcccgctcggaatcccaggccggctggggaccggtgcacttgggctccgcgccccctcga

SEQ ID NO: 108972 - DNA, 122 bp, Homo sapiens
cggcctccaggggccggtcccgcgccaagccgaggtccacagcacagcccggctcacactcggtgaccacaatgaaggactccatgcccaggtggatgctcaaggatgagaggccccgcagg

SEQ ID NO: 108973 - DNA, 122 bp, Homo sapiens
gccgagtcagttgtgcccagaaattggcagttgtccccatcgacggagggtcaaggtggtcggacggggagcctggggagataatcccatctccacggtccggttaaacacacagcaccgca

SEQ ID NO: 108974 - DNA, 122 bp, Homo sapiens
ttgggggctcaaaggcgctcacttaggcagcccctttgagcgattagccagtcgccggagcgcttcgaggccttggcccgaacttacgcccaactcttgactgagtgcctggtgctctcgtg

SEQ ID NO: 108975 - DNA, 122 bp, Homo sapiens
cagcacctggctcagcaggaagcatgtaaaaggcccccaggccaggacaggaggggcctccgttgcaagctattttcactgctactacatatactgctcagtgcctcactctgtcttgcttt

SEQ ID NO: 108976 - DNA, 122 bp, Homo sapiens
ttgatgctgagtttcccgggcagcaggactgggaggttgagtgggggttttggctcagaccgggagcagagcggcgggtggggagcggcaggcgggcagggtccccggaggcccccgggctc

SEQ ID NO: 108977 - DNA, 122 bp, Homo sapiens
ccacgcctgctcggttttgccacatatgccgctgtgctgccggccttgaatgtgtatgagcggctcgtgctggggtcagcggaggctcgctcttcttcaccctgtgttacgtccaggaaaca

SEQ ID NO: 108978 - DNA, 122 bp, Homo sapiens
ctcccactcaggactgacacaggttggagtgggcactgctggggccacacagcaggtgcacggcagggtgggggcggcaggtggggctccctccgaacggtggacgcggacagggcctcctt

SEQ ID NO: 108979 - DNA, 122 bp, Homo sapiens
gtgggctgttctaagccacgaggtttgtggtaatactgttatacaataatagatgactagcgcacttccttttctgctcccacaccccttttagaatctctcccagatctacttcactccca

SEQ ID NO: 108980 - DNA, 122 bp, Homo sapiens
ccacagaaaggagtaagaaagacacagaccatctggctcctcgcctcagctggtgtggggcggtgtggaggcctgaaggctagaggctggactcctgctctccagcatcgctgactggaaca

SEQ ID NO: 108981 - DNA, 122 bp, Homo sapiens
cgtcgatcgatttttcaccgagcgtcgacggggaagggatactagggctgctcacatttccgatacattctgcgggtcaggttccggctgaaaggagggaccccttcccagcaagaagctcc

SEQ ID NO: 108982 - DNA, 122 bp, Homo sapiens
gcagcccaggagtgggtgccagccgaagtcaacaggcaggcgggtaaatgcgtcccagcgcggggagggcttggagaaaggcctggagcgtgacccctgcgtaaagaagaaaagtggccgtt

SEQ ID NO: 108983 - DNA, 122 bp, Homo sapiens
gtattgggactcgctggcgtagggatgctgcgctcaagggtgcgacgccaactgggctcgcgcaggcgcgcgccgtcgagcgggagcgggacacctgggctcctccttggcccctccccgca

SEQ ID NO: 108984 - DNA, 122 bp, Homo sapiens
tcgccgccccccgcgccgccgggctagggcgatgcgggcgcccccggcgggcggccccggcgggcaccatgagccctctgctccgccgcctgctgctcgccgcactcctgcagctggccccc

SEQ ID NO: 108985 - DNA, 122 bp, Homo sapiens
tgttttccagatgctaaggcacagaatataatgccccattgccttggactctgagtttggcgtccagtctgtcagactatgttaactcacccatatatgtaaacacattaacaagcaccgtt

SEQ ID NO: 108986 - DNA, 122 bp, Homo sapiens
tttacaaggtattgcacccagtgaaccatgaggtaagagagcaagggaagagtttcttctcggtgtctctaggactttgcccagcagctggccccgccccctccagcgctctccgcctagcc

SEQ ID NO: 108987 - DNA, 122 bp, Homo sapiens
aatcatctcccaccaggcctctcctccaacactggggattacaattcacacatgagatttcggcagggacacaaatccaaaccatatcaccatgtctttaagtgaagtaggaaagacacaag

SEQ ID NO: 108988 - DNA, 122 bp, Homo sapiens
tgcccaggagagaggggtgggactcctggtgttcacttcgtagctgttctgtggtgggagcgcagtgggagccgcagggcatcggggtcttcgaaggaaagcccgtggattatgcatccagg

SEQ ID NO: 108989 - DNA, 122 bp, Homo sapiens
cggcacccaggaagccaggttttctatcaggccatgccttccccaggaggcctgcctggccggagggaggaggggctgggggcagggactcctgggtctctggggagaaggaggctttggat

SEQ ID NO: 108990 - DNA, 122 bp, Homo sapiens
gacttttttcttcacaaacaggaagttttcccttctcaaggagtacacaaagcaagaggccggctcccccagaatgtgtgacagtgagtgggaggcagtcccggcctccaggatgtgcttgt

SEQ ID NO: 108991 - DNA, 122 bp, Homo sapiens
gtcaacgatatcttcgagcgcatcgctggcgaggcttcccgcctggcgcattacaacaagcgctccaccatcacctccagggagatccagacggccgtacgcctgctgctgcccggggagct

SEQ ID NO: 108992 - DNA, 122 bp, Homo sapiens
tctgaggataggaagcagcagagcacacgcaggtgagggcagagcggggaacccaagtcccgaggaagtttctcagtaagcgaggccccgcgctctgggagggcacccccaggaagcccaca

SEQ ID NO: 108993 - DNA, 122 bp, Homo sapiens
ggaccttgctcaaagaccatgaagagtctcaaggcactgacagcacagcatgaacccaagcggggcccttcaaggcaacggacgaccgcagggtcagaccctacccaagccggacttgcgac

SEQ ID NO: 108994 - DNA, 122 bp, Homo sapiens
taaagcgagcaggggcgccccttcctgcacctgggagtagagggcagttcctctgtatgacgggggagaggccttaacattcgcggtcttacctggttccccgcgtgcagagccggcttggt

SEQ ID NO: 108995 - DNA, 122 bp, Homo sapiens
ggtaagtggaaaggagtccggcagggggcccgcagtggcctgcacaggggaactgggtagcgagagagttccaggcaattccgggggctgccccacagaagcaggtggggatcgacagtggc

SEQ ID NO: 108996 - DNA, 122 bp, Homo sapiens
aggatgatgtttggcagatgataagcaccatatttgttatgggaaggtaactatctaaaccgcaaatcacactctgccacctaaaccagaagtaaggcagagcatatttctccacagttaat

SEQ ID NO: 108997 - DNA, 122 bp, Homo sapiens
tgagtaaacacaccagtggtttcatcagaggggaactcactactcaggaggtgacggtgacgtggtgccggtccctgaagtacgcgcacaagctccggaggttgcgggagctgagggaggaa

SEQ ID NO: 108998 - DNA, 122 bp, Homo sapiens
agcaactgacactgactaacaacaactaactaactactcgccgcggccgagtccaccgcgcgctcccggccgctcgccgcccgcccagcccaccagcctgcccgcctcctctcggccccgcg

SEQ ID NO: 108999 - DNA, 122 bp, Homo sapiens
catcgtcaggacacaaggggacacctggggacgcgccgcagcccctctgcctcctagacgcggcaggtgcattcctctctgccacatatggtaacatatttgctctggggattaagatgtgg

SEQ ID NO: 109000 - DNA, 122 bp, Homo sapiens
gggacgtgagcgggacctgctggcgccttgtttttgtggcatggggttcgggaagctcagcgcgtgctccctcgctaacatctaggcatcctcggactgagcctccagcactacgcgcggta

SEQ ID NO: 109001 - DNA, 122 bp, Homo sapiens
tctccagaactcggtttgagcaacaaacttgagacaacctttgtctggaagcaagtcaagcgcttaataatgcatgctgggatttgtagtttccctgctttcagagtttagtggctccatcc

SEQ ID NO: 109002 - DNA, 122 bp, Homo sapiens
aaacttctaaaccacaaaataaaacgtgattggttcccctgtgagcaatacaatagcacccgttaaaggcttacagttaaaataaagaggcaaagtaattcaaagagtatgggatctgctcc

SEQ ID NO: 109003 - DNA, 122 bp, Homo sapiens
gcaagctcgggtcctcatgatggggacctcggcctcttgcaggtcgggggccgggggcagcggcgctgtggggagggactgggtgagcatggctggtcctggtgggctcaggccgtccgtcc

SEQ ID NO: 109004 - DNA, 122 bp, Homo sapiens
aggagccgccctgacggccctgcgcgaggtagtctctgagcctgagcgtgagcctgagcgcgcacggggcgcgtgctcgccaagagctggcgcagatttccgaagtgccacgaaacagccgc

SEQ ID NO: 109005 - DNA, 122 bp, Homo sapiens
gtctcggggagccgcgtggggtacagggctggagctttcctccagccttgcggcattatacgctgaacccggcccggatggtggaggcgggcacggactaccaaccttatctcacatatggg

SEQ ID NO: 109006 - DNA, 122 bp, Homo sapiens
aactctaatacacatagcataacgataagtatgtcttttcctgggtcttggcgttctaaacgcagctgcgacaatatcttgccttcatagagcgtgcactttgtgcaaaaccttcatgaatc

SEQ ID NO: 109007 - DNA, 122 bp, Homo sapiens
ctctcactatcttaaggtggttcgcctgagccttcttaaagtggtaccccaggccgggcgcggtggctcacgcctgtaatcccagcactttgggaagccaaggcaggtggatcacctgaggt

SEQ ID NO: 109008 - DNA, 122 bp, Homo sapiens
gccgccatgcctgactggtttttgtattttttggtggagacggggtttcgccgtgttggccgggctggtctccagcttgtgaccacaagtgatcttccagcctctgcctcccaaggtgccgg

SEQ ID NO: 109009 - DNA, 122 bp, Homo sapiens
actctgagtcagccctctctgctggggaaagcagcaggaagttcagtgagtcagcgctgccggtgacagcgggtgccggcctggggcagccaggaagacaggcctccgaagcgtctctcctg

SEQ ID NO: 109010 - DNA, 122 bp, Homo sapiens
cgccagcctcggcaacaaagctagaccctgtctctaaaaaaataaaataacaataaagtgcggctcataggttgagatgcaagagtttcagtttgatcaccaagagtctcctacctaaagtt

SEQ ID NO: 109011 - DNA, 122 bp, Homo sapiens
caatgcagaagataatgaagttgaaccttgaaagcagtactccctaacttccaatttctacgacataaaaaaaatgggaagcatgttatataaaccattagtgttggacagttttaaaagtc

SEQ ID NO: 109012 - DNA, 122 bp, Homo sapiens
agacaccactggacttcctccaggccccggtaggcccgcttcagaccccggggaaggcagcggcaggactccaggttgaggtagagcaggcccgggcagctgctgatcacagagctgtgggg

SEQ ID NO: 109013 - DNA, 122 bp, Homo sapiens
gcgcgcacgcggccccagtcggggtgctggagcccaagctggaagagttggagcacaggacgggcgggctgctccccaactctgggggccctccagagtcgggctggaggcagaggctgtgc

SEQ ID NO: 109014 - DNA, 122 bp, Homo sapiens
ggcacttctgtgttctctggacctcagtgtcctcctctgcaaaatcgggagaactggactcgttctgcgaggcgccttccagctctgagcctgtaggcttagggcggggatcatccacgcta

SEQ ID NO: 109015 - DNA, 122 bp, Homo sapiens
ggatggcaggcatgagccaccaccgcacccggcctatatacattttgcttatctatctctcgatggatacagattacagaatttacagaataatgttgctatgagcaagcctatacaaatac

SEQ ID NO: 109016 - DNA, 122 bp, Homo sapiens
atggagtgccgggatggagtgccgggatgagagccgggatggagcgccaggatggagtgccgggatggagcgccgggatgagtgccgggatggagcgccgggatggagtgccaggatggagt

SEQ ID NO: 109017 - DNA, 122 bp, Homo sapiens
agccgcgagggggcgtggccgggccgggccgtaccaagagcgcaaatttgcagggggaagcgcggggctccgggaatgcacgcgcggctcgagtgggcggggcggcggcccaatggccacgc

SEQ ID NO: 109018 - DNA, 122 bp, Homo sapiens
accaattggtggcactcatgattttttaagcaatttcaaccactggtaaccatctcctcccgaggggactctcctgtttgcaggcccaagtggaagcaagatgccaataaatagacagttat

SEQ ID NO: 109019 - DNA, 122 bp, Homo sapiens
gagcgactagacatggcgcccgataccctgcagaagcaggcagaccactgcaacgacggccgcatggcgtccaagcacatgaaggaactcagcaccggtctcttctttgccattctggtcaa

SEQ ID NO: 109020 - DNA, 122 bp, Homo sapiens
atgccccgagtggtaatttcgcttcccggcacgcgaaaaatgaatgggcgccatcttgcgcgtggcatcttgggaaatgtagtttacaggctcaataacaagcacggtccaagaagggaggg

SEQ ID NO: 109021 - DNA, 122 bp, Homo sapiens
gggaacccagtgggactcgggggtgaggggttggtggttgctgcggtgcggtctctgttccggggaatgcagccgcaactcccactccctgatccgatcctgggcctagggtaaacagcccc

SEQ ID NO: 109022 - DNA, 122 bp, Homo sapiens
ccagtagtgtagtgcggtgtgcttttacgtgatggcgggtgggcagcgggcggcgggctccgcgcagccgtctgtccttgatctgcccgcggcggcccgtgttgtgttttgtgctgtgtcca

SEQ ID NO: 109023 - DNA, 122 bp, Homo sapiens
ttggcatgaataaagtgatcacttatgaatcaagtgcttggaactgcaatggcccagagacgcagctttctgcaaagtccacacctactaggttagcaaggctctagttatcttagggaggt

SEQ ID NO: 109024 - DNA, 122 bp, Homo sapiens
cacccagcgtctgcagcgaaggactcgcgtgggagcgagaaatgtccctgcccagtgccccgcgcgctggatcgcgggggcgagtctgagggtggagaggccgccgggtggaggcgcgcagg

SEQ ID NO: 109025 - DNA, 122 bp, Homo sapiens
tagtgtttattaacttctggctggtggcccaacacattcctctgcaatgtgttggctctccgcagtttttgcattgtgtgggatttgaataaacttcaataccccagagaaggtccagtctt

SEQ ID NO: 109026 - DNA, 122 bp, Homo sapiens
cgaaacgagggagctttccctctgtcccccagcctttggactgtcaccaaacaagccattcgttcatcaaaaatacttattaagcgcctaccatgtgcctgacaagggagatgtaacggtga

SEQ ID NO: 109027 - DNA, 122 bp, Homo sapiens
gaacctgctgacctatgcactccagcttcttctgggggcagctctccaggaccagcagtccgagctcctgggccgccgcgcagtaggggtagccagtggcccccttggcctcagggttctgg

SEQ ID NO: 109028 - DNA, 122 bp, Homo sapiens
agatgaggccgcagggtggtcctgccagcaacagcagcctcctcttccccacctctccagcgcctgcaggctctgcccacagcccacttgcaggaggccgcttgagccctgaggtggggcct

SEQ ID NO: 109029 - DNA, 122 bp, Homo sapiens
cgccgggtggcactacgggagggagaaaaatgtgtcaccgccgtctccccaccgtttacacgcacaaaatcccagcctcaagggcagaacattttaaatgacccacccatcctagagatgcg

SEQ ID NO: 109030 - DNA, 122 bp, Homo sapiens
gccctgtggcaggagcaggcttggcgcgtgctccagacagaaaggaggccagccatgcggcgtgggagaaggaagcgcaacctcatgatgcttttggatgcgggtaaaataaaccccaactc

SEQ ID NO: 109031 - DNA, 122 bp, Homo sapiens
ggcatggacgactgcaagagaggaagccgaggcggggatgaggatggcttggcactggcccgcaggtgccccttgctgcctgcaccattgcttggcacttgctgcaggcgcacctggagctg

SEQ ID NO: 109032 - DNA, 122 bp, Homo sapiens
aactgggccccacagaaaccagtgtagatgaaagatcagcctttcaggttttacatccctcgaataccatattttccatcagcaattggttgaaaaaatctgcctgtaagtggatccatgca

SEQ ID NO: 109033 - DNA, 122 bp, Homo sapiens
cggaaggattttaagtcaaaacacacacggctacagggaatacgatgagtcatgttccgccggggctgagccgctccggggaatcagcagcagaaatgaatgagagtgaacgcctcctccag

SEQ ID NO: 109034 - DNA, 122 bp, Homo sapiens
gtttccggccagaggcatgctgggagcgtcacatgcaaattgagcgtgcacccagcgttccgccctttctacgctgggccggttatcgacccggcccagtgcgcaggcgcgggaaagttgaa

SEQ ID NO: 109035 - DNA, 122 bp, Homo sapiens
acagggcacccagatgtgctgctcaagggagccccaagggctggaagggggttgtgaaaccgaaataaactgccaagcctggtctgtcctccagggtgcaaaggaagagtgcagtggccagc

SEQ ID NO: 109036 - DNA, 122 bp, Homo sapiens
catcggaaagaaagaaagagagagagagagagagagagagagagagagagagagagagaacgaacgaacacgaaccagagaaccacgtagcctactgagcatgcccaggcccctgctagacc

SEQ ID NO: 109037 - DNA, 122 bp, Homo sapiens
gccagttcaaaggttacttttttccaactgtcagaatttataaccaactcaccttgcagccgttgaaggaaaagaggcttgaatatttttgccagaaagttgactggatggcattcattaag

SEQ ID NO: 109038 - DNA, 122 bp, Homo sapiens
aacaaaacacacataaattgctgggccagagtatttctccgctgagagcacagttcataccgtgtggcagattccccgcgcaggcggggcgcgggggcaggggagaggcttgtgtgtccgcg

SEQ ID NO: 109039 - DNA, 122 bp, Homo sapiens
gggacgccggggcttcgtggcgcctggcgaggcagccgccccctgagccaggtccccgcccgcctctgtcctgccaggcgctgctgggtttgggaggaatgcgtttactctccaggaccaac

SEQ ID NO: 109040 - DNA, 122 bp, Homo sapiens
ccagctcagggggtgcggctgagcagtggacatcagtcagacatctctgtgaagtgttagcgggaaaagtatcatggaaccattagcagccgcttgaggttaggcccaaaccagtggggccc

SEQ ID NO: 109041 - DNA, 122 bp, Homo sapiens
ggcaatcaccggagaacatccactctcttccagccagaataccattaatacgtgtgtcagcgcggagtgaatctcgccgggtgcacgccgcgctgagtccaggagagaaaatgaagagcatc

SEQ ID NO: 109042 - DNA, 122 bp, Homo sapiens
ctcctccctccccgcagccctaatccaggcaggaattcgggcctgcgcggccctgcccaccgtggcagccagggatgtccagccctggtctctgttctccagggcgtttccacgggacccag

SEQ ID NO: 109043 - DNA, 122 bp, Homo sapiens
atttaacactccaggcaacagaatttgcttttttcctgtgtcaccaggatctacaggggccgggaacccataagtggcacataactagcctgttgtctttgggggttggtggagggtttgat

SEQ ID NO: 109044 - DNA, 122 bp, Homo sapiens
tcagagcagccccaggcctgaactccccagttcactcaagacggcagtgtatgtagctttcggaggaaagctctatcatttctcctgaatatgaagctgcacccattcattgcaaaattgta

SEQ ID NO: 109045 - DNA, 122 bp, Homo sapiens
ccgctcagcttctctggctcccgggcatgggaatctggactcgggagcggagcgctcccgcggccagcaggagtcgctattgcccttagcagccagctccgttaccccgggtcaccaccgcg

SEQ ID NO: 109046 - DNA, 122 bp, Homo sapiens
tggtggtcagacctccggtgtgggcgtgggggatcttggcaggttgtcacgctctgcacgcggcttccgtgagcctgaccaggctccggtttccttccccactcctcaccctgccctggctc

SEQ ID NO: 109047 - DNA, 122 bp, Homo sapiens
cacttactagctgggatgacctttgataaagtgataggcttctcagtgcctcggttttgtcgtctgtaaaatgggagataataactcacctcacggggttcttgggggaattaatacaaata

SEQ ID NO: 109048 - DNA, 122 bp, Homo sapiens
gattgatggcattctgaacagagtatgcaaaggtttgttctccccatttgaccatggagccgtgaacatcttaaaatgccaaggaatgttttacatcctttcttctttctaggttgaatacc

SEQ ID NO: 109049 - DNA, 122 bp, Homo sapiens
tccttgccatgtgactgggcagggtggcctgagctgagagaacttggctggggtagtcttcgtgaaggagatgctgcacccaggcctcaaatgaggaaggattttgattaggggagatgggc

SEQ ID NO: 109050 - DNA, 122 bp, Homo sapiens
ctgccctccgcgccccgaccagcggccgggagtgtccccgagcgcgccccgcggcctccgcgccccaggtccccggcagcggccgagcagcgccccttacgagccacccccggttccgcagt

SEQ ID NO: 109051 - DNA, 122 bp, Homo sapiens
ggcctcagttttggcctcgcctttttgctctttctaacgagcacgaaggggcgatagggacgcggaggacacctttattcttggctggttctagcatgctgcttcatgtcccctggagcagc

SEQ ID NO: 109052 - DNA, 122 bp, Homo sapiens
agatgcaaggccaccgaattccgggtggaaggacccagctgtattgaccttatataagctcggtgccttgccgttctcccatttgcccgcctggcctcctgaaccttctttctctcctgttt

SEQ ID NO: 109053 - DNA, 122 bp, Homo sapiens
ctccattatcactaatgcccagctgctccccggaggtctctgtctctgtgggctcatcctcgtcctcctcgttgtcctctctggccagggtaggccggggtgggctgggtgtgggactgggt

SEQ ID NO: 109054 - DNA, 122 bp, Homo sapiens
ccagccggaagccctcagtgcagcggcaggacacgtgaccatccacctcctccacacattcgtgttcgcagcccccgttgtcagggctgcagccagtccccaggcacaggggcccagcccgt

SEQ ID NO: 109055 - DNA, 122 bp, Homo sapiens
ttcccaccccatcccaggccgcaggggacggggggctcccacgtgcgggtaaattccagacgcccccgccccgccccgtctgttgagttcactttacctttaggcaccttcgtggagcgcaa

SEQ ID NO: 109056 - DNA, 122 bp, Homo sapiens
cccccgccggccaccgtcggagcctgagcctacctttgggctgatccaagaatgtgagggcgtctccacgaacaccaatcaaagaccagagcccggcttcagtagcgacgattgggcagtct

SEQ ID NO: 109057 - DNA, 122 bp, Homo sapiens
ttccagggatgccccctccgaccccgtcaccagcggaggactcatctgccgcggggctgccggaagctctcactcccgccagccccctgggtgctattgatgcggaccttggaggtgcctgc

SEQ ID NO: 109058 - DNA, 122 bp, Homo sapiens
attgaccacttcaggaggtgagtaagggtgaggtccttacaaggttgtggctgggtcggacgtggcctccagccatctgatcctgatataagaatgaggggtggttttagaaactgcagcct

SEQ ID NO: 109059 - DNA, 122 bp, Homo sapiens
cttccctttccccctattccattcctctggaagtctagcttctgccttaacccttcaccacgaaactgggagtaaggatcttccctagggttccaagaatcaatttcctctccccactcctc

SEQ ID NO: 109060 - DNA, 122 bp, Homo sapiens
tctccgcctctccgcaggagcatgcgcgccaaggaggccccggcagtagctgtagtctgacgcctggcgctcacacctacagcgaatatctgcctgcggaagcggaacctgtgccatccggg

SEQ ID NO: 109061 - DNA, 122 bp, Homo sapiens
ggatcccccaaagagccggtggggaggggggcgcttccacgcggagcctcagctgtgcagcgcctgaccccaagcccgtcagggggaaggtctcccaggtccgcagccttcagcaccctgga

SEQ ID NO: 109062 - DNA, 122 bp, Homo sapiens
tcacatatacccaaatccctgcctcaggttcttcttttaagtaatataatctaaaacacacgtactctctcccccaccccaaatctgccagtatgactcatatccttgataagttgagcttg

SEQ ID NO: 109063 - DNA, 122 bp, Homo sapiens
agtagctgggattacaggcacacgccaccacccctgactgttttgtattttcagtagagacggggtttcacaatgtgggccaagctggttttgaactcctgacctcaagtaatccacctgct

SEQ ID NO: 109064 - DNA, 122 bp, Homo sapiens
ccacacacgaaacggagccagcactgttctgcttttcagccgttcagtgcgggagtggagcgccggcgggtgttgggagggcgtgggccctgcgcgcagcggaccagcggcgcctccgctca

SEQ ID NO: 109065 - DNA, 122 bp, Homo sapiens
ggcctgcctccccagcagggcttccacctcagagctgggtggcctttgccccctgtgggccgggggtggagaaggtggggggtggtgagtccatggaagctctgagggacagacagcaggga

SEQ ID NO: 109066 - DNA, 122 bp, Homo sapiens
aagcgaggggtcgccggtgtgtgaggcagggtaagagaccaggggacctgcacggaggagcgctctaggggaggctgctgcctcgggagctagggcgcgcccggaccacaccgcacggcgca

SEQ ID NO: 109067 - DNA, 122 bp, Homo sapiens
ccaccccatccagcccataaatcccaccgttaacactgggagcaatgccacgtatgcaaacgtggctttaatcccctcacacacctattcatctgcataatgatatacctacaaaagcaaaa

SEQ ID NO: 109068 - DNA, 122 bp, Homo sapiens
gcttttccgggaagccgaccttccctctaccctggtggtgccatcattagggcgtgtggccgaaggaggcaaattgttaggtgcaatcaggaagccgtgtctgcatcccatggctgagggac

SEQ ID NO: 109069 - DNA, 122 bp, Homo sapiens
aacagaacagtggaactccagacgtagggcccatcttccctccttcccatgtcactgaagcggctccaggtccttgagggaagcaatggctttagctttggcttccagtccgtcaccgaagg

SEQ ID NO: 109070 - DNA, 122 bp, Homo sapiens
gccagagagtaaacattttagacttcctgggccacttggtctctcacagacactaaactccgcatttgcagatgaaggcagtcgtagcaacccataaacaaatgggcatagctatgtttcaa

SEQ ID NO: 109071 - DNA, 122 bp, Homo sapiens
tcctggctgctccgctccttcaccaggtcatagtacacctttcccgtgcagaagatgagccgctgcacctgctcaggggcccgtgctgcggccccatcttcaggaatcacccgctggaagct

SEQ ID NO: 109072 - DNA, 122 bp, Homo sapiens
ggcacggcggtgccccatttgccaccccagggaggccgagcagcggagagtgtgtggccacggcccctccactctcccagcaaacccacgggggcctcggtgcggacagagacccggtgtgg

SEQ ID NO: 109073 - DNA, 122 bp, Homo sapiens
gcggcagggatgcctggctttgccaaagagtgaaagcctccccagtgggatctgccgtagcgcacaggggagcagacggagccgcggcgcagggcagcgggagcctcagccaccgctggaga

SEQ ID NO: 109074 - DNA, 122 bp, Homo sapiens
atttcttcgaggtggagtcggagctgggacggtaaggcgcgggctccggctggggaagcccgcggcgtgcactgggggttgtccctctcgcagcgacggctcggagggtgcgggagcctgcc

SEQ ID NO: 109075 - DNA, 122 bp, Homo sapiens
ggtggtggcactgagtctctgagaaacgtaatgattgcatagggaagccaggctctctgccggccgggccggcgcagggctgttttcaagggaaactgaaacctgaaacctgacctccctgc

SEQ ID NO: 109076 - DNA, 122 bp, Homo sapiens
tgtcccaaagaaatgcgtgatacttgtgcaaccctagatcttagtgcccagctctttcaccggaaagtgcatttggcattgagtatcgactccttttccacattggaagcagcatatcacaa

SEQ ID NO: 109077 - DNA, 122 bp, Homo sapiens
gcagcccagcagggcctacaaggaatgtgtgaacggatgcacgtaaagtgcttagcaaagcgtggtaaacaagagcccttgttgtcattcttgctttaagcctagtcccagtgatgtctgta

SEQ ID NO: 109078 - DNA, 122 bp, Homo sapiens
caactctccccgcgtgcgtgtcctttcggaggagggtcagcccctggccgtgcagatcagcgcacactggagctctgccaccgaggcggtccctgacgtctaccaggtgaggtgtgggcttg

SEQ ID NO: 109079 - DNA, 122 bp, Homo sapiens
ccagcgattggcgggcgtgtctgggctctagccaatccggaaaggggcgggctggttaagcgtcaggttccttggatcgaccggtcagcccagtaactgactacttttctcccttctctagg

SEQ ID NO: 109080 - DNA, 122 bp, Homo sapiens
gtcgtgggccttcaacaccaggtggcggtgttgagctacattcagcaagccggtactacccggtgagaagcctccctgggaaactagggatggggcaagagaagggtggttgcactttcaaa

SEQ ID NO: 109081 - DNA, 122 bp, Homo sapiens
gcccctcagcaggagcgtcggctggtttgactgtggctgtcgttccgactccgacggtcccgtgggccctcaggaatggacgaataagtctggactgaagagattcagaaggcgctcgagat

SEQ ID NO: 109082 - DNA, 122 bp, Homo sapiens
cctcatcctgccggttgggaatggtagctgctctccctgtgtcgcaggactgctgtgaaacggcaaacaggaagttctggatgtgaaaggacattgccactttttgtccttggttggagagt

SEQ ID NO: 109083 - DNA, 122 bp, Homo sapiens
gcacccgggccagcggctgcggagggtgtactgggtaccccagcagtgccggcccacaggcgctgcgctcaatttctcgccgggccttagctgctttctcacggggcaggcctcgggactgc

SEQ ID NO: 109084 - DNA, 122 bp, Homo sapiens
tgcagaggcgccgcctgccgcccgccgcccgcgccgcttccgctctccggctctagagggcgccctagcacaaggagccgcctcgcccgggctgctggtgcaggtttcaacgctcgtgctct

SEQ ID NO: 109085 - DNA, 122 bp, Homo sapiens
ctcaagcgccgctttcattccctgccccgagcggcgctccccgctccgtgcacgcatctccgctgagggccgccctgacgcacggccttctgccttgaacacagaacccctcagcccttcct

SEQ ID NO: 109086 - DNA, 122 bp, Homo sapiens
tttggccccgccccatagtgtgcccagagccttctgccacacttaacatggcggcggcggcgccctgccgaggcgcctgagcgggtcgcgagcgtggtgttacactccagtcatggcggccc

SEQ ID NO: 109087 - DNA, 122 bp, Homo sapiens
ccgtgagcgaggctgtggtgagcagcgtcaacactgtggccaccaagaccgtggaggaggcggagaacatcgcggtcacctccggggtggtgcgcaaggtgagccccggccctcagacctgc

SEQ ID NO: 109088 - DNA, 122 bp, Homo sapiens
ctgtgtgaaaacattgacgacgtggcaaatgagcagcaaattgatcaatacgaatgatcacgccccatgtgcatctcctcagcagccacaagagagacgaggtcactggaggataaacatcc

SEQ ID NO: 109089 - DNA, 122 bp, Homo sapiens
tcttctgtggccatgttcactccggttttacaggtgagggggctgggctgggaagctgatcgacttgtccaccccacagcagaggggcagctagcctagatgcgaacctagatcagtgtaga

SEQ ID NO: 109090 - DNA, 122 bp, Homo sapiens
gccctgccctcccaccagtggcgatggtgtccctggcaccccagcccccaggccaccctccggaagccaacttggagtttcctggccaggaggaagagcccccatccttgctggaggaggga

SEQ ID NO: 109091 - DNA, 122 bp, Homo sapiens
agggctcccctctctttctctggcgtgtctgactttatttttcttgggagtacttgtcatcgcctgacactgatatagctcgcggcccctcgcaggtggtgagcaccatgcgggcagggtct

SEQ ID NO: 109092 - DNA, 122 bp, Homo sapiens
tcgaggatggggagactgggagcccaccagtgaccagagccagccctgttcagggctgtccgggcagaagaaagcagtgtcagacctggaatctgccatcagcacagcctgcaattgacaga

SEQ ID NO: 109093 - DNA, 122 bp, Homo sapiens
gttttgtgacaggtagcctggacgtgctgtgtgcttggcgcttttccaggtccgaggtcccggtgggttttgtgcctggtagcctgccctgccacggcatgtggtgcggagccgtgtcccag

SEQ ID NO: 109094 - DNA, 122 bp, Homo sapiens
ctttctgtgcccctcgtctctgcaactaaaatgcagcagcacttctcttccccaccctcccgtcacacccttcagccacttttcaatgtcagggtgcccggcagcagggtcctgcccctgat

SEQ ID NO: 109095 - DNA, 122 bp, Homo sapiens
ttaaacaaaaaaggaagctctttctgcacaatgacaacatctagctcaagttactaacatcgatttgtttttattttgattattattatttttgttttctctccttttacttggtgatgcat

SEQ ID NO: 109096 - DNA, 122 bp, Homo sapiens
ccaagccactgtcagtttggagctgcctgactcatgaatcactgtctgcctaaataaactcgaaaattgtaatgtgccaaagtttatcttttaacataatcctaatagctaaaatgtgttaa

SEQ ID NO: 109097 - DNA, 122 bp, Homo sapiens
tatttcttctaatgagataggagtgaatgttggaaccacgtccacagcaacacaatcctccgaccgcattcctcgggcagtcgtttccccagctccctactaaaaacgtcagatggtaaaat

SEQ ID NO: 109098 - DNA, 122 bp, Homo sapiens
gctcctcaagtgtggccagagtgggtgccaaggccgaggaggtgccgagagcgagggctgcgggggctgccagcatgttgtcacctctcagtattgacatagatcagtggaacatgatagct

SEQ ID NO: 109099 - DNA, 122 bp, Homo sapiens
ggccagcgtctgggggtcttggtgcctgacgggggcttcctggttctaacagctgggatgcggtccggagaggctcgagcacgctgccactatcccaggaggcaatcagcgatctcacgcat

SEQ ID NO: 109100 - DNA, 122 bp, Homo sapiens
aaggacaagttggcgatacactcgccatggacccgctcaaagcactcctccttctcgccccgccgggtattgtagagatgaatactactgccactggccaaggccaagacctgggcgttggg

SEQ ID NO: 109101 - DNA, 122 bp, Homo sapiens
actaccttgaggaagaaaaccaagaacaggcacaggagaaattgtgcctgttcttggcaccgaagggcaggacgcgaaagggcaggccggtgggcggggacgcccggctcagaccccgtccc

SEQ ID NO: 109102 - DNA, 122 bp, Homo sapiens
ccgcccgtcgtccaggcggccccggagccggctgcgggcagcaagggccgcggggccccgcgctcaatgtctgccccactcaaaccccagggtagggaaggatttccatggggcttacggtg

SEQ ID NO: 109103 - DNA, 122 bp, Homo sapiens
tgtgttccgccggcctcggcctcccaaagtgctgggattacaggcgtgagccaccgtgcccggccggcgatttccactttctagcaacagttggcgtagaaaccctggcccagccagcgaca

SEQ ID NO: 109104 - DNA, 122 bp, Homo sapiens
taggagagcagcgggctgaagacattgccaagggggcgggcccggccggtgacgtgagcccgccagtccggggcccgcggccaatggcggcgcagacagggcggccgagccccgccttcacc

SEQ ID NO: 109105 - DNA, 122 bp, Homo sapiens
ggctccaggccccccacggtgacctcgctctcctcgcccctgacacgcaccacctggggccgcccgtccctgtccttgtactgcacagtgaaggagtcgaagcggccctgggggatggtcca

SEQ ID NO: 109106 - DNA, 122 bp, Homo sapiens
tttcaagcttaataaattagttaatatttgttaaacacctactgtgtcttggggtttctgcgagatgtgagattcattggcggacaaaccagatagcgtttttgccaagtcaccgagatagt

SEQ ID NO: 109107 - DNA, 122 bp, Homo sapiens
tgaattaaaacttcctaggatcagaggcagtcagaccctctgggctttctgcgagtttagcgcacctccctgggccagtgggtagccctgctcacttttactactcgaagattccttattgt

SEQ ID NO: 109108 - DNA, 122 bp, Homo sapiens
gggcagataaaagactctagcacagacactgttgcccgaaggctagcagctgcggagacccgggaagtgcctccgtttgtctctgtaggtttgtgtaggcactggccaagcagtcttctgtg

SEQ ID NO: 109109 - DNA, 122 bp, Homo sapiens
ctgagcccccaaggaatgcagcttctgatgcaccccctccaggtggcaggcacaggccctcgccttcctctgggagccaagatggggcatttctggctctcaacctgactagaggtcattta

SEQ ID NO: 109110 - DNA, 122 bp, Homo sapiens
taatggggtgggcggctagcagggaggagaatcaacaaagcaagagaacttgactatgtacgtccaacttcttacagaaggagctttgctaccagaacaagttcactgtgtcaatgaagttc

SEQ ID NO: 109111 - DNA, 122 bp, Homo sapiens
taagaccagccctctgtccagttgtctttctctctggctgttttgacacacatttcttgacgcaatatttccctttttgggtatttttaagcttaatcatacattatctatccaaatccaat

SEQ ID NO: 109112 - DNA, 122 bp, Homo sapiens
aatgccgcggaaagcaaggggagctttctggaagccgggaggtgggggccggtgcagcaccgggctgggggcgccggggggcgcatcatcaccacgaatagctgtgctggctccaggagaga

SEQ ID NO: 109113 - DNA, 122 bp, Homo sapiens
accagctccatcagctctttagtcagttcggacatgatgaggaaccggcgggcggatcttcgctttgcggactcctgccccggaacatggggaaggggcaactccggaaacagcagctgcgg

SEQ ID NO: 109114 - DNA, 122 bp, Homo sapiens
ggaggaggactggttcgccaagatccccctggcctggaggcagcagctgtataaactctacgaggccgactttgttctcttcggctaccccaagcccgaaaacctcctccgagactgaaagc

SEQ ID NO: 109115 - DNA, 122 bp, Homo sapiens
gggtgactgactgacactataaaatatcctgacattcattttattattttgctttgcccccggaaatttgattcttctctgctaagtggagagagatgagctttggacctatttatagcttg

SEQ ID NO: 109116 - DNA, 122 bp, Homo sapiens
ccctggttccccgcctctctccctcactgccaccgccccctctcgggtccagagcccgggcgtgcgctgtcaatgattgcccagcccgtggcccggatccttatctgcattcctcggcgccc

SEQ ID NO: 109117 - DNA, 122 bp, Homo sapiens
gcccctggggaccacaggtccccagcgggtagggcggaggcgtggccttgcgaaggtcagcggaggccacccagagctcacagcctcctgccagcgcgctctctgtttctctgcagccccga

SEQ ID NO: 109118 - DNA, 122 bp, Homo sapiens
ctctgttggaggtagtgctgggcattagaaccatccctgacagtgtgcaacaaacccacccgtggaacgacacggccttctttttcttcgggatccccttggcccggctggtcaccctccgg

SEQ ID NO: 109119 - DNA, 122 bp, Homo sapiens
atccgggtccccgcgcagtggctgcacgcagcccacctctcccgacgatccgggtcctcccgcccttcgcggtgattctgtcgcgaaccctctcacggcagctatgagactgctgcgctccc

SEQ ID NO: 109120 - DNA, 122 bp, Homo sapiens
gggccgcgtctggtgtgtccacaggaagaagagtctccgtgtggggaggtgacgctgaaacgggaccgctccttctcagagcatgacctggcccagctccgaagtgaggtggcctctggcct

SEQ ID NO: 109121 - DNA, 122 bp, Homo sapiens
tgctattagagagaataatatttctcaccgcgtacctgtgcctggacccggaagggttgccgctggggacgggaattcgaactggcactggtggcctgtgaagggaaagatgtgatgagaaa

SEQ ID NO: 109122 - DNA, 122 bp, Homo sapiens
gcccagcgcggcggcgcttagccgttgccatggagactggtaatggccccgcctccgcgccgaaaaacaggcaggaaccacataacccagaaggctgtgcgcaagcgtctgcgcgcgtattg

SEQ ID NO: 109123 - DNA, 122 bp, Homo sapiens
actgaactgaatcctggggggcgatcgggaggaagtgtctcgttccctgtttgcactgcacgatcctgcgtctgtgggcatgcagctgggacacaaacccctcattgtgcctcttaaactca

SEQ ID NO: 109124 - DNA, 122 bp, Homo sapiens
acccccggctcacactggccaaagatccagactgacaaatgactcagacacacaaacgcccggggctaagaggaaacacggcatggcccggaggttgcagggggcagcactcacagggatgg

SEQ ID NO: 109125 - DNA, 122 bp, Homo sapiens
aaaggctgggtggctgcaccgtcgtcccctaacccaacattgctttcatctgggaaaattcgcttgctagccaattaagccatggaggctattacatttacacggggctacgcacaatctca

SEQ ID NO: 109126 - DNA, 122 bp, Homo sapiens
tgacatagatttctcagggcacaatttcaactactttttcagctttagggtttttagatacgtttgtaccacaattgagcatgggagggagaggggtgagcctaagcagtgatggctgattt

SEQ ID NO: 109127 - DNA, 122 bp, Homo sapiens
ctcttgtgcaatcgatggctcaggttggctgcgcggggagcggccagaggctcgctggcgcgcacgccgcggagtcatgaacgactttgacgagtgcggccagagcgcagccagcatgtacc

SEQ ID NO: 109128 - DNA, 122 bp, Homo sapiens
ggtatggcttgtatacactttccaggctgagcccctattcagagggggctgcagcttgcgcgtaatgggccccctacagacaaagccagcaagtttcttaattaagtctaagtgaaagacag

SEQ ID NO: 109129 - DNA, 122 bp, Homo sapiens
gccagtaacaattaaatttttaaaaagttactcttctacatctcctctcactatggcttacgtttctatttcttttactgtcattatacaaactcttgtgtttattctcatctttgctttct

SEQ ID NO: 109130 - DNA, 122 bp, Homo sapiens
cgctccccagaactaaataagagacaagtctcggctcgagggccgatggcctaattaacccgctgactggaccgtggggaagaggaaagagtcggcaaccacagccgctccactccactccc

SEQ ID NO: 109131 - DNA, 122 bp, Homo sapiens
cgcccaggctacccggcctcgcgggagccggagccggagccggagccggagctggccgcccgcgcccttcatgccgcccgcagcccaccgcacgtactccgcgcccgcctggctttggcgcc

SEQ ID NO: 109132 - DNA, 122 bp, Homo sapiens
ctgatgtacctacatgtcaggttcttgtctggggaggacccataatcaggtttaggacaccgagaaagtggtagtgatgaggagggtgactgtttaatgaatacagtcagaatcatttcatt

SEQ ID NO: 109133 - DNA, 122 bp, Homo sapiens
gaaaattgcattgggggagactcagagtgtatataggaataggcacgttatccattgatgcggtaacacagctgtgttcaccctgcttttgttgggaaccgcacacatcactgtcctaaaaa

SEQ ID NO: 109134 - DNA, 122 bp, Homo sapiens
tgttttgaaaaacactgcaggtgctacaaaggtcatagcagctcaggcacagcaagctcacgtgcaggcacctcagattggggcgtggcgaaacagattgcatttcctagaaggcccccagc

SEQ ID NO: 109135 - DNA, 122 bp, Homo sapiens
attaaagctaatgcttagcactctttggaaggtggagagattaaaaactaacttccttgccgaatagcctgggtttggaaaagcatgtttttgaaatatgtgggatctccactctggagccc

SEQ ID NO: 109136 - DNA, 122 bp, Homo sapiens
gtctgcgtgaagcatgcagttctggtggcaaagagctggctccatggcagggctaaaaaacgccaaggacaccagcacctggcctttgtgtgtcccgagccggcagagctgccctggcttgc

SEQ ID NO: 109137 - DNA, 122 bp, Homo sapiens
tttttcctcccaggcgaatcccagagctggtttctgggtggctgtgcaatgccaggaagccgacggcatctttcgggccttggcatggagccaggctgggagcggatgaaagcgccccgcag

SEQ ID NO: 109138 - DNA, 122 bp, Homo sapiens
catgaaaactggggtcttctcagaggtagcaaggttcaacctgtctgcaccacagacagacgtctgctctcactccaggcagccacctcctcttgagtgagctcctaaacctttgtctcagt

SEQ ID NO: 109139 - DNA, 122 bp, Homo sapiens
attgccgccgtctttcatcccttttggcaaagaacccgcgccatcgggtcctctgaagtgcgggagacggatcgctgatctgccggggaatgtgctctacaaggttaagcatgtttgcccaa

SEQ ID NO: 109140 - DNA, 122 bp, Homo sapiens
gcattaccccttgtgggagccatatttttctagaaggcattttgatcaagacaggcctcccgcggttattgatcttagggtcattgagagtccaagaactggggagatgaaggccacccggc

SEQ ID NO: 109141 - DNA, 122 bp, Homo sapiens
agctggcacaaaatgaccactggcaacggctgtggtggccagatggaggcctcagcctgccgagcacagtgagaatctgtgacttcattcataaatttcccagagaaacgggatgaggcagg

SEQ ID NO: 109142 - DNA, 122 bp, Homo sapiens
gagaacaccgtcagtactccctaataccccgtgctccaaatccggagctcggtctccacccggccgcactccaagtgacagcaataatagctggtgtttctaaagtgcttactggtaccagg

SEQ ID NO: 109143 - DNA, 122 bp, Homo sapiens
aagacacgcagattatattttatttaaaactctgccgctgctgccggagactgatctgggcggcagttggcggcctcggctagcggccaggagccacttctgcgggtgcccagagaagcaaa

SEQ ID NO: 109144 - DNA, 122 bp, Homo sapiens
cctttccaggacactgaaggctgcagaggtgtgactggatgctggtggagggatgcatggcggggaagctgagtcagatcctgaaatcctccaagcatgcgcctgaaatgaccaagggaaat

SEQ ID NO: 109145 - DNA, 122 bp, Homo sapiens
ccagccgatccgcggtccttgtccaacagcccagaggccgctgtccagcgggccaggaggcggatcactgcgtcggcgttgaaatttccactcgcgctccaccgcccttcccgcgggccccg

SEQ ID NO: 109146 - DNA, 122 bp, Homo sapiens
cattatgcccccaccccgggaagcggcacacagtgctacaaacagctggtggcttccagccggctgatggcccctccctccccaggaagtcctggctggggcccatgggggtgggacggctg

SEQ ID NO: 109147 - DNA, 122 bp, Homo sapiens
ctcgtgcagagccgtgtccccttcctgctgagaacgcaggcagtcaagcttctgcctccgcgtgctgccctcctcatgcaggaaggtcagggctgctgtcaccgagcagacagcacctctgg

SEQ ID NO: 109148 - DNA, 122 bp, Homo sapiens
ttcaggtctctaagccacccgaactgtgtgtggctggaaggatcgctccatgaccacgtacgctggcggcccctcttccggcttacctcaggggctggtatcgcgggcctgttctttcatca

SEQ ID NO: 109149 - DNA, 122 bp, Homo sapiens
gtgctgcatatgcatgagggggcggggaggggcggggccgcgccgcttggggctgaggttcgggaggtaacccgggcttcagacccccacggacacaccgctctaatccctagccagtgagc

SEQ ID NO: 109150 - DNA, 122 bp, Homo sapiens
aggcgggactgagcggggacgggggcggggcctgcgggaactacggagcttggaggagaccggggtagtcaagggttacaatgtagctacgccttgaggctaaagctgtactaaaagccaac

SEQ ID NO: 109151 - DNA, 122 bp, Homo sapiens
tcaagcagcaggaggggcacgatcctcctgctaacaaagtgaaaaccattgctgaaattccgaaacatacacatttggtgagatcaggttccaaaacatttgaaggcatttgttcttatttt

SEQ ID NO: 109152 - DNA, 122 bp, Homo sapiens
tgctaggacatgcttctctggaccacacgggggaagtcagacagcatttctccagacagccgggggctagagagggctcagtcccagctcccagatattcatgaggagtactcgacaggccc

SEQ ID NO: 109153 - DNA, 122 bp, Homo sapiens
aggagttgaaggcctacaaatcggaactggaggaacaactgaccccggtggcggaggagacgcgggcacggctgtccaaggagctgcaggcggcgcaggcccggctgggcgcggacatggag

SEQ ID NO: 109154 - DNA, 122 bp, Homo sapiens
catacagcctagagtaagctaatcaaatgatctcaatccaaaatttgaatcttgaagcaacgaggtagacaacacagagttgagaagtcactcatagtggtgtcagcagctttgagatcagt

SEQ ID NO: 109155 - DNA, 122 bp, Homo sapiens
aagacaggagttcctgagccctgaacaagaggctacctagggtaaagcgattgatctccgcgcggtgcggctgagaagagaaggcgttgttgacctttcggggagcaagttaataactcagc

SEQ ID NO: 109156 - DNA, 122 bp, Homo sapiens
ctcgcgccgcggtctcctgcagttcccagcggcctctctgggggtcggacctggtcactgcgcgcacttatctcaggtggcggggcccgtggacggcggcgacctggatcctgtggcctgct

SEQ ID NO: 109157 - DNA, 122 bp, Homo sapiens
cctgcatgttggcgtccctgcctgccggagggaatgatactaaatgcagcctgctgcagccgcacccacactaaacatggaggagggctacgaagagtagcagggccctgcatgaagggtga

SEQ ID NO: 109158 - DNA, 122 bp, Homo sapiens
agagataaggggggggatggctcacaggtccacagggacgtcacaggcacaggcgggacacggcgacgtggccggggctgggtggggagggggaccccacgcatcgtaaccgccagcagggg

SEQ ID NO: 109159 - DNA, 122 bp, Homo sapiens
caggctgcggtgacccaggccggcaggtagccaggggctctctgcctgggaggacaccttcggcggctggcgtggggaaaggggccgcccggccggggatgccccgccaggaggagggagcg

SEQ ID NO: 109160 - DNA, 122 bp, Homo sapiens
aagtgccctccagcgtcagccgatggccacatcagtaaagacgtggtccccatgtctctgcgtgactcctccccgtgtatagaattccttgtttccacacgcacagtcctgtgaagcttaac

SEQ ID NO: 109161 - DNA, 122 bp, Homo sapiens
gtttccgccttagcctcgccaggccccaatgagcctctgtttggcctgtagtcaattgaccggttggacttggggcaggtgctcgaggagccccactgagggagggcaggtctcttgtgcgt

SEQ ID NO: 109162 - DNA, 122 bp, Homo sapiens
aaaatgcttgtattacttttgactcccctaggtcttaactactaatagccaactgttgcccggaagccttatgaagttgcccggaagccttatgaattacataaactcccagtcgattaaca

SEQ ID NO: 109163 - DNA, 122 bp, Homo sapiens
ctccaaacctagcacaggcccagggagcagctccggaaacaacatcctgagcgacgtccccggaccgtgctgtgcactgagacggacacacacacatcacccagggagccgttcaagcttcc

SEQ ID NO: 109164 - DNA, 122 bp, Homo sapiens
aacagctaccacatgtggctccaatctgatttcattcctgtgggtttctgggccacttcacgaagtttttgcagctggatctttgatcacagtgctttgtctattaggttagaaatttgtct

SEQ ID NO: 109165 - DNA, 122 bp, Homo sapiens
ggcatcctcccagatagagaaccaactcattcacacacatagttggctgttgtttcactccgaaagagttgatttgaaattatttgactgcattaactgaactgataaccagctgatcattg

SEQ ID NO: 109166 - DNA, 122 bp, Homo sapiens
tatactttaagttctagggtacgaggccagggagaaggagaagccaccctgaggaaggtgcggaatgtcgcgtggagcccggctctctgcctttgaagcaggattttcatgcactcgccagc

SEQ ID NO: 109167 - DNA, 122 bp, Homo sapiens
gtggaataaaccccttctccacccgcccctctgcaaccccacaggccacagtgtccacagcgtccttggtaaagtcgactgtattcacatctgcattctgtgagtgcgggtataggtgggag

SEQ ID NO: 109168 - DNA, 122 bp, Homo sapiens
cagtctgcagaccaccaccagggtgcacagaaaatatacctctctgaggtcagggggaagcgttaataactaactttatagtttaagatgctattctgatgtacttaagctcaatactttca

SEQ ID NO: 109169 - DNA, 122 bp, Homo sapiens
gaagcccggcgcgccgctgcagagatcgaaggagagccctggcgctgggcgtttctcttccgcccttggcgctagagtcagctacatggggctctgggcttgtgatcccatagtctagtttc

SEQ ID NO: 109170 - DNA, 122 bp, Homo sapiens
ccctccttcctctttactgacccaaaatgccaactattatagtaactcttttgggttagacgaatccagtgaataaacacctactaagcattggaggtccaagaggaataagatatgcctga

SEQ ID NO: 109171 - DNA, 122 bp, Homo sapiens
attgttactacagtggtgactttccttgacccatctacgccgattccctctccgggactgcgcccaaagcttccaattcccgcccacccggaggattctgcggtcgctcctcctctcgcccc

SEQ ID NO: 109172 - DNA, 122 bp, Homo sapiens
tttctgtgttcccattggttgcacccagggccccaggaggccggggtttgagaccccacccgaaccagatcccaccccagcccttggggaggctgctgggattccacctctgcgcagaggct

SEQ ID NO: 109173 - DNA, 122 bp, Homo sapiens
accccactcctcacattgtcgcgcgcgcccaaaaaagaccatatttaaaggatgtggccgcgccgactcggccctgcgtgatgacgtctcagcgacatagtgggcggggccttgcgtcttga

SEQ ID NO: 109174 - DNA, 122 bp, Homo sapiens
attgatccagacttcctcggaaaatgcccgaggaacaggactcctccggccgtatttgcgcgagcgcgagcgcacatacatcgtgccttggatgcctcccgccagccccccgaaaaagggag

SEQ ID NO: 109175 - DNA, 122 bp, Homo sapiens
ttttatatttttcgtagagatggggtttcaccatgttgcccagcctggcttgtgcaatttcgttttttgaaaaaatagctaatggagattctgataattcttattgtttcctggtcaacttc

SEQ ID NO: 109176 - DNA, 122 bp, Homo sapiens
gggccgcggggggagcgggggatgggagcagaggaagaaaccaaatcggtggacccgttgcggtctcccctttggttattcccaacggttgtggttctgttggctttttttattattcctgt

SEQ ID NO: 109177 - DNA, 122 bp, Homo sapiens
ggcagcactgagggttgggagttgggggtgagctggtaagaagtctgctctcagtcccttcggccgcttcatagaaatggaaccaggcaggaggccactgcaacagtccagcttgagagaaa

SEQ ID NO: 109178 - DNA, 122 bp, Homo sapiens
acaggtcagcaacctggatctgcacctttcctattactttgttagcctagaaaacaaaatcgcaagcgagagagaggcagcaggtaagtcatctggcaatgtgaacaggaacatctaaaaca

SEQ ID NO: 109179 - DNA, 122 bp, Homo sapiens
attaaaaccttagtccaatccgaagggcttccttcccaccttcggggcaagtacagggaccgcaaaccgccagatggctgcattctttacgcgcaaaccaggctgcggggaagctaaagcca

SEQ ID NO: 109180 - DNA, 122 bp, Homo sapiens
agctgcttttcgcgggtgggttgcggctccggatccaggatgtactccgggaacagaaaacgctcctgcatgtcaccaccttctccaaagccctccgtgtccacggggtcataaggaagctc

SEQ ID NO: 109181 - DNA, 122 bp, Homo sapiens
ggggggacctgggctctgagccccatctccccctctccctgcagatcacaaagccttctacgtcctttttacctgggaccaggaggcccagatatacgagctggtggcacagactgtgtcgg

SEQ ID NO: 109182 - DNA, 122 bp, Homo sapiens
gtaatgctaactccggctgtttgagtcttctgccagcgagggcagggcaggtggggcaagcggtggtgaagcgggttccgggggctcggtgagtctgaacactggctcgcctggaaggttgg

SEQ ID NO: 109183 - DNA, 122 bp, Homo sapiens
cgggttctgcgcggacagcttactcactggagtggttcggcatcctctgtcgtccgcccgcgcttcctcaggaagcccctaatgcagcggcagcctgaaagcagcagccgaagctgctgccg

SEQ ID NO: 109184 - DNA, 122 bp, Homo sapiens
cctgagcactccgtcccgcatccatggcggtggctttagggaaatctctgaagttgagcacggggtggacttgccctcctgagtgaatggagaatagaaagggggaggatttctattttgtt

SEQ ID NO: 109185 - DNA, 122 bp, Homo sapiens
tctatattttgccaagattcctgttaactctacctctataactatatctaatatctgtttcggaccctactccatcaggcagccattttctcttgcctagattacgagactgtttataatca

SEQ ID NO: 109186 - DNA, 122 bp, Homo sapiens
cccctctcacgtgctgctcagcgtgcgcccagacatgtgcgggcacacgtgacagcgccgcgtccggccccggttccctaaccccgcgcggctgtactttgaacccaggcgtgggagactgg

SEQ ID NO: 109187 - DNA, 122 bp, Homo sapiens
accctctcagacatctcattcatgcacagcaatctaaaagcagcaatcacctctgaaccccggaaagagtaatattgatgttcataaatacatacaagccatcaatgatattcaagagaggt

SEQ ID NO: 109188 - DNA, 122 bp, Homo sapiens
gattttagtaaaacttcattaaagacacgagtggtggctatcattcacttcttacccatccgctatttacttgtatttcttgctgaaagaaccccaactttgtgcagcatgacttcagctaa

SEQ ID NO: 109189 - DNA, 122 bp, Homo sapiens
cttttaaaaaagatcatgtaagtgtcaagaggaagtgaagaacctagataatccaccaaccggataatcagctcttgcatatttgagagttgactgcttgacctaagcatctcctcataagg

SEQ ID NO: 109190 - DNA, 122 bp, Homo sapiens
acccccacaggacgcacatgcagaacatcaaggacatcaccagcagcatccacttcgaggcgtaccgtgtgaagcgcctcaacgagggcagcagcgccatggccaacggcatggaggagaag

SEQ ID NO: 109191 - DNA, 122 bp, Homo sapiens
cagactttggtcagaagagtaccacagcccaacggggctgcggacggcaggcgtggagcacgccttggcgtttcccctcaaccctactcctctaccatcggagctggaaatgactcccaaca

SEQ ID NO: 109192 - DNA, 122 bp, Homo sapiens
tcagcagcccccgaggatgctgtggggttgcaactcctaaggcttaactgcggcggggatcggttaatagtatggacaaccccacaccccagaacaggggataggtgatggacgacagtggg

SEQ ID NO: 109193 - DNA, 122 bp, Homo sapiens
tgtcaccttcctggggcttttccttctgtgcccccagccctgcccccttttctgccaccccgggcatgggctccacccttcagctcccaaagagcctcaggcacaggggagcctgaacctgc

SEQ ID NO: 109194 - DNA, 122 bp, Homo sapiens
gtcacatggacttcgacagcatgaactttaaggaacagctcatgcctttgcaatgtgcagcggaaagtattatgaacctcacgccacccagagctcttggcttctcatctctcggcttctca

SEQ ID NO: 109195 - DNA, 122 bp, Homo sapiens
gaaccagggcgcctgcgagggacgagggggcagggccggtgcctagggggtggaaatggccgagccgacttgttggaccccggtcctgctagattccttgtctgaatgggaaatgtcgccct

SEQ ID NO: 109196 - DNA, 122 bp, Homo sapiens
acaggctgaacaaatgctggcgagaatacaaagcacctagaactctaatccacagttggccggagtgtagacccattcactcatgttgggaaacggtttggcaggatctactaacactacta

SEQ ID NO: 109197 - DNA, 122 bp, Homo sapiens
gcccccattgggtcttccggggctgtgccagaggcctcctgtctggccagtaccccagggcgccacatccccaggccggcctgccggcctctcccctcggagttcccacctgcttctcttag

SEQ ID NO: 109198 - DNA, 122 bp, Homo sapiens
gagaggaaactgggagaggccggagtgcgacttggggagtcttagcctccaaggacgttccggaaccctgcggacgcggggcgccagcaggtggcgctggacgcgcaacggacaaggaggcg

SEQ ID NO: 109199 - DNA, 122 bp, Homo sapiens
ctcagccccgaacgacgctgctctcatagcgaaggtgttcagtttcaccactagagggagcgcagagcccacagcatcatcataaggttagggagaaagaagaaattgggtccagaaacttc

SEQ ID NO: 109200 - DNA, 122 bp, Homo sapiens
ctcccgaagccgccgagagcaaaaggacccatcagagctgtgctgagacccgccgcgggccgggctcgcactcgagattctcgcccgtgggattccagtcctgagctgaacgagagataagt

SEQ ID NO: 109201 - DNA, 122 bp, Homo sapiens
ccagttgctctccctgtttcagacattatcggtctgctcgggtagagactccatcccatccgggtggtgtgagcgaagagttttgggaacgcagtcggcagagagagcgggagcggcgggaa

SEQ ID NO: 109202 - DNA, 122 bp, Homo sapiens
agtgatatcagggctggtgtctttgtgattctctaggtctttctctcaggctcatgacttcgtggtggcaaaatgctactctggctccacccaacatgtttatgattaaggcatgaaggatg

SEQ ID NO: 109203 - DNA, 122 bp, Homo sapiens
agacgcttcatttggaatggtttgttactgtgtctttagaaattaagattgaaagagaagcgatagattattaaactacaggtcgccaacacagcaaggctttgaaagttgtacttttttga

SEQ ID NO: 109204 - DNA, 122 bp, Homo sapiens
ggctgtactaaaatctgagacctgacttccagcacgagtcttgattgcttttttttttctcgagttcgaggcggagcccgcgaaccccatctcctcagagcgccaccccctcagcttcgccc

SEQ ID NO: 109205 - DNA, 122 bp, Homo sapiens
tattgcagccggttatacaacgtggggaggcagcctggctccccaaagacagcgcagcctcgttcccggagggcggcctgcctgggacctgccgggcactccgccaccctacggtgatgcag

SEQ ID NO: 109206 - DNA, 122 bp, Homo sapiens
caccagcaaagccactccaaggcagcccgggccgcggccgcacaggcagggagcagctgccgccatgtggcgtcacccaacgtcaccagatgttaaaggaaagtcagctgtgaaccagcacg

SEQ ID NO: 109207 - DNA, 122 bp, Homo sapiens
gctggggtggggtgggaagggtgctgctcccttctcgaacctggcactcgagttacagcccgacgcggattcggctgggctagaccctgaagcacgggtagaaacgcaactccggagtccca

SEQ ID NO: 109208 - DNA, 122 bp, Homo sapiens
tcccccagagtgacagggaacccccagggaagaagggcccctgtggggcatgcagaaaaacgcctgccccctggtgtgaggtcacagactcagtggccaagctcaacaatgctctgggaact

SEQ ID NO: 109209 - DNA, 122 bp, Homo sapiens
ggggaaccaaaagccagggttctcaggaccacgaaaggcaaaaccagctctaagagagcacgcaaagtcgctgtggcggagtctgtaggaaatatgaagttccctctttcccccattcagat

SEQ ID NO: 109210 - DNA, 122 bp, Homo sapiens
cctcttaggtccacattaaagcccaaagaggcactatgacaaccccatcctggagagacacgtgtgctgaggcgtgatgcggagcaagtgagacccgtgggaggtctgtgcgctgtgatgtt

SEQ ID NO: 109211 - DNA, 122 bp, Homo sapiens
aggttaagcacagaactggactgtttgtatcaaggaaattcgtggagcttgttctcctgccgctatagcagctggtattgcctggtctaatgtcccttctttgatttcattgttaagccctc

SEQ ID NO: 109212 - DNA, 122 bp, Homo sapiens
ggggtggggcgggagctccacgctacttttactctggggggcgtggtctgctcttggccccgcctcggggcggggctgggatagcccagactcggggaagtccctgtccaccgccctagccg

SEQ ID NO: 109213 - DNA, 122 bp, Homo sapiens
cccgtagccagtgggacggtgctgcacgtggtcgtgcctcaagccctccactgcaccgggcgccctggccaaccctgccaggaagtaaggagaccggggaggccactgagggcctggacctg

SEQ ID NO: 109214 - DNA, 122 bp, Homo sapiens
gctcgggtgggcgcgatctggatttggcggcagcttgggaccgctcggagctggcatggccgggccgggggctgggagttgctggccgtctactaaggaatcgggttcttccttttaaacgc

SEQ ID NO: 109215 - DNA, 122 bp, Homo sapiens
gaagctcgtagtactcaggttgtggtacaggagatctaacactcctacacaaatgcatgtcgtgcttatttcgtaccaaactggtctggcggcggttcttcgtccagacgctggcgggccag

SEQ ID NO: 109216 - DNA, 122 bp, Homo sapiens
aaagctacaaacaccaggcacatgtcattctggctgaaggcaaatgatgggacaggcccccggagctcccctaggacagaagctcaccttcagccccacggctgcactcagagatggccccg

SEQ ID NO: 109217 - DNA, 122 bp, Homo sapiens
ttgacaggcagttggggactcttgggagccgccacctggagctcagccagacccctgggacgtgtccttttttttattttttgagttggagttttgctcttgttgcccaggctggagtgcaa

SEQ ID NO: 109218 - DNA, 122 bp, Homo sapiens
tcctcgttctggggtgcacccagtcctttcgtgggatagagccttcgcgtaatccgtctgcgactcctcccttcccattttggctgctggctgacctgaaagccacgcccaacctgtcccca

SEQ ID NO: 109219 - DNA, 122 bp, Homo sapiens
gcttccgtgccccgttctcctggagcaggcaagacctggagtgaggtgcttgggtgcgctcgagagagcttccccctgctccacctgtcccgcggtgcgcgcaggccaacgcgtcgggcagt

SEQ ID NO: 109220 - DNA, 122 bp, Homo sapiens
tcatacctgtggtgcagttgagcgaagtattgaagccaaggaagggcgaggcagcattcacgcaggccactacgacggtctcgttccgcatctctgtctggaaagggaggcggtgccggctc

SEQ ID NO: 109221 - DNA, 122 bp, Homo sapiens
cccacggtgcggtgagcccatgtgactagaccccggacgatggactaagagggaagaggacgtgcctaagttccgggctgaggccttaagaacccatgcactcttctcctgttacttttccc

SEQ ID NO: 109222 - DNA, 122 bp, Homo sapiens
agaaagctacaaagaggtaaaaattggactatttaaattatcttgtttcctcctgaataacgagaaggctttgtgcgtgtgtcatccttcaagtcaacagctagttatttggaaagaaacta

SEQ ID NO: 109223 - DNA, 122 bp, Homo sapiens
ttccctcggtgtcccggctcctctggcaactgggcgggaccgcgagcgtctagaccgcagcgctaaaatgcgctcagccaatccggcagctggcgcagacacgtggttcgggggcgcgctcc

SEQ ID NO: 109224 - DNA, 122 bp, Homo sapiens
gtacccctaccccgcccatttcctttgcttgcccagaacggcgctgcagggcaaagccgccgccacttctttgctgctctggcagaaaggtcggagcctgggactgatgggggtgggagcaa

SEQ ID NO: 109225 - DNA, 122 bp, Homo sapiens
gtgcgctaagttgcagcagtcgtgtcaaagttcactatatagagagctcagtgagctgatcgcggagaagccacttctgccagccccggcgcctataaatcgcattccctcccgcgcccccc

SEQ ID NO: 109226 - DNA, 122 bp, Homo sapiens
gcccacgttctagggctctgagaacactagtgaacgaactcccgtgctttcaaagagctgcggtagggggcagaaccgggaaccggatgttctaagcctgtcgtacgagcgcgacgtaaagc

SEQ ID NO: 109227 - DNA, 122 bp, Homo sapiens
tagcattgtgaacatgcaaaaacgatgaagttctgcccttcatttcaccagagctgggctcgcctcaaattcctggttccttattcccgctggctcccaccaactgaaaagcagaggtggct

SEQ ID NO: 109228 - DNA, 122 bp, Homo sapiens
cataacctttcccgctgggaagcagtctctgcatcctgggccttctgtccagtttggggtcgggggtggggcggggaaaagtcagaggtgctgtgaggtgacagagcaagggataagggact

SEQ ID NO: 109229 - DNA, 122 bp, Homo sapiens
cccccgcgacagtcacccgttcccccgcccctgcgacagtcgcccgttcccccgcccccgcgacagtcgcccgttcccgcccccgcgacagtcgcccgttcccccgcccccgcgacagtcgc

SEQ ID NO: 109230 - DNA, 122 bp, Homo sapiens
agacagctatacccaaaggggatggcaatagcaacaacctctgttcagttttgtggtcctcgtgcagctggttgtgtgttcatctgttgacatttggaggtgcggtgggggatgttaatcag

SEQ ID NO: 109231 - DNA, 122 bp, Homo sapiens
gctccaggatccactcctctaggttgaggcgcttccgtagctccttgccgtcatacttgacggtgaccttcccttggcgcctcactgggctgtctcctgcggccccagaggggctctgaaag

SEQ ID NO: 109232 - DNA, 122 bp, Homo sapiens
tccccctccggatattcggaacagtatcacagtgggtgtgtacagctcctgcgacattgccgctagtatcttcctctccctcccaggatagaaggaagaatgttacaagggggtgtacaccc

SEQ ID NO: 109233 - DNA, 122 bp, Homo sapiens
tacagcgcctcagtgttgacaagggattttcagcaaaagcatccagccgggacatgcccacgagcttctcccaaaaaccttatggcaggaggcttataaatgagaatgaaaactgttttcca

SEQ ID NO: 109234 - DNA, 122 bp, Homo sapiens
gtacaaggcgagccaggagagtgaatgttacgtgatagatgccgaagtcctcacccacgacgtgccctaccatgactacttctacacaatcaatcgctacacgctcacccgtgtggctcgga

SEQ ID NO: 109235 - DNA, 122 bp, Homo sapiens
gggcgggcccaattcctgggctgacgtcactaccctggcttggagaggctgttgctgagccggctccaaccggctggaaggcgggaagctgtttcgcctggaggctcgcgcgctttttggaa

SEQ ID NO: 109236 - DNA, 122 bp, Homo sapiens
taagagaaattcagaagaggctggggtcctcgtctttttctgagttgtgaggaggggccgcgtccttgtgcttctgcaccaagcacgaatctgccctgcaggagggaatgggcgtgttcctc

SEQ ID NO: 109237 - DNA, 122 bp, Homo sapiens
agtttgtgaagaagctaagatcagttgagataaatcattgttactattcttgtattctgtcgtggactcttggggatttgcaggctgcattaagtacaagttttgtcaagtttgggtgcaca

SEQ ID NO: 109238 - DNA, 122 bp, Homo sapiens
cgccgccgtgacctcgggcgcctaccggggggacccgtcctctgtcaagatggtccagagcgacttcatgcagggggccatggccgccagcaacggcggccatatgctgagccacgcgcacc

SEQ ID NO: 109239 - DNA, 122 bp, Homo sapiens
aattgtcccagagggaagagaagggctgccagggccgcctctcccctccacagtccactccgcacaccgggcggcgccctagctggagtccccaccacaggcccttccctgagcctgccctc

SEQ ID NO: 109240 - DNA, 122 bp, Homo sapiens
tcccatacccgctgccttgcacatggtgctcaatacacacttattgactgactggtagaccgatctgcttaaaggttaaaggctacatccaaatatttattttatttttttatattacacac

SEQ ID NO: 109241 - DNA, 122 bp, Homo sapiens
atcttgctggttttctgggtttttccaacaggaactgggcctgtcaatatcccctgcacccgcttccgtgggttggggcgggaagggtggcctgggggacgcctctggtcctgggaaaggaa

SEQ ID NO: 109242 - DNA, 122 bp, Homo sapiens
gagcagggccgcccgtacagaccacacctggggctttctgggttaggggatcgacttgcacgttcacactgccaggctgggcggtgacttcctgcccctcggcctcaccggtgccccggccc

SEQ ID NO: 109243 - DNA, 122 bp, Homo sapiens
cctttttgacttatggggcttgcttgggcaagcctatctgtctccctggtgtgctcacctcgaatctctttcctatttcttgttagaaacctgaccacaagttccataaaagcagtagttga

SEQ ID NO: 109244 - DNA, 122 bp, Homo sapiens
aattcgcagccctgggccccagcacccactctctggcccttgctttccttgtaggaccttcgcctctgcatttgtccagtaactctggctgtgccggatactgcttgggtaaaacgggcacc

SEQ ID NO: 109245 - DNA, 122 bp, Homo sapiens
acttctattgtgtgcttctttaataatcaacagtgttgctcgcagtcccagcgctcccaacgagggtgcctcccgttgacaacaacctgagcagacctgcgcctaggccctccgccaggcct

SEQ ID NO: 109246 - DNA, 122 bp, Homo sapiens
cgaaactgtggctggcagccaataagagatgctttaaaccccaactctcccttgatagcccggcaatttgtgagtaacttatcaggcagcagaattcatggagctctgaaggctgggccttt

SEQ ID NO: 109247 - DNA, 122 bp, Homo sapiens
agttggggcttatacctctgaggtgggagcactgcctagctgctgctggtacctacaaggcggagtgatgaggctggctctggcaatctagaaaaataaatacataaagctgaggtgagata

SEQ ID NO: 109248 - DNA, 122 bp, Homo sapiens
gaggcttaaatgcctcccaccctctcgctgtcagcggacagggcatgtggaactgttaaacgttaaaactctctgctctggggcccagcccgtgctctctaaataaaggtaggagcggaaag

SEQ ID NO: 109249 - DNA, 122 bp, Homo sapiens
tttcatttctttttcctgtgtggttttaatgataagtagtacaggcttttaggactggtacgatttttctatgtcgtagaacccttttgtaaatacttttggtattatggtgtgtgtttcta

SEQ ID NO: 109250 - DNA, 122 bp, Homo sapiens
gcccccctcactgccatgcctgccaccctcctacccctccacgttaaatatgcacgctggcgagcaggcagcggagaacacagaccttagagttccttggttttggatcctagctctatcac

SEQ ID NO: 109251 - DNA, 122 bp, Homo sapiens
gaatgaaggctaggaaacaaaaacgtggatgcgggtgaggagctgtcagtgttaccgccacgacaacgtggaccctgcgaaactcggaggtgccactcaagagccgaaagcctgcccactcg

SEQ ID NO: 109252 - DNA, 122 bp, Homo sapiens
acaggaatgcagatgatgtgccaaaactcagtaactggaacatatattactgccctcttccgtgtactagagtatcacttcaaataaccaagaagggtatgtatagggagttaacaacaagt

SEQ ID NO: 109253 - DNA, 122 bp, Homo sapiens
gcgtctatacccgcgctcagtgggtggcccttgggcgcgcaccccgcccggcaagagacgcgtccgcttctaaccgctgagggccagcgcgtctgaggtttaaggtcttgcgaaccggtctc

SEQ ID NO: 109254 - DNA, 122 bp, Homo sapiens
cggaacatgtgcaagacccggcagcaggttccgggggaggcgaattgatttcacaacggtcgagaaggaggaccccgcccacttcgtcatttctcggaagcccagggactcgccggaagagc

SEQ ID NO: 109255 - DNA, 122 bp, Homo sapiens
ggtggtagagccgagatgagagaccccactacccatcctgcagcctggagccagtgtgtccggaggccatcgtgtgccgtaccaggccccaggctgccccaggagaagcagcggtccttgtg

SEQ ID NO: 109256 - DNA, 122 bp, Homo sapiens
gtttagcctacgaattgacaatgaggtcaatctgtatggactaacacagtaagatctctacgacatattaatgaaaaaaaatcaaattgctaaaaatgtatgataaaacatcaactgtgtag

SEQ ID NO: 109257 - DNA, 122 bp, Homo sapiens
tctgagacaaggtctcactctgtcacttaggctggagtgcattggctgatctcagctccccgtaacctcctcctccctgtaacctcctcctccctgattcaagtgattctcctgcctcagcc

SEQ ID NO: 109258 - DNA, 122 bp, Homo sapiens
gtcatacatcactcaggccgtggccttgaatgccctgtctctggagcagcaggtaccctacgccttcttcacccagacggactcccagcagccgctgccgcagccccagcctccgccgcccc

SEQ ID NO: 109259 - DNA, 122 bp, Homo sapiens
gggcactgcgagggcggagctgcgttctgttcagcacagacgtggggggcaccgtaaaggcggagcagcattcttctcagcacagacgttgggggtactgcctgcctttgggataactcggg

SEQ ID NO: 109260 - DNA, 122 bp, Homo sapiens
atattctgttttgctgtgtggatgagttggttctgtgctccatctgctattgggcgttcacgctttaagagggagaaagtaactaaagagaatgtgattatattccaaagaagggttcttat

SEQ ID NO: 109261 - DNA, 122 bp, Homo sapiens
gcttcttcatcatgttcagtcccgttgcaaccgaaactgatcgctgtaaactgggatcttcggaagtacctgttggagggagtgtagcagtaatggcttttcaaagcatgagaatcaatagg

SEQ ID NO: 109262 - DNA, 122 bp, Homo sapiens
ctggcagggagttgaaattatttttctcactgctgaattcccagggcctacaacagtgctcgccaaaaaattaatactcttggttcttcaaataaaacattctgtaaggactgctcccaatt

SEQ ID NO: 109263 - DNA, 122 bp, Homo sapiens
ctgagctgcgcgggatgctgagctgcgcgggatgctgagctgcggggggatgctgagctgcgggggatgctgagctgcgggggatgctgagctgcgggggatgctgagctgcgggggatgct

SEQ ID NO: 109264 - DNA, 122 bp, Homo sapiens
ctttgagcctgtgaccgacttgtggttggctgcgggggcggagcccgcaatggaaagaggcgtggccagttagaaagctcaagtccttagcaaccgcgccctgggaacgtttgcctagcaac

SEQ ID NO: 109265 - DNA, 122 bp, Homo sapiens
ttcaaccaggtgttcaaaccctaatcagattaatggacttttttaaatagatgggtcaagcgtcagccaactggaagagcatgaagggagcagtcccagctgtagcacttgttgggctagag

SEQ ID NO: 109266 - DNA, 122 bp, Homo sapiens
atcactgtgtttgaatcgagggggaggggtggtaaccggaaataaagacctccgatcttccgccccacatgcagtctttgtctttttggggggaatggggccccttgtcttctccacacccg

SEQ ID NO: 109267 - DNA, 122 bp, Homo sapiens
cttcccctattcttgcccaggtcagctatgtcattggtaatacttggctgccttttctaccgctcccctttctaaatctcatgttacccatagtatacatgggccctttgtatgcctgccta

SEQ ID NO: 109268 - DNA, 122 bp, Homo sapiens
caattactgaaaggaaacatccaataaaacaaaatcagaacaagctcccaaccccccggccgcctctggctgccaggcgggggtgggctggcctcttcccccactgctggggggtgacggct

SEQ ID NO: 109269 - DNA, 122 bp, Homo sapiens
cacccctgcggacacctgggcattcagacgcatgcccacaggcacacacgcatgcacgcacgcacgcacacacgcctactcggcccccggggtgcactcaggtgcctgccagtcgctcacac

SEQ ID NO: 109270 - DNA, 122 bp, Homo sapiens
gggcggagggctcacaccctgaggctcggaaggcgggcagagggctcacaccctgaggctcggaaggcgggcggacggctcacacagacccacaaggaccaaagaggaacgtgcaggactcc

SEQ ID NO: 109271 - DNA, 122 bp, Homo sapiens
cagacccgccgctcagcttctctggctcccgggcatgggaatctggactcgggagcggagcgctcccgcggccagcaggagtcgctattgcccttagcagccagctccgttaccccgggtca

SEQ ID NO: 109272 - DNA, 122 bp, Homo sapiens
ttctcccccacgcctagggctcaacctaaccactacggcgccaaggaccggggtccgaggcgcttcttccaatcaagaagggctcggggcatattttagccaatcagaagggctccgggcgc

SEQ ID NO: 109273 - DNA, 122 bp, Homo sapiens
cgttgcccgagctaaaggttttcctcgacggagtctttagaataccgtggtagaggtagacgcggttacaaattgatgtctgttgagacagtctacccctgtaaagtgtttttggttactca

SEQ ID NO: 109274 - DNA, 122 bp, Homo sapiens
agttttagctcatcaactaatctcagtgatgtattttgcattttttttttctctcaacaacgctttggttacctgaaatacagattatgcaggaaaggcaggataaatgctttattttttcc

SEQ ID NO: 109275 - DNA, 122 bp, Homo sapiens
cctcgccgttctactggtcaggccctatcctttcattagcatatttaaacagctcaggggcgggggaagcttgtaggccggctccggggacagttattgagcacgcgcagaggcggggcgtc

SEQ ID NO: 109276 - DNA, 122 bp, Homo sapiens
ccgcgagggaaggtgagaccgggagggagctggctgtcctgaagctcaggccaccgctgccgcctgctgagctagctgcgcttggcaccggacttggctcagaatcacactggctaattttt

SEQ ID NO: 109277 - DNA, 122 bp, Homo sapiens
ccgcctgctctatttaaacttctggactcaacctggccgctagaccggagcgtcctccagcgcaggcaaggattcctcgtttagagtcatgttatcttcgagtacctagagagacattttaa

SEQ ID NO: 109278 - DNA, 122 bp, Homo sapiens
atccgcggtcccgacatagctccctcacacacaggcacacacggctcgcctcacacgcggcgccaacttcacacttgggcgcacaagccccgagaaccacagcagcgaagggcgcaaacccc

SEQ ID NO: 109279 - DNA, 122 bp, Homo sapiens
tgcctggggtggcctaggaaagccgcctccaagctaggcctcccagatctgaccagaccccgcagaacctagcacatgtgggcccagcagctgcccaggtgtatgacttcagtttcacggtc

SEQ ID NO: 109280 - DNA, 122 bp, Homo sapiens
ttgcgaggctgactcaagtcataaggcacctgacggttaacagggtggggtccttaaatccggaaccggatctgtggtaccggttgggttacctcgggagtcttaggtggagagttagtagg

SEQ ID NO: 109281 - DNA, 122 bp, Homo sapiens
tgagcggagcactgggcacctcctatccttacatccacagcaacctgacaacctcccaggcgggcgtggagtttgaccagttccaccaccggcgtctatctgggttctctacgtgccgggcc

SEQ ID NO: 109282 - DNA, 122 bp, Homo sapiens
aatctgctttcatgttggcaaatacttggcagggcaccctttggcagcctttcacgctggcgtgaaacaaattgggtctgttcgatcctgtcctgcgcagagctggaattcactggtggtga

SEQ ID NO: 109283 - DNA, 122 bp, Homo sapiens
caaatgcaataagagaaaaatctgtcatctgatgttgagatagcatactgggagccaggtcggggtactgcatttgctcaccagaatcagatcaaacgagatacgagtcctttggtttgatt

SEQ ID NO: 109284 - DNA, 122 bp, Homo sapiens
ttatgtaatcctcacagcacctctatgaggtagttattctcatgatcctcatttgacagacgaggaaactaaggctcagagggacttgccccagggtgcacagtaagtggcagggtgggatc

SEQ ID NO: 109285 - DNA, 122 bp, Homo sapiens
tggcgccagccgctggtgcacaggcagggcctggggatcgcgagtttctgcccagcctctcgtcaggctgagggtccagggcgggaaggagagcggatctcgtcgggtctccaccgccgccg

SEQ ID NO: 109286 - DNA, 122 bp, Homo sapiens
cccccaccaatcacagtcccagccccatttacacagaagcaagtggattctgcagctgagcgccgagcgctgagcgtggggaggagaagcaacggcagcccggagacctgccccggcaccag

SEQ ID NO: 109287 - DNA, 122 bp, Homo sapiens
gccggccgcgtccaggctgcgggccgaagccgggctcggggcgctgccgcggcgggcgctcgcccagtacctgctcttcctgcggctctacccggtgctcaccaaggcggccaccaggtgag

SEQ ID NO: 109288 - DNA, 122 bp, Homo sapiens
atacctagttcctaatttcctacccaaatgctgttttggctgtgttactccctctgccctcgaagctaagatttatatatttacaaaatttattggagctggtagtcagatctagtaaaatg

SEQ ID NO: 109289 - DNA, 122 bp, Homo sapiens
ctcggaggttcgtatataaatgtgtttttacccagtgtgcattattctccgcctggccgccgccctcagcgcggcggcgcgggcccgcttgggcccgggctccggctcccgctgctcagcct

SEQ ID NO: 109290 - DNA, 122 bp, Homo sapiens
tttctaataagaataggatagcctagcctagtctagcataacacagcatggcacagaggacgaacattgtagattactaagggtgagtactaacttgtgaaagttttgtttaagttctagta

SEQ ID NO: 109291 - DNA, 122 bp, Homo sapiens
ttcgggtcctcctgatgggggtccctgcagcagatggggcattcacttccctgcagagctcggcccgagggagctcctgggcctccttgggcagggaggggtgcgaccgaattccctggcac

SEQ ID NO: 109292 - DNA, 122 bp, Homo sapiens
gccccgcgcccccggcccgcgccgcgcgtattgctgccgcctgggggcgaggagggcgcgcggcccggccgatccctgcccgcactcaccgttcacaggcgcgactgcccccggggccaggg

SEQ ID NO: 109293 - DNA, 122 bp, Homo sapiens
agcatggagagacctccaggccctgggagcgaccagactgcggatgggggcagctctgggcgctgacattcccaagtcctgggagcgaacagactgcggatgggggcagctctgggcgctga

SEQ ID NO: 109294 - DNA, 122 bp, Homo sapiens
tttatctcctcactgaaaagcattagaacatctctacagctataccactctgaatgctcccgatctggtccgaaaagcattagaacatggaattacttgagtgattaaaagtaaaacaataa

SEQ ID NO: 109295 - DNA, 122 bp, Homo sapiens
cccccaacccccaggccattccgggagcgggtcgcggaggtgggggaggggtgcccgtcacgtgtttgtaaatttcaccctccgggggcatttcccacgttgcaggtgggacggggacgaat

SEQ ID NO: 109296 - DNA, 122 bp, Homo sapiens
gcggcccgaggccggccagaggcgcttccccggccccgcggcccccgcccagcccggccccgcgacttcccgccccaggctgcggctggctgttgctcctggcccccacgcggcgctcacct

SEQ ID NO: 109297 - DNA, 122 bp, Homo sapiens
cattcaccggcagtgagacatggcaggcagacacagctcacactgctgggagctcgcgtgcgcagtgctgcggaaggaggggtctgggcggaccgccctcacgtgcccgggtgctggtggag

SEQ ID NO: 109298 - DNA, 122 bp, Homo sapiens
aaccttgtcctgatgagggctcggaaagtcaccacttccatctcagagtgactcagcctccgtgtgagccgcaggcctcggctgggccgctgactcgctgtgactcgaagcaagtcccgggc

SEQ ID NO: 109299 - DNA, 122 bp, Homo sapiens
aagaaaataaaggtgaattccaggcatgagctttcgacggggaatggggcttccccgactcgcccccacgccccccgcccttctccccaggtgcgcagcccgcgccgcccaccccgggcgcg

SEQ ID NO: 109300 - DNA, 122 bp, Homo sapiens
cggaatcgcaaccggcctttccccaagtacggctgggcgctgggatggggcctgctgtaacggcagggagacggtctctccgcggcccaggagagagagaccagaaggaacggcctcaggta

SEQ ID NO: 109301 - DNA, 122 bp, Homo sapiens
tttctctctcttttcctcttttattccttccaccttccataacaaataattttgggagaacgttttaaaaagagagaaatcctttatttttagagccagaaagatttttttcctttggccaa

SEQ ID NO: 109302 - DNA, 122 bp, Homo sapiens
agaagaatgtggacgcgcgacaggacgggctgaaaggctgcaggaggaagcaggcagccccggctcctggctttaccatttcggttgctttcctaaaaggctacatgcagggtcatgtgact

SEQ ID NO: 109303 - DNA, 122 bp, Homo sapiens
ggtcgacaaaaaggggcggggatgcggtggttccgggcggggtcttcagcccttccggtgcggcccctttaagaggcggggcctgcggggcgggcgccgagaacgccggggcggcccgaaga

SEQ ID NO: 109304 - DNA, 122 bp, Homo sapiens
cactctatttttctgcaggacggttctcgcatgatggtgctggtagacaaaatggagccccgggcaaaaattagtgtttaacattctgcccacaccattcccgctatagcagtggagtggag

SEQ ID NO: 109305 - DNA, 122 bp, Homo sapiens
agaacgaggagccggttcagagaaacccaaagaattctttctctctggaggttttcccatcgcatgagtgtttccgtcgagctcgtcctcgtactcagcggcctagaaacaggccagagagc

SEQ ID NO: 109306 - DNA, 122 bp, Homo sapiens
ccccaggggatgcgggtccctgacactgtgcaggcacagtgagaatgatggaaggggtcccgagaaggatgcaattccctgacaacactaagagggatgggaggggtccccagaaggatgca

SEQ ID NO: 109307 - DNA, 122 bp, Homo sapiens
cgaagatgcttttgtaggcgaaacgctcagctcgcgcggctctgaaccaccggggagcagcggctgctgctagtcggactacgccagcacctccttgtccagcccgggagcagccccgcctc

SEQ ID NO: 109308 - DNA, 122 bp, Homo sapiens
cccacgggctgatggcagaggaggcgacagcgcagctgagcgagcggccagcagggggcgcggccctgccgtcctcacacccaccccggacacggagacgcggggcgagcggggcgcccctt

SEQ ID NO: 109309 - DNA, 122 bp, Homo sapiens
cctaggggaatggcgagggaagcacggctcgcagctggagccgggagtgggcaggtgtctcgagggtaccgctccccggaacggggaaggacaccagtacctcacccccccagagtgggcag

SEQ ID NO: 109310 - DNA, 122 bp, Homo sapiens
taacctccaggattatgtgaggattgaatgggacaaggacatcaagtgttagcacagtgtcgtcacccagggactgctcaatcggtggaggccacaccatcatcttcacacactggcctaca

SEQ ID NO: 109311 - DNA, 122 bp, Homo sapiens
accatggcaccacaaaatgttttttaaaaaatcagccaagtggcagggtgcggtggctcacgcctgtaatctcagcactttgggcgtggtggcacacgcctgtagtcctagctacttggaag

SEQ ID NO: 109312 - DNA, 122 bp, Homo sapiens
cctaaatttataaagaccaggtgggtatgggcttgaaccttagctctgccatttactacccgtgtcatcttgaacaagtaccttaacaagcgtaggcctctcattgtttcctcatatatatc

SEQ ID NO: 109313 - DNA, 122 bp, Homo sapiens
tttattcccggctgtccttccagtccggaagcctgaagtggacaccgaggaactgcggtgcggaaactaagatagtactgggaagacttgggttctggccagccaagattaccaaaaaaaaa

SEQ ID NO: 109314 - DNA, 122 bp, Homo sapiens
cgacccaacattgagtggtacaagaacggggcgcgtgtggccactgtgcgggaggatccgcgtgcgcaccgcctgctgctgcccagcggcgccctcttcttcccgcgcatcgtgcacgggcg

SEQ ID NO: 109315 - DNA, 122 bp, Homo sapiens
acctgctgtgtgccaggcgtagaggaagataagagattccagagatggtggatggtatatcgtcatctatgatagatgcaatacaatcatgggggcccaaagtatgtgtagcaatttgttct

SEQ ID NO: 109316 - DNA, 122 bp, Homo sapiens
cattggctgagatgagcctggtcccattgacaacaaacaggggggcgcgcggcctggaggcggggccgcagggggcgcgggctggggcgggggaatcccgccccgccctttctgtgcggcgc

SEQ ID NO: 109317 - DNA, 122 bp, Homo sapiens
tttcacttaactttttaaacagtgagttctgtagttttgatgagtgagagtcatcatatacgaagcaaattaaaggaaagggaaggggtcatgagacttgtaagatttttaaatactgtact

SEQ ID NO: 109318 - DNA, 122 bp, Homo sapiens
agagtggctgcagcacagttgtctgtccataactacctctatggcctctcgtttccacctcgtttctcagggtctcagtccagggaaggccttgccactttgtggctggagactgtgtcttg

SEQ ID NO: 109319 - DNA, 122 bp, Homo sapiens
ttgatgaggtcctgaccaaatgcaggaggagcaattccagcaccgaggggcgagcagagccgcctgttagcactcctgggagggcccggagtggtccctgaatgatggattcacctggaaca

SEQ ID NO: 109320 - DNA, 122 bp, Homo sapiens
acctagacccggactcggaacccggggtacttcgtcaaccagaaaacgaacctgtgtaggcgcagtgtcagcggcagccgccggggcgcatgcgcggcccgccctatccggggggggggggg

SEQ ID NO: 109321 - DNA, 122 bp, Homo sapiens
tccggaaagggcgttgggccaccagtatattgtcacgagtgggagcaggagttctgcagtcggatatcgtggattctgtttctgtctcctccgccctggctgtgtggcctcccacaggtcac

SEQ ID NO: 109322 - DNA, 122 bp, Homo sapiens
ctcctgtgcaaaactacagaatatgcagaattggtctttgtgcttcttttacctccctttcggaatctctctcctacctcttgctctttcccccatcttccagatactcagcacccccatgc

SEQ ID NO: 109323 - DNA, 122 bp, Homo sapiens
accccctggtggctgaggccctcaagcgggagctgggggcctccctctacctgggctgggcggcggctgcactgcttatgctgggcggggggctcctctgctgcacgtgccccccgccccag

SEQ ID NO: 109324 - DNA, 122 bp, Homo sapiens
gagatgtggggagcgcctctgccccgccgccccgtctgggatgtgaggagcacctctgcccggccaccccgtctgacaagtgagaagaccctctgcccggcaaccaccccgtctgagaagtg

SEQ ID NO: 109325 - DNA, 122 bp, Homo sapiens
atggtactggtagtgtatgttttctatgtggttcaaatatgaatttcgaacacaccaagccgctaatgagatagcagcttttttctgggacccagagtcacaaccaaattgatttaagaccg

SEQ ID NO: 109326 - DNA, 122 bp, Homo sapiens
tgccttgcgggcttgtcgtgaagatatggcgaggtattattcgtggagtgcctcgcgcggcgtgtggcccacagcagacacccaataaatgagagttgctgggatgtccgagggtccctgcc

SEQ ID NO: 109327 - DNA, 122 bp, Homo sapiens
aggccagagagaatctgagcggcacacaggctggggaggggttggccgtgcctcggacaccggcctctgcagcttgagcctattactgacccaagtcccagtatcaccaggtcccagtgatt

SEQ ID NO: 109328 - DNA, 122 bp, Homo sapiens
caaccctgttccagtccactgtcacctcctccaggccaaatgagggcaatcacatataaccgaagccctcaacacacacactccaggagtttggagtggggccagagcaaacacctggagtg

SEQ ID NO: 109329 - DNA, 122 bp, Homo sapiens
cccttcccctaaaggttgtttgagcaggaatccaaccagcaattactatatttccatttgcgattagaaaagaagaggtttttcttatctgcaaacatttggccaccaaatcccaggagtat

SEQ ID NO: 109330 - DNA, 122 bp, Homo sapiens
ggtcctcctctcaagcgtgcaagtcacacccccggaatccgtagatgtgcatctgtgccccgtgccccactcctggatgcataaatgcatgagaggcttcctcacctgtatagcataaaaat

SEQ ID NO: 109331 - DNA, 122 bp, Homo sapiens
ttgtttttaaatatgactctccctcctacctgtagattgctgtctgcaaataatgggggacgatttttataatgtgaatgtatctttcattgtcaaagaacgtcctggtcaggtgaaatgtt

SEQ ID NO: 109332 - DNA, 122 bp, Homo sapiens
gggaaattcacccagcggctgctttcagtggcctgagcccagcaggccggggcccgacgacgtgagggcttcattatgctgcagaatttcctttaagacagccggcctgtttacggatttct

SEQ ID NO: 109333 - DNA, 122 bp, Homo sapiens
ggaacccaggtcctggggagcgcacgaacgcggacagcagcgctgagaggggtctccaggcgcccgcgcgcccggggcagggggctgtggctccagcaaaggcgccgtcctcctccctctcg

SEQ ID NO: 109334 - DNA, 122 bp, Homo sapiens
ccactgttgattatccctgccactgctgtccttgctcattgctctctgccacggtggtctcgttattcaacgtccctgggtagattttgtctttaggttctgaacttgctgttccctttgcc

SEQ ID NO: 109335 - DNA, 122 bp, Homo sapiens
gccgcgacccaggggaacctcatagtcaaagtgaaagctgccggatggtgacttctcctgcggggtgctgggtgtggagaaggacgagcaaagaggtccaggaggcggtagcctggtggccc

SEQ ID NO: 109336 - DNA, 122 bp, Homo sapiens
ggtttgaagtacctggacttcattcaaaccattaatagcttgcagctatcctaaaccctgcggagctatgattaaccttttcattacagtttcatctataggataaaacagcaacttcagga

SEQ ID NO: 109337 - DNA, 122 bp, Homo sapiens
agaaagaagaggaaaagcaaatgctagaacctcgatggcttttttttttctccctgctgtcgttccagctgtagcctgggattaattaagtgctgtgaactcagtgccagagagaggagggg

SEQ ID NO: 109338 - DNA, 122 bp, Homo sapiens
gccagcgctttgaggaccctgtggacccagcggagagggcccgggtgagggctctggaggcgctgagcagggccgggagccacgggacccgcagagggcgcccgtccgcgtgggggcagcag

SEQ ID NO: 109339 - DNA, 122 bp, Homo sapiens
cctggccgcggtggacctcaagtgggagcacaaccccgctgtgttcctgggccccggctgcgtgtacgccgccgccccagtggggcgcttcaccgcgcactggcgggtcccgctgctgaccg

SEQ ID NO: 109340 - DNA, 122 bp, Homo sapiens
taaaatagcgttcgctaccactgaggcgcttattatgccaaactctgggcgaacgtcttgcggttccagtgtcttatttattcgcataacctctctgtagggctctctgtagggctgccaga

SEQ ID NO: 109341 - DNA, 122 bp, Homo sapiens
gcgctttgccgccggtggacttgcgagctgtttgctttgttcgtgccatggctaagtagacgtacctactcaacacaaatgagagaaaaaaactgatcatcccggtatttatagctgccctc

SEQ ID NO: 109342 - DNA, 122 bp, Homo sapiens
agttgcggagagcggactggagcgcctgctgcctcctctggcccgggcgggatgggtgtacggaaccctagggctgcacgtggaaccccaaggctgcacctggaacccttggcttacactct

SEQ ID NO: 109343 - DNA, 122 bp, Homo sapiens
ctaaatctagcccagccatatcccagggcaagccctttgaaagctgtgcagctcagcatgcgaacagtacaagcacctggagaaagagcaaggaaattcacttcaaccaccccaactttagg

SEQ ID NO: 109344 - DNA, 122 bp, Homo sapiens
ctaggaaacacggaaggtattttgtgtttggagctagtaaccttggtcaaacgattcctccgaagagtcgctgaaggaggaacgcgcctcggcctctcgaagcagcagacaaaacggctgct

SEQ ID NO: 109345 - DNA, 122 bp, Homo sapiens
tcaccaccttgcccagtctccaggagttacatggagcagaaaagtggtgcagaggaagcacggcccactgcaattgcagatctatgtattttagccagagatagatctgaatggtttccagg

SEQ ID NO: 109346 - DNA, 122 bp, Homo sapiens
ggcgggaggaggaggtgagagaggccgggggcggggccgtgcggccggggacctgttgatcgcaggtatagccggctggcccgggctccctcgggactggggcgactgcgcatgctcgctgg

SEQ ID NO: 109347 - DNA, 122 bp, Homo sapiens
gtggagcccggcggcgggagcttagattctctgtgggccacatggtctcagaagaggccccgcggcccgggggcgcccgcagtgtcgctggaccggcggcagcgctggccacgccgtgggct

SEQ ID NO: 109348 - DNA, 122 bp, Homo sapiens
caataagtcaaactgctgccgcagttcatggatgtacctggggtacatgctccctcattgcgaggcaggacgtaggcacatgactgtgcatttaggcatatatgtgaccaagaagaaggaga

SEQ ID NO: 109349 - DNA, 122 bp, Homo sapiens
ctgggcaagatggcggccttcgggatcttgagctacgaacaccggcccctgaagcggccgcggctggggcctcccgatgtttaccctcaggaccccaaacagaaggaggtgcgttcgaaaat

SEQ ID NO: 109350 - DNA, 122 bp, Homo sapiens
gcactagcgggggcctgtgcaagtgaggccccccacctaagcttaagtttcattaattcacggctatgtagaaaatcgtctcaattcccataccgagtccatcatcatttcctagaagacta

SEQ ID NO: 109351 - DNA, 122 bp, Homo sapiens
taaatggggctaaatgtcagcagaattgaagaaaagtaaaggaacttaccaatacttgatcgagacagtgctaaaataaaacacatcaaaagaagaatgagttctgtttgtcccagggagaa

SEQ ID NO: 109352 - DNA, 122 bp, Homo sapiens
gctgaatgccgcgcggaggcgagccccggatcgcctgccctgcagagcagcctgccctgacgagccgcgctcctagcacgcacctgcgcacgagccatctcccgcctccttttcccgccgac

SEQ ID NO: 109353 - DNA, 122 bp, Homo sapiens
tccacgtggagtctcacgctgggccacgcggggctccgggggtggcgtctgacccgagcccggcctccgcagagttctctgtggcccatgaccttcggcctggcctgctgcgccgtggagat

SEQ ID NO: 109354 - DNA, 122 bp, Homo sapiens
ttgagaattactgccctaagatcacagtgaagctccttgagtggttgccttcagctctagcgattcctcccaacaactggacccttaatctgacaaagtatagcaacagataaaagacttcc

SEQ ID NO: 109355 - DNA, 122 bp, Homo sapiens
atcttccgtgaaactggtccctggtgccaaaaaggctgcagatggttgtcttaaagcatacgccagacatcaggtcagttttttttttttttttgaaacggagtctcgcctgtcgcccagac

SEQ ID NO: 109356 - DNA, 122 bp, Homo sapiens
tacatcccagcccagccacacgccatgccaggtacacagcaggtgcccctggaagaggagcgtctaaagataacacaacaagataacaaggaggacgccgcctgcctaacgtgtaaataaca

SEQ ID NO: 109357 - DNA, 122 bp, Homo sapiens
ggggaggcgaactcgggcggcagactcgggcaccgggcggcccgcgctgacacctggctgcggcccaggtcccagcccccgtcaaggccggcgttacggggctgttcccaggaaagggttac

SEQ ID NO: 109358 - DNA, 122 bp, Homo sapiens
tccatataaagttctattatattggtttttcagcaactatattaaaaatctacattgggccggacgcggtggctcacgcctgtaatcccagcactttgggaggccgaggcgggcggatcacg

SEQ ID NO: 109359 - DNA, 122 bp, Homo sapiens
ataaggctattttaacactgtttgctttccagatgtgtaaggcagcccaggactcatacccgtggtatctcatatcagaaatgaaacttggctttggaactaagctccaaaggtgatgatca

SEQ ID NO: 109360 - DNA, 122 bp, Homo sapiens
cactctgaccttgcccaggattcccagagcaccaacctcatccagggcttccagacttcacgcccctgggaccttgagtcccgcaccagggccttaggtttcatcttgaagactctttggct

SEQ ID NO: 109361 - DNA, 122 bp, Homo sapiens
tttaatatccttcattaaacatctactaaaatataattaaatgttggggttgacaatatccggaatttagaccacagaccatgctattggtttgattgtgttccccaaagttcatgggttgg

SEQ ID NO: 109362 - DNA, 122 bp, Homo sapiens
tggtgggctaattctcctggggtcaggatgatttctgtgcaggctgcagtgagccgtgaccgcgccattgcactccagcctgggcgacagagggagacaccgtctcaaaaaaaaaaaaaggt

SEQ ID NO: 109363 - DNA, 122 bp, Homo sapiens
ctgttccggttgcaggtatttcagagagttgctctcaaattcttcaatctccttggttggcgactccatagctgcaggtaggtgaccactggcggtgaagctgagatagtttgggctgtccc

SEQ ID NO: 109364 - DNA, 122 bp, Homo sapiens
tctagtctagccacttggtgcgggtaggcattacctgtcccactttccatgagagaaaaacgattcaaaggttaaacaatactctgaccaaccagaagaaaacatgaaccatctagtctaac

SEQ ID NO: 109365 - DNA, 122 bp, Homo sapiens
atcagccaactctgtgctgaaatgcaggtttgtgcctgctttgggctctttgctgcagagcgtgttgcagagccctgtgatgtgtctggtgcttcaggcaggtcaccaggcagcttcctggt

SEQ ID NO: 109366 - DNA, 122 bp, Homo sapiens
aaatgggtctccttctccccggctatcagtccttcccttgttggggagggcccaaagttccggccagcactgccatccaagcagggatgttgcttgggctgtggcagactggagtcaggggt

SEQ ID NO: 109367 - DNA, 122 bp, Homo sapiens
aacaacagagaagagtaaaagaaaagctcagaaggcaagtccccaagcacctagctccagcgagccctgtccatactgcccagaccctggacacagacgtctggacactgccttctctgaga

SEQ ID NO: 109368 - DNA, 122 bp, Homo sapiens
gtccttcatacaatggataagtgtcttggcaacgttgatggggaaaattgttggagagagcgcggagaggtcatctttaaggaagatgaagggatatctaggttttttttcggttttgttta

SEQ ID NO: 109369 - DNA, 122 bp, Homo sapiens
ccggtctgcagagaaattaatacttgccctgagcttggaaatcaacaatcccaggaactgcgcccgccgggggttcagacctgaacctcgccgtcaggcgcgctggcgaacctgtagttcgg

SEQ ID NO: 109370 - DNA, 122 bp, Homo sapiens
cctcaaaatactgaagttctgtgttttgactgtgtgttgttactctgatcactgaggtgacgacttggaggttaactgccattgttccaacccccacgagctgaagtggcttccaggagatt

SEQ ID NO: 109371 - DNA, 122 bp, Homo sapiens
tgttgggtgtcgtccttttcaaaagtgttttggagctttctgtgccccccgactttcccccgcctccccgccccccacgtggccacttttctctggattttagctgtaatgtctttactctt

SEQ ID NO: 109372 - DNA, 122 bp, Homo sapiens
cgggccctcccgctggtgctgatgataatggagatagcgggcatgggtgcagggccctgccgctggtgctggtgatggaggtagtgggcgtgggtgcagggccctcctgccactgctgtttg

SEQ ID NO: 109373 - DNA, 122 bp, Homo sapiens
aggcaggatgtttcctcctcattggagcagaatcctggaaagctacaactgacaagcattcgtctgaccctgggcagatcagtgggcatctatctgagaaaaaaggggcatatatcagtggg

SEQ ID NO: 109374 - DNA, 122 bp, Homo sapiens
tgcgcggcggcggtggcggcggggaagatggcggcgtcctccctggaacagaagctgtcccgcctggaagcaaagctgaagcaggagaaccgggaggcccggcggaggatcgacctcaacct

SEQ ID NO: 109375 - DNA, 122 bp, Homo sapiens
caagcccacttcctggacttcaactcattcataaggagaagacaatactgtctcaggcctcggggtgtcctgcagttcacaaagttttgtttctgaagtgctttgaggtcttccaagaaagt

SEQ ID NO: 109376 - DNA, 122 bp, Homo sapiens
agctaagacccaacttctttctgaagctttatcttccttcccaactcacacatgcacacgcgcgcacacacacacacacacacacactaaatacatatacactgcctcactctttcatttgt

SEQ ID NO: 109377 - DNA, 122 bp, Homo sapiens
cctccagccccgctcccgacgtgaggggcggggcttgcctggaggcggggcgcagggatccggaaacacctgatcatctataggtttagtgcctaatgggtgttgttcctggctggacttga

SEQ ID NO: 109378 - DNA, 122 bp, Homo sapiens
agccgctgacacctagcggagcgatgcccaaccaggcgcagatgcggatcctgaaagagacggagctgaggaaggtgaaggtgcttggatctggcgcttttggcacagtctacaaggtcagg

SEQ ID NO: 109379 - DNA, 122 bp, Homo sapiens
atagagctgagaagtggcaaaggacggacccaacccagggcctttagaaccaaagcttaccgcttcttctcttggggaaggtttctcccttaccttttcgtccaacttggtgtggatgtgtg

SEQ ID NO: 109380 - DNA, 122 bp, Homo sapiens
caggggcctcagtaaatcacgttaatgaaggctccatccccaaggaaaccacctgtctttcgtggagctgtctgaacttatgttactctgcttcccttccagctgcctctattacctcatag

SEQ ID NO: 109381 - DNA, 122 bp, Homo sapiens
cagagcccctccgcagcttcccactgagtccaaggccctgaggaggctgaggggcagcagcgggggctgccaaacacttccgatgctccagacgccacacaggttttctgagtcttccggta

SEQ ID NO: 109382 - DNA, 122 bp, Homo sapiens
tgagattgcctgcctaattcatctgctactgccaaaaaaaaaaaaacaaacactgcagctcgacgcctataaaccttttctgagcagatgaggctacacaacatgtttatgagagaatgagt

SEQ ID NO: 109383 - DNA, 122 bp, Homo sapiens
agccgaagcgttagcccggaacgagggcggactggaaagccggagcggggccgagcgagccgccccaaaaggctgccgcttcatcccagcgaaaaccgccggccaggccaagcgcggcgagg

SEQ ID NO: 109384 - DNA, 122 bp, Homo sapiens
tgtcgccgctacgagagccaaccgagattatgtgttcaaacaagtccaggaggccatcgccggcatctccaatgctgctcaagctacctcgcccactgacgaagccaagggccacacgggca

SEQ ID NO: 109385 - DNA, 122 bp, Homo sapiens
ctggcctcaggctgccagcctcagggaggtagatgcggctgtgacagcagcaaagaatgacggccaagggcgacagcaggggctggccatgctgtaaaggggcttcttgggagggtccagcc

SEQ ID NO: 109386 - DNA, 122 bp, Homo sapiens
cgctgccttgctctccactttccatctctccatcttctcctccttcccttgaaatcgcaccgcaagtgtcatttgactacactgccatccttcgaggtctgaaagggctgcagtgagaagaa

SEQ ID NO: 109387 - DNA, 122 bp, Homo sapiens
ttaatcacaattctgattagaagatcccttagacatggattcatccacacatgggtaagccgagggaatgtatccatcactagaaattaatgctgtgttctactgtgccctacatgagaatc

SEQ ID NO: 109388 - DNA, 122 bp, Homo sapiens
cccttcctcaatttgtcccttgagggaatgacaaccttcctcaactacagacattttgcccgggactcctccctccagctttgctgatggcctgtcatcgctgcccattccagaccagctcc

SEQ ID NO: 109389 - DNA, 122 bp, Homo sapiens
tcgcaccctagggaccgccatgtgagcttccctcccagactgacgctgcgcgcggagagccgggagtcacaggcccaggcactcgcagcctccaccagaacaaacggcggcagcggccgtgc

SEQ ID NO: 109390 - DNA, 122 bp, Homo sapiens
ctcggtggtggtggaccggcgggaggacgagcgctacctcagtactacttctgggtctcccgcgcgggctgaggaagcgcctttcgccgccaagcccgccccgcgcatgcgccgactgcggc

SEQ ID NO: 109391 - DNA, 122 bp, Homo sapiens
acaaaactcagagaaagctcagctcccagtatggagagcatcatttttcagtgaagagtccgtgataagctgtgaaattcagatgcgaattcaaacattttcagacattcagagagtcagag

SEQ ID NO: 109392 - DNA, 122 bp, Homo sapiens
cacgaggtctgcgatgggtgcagcactgctcccgcatccatgtgaagagcacgaggtctgcgatgggtgcagcactgctcccgcatccatgtgaagatcacgaggtctgcgatgggtgcagc

SEQ ID NO: 109393 - DNA, 122 bp, Homo sapiens
aaaacagggtacatatgaacactaaatttcaaatagaatagatcctatggcatcctgctgcgctcattgaccattgaacacacattactcacaccctatgaatggccaggtattggtacaca

SEQ ID NO: 109394 - DNA, 122 bp, Homo sapiens
tccttgctgtggagggcagagctaaggctccctcctcgtggcgctggggagttctgatggcggtccagggccctcgccaccatcacctgagcgctcatgttgcccacacagccggcctcgcc

SEQ ID NO: 109395 - DNA, 122 bp, Homo sapiens
tagctgggattacaggcatacaccaccatacccggctaatttttgtatttttagtagagacgggttttctccaggttgggcaggttggtgctgaactcccagcctcaagtgatctgcctgct

SEQ ID NO: 109396 - DNA, 122 bp, Homo sapiens
aaaataattactgtattaaataaggagcggtgaattcttcccaagggttcttatcgctggcggccaggccagaagcgggactgcgcccccacccccacctcgtgacgtcagggcctgcaggg

SEQ ID NO: 109397 - DNA, 122 bp, Homo sapiens
tcacactggaggaggccctgcttgcgtcagtcttggcgctagaacccgagggcctggagccgccaggggagacgcggagctcggccgagacgaggtggcttttggcacctctttaccctctg

SEQ ID NO: 109398 - DNA, 122 bp, Homo sapiens
gctgttggacggcgccactgctggcacttatcgggagatgctcattggacagtcacgtgacgggaccaaacctcccgagggagcgaggcaggtgcggtcacgtgacccggcggcgctgcggg

SEQ ID NO: 109399 - DNA, 122 bp, Homo sapiens
aaacgccgccgcgggccctgcctttcagagctgcggcagccggggctggcgtggagggggcgctgaaacaccggcgggcgtcaggggccagcgctgagctgcagatctggccgcagcgctga

SEQ ID NO: 109400 - DNA, 122 bp, Homo sapiens
taggctgtttttggagtcagtgcccacctgagaagacagtcagtaaggtaagagacagcacgagcacaggcaatgtcttcatcctgccttggttcctctgcctcttgctgagtgaatcctcc

SEQ ID NO: 109401 - DNA, 122 bp, Homo sapiens
cacataccgcccctgcaggcctgtcccctcctggctgggcccattccctgtcctcccccgcgtggcctcccctgaagctctgcacctcatggctcagcaaagccctgtccacagacacctgc

SEQ ID NO: 109402 - DNA, 122 bp, Homo sapiens
cgtacaggttcatcttgtacttgtggtctggctccaggcctgagatggtgaccccgtcctcgtgccccggcacccgcaccaccttgggctgcccatccccattcctgtactggaccaggaag

SEQ ID NO: 109403 - DNA, 122 bp, Homo sapiens
ctctcccagctggaggccatcctcctggactaccaggggcggcaggagatcttcctgcagcgccatggacccctatctgtccacatggcctgcctctccttcttcttcctggctgcctgcag

SEQ ID NO: 109404 - DNA, 122 bp, Homo sapiens
cgtctggagcttaagtctgggggtctgagcctgggaccggcaaatccgcgcagcgcatcgcgcccagtctcggagactgcaaccaccgccaaggagtacgcgcggcaggaaacttctgcggc

SEQ ID NO: 109405 - DNA, 122 bp, Homo sapiens
agcccgtttttgttttgcttaagaaacagattccgatccgagcaaagcctccctacctcccggggaatagggggagatggcagcacggtgccggcgtggagagcgagaataaaagaactgcc

SEQ ID NO: 109406 - DNA, 122 bp, Homo sapiens
gggactgcactttcaggactgcagctgttaatgaaccagctctgcctggaggctagagcccgcctgcctcatgcctaagtgtgcgtcattctgccttgtggtttctcgtgtggctcgaggcc

SEQ ID NO: 109407 - DNA, 122 bp, Homo sapiens
agaagtcgggcggggtgcccgtggtgaccgcgtcgctgggggacacgttgaggtagtccccgttgggcagcagcttgccatctgcatgctccatggacagcttggaaccgcaccacatgcgc

SEQ ID NO: 109408 - DNA, 122 bp, Homo sapiens
cccctacccccagctccttcctagcctattctgccaaagctgggatcttctcctggaacccgggagcaagaagagctggcagtgccgactcccagaacccggctttccttcagaaaagatgg

SEQ ID NO: 109409 - DNA, 122 bp, Homo sapiens
aaaacctaaatccttctagattatgtcattatagccaatttcagacccaaagagtagcttcgagagcctctacttaaaatgctatctcctctcaagccaaaaattatacctaattcatattc

SEQ ID NO: 109410 - DNA, 122 bp, Homo sapiens
ccaaagtgctgggattatagacataaaccactgtgtccagcccaagaaaatattattttgcggtttgcatcaaataattctaaaagcagttgtttctgcaggtctatttccaatgtttgtgt

SEQ ID NO: 109411 - DNA, 122 bp, Homo sapiens
cctcttggtggcctcggacattcagcaggtgctggcacaggccctggctgggaggtggggcgggcaggagccagcctggaggaggggctgagagtcagcaggcacacgggaacccggaaccc

SEQ ID NO: 109412 - DNA, 122 bp, Homo sapiens
gggtggtagcgcagcgcctggcggcggtaggcccgcttgatctcctcgtccgacgcgccgcgggccaggcccaacgtctggtagtagtctttacccatgaccccctcctgcggcccgccgac

SEQ ID NO: 109413 - DNA, 122 bp, Homo sapiens
ttattcacttcaattattagtttgaagtattaaaagccaaccatatttataaaatatactcgatcactttaatgggattttgaaaactgtatgatttatgaaacattacatagatccttctg

SEQ ID NO: 109414 - DNA, 122 bp, Homo sapiens
gtttaattgaaaagtaaatagcaattgacatttggttctgtcaaatctgagttctgttttcgtatttttctgctgtatttagatatggcttttggggtaaaataaaaacaggtaaagcttat

SEQ ID NO: 109415 - DNA, 122 bp, Homo sapiens
tgggcggctgcatcatccccatggaggctgccctgcccgggctgtgcatgatctcacaggcgcgctgccaggggctctgctgtcgccagcccgggctccgggcgcttgggacagctcgccgg

SEQ ID NO: 109416 - DNA, 122 bp, Homo sapiens
tgtagatgacgtcaccacagtaagaccacaggataccgccccagccgcgcctgtagatgacgtcaccatcgtaggcccacaggacccttcccagccgctcctgtggatgacgtcaccgccgt

SEQ ID NO: 109417 - DNA, 122 bp, Homo sapiens
atggacttgggtggaggctgagctaagaacagatgtgactcttcctcccttcctgcctcccgcactgcactctccacccccagtgcctccactaataataaagaaacccagccttatcgaga

SEQ ID NO: 109418 - DNA, 122 bp, Homo sapiens
aggggcctcaacaggaggtcctgaatggagggactgttacagagccccaggagcttgctgcgacagggaggggacaggaagactccgccctggcccttcctcctcccacagtccaggcctgg

SEQ ID NO: 109419 - DNA, 122 bp, Homo sapiens
gagtgcgggcggaccgggacgacccctgggtgataggagagccgcagtgagcccagggcacggtgctggggccgctctggccgccgccgccaagcgtcacaggaaaacagcaaccaggaccc

SEQ ID NO: 109420 - DNA, 122 bp, Homo sapiens
gtttcaggctctgctgtcgccatctggacattcttcatagtttttgagccaggggccccacgttttcattttgcatttgaccctgcaggttatgtagcagctctgtctgagagttaaggagt

SEQ ID NO: 109421 - DNA, 122 bp, Homo sapiens
tttgctcttgagaggactgatggcctgggatatgttattgatggtcctgaaagggatctgcgtttgaataggtcagagaagatgttctggaagtctggagactgggatacgctcccttccct

SEQ ID NO: 109422 - DNA, 122 bp, Homo sapiens
tggcagatgtggtatcccttgttctgccatgtggtaagtgaaactctctgtggcaccatccgcttggcacctccccacaccacctgcccctccactccccctggatgtgcaaggcatctagg

SEQ ID NO: 109423 - DNA, 122 bp, Homo sapiens
gggagcgagcgacggcggttctgacgccacaacgaggtaagactcagtgttggccgatcacgtgtggctgttgtcatcgccagaggctccgcccccgtcccacgccccctcctgcagcccgg

SEQ ID NO: 109424 - DNA, 122 bp, Homo sapiens
acagaaagttggcaccttaaagtatttgtggtgtgatggagacgaggcctcctgcatgaacgtgtctcagtgacgctgattctgcttcacaacaaaagcaaaacaagaacgtaatccttaat

SEQ ID NO: 109425 - DNA, 122 bp, Homo sapiens
agggaaatttatcttaaatgcgcttgtttactcatgttgtcctaaaaccgacctttcatccgagtgcatgactgctccctgaaagggggaacaataatgttaattacccgcagattgtgttt

SEQ ID NO: 109426 - DNA, 122 bp, Homo sapiens
tcaaatttttccaacatcctaacaaactgttattgcctgtaaccaaatgtatcacagtatcgtctaccaaggcgttacatcctgaaactttcctacaaaaagcacagcttcaaagaaacctt

SEQ ID NO: 109427 - DNA, 122 bp, Homo sapiens
gttgtccacaaggactcacccaagtaatagactggaatggttaagagctggccacacatacgccccgcaaagctggctgctaccattcgttccttgttgcataaaacattgttttcaaagcc

SEQ ID NO: 109428 - DNA, 122 bp, Homo sapiens
gccgcagctacccggaccgactctcccaggtggaggagttccggccactcagtcccacctcggtccctggccccggcaggccctggaacagaccttaaaaaacactttcccttgggaggcgg

SEQ ID NO: 109429 - DNA, 122 bp, Homo sapiens
atttaaagtctcaccacttctatctgcagctcctcctctcatgattctggccacaatgatcgccccggtctgttcatccttcttaatggtagctcccttttaagacaaaaacaaaaagcatt

SEQ ID NO: 109430 - DNA, 122 bp, Homo sapiens
gcggcccggctgggaggaggtgctttcgggaggcggggccgcggcccggggatcctctcgcgcccgcgggctccaatcgctgctcctcacgcaatcctaaacggttcccgggcgaaccgggg

SEQ ID NO: 109431 - DNA, 122 bp, Homo sapiens
gacgcatcggggagcaaactctttgactgtaggattaagactctgggcacttggggaattcgtcttggtcctttgcatttcaggaaggggccgtcaaattttaaggttcgaggttggagagc

SEQ ID NO: 109432 - DNA, 122 bp, Homo sapiens
gttcttatttttccttcacccactttcatatcagcttgccagcttcccctttactcagtgcgtcatgagcttcataaacacagcatagtgctagatatacaggcaaaaccccattgtagtgt

SEQ ID NO: 109433 - DNA, 122 bp, Homo sapiens
ggaccagagtctcttccggttccatacaatactcaattggttggttgtcggctaagagcccgcctcattgcgctcatctagtacaataggaattagaagaagatagctgctaactgagtggc

SEQ ID NO: 109434 - DNA, 122 bp, Homo sapiens
ataaaagcttggctgatacagttccttcttggataagagaattaactgtctctcattgcgcggttcctccggaggacagggtccagtatgcatggacagccacaacgggggctcggtaagta

SEQ ID NO: 109435 - DNA, 122 bp, Homo sapiens
gggggctgggcctgggggtcggcgctgaggcgggaggggccgcccgggatggagacgttgcggccggtggccacagaaacttgagccgcggcagagaaacctctgctccggtctctgcgtcc

SEQ ID NO: 109436 - DNA, 122 bp, Homo sapiens
gagtgggtgggactagaaagatgggtctgaaaatagcctgcacccccttcctggtgcttacgcggatctacacgcattgcaccgacactctcttggttttggggctgcgctgttacggaaag

SEQ ID NO: 109437 - DNA, 122 bp, Homo sapiens
gattgctagcacagcagtctgagatcaaactgcaaggcggcagcgaggctgggggagggacgcctgccattgcccaggcttcattatgtaaacaaagcagccaggaagcttgaactgggtgg

SEQ ID NO: 109438 - DNA, 122 bp, Homo sapiens
tgacctcgtgatccgccctcctcggcctcccaaagtgctgggattacaggtgtgagccaccgtgcctggccctggctagttttttctatgtatctatgtgtatagagtttaaattaaaaatg

SEQ ID NO: 109439 - DNA, 122 bp, Homo sapiens
ggcggcccacctggggtgggcgtccaggcctggcgctaggagagtggagcgtgttctgcccgccttccgaccgggctcataacccgccctgctccgtaaactgccactcccacctgcctccc

SEQ ID NO: 109440 - DNA, 122 bp, Homo sapiens
ccggcggaacgggcccgctcggctgcaggcgatgtcagaggacggggaagcaagagacggcgactgcaagcgcgtcgccctcaccacacccggcggccatattcttccctctccgcgaactg

SEQ ID NO: 109441 - DNA, 122 bp, Homo sapiens
tcaataataacccacaaaatagatgcatatggccctattcatcaataagcaaaatgtacccgcggtgagggtgaaacatttaatctattgtatatttaagccagtggagatcaggaagctta

SEQ ID NO: 109442 - DNA, 122 bp, Homo sapiens
ttcctcaaaacacctctcgggtctctcatttcgggaatgtttatctgaggggaggcccagcgatttgttccggagttaaaaaggaatactattttagcaaattgggggaatcttggaataac

SEQ ID NO: 109443 - DNA, 122 bp, Homo sapiens
agacgtggagcaggacgccggcggcatgaagcagcaggcacaggaagggccggtagttgccgaagcccacgcagcggcccagcaggcggcagtggtggtcccgacgcaggatgcagacgcgg

SEQ ID NO: 109444 - DNA, 122 bp, Homo sapiens
tatagtttaacttaggatggtaatatatctcaactacgacgaagtccagcacatagtaatcgctatgtgtttactatgatgatttttattatcttcatctaacaacaacaacaacaaaaagg

SEQ ID NO: 109445 - DNA, 122 bp, Homo sapiens
atagtgattccggggtaaggccatcatctccttcctaaatccaaatataaaagttgaaatcgtatttgttaaaactgtcatgttgaatttgtggcccagattgttttcccgaggcctgctgg

SEQ ID NO: 109446 - DNA, 122 bp, Homo sapiens
ggcagctgccactgtctgggcacgtgggcgccggctcgtccgtgcagtgtggtggaacgacgcacagccgtcctggtccctgcacgggggtggcggccacacaccggagtctcagccgggca

SEQ ID NO: 109447 - DNA, 122 bp, Homo sapiens
gctctgctgtcccgagccactcatggtgagctgcctccctacgaattccagccgctgtcgcgcccttgagttctgtgtcctgtgaccaccttgccaggccacttggtgaacacgccttcctc

SEQ ID NO: 109448 - DNA, 122 bp, Homo sapiens
tattcacagctgccgcactcagtttacattggtgtaatttaaaggcatatatatagccgccgttgctcctctctgtaataccccaagactgtaaatctataaccactgcaatgatttagtga

SEQ ID NO: 109449 - DNA, 122 bp, Homo sapiens
tttcactatgtacctccttgtcttcactcacttccacaaaatagctctcctgtaaaaactcgggtggattatcattggcatcgacaaccacgacatgtagaagacgccacgcagccttctgg

SEQ ID NO: 109450 - DNA, 122 bp, Homo sapiens
gtgggcgggggcgccatgacaaagtgaaggtcaagttagcatcgtaccttataaggaaggcgccggtcctccatttcagccttttctctgccaggacgcggccgtggcatttctggtcttgt

SEQ ID NO: 109451 - DNA, 122 bp, Homo sapiens
ctgattcaaaaaaaaaaaagaaaaaatattaggcagtttatctatttaatctgtggtgtgcggagaccaggaactatcagatttatcattatttgagcaaatggttttattggatcacaatc

SEQ ID NO: 109452 - DNA, 122 bp, Homo sapiens
cccgccgtcgcctgcagggggcgctgttgctggcgcgattctatcaagcgcagagccagccgaggcagtatgccgaggcagagaaaccggttctgcagtcccagggcctcggtttccccctc

SEQ ID NO: 109453 - DNA, 122 bp, Homo sapiens
gcatttccgtctggcgaggcgactgaaaatcctgagtgtgggagtcggtttggccagctccgctctcaggatggagggtgcctttgggaaggaaggtccgcgtttcctttgagatgtgttat

SEQ ID NO: 109454 - DNA, 122 bp, Homo sapiens
ctggctgcagcctcttggcttttccacatctcccacctcagggaacagtccactctgtgtcgaggctttgggcctgagtggcaggctggaaccaagaccctcatttggtagaaagaaaagcc

SEQ ID NO: 109455 - DNA, 122 bp, Homo sapiens
taaaaaatacagactcttgggttcctctgccataccaattttgaatctccaggtggagaacgggaactaggagttaaaaaaaaattccatattttaatttactaattatttttacttcattt

SEQ ID NO: 109456 - DNA, 122 bp, Homo sapiens
tgggcttcaccccacggcttctgtgcaaggccaccctggctctggggctctctgtgggatcggccgaggcttaatggacgaacgccaggctccatccatgagacggctcgagtgtggggtcg

SEQ ID NO: 109457 - DNA, 122 bp, Homo sapiens
ttatagaaaacaaggttcaattggctcacggttctgcaggctgtacaggtcgcatagcaccggcaacagcttctggggaggcttccgggggcttccaatcatggcggaaggcgaaggggagc

SEQ ID NO: 109458 - DNA, 122 bp, Homo sapiens
ctcctgccctttccagctcccaggggcttcaggtgttcctcggcttgtggccacgttgctcgtctctgcctctgacttcacttgaccacgtcctctgtctgtgttttctcctcgcctgtctc

SEQ ID NO: 109459 - DNA, 122 bp, Homo sapiens
acaaggcaactgaaactccaagtcctcaagcaagctcccttcatggcactcacagagccccgctgatataaccagcctggatgtggagagggggaaaggccccgcttccccttgatgctgcc

SEQ ID NO: 109460 - DNA, 122 bp, Homo sapiens
gacagaaaggatggctatgtgctgagactcaaccgagtgaacgacgcccaggaatacagacgggcaagtagggacagttcccactctggggcagggatgtgggcaagctggagagactggcc

SEQ ID NO: 109461 - DNA, 122 bp, Homo sapiens
cgatggcgcccggcctcagtttcccctccgcaccgcctactcacaggaccccgcgggtcgcggtgaccctggcctcacgatccccaaactcttacgagctttggggccccgtgggccccgag

SEQ ID NO: 109462 - DNA, 122 bp, Homo sapiens
tagagcgaccccccacaatccccattctaggggtcgcttggcagagcccccaaggcactgcgtcagtggaaaggctgtttgcaggagctccgagggcagaacatacacctgctgtgggtctg

SEQ ID NO: 109463 - DNA, 122 bp, Homo sapiens
tctccatagcggatgggtggggccaggcccacccacattagagaggctgaaggctcccagcgccctaccccgcccgaggggcggagcctgagccaaggccacgtgatgatgacagacggcac

SEQ ID NO: 109464 - DNA, 122 bp, Homo sapiens
ctcattggccaccgagtcagcgggaggtggggctgctgccgtcgccatcttgttgaggggcgcggccggcttggtgcggacatgtttatgaggggcaacctctagcttgagacctcagccta

SEQ ID NO: 109465 - DNA, 122 bp, Homo sapiens
ggctggcgggagccggggacgggaaaggagagtgctcggtgcgtgggctgggcgtgcctgcgtcccctcgagccccacggggcaccctccccacttgcctgtggcctcggagcccgcgggcg

SEQ ID NO: 109466 - DNA, 122 bp, Homo sapiens
agtgtcctgagccccagggagagggggctggtgggtgcctaggcctgggcagtggatggccgtgaatgggtgcccacagtgtcaggcactgggcatgaggggttcctcccctccagctccct

SEQ ID NO: 109467 - DNA, 122 bp, Homo sapiens
gaactccagggtgggcactcgctccatttccacaggccctcaagggttccaggattgccccgtgggaggggttttagtgctgcatctagtaagaagctgtaagatgctcagaaacatgtttt

SEQ ID NO: 109468 - DNA, 122 bp, Homo sapiens
aaacaccaggtagaaggactgcattagagaacatatgtgaccctgttaggtttgcagaatcgaggccataaaccataagctgagactgcgaatttatgaaaggttcattgaaagcaagcaaa

SEQ ID NO: 109469 - DNA, 122 bp, Homo sapiens
ggacactcagccctcactgcttaaataaagatggagcctcaccgggctgctcttcctaaacgggtggcttgctcattcatgactgctactttctacagtcaggccccaggttatgtctcacc

SEQ ID NO: 109470 - DNA, 122 bp, Homo sapiens
aattgtgtttgcttcaagcctttgtcattaaatctgtactaaataaatgcaaatgtcccccgcttattggggctgcactctcattggcagggctgcactctcatcagtgatgctaagccgtg

SEQ ID NO: 109471 - DNA, 122 bp, Homo sapiens
accgtaaatatttgtatatctggggtgtattatagtgctgccatgcgtaagagttactaccggtggtgactccctgtccatgtacccggttcactgcaccaaaggaccagtgtttttggcta

SEQ ID NO: 109472 - DNA, 122 bp, Homo sapiens
aggcagcccccacaggaagtgagaggcagccacacacacctcggcttgcattctgggttgcgaaagaaaccatgtggggactgtggagacctcactcaccctccagcctgcccctacctggg

SEQ ID NO: 109473 - DNA, 122 bp, Homo sapiens
gtgggctgcgaagaaaatggtgcaatctgagagcgactgagcccagctgggcagagcagacggggtgccagagtgccaagggctcaggtgcctggagaaaggggcggattgtttggaggggc

SEQ ID NO: 109474 - DNA, 122 bp, Homo sapiens
cttaggcttggggacacggggtggcctcagggcagaggccatgacggagccagggtcttccgcctggcctctccttccagtgggtgccccagctgggccgggaagctgagaaacaggtttca

SEQ ID NO: 109475 - DNA, 122 bp, Homo sapiens
ctcagcatgcatgtgcctttggttagaagctaacgctggcacgacgttatacgacctgtacgcaaatacatatgcacaggccgggagtgcacttacatgtttgggggagcacaaggaaaatg

SEQ ID NO: 109476 - DNA, 122 bp, Homo sapiens
gggaaccagactcagccctcacagcagccaacacagagccagctgcctgagttcactgttcggggtcaaggaggggggattcagccctggggctcaggaaatggctcgtgacaccgtctgtc

SEQ ID NO: 109477 - DNA, 122 bp, Homo sapiens
gctgggaaaacttaagatgttccttcttgtaattaccagggcatccatgacatcactctacgtgatagggaaaaataacttaagtagccattgctaggggactgcttaagttaaggcacagc

SEQ ID NO: 109478 - DNA, 122 bp, Homo sapiens
ggccgggacactgcgcctaggtggcgcggtggcattgaatgggttaaggaggggaggtggcgggtgtcccttaactgcacctggcccagtatcggtcacgtggccagggtttcacctgcccc

SEQ ID NO: 109479 - DNA, 122 bp, Homo sapiens
cctcactggggtccagtatccatcagtacagtagcccaggctgctctggcccagagagggcgggagcccctgcaggacaacacagcaatgagtcccagacgcaccccaaaccgaaactcttg

SEQ ID NO: 109480 - DNA, 122 bp, Homo sapiens
cgaagtcactggcagtcagggtcagggccaggatgggggctgcaccccaccaagtcaacccggacctctcccagtctagactctgcaagccacctgccacccaccacctccactcagctgtc

SEQ ID NO: 109481 - DNA, 122 bp, Homo sapiens
ccccctcccccaccctgtgcggaggactccggccttggggtagggggctgctgaactgggcgtggcatctagtcaggaactctctgccccccagccctagggctcagatcacacacacacac

SEQ ID NO: 109482 - DNA, 122 bp, Homo sapiens
agctgagtcctataaaccgcccggcactggatcaggcccacggaggtcctggaagagcatcggtggcttctccatgggaacaggactccctggctcttaccgccccggatctcgacttcagc

SEQ ID NO: 109483 - DNA, 122 bp, Homo sapiens
aacctagacattcatctctagatctgtcccactaccctttcagctcgatttccccagtcgcgccagttagacaaacacacaaacaaataaacagagtggggtctggggcctctctccaaatg

SEQ ID NO: 109484 - DNA, 122 bp, Homo sapiens
gctcaaggccaagacccgctcgggtggcggccgagcgccctccagccccgggcccacctgcggccgctctctgcatctcacgcccagcgggactccggggctccgcctcagggaccgccgaa

SEQ ID NO: 109485 - DNA, 122 bp, Homo sapiens
gcggggagagtggggtggggccgctccttggaacggaagcgcgcggcctcgaggcccttccggtgcgggagaaactactactcccataatgccccgcggtcccgcgagctgccagtctcgtc

SEQ ID NO: 109486 - DNA, 122 bp, Homo sapiens
acacaggtgcactgtgcatacacacacatacacattacatatgcaacacatctgcacactcgaacacatacatccaccaggaaactaggaatatgagacccaagtttattaaagtataaaat

SEQ ID NO: 109487 - DNA, 122 bp, Homo sapiens
ctttgtatgggggtgtgtgtgtttatttttatatatatatatataatttgtgtgtgcatgcgtgtatggcttaatactatacatgtgtggattttccagtcatattggctttcttttcatgt

SEQ ID NO: 109488 - DNA, 122 bp, Homo sapiens
ggggattagggtctaaggacactgtctagaacctggtactcagtgattgctcgccgtcatcgtcatcaattattaggtatttaattgaggcaaaacattacagtaaagggcatgaaaaccgt

SEQ ID NO: 109489 - DNA, 122 bp, Homo sapiens
tcctttcgccccttgactgctccgcttccgggaggcggggcttctgcgggttccacctcccgagcgccccttgtggctaccaaggtcaggcaacaggtgtccagttgttccctctcctgtct

SEQ ID NO: 109490 - DNA, 122 bp, Homo sapiens
agggagaacttgggcatttccacacctctgaccttacaaccctcaagagcaccaacatcccgtcctgatgctgtgtgatccccgctgctccaatagtactgtgggtgttggcacaacagaca

SEQ ID NO: 109491 - DNA, 122 bp, Homo sapiens
agataatccagtatcaacgcggggcggactggagacccaggaaacgcctgaaaggagggccgtgcaggacgaagcccccaggacacgcgaggagacccggccgcgcgccgcgtggggcttgg

SEQ ID NO: 109492 - DNA, 122 bp, Homo sapiens
gtcccattgtggctccagacacagcctcagctgggtgtttctgatgacttccacctgcaccgtggcttaactaggggatagacactctggcatgtgtgtggctttcttactcacctgcagcc

SEQ ID NO: 109493 - DNA, 122 bp, Homo sapiens
tctcatgcttcgggagtttctgtccataaatcagttttaggtactgggcctttcctcttccgttgggaagtcggaggttccacatcaggattccagcagctgtaaatcggtcaaaataaggc

SEQ ID NO: 109494 - DNA, 122 bp, Homo sapiens
ttacggtgccctttttaaaactacagaagtatttaggtgaattacattaaattgtcatcacgtgctgtctttggcagcaatatactaagaataaataaataattggaacgatacagagaaga

SEQ ID NO: 109495 - DNA, 122 bp, Homo sapiens
gcacaataacgaatgtttactttgcccttgcactcttcacatctgggaaccgcaaaggagcgcggtggtcggactgtcagcctcgccttctattctttgatttccagtaacttattttcgaa

SEQ ID NO: 109496 - DNA, 122 bp, Homo sapiens
ggcgcgggttggacccgggagggcgggggtctcttgccagggccggggccggggacggggcgggagcggtcagcggcgacctccaacctgggagatctcagactccgacgctgaggactccg

SEQ ID NO: 109497 - DNA, 122 bp, Homo sapiens
ttagggggtcggtggaaggaatcggagtagagcaaatgtgggtaaaccctggacagagagcgttgagaccagcagacaggaagggaaagtgtgaaaaaagtctgtagaggtgactgtggaga

SEQ ID NO: 109498 - DNA, 122 bp, Homo sapiens
attcaggggtttccaggttattttgtgtctctccccacaaccaccagcaacaccctcacacgtgcgcacatacaggtcacccacaggctctcctgcagacacatgtagtcacacttcagtct

SEQ ID NO: 109499 - DNA, 122 bp, Homo sapiens
tagagacggtttcaccacgttggccaggatagtctttatctcttgactttgtgatcctcccgcctcggcctcccaaagtgctgggattacaggcgccccgccacattattctgttttttggt

SEQ ID NO: 109500 - DNA, 122 bp, Homo sapiens
ggaattccgaccagcacctgggattcccaggcccacgttcttcccagcagacccgaacaccggcaatttctgggcacccaccatcatggaaggctgtatggaggcagctatgcggccctggt

SEQ ID NO: 109501 - DNA, 122 bp, Homo sapiens
cactgacactcagggcacacattctctctcacacacaccagtcacacacacatacagacccggcaccaagtaccccacttcccagccatgcccgaggtttcctggatgggacctctcctgtc

SEQ ID NO: 109502 - DNA, 122 bp, Homo sapiens
caacgtggttgtggcgcagtctctcccctcgtcgcgggattcagaatcctggcgaaaacccgaacaggtggcaacgctcagcagtcaaatttggagccgaaggccccaaggaggaggcctgg

SEQ ID NO: 109503 - DNA, 122 bp, Homo sapiens
ggaggagcttgggcccgacggagccactctgtgcatggggggctgctcggggcagggtgccggggggtaggaggcagcgccgagcggctggaagagagtgtggtgtgatggacgggcagctt

SEQ ID NO: 109504 - DNA, 122 bp, Homo sapiens
acgactccgcggttcagggacgcggctgccgcgggcaagcggcgcggccgggcgggtgtgcggaccctccaggcgccagccaccagccacaggcacgggtgcttccctctcacaccgcgagg

SEQ ID NO: 109505 - DNA, 122 bp, Homo sapiens
gccagaaggttttggcgaagctcttggagaggcgtcgagcacagtagggcggcgggggtgcgttgagcgctcgggggtcaggcagtcggccgggatcgccgctggggagcgtttccgaggcg

SEQ ID NO: 109506 - DNA, 122 bp, Homo sapiens
taattggaatatattgcaggcattaagctcattaaaaacaaactggcttgcagaagggtccgatgtgccaagtgatcatgattctgctggaaagaggattttaaatattgtgggagttctcc

SEQ ID NO: 109507 - DNA, 122 bp, Homo sapiens
gtagaacctcacggcctgtgtcctttcgtctcctggggaccggggatgggtagacccttacggcgtgtgtcttttcatctctggccgctgtcaccaagcaccatgtcctccaggtgtgctcc

SEQ ID NO: 109508 - DNA, 122 bp, Homo sapiens
atgctcgcagccacccagtattaaagcaataatctcccccagggaaaagtcctactgggccggatgtaggaaaaagaatgaaagcaggcacagctttcaggtccactccaccacaaatgact

SEQ ID NO: 109509 - DNA, 122 bp, Homo sapiens
cagcgtggacacgtaccccccgcgctgggcccacctctgagcgtggagactttccccccgcgctaagcccacctctcagggtggacacgttccccccgcactaagcccacctctgatcgtgg

SEQ ID NO: 109510 - DNA, 122 bp, Homo sapiens
tggacacagctctcctgtagcgaaaacaaaacccaccaagcaggtggctgcaggagcccgcgcgcaacgcgcccgctcctggccgcgcacgccccctggcggccatcgggaagcatcgccgc

SEQ ID NO: 109511 - DNA, 122 bp, Homo sapiens
gtgtccatggccagaggacgctggccggcagcggccaaacctgaaccgcaaactagaagccgccgccgattcgaataccccgcgcagccgcagtcggctcgccgaacgtttcagggcgcctg

SEQ ID NO: 109512 - DNA, 122 bp, Homo sapiens
aggggagggaaagtgtgggagggggagccgcgggggtgcgcgctcctcctaactcggggtcgcttttagcgagaagtgatatttttccagcctcattgaaaaccgttgcaaacattgaaaat

SEQ ID NO: 109513 - DNA, 122 bp, Homo sapiens
gggacatatgttgaaatttcatttggggagttagggaaaacaagaagcgggggtgggtggcgcttttctccagccaagataacctaaaaagggaaaaaatcccgagggagagagggtggggg

SEQ ID NO: 109514 - DNA, 122 bp, Homo sapiens
cagctataacagagacaaacattttcaaccttccctgcttttaccttagcccatgaaatacgtgtgctcagcctccacatgagaaatggtttgattctaagaatcatgttcgatgggttctt

SEQ ID NO: 109515 - DNA, 122 bp, Homo sapiens
tcctctgcgcagcctggagcagcacatggtcatccacacggaggagcgcgagtacaaatgcgaccagtgtcccaaggccttcaactggaagtccaacctcatccgccaccagatgtcccacg

SEQ ID NO: 109516 - DNA, 122 bp, Homo sapiens
atttcccgtgtgacatattttcttcatagtccctaatatagtcatcctctacagagttggcgtgctgtgtgcactgtggattaggaacagagtggagctgtaaccagtctcttctctggccc

SEQ ID NO: 109517 - DNA, 122 bp, Homo sapiens
caccacaaggaagaaactccgaacacatccgaacattggaaagaacaaactccggacatgcggcctttaagaactgtaacactcaccgcgagggtctgcagcgtcattcttgaagtcagtga

SEQ ID NO: 109518 - DNA, 122 bp, Homo sapiens
agcgccggccgcccgcccggtcgggcgatgaagtgtcactatgaggcgctgggggtgcggcgcgacgccagcgaggaggagctcaagaaggcctatcggaagctggccctgaaatggcaccc

SEQ ID NO: 109519 - DNA, 122 bp, Homo sapiens
tcaggtgggccgggggctccgggaggcctccgccgccctccgtcccaggagagcagttcccggtgagaagcccgggctctgcagacaccccacagcagttctgcgtctcggaaaacgcggcg

SEQ ID NO: 109520 - DNA, 122 bp, Homo sapiens
ccttgctgagcttctctccgtctgtgtgggggatgagggtcttgagggactggaatcccgcgttgatgctctgcatgcgtctccgctcgttgctgttggcgatctcccgccgaatccgccgc

SEQ ID NO: 109521 - DNA, 122 bp, Homo sapiens
caggtgacagccctcagtggacttctgtcctcaccatgtttcccactggcacaggtggggcggccacgcctgtgcccgcggcgcctgtgctgagtcccgacgctgtgcgccccactcccgag

SEQ ID NO: 109522 - DNA, 122 bp, Homo sapiens
ttcgcgggccgcaagctcggagacgcgcgtgtcccgcgttggctgcctgacccggaatggcgcagccccttcgcctccagcgcgctggttgaaaggatccgagccaccctcggggacggccg

SEQ ID NO: 109523 - DNA, 122 bp, Homo sapiens
ccctcgccatttgagcctcactcatcctgttgtggccaagcgaatcagtttctacaagagcggagacccccaattcggcggggtcagggtggtggtcaaccctcgctcctttaagtcctttg

SEQ ID NO: 109524 - DNA, 122 bp, Homo sapiens
tatccgcgctggtggactacgagaggcagacggcgatggcggtgcaggtgagggctgctccggggtgccaggggcagaagccgaggggcacttgggccccacagctgctgcctcctcccctg

SEQ ID NO: 109525 - DNA, 122 bp, Homo sapiens
tccagagctccagtgggcgtcctcctgcatgggggcccctactaaataaacaccagcccccgccatctggccctaacggaaggaggacgcgaggcgggaaatcaacgccctttaacggctgc

SEQ ID NO: 109526 - DNA, 122 bp, Homo sapiens
gcactcagccggagccttggaaatcctgattcagcaggcgctctgcttaagagtggcaggcgggcccctttgctccttactggtgagctcttgcccaggtcatcacctgcttccaaagggat

SEQ ID NO: 109527 - DNA, 122 bp, Homo sapiens
gccggtaaggaacatgcagagccccaggacccggcacacgctgcggatgtagtcggcaaacgtgcccaggaagccccccgtgttcaggatggagaacaccgccttgctgaagaggtagccca

SEQ ID NO: 109528 - DNA, 122 bp, Homo sapiens
gggctggagcccacctggagcccctaatggagggggcacattggggataaagaggggacgcgtcagagctaggccaactccactctctgtgggccaatgaggaaaaaaaatgtaaaaccacc

SEQ ID NO: 109529 - DNA, 122 bp, Homo sapiens
cctcactctcaggtctctttaccttggcttaccttgacattgggcatgtatttagagaagcgctcatattccttgctgatctgaaaagccaactcccgagtgtgacacatcaccagtacaga

SEQ ID NO: 109530 - DNA, 122 bp, Homo sapiens
gtcaggaaatggggtgctctcgcgctctggctttgagcatgttctgcctctcagtgactccgggaaaaggaccagaggacacacgggaactgatttcccaagctgccgccccgtaccaggcg

SEQ ID NO: 109531 - DNA, 122 bp, Homo sapiens
ccacagactttctaagcagtgactcagaaggttcttgctggaaggtgcaccttgaaacaccgatactggagtgaatgacaggcacagaggttctgatgactcatccacttgtttcacttaca

SEQ ID NO: 109532 - DNA, 122 bp, Homo sapiens
ctgtattcaataaaatagcctccttattctcactgatggtttagaagtacctgttatatacgtagactcagcaatttacgcccataaactactcctttatctgtctcatatattggggctct

SEQ ID NO: 109533 - DNA, 122 bp, Homo sapiens
tccccaggttcctgcgtgaagaccagctgggagcccactgcctgctgccacctccaactccggccccctcaccatgcactccctggacgagccgctcgacctgaagctgagtatcaccaagc

SEQ ID NO: 109534 - DNA, 122 bp, Homo sapiens
acctcaggggaagagggagattgtcgctggtcagaggagaatgccagggcttctctcagacggaggcagcctcccatctcaccgcaagtcggatcttgagtagcacctgtttcggcccattg

SEQ ID NO: 109535 - DNA, 122 bp, Homo sapiens
ccctttaattagtcagtaaggtgagcaaaccttttcagaagctttgcatcagggagtgatcggaacacagccgctccttttacttgaaagaaggggtaggctctgcccagtgctgagcatgt

SEQ ID NO: 109536 - DNA, 122 bp, Homo sapiens
cttctccattctgtcgcctttgctgcctttgtggtcaccggaactgctgtcgtgcatttccgccttgcaggtacaatccgattctccggtgcaaaataagtctccaaaagagagggctgtgg

SEQ ID NO: 109537 - DNA, 122 bp, Homo sapiens
gatgccgaagatgtggatgaccacacgggcgaacgaaggcccatgtcgttcaggaggccccgagcattggacacccaggccctgagacgtactcagttcggtctgcatctgttgatggtgaa

SEQ ID NO: 109538 - DNA, 122 bp, Homo sapiens
gcagctgcgaaccaccctgggcgagtcaagactctgtgtcatctgcctgcccccgaggctcggccaagacaggaaggaaccaggagagggagtggacgcaaatgcccacagagaggggaggt

SEQ ID NO: 109539 - DNA, 122 bp, Homo sapiens
gctgagagtcccccatccccactgtgtcataggaggggcggctgggaagcccggaagtggcggaagtggcagtgccagaacaggcaggtgtgtggaggggaggctccgtgctcacccctctg

SEQ ID NO: 109540 - DNA, 122 bp, Homo sapiens
ctctgtcctgccgggtctcccaggcaccgagtcctttggccttttctcctgtctggtcaacggcgaggagcgagagcagactcaccgggctgtgttcaggtacggcctccctccttgctggc

SEQ ID NO: 109541 - DNA, 122 bp, Homo sapiens
ggcttcatggggcaaatttacactaagccagtctggttaagagcttaaagctctgcaaagcgaggagttggatggactgatgtcacaggacccttccatctctgacctcctctgagctagaa

SEQ ID NO: 109542 - DNA, 122 bp, Homo sapiens
gagcgggcggggaggctggcgcagtgaggcttggagaagcccccaggtcaggaccctctccggggctgaaaaagaaaacacggacacggcgagggcgggcgccgcctccctgctggacttgt

SEQ ID NO: 109543 - DNA, 122 bp, Homo sapiens
gcctgggaagagctgagcctgtcagaccagcagcccacacttcctccccacctgcctttccgccttcctcatgccctgaaagcagaatgtcacagatggagagatggtgtgggttggtggga

SEQ ID NO: 109544 - DNA, 122 bp, Homo sapiens
gtttgtgacagaggcgggcgagaatgaatggtccctctcccggcagttaagccgcaggggcggcgcagggcgcgcgccgggctcgcggtgcagagacctgcgagcgggtctgggcgccgggg

SEQ ID NO: 109545 - DNA, 122 bp, Homo sapiens
aagtactactccatgttattctgtgtgattgcacaggtagtgcaccggatttcctctacccgagagtaaaaaaagcacgccgtagtcggcaggattcgaacctgcgcggggagaccccaatg

SEQ ID NO: 109546 - DNA, 122 bp, Homo sapiens
aaactatattagtatgacatttagtttgtgtaaaaatatgcatgcatatttcatagatagcgtatgtatattacataagtgggaccctaactgcatctatatttagtgaaatgtcaggatcg

SEQ ID NO: 109547 - DNA, 122 bp, Homo sapiens
agtaacaacaataataataataataaaatcacccaggagctcagcgtgcagacccccagccgcaaagcccagagagccccttttgggaggacggggcgaggcccagcaatccgcgttgggag

SEQ ID NO: 109548 - DNA, 122 bp, Homo sapiens
aaaatgaatggtaggttggctcgcgaccggcgtgtgggcccttaactagcgggggagagacgcagggagcggcaggggctcacccggcgcgttggcgcgcctttcttcccttcgggtgtctc

SEQ ID NO: 109549 - DNA, 122 bp, Homo sapiens
agccccttgtgctgtgagcagagcaggcagtggctctggaggctgcctgtggtctccttccggctgtggctgacagtggctctggccagggttgcttggagaaggctcagtgtgcctgggac

SEQ ID NO: 109550 - DNA, 122 bp, Homo sapiens
cgtaacccgacgtctgagatcgcagtgcctgattggcgcagccaaggttggggcgggcctcggccgcggcagctctccccacccgcccccgaggggcggggctccggccgggccacggggcg

SEQ ID NO: 109551 - DNA, 122 bp, Homo sapiens
ggagggatcttgagggccctccgagtccccggggcttgcgctttttttctttgtagccaccgtgcctaccgcgaggatgagctcggcctcggtcaccgctttcgagaaggagcatctctgga

SEQ ID NO: 109552 - DNA, 122 bp, Homo sapiens
cacggcccagaattacagagaaaacacactgcgcacgcgcactctctcgtcaccgctgtgcggcttctgtttggttggccagttcgtcccaatttccgactcacagggctgcggagcagcaa

SEQ ID NO: 109553 - DNA, 122 bp, Homo sapiens
tagcacactgctttattatttatgcactgtaggaactaattgcttacataaaaatgagtacgttctggaaactagggccgaaatagggtaaggagtttattccagtgaggaagggtcactag

SEQ ID NO: 109554 - DNA, 122 bp, Homo sapiens
cccaaaagccacaaatcacctacggtgaagattctccgaagtggaacaaatttccagactcgcattatctcacatccctgcgggatagatggcctccacttaccggctaccgggagagagct

SEQ ID NO: 109555 - DNA, 122 bp, Homo sapiens
aatgtgcatcttgtacctgcccccaccccagctctgttcactcacagtcgctcatagaggcgaacctcacacatcaaaggctgtgacacccagtgaataaaggcctttggcttctctccagc

SEQ ID NO: 109556 - DNA, 122 bp, Homo sapiens
ttctcagaccaggcaactcttcctttgagtcaccccagaggttaagagatggctctccaacgctccagcaattctctttcttcctgccaggaaactattactttgattttactgtcttgact

SEQ ID NO: 109557 - DNA, 122 bp, Homo sapiens
agcgctctccggagagcaggcacctgctgccaagccctgcgaagggggtgcgcgcgggggcgcgggcgggggtgcagccccagctgcaggtgccggccggcgggctcggggcgggcgtcctg

SEQ ID NO: 109558 - DNA, 122 bp, Homo sapiens
ttcgttgtcaggagcgctggtggtttactccacagaggcaggaaaacttcagtcacgaggcgaataccccactcagtgcgcatgctgcacagacctgttggtgcccatgtctgttgctatgc

SEQ ID NO: 109559 - DNA, 122 bp, Homo sapiens
ctggggcgcgacctcggcccggcctcccttcgctcagcttctccgcgcccctgctccctgcgtctgggagagcgaggccgagcaaggaaagcatttcgaaccttccagtccagaggaaggga

SEQ ID NO: 109560 - DNA, 122 bp, Homo sapiens
caagccttcaaatctcttaattttttcggtatttattaaatctgtgagtggtttaaggagcggtcagtgtgtataaagtgtgtttgaacattatgccaaatatcaagatgtgaaggactaat

SEQ ID NO: 109561 - DNA, 122 bp, Homo sapiens
aactaagtgaagaaataactattttgtgcattttgtggctgtttatactaagagctcccccggagcctgccccttcctctaagtcccgcctcctcgagctggcaatcgcccgtccctgtttt

SEQ ID NO: 109562 - DNA, 122 bp, Homo sapiens
catttttggggacagtatatgaaacagtttgccacatgaaatccaaatatcgtaataaagcgttggcccaccatggaatgacaaaagttattatggtttaaaaatcgccaatagccttattc

SEQ ID NO: 109563 - DNA, 122 bp, Homo sapiens
gtggggaggcggtggcaacagcaacgatagttgcatcagcgctaactgctgctgctgctgcgtgttctgccggaggctgccgggagggtacagtaatgactgtagggagcgcacagccgctg

SEQ ID NO: 109564 - DNA, 122 bp, Homo sapiens
ctgaagcttgacgctcagaaaaggcatatacaagcctaccaccagatacctcattggtgccgctggcgttatggtatagaggcaccagtgaggtatcttgtggtaagtttctacacagtagg

SEQ ID NO: 109565 - DNA, 122 bp, Homo sapiens
agcgcctgcaagagaaaaggtgacatcgcgcgtgaggggcgcggcggggctggcgtcgggcgccccctgccacccgctctcggagctccgctcggcggcacctgccttggccacgcgcccca

SEQ ID NO: 109566 - DNA, 122 bp, Homo sapiens
caggaaatgggtagtttaccgtgttgtttttcccagtgacggagtcagctgacagttgtgcgtcctcttacgggtccgtgtggcaccgttaggctgcgacagtgagtgcactacagctgcgt

SEQ ID NO: 109567 - DNA, 122 bp, Homo sapiens
atcctccgcctggtggttatttattcctgacctgttgtaaccttctgcctggctctctttcgtccgcacacctagggtttttgcacaaagcagctaaaattcattttcatgcccattgactg

SEQ ID NO: 109568 - DNA, 122 bp, Homo sapiens
atttcaggttaaggttgatcaccaaggtcattccgagcacctcgatgtctgcagcaaagtcgtctcccgataccagagggcaagggccgcttctaagctacagaaacttaagtgactttgaa

SEQ ID NO: 109569 - DNA, 122 bp, Homo sapiens
tcgccccttgacagcttgaggctccgccccgctttgccccgcccccccagctccggccgacgcccaccggaactacagcccccatgatgcagtgggagtccgagcctctgcgtcgtccgctt

SEQ ID NO: 109570 - DNA, 122 bp, Homo sapiens
ggacctggcttgggacgccagggctggggtgggcaggaccgggaggaccctcaggacgcacgtactctgtctcggagagctccatgtccgacacggctggtaccacgtgcagcaccggcgcg

SEQ ID NO: 109571 - DNA, 122 bp, Homo sapiens
ggttctgcgacgcatgcgttcagcctccaagaaagtggcaaatacggctgcgcgaattggcggcccggccctccttggtcacgtgttgggagacagcggcgtggcggcggcggtggcggtag

SEQ ID NO: 109572 - DNA, 122 bp, Homo sapiens
aaataagattattttaaaccaaacgaacaaaagcaagagctctgccaggaggaaacgacacgtggccgacccacctggtcaaacttcttctgcttcttctccaagttggaggcgacctggcg

SEQ ID NO: 109573 - DNA, 122 bp, Homo sapiens
tcccggcccggcggaacgcgtcccttttaagggggcggggacctgggggtctggggccagcgcgcgggagggacgcctgagtgcctcgagggcgccgttcgggcggggaggatcccgcgggt

SEQ ID NO: 109574 - DNA, 122 bp, Homo sapiens
tggagggttggtggtagcggcttggggaggtgctcgctctgtcggtcttgctctctcgcacgcttcccccggctcccttcgtttcccccccccggtcgcctgcgtgccggagtgtgtgcgag

SEQ ID NO: 109575 - DNA, 122 bp, Homo sapiens
tagacatgggtgggtcatggagtcttggagctgctctgggaaagccctgctctgtcccagcgcctcatccattgccccaaccaaagcagctctgggctcactctccaggagcctctgctcct

SEQ ID NO: 109576 - DNA, 122 bp, Homo sapiens
cctccttaccctgtccccttgtcttgtatgcaataaatatcagccgtttggggccactaccggtctcctcctcttgatggtagtggtcccccgggcccagctgttttctctttatctctttg

SEQ ID NO: 109577 - DNA, 122 bp, Homo sapiens
cactcctcgctcccctcaggagctcgtaagagccccgcgcggggccgaggcgcgagagcacgcgcaacgcttcctgggaaatgtagttgggtgtcggattagaactacaaatcccggtactc

SEQ ID NO: 109578 - DNA, 122 bp, Homo sapiens
ggggtcagggcgaagtcccagggccccaggcgtggctctcagagtctcaggccccgaaggcggtgtatggattggggagtcccagccttggggattccccaactccgcagtttcttttctcc

SEQ ID NO: 109579 - DNA, 122 bp, Homo sapiens
agcagttcacatttaggtgaaatagatgatgttatcaggaagccaggttcccaccagagtcggtgcttggtacctggtctctccagtctcaacagactcaggtcaggtctctcacccaggaa

SEQ ID NO: 109580 - DNA, 122 bp, Homo sapiens
cacttgtccgggggagaccttgaatttggtgtggaagaaataacatcagtagttcaggtacgattggatcagcatctggtcctcgatttgcctttggaaaaaaaaaagttaatatttatagg

SEQ ID NO: 109581 - DNA, 122 bp, Homo sapiens
gagcactgcccagccaggcacgtggtgctcaaccctgtgggcactgaccccacaaaaggccggggtttgtgctgcaggaggcctctgtttggggagagctctgtcccggctccagtgcggcg

SEQ ID NO: 109582 - DNA, 122 bp, Homo sapiens
gctggaaggacagcctgcctaacacactcacacacctcagtatcagaaaagatcaagcttcgggcagaagattcaggaaaatgttccttgtgtaaacacaaggaatcaaagaagtaggggct

SEQ ID NO: 109583 - DNA, 122 bp, Homo sapiens
tctaaacggaattttctgtcacgctcttggcggctcagctgctgttcctccctctcctggcgcagctgttcctcctcgcggaattttctgtcacggtcctgacgccgctgttgcccgcgctc

SEQ ID NO: 109584 - DNA, 122 bp, Homo sapiens
caccttgggaaaccaagcccaaggtctaggccccccagcttccagcgaggggtgggagagcgaaaatccccactttacagatgaatgaaatgagactcagagctgaagggacctgtctgggg

SEQ ID NO: 109585 - DNA, 122 bp, Homo sapiens
gcaaactgtgagtggcagagcaaaagacggacagacagaggacgcacaggactgacttcccgcagagagctggacccagacaagagaggcacgtggccctgctagagctgaacgctacagcc

SEQ ID NO: 109586 - DNA, 122 bp, Homo sapiens
agatgcttgataaacacagctgtgatgacaaaggcctgtgaggtccctgagaagaggccccggctctccgctctccccagcatggtgtgaggctctgaacccagaacttacagctgtgttcc

SEQ ID NO: 109587 - DNA, 122 bp, Homo sapiens
gctgccgccggaggagccagtgagcgaggggacccagcacgaccccctgagtcaggaggccgagctggaggaaccactgagtcaggagagcgaggtggaagaaccactgagtcaggagagcc

SEQ ID NO: 109588 - DNA, 122 bp, Homo sapiens
ggttcccgaacataccacataatgtgtcatcaagacaacagatgcactcttaagctcagccgactgggaaactggaagccagagcaggaaaggggcgcctggctccactgggcagctgagcc

SEQ ID NO: 109589 - DNA, 122 bp, Homo sapiens
ttgtcctttcttcctccctgtgggctgtgaatccaactcgtcctgggagcagggcgctctcgccttctgttcctctccgagctcagtgcacagaagcattctgcttacccagctgggactgc

SEQ ID NO: 109590 - DNA, 122 bp, Homo sapiens
acagtgcacaaccggctgggccagcccatccagcatagagatgtgaaaacctgtccaggtcgctggtgtatagccagaacaatggcacggggcagggcaaagatgctcacccaggtctcagg

SEQ ID NO: 109591 - DNA, 122 bp, Homo sapiens
ttatgtcatgtgcatgccgcagactgtgagtatgagctgacgcttactttgtgcatgctccggggttcttttttggctgccttttttgccccttctaaagaggatagtgggactgactaggg

SEQ ID NO: 109592 - DNA, 122 bp, Homo sapiens
tcctttaggggcaaaacataaatgtttgaaaacagctgcattgaagaaaactgacagcaacgtaaaccatccccaggggctcgagcctaacagactgagtctccaggccacacagcagagag

SEQ ID NO: 109593 - DNA, 122 bp, Homo sapiens
aagaagctctcggcggggctccgcgtcccggctttcctcagcggcagcagccgggcagagcgtcggccccaggcatagttttcccatcccgtcatgggcgggagagccttcctcccggtcac

SEQ ID NO: 109594 - DNA, 122 bp, Homo sapiens
ctgtctcattttcacgatcttatctatgaggaaccagaggctcagctagactggatttgccgaggtcacaaagtttgtaaatggcagagtcagaattcagactcatatatctggtgccagac

SEQ ID NO: 109595 - DNA, 122 bp, Homo sapiens
gagtggtggtgtctgctgctctgcgggaacacgggcaccaggcccagcagtgcatggatgcggcaggccccgcgtgcgatgccctggtccccacgactgtttcttcccacgccgcggagtgc

SEQ ID NO: 109596 - DNA, 122 bp, Homo sapiens
gtttcgtcatgtgtaaaatggagggttggcatggcatactaaggaggtgaaagggaagaacgctggccttagagacgagtgtcctggctctctactgtgtgttttctggctctctactgtgt

SEQ ID NO: 109597 - DNA, 122 bp, Homo sapiens
ggggaaccccaggctgggaagtcgctgggagccacgcccatgccgcgaagaggctggccgcggcctttcctgaggctacaaaagtctcgaagtttctaactctccaggcaatccgtgcccct

SEQ ID NO: 109598 - DNA, 122 bp, Homo sapiens
taggtatccaccaaagcgaaaaaaatgcccacacaaagactcgtctgagagtgctcagagcgactttatccgcagtaaccccagctggaaactacccagatgtccaccagcggatgaacaga

SEQ ID NO: 109599 - DNA, 122 bp, Homo sapiens
gcgcctgcaatcccactctctgggcgcgggcaaggaagactggaccttagggttggagggcgatgcattcggggaccctcaaggcttctggaataagcccttccagcctccgacgcgggctt

SEQ ID NO: 109600 - DNA, 122 bp, Homo sapiens
cttctctccacctctgacagacctgaaccttgtggattggagttctgggaatgtactggccgtggcactggacaacagtgtgtacctgtggagtgcaagctctggtgacatcctgcagcttt

SEQ ID NO: 109601 - DNA, 122 bp, Homo sapiens
aactgtaagtaattctttatccactggcccctgagcatgcatgccaaatggtctgccagccgtggctttactactcccgtatgcttggtagagcaggccaaatgcagtactgccccacacca

SEQ ID NO: 109602 - DNA, 122 bp, Homo sapiens
actccacagtggccagcaagacatgaacacccagactcttaacccatgtggtctaagagccgcctgaatatgagtaccaagagaaaagtgcagtagaaggtgagagaaggttccatgccaag

SEQ ID NO: 109603 - DNA, 122 bp, Homo sapiens
gcgggcagtgcagagtggaagagaagccagcaagttagacacagcccctctctgggaggccgcctctaaaatggaactagcggacgtaccttggtttgtacatttgaccatggacacacgta

SEQ ID NO: 109604 - DNA, 122 bp, Homo sapiens
cccccatggctccttctgggctggctgtcttcctcctgtgggttctgatgccacctgggccgacggcgtcttctcagcccagggcggccgcgcctccggtgagtttcagctgagggcgcgcg

SEQ ID NO: 109605 - DNA, 122 bp, Homo sapiens
ttggcatttctatcaagcaccgccttgagtgacactacagaccccttccaaacatgctcacggctggtcagctcagggtcaagttctggcttgtctagtgttccagtctctatcctggtgtg

SEQ ID NO: 109606 - DNA, 122 bp, Homo sapiens
agaagcatgttgtccaagcgcatcagctgtgggtccaccggctcctcctcctgggagctccgaatgctgaggcctagcatgcaggcgagtggacttagggacccagagaccccaatacccag

SEQ ID NO: 109607 - DNA, 122 bp, Homo sapiens
aaatgatcaagtcaatcgtgtgggcatgtttcattattcattgaacacaatcttttacaacgctccgtttacgtgcccgagtttgctcctgacgcccgcgtttcaatgtttaaggtaaggaa

SEQ ID NO: 109608 - DNA, 122 bp, Homo sapiens
attttatgtggggcgggcacagtgccgtgagtcttacagaaacctgcatggtgagccgcacgcctttgagtccccatcagccctggcccatccctgctgaggtggcgcgacctgctcacaga

SEQ ID NO: 109609 - DNA, 122 bp, Homo sapiens
gccgaggttgcctggtcgcctgtgtctaccaggaacaatggtcgctgtcacggcatctgccgcctattcttaaaccggtgagaaaaggccctggccctcttttcaagcgagggtcgtaaatt

SEQ ID NO: 109610 - DNA, 122 bp, Homo sapiens
gcagcttttcttggaacaccggcggctctcggaagcccagctgctgtctgaactttgagccgagttggaagctagaaactgtttttgaggctctcctatgttgtccgaaatagtgggccgca

SEQ ID NO: 109611 - DNA, 122 bp, Homo sapiens
agcctggctgtgcatgcacgcagtgtcccaagctgtccctgggcctcacccttggtcaaacgcccaaacatccagagctgctgcggggacctttccgaggcgggaaacttactgaggcagcg

SEQ ID NO: 109612 - DNA, 122 bp, Homo sapiens
attgtctattagtgcgatggtgacaaccaactaataaaatttaaagaccacactgcttatcgtgtctggggttcaccggaaataaatgattcactggaacaattctactgtcaaaacaaagg

SEQ ID NO: 109613 - DNA, 122 bp, Homo sapiens
gcatcggacagtgggtgacccctattggcccacagatgactttgggagacatttgcctttcggtctgtgctttgttctagctggtgcatgaaatcccaaagttaaagtgattgctgctggta

SEQ ID NO: 109614 - DNA, 122 bp, Homo sapiens
acacctcctacattattaccacagcaccatcactttgcatgagacaggtctggctgggaacgccacctccagcatggacagaaactgcgtgtccttgacccagttgtttcatttcttgtgct

SEQ ID NO: 109615 - DNA, 122 bp, Homo sapiens
ccatgaggccaccaaggcagggaatgcacatctctgccatatcaccatttcctttgatgacgtattgaatctctcagggactacagctcttttccagggaatgggggaaagtgaagacaggc

SEQ ID NO: 109616 - DNA, 122 bp, Homo sapiens
tgttagccatccatcatatgctcagctgtgatatgcctgcctgagtgcctgtcccactcacggggcagtcagcatggcaagcagttggtgtggttcggggaaggagcaccagctttcagtcc

SEQ ID NO: 109617 - DNA, 122 bp, Homo sapiens
tttctgcgactggagcggcaggtgcggaccgggagccggaccgaggtttggcagaagcaacgtgtgctcgggagcaaccggcgcgggtgccactgaggcagcggagggaggcaggatcgact

SEQ ID NO: 109618 - DNA, 122 bp, Homo sapiens
ttccgggagcgcagcgtggacttggtgtcgccgcttttggcatggcggccttttccggcccggctgggccaatcctgttgctgaacccgcaggaagatcccgggtttcagaaggagggggcg

SEQ ID NO: 109619 - DNA, 122 bp, Homo sapiens
catgattcagaagctaacgtgaggacccagagcagtgaagagccatggcatttagacaaccggaatacacataggggcctctaaagaaggtttcccacaacagcccttcccacccaaggacc

SEQ ID NO: 109620 - DNA, 122 bp, Homo sapiens
ctggtcaaggacaagccgatggatttcgaaagctatttaatccctgggttctgacgcacccggttcaccaccaagcgggatctagtgcccacaatctgatgtcagagggcgggagtggcctt

SEQ ID NO: 109621 - DNA, 122 bp, Homo sapiens
gggagcccaaaccttggaggcagacagtgcagggatattcaagtctcagtatgatctgtgcgaccctaaacaagatgctgtgtagggctcagtgttctctttataaaatgggaacgatggat

SEQ ID NO: 109622 - DNA, 122 bp, Homo sapiens
aggggtggctggtgccctctgagccgctgcatcacgatgcttagaatgaaatgcacggcccggccaagagtggcagaaccgcccggccggcccgtagactgaggaggggtaataaatggtgg

SEQ ID NO: 109623 - DNA, 122 bp, Homo sapiens
aggcatcatctccaagaccgcattgctcaggtggacacagtgcagcgggttgcagaagcacgtgtacattatgactacacgccacgggccacaccacacaactacccacacgccaccttcca

SEQ ID NO: 109624 - DNA, 122 bp, Homo sapiens
ggcaaggaacatggctgtctccttgggagtgtctctacgggagccgccatcttggaagggcggtcatttctgccgcggagcccgcggtcccctactcgatatacccctgtgggattttccag

SEQ ID NO: 109625 - DNA, 122 bp, Homo sapiens
gctgtcaagctggcgcgccagagcggcatcgaggtgggtgcccgccagacgcaggcacagcgccccagctggccccaggcctatggccagccgccctgtggcatgtcccccggcatgcctgt

SEQ ID NO: 109626 - DNA, 122 bp, Homo sapiens
cattccctctaccctggccttcctcctccttgcaggccccagaagctggagggggctggtcggggttgggctcacagacacagtggtggagctcacagaagtgcccccacccaccaggagcc

SEQ ID NO: 109627 - DNA, 122 bp, Homo sapiens
agcgtgagtttccgcgtctgtttggtccggctgctgtcgttggttgtgagcggcatctctcgccgtttccccgggctgcgggagctggcggccgggctggggctgctgggcggaggtcggcg

SEQ ID NO: 109628 - DNA, 122 bp, Homo sapiens
agaggaaaaggccggcacccggtccgcgagagggggcacgtacggggcgcagaggcagaacgcagcccgcagcagacggacagccttccccagactgcctggagctcggagcccggcgccga

SEQ ID NO: 109629 - DNA, 122 bp, Homo sapiens
ctcaaaacaaatgacttaagatattacaaattcattgcaaggtttcttcacaaaccttcacgtgtaactcctttccagggagacactgggggaagaagggcctgttatcattgatgtcagta

SEQ ID NO: 109630 - DNA, 122 bp, Homo sapiens
gaagagacagacacatgcgtgcacacacatgcacacctccagactatcacacgtgcacaccggcacgcacagacacccgcacaggtgcccagccaggcctcaacaccaggcccctcccccag

SEQ ID NO: 109631 - DNA, 122 bp, Homo sapiens
cctaacactcagagtgtcggtaaaatcacagcagcgctcctgtctggcgcggcaggcgggcgctggagcagcctgcgaggcaatctccatggatcacaggcagattctacatcacgacagga

SEQ ID NO: 109632 - DNA, 122 bp, Homo sapiens
cccgccaggtgagcggggagcagcggctgagaggttagctacaaataataaaggtaatagcgatccttgactgcgtgctgtactttgtgtgccaggccttgacccaggagaggcacgtcatt

SEQ ID NO: 109633 - DNA, 122 bp, Homo sapiens
ccaaggtgggcattcaaagccgatccaaaggatattcttctttttagaaaacaaaaggagcgcaaggagtaggggactgaaggtgcccaaagctagtgggtcagtgtcactttcttcctccc

SEQ ID NO: 109634 - DNA, 122 bp, Homo sapiens
tccagcaatggaaagggattcagcgaggtaagacgcttcccctctcctccattcagagagcggcacacaagaaatctacacagtcttcccaacatgtacacaccctgacatgcccggatgca

SEQ ID NO: 109635 - DNA, 122 bp, Homo sapiens
aagtcctaaccctggctaacctcgccgtctacagcctgaattttggcaaccgaaaggcagcgccggcgccacgtgcacacgggctgggccgctccgccagctgccagggccactgccgcgct

SEQ ID NO: 109636 - DNA, 122 bp, Homo sapiens
gctgcctgaaagatcgaaggacggtaaaccacagacgtgagaaacggaactttgcgaaaacgcagtcgttttatgtaccggctactcattggagttacaccagagactcactactggagttc

SEQ ID NO: 109637 - DNA, 122 bp, Homo sapiens
ttcccccatccctgcagtggataaccccgtgtaaagatgccaaaggcgggctgcccccggcgcagcctttcctggacatgtgttcccagctgcctttgctggagcgccgctgatccttcagc

SEQ ID NO: 109638 - DNA, 122 bp, Homo sapiens
aggggcccggcgctggcttccctcctggggcatagggaccggacagacccgaacaggagccggggccacggccacacgcggcctagcgtaggttggacacgcctcccgggctctcggagctg

SEQ ID NO: 109639 - DNA, 122 bp, Homo sapiens
ggggagcagaagtaactaatatcattgtgttttcttagttacattttggacaaatttttacggatactggagatgagaagtggactctgctctgtcctgaaaacctggaatcataacatttc

SEQ ID NO: 109640 - DNA, 122 bp, Homo sapiens
gttcacgtttttccgcctggaaactgcatgcctgtctttctgctttgccaaagtttccttcgcacgaggagggccctgaattacagaagtcgcttttctccagtcagttcaagccagcctgg

SEQ ID NO: 109641 - DNA, 122 bp, Homo sapiens
cccgtgacccggttccggctctgctgccacattttcaggtgtttgttacagcaacagccccgcttcctggtagcaatgtctgtcttagcctgtttgtgctgctgtaacaaagcaccatagaa

SEQ ID NO: 109642 - DNA, 122 bp, Homo sapiens
accggtgccgtgccacgtgaccctccagctgtgcgcgcccagacttctggagctcagctccgccccggcgccaggagcactccggcctcagagtggggactaatccctgagagggagcctcc

SEQ ID NO: 109643 - DNA, 122 bp, Homo sapiens
ttcgtccacgagccggggagggggtactggccctgccgctgactgcgcgcagaagcgtgccgctccctcacagggtctgcctcggctctgctcgcagggaaaagtctgaagacgcttatgtc

SEQ ID NO: 109644 - DNA, 122 bp, Homo sapiens
cggggcgccaggcagaggtcctggttccactgatcctccagtagtcagtggctccagggacgcgctcctgaccctccggggagctgctgggggtgtctctttcttggaagggatggaagggg

SEQ ID NO: 109645 - DNA, 122 bp, Homo sapiens
ccgtgctttcaaagagctgcggtagggggcagaaccgggaaccggatgttctaagcctgtcgtacgagcgcgacgtaaagcggatctgctttatggcaccttgctttcgccgtaaagcgcag

SEQ ID NO: 109646 - DNA, 122 bp, Homo sapiens
gagggggataaagaaggaaggaaggaaatggacacgcactgtggctcggatccaccttgacgactctgcggagtgaaacaaagtcaaagcctgcttgattcgctcagatgaggtccccagtg

SEQ ID NO: 109647 - DNA, 122 bp, Homo sapiens
cagagcagtttcagcgcgcggtgatggcagggaggccaattcaccaggttggaaaacaagcgggagggagaaagtggcgattttccccaggagtttgggcgagaagagggggaaagagacaa

SEQ ID NO: 109648 - DNA, 122 bp, Homo sapiens
aataaaagcgttttctgtggctcctccatccggttgggctcacagaggtgcacggacaagcgggagggccggcggagaacgagcccaatccgtgcctgaggtttaatgacggagtcttatgg

SEQ ID NO: 109649 - DNA, 122 bp, Homo sapiens
tctgtcccccttctcctatccactcctccctttaacccacacggcccaagcctggagaaacgacttggtttcccacactatagacagagcgctggggtaaaaaaacctgcaacttttgagag

SEQ ID NO: 109650 - DNA, 122 bp, Homo sapiens
tgcactcacagagcagggctcctgaagggtgcagcttgttattaattcaacaggggctgccgagtgggcactttatcccgcctggctcctgctacccactcctggctaagctcacagacgaa

SEQ ID NO: 109651 - DNA, 122 bp, Homo sapiens
aaaggagagaaagtcgagcgactgtggggttagacggaggcagacagagcgtgggccgagcgatgcggggctgtgcgcccaggcggccgcgagttgtgactggagccacgatgcacggccag

SEQ ID NO: 109652 - DNA, 122 bp, Homo sapiens
ctgaagaatgggagactcctatcaaaatcccactccccaaactctaatggtttaaaatctcgcaagtaaccaaaatccccacacacttttatcccatttaataactatgtatatacagaaat

SEQ ID NO: 109653 - DNA, 122 bp, Homo sapiens
gaataaaaagggaggcgtgagaggaggttgcccaggccagtttccttggtcggctgcccccgcgtctccccgtccccaagccgtagtcctggatggccggcagctgcactcaccaccacctc

SEQ ID NO: 109654 - DNA, 122 bp, Homo sapiens
agacaagaatgtgaaataagcacctacagaaatgcaagtgttcccagtggattttccgcccgtcccaggttcgaggtcccaggtccacggacgccgtgcactgggatgccccggacagcgcg

SEQ ID NO: 109655 - DNA, 122 bp, Homo sapiens
ccacgtttttccagccaagccacactcgaagagtaagtgccgtcacctcacgctgcagttcggtaggtagagtccgccatttttccaccaggacagcccgggtttggttcctacatcctttc

SEQ ID NO: 109656 - DNA, 122 bp, Homo sapiens
ccaataaccttgagggatctgtcaccacgctgagtccgcagcctgtgctgagttggccaccgcctctcccgctaagtgaaatgcaggtgtcaggggagcagaggccacaataaagccgcaac

SEQ ID NO: 109657 - DNA, 122 bp, Homo sapiens
cctcaaatctagtctcaaatttaggttccttttcattttctgttatggaaaggccctcagcgtatcccaggctttggagccttttgttagtagtctggcccatgcataatttccccttcctc

SEQ ID NO: 109658 - DNA, 122 bp, Homo sapiens
gtcagggcttcgataggcctccctgttcactgcacctgtcaggcctcagataggcatccccgtccacctgtcggagctcggataggcctccctgtccactgtgcctgtcggggctctgatag

SEQ ID NO: 109659 - DNA, 122 bp, Homo sapiens
cgcaaataaaggaatcagtgtcagctctctagctgggaaccaccaaggttacaaagctaacgtgactggccctgctataccgaaacggcttaatttctttctggcaaatccacatttacggc

SEQ ID NO: 109660 - DNA, 122 bp, Homo sapiens
aactcattcattagtagtccatctcatagatataatttgatatctttttccagttaagcccgtttggttacctttttactcaagtgaaatgccctattgttagatgtagtcagttactggca

SEQ ID NO: 109661 - DNA, 122 bp, Homo sapiens
cccatcctgagtggacatggccagagccaccatgggcagaggcagggctgggtccaacctcgtgctgcccgggaggaccaggctggcctcctccctcctccctcagccgtccgcagctgctg

SEQ ID NO: 109662 - DNA, 122 bp, Homo sapiens
caggggcccagagtgcctgagaggcgcctgtgtttgcacatttggaggccggtgggggtccgtgcaggcgcagagccccacagtagcaggtggccccgtggggaggctccccgatgggtaca

SEQ ID NO: 109663 - DNA, 122 bp, Homo sapiens
tgggcggagaggcagaattaggggagtctccaggaggcgtggtgattggccgccgccgggcggaagggggcgtggggagggaaaggccgagcagcgcggtgacgtctcgctggcgggggcgg

SEQ ID NO: 109664 - DNA, 122 bp, Homo sapiens
gaccgccgccgtgcgtgagcaggtgcaccttgagctggtgcttcttggcgaaggccagcgcgcactgcggctcggggcagcggtagccgggcgtgctggggccggaggcctggggcgcgcgg

SEQ ID NO: 109665 - DNA, 122 bp, Homo sapiens
cacagggctatcagggttaccaagccgccagcaccagatcacctggtgggcagtttctcccgggcctttgtcggatttaggcctcccctggcttccgagcgcagcccccccagttcgtcccc

SEQ ID NO: 109666 - DNA, 122 bp, Homo sapiens
aatcacttgcgcacaggatgacaggagctgggaacctcaaggtaggtgagcctgccaagacgcgggtccgggactcggctggggcgcagatggagcccgcccggtagggggtgtgcggagcc

SEQ ID NO: 109667 - DNA, 122 bp, Homo sapiens
cgctgtttggggtggaaatcctctaacccgctgggcctgtgcgccagggctgagcaacagcgcggagccgtgcatctgtcgggggcgggacgcggcagcagggctgtgagggctgcgttttc

SEQ ID NO: 109668 - DNA, 122 bp, Homo sapiens
cttggtgctgtcccaagagtggagaggagacagatgaacgtttctcaggctagaggaaggcggtttatttgcttccaagggttccagtagacagttctgacacgaaatttcgttgtggaggg

SEQ ID NO: 109669 - DNA, 122 bp, Homo sapiens
tattatcttaatgccttgaacgccaaaatcttcagatcagagtaactctgatcaggagcacgccagacctacagaggaaaggataaacaagaatgaggtaggatcttcctgtatcccaaatc

SEQ ID NO: 109670 - DNA, 122 bp, Homo sapiens
gcaggttctccctactgggccctgctggagactttgatgggaccaaggctgaatgaggagcggataggctggcaagcaagggaaggctctcatgcccaccctgctgcatactcaggcagacc

SEQ ID NO: 109671 - DNA, 122 bp, Homo sapiens
cagcaggccattaactggcagaacgacgcgaagtttggccagggctgtcagaggagagcccgggccactgaacagcctactccaggggaaaaccatttcccttttgtctcccccatctgttg

SEQ ID NO: 109672 - DNA, 122 bp, Homo sapiens
acggcgggagtaactatgactctcttaaggtagccaaatgccttgtcatctaattagtgacgcacatgaatggatgaacgagattcccactgtccctacctactatccagcgaaaccacagc

SEQ ID NO: 109673 - DNA, 122 bp, Homo sapiens
ctcaggtgatctgcccgcctcggcctcccaaagtgctgagattacaggcgtgagccaccacgcccggcctcaaagctgaaattctttaacccttgtgccattgcatcatgtggcctggaaga

SEQ ID NO: 109674 - DNA, 122 bp, Homo sapiens
gaagatcctagttccttccttcccgagtgatacccatgaactgccagtagaggctgctatcgttccatgtgtaaggaatgaactggttcaaggcgcgtcctacccagtcattttctttacct

SEQ ID NO: 109675 - DNA, 122 bp, Homo sapiens
aaagatcaacaggatgagcaaagagaggccggacttttccaaggagtttggagaaacttccgggaacactcaatctcctggcgcaggagagcaagatggtgcttgatggaatattttcccct

SEQ ID NO: 109676 - DNA, 122 bp, Homo sapiens
actgagaaccaaccaatcagggggagggaggggccgggctcgctcagtccgattgggcggcgtccgcacagtcacacagcgctcaggccacacccactccgccgccgctggccccaccgggc

SEQ ID NO: 109677 - DNA, 122 bp, Homo sapiens
agtcaaggtctttacagggtggacattttaggaatacaagagaagttgaactgaaagggccgtgtggatatgttgttgatcttggcgaactctcctgagctgtatagcactgacaatggagt

SEQ ID NO: 109678 - DNA, 122 bp, Homo sapiens
gggagcagcctccctccctccttagagcccacctcttcagcccttcctcagcctgctgcacgcttgtacaaagtggagcctcccctgaaccccacaatcatttatctgaagtgctcagacac

SEQ ID NO: 109679 - DNA, 122 bp, Homo sapiens
taaaatctacatattaatccctctggtcaagctggaacttccaccacctggttttcttttcgccctttctttgttccttcccctcccccattgcctcaggatatctgaaattttctcctcaa

SEQ ID NO: 109680 - DNA, 122 bp, Homo sapiens
cagcgttcggccaagtgtcagccggcagcgacggcgctagagctgggagctggggacgcgcgcgccggaccttccacagcctccgcccagagcctgaggcgccggggccgggggagccgggg

SEQ ID NO: 109681 - DNA, 122 bp, Homo sapiens
ctccacctgaaggcaggagagatgcccgcttggactccatttcccaaggcgcgggcctcccggttccccaggtctggctctccagagatcctccttaacgtgaactgatgcagccgtctccc

SEQ ID NO: 109682 - DNA, 122 bp, Homo sapiens
ccagagctgggcagcagcccaagggggcagcccacatctgtctgcctgaaaggcagagctcgggagccgagccctgggaagatgcgtcagccccaaaactccgtgaggagtccaggagccaa

SEQ ID NO: 109683 - DNA, 122 bp, Homo sapiens
ggaaagaggagagccgtggagaaacagcagccggaaagcgaggacgaaacagaagacatacgtacgacagttcggtatccagtggcgctgaattggaaaaagaactgggtgggtggggcctg

SEQ ID NO: 109684 - DNA, 122 bp, Homo sapiens
ttaccacgctccctggtcagtgggttaatgtcgtcaggcggggccaggctcgctaacagccgggcggggtcccttcccccgggccccgccccggccgaccccacctttccgcgcggctccgc

SEQ ID NO: 109685 - DNA, 122 bp, Homo sapiens
gatggcttccagaaaatcacttaatgaggaaaaaaatgttttccattgtgcacagcactgcgcgctgcttggctctccctaaactgccgccctccagcatctttgtttacatgtggtttaca

SEQ ID NO: 109686 - DNA, 122 bp, Homo sapiens
gaggtttattgctctcatttttcaagtgaggctcaaagaggttgtgtaggggttaacaaccgactttggagttctgcaatcttggattacaaaacactaactgtgggacttttcccaattta

SEQ ID NO: 109687 - DNA, 122 bp, Homo sapiens
gccaccaaagccttcttctcccacacaccgccatttcctaggttaccagctccccagtgccgaaggggctacagaaacaggaaggaaatgccccacagacatgcaacaaacccagctgcaca

SEQ ID NO: 109688 - DNA, 122 bp, Homo sapiens
gttcgggtaagtttttctctcggttcttttgtctggcgcctggcttgggaagagcctgggcgtggggcagagttggcagggcgtgcggggaaggttttgtcgccgggttgcccagaggagga

SEQ ID NO: 109689 - DNA, 122 bp, Homo sapiens
aggaaggtgttgaggaagtcgatgctcaggaagcgcaggtccgtcagcctctccagcagccgctccacactggcgtagcggatctgcagcactttgcaggagttcatggttttgctgaagcg

SEQ ID NO: 109690 - DNA, 122 bp, Homo sapiens
ccttctctagggtcctagcacagtgtctgatggagctttcctaccagaccctgaaattcacgcatcaggcgcgggaagcggtaaggaacgcatatataaaacatgattataccaagaacccc

SEQ ID NO: 109691 - DNA, 122 bp, Homo sapiens
tctctgtgattaaaaaagaaaaggctttttctggtactgttttaataaatatgttaaaagcggacaacattttaaatttatggtcactgagaaagatatttgcagatatcaccttcttcagc

SEQ ID NO: 109692 - DNA, 122 bp, Homo sapiens
gatgctctacattaactgcaaagtgaatgggcatcctttgaaggcttttgttgactcgggcgcccagatgaccattatgagccaggcttgtgccgagcgatgtaacatcatgaggctggtgg

SEQ ID NO: 109693 - DNA, 122 bp, Homo sapiens
ttgcttttaaagaagagccctctgcttcctagcggctgctgcgtatgcttggtccagccacgaagacataatcctctgcgggcagcatcacgtggagcgagggtcaagtcctctgcctggtg

SEQ ID NO: 109694 - DNA, 122 bp, Homo sapiens
cgcccgcggcggtgtctcagaggcagctccagtggcctgtactatatgcggggatgtgaccgaaggaaatgggaaagtaagggagcgggagtggaaatggctgagccagaaagcacttggga

SEQ ID NO: 109695 - DNA, 122 bp, Homo sapiens
agaacctggggcaggggcggggcttaggggacgaggttagtacgaagccccaccccgacccgggctgcaccgccccctccgcgcttacgtggcgcagccgcggggacatggcgtgggtggtg

SEQ ID NO: 109696 - DNA, 122 bp, Homo sapiens
tgttggtttttaaaggtcaaagataaggaaacttgtgcccccacgttcaggagcaccccacgtgctggccagacgccaggaagtgtttcatcaggtcacaaacacacaagagcttggtgctt

SEQ ID NO: 109697 - DNA, 122 bp, Homo sapiens
tcagggctagcagcttctactgatgcaaaaacataggaagtgtctctttgcttctggaaccggggtgggcagcaaggagctggccacttctttgaataccggtggcatcctgggcagaattt

SEQ ID NO: 109698 - DNA, 122 bp, Homo sapiens
agaaatccaaggcaggaaacctgctgttgcaattcgtattctctgtgtctatgccggaaacggcttgagctgtaattgcagtttatagtgatgtaaatgcagccaaacccccgagtgaagcc

SEQ ID NO: 109699 - DNA, 122 bp, Homo sapiens
tgacatacccactgtgcgcgcgacatacccactgtgtgagtgcgacatacccactgtgcgcgtgaaatacccattgtgtgtgtgcgacatacccactgtgcgtgcgacacacccactgtgcg

SEQ ID NO: 109700 - DNA, 122 bp, Homo sapiens
tatccctgacagctttcataagcttcctatacagctataggagtatatctcggatacttacgcattggagcagctcctactttttttgtaagtgtaccacaaatcccaaaattagatgttct

SEQ ID NO: 109701 - DNA, 122 bp, Homo sapiens
tgcgcgcgtgtgaaagggttcgagctcttaggccgccgcggcggctgcaatgctggatgccgggctcgaaggctgcagcgcttccatgtcccaagccacctcagtcctctctcggcacctcc

SEQ ID NO: 109702 - DNA, 122 bp, Homo sapiens
tcctcacctctcagacggggcggctgccaggccgaggggcacctcacttctcagatggggcggcggccgggcagagacgctcctcacctcccagacggggtcgcggccgggcagaggcgctc

SEQ ID NO: 109703 - DNA, 122 bp, Homo sapiens
atcacatgcccatcaggaacgatgagcctgtcgcaggcggcagagttctcctggttccctcgggcggggggcgggggggcgggggtcctccaccgaccctgggcttcgaagaagcttctggg

SEQ ID NO: 109704 - DNA, 122 bp, Homo sapiens
gttcgcaccgggccagtgggctggcgtggtgctggacgacccggtgggcaagaatgatggcgcggtgggcggcgtgcgctacttcgagtgcccggccctccagggtatcttcacgcggccct

SEQ ID NO: 109705 - DNA, 122 bp, Homo sapiens
attgggatttgacaaggactgtgaaaggctgactctccctgttctctttcatgctggcaccgggcagagtgtgggaactactgcctcaatagtaagtacagtaagtcctgtgagaaactgcg

SEQ ID NO: 109706 - DNA, 122 bp, Homo sapiens
agggaccctcgcccttaccatctatccccatttccgcatctcttgcactggtaccccgggcgccacgttctcagttcctgggactgaaaactgcagcagtctggccagctccagggacagag

SEQ ID NO: 109707 - DNA, 122 bp, Homo sapiens
ccccgtgcctcaaaggagagcctctgccctgctaccctggagcaccttgtggtgggccatcgagcccccggtacctgtggggcaaagccggccacagccctagggacgctctgagcagttac

SEQ ID NO: 109708 - DNA, 122 bp, Homo sapiens
ggcaggacaaaggcgcccacgaaccctccctgccgccgccgctccacagccgcgccgcgccgccaacatggagggaaacgtccgcagtttaaaacccccagctccatttccgcagcgggccc

SEQ ID NO: 109709 - DNA, 122 bp, Homo sapiens
ttaaatacttaggaacacctatcataaggcatattgccctggctacttcatcctacatagcgtatcaacctttctaagtatgatggccttctttgcccgtgtacttctagcccatttctgct

SEQ ID NO: 109710 - DNA, 122 bp, Homo sapiens
gtccttattgttctttgaatacttccttactttctggcataagctgtttcaaccatacttcgtattttctctgccctagcccttgaatcagccattttcatttttttccagaagccctgact

SEQ ID NO: 109711 - DNA, 122 bp, Homo sapiens
ccgagttatgcagatcaatcggcctctggttggctggagtagcgctggcaggggcggggccggggcgcggccacagagcgcgcggggcgggggccgaggggagtcgcccagtcccgccgctt

SEQ ID NO: 109712 - DNA, 122 bp, Homo sapiens
agaaaagaaagaaaagaaaagaaacaaaaacgccaaccagagatttttttttttctcagacgatgaactcgcacttagaagatcaaggcgggctggaaagcaaatttttaaaaaatgtaaac

SEQ ID NO: 109713 - DNA, 122 bp, Homo sapiens
agctgcaccgctgagctggtgagcattcaggcagagcacccacctctacttttctcaccccgaaaatcagagactggttctcagctggtgcagccaccgccccagcgtgccggatgcaggac

SEQ ID NO: 109714 - DNA, 122 bp, Homo sapiens
gacactgagccttggagaatgagggcatctcacccgaggccacatggctggtcagcagagcgaccagcaccagcatcccagcctgtgagccccataccttccagcctggaccacagccacat

SEQ ID NO: 109715 - DNA, 122 bp, Homo sapiens
cctgcaggcaaaaggggacacgttaagtccaggcttgggtcattcactgcggtgtaaacacgctttctccctcccgcccggccccagccagctgccttggtggcccataacccctgagggta

SEQ ID NO: 109716 - DNA, 122 bp, Homo sapiens
gcaagccccaaattccaaaaaacctgagtttcccctcctcacagaaaataataaagcatccgtgaaatgttttcatgatgaaccatggagtgcagatttttagggtcattggtgacatcatg

SEQ ID NO: 109717 - DNA, 122 bp, Homo sapiens
gaggttgccccagtcccctggctgcaggaacagacacctcgctgaggagagacccaggagcgaggcccctgccccgcccgaggcgaggtcccgcccagtcggcgccgcgtgaagagtgggag

SEQ ID NO: 109718 - DNA, 122 bp, Homo sapiens
accccgcatgcgtgacgctcacgcgcgcagtccccctggcttcttccaggaaggctgaagcggcctaatctcggccaaaagatcaggacgactcgatctgggctggactccttctgcctgag

SEQ ID NO: 109719 - DNA, 122 bp, Homo sapiens
cccggctcacctgtatccatttaccttcatcctaattcttaagaaagttgtctttaggaccgggcgcggtggctcacgcctgtaaccccagcactttgggaggccgaggagggcggatcacg

SEQ ID NO: 109720 - DNA, 122 bp, Homo sapiens
ctcgccgccgcccgccccgtacgtgtcctcgatcacttccccgcccgcggggctcacgagcgacgaggcggtccccatggcgtccgttgccgctactacctagtgagtaccagcaggactgg

SEQ ID NO: 109721 - DNA, 122 bp, Homo sapiens
caagtcacttccctggtctacgacccagtttcccaaatgtgtaaagggtcctttagacctcgccctaaaaggtcaggggcgtggcttaaagaggaccgcgcttcccgggccccgaccccaga

SEQ ID NO: 109722 - DNA, 122 bp, Homo sapiens
tcagcctagtgcaaactactgccccggggcgggggccgcaggcggcgggggtaggaaagccgcgggtggatggcagaacgggagaggtgcgtgggtggcactttgacttcaggagaaagaag

SEQ ID NO: 109723 - DNA, 122 bp, Homo sapiens
caggtgcctccagagcaacaagccacagctgcaccggccacttcctcagcaagcgtgcaccgaggtagagggacacgaggctgcagcacggccatacaatggaatacaatacagcaaggaaa

SEQ ID NO: 109724 - DNA, 122 bp, Homo sapiens
cgccgagatgtcctcgcgactgtggctctggtgcttctgcctgggcggttgccggctggccgccaggaagcgccctacagctccggctgggcatgtaagtggcgcccgcgcgctccggaacg

SEQ ID NO: 109725 - DNA, 122 bp, Homo sapiens
ccgaatcttgaaaaactagacgttgcccagctaccagcccccgtctggtttccataggaacgcgcaattccgttgcgtagccctctgcgccggtagttgttctgtctcagttccggttttcc

SEQ ID NO: 109726 - DNA, 122 bp, Homo sapiens
acgtccagaaactacagggttaagtaaaagctgcaggcaaggaggtcagagatttgctcccgatggtgatcagatggccccagagcagtgctatctcagagtgccctcgtcaggtgaattta

SEQ ID NO: 109727 - DNA, 122 bp, Homo sapiens
ttctgatgcagtaggtctgtggtgaagttcaaaaattcccatttctaacaagttccctggcgaggttgatgctgccagtccaggggtgcactttgagaactactgctctaaggcactatgca

SEQ ID NO: 109728 - DNA, 122 bp, Homo sapiens
ggttcattttacagttcagtttgagtcccttaatgctggaagtcccagaatgtgatatcacgctcatttagacacaaaatatttatttaatacttcgagtatgtgctgagaaccatggtagg

SEQ ID NO: 109729 - DNA, 122 bp, Homo sapiens
ttcaccatcactctcaggaagccctctctcagaagcggatttctgcctgcttcactttaacgtctctcaagttggatacccagcgtggtcctcctactgaaacaagagtgccagctatacca

SEQ ID NO: 109730 - DNA, 122 bp, Homo sapiens
gtagatgtctttgggatgttctaacctgcacccaaaatttctggatagagcagccttcttcgggatgttctaatctgcacccgaaatttctggatagagcagccttcttcgggatgttctaa

SEQ ID NO: 109731 - DNA, 122 bp, Homo sapiens
cagccgtgctgctcaactatgtctctcctgaattacccaggagtctcctgcagggctcagcgtttgactttgcaccattacttcttggccattcctaggctgtgttattcttggagtccttg

SEQ ID NO: 109732 - DNA, 122 bp, Homo sapiens
aatgctgctgccctcccgcatcccgcgcagagtcgcttatgatcaccttaggggccgtggcgaaaaaataagggcacagaaaatggggcggctggaggatgttcacaaaaggggtgatccgt

SEQ ID NO: 109733 - DNA, 122 bp, Homo sapiens
caggtcctaagtcctgccccgccggaaggcagccaaggcccagtgagaaattgagtgcagcgccggtgggctggcactgctgggggacccagtacaccctccgcagccgctggcccgggtgc

SEQ ID NO: 109734 - DNA, 122 bp, Homo sapiens
attctgcagccactgcagattcgcgggaagctggggggaggcaatgccccacccggcccccggggctgccccatagcagccaccatgccctggccccaggccccaggaggaggatcctgccg

SEQ ID NO: 109735 - DNA, 122 bp, Homo sapiens
cggggtgtactccgcgcgggaccctgggcctccgcaggccccggcggggtcgccccgaggcgggcctggcgagtccaatcgccctgcccgcaggggacccgcccctcatgggtcccgccaat

SEQ ID NO: 109736 - DNA, 122 bp, Homo sapiens
gcagctccaccggttgaaagttggctttgtttagtgcccaacttcgcagaagattttcctcggctgagtgggcttggcagagccccggcttgagagggttgcttagcaatgagatttggtgg

SEQ ID NO: 109737 - DNA, 122 bp, Homo sapiens
tttccacggcttattcggctgacccagccccttcccctgcaagggcggcgcgctccttgccgctgtccagcagctgtttctactgccaggtgctgcgtcccgcgatcgttataacacatgcg

SEQ ID NO: 109738 - DNA, 122 bp, Homo sapiens
tcataccgtggaaattaaacatggtgagaacacggaaagtaactgcctgttcgtcagagacgtttaaggtttgggtttggttaaattactattttgtccagaaaaaaaaggaagcactaaag

SEQ ID NO: 109739 - DNA, 122 bp, Homo sapiens
ttgacccaccagccctggttccaggtcctggagccgcagttccggcagtttctcttctaccgccactgccgctacttccccatgctgctgaaccacccggagaagtgcaggggcgatgtcta

SEQ ID NO: 109740 - DNA, 122 bp, Homo sapiens
ctgtgaaatagctagagacgggggtaagggcgacaaatctgaggttgcggttccagaaaccgaggctcagtaaactggaactccctcagatctgcattgtatccgcaccacccactatgcta

SEQ ID NO: 109741 - DNA, 122 bp, Homo sapiens
gcaggattccagccttcgcctagccgggcgctttgctctgccgggctattgggcgtcctccgctgcacagaaagccagcccagttgggtattactggggagaggatgcctcctgtcggcagg

SEQ ID NO: 109742 - DNA, 122 bp, Homo sapiens
cactgatgcatctccacagcctaaaagactgtctggcctcaacagtattcaatacagacacgatgaacacatgggggtgactgagcgcgactccagtgcatcttctttgtaaccgcaaacac

SEQ ID NO: 109743 - DNA, 122 bp, Homo sapiens
gctatcaatatgtttcctgggcaaaaggcaaggcccagacatagagagttgacacattaacgcctcctctctctctgaacccatctgaaggttctgttgggggtagattggggtggtggtga

SEQ ID NO: 109744 - DNA, 122 bp, Homo sapiens
cgtacaatatcttgaacatgcttcttccaatgggttttgtttcccatttcctgcccctttcgccactcacggaccttgaggccagttgacggcccttctccccacgcctgtgtccccgcgtt

SEQ ID NO: 109745 - DNA, 122 bp, Homo sapiens
gggcctagggcgaggccgcgagcgcagggagaagccgagggcggaaggagcccgggtagccgcccagcagcgcctcaccccgctggccgcagcatctccaaggtggcctcttagcgccccgg

SEQ ID NO: 109746 - DNA, 122 bp, Homo sapiens
gggactgaagctggaaccagagctagggccagggcaagggccagggctacccgggcacgtcgggctgtccagaaacgggcttcccccaattcagatgataccgttttgtcccctcaagagct

SEQ ID NO: 109747 - DNA, 122 bp, Homo sapiens
gaactcagtagtcactccaactcaacagccaccatggggtgctatgtccccaacaggcctcggaaccaaggggcagaagcagcagcggcccctgtaccaccactgccagtgacctgctgtgg

SEQ ID NO: 109748 - DNA, 122 bp, Homo sapiens
tggggggcgctggctgcctgctggccctggggttggatcacttctttcaaatcagggaagcgcctcttcatcctcgactgtccagtgccgccgaagaaaaagtgcctgtgatccgaccccgg

SEQ ID NO: 109749 - DNA, 122 bp, Homo sapiens
tttctgaaacattcctcttccatttattctgtgattttcttcagaaacacaaggcgtgcacgagtcagcttatcagcttatccttcacccacacgtaggctcttctttccaatcaattttat

SEQ ID NO: 109750 - DNA, 122 bp, Homo sapiens
cagaagcctcctccttaaaaggccccaggttcacttactctgtgacgtacattggtccttcgatgacgggatctgcagggacagggacacagaacataagcagtttcctccagaccccactg

SEQ ID NO: 109751 - DNA, 122 bp, Homo sapiens
cccctgctgtcagtgctggctggagaagtgctgctgaagaaagggccacaccagcagagacgagtgtccctgcagagaggaacctaggtggatgggatgggacttacaaagaaaagcccttc

SEQ ID NO: 109752 - DNA, 122 bp, Homo sapiens
catggaagttggtcccatagaatagggtatcctgggaagtagcttccacagcagaagtaacgagtcatggtggcagcaattgagaaggatttagatggattgtgaagggtaagttacccaag

SEQ ID NO: 109753 - DNA, 122 bp, Homo sapiens
aggcggcgcgtcgggccgaggaggggcttctctgtggctgcagtagtttgttctctgggtcgtctttggagtggccgagcggcgtccgggcgctggggcggccaagtggcgcgggaagggtg

SEQ ID NO: 109754 - DNA, 122 bp, Homo sapiens
ggagctgagcctgcccaagggacacgcgcaccgcccagatctgggagcgcggcacggggacgtgtaaacctccgtccccagggagcctggagcacctctcagagggcggagcagcggccatt

SEQ ID NO: 109755 - DNA, 122 bp, Homo sapiens
catctatgcaattattcatcctcatcaagctttctgcatctgctttgttaattactgattcgtgctatgcctgcttagtgtttccattgggttcagcatctgcagctgtccagttggctgct

SEQ ID NO: 109756 - DNA, 122 bp, Homo sapiens
gcaaaacccaacacgaaaagcacacagcaaagacaaagaggcccgccatgttttacactgcggcaagaccttcagccgccatcttttcctgtgtgaccgcacatgtccaccaccatgctaac

SEQ ID NO: 109757 - DNA, 122 bp, Homo sapiens
aatcaacagaggcagggtagatataaaaattatcacaaaatggccaggcgcggtggctcacgcctgtaatcccagcactttgggaggccaaggcggttggatcacgaggtcaggagatcgag

SEQ ID NO: 109758 - DNA, 122 bp, Homo sapiens
gctgaagcagtggtgcctctttgagctctcgggcatgccggaagttttggaaacgctacccggccgtcttccgagctccgctgctggtggtggagttggcatctcatttcgcaggcgggagc

SEQ ID NO: 109759 - DNA, 122 bp, Homo sapiens
cagcgctgactggtgccgtttcccacacagtctccacagctgtgatttgcttcgaattaacgggtcagattgctcacatcctgcccatgatggtggctgttatcttggccaacatggtggcc

SEQ ID NO: 109760 - DNA, 122 bp, Homo sapiens
ctctgtgtatgccccagcggctgctctgccaggactctatacaggtgctatgtattggaccgaaggccctggtggtgtggcttacaaagggatctcctaggtgcaaagatccatgggagagg

SEQ ID NO: 109761 - DNA, 122 bp, Homo sapiens
ctctccaactggctcctccctctcccccaccccgctttcaaagccgcctcatcattcccacgctagcaagttaatatccttatttacgagaacttgtgtttcacagtcttaaccacggaggt

SEQ ID NO: 109762 - DNA, 122 bp, Homo sapiens
ggtggtggttagagatatgcccccctcattactgccaacagtttcggctgcatttcttcacgcacctcggttcctcttcctgaagttcttgtgccctgctcttcagcaccatgggccttctt

SEQ ID NO: 109763 - DNA, 122 bp, Homo sapiens
ggatgaacacccaagtgcgctccaggagaagggatttggcaccccaaggggcttttaaaacggtaagcttctaggggtgtctttgcccccaataatccatagaaacaacagtcatctaaaaa

SEQ ID NO: 109764 - DNA, 122 bp, Homo sapiens
ttctcagcaccccgcaaccggcaccggcgctgtccagaccgaggccatgaagcagattctcggggtgatcgacaagaaacttcggaacctggagaagaaaaaggtgccaggagttggcgggg

SEQ ID NO: 109765 - DNA, 122 bp, Homo sapiens
gcagcctccaagtgcagacacaccgaatggcttttcagctgacacaccgaatggcagttccggattaattcccacactgtccactccactcgtccacacccatctctgcacccttcagcagt

SEQ ID NO: 109766 - DNA, 122 bp, Homo sapiens
cttttgctacccaagaccaagcggctctggcaagacagggttgttttccgaatgccagaccgaggtgccttatgaaggcagctgccgatggttccagatgtagagagataggtgatgcagga

SEQ ID NO: 109767 - DNA, 122 bp, Homo sapiens
gcaagagtgcaacccacccgtgtccctccaagctgcagtggaagagtggaagagtgacctcgcaggtctgagagtggctggttcatgtgagatgccgtgaccaacctttctaaagtggaaaa

SEQ ID NO: 109768 - DNA, 122 bp, Homo sapiens
aggcctgggccggtagcgggaaccccgggggcggcccagctgggtcctccgagagccggccgccatcgtgtgctttctcacaggagagaagccgggggatgtttcattcattcggccgaggc

SEQ ID NO: 109769 - DNA, 122 bp, Homo sapiens
agaccgcgggttaggggcttcatctctctgcgttctcagttgtgggaggccttggtgattcggccacagctcagcctccgtcgctctgtgacctgcgggtattggatgattggtagctaaga

SEQ ID NO: 109770 - DNA, 122 bp, Homo sapiens
tagacgtggtttctcctttgttttcttcttttttttttcttttaaggctggggtcttggccgggcgcggtggctcacgcctgtcatcccagcgcggtggctcacgcctgtcatcccagcacg

SEQ ID NO: 109771 - DNA, 122 bp, Homo sapiens
cttcattagcctggacaccgtggcgaaagctgtgctgtcagcactttggaggctccagttcgcgttgcctgtcagtcaccagggacagctccggagccgttcacaaagccttgttttccttc

SEQ ID NO: 109772 - DNA, 122 bp, Homo sapiens
acccaccccaaagccgtcggcctcctgcgacagcggcgccctgactgcctcctccggccacggcccctcctgctttaattaccagcatctagggcagccggcacgccaggcggcttcgcact

SEQ ID NO: 109773 - DNA, 122 bp, Homo sapiens
gcccagggccagccaatggcggtagaggtcttgggcacctgacaagaggggcggtccccccgccggaaggggcggggcgaggcgagcggccgcgtcagcggtaggtggggctgtggttacgc

SEQ ID NO: 109774 - DNA, 122 bp, Homo sapiens
ctccggagttgtggggcagaagtcagtattttaacaaggcctccaggtgattctgatgcgcgctactcttctgggggtgtgaaaaaccagagaggacaggaagaaagttagaattaaagcat

SEQ ID NO: 109775 - DNA, 122 bp, Homo sapiens
agcaagctggggctacagcggtttaagaacattgttggaaagttgcatttcgagtttgatcgaattgctcacagcctgttccgttttaggtcattagcttctggccttctgccccgccggca

SEQ ID NO: 109776 - DNA, 122 bp, Homo sapiens
agagggcagctggtagcagggtgggatgcccgtggcatagggccgagcccccgctaggcacgcgggagcagcaaggcttccggaagcgcagggagcgctggactggcgggcgcccgggattc

SEQ ID NO: 109777 - DNA, 122 bp, Homo sapiens
tgctaccctttccgtcggccccccgcccgccctcctttccttctccccgagtccagccctcgctccgccgcaagcagcccccagctcggaaaggatacaatatgtgcggccgcattcgtgac

SEQ ID NO: 109778 - DNA, 122 bp, Homo sapiens
ggctggcacctcttggaccaggcttaccaccagggcccttctctgaagccccagtctgaccggcctgctgctgggaatccccctctgcccccacactaacctctgctggggctgagccaggg

SEQ ID NO: 109779 - DNA, 122 bp, Homo sapiens
tttgccactggtacagtattatcttttttctttttttttcctgattcagatcccaaaccccgctttgtaggtgcaggaaacaggagacccagaagtgtaattccttctagtgacccgcctaa

SEQ ID NO: 109780 - DNA, 122 bp, Homo sapiens
ggtcccggggccctccaggcggagtcactgcagcccagatccgggctgcgggcctgccctcgcccagatgcttgtctctggagtcagccaggacctttgcgtgtccctatcaggtggcttct

SEQ ID NO: 109781 - DNA, 122 bp, Homo sapiens
gaggcgccaacgctcctggggtcccagctgctgcagatccgggctggggctgggcctggccgctgctgggggcgggaggcaattcccagccccgggccggtgacgtcaacgttgtcatggag

SEQ ID NO: 109782 - DNA, 122 bp, Homo sapiens
cggactgccgaggacacaaagccaggcctaaaaccctgggaaagcggggtcagagtcctgcgtccgcccttcccgcacccccggcaccttttccttctcctcacagctgaggggcttcccgg

SEQ ID NO: 109783 - DNA, 122 bp, Homo sapiens
caccacagccctggggcaggaggcaaagcccctggccgggctgcggatcctcgccccacccggccccaggacccaagccaagcctggggtctccacacttgcccatctggggccgggggaag

SEQ ID NO: 109784 - DNA, 122 bp, Homo sapiens
ttcctcgaaggacaatctgtttggaaaagctttctggcttcttaatttgcttctggtcctcgcattctctagaaaactttctgcacatctgggattctggcattacaacagactcatcaaac

SEQ ID NO: 109785 - DNA, 122 bp, Homo sapiens
atttggtccccagaccccttgggaagacgcgcacaccctggcaaaccatgtgtacacccgcggtagaagcaggtgcgtgttttacagtagcttagctgcggagtccacccagcccctggcat

SEQ ID NO: 109786 - DNA, 122 bp, Homo sapiens
ccggtgtcagacagctgtaaacccgtgtcgacaggttgtcagacagctgcgggggctggtcgggaaggagcccacggcctccgggcccacaccccgccgccccgacgcgcgcgcccaccgcg

SEQ ID NO: 109787 - DNA, 122 bp, Homo sapiens
gcctcaagtaatcctcttgcctcagcctcctgagtagctggaactgcatgcgtgaaccaccgtgcctggcctacttctgtaatttttaaggaaaagttttctaagtgatatcacacacacaa

SEQ ID NO: 109788 - DNA, 122 bp, Homo sapiens
gccctcctccctcagcgagcacccggggagagctgtcctaggagagtctgtagagtccctcgattaccggtcgcaaacgcctttgggagcgcagtctgctgcgagcgccgaagggtgagacg

SEQ ID NO: 109789 - DNA, 122 bp, Homo sapiens
ggtgaacctgccacagggacggttactcactctcaacgtgtgcaaaggcacagaaggggccgcgcgggcagtacccggtttggcgcatgtcgttgcattttgtagatttgtagatctgggga

SEQ ID NO: 109790 - DNA, 122 bp, Homo sapiens
tacgtgtcctctctcacttcaacaagcaatgaacccaacttgttcaactacaggtgtgctcgtggtggtctttggctagggggcactgatacttcctatctcattattacaaaagcacagag

SEQ ID NO: 109791 - DNA, 122 bp, Homo sapiens
cattctccaccacaatttacgtttattcacgggcatccattgtttcagactcatgacaaccgtgtaaagtagcacggagtaggtaagtgatttgcccaagggcacacagcaagggagaggtt

SEQ ID NO: 109792 - DNA, 122 bp, Homo sapiens
tttaaagtgtcatctcacagaactcatccctgcagccccatcaggcaggagttgtaccctcgcatgtcattgtaacattccttaagggaggccattttccacagcgggtcagcctctcagtg

SEQ ID NO: 109793 - DNA, 122 bp, Homo sapiens
cttcattgctgaaactgccggcgaaaagatctctttctcaagcctcagagcaccttgaggcggggcgcagagtcgcccgctctggatcccgcgccagagacccaggaggatccgcaggagcc

SEQ ID NO: 109794 - DNA, 122 bp, Homo sapiens
cacgcttccctgggtgcatcctcaaaagactgcagagtgacgacgaagccttcgtgaccgcgggccaggccacgcttccctgggtgcatcctcaaaagaccgcagagctaggacgaaggctt

SEQ ID NO: 109795 - DNA, 122 bp, Homo sapiens
gctgcgatgagtctgagcgagaaagatccggcctaccccgtagcggacggacattggttccgcttggtgagggggtaggggggtggggggtaggggggtgggggggtagggggggtggagct

SEQ ID NO: 109796 - DNA, 122 bp, Homo sapiens
aagagtcctcaggtggctttttctattcccttttccagaatggaacggctctttagaacccgctggatggggaaaatcacacagtatacaaagcagccttgtctgcagagataatgcaaggc

SEQ ID NO: 109797 - DNA, 122 bp, Homo sapiens
cgcggtccctctgcggaaggcgccgctcttggcttcggcggcgccgctgtagcttgaaggcggtacttcctccagcatttgccgcaagttattggcaagttcccctgcagttgtttgggctg

SEQ ID NO: 109798 - DNA, 122 bp, Homo sapiens
agatagcttcgttccgtgtttcagataaagtgaggcccggaggagcaagggatcggggttcgtaggcacttggtggctgcaccaaaaacggtgccagacatgtccacagacttgtctgggta

SEQ ID NO: 109799 - DNA, 122 bp, Homo sapiens
gggtggatggagggctggggctctaagtgggtggctggggggatagtcttacaggctccacggccccttgccataagacggcaagggcctctccctctctgggcctcagtttccctggctgt

SEQ ID NO: 109800 - DNA, 122 bp, Homo sapiens
ggtacgtatataagggaatagtaaaagatctggctggaaaggaaaagtaggggcaggttacgaaggacctctgaaagtcagactgtggaactggaacttttatcaggaagcagtagttagtt

SEQ ID NO: 109801 - DNA, 122 bp, Homo sapiens
gagacccacccacccattccacagatgggaagcctaggctgcccctgccctgcggaatggcgctgcccagaccccagctcaacccagcccccactctgcctccccacatagcacatgggagc

SEQ ID NO: 109802 - DNA, 122 bp, Homo sapiens
aaataatgaatctcacatacaacttttctaaaacatgcagggcaaaaagtcgggggtactcgaggcacatgtatttatccatccaccaacctaacgtgtcagtgaagcgggatgaaaccgtg

SEQ ID NO: 109803 - DNA, 122 bp, Homo sapiens
tctgtgttgaggaaaacagtggaaggagcgtggccccttactggcactttcaatgccatccgcctcccgggatgcactttttaaggcaaaacctttcaatgaagaagcatgttttgctgtcg

SEQ ID NO: 109804 - DNA, 122 bp, Homo sapiens
gttccagccatggtgttgtgagtggcagctgttcctgctcgggccgtgggtcttccgtcacgagagtggcagctgtgctttctcaggtgttgagagacaataggtggggaggccctagctgt

SEQ ID NO: 109805 - DNA, 122 bp, Homo sapiens
cccaagtgccggccaccgctgtcagggattgcccacccctgggcatcatgtgtgtggggccggggagcacaggtgtgggagctggtgaccccagacccagaattctcagggctctacccccc

SEQ ID NO: 109806 - DNA, 122 bp, Homo sapiens
gaaatgtaaagagtggcagtctgtgaattagtcattctttccctcaagaaatacacactgcgcatatactacacaccatgtgctattctaagtggagagtatcctgcagtgaatgtgtcaga

SEQ ID NO: 109807 - DNA, 122 bp, Homo sapiens
ggttaatatatgtcgtcagaggctcctcacgccaatcccggggcggcaggggcggcgcctcgagctctcggcaataaaactttttgatgttcacgttgctaattgccgaggtcctcttccag

SEQ ID NO: 109808 - DNA, 122 bp, Homo sapiens
gccaacaggtgcggggtgtgggggacccccaggcctgggatgggggttccaaaggacccgcggcgagggatgggaggagccaagagtctcggggggtaacctgggtgctgggagactggctc

SEQ ID NO: 109809 - DNA, 122 bp, Homo sapiens
ttaaattaaccttgcgattccctgcagctgcctctcacccatcacagacatgctaatgcacgtgtgtgctgctggggggcggtgggaggggaccctgacactagctttgtgaaacagcatcc

SEQ ID NO: 109810 - DNA, 122 bp, Homo sapiens
agccatctgccctgagtaggctctgtctgcgtgttcgaggcagggctctgatccgatgaccgtgaagattcaacctctgtgctgaagagaactgatgactgggcacttcattgtcccaagcc

SEQ ID NO: 109811 - DNA, 122 bp, Homo sapiens
tggtcttcagggtggctctccagtcggtggtctgggcctgctcctggcacctgacaacagcggccatgaggaggagcaggagggtgagcgcggggcgcgagagcagggccatgcgcgcagcg

SEQ ID NO: 109812 - DNA, 122 bp, Homo sapiens
tggcgtccggggaacgtgggtttcatttggggtgatgtggtggaggaggccagatccgaacgccctgcagttgtctgcgctgaggattctcaagtgctaagttgatgtctggacaatgtcat

SEQ ID NO: 109813 - DNA, 122 bp, Homo sapiens
ccaactcaggactggctcctccgtgtcctgtggctttccagaaagcaggagcatctcccacggcattccacccagcttcccccagcagggcctactccagggaagaagagaagctgcccctg

SEQ ID NO: 109814 - DNA, 122 bp, Homo sapiens
ggggcggagggggaggagcaagtggttgccaaggagactggacccactagcgtcccctggcggcgagccgagcgggggcggggcagcaaggactgctcaggggcggggcgcgtgcggacgca

SEQ ID NO: 109815 - DNA, 122 bp, Homo sapiens
aggaccctggcgtcggggtgtagccagccgtgcgcgggtttgtggatgaagctgcccttccggatccactcggcggcggcggcggcgtccccggaccccgccgccccccgcccgccccgcga

SEQ ID NO: 109816 - DNA, 122 bp, Homo sapiens
cctgatagtaggtgtgtacttttttcctatttccattggcaagccacatgacaagcaaaacgatcactcgaagaatattgttccctcaatcaagaaaaatgcccattgggttttgttatttg

SEQ ID NO: 109817 - DNA, 122 bp, Homo sapiens
atttgtttcacaaaataatgcaatctgagcacaaatcactattttacatgcttattttcccgtgtggtcacaaattttcttttacttttcacttaaaatttacccaaagtatcgatagtagg

SEQ ID NO: 109818 - DNA, 122 bp, Homo sapiens
gctgcgcgccgcgcgcctggccgccgctgctcgtcgaaggccagcgcctgcacctcgtcgcggtttcgcaccagcatcaccgacaggctcttgtgcggggccttgccagccgtgaaggagaa

SEQ ID NO: 109819 - DNA, 122 bp, Homo sapiens
ggggcacctcggggaaggacgccggcatcagcaccattctggggtacggggatggatggtcgaccagttggaaagtaattgtttctaatgtacttcacctggtccactagccgtccgtatcc

SEQ ID NO: 109820 - DNA, 122 bp, Homo sapiens
tcataaggctaattgcttgcttcaatggcctattcagagaaaggacatttgggaacttttcgaggacaatgacaaaaaggcaaatagcccaggataaaaagtagaaagaaaccaactgaaaa

SEQ ID NO: 109821 - DNA, 122 bp, Homo sapiens
ccttcgcgcggcctacgcagcctcggggtagcgtgtggcctccacccggccggtccgcttcgctggcagccgcaacttcccgtctgcacccagctaggtcccgcggctacccgagaggcaag

SEQ ID NO: 109822 - DNA, 122 bp, Homo sapiens
tgccgtttggggcttggctgcagcctccagcccaccccttcccgcagaggcaggaggccacgccataacccggctcaggccccagcgcccagccacgcaaggccatccaagcaaccagccag

SEQ ID NO: 109823 - DNA, 122 bp, Homo sapiens
gttacacaaaagctctgtgaccctgtttggtcagccataaaatgggcacagctataagtccgaccttctaaggtggtgtgaggatgcccgaggccacgcaggcagagcagcgtccagtgggg

SEQ ID NO: 109824 - DNA, 122 bp, Homo sapiens
agcccccaggtaacagcctcacccttccaggaagccctcctgaagctgggtccactgccccggctcctcaacgacatcagcacagctctgaggaaccccaacatccaaaggcagccaagccg

SEQ ID NO: 109825 - DNA, 122 bp, Homo sapiens
aatagcttccgagtcagccggaagtgaccctctggaacggttgccatggcagcggctgggcgtgctgcttagcaggggaaagatggcggtgacgggctggttggagagtctgcggacagccc

SEQ ID NO: 109826 - DNA, 122 bp, Homo sapiens
acgccatcgcggtgcccgacaggggtgctgcggtgaggcccaccaggcgcagggatgctgcggcccctccgagcccacttgttggagatgtcacactgcagtgccccagccagtgaaggggc

SEQ ID NO: 109827 - DNA, 122 bp, Homo sapiens
tcacacacatttggagggctggactttctgggtttggttatttcccctggtaccaatccccgccttttcccagaaatcacttgactttcccgaaaactcagaaacacaccctttggctgaaa

SEQ ID NO: 109828 - DNA, 122 bp, Homo sapiens
tgctaactcagttctgctatgggattttatcctgtgaactagatgaagctctcagggcctcgtttgctcccagacaggccgacctcctcaatggttctcacgaaagcaagtgtgaaagtgag

SEQ ID NO: 109829 - DNA, 122 bp, Homo sapiens
tctgaagtagaaaaaatctctttgtagaaagatcttactattttatggtattctggtcttcggtgtgcagggcgagacatagtgcttgatagatgaagaatatgatcttcaatttctcttct

SEQ ID NO: 109830 - DNA, 122 bp, Homo sapiens
ccattgtgctccagcctgggtgacaagagcgaaactcagtcggtggctcacgcctgtaatcgcagcattttgggaggcctaggtgggcagatcatgaggtcaggagatcgagaccatcctgg

SEQ ID NO: 109831 - DNA, 122 bp, Homo sapiens
attgtgtctcttaatgcgtgtgcggggaaggtgcttctccctggaacatttcctagggtacgctctttctctagcagccactctcccctttttcctttgggtaagttggcccacacttccca

SEQ ID NO: 109832 - DNA, 122 bp, Homo sapiens
tagcagtaaccagaaaataaattccttgccttcagatagcttacctcctggtgtcgaacacggacattttttcttcttttttgctttttacctttgagacagggtcctgctcagttgtccgg

SEQ ID NO: 109833 - DNA, 122 bp, Homo sapiens
tcaagacaaagcaggtggaaactggggggtagatgatcagaaacctgccagcaaggagcccgaccagacagcagggctgtttaacccacaggcacttctgccactgggatgaaacccatggt

SEQ ID NO: 109834 - DNA, 122 bp, Homo sapiens
tgattcaatctcagctcattgaaggattgcaactggaggctttccactgttaccccagtccgttccaacaaagttaaaaaattaatgttcctgattttcttgtgtaattccagtcaccagaa

SEQ ID NO: 109835 - DNA, 122 bp, Homo sapiens
tcttctccctcagggtgagctgtgcaggctatggggagcctctctctgtgctgaaggccccggccgtcctctttctttcagggccctacccctgtgggaaacagaccctggaacgcaggaag

SEQ ID NO: 109836 - DNA, 122 bp, Homo sapiens
ggctagccttcctgcggcaaccgcggccaagtttacacagaaacccgagtcacctcctcccgcccagcccccagccccaaacgaactcttccgggctgtcccggggcgaccctaccaactcc

SEQ ID NO: 109837 - DNA, 122 bp, Homo sapiens
atgagtgaacccaaaactctgaggctttgcttgaaaagtttagggctgcccttcctcattcgctatcagtcatgcttatggtcccctcaccagacccggagccgctgggatcttcctgcgtt

SEQ ID NO: 109838 - DNA, 122 bp, Homo sapiens
agcagccaggcactcaagtcagatccttagggcctgaccacaaaggttaccagtggccatcggggatggcatggttaattctctagtgtaaagagacaaaggttaaactaacagaatgtgtc

SEQ ID NO: 109839 - DNA, 122 bp, Homo sapiens
aaaattcgtgaagcccaacgctctaaaacatagattaagaagttgctttgagtctggtaacgtgtcctacactggctgtttagagccctgcaccaccaaggattaaattccaaaggggactg

SEQ ID NO: 109840 - DNA, 122 bp, Homo sapiens
agctacgatccctcgggaagtagagatggaaatcattaggcgcattaacccagacctgaccgtggaaaatgtcatgcggcacaccgcgctcatgaagaaactggaagaagaaaaggcccaga

SEQ ID NO: 109841 - DNA, 122 bp, Homo sapiens
cagttcaactgaatcatctgaactggatgggaagaagactagaaacaggaaaaccaatgacgaagttactggaaaaatccaggtgaatgatgatgatgccttggaataaagaatggcagtgc

SEQ ID NO: 109842 - DNA, 122 bp, Homo sapiens
ggcggccaatgggcgcagggcgcggtgtatgcccgctcctcctcctgttttcttcgaattcgttcttcgaggtcagccctacgcccaaggatgatgtaaaaccgcagcctcagccttcctag

SEQ ID NO: 109843 - DNA, 122 bp, Homo sapiens
ggcccaaagggagccctggaaagttcagccaggggccgaggagtgccagggttggcactacggggagacttttgcgacaggagagagactaagagctcgattccaggtagcagtgggagccc

SEQ ID NO: 109844 - DNA, 122 bp, Homo sapiens
ggccctaatcaaccgcagcgagcgggaggcgcaaggcgttgtggggagtgtagtttttcgcgtcgcggcgcttacaaccgtagactgcggagagttgcggccgtccggagaggtctcggtgc

SEQ ID NO: 109845 - DNA, 122 bp, Homo sapiens
cgctgcccttagtggctgcggtccgggctccggtgcggctggtgctgaagctgaggctgccggagctaggcgaggctcagctcggctcagccctcgcgccccagcgcctcccctcggctgcc

SEQ ID NO: 109846 - DNA, 122 bp, Homo sapiens
ctgctatcattcaaataagcattaagtggacaccctttataggcagcttcttttcaggggcggaaataagccattgcatgtgtaagaactaaggttgagcaacagcaattttgccagatgag

SEQ ID NO: 109847 - DNA, 122 bp, Homo sapiens
ctacgtgcaggagggcattggcagcagctacctgttccgggtggaccacgacaccatcatcgatgccaccaagtgtggcaacctggccagattcatcaaccactgctgcacggtgcgccagg

SEQ ID NO: 109848 - DNA, 122 bp, Homo sapiens
cacacttaaatcaatggaattcccaggttcatctttcagactaggttagcaacaacccaccgcacccccccgccccaatacgtgctcctaatgtcaccttttaagtttcctttcctaacaac

SEQ ID NO: 109849 - DNA, 122 bp, Homo sapiens
gtgtgacatgtgatgtgcgcacgtatgacacacacatgcagacgagagtgtgcgtgaagacgagagtgtgggtgtggacgacagagtgggtgcggaggagagcgtgggtgcggacgagagtg

SEQ ID NO: 109850 - DNA, 122 bp, Homo sapiens
gatggtaggcctgcccccagtgcactgataagagcatgggctgagagtgccacttggattcggctacagtgggcggcagagtgggggtgactggtgttgcttttactctagagcagaggagg

SEQ ID NO: 109851 - DNA, 122 bp, Homo sapiens
cggcgctctggctctgtacctggacagggctgcggtaggccagcggtgggctggcggttgcgctcctcagatcggcggcctttcgggcggtggcttgcgtttgagcctcagaaagcgaggag

SEQ ID NO: 109852 - DNA, 122 bp, Homo sapiens
gggtttgcagctgctcagcctgctgtgtctgcagcccatcctcctccgggggctcccggacgccgcttcccaactccggggcccccagaggagcctgcgatccgggccccgctgcccgctcc

SEQ ID NO: 109853 - DNA, 122 bp, Homo sapiens
ccgtgggtctcggcggccccggcttcccaagagctctgtgggaaatgtagttctctggcgcgccctgcgctcgggccccgcaggtccctagggcgcggggacctcaagccgtcccgtttgga

SEQ ID NO: 109854 - DNA, 122 bp, Homo sapiens
ctaactccttaggaataattataggtgtatagtttggacaattaaaatatgttgataattcggaaatgtgatgttagtgactagtgttagactaatctgcaccccagctttatcctcagagt

SEQ ID NO: 109855 - DNA, 122 bp, Homo sapiens
tcccatggatgctattttttgagtgaaaaagtagcactcctctaatcattcgttcagtgacgttctctaaaggcaaggctttctgaggatttaggtagacagaggagtattcatggtcaaat

SEQ ID NO: 109856 - DNA, 122 bp, Homo sapiens
tttcaaagtgagttcactggtgctagtgaagcctgtcgggagctggcaagccctgcagggcggggagtgatgtccccacagggcggggagtgaagcccctacagggcggggaatgatgtccc

SEQ ID NO: 109857 - DNA, 122 bp, Homo sapiens
gagtgctctgccaggtgacggttgggggcgcacaggtagtagatgttgcgggtgccggcccgcatgcggctggcgtattctgagaggctggttagctgcccggagggcagcgccgaggactc

SEQ ID NO: 109858 - DNA, 122 bp, Homo sapiens
agcgggagtcctaatggaagcctctggatcgagtcccgtcgtaaccaggctgcagtgagccgggcagctcttctagcagagcaggagagacgccagctcctgggcctcagcctgtgtccgcc

SEQ ID NO: 109859 - DNA, 122 bp, Homo sapiens
cacgtgactgacccgatcgacacatgatcgacatgtaatcaacgtgtgacacgtggccgacgcatgaccagtgacacgtgagcaacacgtgaccaacatgactgacatgactgacatatgat

SEQ ID NO: 109860 - DNA, 122 bp, Homo sapiens
cccaccagattagtgcttctaccctaggcagggctttcttggtctaatggtaataagcaccgacactgctaagcactttacgtgcattattatttcattgaaaagaactgtcaagtgaaata

SEQ ID NO: 109861 - DNA, 122 bp, Homo sapiens
tgagctcatgaaagatctggttgtttaagagtagacacctcccctttctctctattgttccgtctcttaccatgtgacacactggctccccttccccttccgccatgattgtaagcttggtc

SEQ ID NO: 109862 - DNA, 122 bp, Homo sapiens
cgctgcaccccgcccctcatttccagtggccctcttgctttctcaggtgtcagggcttcccgcctatgccaccccctagcagagaggcacccaggggtaccctaaccattgcagaggagaag

SEQ ID NO: 109863 - DNA, 122 bp, Homo sapiens
gaagaagtgagagagcgggtccggggccccaggggcttacaagctggtggaggagacagacgtacacatatctacaagcagaggcaaatgctgatggctgagacataaaaagagctgcaggg

SEQ ID NO: 109864 - DNA, 122 bp, Homo sapiens
tttaaaatttacatttagataaatatggtggcatttgttccatttcacagttattaccagcgtcactggcttctttacacttccttcccagcatgctaaagcctgcatcaatggctttttct

SEQ ID NO: 109865 - DNA, 122 bp, Homo sapiens
cgtgctggccgccgacggcctgggccccgcagaggcgccggccgctgaggcgtcggggcgcggggaggacagtggctgcgctgcccttggtgactgcaagcccctcactgccttcctggaac

SEQ ID NO: 109866 - DNA, 122 bp, Homo sapiens
agaataaaacgtcatcgttgcattggccgggaatcgaacccgggcctcccgcgtggcaggcgagaattctaccactgaaccaccaatgcctcgcgtacaaaagaagccttgtcgtctctagg

SEQ ID NO: 109867 - DNA, 122 bp, Homo sapiens
ccccaggtagagaggacagcatgggcaaacagcgccagtattgcttgtgaggcaggaaggcgcaggcaggagctggtggcaggagccagacctgactcctgtgtaggttataggtgaccctc

SEQ ID NO: 109868 - DNA, 122 bp, Homo sapiens
taaatattgtcatttgagtggcgcagctgatgaaagccaggaaattctaaatgtgtgcaccgacaatctgccactccaattttacactccggactcctgaacaaaagctacactgtgaggtg

SEQ ID NO: 109869 - DNA, 122 bp, Homo sapiens
tcttccccaggaagaaaggggcagacatggagataacaccggacatcggagaaatccaaccgcagctgccagcctctggcgctcagggaactccagccccaggagcttcccggcctccgaga

SEQ ID NO: 109870 - DNA, 122 bp, Homo sapiens
ggggggacccaagagcctgcctttctaacaagctcccaggtgctttggctcctgctggcccgggtcatgcctggtagggcaaggtgtgaacacagggcagagtgggcaggagtgagactttg

SEQ ID NO: 109871 - DNA, 122 bp, Homo sapiens
gtgatcctcatgaccagacgcggctttgctacaagacagctcagactgtgttcccccaatcgtgttcccgcaggaaagctgcccgaggatttttgtcatgcacacgccgctgccagcccatt

SEQ ID NO: 109872 - DNA, 122 bp, Homo sapiens
ttcccgggtttgggaactgcggttgctacacaggtcacatttgaaataaaagtcctgggacggcggccggcgcgacactctcccccgcacagcgcaggctctcactgggaatctgccgggac

SEQ ID NO: 109873 - DNA, 122 bp, Homo sapiens
gcaagcaagtcccctgaccctggccagctctgggcagggcagcttccctggggagtggggcgtgtctttacttctcactgggcctcaagggcaggggctggggcttgggcaggtcctcctcc

SEQ ID NO: 109874 - DNA, 122 bp, Homo sapiens
tacacaccagctttgtccaaaaccctctacaacagctaataaaatacacacgcagccaggcgggcctacacctggggccagacagtcccgggagccatgggcagggagtccctgagcctggg

SEQ ID NO: 109875 - DNA, 122 bp, Homo sapiens
ggttctccatatgcacaagtccctgaagggttggtgcttcttggtgtgagttccagatcccgatcctctggtggtccatggtgttaccactgactcccatgtccctccttgtccccctagta

SEQ ID NO: 109876 - DNA, 122 bp, Homo sapiens
accgtgggtgtgcgtcggggagggggtggggaggagtgggtaggagtcaggaaagtgggtcggccaagacctggagctgctgcataacaatatctggcatttacacaacgaggcctctgctc

SEQ ID NO: 109877 - DNA, 122 bp, Homo sapiens
atttaatctccatctccacagcagcactatggagaaaccagcattattaccctactttatcgatgaggaaactaaatgttagagatacaaagtaacttgccaaggtcatagaacctgcatct

SEQ ID NO: 109878 - DNA, 122 bp, Homo sapiens
ctgctgggggacctggtgcaccctccgcagctgctggcccgtgctaagcccctcactgcccgggcctgtggcaccagcctgccactccaagtgcggggcctgctgagcccacgcccacccag

SEQ ID NO: 109879 - DNA, 122 bp, Homo sapiens
tgagaggagccgcgcgcgccgcatgctggccggctctgtggtgatcgtggtgatggtatgcggtccccctgccctccgctcacgcctccatcctcctgcaccatgtggggtggttttgtccc

SEQ ID NO: 109880 - DNA, 122 bp, Homo sapiens
aaagcacaaagttgttaattttcatctatgtgcttttctttttataaaaaagggcagcagcgtgagtaagtatttaacatacaaagttgagcagttttccaaagttcaagcttttgtgtgga

SEQ ID NO: 109881 - DNA, 122 bp, Homo sapiens
tttattttttatttttcttagtagagacagttctgccatgttgaccaggctggcctcaaccgcctgggctcaagcaatcctcccgcctcggcctcaggactacaggcacgcaccaccctgcc

SEQ ID NO: 109882 - DNA, 122 bp, Homo sapiens
cgccctcgagggagccagctgggccatggccgcgaggcaggggtgagaccggcggccacccgtgagccctccgcacccgcaccatgcagaagagcgtgcgctacaacgaggggcacgccctg

SEQ ID NO: 109883 - DNA, 122 bp, Homo sapiens
gtcggggcgatggggagcctgaggtgcaggtgcagggtgcgacgcgccctccaggtaccccgggggcgggacgctccggacgcagaggtgtcctgggggctctcggccgccgcgcgctgtca

SEQ ID NO: 109884 - DNA, 122 bp, Homo sapiens
ccgaaagttttctggaacaaacacccgcatctggggcttggcgggccaggaggtgccggacgggcgtgggagggggagagcgagttggcgcggcccaggcgcccggcggccaggcctgggtt

SEQ ID NO: 109885 - DNA, 122 bp, Homo sapiens
tttacagagatgacagcccacttcactccccaaatgatggaaacacttgggaattgaggccgcagctctcaactccacagaccagtggctgacacatggtgcttcttgtaaacagatggatc

SEQ ID NO: 109886 - DNA, 122 bp, Homo sapiens
attggaagggaggggtggaaatccacggttctcccgctctcgctgcaccccacacacttccgccagcctcccaacctggtttaaacatcagggcttggatgcaggcttggggccccctaagc

SEQ ID NO: 109887 - DNA, 122 bp, Homo sapiens
aacatatcattttacagaggacaataccagcaatttctgaatgaatctggcagctaagcccggcaattatttggaccagcactcagtggttctttggggataaactgagctagaagggcttt

SEQ ID NO: 109888 - DNA, 122 bp, Homo sapiens
ttgaagaatctctttgttcattcatttattcaacaaagaggagtgttcctgggtgccgggcgccatcgcaggcatgaggcgcactgtcctctggcacccggcctggtcacatctgaccacag

SEQ ID NO: 109889 - DNA, 122 bp, Homo sapiens
gccgccaaatgcggggactggctccgagcagctgagagtacagccccaaccgcatgagcacgacctgggccctgccgccctccctgtattgcgaccaccccatccccgcacccccaccccta

SEQ ID NO: 109890 - DNA, 122 bp, Homo sapiens
cctcgcgctactcaatgacgaggcagcggggcaggtgctgcgagaaatacttgaagagctcgggggtggccccggggcagttggtcagctccagctcctccagctcctgcagctgcaccagg

SEQ ID NO: 109891 - DNA, 122 bp, Homo sapiens
ctgcgaagagaacaggaacgtctctaatgacagctaccctaacagagtcggatttgggagcgcctggggccacattccctagaatttattctttggtgcaagactagcaattctgatcagac

SEQ ID NO: 109892 - DNA, 122 bp, Homo sapiens
ggacatttataactccgcagggactccggggtgggagtcagtccgtctcaggtgcgtctccggaagaacttcggcgtcctcagggaatcagtccctgccccagtgagaaaaaccttgctggg

SEQ ID NO: 109893 - DNA, 122 bp, Homo sapiens
agggtaaggacaaccgcggggtttgaacggcagagaaggcggtggagccagcgtagcgcccgcagagcaacgcaaagaggaagaacagagaaacggctatgagaaaaagggccgaagagtga

SEQ ID NO: 109894 - DNA, 122 bp, Homo sapiens
cccttctcccacccgggtggtcccagaactggagcaacaatggccggctctgtgtggccgcgtcctggggccaaagcagtcgggacgtgtcacgccgagggagggctccgaatgaatacgct

SEQ ID NO: 109895 - DNA, 122 bp, Homo sapiens
gatgaagctgagccctgagtggctgaggtgggtgagctttaattggttggttcaggtgagcgctgaaaatctcaactataaaaaggtacaggttttcaggatactcagagtaaccgtgtgac

SEQ ID NO: 109896 - DNA, 122 bp, Homo sapiens
cggctgggagagccagggctccgcccgcggagaggccgcggcgggccgggcgcgcagcggcgcatcctcgcgtaaccgggcctcttcccgtaaccgctcctcgccccgcggccgggcctcct

SEQ ID NO: 109897 - DNA, 122 bp, Homo sapiens
ctcaggtgtggaccattacacaattaaattagcaaacctcagagggcttggattagaacccggcagggaacacttggggattcgagggcagagccaagctttctgaatggcagtggctctcc

SEQ ID NO: 109898 - DNA, 122 bp, Homo sapiens
ggagagaccggagagaagggagcgagcgactgtgcggcgctcacgctgccagagcccgggcggagtgcagtcgcctccaaagccttagagcggcgccccagtcactgcagctcttcacccta

SEQ ID NO: 109899 - DNA, 122 bp, Homo sapiens
ccttcctgtttaccctccctgagcttgcttctgcctctgtaaagtggcccagttagcaaccggcaggccaggactccagagctacggaggacaagtggtggcgcgattatcgtagcgagcag

SEQ ID NO: 109900 - DNA, 122 bp, Homo sapiens
gggcaggcaaacaaccggtcggtctgggcggagccgggcgggcggggcgagggcggagggcggagggcgcattgcctcatcctgtacattttactggaaatcggacgcatccggaggagggg

SEQ ID NO: 109901 - DNA, 122 bp, Homo sapiens
ggtgcgggatataatcttgtggtgtgccgttttttaagcctgtcagaaaagcgcagtattcgggtgggagtgacccgattttccaggtgccatccgtcacccctttctttgactcagaaagg

SEQ ID NO: 109902 - DNA, 122 bp, Homo sapiens
ctccatctcacccgagccaggaaatgcacacacaaacaaggaggtacaacttgcaccctccgacaggctgacatgagaagggatggctcctgcgccagccacttcgaggggtcgttgatggt

SEQ ID NO: 109903 - DNA, 122 bp, Homo sapiens
gcgtgtgtgcgcgtgtgcgtgtctgcgcgcaagaggggtgcgtgtctgagtgtgtctgtgcgcctgtgcgcgtgcgtgcctgagctcagaacagctgtctgtgagggagtcagagggagaga

SEQ ID NO: 109904 - DNA, 122 bp, Homo sapiens
ttcctaatttgttaggacccaagcaacactcatctgtttcaaccaaagtagctaccctttcgttttcttagtgccttctgattttgaggttctctgtgtgatttcatttgaagaaaagtttc

SEQ ID NO: 109905 - DNA, 122 bp, Homo sapiens
agactgactcttaaatcctgcggccttaaaggtgagatcctgccaagatccaaggagctacgtgacaactagccaccagccaatgacagtaaccaccatttgtcaaacactcccacagaatg

SEQ ID NO: 109906 - DNA, 122 bp, Homo sapiens
ggcgcgcgccgccacccacgtggccgtcacttctggagctgcggtcgggatctgggaggacggctggggacgcgggctggaggataaggcggtccggcggagcgggcctgacgcgttccgga

SEQ ID NO: 109907 - DNA, 122 bp, Homo sapiens
cagacatcttttgccttggtagttctggcttctgctgaatgttttctccctccaggcactcgctttgttgttctgtaggcacacagtttcaagcctgggatggcttggagtgttacagatgc

SEQ ID NO: 109908 - DNA, 122 bp, Homo sapiens
agagactgaaactatctgctgccgcctggattctcccagagattgcctggaacaccagctcgggtcctcgcacaccatcctggtaggaatctctcagtgacaattgagagtttgtgggctgg

SEQ ID NO: 109909 - DNA, 122 bp, Homo sapiens
aaagaaaaagacaagaatgtaaaatcaccggcatagataggtatatgggaaaacaacccacgctttttcttttttttctttttttttttttttttgttttttggttagaagctttggaattg

SEQ ID NO: 109910 - DNA, 122 bp, Homo sapiens
catggtgataggagcatcatcaacgtctcagggtaaagtcacaatgtgtattgtgaggtccgctttctgctgcaccaacaagagtgctttcacacgcacaggagggtcattaaagattaggc

SEQ ID NO: 109911 - DNA, 122 bp, Homo sapiens
gcacaacagaattcaagaaattacatattatcctggattcttgaagtgtccataggagtgcggacacctggcttcctacagtgcagtgagattggtgattccaacagccacagcaaaatgtg

SEQ ID NO: 109912 - DNA, 122 bp, Homo sapiens
gggctgaaccatgcttcccactcgcctgtcctctgccttcaccagctttgtgcgcatttccgggcaagtgtctgtgcaggtgccatcactgatttcagtagcgagaacgtacacagacacca

SEQ ID NO: 109913 - DNA, 122 bp, Homo sapiens
ggcaggcagcggggtaaacccaatcagccaaaagcagcaactgccctctggagaagaattcggtctggccccgtgagactgaattctccctttcctctccccaagtcccggctcgtcctttt

SEQ ID NO: 109914 - DNA, 122 bp, Homo sapiens
tcccagctgattatacagtcgcctttcaggccagaacccaataaaaaatcaagaaaggatcgcccgttctattactgcgctgctccctcccctcgtagatttcacaaatatacttctcacca

SEQ ID NO: 109915 - DNA, 122 bp, Homo sapiens
cctgggtccggagaagcgacggggacacttaggggaaaactttgccaacttcgctcttggcgcggaagaggccgctggccggaatggtgcagcagcggcggcgggccgcgacgcgcagggtg

SEQ ID NO: 109916 - DNA, 122 bp, Homo sapiens
tgggcctgcgcagcccagcccagcccagcccatgccccgcacccgtaggctctgggggcccgctccccagcagacccgctccctgcaagacccacgcgtcgccctgctgtgaacctggtccc

SEQ ID NO: 109917 - DNA, 122 bp, Homo sapiens
tggtgaagtattgatgctacgcaggtgaatttagtaacaggactgacgtgtgaacatggccggaaacacttgccgtcttcctgttaccgcgtccggaacttcacggtgatacccagaaatgg

SEQ ID NO: 109918 - DNA, 122 bp, Homo sapiens
ggcccctgcgtcactctgggccttccctggatttctcattttcctgtttgcaaggttggtcgcggcgagggcgctccttcagaaagttcagcaattccttcattcccaggctcaaacatctg

SEQ ID NO: 109919 - DNA, 122 bp, Homo sapiens
ggcaggggtcctgcaggtcctggtgggtcagcccagcacctgctcccagtgggagcttcccgggataaactgagcctgttcattctgatgtccatttgtcccaatagctctactgccctccc

SEQ ID NO: 109920 - DNA, 122 bp, Homo sapiens
ccttgaggtttactgtgtttggcatcgcagttccgacggcagccgccgtttcgcgacccacggcggacttgcataaacactttctagttggaatctcaccctgtgaggtgggcaaggtagtg

SEQ ID NO: 109921 - DNA, 122 bp, Homo sapiens
ggtgtggagggagaggtgccggcgggagctggggctgcgcgtggcattcacaggccggtgcgggttccgggtggtcaggggctcagtgcctgctgggcttgattgggggatgagctccctct

SEQ ID NO: 109922 - DNA, 122 bp, Homo sapiens
ccatgtcggggcgtggaggtttctgactagaggcagagcccgagtagaaacaggtctgaacggatggaactgcaggctgggccccggggtgggatttggaacttcctcctctctttaacacc

SEQ ID NO: 109923 - DNA, 122 bp, Homo sapiens
ggagaggacatgttggaagatctgttctccactctgaccaactcttttcttccctcagagcgttctaccaaggagaagcagagctcagaggaagaagaaaaggaaacaagaggggttcagaa

SEQ ID NO: 109924 - DNA, 122 bp, Homo sapiens
tatctttcttactttaaaatctaacataaaactgtatgccttcagctactgacatggattcgtgacatttaaaatacagctttacaatgagtatttaataaccctttgcaattgtatttggt

SEQ ID NO: 109925 - DNA, 122 bp, Homo sapiens
attaattttccgattctacagaaataggctgtgactgtatctgtaaaagaaagacggttccggagcataaatacaaaaacactggagatgctggggatcgaacccgggacctcatgcatgct

SEQ ID NO: 109926 - DNA, 122 bp, Homo sapiens
agcgaacagctgtcacctagtgcggaacaagtctcccaaatttcccaaatctccctgggccggaggccactgtcttctcttcctcctccaccgagtcgtgctctcgccccaacccgcgcgcc

SEQ ID NO: 109927 - DNA, 122 bp, Homo sapiens
gcgagccggggccggcgtgccggggcgtgcgctctctcggcaggcgagcgccgggctccgcggaggtccctgcgcccactgcctgcttctccgcccggcgacccggagtccccaggctgcgg

SEQ ID NO: 109928 - DNA, 122 bp, Homo sapiens
gagagccgattccggccgctgccctcggggggctccgcatacatctagtagcgccatgaccgcccagcacccagagatctgtccgctctcggaggaggaagtgaaagcgaaagccacagatc

SEQ ID NO: 109929 - DNA, 122 bp, Homo sapiens
caaaattgcccccaaaggagggttcagtgcacggcgctctggacccactagagccctgcccgtgcgtggacagtctggggactccagggtcagcccctgccccacggccgccccccgcgtct

SEQ ID NO: 109930 - DNA, 122 bp, Homo sapiens
catgcgcagtcgcggcactcgagtcacccggctgcgactcgctggccctggcgtctaaagcgtagccttaattacccggaagtgcggtcccagggacttcaaaccttttgtccaggccgccg

SEQ ID NO: 109931 - DNA, 122 bp, Homo sapiens
ggtgaatgaggaatgggaagagaatggatttcctggagcaatgagagaggagggaaatggcggaaggatctgggaggccaggcaatctctgctttcagttcaacaaatatttattgtcttcc

SEQ ID NO: 109932 - DNA, 122 bp, Homo sapiens
aatatatgcagcctctactctgaacactgggacgtagtaggggacaaagctgccgccagccgtcctcgtccttgcgaggtgtcagtgtttgcgccagggacaactccctggagggctggggg

SEQ ID NO: 109933 - DNA, 122 bp, Homo sapiens
gccagagagaggtcctccgggggctggacgccaggcgtcggtacggcaatgaggaagggccgtctcaaagaccagcctggccagagtcgcactagctgtgaaccaaacgacaggctgcgccc

SEQ ID NO: 109934 - DNA, 122 bp, Homo sapiens
acttgaactccacgcgcatgttgttgctctgcgaggtgatgacctccggcgtctcagagccgcagaacctgccgtgcagcttggcgtcgggggacaggccgctgcgcacctctacaaagtcg

SEQ ID NO: 109935 - DNA, 122 bp, Homo sapiens
atccacctggggggtgggaggcagggtggcctcgaacttcttagagctcaagtcggaactcggagccccacttcaccccgcaactcgctttccgccctctttttcccgcggagcctcagaga

SEQ ID NO: 109936 - DNA, 122 bp, Homo sapiens
acaagtttggaggatccgtgatggctgagctcttccgagtccctggagatgtccctccctcgcgattggtgcctgccctgcccctgccagggtcactctgcgccacctccctggggctcagg

SEQ ID NO: 109937 - DNA, 122 bp, Homo sapiens
cagtgagatccacgtggaggtggaacgcaccagcactgccaagccggcgctgacggccagcgcaggcaacgacagcgagcccaacctcatcgactgcctcatggtcagccccgcctgcagca

SEQ ID NO: 109938 - DNA, 122 bp, Homo sapiens
ttggtaatagggtctttgcaactgtaattagttatattaagattaggtcctaatggattacggtaggccctaaatcccatgactagtgtccttataagaaggccatgtgaagacacggctac

SEQ ID NO: 109939 - DNA, 122 bp, Homo sapiens
tgacttccaattggcgggtgttactaaaactttatcaccaaagttatttcactagctgagcgtggtggctcatgcctgtaatcccaacactttgggaggccaaggcaggtggatcatttgag

SEQ ID NO: 109940 - DNA, 122 bp, Homo sapiens
tgaaacggtcagtatccctgccatgcagtagtggagccactagacaccacatgtggcggtcgagttcttgaaatgtggctgctgtgaccaacaatagcattcatcattttatttaattttga

SEQ ID NO: 109941 - DNA, 122 bp, Homo sapiens
tgtactttttccttagacatttgtcaatcactgatcttggttactccactgtcattgccccgaagatgttagtaaacttcatagtgcacaaaaacacaatttcttacaattggtatgccact

SEQ ID NO: 109942 - DNA, 122 bp, Homo sapiens
gagtctctcgatcggcctgctctgggccccagagactgaccctgacggcttctcagctcccggtcagccccgtcaccctgggccaattcttcatcatacctggagacagaaacagccaggat

SEQ ID NO: 109943 - DNA, 122 bp, Homo sapiens
ccgtcagctgccttcacctcaaccctgttgctttgtaaatgtaaatccagttctgttctgcgggccgagcccaaaggctgagtgtatttttcacactgggaggagaagcagggcagagggcg

SEQ ID NO: 109944 - DNA, 122 bp, Homo sapiens
gacgcatacggacttggggccgggggtgactcgccgggaactgagggcccgcgaccctcccgcccaagtggcaccaaagggtggaagcccccaaattaggaaaattccttctcccctagggc

SEQ ID NO: 109945 - DNA, 122 bp, Homo sapiens
cttgggcaacagcgagactccatctcaaaaaaaaaaaaaaaaaagtctctcaaaatagtgcgatccatggaggaaaatcagtccaagttcggcaagtatttgtcggtatcctgtatgagcta

SEQ ID NO: 109946 - DNA, 122 bp, Homo sapiens
atgttcctggggatccacccttatagaagttaccttttagagagaggagacagacaaatacgtgtaatgctcaagttgtgataagtacgatgaagaagtacaaagcagaagggagggcgcgg

SEQ ID NO: 109947 - DNA, 122 bp, Homo sapiens
gaactcacctactttaagtccccgcgcgcgccaccagtaacggtcgcgacccaggtggagcgactgcgtgtgccgaaaaagagcttatttgctgattggcttctgccgctgtctttcacaac

SEQ ID NO: 109948 - DNA, 122 bp, Homo sapiens
ttgtgaatccccagccccatttgagccctcagatgataaagccctggatgacaattagaccgcaattttgtgagtggccctgagccagaagaactttgagaaaactttcctggattcctgac

SEQ ID NO: 109949 - DNA, 122 bp, Homo sapiens
gagtctgggccaccaagccgaggggttccctgaggagaatgtccaagggaaaaaaaggagcggacagacttcctgctgtgaccatgtacatgacaggctgcacttgtgtttttcttgggcgt

SEQ ID NO: 109950 - DNA, 122 bp, Homo sapiens
ggtgatccacccgcctcggccttccaaagtgctgggactacaggcttgagccaccgcacccggcccttcactgggaacgtatatggaatacatctgcccatttacttgaaggaaaaactaaa

SEQ ID NO: 109951 - DNA, 122 bp, Homo sapiens
taaaagccaaaatgtaaaaccaagtcaagacaccattacatgtttgaaattacaagttaccgcttcaaatttctctctgttctctcgaagatagtgaatacaggccattctgacttcaacat

SEQ ID NO: 109952 - DNA, 122 bp, Homo sapiens
ctgtatcaccagcgcctcccagtgcacctcaccaccagcatatatctgatatgcatacctcgtccatcccaattcaagcagtgacaaaggactaaaacatggcggatggtggcatgtcacac

SEQ ID NO: 109953 - DNA, 122 bp, Homo sapiens
aattgagattattaattgccgtaagtcgccctgcgccattacacccctccctcggcagctcgtttatgaccctaaacggggacacagatgcccctgagagagcagcggtagactgggataga

SEQ ID NO: 109954 - DNA, 122 bp, Homo sapiens
accctcttctcatcctaggggatggcgcggagctgcctctccgggaaagttggatctgtgcgcccagacatggaaaagggattaggacaccggcagatcttgccctcacagagcggaggtgg

SEQ ID NO: 109955 - DNA, 122 bp, Homo sapiens
tttcagactagccactgtgcggtgcccgagagccgtgtgtggctaccggattggacagcacggatctgaacaagacagggattttttttgttaatgtgtgttgatgagtcaaaggtcaagag

SEQ ID NO: 109956 - DNA, 122 bp, Homo sapiens
cggcggcttacagacctggggccacctggagacgccgggatgggaccgcgagggcagctccgcgcggaggtgggaccggcgggttgggaacggagttggggcccgtcgggggccggcgcgtg

SEQ ID NO: 109957 - DNA, 122 bp, Homo sapiens
ccatttgctcagctgctacagccctgaaggctgggggttgctgggagggaaggggcgcaccggataatctgggtacttggtcctcagctgcctcctgggtcactgaggacaagctagaggga

SEQ ID NO: 109958 - DNA, 122 bp, Homo sapiens
gctggactcctcggccctgcaccccctactgtgtgtgggtcctgagggtcagcaggtgagcggggagtgggggtcagggtgggctcttcaaggagcccaggacctacggggcggatgaattc

SEQ ID NO: 109959 - DNA, 122 bp, Homo sapiens
acaagagaagctacaaagccacaagaggacaagtgaaaaaactgccaatacctccccgggcgccccccagctccctcttgacttcagaaaaccctgccaacccagcttctcctcagctaaac

SEQ ID NO: 109960 - DNA, 122 bp, Homo sapiens
gatcccggcaggcaggacgtaccacgagaactgggaaccacgtgaaggccagaagggctgcggagcccgcagtgctgccgagaggccgagaggaagccgagggaagccgagtgtggccgagc

SEQ ID NO: 109961 - DNA, 122 bp, Homo sapiens
caagaacagagacaaaaagcggaaggtccatcagcggaagcgggctgccctaatcacctgcgatgcgtgtgtttatggaaccttgtcactgtcaccacgctggtgtccacacgcagcttaat

SEQ ID NO: 109962 - DNA, 122 bp, Homo sapiens
atacaaataatatggaacacaagataacacatgtgtaccttaaacattttaacttaaaaacgcacatttattaacaatctgctgaagtgagtattttctttatgggtctactgacgaattcc

SEQ ID NO: 109963 - DNA, 122 bp, Homo sapiens
tgatttcctgagtgctcttcaaaggaatccagaaatgaaaatatcaactagcaacattaacgataaagcccatctcctgtggcaacaagcttgctgaggaacctgtttgtttgtccttggct

SEQ ID NO: 109964 - DNA, 122 bp, Homo sapiens
cgtctttgagtatattcagaattatatgggaggccaggagcagctcccaagaagaccctgcgtgcgccgctaatgtctgatttgggcagatcagcgagcaaatgcgacaacagcccacaggg

SEQ ID NO: 109965 - DNA, 122 bp, Homo sapiens
tggctcccagaaaaatggatctccagagagactatgtcatctttgggtaggctcctttaacggaggcagtgtgctagattgcctgccattacggcccatgctaagacatttacccttagcaa

SEQ ID NO: 109966 - DNA, 122 bp, Homo sapiens
tcctggagaaagatgataagatggttgattcacagaacccaggctggacgggacttgtggcgagcagtccagcacagcctcacagtgcagagcatgagctttggagcctgcccccaccctag

SEQ ID NO: 109967 - DNA, 122 bp, Homo sapiens
agcctcacctatctgcgcctctggctggaggaccgcacgcccgaggccctgctgcaggtccgctgtgccagccccagcctcgctgcccatggcccgctgggccggctgacaggctaccagct

SEQ ID NO: 109968 - DNA, 122 bp, Homo sapiens
cctctgcttatgttgctgtgcagttgttactgaaggtcgcctgtagagggcgccagtcagcgaaggggagggctgcgcttcctggttctctggggcacgaggcttctcctcagcactctggc

SEQ ID NO: 109969 - DNA, 122 bp, Homo sapiens
gttctaaatggatgggaggagaataaacgctggaacgacaaggacgaaggccttaggttgcgcaaactcggatgtcactgaagtttttctgcctttgcgctgcaaacgtgtctcacaaatgt

SEQ ID NO: 109970 - DNA, 122 bp, Homo sapiens
taaccagccccgccactcccgcgggcaagtcagcccttgatcctttaaagcagggacaatcgacgtggtccgagagaggaaaataagggtatttctgggcccttctctttcaggagttgatc

SEQ ID NO: 109971 - DNA, 122 bp, Homo sapiens
cacttcctgctctgggcttccttctctgcgctgctcacagcggagacgtggtcatgaggccgggtcgccttggagccagggcctctcagtccctgtggtggtctctggtcagatttggccca

SEQ ID NO: 109972 - DNA, 122 bp, Homo sapiens
acaccttcgttaaacactccgcaaggttatacaaagcacctacttaactcacgtatcacacgccagaacacagtcacctcatcaatagtgtttacatatataaacacatataatataaacat

SEQ ID NO: 109973 - DNA, 122 bp, Homo sapiens
gggagttagccgtcaccacggccaagtgcacatgagaactgcattgcccagaaacctgtgcgccgcccggcggcggcactcttaggggcgtctccctgcggacggaagctctctgggcggga

SEQ ID NO: 109974 - DNA, 122 bp, Homo sapiens
ttgtcgtaggtcaaaaacagcaaattatctgcaatgtcatgtggttctacctaatgcttgcggtgtccctgccctgggctgtttcccttcggcttcatctcagcgaatcacgaacacattcc

SEQ ID NO: 109975 - DNA, 122 bp, Homo sapiens
caggcggtgtgaagttctgtgttctgaactggggctgagcaagatgcgatggtctcagcccgctgggccgcccgtagcgacggcaggagtaggggagagggagggacgcttggagtgtgagc

SEQ ID NO: 109976 - DNA, 122 bp, Homo sapiens
cgctccagcacacctgaccctggccgcttaacaactcccgcccggcactagcgggactcacgagacagcggccatgttactcgagtcacatgactctacagcacttccgccttccgtcgcga

SEQ ID NO: 109977 - DNA, 122 bp, Homo sapiens
gtaggggaatgctttgagaaaaggagaggagagccaggaggtggtggtggcagacccccacgccagacccctcaggtctttgttgggggtttcagccttcaggaaaaacggctgcattttta

SEQ ID NO: 109978 - DNA, 122 bp, Homo sapiens
ttgaaaaatcagtttctggttgcactgggcctgcattgccacatggaagccactggatggcgcaaaggagcagctgccaccttcagagacactgtgagctctcagttcagcagtgttcccac

SEQ ID NO: 109979 - DNA, 122 bp, Homo sapiens
aggacaagtgtgtaacaatacaatccaaacactttagtatctagtatcacaacaactctgcgtcgtaggtattcatatcacgatgttccacatgaggaaacttaacgcaaacagcggataag

SEQ ID NO: 109980 - DNA, 122 bp, Homo sapiens
ctggctttttcataactgcccctgcttggtaagaagatagactgaatcctgtttaccttacgtgtttgaagatgtgtttgctgatataacacacacacatatgtagcagagagagtttgtag

SEQ ID NO: 109981 - DNA, 122 bp, Homo sapiens
ccctctttgatccaggctcagcagggctaggggcaggggaaacccccacctcacccgctccgtctgactggagtaggggttggctggggaagactgcagcctccatcctaccttttcagttg

SEQ ID NO: 109982 - DNA, 122 bp, Homo sapiens
tgagcttgtttaggcaaccaggattagagctgctcaggttcccaacgtctcctgccacatcgggttctcaaaatggaaagaatggtttatgccaaatcacttttcctgtctgaaggaccact

SEQ ID NO: 109983 - DNA, 122 bp, Homo sapiens
tgctgtatttggaagggtctgaagtcttagtctacactcatttcttactcagagtgcagccgttggattgaataccacacgtgattagaagtggttgggtgcccaagtaacaaataagagtc

SEQ ID NO: 109984 - DNA, 122 bp, Homo sapiens
ggttcagggctgcaagtggtcacttgagtggagccctccccacaggcccaatccaggctccgcccgtttggagtcatggggccaacttggcagtggcccgctccaggcgagaggtgacaggt

SEQ ID NO: 109985 - DNA, 122 bp, Homo sapiens
cggggtagagcgcaaagcttaccttgaactccttctctatgttggccagcttggccagctcgttgctgagctctagggccgtaagcaccgggtcctcgctggacaatgagaggtaagccggg

SEQ ID NO: 109986 - DNA, 122 bp, Homo sapiens
acctggaggaggaggcatttaagccgaaaatgaaaggaagaaaacaagaagaaagaggagcggggaggcagaaaacagtgtttcaggcaacgggagctgcctgtgcaagaggacagaggcaa

SEQ ID NO: 109987 - DNA, 122 bp, Homo sapiens
aagatccagtccttcaaactttatcacatacatgaaaattgggacccaaagtgagtcacacggtttgaagtggggggtgtagcagaggcccgaattttctcccctcctgacatcctgcccag

SEQ ID NO: 109988 - DNA, 122 bp, Homo sapiens
gtccttatgcccgggcgcctctcattaaggtccccccacgggcagagggaagacgggcaccgggtccccttcgtgttcgatgtgcaccccagcaaggcctccttagctcatccggattggta

SEQ ID NO: 109989 - DNA, 122 bp, Homo sapiens
gtatatttggatgtgtttcctaaaaataccctcttgtcaacgtccccgttggattttccacggactggagaggagaagactgacttttcttttttgaagaattattttccctctccccctcc

SEQ ID NO: 109990 - DNA, 122 bp, Homo sapiens
tccctagtccacttctgatacagtgttttgagccttccatatttgttgttaggtattaaacgtgctgccatgagactcctatgttaacaagggcattagggtggggtttgttgaattctttt

SEQ ID NO: 109991 - DNA, 122 bp, Homo sapiens
atatgcactgtgtgaagcgctctgcgtcctggtgtctgatacgcaccgtgcaaggcgcttcgtgccctggtgtctgatatacaccagtattctgatgtgcactcgtctttttcctgaaaata

SEQ ID NO: 109992 - DNA, 122 bp, Homo sapiens
gattcagcaggtctgggaaggcctgagaaggtgtatctctaccaaacccccaggggctgccggtcctttgagaagcaaggctaagggaaggacttccctttacctttgagaagctctgactg

SEQ ID NO: 109993 - DNA, 122 bp, Homo sapiens
aggcttctccttagcagctgctgctcccagcagcctcgaagctggcggctgagggcccggcgccaagatgcttctcaaccctcggggccaggggcagtcccagagccgcaacaaccgtccca

SEQ ID NO: 109994 - DNA, 122 bp, Homo sapiens
acagttgcaagtctgcctccttcatgacaaaaggactggaggaaaatgtatctggcaagtcgataacactggatcgtttgctcccagctttaccacttggcatcagtgcaaactttcaccca

SEQ ID NO: 109995 - DNA, 122 bp, Homo sapiens
tcccgtgtaaggatcaaacctgtagttcttcatccattaccccaaggtcgacctgaagcccgatctgtcagaagagggaggctgcaaacaaactggacctgaggtcaacagcacttacccca

SEQ ID NO: 109996 - DNA, 122 bp, Homo sapiens
aaagcaaagcaaaggaaagaaaagaagagaaaagagctctaggccaggcgtggtggctcacgcccgtaatcccagcaatttgagacgcaaaggtgggtggatcacttgaggtcaggagtttg

SEQ ID NO: 109997 - DNA, 122 bp, Homo sapiens
gtggagggaagagaggatgcggctcagggaatccctgcaaggatccagagaccgggaaatcggcccgagccaaagtctcagcaccttccccaggatctcacaaagttgcaacaacaaaaagg

SEQ ID NO: 109998 - DNA, 122 bp, Homo sapiens
tagctgtcgcctccgcggctgttcgttgctcccggaaccggaagtccgctgcctgcctctcgggctccgcctctggctaagcacctgcgcactattgcctcgatgtcgcgtgcccttaatag

SEQ ID NO: 109999 - DNA, 122 bp, Homo sapiens
cttccccttcagcctgatgaggaggatatccgtgttcaagtacgtctcagggtcttcagccgagaggagggcagcccagagccggaagtaagtgacagaactcttaagtgctgttaaatctt

SEQ ID NO: 110000 - DNA, 122 bp, Homo sapiens
gccagttaccagtagagcagatccttcaatgcaagtttttctccaaccctacacagcagtcgtaccagggccccaggctgcaatcccctggcccagtgctgatcggtggctcccagggacac

SEQ ID NO: 110001 - DNA, 122 bp, Homo sapiens
gaactcctcagaatattatttcagggaatactaagtgggaggcattaggaaataagtccccggaatttgggggtccatgggagaagaaactagaagccagcaggactctggagcaagagtgg

SEQ ID NO: 110002 - DNA, 122 bp, Homo sapiens
cctgcgaggagaggcagcctgcatgtgtccgcattttcggtccacgcctgtggcacgacacgaagccccagtgccatttggcatggcctagctgcctgcctccgacgctgtcccgccctccg

SEQ ID NO: 110003 - DNA, 122 bp, Homo sapiens
gaaccttggtcccagccatgaaacagtctacacccaacatgcaggtaaattcataggctgcgctgggaggacacagatagagctcacactggggcacatgcttacgcactgcaccctacagg

SEQ ID NO: 110004 - DNA, 122 bp, Homo sapiens
accacacagccagtcagtagcagagccagattctgaactcatgcctgttttactccaaagcgacccagcccctacctccctgtgtgacatgggggcgtggcgtctgtcctccctgtctcagt

SEQ ID NO: 110005 - DNA, 122 bp, Homo sapiens
gggaggccctgtgctcccgattagattatcaacaccacacagttcacctttgctcggctgcgctgctgttggttgaggaaaagcaaagaggagttacattttaacatttgtgatagcgcagc

SEQ ID NO: 110006 - DNA, 122 bp, Homo sapiens
gatgcccgcgagggtccctgggcttctggccgctcttcatttcgcaggggctccgccggccgcgcccggaaagccctatctcagatttggcggctgctgatcccctgaggccagtctttgtt

SEQ ID NO: 110007 - DNA, 122 bp, Homo sapiens
ggccgagattttggaaatttcaactgaactggagaccaccatcccgtgccttgacgggaacgcattgagatagtaatcaaagaagatggccagttcacgcctgtaatcccagcactttgaga

SEQ ID NO: 110008 - DNA, 122 bp, Homo sapiens
ggccacgtggtgcatgattctcttcccacgaagggcccagagcagacagacccacagggacggaaagtggaccgccggatgtcagttaccccagagcgtggagggaacagacagggactgtc

SEQ ID NO: 110009 - DNA, 122 bp, Homo sapiens
caaaagaaaaagaagaagagatcatctattagtgttcttgatttttgttaaaatgtgatacgtgatagttgataagctttaggcatatgtcaatctgtggccatttaattttgggctaagga

SEQ ID NO: 110010 - DNA, 122 bp, Homo sapiens
cagcaggcggtgagcccgagcgcggggcgcgcccaggatggggaggtggcccccgccccccggcccaccggcccagcccggtcaccttgctgtagccgtagtaccccaggcactgcgcgaag

SEQ ID NO: 110011 - DNA, 122 bp, Homo sapiens
ccataggaactgaacttgttttgaattatttggagtagtaaagagggttcatgaaagaggcgggtgtggaaaaggatgattagaaaatttgatctagcagtttttaaaattctttgtctttt

SEQ ID NO: 110012 - DNA, 122 bp, Homo sapiens
aagctgtccctcccgtggcaaatactgagttattatcagccttccatctgctgtgggaaacggtggggctccactcacggcatttgcatctcgtctaaaacgggagcatcgcctgggaggcc

SEQ ID NO: 110013 - DNA, 122 bp, Homo sapiens
ctctccacaaggcagccccctccacctatctcctaggacagagacctgaataccagagcccggtccaggggcaaacacttcagtgccaatatccagggagagattccggggtgtgctccagg

SEQ ID NO: 110014 - DNA, 122 bp, Homo sapiens
ggaggagagagtggaagggggacttctttgggggcggggcatggggcggcaagggactaacgaggtgctggcgctgctgtgaacgccccctacttcaggctggcctatgcctcccttctcta

SEQ ID NO: 110015 - DNA, 122 bp, Homo sapiens
gagcagggggactacaagggaagggggtgctccaggaggaagtagaggagtggcccgaggcgctgaaggggaaacaggctgggggagctggcaccacccaggcctcctccctcaacttcctg

SEQ ID NO: 110016 - DNA, 122 bp, Homo sapiens
ccgccggcgggcgggagggggcggggggcaagcccggccgggccgcggcggcgcccctcgcgcctcagtcgcacactccggggtcaccagactcaagcgccgccccctcactgcccggccat

SEQ ID NO: 110017 - DNA, 122 bp, Homo sapiens
tccatttgctgtcacaaaaaaaaaaatcaagggaattggggttgccacaaccaaaatggccggtagaatatgtcgccggttcaatgacttggaaaacaaaaactttatatgtagaggtgaac

SEQ ID NO: 110018 - DNA, 122 bp, Homo sapiens
ggcaccccagacccacccacggcccgttgcctagcaacagcctccccacccccgcctccgcgccttttcccgccgactgcccagtgcgcacgctcagagccttcctccacaccccgcccctg

SEQ ID NO: 110019 - DNA, 122 bp, Homo sapiens
cttaatatttaaacaccaccaatgaggtggacgtcctactcacgggactgagtttccaaacgggccagagagcagcacgtgagcattttgcaggtacttcaagggagtgggtttaagaataa

SEQ ID NO: 110020 - DNA, 122 bp, Homo sapiens
ccgcccgccggcctggggtgtctgggacccaggaaccacccgcggctgggagacctggggcggcctggccagagaccgcggggcctggggctgggggaggggagcggtaagtgggggcggga

SEQ ID NO: 110021 - DNA, 122 bp, Homo sapiens
tgaaataaatagtatatacagctagggggccgggcggagcggaggacatgggggtcccgccggggtcacaggtctgagcagcgatcctgcttgctgtagtggtcgaactggttcttccagtg

SEQ ID NO: 110022 - DNA, 122 bp, Homo sapiens
gcagcctggccccgcgtggcccgccccggaggcgcgcatagctcattctctccacttgggcgtggagctcaattttgtacccacggaaccaagaagggcctgagcccggccagtgaggaatc

SEQ ID NO: 110023 - DNA, 122 bp, Homo sapiens
gcagggcgatgtccgcaccgccctgggcagacaggctctcgttgtactgggggtgacggacgatctcaaccaccttcgtccgctggtcgtcctcatagagcctcagctgccccacctgcact

SEQ ID NO: 110024 - DNA, 122 bp, Homo sapiens
ggcctggccggctggagtcggagagagggacagactgctctctggaaggctggccagacacgggaagatatgtaggcctagtcaggcgactgccagggcagatctctcaaactctgatctgg

SEQ ID NO: 110025 - DNA, 122 bp, Homo sapiens
ccacccaaccggtgacacagcccggggccccgccgccccctggcggccattacggatttccgcctccctcacagaaggcagtcactgcaacgtgcgtggcctcagttgcgtcatatccggcc

SEQ ID NO: 110026 - DNA, 122 bp, Homo sapiens
tgtttttctctggagtcgttttctggaggttggttccctaaactttttgggcgaggggcacggattccggagataggtaggttgcagttgtgtttgtttggggttgttttcatttccaaata

SEQ ID NO: 110027 - DNA, 122 bp, Homo sapiens
aatatgatttggggagcgagccaacagataaagaaggatatttatttttgtttgtaatgtcgacgtcttctttcgggctcgatcaaacaatcaggagatctgtgtaggccacagcgtcattg

SEQ ID NO: 110028 - DNA, 122 bp, Homo sapiens
cactgaaatactattgtacttcaaagttcgttatttacatttctttttgttatctgccaacgtgaaagaaacatcacattacttaaaacctccactgaataagttattgtccaccaacagtt

SEQ ID NO: 110029 - DNA, 122 bp, Homo sapiens
tgtgtccaaaggtgaaggggtaggaggagggccctcagctggccctccccacacacaggacggcaggggcactgtgaggcttttcttattaaaatgaaaaaattgaaaaaaaaggacaaaga

SEQ ID NO: 110030 - DNA, 122 bp, Homo sapiens
ctgctgctgcctcggagcccggactaagcaaggctgttaggcacggggtgagcacggttgcgcctactgctgagagtgcctctccctgccggtctcctgctctctctctgcagagcagaaga

SEQ ID NO: 110031 - DNA, 122 bp, Homo sapiens
gaggggccaccaggcggttgggacccgccgcggccaccctgtgccaccgcgagtgcagcccgccctgcccggggtctccctgtgctctccgcgtttagctcccgagcctccttcctccctga

SEQ ID NO: 110032 - DNA, 122 bp, Homo sapiens
agccagagggatctaggcttccggtctccctcctccctgtctccaaagcggcaccgccctcgtgcgggttttctaaccgggcagagtcctggaagctctgccccagcctccttaagtggagc

SEQ ID NO: 110033 - DNA, 122 bp, Homo sapiens
atgagcgttgctgccaccggaaaactgtctgctagggctctgccctaaccaccttgcaaacgagaaactggcgcgttgaacttagcaagcgccggcacctagcggatagcgctggtattgcc

SEQ ID NO: 110034 - DNA, 122 bp, Homo sapiens
cggtgttcggggagggccccccctccctcaagtcctccccaagcggcagcagcggccatccgctggctctgggcccctgcaagctcaccaacctgcagctggcccagagtcaggtgtgcgag

SEQ ID NO: 110035 - DNA, 122 bp, Homo sapiens
cggcgcgccgtcgccgccgcgcgcctcctgcgcacacccccagtcaatcagcatcacaaacgcacctcgccccgccccctccacgccgcgcctcggcgaggagactacaagtcccagcgggc

SEQ ID NO: 110036 - DNA, 122 bp, Homo sapiens
tgtcggctgccagcagtgcttatgctttaagtgcggagcgggtggctgcggagccaggcgcggcgcaggatggtggacagcgtgtaccggacccgctccctgggggtggcggccgaagggct

SEQ ID NO: 110037 - DNA, 122 bp, Homo sapiens
gtccacattgccagctgatggccgagcggtcagtggtcgaggcgcaggtctgagtgtactcggccggagtacccatcatgagccacttagattagcttctcggcactcaagaagtacgtacg

SEQ ID NO: 110038 - DNA, 122 bp, Homo sapiens
tcgccagccgcctccactttcctgggagcgagcggccccggaggagggaagcggcggcggcgcccccaagagacagcttggagcaggcgcctctgctgcaggctgcgtgctgcctcggggcg

SEQ ID NO: 110039 - DNA, 122 bp, Homo sapiens
agggatatgggagctgaggcagaagagaaactttgttttcattctcactgcagagctgagcgtagactgtctggggccactggctgaagtgtaactgcccactcccccgccccgccagggct

SEQ ID NO: 110040 - DNA, 122 bp, Homo sapiens
aacaagaaaacaagtgtaaaatctgcaaacgagtccccagctaaggcgaaatcttgacaacgctactctgaggtgagcgatcccctccctcctccggggttaggagtggcccaggagaggcg

SEQ ID NO: 110041 - DNA, 122 bp, Homo sapiens
caaccacatcgcctctgttctgctgccacgaggcagcatggcacctggagagcctgtcaccggccttcctggtccctgccagggtgccagaagcaccatcactccactcctgcccaggacgt

SEQ ID NO: 110042 - DNA, 122 bp, Homo sapiens
ctcttccaccctcattttcagaatacttatatagcagatctgtggttttggtctgcctagcgttttctccttctggtaagagaacacctcttctccctttggcatctccagtccgtgttcgt

SEQ ID NO: 110043 - DNA, 122 bp, Homo sapiens
gcgggtgtctgcggggagcgcgcacggcaagtgagcggggacctcgggggagcggggctccgcgtggcaagggcgcagtgtcccccggagagaatttccccgcagaagtggccgagctgcct

SEQ ID NO: 110044 - DNA, 122 bp, Homo sapiens
cctcattgcccggggccggcaggtgctccgagtgcggggcccaccaagcccacgcccaaccggaactccagctggcccccaagcaccgcgcgcagccccagttcccgctcgcgcttctccct

SEQ ID NO: 110045 - DNA, 122 bp, Homo sapiens
tctagtatggagtgcctatttcactctgggtctctgtgctacctagtagtgatgtgaagacgaacaatacgcagtccctggccttaagaaactcaacagctagagaagggacagcaagaaca

SEQ ID NO: 110046 - DNA, 122 bp, Homo sapiens
aaaatctaggctcttggtacgtccttgactgaagatgatccacatctgcttgggaagatccgtatcttccttacctaaagggcctaatgtgggaatttctcagctgatttaaaaaccattac

SEQ ID NO: 110047 - DNA, 122 bp, Homo sapiens
tccatcagccccctacgggacttgtgttcattacagtgagggggtgctcccactgtctcccggcctccctaatgctccctctgctgcagggagaagggttccaagatcacaaaatgtcaaca

SEQ ID NO: 110048 - DNA, 122 bp, Homo sapiens
ggcgtctggcacattcgtagcactgtgcaaccatcgctgccatctggttccagaatctttcgttgccatccccaaaaggaagccctcagcccatgcgtggttactcccatctccccagatgc

SEQ ID NO: 110049 - DNA, 122 bp, Homo sapiens
cgagcgcgcggcgcccacgtgaccgcggagagctgcgcgcaggcccttcgcgcgatctgccgtcatatcagcttatggcgccggtcgctgattggctggccgctccagcctcccggcccgct

SEQ ID NO: 110050 - DNA, 122 bp, Homo sapiens
ctccgaaaggaaggggcttgctgtggtgctgcaggtgctacaccgcgcttctccgctccgcggcctccagaatggcctagctgatccaactcgctctgtacgggccccgcgcctctccctgg

SEQ ID NO: 110051 - DNA, 122 bp, Homo sapiens
ttacttctatttcacagaggagggaactgaggcacagagattaagtcctgagcccaagaacgcagaagaaaggcgtgtgctaggcaggactccactccaggcattccacacatacggggaca

SEQ ID NO: 110052 - DNA, 122 bp, Homo sapiens
caatgatggcaaagtcctgggcggtctgggccttgcgggtagcgaagcactggtaggccccggaatggctcttctgggccgaggtgatgagcagcgtctcgttgctgagcccgcggatggag

SEQ ID NO: 110053 - DNA, 122 bp, Homo sapiens
gtctccgggcccctgtctccgggcctctgtctccgggctctgtctccgggcctctgtcttcggccgcatctccggccccctgtctctgggcctctgtctccgggcgtctctctccggcccca

SEQ ID NO: 110054 - DNA, 122 bp, Homo sapiens
cgatctgcctgcctcatcgcgggaggccaggagggtggaaggcagcggatcgcgccctagcgagcaacccacatgctctggaagtgtggttcaactttcaccaggctactgcgggcggccgg

SEQ ID NO: 110055 - DNA, 122 bp, Homo sapiens
cagtgaacttttatagactacctgtgcttgggccttagtttcagaatttctgagtctctgcgtctgggcagggtatgtgtaggggagaggcaggtctgggcatctgagtttagatgaagcag

SEQ ID NO: 110056 - DNA, 122 bp, Homo sapiens
gcagagacttgagctggtgcagacacctgagtgtgcattccaggaaacgcgaacagcaggcgcaagggtccctatgagagaatgtgcttggcgggctcgacgcacatttatttacttgggac

SEQ ID NO: 110057 - DNA, 122 bp, Homo sapiens
gcgtcgtggccttcatggaccacatccgcatcttccaggagcaggtggagaagctcaaggcgctacacgtcgactcagccgagtacagctgcctcaaagccatcgtgctgttcacgtcaggt

SEQ ID NO: 110058 - DNA, 122 bp, Homo sapiens
ccccgtccagcgggaggctggtggaccccgggttccgatgacgctgagccagagagccaacgcgaccacgttttggggagggaaccccggcaccttggggcgtcagcaaggggcattgactt

SEQ ID NO: 110059 - DNA, 122 bp, Homo sapiens
cgagtgtaagtggtgagaaacccagcgaatgaaaacatctacataagaacgcagacacagcgccctcagaggccggctgcagaaaggactggagacactgcaaatgaaaacgtctacacgag

SEQ ID NO: 110060 - DNA, 122 bp, Homo sapiens
acttgttttgtggactctgattttctcctcccctggatgaaatcctcgggtaggctccatcgttttttgggtcattctttgatgatattatgcaaagtccattccagtctagtgactgctat

SEQ ID NO: 110061 - DNA, 122 bp, Homo sapiens
gggaggcgcgcagcagaggctccgattcggggcaggtgagaggctgactttctctcggtgcgtccagtggagctctgagtttcgaatcggcggcggcggattccccgcgcgcccggcgtcgg

SEQ ID NO: 110062 - DNA, 122 bp, Homo sapiens
caccgccatcttttggtgcagaaggtgacgggaaacaggccgcagacctgaacttccaaccgtatgtaggcgagaagccggtgccgatactcccactatcccacaatgtcccactgggcccc

SEQ ID NO: 110063 - DNA, 122 bp, Homo sapiens
caccagtcagcttacctgatcagcaactctgtagacctcttgtctgttgctacagtcacacgtgtagggaaacactttcttaccacccttttctttggccagtcgacacgtttccatattgc

SEQ ID NO: 110064 - DNA, 122 bp, Homo sapiens
ccatgtggcttctcaggcctgggtggtggcactgggcatctgcatggaacaaggtctaggcgatgctctcccaaggtctgtggccacactcagaggaacgtgaggccctgttgctgagcctg

SEQ ID NO: 110065 - DNA, 122 bp, Homo sapiens
agggagcagagctagacgctgtcaggatgtgaggaagcggactcgagggcgtcagggcgccgaggctgaggtagcagccggaagtgcagccgaaggcgcagccggaagcgctgccacagtgc

SEQ ID NO: 110066 - DNA, 122 bp, Homo sapiens
ccccgttgcccgggcaactgcatccaactcgccctgggctggctgcgtctctatggcaaccgcgcgcgccgaggggggcgcgagcgccggctgcgcctgctgctgcggcggcggtggctgcg

SEQ ID NO: 110067 - DNA, 122 bp, Homo sapiens
atcctggattttacgggtcactctatttgtacttgggagcagggctgtcccgacatcaggcgcagcagctgcacttctccgatgcccctttgcagatgcagccctgggcacacttggcacag

SEQ ID NO: 110068 - DNA, 122 bp, Homo sapiens
cacggcccgctggggactgggggtcttctctacccgatgaacgcagccgcgctggccactcgcctggcctctgatgttcttgccagggaccgggtgcaccccctggaggactaggtagctcc

SEQ ID NO: 110069 - DNA, 122 bp, Homo sapiens
agattcaggtcccaaggatgccatctggtgtgtgtagtgtggcctctctcaaggctgatccgaggctttgtgttcacgaggtggggccggagctcactgtttcctaacggtgaatttggttt

SEQ ID NO: 110070 - DNA, 122 bp, Homo sapiens
tttggagcctcatccaaatttatgttaaaattcagcttttccttaaaattgttattcattcgcttaaatcctctctgtagtgtattctcagccactgaagcaaattacgaattacaataaat

SEQ ID NO: 110071 - DNA, 122 bp, Homo sapiens
ggccatgccccgccgcagcttctgctccatccgcaggtaggagaccgcggccgccaccagcgtcaccagcagcaccgccagcttaacctgggcgtaaagagagggatgccagggacccgcgg

SEQ ID NO: 110072 - DNA, 122 bp, Homo sapiens
acgtcgtgcgtcattaccaacgaggcgcaggggtcaggacgactctcggcagcgccattgcgcgccctctagtggcagccggttttgaggccggcctccggctttgaagttcctcaccgcgt

SEQ ID NO: 110073 - DNA, 122 bp, Homo sapiens
ggaaacaggccctggactataaggacttctgcacacgtcgactcctggtcacgtgagagtcgcgtcatcactgagctcgagtccccagttacccctcccattaacactgcagcccgcccgct

SEQ ID NO: 110074 - DNA, 122 bp, Homo sapiens
aaactacacctgtaatccacagcagtcttgtggcttcctgtttggtctaagaaaaccacacgtaggatacgcgtccttgttgggatgcttggtgttaccacatttcaccagtaggaggcagc

SEQ ID NO: 110075 - DNA, 122 bp, Homo sapiens
ttctggtaggaaaagaagcctctgtccttggtgagcaagaaaaggcaggttgtgaaatagcggaaaaggcacaggaaatgctctgtgtcttggtgggaactgagactaagggtaagggtgtg

SEQ ID NO: 110076 - DNA, 122 bp, Homo sapiens
gttccctttcgtagtcaaagaaaggggtgacagacggcacctggaaaatcgggtcactcccgcccgaatactgcgcttttccgacgggcttaaaaaacggtgcaacaggagattatatcccg

SEQ ID NO: 110077 - DNA, 122 bp, Homo sapiens
tggagagaaacaaacgcagcggcagaagaaggcacaagtggctggacgtcaagaggggcgcggctgcgtaagagcacacagacagacacacacagatgcaggcaggccggcaggccatccac

SEQ ID NO: 110078 - DNA, 122 bp, Homo sapiens
cagggaggtgaaatgacctctgtttacatccaacttgctcggctgctgtcctcccacagccgacagagatggaaatcttagagtaaaatatgcaaatcatattaaataaaaacccaaatgaa

SEQ ID NO: 110079 - DNA, 122 bp, Homo sapiens
ttatccaaatgtgcagggaaattgggttttttcgcaggaacaatagcacaggctctctggcgagctgtttgcatcaacctctaggaattggcactgaggtagaaagttctatgtacaagagg

SEQ ID NO: 110080 - DNA, 122 bp, Homo sapiens
ccgcctcccaggttcaagaaattctcttgcctcagccttctaagtagccaggcctacaggcgcgtgccaccacacccaactaatttttgtacttgtagtagagacagggtttcaccatgttg

SEQ ID NO: 110081 - DNA, 122 bp, Homo sapiens
aggctggcgtcccggcggctgccgcacgtgcgccacctaggggacagagctggcgctgcacgtgctgggtttggtggctatttgaacccaggtccaactttgatagaccctaaaatttgtct

SEQ ID NO: 110082 - DNA, 122 bp, Homo sapiens
ctgctctgctctaatcccacgaccttccccacagcgtcgccggcagggtgtgtcctcagacgtttgatttttgccaatgtgatggcagagaagtgtttccttggtgtggcttcaatttgcat

SEQ ID NO: 110083 - DNA, 122 bp, Homo sapiens
aattgcagtctgtaaacttcagattcactacctacctctctggctcgatggagctgtgcgcgctcaatcctagagatgatatcctttactgagaatgggatctcaaggttagggagcatcaa

SEQ ID NO: 110084 - DNA, 122 bp, Homo sapiens
tcgagcctaattttccacaggtcctggatagcagaggttccctgcttttggtggagacagcggtgcagtgcagtctgtggtgtagggcataagaggggtacctgcacgggacaagagggggg

SEQ ID NO: 110085 - DNA, 122 bp, Homo sapiens
gtagggggcgccgcctgcaggggttccgcctgtgaactcgctgcggcttggccctggccgcgaccccgaccccgcagccgcagaagccagcagcctgcagccacccggatcccgcgcgggct

SEQ ID NO: 110086 - DNA, 122 bp, Homo sapiens
cacctagactgggcccctcctgcccactgcccacccgcctgtaccggatggggatcatggcgatcatgatgaggggaaagatcatcttcatgtagggcagggagctcatgccgaaggcacac

SEQ ID NO: 110087 - DNA, 122 bp, Homo sapiens
taggggagacaagtccaccagcaatgatgtggggagggcagagtgctgccaggagcacctcgacagttaaaccactgaccagagggatttcggcagaggagtaacttgatcggatttctgtt

SEQ ID NO: 110088 - DNA, 122 bp, Homo sapiens
accttaatcatgcacaggctccggccttaacagttgagtgggtggtggaccgaggccaagcggccaaataagtggagtagaaaggcgcgagtctgcgctgcgtgccacgtaccaaacgctca

SEQ ID NO: 110089 - DNA, 122 bp, Homo sapiens
caggagcgcggcccgctccgccagaggggcagtttctccggcgtccgcggcgtctggctgcgcagtttgtgcccaggaccgagcattagcatcaggtcaccttttctaaaacttgtttcagg

SEQ ID NO: 110090 - DNA, 122 bp, Homo sapiens
gcagtaaactccggagccggctacagcgcgcatcctcccttcctcctttcggagaactgtcgctttcccgaagctgctcccagctgggttttctcccgaagtttatttttctcattttgcaa

SEQ ID NO: 110091 - DNA, 122 bp, Homo sapiens
gaggaggaggagaatgaaaagggactccatctccgaagccagctcagcttgaccccactgcggcactaccccacctcaactgctgccccttacagaagtttccagctgaaactcaaaataca

SEQ ID NO: 110092 - DNA, 122 bp, Homo sapiens
gtgcgaacttaagctcctgtgggccttaagcttccgtgtcaacgagtgcattagtgggtgcgcacatgcctgagcgccctctgcatatgagtgtgcacacacgcatgggtgtgtttacacgt

SEQ ID NO: 110093 - DNA, 122 bp, Homo sapiens
ttggaaaagctggtctgtttttaccaataggcctgcagaaaaaaaccaaggccggccaggcgcggtggctcatgcctgtaatcctagcactctgggaggccgaggcagggggatgacctgag

SEQ ID NO: 110094 - DNA, 122 bp, Homo sapiens
cgctggtgccaaagcgggaaggaacgcattcttcagcctaaaagacctaacagtaggacacggacataaccactcccggccaaaaagaacacagagcaacacaacgtcttggctaacgaaaa

SEQ ID NO: 110095 - DNA, 122 bp, Homo sapiens
gcccccaaggcgggcgcgcgggaaagccacgaggccccaggagtgcgactgcggtgcctgcggtgccggtgttttgtttgattccctgcctcaaacggagggaaacgaccttcctttatcct

SEQ ID NO: 110096 - DNA, 122 bp, Homo sapiens
ttcctcaaaacatctctacttctcagcctccagagtggcctctggacccacttaggctcccgtggaagctggagggtgactgtcatactgcaggatgattagggacagtcagtgtcacacca

SEQ ID NO: 110097 - DNA, 122 bp, Homo sapiens
acacccacctccactccctacacacacccccttcctcttcagttgtaaacccctcaccatcgagcctgctccacctgcgttgcctctgccagcttcacacaaaaggcattctctgcctcttg

SEQ ID NO: 110098 - DNA, 122 bp, Homo sapiens
agggctgtctcgggctcgtcttctcggggatgtgtgtggggtccattggctggggggttccggtcctcagtgttaggagcaccaggctccatgagcagccctgggtcctgtgcacaggtcag

SEQ ID NO: 110099 - DNA, 122 bp, Homo sapiens
tggatcatagcgacgtccgttggacagggtaatcagaggaactacgtttaggaaaggggccgagttcctgttgaaagtgcgtggcctgtctttgcctgtccttgggctttctccttagatag

SEQ ID NO: 110100 - DNA, 122 bp, Homo sapiens
gaaccacgtggaagggaccgcccgcctggtgacagacacagctgagatcctctcgagactcggcggggtggagctcctccaagacacattaggacacgtcatgccttctgtacagctgccac

SEQ ID NO: 110101 - DNA, 122 bp, Homo sapiens
cgtcgggaccctgacccgtcccgaggtgacgcgacgcccgcgcgcttgctcccagaagcgcggcctaggctcggccagcaacagcgactcctgggagggtcctgcgccctcgggggtgcccc

SEQ ID NO: 110102 - DNA, 122 bp, Homo sapiens
agtgatgcgaatgggcctgtggggaggtcgcacgggcttgaggagggcagcatgtcgtagcgggccatatttgtgtcagggttgggaacggcacaaggcacacctgtttcctagtgctgcag

SEQ ID NO: 110103 - DNA, 122 bp, Homo sapiens
cctgcccccacgctcacctgggacccggccgccaggaagcggggccgcagcgctagggctcgcagaagcttcccggcctgcgctgctacgggggacgccatcttaaacaggaaactcggcac

SEQ ID NO: 110104 - DNA, 122 bp, Homo sapiens
tagtggggactataaaaggtcatacatttcaggtcttcagcgctgtccctagcacatgtgcgttttgtattttaattatttattccaccatttccctactcacatacacccttaacccctaa

SEQ ID NO: 110105 - DNA, 122 bp, Homo sapiens
caggggttacgttaaaaggcccgaccgccaccttcagtgaggagatggggctgaaaggagcggacacaacagccacgtggaaagtggaaaaatgggcacaggctcccagcacggcctggggg

SEQ ID NO: 110106 - DNA, 122 bp, Homo sapiens
gttcaagcaattctcctgcctcagcttctccagtagctgggattacaggcgcccctgctacgtatcagctttgatttctcagcagtttagagcaggtgaacatgatgggtagaaggaataac

SEQ ID NO: 110107 - DNA, 122 bp, Homo sapiens
tgacctctctgaacaggtccatacttccctgtccagctgatcgtaaggactgaatgacaccgcatgtggaaaagccagggtgttgggaaggtgggaaccctgcacccctcccaccccttctc

SEQ ID NO: 110108 - DNA, 122 bp, Homo sapiens
cctcaaataattcttgactgaaagactttcagccactgctgcagaggtcagattctgccacgcacttctgtatttagggttttaacttgctctgtgtggatttttcccagtgggctggtggc

SEQ ID NO: 110109 - DNA, 122 bp, Homo sapiens
ctgaggttttctgattgttagttttgcagcaataggtgatctacataccagcctgccctacgctccttctgttctccttcattccctttctgttacccaagggcttgaaaagtgttctgagt

SEQ ID NO: 110110 - DNA, 122 bp, Homo sapiens
gccaggctcactggagtggaagcgtgcactctcatctgtgaggctaggctgttccctggccgtcacctcaccctttcatctctgcttacctgcatctggtgtcaagaatcagaatgggagag

SEQ ID NO: 110111 - DNA, 122 bp, Homo sapiens
cccgcctggggccaggaaccctcgccgctcggcctgcgccgccccgggaaccggccccggcgggaacaaagcccaggccctcccggaggcgctgacccctcgctcatcaaaggtcaggggcc

SEQ ID NO: 110112 - DNA, 122 bp, Homo sapiens
aggataacgaccctcaacagcggcggaaagggagcagccatttggtgtgtctcagaaaatcgcgctcagttccgaggcctcctagatgtggaatcctgctcagagttgttcccaggtcagag

SEQ ID NO: 110113 - DNA, 122 bp, Homo sapiens
tgcggcgcccggtgctctgcaacgctgcggcgggcggcatgggataacgcggccatggtgcgccgagatcgcctccgcaggtgagtgtgcggtgggaacgagggggtgtggctggcggccct

SEQ ID NO: 110114 - DNA, 122 bp, Homo sapiens
ggtagctaaaggagataaatggtaaagcacttgggagttaggtctcttcatcactatactcgactgccttctggcagggaagagcagcatcacttccctctggaagggcagaggcccagacc

SEQ ID NO: 110115 - DNA, 122 bp, Homo sapiens
tctttccttaataaaaattgctcactgggggccaaggtgtattttttggggctgtgtttccgtttgaattcccctacacaagcctatatgtgattagaatgtggtatttttgtttgtttctt

SEQ ID NO: 110116 - DNA, 122 bp, Homo sapiens
aagccgagcccgggctacctcggtcgtccccagcaggcttggctggcagaggccgggcctcgccaggtccccaggacaggccccgcccgggcctcaggtgcactcccggcccgccccgcgcc

SEQ ID NO: 110117 - DNA, 122 bp, Homo sapiens
agcagacaaaagatgtatttgagcaatctttactttcctaaacaaggaaattttgggccacgtggttgagatctagtagaaggaaagaaattaaactagagaaacttcatttaaattagaaa

SEQ ID NO: 110118 - DNA, 122 bp, Homo sapiens
gaacgcccgcgtgggcaggcaatcgtccttggtgagccgggatctcctcaccccgagagccgcaggctccgctgacgccggtacaggtctcgctgcgactccctctgggcgcgcggaatcct

SEQ ID NO: 110119 - DNA, 122 bp, Homo sapiens
attcaacccagtacagatgtattgcagaaataatctcccatcccacagattgcctttctacgtcttacggttctccctccctccctccctcccttccttccttccttccctccattcctccc

SEQ ID NO: 110120 - DNA, 122 bp, Homo sapiens
cacctcggggcgcccgccccctcccccacccgagcccgctccccgccccccggcacctcgcgcccccgcatcccgccacccccacctcggggctcgcacgcgccctccccgccctgccgcct

SEQ ID NO: 110121 - DNA, 122 bp, Homo sapiens
agttgaaccattaactattaaaagtcatgttatcacttatttattttggatgatggataacgggtgtttattatatctttctgtatgctttaatttccaaaatgaaagtgtttaaaaaataa

SEQ ID NO: 110122 - DNA, 122 bp, Homo sapiens
ccggccaccgcgggcgcgtgggctcccaggacacaacagaaatgccacccctctgggcaccgtgcgaaaggcacatggcacggccgctcgtctgggaacccactgcctcctcagacaagccc

SEQ ID NO: 110123 - DNA, 122 bp, Homo sapiens
agacgcccgttgccaagcggaccatggtctagcggtagcgtcagtgcttagaaaaggcaccggttacttagcagaccgggaaagggaatctccctttctccgggggaggtagagaagactct

SEQ ID NO: 110124 - DNA, 122 bp, Homo sapiens
aacttctgggcagagttcacattgtgtatgctcacataatcattggggagagcagttctccgctcctcaggactaggaacaaaacctaaacagggcttagcatgaactggggttacaagata

SEQ ID NO: 110125 - DNA, 122 bp, Homo sapiens
gacagaggatggatgggtgaacccggatcccgggattctcccgcgcccgctgcccctctgcggagcctccccggagtcccacgcccccaccccggccacggagatcaccacgtcaggagata

SEQ ID NO: 110126 - DNA, 122 bp, Homo sapiens
gacagatctttcggtgaccttcgaaagcgacatcgagattgacgatgtataagaatctgccgccagaaagcactgcatgttgcccaagacagtcacagacatcgcagttgcctgggagtcac

SEQ ID NO: 110127 - DNA, 122 bp, Homo sapiens
ggagaaagagacggcttccttcagcctacggacatgaaggagtcaactctaccttccactcgttgccggctttcgccgagaaccccgagaaacggactaccggagtccctatcttgcagccc

SEQ ID NO: 110128 - DNA, 122 bp, Homo sapiens
taggaggttagggcactagccagcagcactctccaacagaaatgtaacgtgaatcacaaacgtcacttaacattttctacaactcatactaaaaaaaagtaaaaagaggctgggtgcagtgg

SEQ ID NO: 110129 - DNA, 122 bp, Homo sapiens
cgcccggctcagaatgaccagcttttaatgtgactcctttaacctggtgtgctttaacaacgatccttaaagcttcctgttttaggcaacagccatttacgggccaaccaaataatgcgacc

SEQ ID NO: 110130 - DNA, 122 bp, Homo sapiens
ttcagtatgacctgtcccacacaccgagcaccggcagagctcaggggccaggcgcgcacgcgaggacagaagggaacctccttacccgcgtcctgtcctcgatctcgtagatccgcagctgc

SEQ ID NO: 110131 - DNA, 122 bp, Homo sapiens
ttctactgtactatttgcattaaggttatagttgtaattcaatcaatgacccattttaaacgagtggctaggacatcactggagaaagtgtgtacaatgcaagaaacatttccctatgcatc

SEQ ID NO: 110132 - DNA, 122 bp, Homo sapiens
tatggcgaggaagataaagaagacatggacagaaggcggatggctctgcggcctggctcccgcagaccgaccgccttcttcttccattcgagatggctcgtaccgaacctccttgccttctt

SEQ ID NO: 110133 - DNA, 122 bp, Homo sapiens
ccaagtctccagatggcacgagagtccataatgccttcttgtcggtgaccactgtatgaccgaatgaatggaatgcatgcgactgattttaggaggatgctaccagtttcggtagagtatga

SEQ ID NO: 110134 - DNA, 122 bp, Homo sapiens
cctcctgcaaacgacggtaattgggtcaacattgaacgattacgcagataagcgcctgcccgggcagcttcattgactcggtgagctagaaactgttggtattcccattgtatggatgagga

SEQ ID NO: 110135 - DNA, 122 bp, Homo sapiens
ctcctgcggcggggggagggagccccctttcttttctttgagaggtcagaatccgcagtccgcccttcgcctttaaataaaagcctgccggctcgagatcggcgtcgcgatggagtgcccgt

SEQ ID NO: 110136 - DNA, 122 bp, Homo sapiens
aagcatctttccaaggaactcactcattccaagaaacttcggttctaactcgcaagctggcggctgctgtgagtgtcctctgaatgcagcctggtcaatgtgtcgccaatccagaaaacaca

SEQ ID NO: 110137 - DNA, 122 bp, Homo sapiens
actctgcccaggaaagtcaggaggtggagaataaaacccccaggaaaggatctggggtgtcgttcactgacgcaggctttcccagagagactgagccacgaggtggacgaacagcgtggtgt

SEQ ID NO: 110138 - DNA, 122 bp, Homo sapiens
cttcctggtggacacctgtttaggtgggcagactcctacacagagctgggaacagctacccgagaaggatactctcctccagctctgggttaagacacaaatcatgcaacagtgacatcacc

SEQ ID NO: 110139 - DNA, 122 bp, Homo sapiens
gccgcctgctggcagctagggacattgcaggctcctcttgctcaaagtgtagtggcagcacgcccgcctgctggcagctggggacactgccgggccctcttgctccaacagtagtggcggat

SEQ ID NO: 110140 - DNA, 122 bp, Homo sapiens
tcattatttatttgcttattatccacaggtctcccctggatctgacagttataagatccacggaaagagaggctttgtctatcttgttctctgatacattcccagtgcctacagggttgtca

SEQ ID NO: 110141 - DNA, 122 bp, Homo sapiens
ccagcagcgcgcggctgcccaacagcgccggagcttccttaacgcccaccaccgctccggcgcccaggtattccctgagtcccccgaatcggaatctgaccacgagcacgaggaggcagacc

SEQ ID NO: 110142 - DNA, 122 bp, Homo sapiens
agaagacaaagatattcacatttaccacttccattcaacgtagttctgaccagagcaattcgccaacaaaaagaaataaaaggcatcaaaattggaaaggaagaagtttaattgtgcctgtt

SEQ ID NO: 110143 - DNA, 122 bp, Homo sapiens
ccctcaccccgtgactcacccgcatgcgaacctcataggtggtgaagcgcgcgcgtcccacgcccaccgtctgaggattaaagatgtcgatctccaggaagttacttggcggcccgtaagcg

SEQ ID NO: 110144 - DNA, 122 bp, Homo sapiens
gggctcaggcgctgcaccccgtgccatcctgtttgctgagagtgagccccaaatttgccccgttattggttctcagggagatgagacccacccgtgctgtatccccagagagacctgtgagc

SEQ ID NO: 110145 - DNA, 122 bp, Homo sapiens
ttagcctcatttcttcacctgtaaaatgcaagactttttaagcagtcttttgaccctgttcgagctatatcaagatcagttaattcagtctagagaaggaccctgttatattatacacttat

SEQ ID NO: 110146 - DNA, 122 bp, Homo sapiens
acctgatgttccttgtggtccctggaacggggctgcctgctggggtgttgactaactgggcgtgtcaaacttgggaccctcttcctctgtttccttgttcctcattaggttcctcattggct

SEQ ID NO: 110147 - DNA, 122 bp, Homo sapiens
catctcggctcactgcaacctccctgcctgattctcctgcctcagcctgcccagtgcccgcgattgcacgcgccgccacacctgactggttttcgtatttttttggtggagacggggtttcg

SEQ ID NO: 110148 - DNA, 122 bp, Homo sapiens
aaagttctgtgagtttttcgtagatctccctaccgagtggagaaggttctgtgagtttttcgtagatctccctaccgagtggagaagtttctgtgagtttttcgtagatctccctaccgagt

SEQ ID NO: 110149 - DNA, 122 bp, Homo sapiens
gaaataggtcatcaggcgttaaaaacaaaatctccatgaaaataactcaccgaagtctagcgacttacccaaagtgctaggctctaggccagaaggaaacttgttctattttttctctcaga

SEQ ID NO: 110150 - DNA, 122 bp, Homo sapiens
taacccgacgcagggcgcggggcggggcttgccgtgacagctaccactcctattggtcaacgcgaacagcgacgtcctctgcgataggctgtaggtgaaaagggtaggcctccactgctctg

SEQ ID NO: 110151 - DNA, 122 bp, Homo sapiens
taagtgtgtgaatgtggttgtgtggcccactcttctgtacccaagtcggtctcactcactcggcaggaaagtcttcgtcaggcattgaggagtgtttgtcattcagcctgtgtatctaagca

SEQ ID NO: 110152 - DNA, 122 bp, Homo sapiens
tggcagaaatactcctgcctgctttttaaaaagaatgtgtggtgggtgatggtggaatggcggggaaggtggagtggaaactctaaacatttgctcctatctgtcagaaatcatcatctgag

SEQ ID NO: 110153 - DNA, 122 bp, Homo sapiens
agtggttgcctggcttggtaacaaacactcttcggagccacagcctgttctcagggtcctcgccgcctcccaggccctgcgatctctttgcatctcaggaggtccaggttggttgcagtcct

SEQ ID NO: 110154 - DNA, 122 bp, Homo sapiens
ctcccctcccaggtctgtccatgcggctgctggaatcaaaaaaaggcctctccttctttgcgtttgagcacagtgaggagtaccagcaggctcagcacaagttcctggtggccgtggagtct

SEQ ID NO: 110155 - DNA, 122 bp, Homo sapiens
cttcggctgcccccgcgcggcctgctgctgctgggctggtgtcccttcgagggctccgcgcgcctggagccctcacacacctgctggccctaaggccctcgagtcgggaggggggacagggg

SEQ ID NO: 110156 - DNA, 122 bp, Homo sapiens
cagcggtgcacacaactaatgcgcatgcgcctgacgtgccaacaatgcatgtgactaatgcgcagtcgcctgtcgccccagcagtgcgtgagtgacatgtgcacgtgcccatgatgcggtgg

SEQ ID NO: 110157 - DNA, 122 bp, Homo sapiens
cgggcggggcgcggggctgacgtggcccgcggcatggagcgggcgtgattcatcagcatccgcgccggggcggcatgggggcgcgcgcggcggccgcctaggcgcccagggccaggcagcgg

SEQ ID NO: 110158 - DNA, 122 bp, Homo sapiens
atgagccatccacatggaatctaaaataaaaaaatatgaaggacatgaggctcagatgtacgtcaagggaagttaactatgtcagtcaccaaaggagaaaaccacctgttaaatgcattttt

SEQ ID NO: 110159 - DNA, 122 bp, Homo sapiens
tattatgtcatttgctactacaggaattattcatgatcatttaccagcaagctgagaacacgtggggctgatatcttgattcagaacaccaagcctaaaagggatacaagtacttagtaaat

SEQ ID NO: 110160 - DNA, 122 bp, Homo sapiens
tcctccttctcagccccacccttctccacctcctcccactttgcactctcctctagcggccgcctgtcctttttaaggaactccaccctaggtggagtcctcacgatagtcacacctctcct

SEQ ID NO: 110161 - DNA, 122 bp, Homo sapiens
agaaataaactccaagtgcccagcacaagccccttcctttcttagtggctgaggctgcaccgtgtcaagttgttacagaagctgcattccagagggtgccctggtctatttcctgagccgat

SEQ ID NO: 110162 - DNA, 122 bp, Homo sapiens
ttggcttcggataaaacaatagggccgaggagtgcaatctgattcccacacatttgtctgcgacttcgcagcgctcagggcccctgtgccaccttctctgtacctgctttctcaagccgaaa

SEQ ID NO: 110163 - DNA, 122 bp, Homo sapiens
tctctctgagcaacccaaacagaaggtactgctgtgggtcccccacttggcacgcgacggcgctgggtcggcctggcgcgccctcccgcgcccacgggcgctaggctaggtctgtgcgcagc

SEQ ID NO: 110164 - DNA, 122 bp, Homo sapiens
ccctttaaggctatgccgagtgggcgcgtcccggcctctcccgggagaggagaggcggggcggacctgtgtcccgcccccggcccggcccgcccccagtgcccgccccgcccccggcactcg

SEQ ID NO: 110165 - DNA, 122 bp, Homo sapiens
caggcgtttactccaagattcacatgcgtcttcccatgtcccagctgcctttgccgctgtcgatgcagacacctaaaaaggaggatttttccaaccccactgggagccccgcctctgcctct

SEQ ID NO: 110166 - DNA, 122 bp, Homo sapiens
cttacttatggctgccctagtcaggcccagtaaaggcacaccagccttcccaggctgaaacgaagataaggacaggcccatcatgaggagagggcccaggacatgaaaggccactgagttac

SEQ ID NO: 110167 - DNA, 122 bp, Homo sapiens
cgccgcctttccctcctcgcctcttccttccttccgggtcgtgccctccaacctgctgtgcgttaccgcagccaagtttccaccgcccggcggagcgcattgtgaacagcagctgacaaatt

SEQ ID NO: 110168 - DNA, 122 bp, Homo sapiens
ttgccacaaatatacaaggtctagggtcaaccctgccaagcacagtactctggaattttacgtcctctaatcctgaagaagcagggtactgggggaagaaaagcttgattagaaagtcacca

SEQ ID NO: 110169 - DNA, 122 bp, Homo sapiens
taaacttctgacctcaggtgatccacccacctcagcctcccaaagtgctgggattataggcgtgagccactgcacccagccacatttattttttgagactgtcgcccaggctggagtggcgg

SEQ ID NO: 110170 - DNA, 122 bp, Homo sapiens
gggcaccttatgggacgccagaaaggacgatgccggaaatgagctatggagacagggccacgcaaggtcaaagtgagccttgagctgtagcttggggccggcctgaagacttgaagggtttg

SEQ ID NO: 110171 - DNA, 122 bp, Homo sapiens
tggcttcagaatgatgttgaggccaagtcctagctcagcagaaaggacggctgtgattagcgatgtggccgattgctgtaccaggaaggactcacggcctgtctgccatgtagcttgccttc

SEQ ID NO: 110172 - DNA, 122 bp, Homo sapiens
ggcggggattcgagtctggtttgtgtgtgtgtgtgtgcaagaggagggagacttgaggggcgccgggtcgcccccaggaatacaaccccctggaccttggggctggggccggggggttttag

SEQ ID NO: 110173 - DNA, 122 bp, Homo sapiens
gttaattttggagctaagcgaacttggtcacccactaataaggggcaagccaggaccctacggagcacagagccaagctctcaacaacacctggtaactctgtgctattcctagaatcactg

SEQ ID NO: 110174 - DNA, 122 bp, Homo sapiens
ccctctggtgctcaagaagggaaagacgcagggaggcgttgacagcgcttcgctgaaggacgaataaaaaccttgaaaagggacttaactgcgaggttaaatcgtggaggtgagcaaggccc

SEQ ID NO: 110175 - DNA, 122 bp, Homo sapiens
gccttgcagctggattcagctctagcaccccttctccaaatgagctttgccttgcctgcccgcaatgtctcccgaaacaaaatatgagggtgtgatccatgcccatctctcagatcagggac

SEQ ID NO: 110176 - DNA, 122 bp, Homo sapiens
catactggctgatgcgctctgttacgcacacacgtttaacccgaaggtcatcctcaatgccgccaccttaacaggtcagaccgcgcacttgccttgattttgtttgaaggaagtcttgttcg

SEQ ID NO: 110177 - DNA, 122 bp, Homo sapiens
ccccagggcgccaccctgcctcggcagacacgcttgctccgcccggcgactgtccctcagcgcctgctgctgcatttccattaatgcaggtcctgccctgtggccccagcctgcccacagtg

SEQ ID NO: 110178 - DNA, 122 bp, Homo sapiens
gcaaacatttattgggcacgcgcctgggctgggaactgagctcacagatggggagaggagcgagacataagcagaaaccagcaccggggctccgagagggcagtgctctgcggcagcactgt

SEQ ID NO: 110179 - DNA, 122 bp, Homo sapiens
tcagcccctagtggcagattcccctcccagacaagggggctagagactttgaggctgaggcgaggcacatttgtctcagagtgtgaatctttcaaatggcattctagctcagaagaaaatac

SEQ ID NO: 110180 - DNA, 122 bp, Homo sapiens
ccctctaccacccaataacttctcatcattcattcaaagttactgaacgtaccatattagcgaatctgcaatggaaacagtggaggctgttttctcaaaggattttctaataaagcaacaaa

SEQ ID NO: 110181 - DNA, 122 bp, Homo sapiens
gctctggtgtttcgcagggacgggagcgagccggcacttacggcaatcttgtttttgatccgggacagcttctcttgtgcctctgccagctctgcattagcctcctccagtgcctgcctctt

SEQ ID NO: 110182 - DNA, 122 bp, Homo sapiens
gggctggcgtccaggcggggtctgcccggtgccccccccccatgctgccttgaggcccctcgcgatcccaacgcccgcgccctccgggttttcacagcagggaaattgaggccacgggccca

SEQ ID NO: 110183 - DNA, 122 bp, Homo sapiens
caggtaggaaaatggcaggagcagggtgggagcaggtgcagtatccccatatggttcctgcgggccctggggagggccccaaagcccagttcttggagggaggggacaaaagggcagcctga

SEQ ID NO: 110184 - DNA, 122 bp, Homo sapiens
cccagcagacagagggggtcagctcgagtggccacgcgtgttctttggattagaatgttccggctcttaaacatgagctgctctgagaatgaggactgaccacttggcagccgacccgggct

SEQ ID NO: 110185 - DNA, 122 bp, Homo sapiens
gtacacatgaccgtcgctcctggtgtggccgtcgaagccgaaggtgccgttggagatgggcgatttcacagagccatgggtcatggacagtgctcttcctgaaaagggttagagaaggtctc

SEQ ID NO: 110186 - DNA, 122 bp, Homo sapiens
ggcccggcgaggtgctggagggagcggggcgcggatccggcccagatgggcagctccgtccgcggggtcagggccgggcttcggcttcaccgcagcctcgcctgagcgggcgcctctgaagt

SEQ ID NO: 110187 - DNA, 122 bp, Homo sapiens
ccgggcagggcgcgggcgggggctcacctgtgtggtccccggcctcctcccgcccgctcacgattccctccaaagccccagaaatctccgtgctctccgcgtgtggcaacgttgtttggaga

SEQ ID NO: 110188 - DNA, 122 bp, Homo sapiens
aactcatgtacatggtttcatacccacatccatgcaaacacacatacaaatccagaaatacgcaccctcacacccacaaacttgtacacacacacacacgtatacacaccaacacacataca

SEQ ID NO: 110189 - DNA, 122 bp, Homo sapiens
tgctttagctgggcctcagggtgctcgtccttcctggactcccggcgggtgcccagcccgcgcctgcatcagatatctctcaggccttccccagatcccaggcctgtggcacacctagtttc

SEQ ID NO: 110190 - DNA, 122 bp, Homo sapiens
cgcagcagccgcagagccggaggtcgcccgtcagcccgcagctccagcagcagcaccaggcggcggccgccgccttcctgcagcagaggaactcctataaccaccaccaggtacggcgggcg

SEQ ID NO: 110191 - DNA, 122 bp, Homo sapiens
gtctcaccaccctccatcagcctcgggcgacaccaaggggaacagagcgctggagctcctcgaagtcctcccgaccttagcggggctccgttcatcctcccggacgtggccaggccccgctc

SEQ ID NO: 110192 - DNA, 122 bp, Homo sapiens
ctaattgaagtgtcaaaagggggagcctattatgctaaatataggctgggtgcttcatggcggtatgcttaccactgggtattttaaattggcctttgacacttgttgccttttaaaaatat

SEQ ID NO: 110193 - DNA, 122 bp, Homo sapiens
tccctctccccgcacccctctcccaagggctggtcatgagggctgcccaccaagacggagcgcagcaggcggtccctccagccccagctgcggggacgccacccagactcggctgggcccag

SEQ ID NO: 110194 - DNA, 122 bp, Homo sapiens
accgggagtcaggcgtttggattgagacttggaggtcacatcaggacctgcggttactgccgctaccaggacggggagggggtcggggacaagcccacaagtcgaggggcggggttcgtggc

SEQ ID NO: 110195 - DNA, 122 bp, Homo sapiens
aacaagccaatgaggatgatggtgccagggagagaggatcctgtgttggtcaaggatgtgcgagtagctgttacctccattggcagttttgtcactaaaagacctcattcacttgagcattt

SEQ ID NO: 110196 - DNA, 122 bp, Homo sapiens
ttcttcttagtccgctggtgctggcttagtcacactagccgggcagggctcagatggacgcgcctgcttttcagagtgaagccccagtgtgctccggacaaggtgaggcggggagggcatca

SEQ ID NO: 110197 - DNA, 122 bp, Homo sapiens
cgctcctcagtgggccggagtcggtgacaggaatcggcttccaacatggcggacaggaagcggccccgcgaggaggagagaacattccagccgcgccggctctggggggagcgggcgcgggg

SEQ ID NO: 110198 - DNA, 122 bp, Homo sapiens
ccattcctccgacgctccagggcttccccaggctactgagctcccaagcttccaccacatcggacctgttcaggacagtttgtgctcccaggcgtcagggccctgggcccacggtcctggga

SEQ ID NO: 110199 - DNA, 122 bp, Homo sapiens
ctggaagaacagacccaggaactcaactacttggggttccttaaattagcctcccatagccgcttcctgtgcttgtgataaagtgccaggctgatctggaccacagaagcctttggagcacc

SEQ ID NO: 110200 - DNA, 122 bp, Homo sapiens
acctgtgttccaagcagaccagcctttaacaatgaaatggtgggattttcacttttgtggcgtagacaccagggctgatattgatccgtgtttttccggtggtccggcgttgcagaagtgga

SEQ ID NO: 110201 - DNA, 122 bp, Homo sapiens
cacagtcaaatgatccagtcccactattatctcagtcccctctgagtttcttcctgctggcggccctcactgtacagaaatagccaagtagcatcagggtcagtcatcaatggtgggcaacc

SEQ ID NO: 110202 - DNA, 122 bp, Homo sapiens
tcccctcacctctgtacttggggactggggtgggattctgggcttctgcagcctgaccctcggatcctccgcagttacccggactcaccttctcagttgcccagcgaaaacttccgctgggc

SEQ ID NO: 110203 - DNA, 122 bp, Homo sapiens
gtctctggcctcggccgacatcctggtggccacgctcgtcatccctttctcgctggccaacgaggtcatgggctactggtacttcggcaaggcttggtgcgagatctacctggcgctcgacg

SEQ ID NO: 110204 - DNA, 122 bp, Homo sapiens
gacacgaggggctgaggtccatacgcggatggctagtgacaaggtaaatagacaaagaggcggctcctctctgcgtatccaaggcttaactttgacttaactttgacccacagattattacc

SEQ ID NO: 110205 - DNA, 122 bp, Homo sapiens
agaggtggaaaggcagggggttccctccggttcccctggaggctggacttccagcagaggcgccccacccccaccctccacggcgaccactctgcgtcgcaacagaccggacgggccgaccc

SEQ ID NO: 110206 - DNA, 122 bp, Homo sapiens
caatggcttcagaagcctcacactgtctcacgctcagagaccaatcacggggtggttggacggatgtttcctattttgaaggcgtccacttgggggaaaaaaatgaaaggaaaaatatttca

SEQ ID NO: 110207 - DNA, 122 bp, Homo sapiens
tgctcaaaatcctccaatgatttcccatcttattcagcataaaatccaaatttattttggcggcacgaaagcccctacactgtgttacttcgctacctctgaaattattgctccagcctcac

SEQ ID NO: 110208 - DNA, 122 bp, Homo sapiens
ccttggcccctcgggcagagaactcgtctccctggtgcggattaggctccgttttatctccgctccttcagagacaaaaggggggctctgcataggcgcatagccatgaggcatccgcgact

SEQ ID NO: 110209 - DNA, 122 bp, Homo sapiens
ccgggcgatcacgtgggctccagccggcccaggtggggctgtgacctgtgacgcaggcggcgccgccacaggtgcccgggacgcgccccgccccctccccggccctccccgcccgggccctc

SEQ ID NO: 110210 - DNA, 122 bp, Homo sapiens
acgcaaatgcaagaggagttgaaagcaatggagaatgtgtcctgctgaatgcaagggctgcgtgcgatgcagtcacagtggggtatgttcttggagagatggtttcttctaggctttgactc

SEQ ID NO: 110211 - DNA, 122 bp, Homo sapiens
ggtgacgtttgttcctgtccaagtctttgtgagtcgctgcacactttcgggcatggtgtccgaactgctctgtgcacacccacctttattttctgtgtcatctgttctttttctgatcctca

SEQ ID NO: 110212 - DNA, 122 bp, Homo sapiens
gggccaggcgcctggaaggcgtaaagcaggtcgagtgagcggccgtcgtagaaggccacgcggccccgctcccagtccaggtccacgcgaatgcgccgcggcgggggctcaacaccgcccag

SEQ ID NO: 110213 - DNA, 122 bp, Homo sapiens
tagtgagactgtaatacaaaatacttatattctggtgtctggctatttttgggtggtattcggctcccaattgtccagataatggccccaagcggacaggctatggtcctcaggaagacatc

SEQ ID NO: 110214 - DNA, 122 bp, Homo sapiens
acttgagtctcgaacagcggttgtttttactttatttatcttaggccctcagctccctgacgtcctgagcctccctgtgacgctctggccttctctgtacctcagagtgcagaaccacagac

SEQ ID NO: 110215 - DNA, 122 bp, Homo sapiens
ctccggccgttgattggcctgggcggggagggcggccgttgattggttcgggcccactcgcgcgggcgccactctctttgtctgacaagagagtcgtgaagcctccgcggtcctagaggggc

SEQ ID NO: 110216 - DNA, 122 bp, Homo sapiens
cactctcaatgacatggagacaatggctgtgccccacaatggagcccacagagatgtgctcgatacaacacaaacacaccccaggatccgcactcactctcatcaggacaggcatgtacgac

SEQ ID NO: 110217 - DNA, 122 bp, Homo sapiens
tccaggcggcgctccccgcccctcgccctccgcctccgcctccgcctcctgcttagctcgcgcctactcggcccggcccgccctggctctcgctttaatctcaggaggcggtgtcccagggt

SEQ ID NO: 110218 - DNA, 122 bp, Homo sapiens
caacccatcagtcctcttctttattttacccccaaaccaaaacttagggatgaagcttcacgaagctctcttttgtgaaggagagaggcctgttccgttgccaaggagtgcaaagctgcaca

SEQ ID NO: 110219 - DNA, 122 bp, Homo sapiens
tctcatatggcgtgcccccatctaatgtgtggttcgtgacctggacacccagggagtgcacgtctcctgtgggaagtggccaggttgtgctgccagagcccgagtggtcagtgagtgcgcat

SEQ ID NO: 110220 - DNA, 122 bp, Homo sapiens
cgtctcagaccaagtcgaggacgccatgttcacccgccgtctgtgtttgaacctgctctgcgcttcctggttggctgcttcaggcgcgcgcgtacgctcgggggtagagcccggggggcggg

SEQ ID NO: 110221 - DNA, 122 bp, Homo sapiens
cagaggtggaagccaaaagtctggagttaacctgacttctcttctggctccaggggctgccgggatcgtctgtcctcaccctccttgtcctccccagccctaaccacccggcagcctcttct

SEQ ID NO: 110222 - DNA, 122 bp, Homo sapiens
tgggcattggggcaatgttctttattattaatattaaacagactatcagcatccttgtttcgccagtcgctgaggaggagaatgtaactgagggttttgcaagaatcaaaccagtgacagtt

SEQ ID NO: 110223 - DNA, 122 bp, Homo sapiens
cacaccacgccttggacattagaattccgacttctggctgggagaagcgcaacgctcacacgcaaagtcctgcttcccaccaagagaccgcgcaggcggcggccctcagagctctgctcact

SEQ ID NO: 110224 - DNA, 122 bp, Homo sapiens
ggggcagatggcaagtggagacagcaatctcaacttcaggtgggtcatcgtctcctttcccgtctgtccttcatctctggtagggttccctttcatacttgttatttaatgtctacccagct

SEQ ID NO: 110225 - DNA, 122 bp, Homo sapiens
ggacagcatcgttttatttttaaatcttacttctcactggcaatatggtgatgcttccaacgtttagttacgaactagttcgtataaaaaattctgggccagcactgtggtgggaggcgggc

SEQ ID NO: 110226 - DNA, 122 bp, Homo sapiens
cgactacagcatcctgatttgcactgctgctttgtacactacaagtcacagtgacacagtcgtaagtgcttcacagcatttcaagcacctcacatatcacctatcattacctgtgtgaaaag

SEQ ID NO: 110227 - DNA, 122 bp, Homo sapiens
ctgccaatcatatcacaggatatcccaattggaaagctattgggaatgtaccttcctccccgagtagaaatcaagttataaacggccaaagtagcctattccaaagggcagattttaatatt

SEQ ID NO: 110228 - DNA, 122 bp, Homo sapiens
ctaggtaatgggggctgggtgtgagggatatcttagtttggggctggcgtgggggtagggcggtcacagatgtcctgttttgtttgggcagggggctctaggctcctgttttaagtgctggg

SEQ ID NO: 110229 - DNA, 122 bp, Homo sapiens
gagaactataaaaaaaatgcacataacaactgaggcacgtggagattcataattgaggcacgtggagattccctggaataagaatactgaagtcctcaatgaggcaaagtctcatctattat

SEQ ID NO: 110230 - DNA, 122 bp, Homo sapiens
ctgcaggcccagcgggccagcgtggaggcacaggaggtggccctgctggcagagcgtgaacgcctgatgcaagatgggcatcggcagcggggcctggaggaggagctgcggaggcttcagag

SEQ ID NO: 110231 - DNA, 122 bp, Homo sapiens
caataaacacaattgtttgttaaccctgggatgccggccagtggggcaggccgaagcgggcgctgccagtcgctccaccgcttcggtggcagaacccggtgtgtgtccaggggcaggacggg

SEQ ID NO: 110232 - DNA, 122 bp, Homo sapiens
gcacagcacagcaggagactatcccttccatgaccgggctctcagatgctcagagccggccgctgcctgtgtatccagcaccagggttcagattcagggcaacgatcacccacttgcccgac

SEQ ID NO: 110233 - DNA, 122 bp, Homo sapiens
gcagcaaatcagtgccccctggccaggcagaacgagtcgaacgtggaagtagggagcaggcggaggccggcgcggagctgcagttaagcaagccgggtctggctttgggccctgggccttcc

SEQ ID NO: 110234 - DNA, 122 bp, Homo sapiens
ctgcaataactgacacaggccctgcatagaaatcgcagggtggaacacttgcctaaaccccgtccccacttcccaatgcatggaaatcccactgcctaacacaccctcaaacaaactactta

SEQ ID NO: 110235 - DNA, 122 bp, Homo sapiens
ttgtcacgtccctgtctttctggctcagctgtctctcttgaaggccgcctcctccccttacgtgggggccgtgcctcccacatcacactgtaaatgtcaaagagttttcctctttctccaga

SEQ ID NO: 110236 - DNA, 122 bp, Homo sapiens
ctcctccccctagtcctggtgctctcctttcccggggtcctggtccccggtctctgggctcggactgactgcccactgaccagagcccgggccagtccactcactggtctaacaaataaaga

SEQ ID NO: 110237 - DNA, 122 bp, Homo sapiens
ccctccgtgtgctccgcagaggcgtgggttctccaggcagcgcccagctggggggtgctccgtggccgcgggccgagtccagctgaggtggctgcaggggtgactttgagacttgtgttcca

SEQ ID NO: 110238 - DNA, 122 bp, Homo sapiens
caatggagtgatgaaggtaacccggacccggggagttggagggcgctaagtcagccctgacggctagggagtcgcctgctgctgctgtgatcaaggaaacgtagtccgcggaacagctgaaa

SEQ ID NO: 110239 - DNA, 122 bp, Homo sapiens
cggaagaataaataatagtgcttcaagaagagtagtgattgagaggataggtaaagagggcgcctcatcgtggaagctagagcaggaacacctccccagtagtgacatgtgcaaagttccag

SEQ ID NO: 110240 - DNA, 122 bp, Homo sapiens
ccaagagcaggccgcggcaacttccagaagccgggtctctggggcaccgcgctcgcggaccgacctcagtcccatcccagccgctccctgcctgggcagaatgggggccccgcgggaacgcg

SEQ ID NO: 110241 - DNA, 122 bp, Homo sapiens
cctttttttcccactccgcttagcagcgattctttcttgccccgtctggctctaggctgccgaactagcaaaagtcttcagatagggttcaagccgcctagtccatttctgtttgccggtcc

SEQ ID NO: 110242 - DNA, 122 bp, Homo sapiens
agcccgttccctcttctaccattaccaattctgcagtacagtctacctcgaacgcatctacgatgtcagtttctagtaaagtaacaaaaccgatcccccgcagtgaatcctgctcccagccc

SEQ ID NO: 110243 - DNA, 122 bp, Homo sapiens
aaataaagagaataccctgacttttccagttgctccacacacagtccatcttggtggaatcggcagtggcctgcatcgtgcgggctttgggggctcgccgtggctctcctcgggggcgccga

SEQ ID NO: 110244 - DNA, 122 bp, Homo sapiens
tggggactggagctatccgtggcggctgcccggcctcctggaacactgtggcagccgccccgcacatgtcccgtgtacgtcacccagggcctcgctgtccggcttccaggatgagatcagaa

SEQ ID NO: 110245 - DNA, 122 bp, Homo sapiens
aagccgctgacccagaggatggaactgcggctctggagattagaaagaggaggacttcgccgcgttcactagcccaggaggaaagccagaaccctaggccggaacccagcgtcaagacgtgg

SEQ ID NO: 110246 - DNA, 122 bp, Homo sapiens
agttgaaacacagccagcgacagttgaaacacagtggcagttggggtggaagacaggatacgcatcatcacaggacctcagcgacaggtcatcagagaatgttcaaatgaacacaggaacac

SEQ ID NO: 110247 - DNA, 122 bp, Homo sapiens
tcagcctccccggagggccctcacggctgagcaaacgttcgggctgatgtcggcaacatgcggaatcaattttcggggaactcagcagccaaaccatccacctttgggcgggaagcaggatc

SEQ ID NO: 110248 - DNA, 122 bp, Homo sapiens
gccatgtccagatgccctgtcctgggtccttaatgcatctccgagtccactgtatccattcgtcccttgggctcagtcacgtgcacttgggcttcctcaacagacaatagactgctggggtg

SEQ ID NO: 110249 - DNA, 122 bp, Homo sapiens
ccgccatcgcacccggccccgcgggcgcttccgggacgcaggaggcatctgcatccggggcgccgctgagtcccgcccagagccccgcccccggctccaggttctgcgagcggcttccgccg

SEQ ID NO: 110250 - DNA, 122 bp, Homo sapiens
taatcagatccgaagaggagtccagaatgcccagccggcaccctgaagctccttctccaccgggaactgaagcagaagaccagaaaaccaatcaagaaggtcctgacgacaggactcctatg

SEQ ID NO: 110251 - DNA, 122 bp, Homo sapiens
tttggagcttgggcattgaatctctaaggttgttcatggcctccagcatgaggtccaggacgtgatccttccggctcaccagggacttcagccacggcttctctgtggcctcctctctgctg

SEQ ID NO: 110252 - DNA, 122 bp, Homo sapiens
tatcatctcatttaatccttttaacaaccctgaagcaccatccttattctaaagggacttcggacctctctgcggtccacactgtcccctgctcggtgcaggagtgtagactgggactgttc

SEQ ID NO: 110253 - DNA, 122 bp, Homo sapiens
tgtctcagccaccctgggggtgagtgctgggttttggcatgaacttcattatgcctgctgcgatgggaaggagctgaaacagctccagcacccacttccatgtccaaccttacctaggtccg

SEQ ID NO: 110254 - DNA, 122 bp, Homo sapiens
tattcatcctgcagaacccaggctctgtagggccacttcatgtgtactataatagccttccgtgtatccagctaacagagtactcatcagcagcctggcaatgactgctgctgtttagttac

SEQ ID NO: 110255 - DNA, 122 bp, Homo sapiens
gcgggcgaagcggagggcgcagagcagcacaagtggccctgcccagaggccgcgggctcccggcagggctccccaagagctggcctcccacctgcccctttgccggggtcctggggctctgc

SEQ ID NO: 110256 - DNA, 122 bp, Homo sapiens
aagtaagaccaagactcaaagtgagggtgcccgggtcctccctgaacagagggagctgttcgtgtcagagactcactgccagaaactgtcacagcagctgcaggtttgcacacccagtgctt

SEQ ID NO: 110257 - DNA, 122 bp, Homo sapiens
tcctgttggccaggctggtctggaattcctgacctcaagtgatccgtccgcctcagcctccgaaactgctgggatgacaagcatgagccaccgcacctgctccctgccctgttttttttttt

SEQ ID NO: 110258 - DNA, 122 bp, Homo sapiens
ttacctgggtcatgaaaaggcaccaggacatagtggacaggctccatggggctgcctctccgctgctccacaaggtggcgagcctggattttggcagcgttgatctcctcacccatgctgcc

SEQ ID NO: 110259 - DNA, 122 bp, Homo sapiens
aaagagcgtggctcagcctgaatctcacgtggattctggaagctgagaaactatggattccgattcaagttaaaagcagctaacaagtaaaaagagccaatgacattaaaactgaactaaac

SEQ ID NO: 110260 - DNA, 122 bp, Homo sapiens
gacccacttgtgtgatgagacccgcggggactcccgccctggggaggccccaataggaagcggcacgggtgcggtggagatgcctgccagggagccaggcgatgagaaacctccagccccct

SEQ ID NO: 110261 - DNA, 122 bp, Homo sapiens
cccagcaaggacgctgcaggaccccctaccccgggtttccgcacggctccatccccagtgcgggcagcttctatggctcctttccggactctccagatctgtctgcctgtctctctccaggg

SEQ ID NO: 110262 - DNA, 122 bp, Homo sapiens
gtttggggagggggtgtgtggagccgggtcctgtgtccgcagtggctgctgtcggggggtcgcctgttcgcggaggtgcggagagactccttgggggtcgagcacataacggggttcgggtg

SEQ ID NO: 110263 - DNA, 122 bp, Homo sapiens
gacgccagcatttcgccctccagcacctcctgcgggctgtggtccgcttccggcctcactcgagcagaccccgccctcccagaggccgtttgtccaagtcacgtgatcgtcgaatctgttga

SEQ ID NO: 110264 - DNA, 122 bp, Homo sapiens
actgcggcttcttagcaaaaccgcggactctggaaaccccagacctacagaatcagaacccgcattttagccagatccccaggaagggaaagcacaggaacgaatgccagtgaagtgtgagt

SEQ ID NO: 110265 - DNA, 122 bp, Homo sapiens
tcgtgcctgtcacccagcatccccattgcctcacggttccccctctcacgggagaaacgtcgacagtgctggtgggaacacagagatgccacccaggacccccgtgagatgcagacacaagc

SEQ ID NO: 110266 - DNA, 122 bp, Homo sapiens
ggcggggagcgcgtggccgccggtgtcctccccacgggaattctctggcgtgcgcgccgccgagtcacacaccgacccgtcgggcctggccacccactcgccgtgagtgaagggcagagttc

SEQ ID NO: 110267 - DNA, 122 bp, Homo sapiens
gagaagaacaacagaaagtctgcgctctgcaccacaaacaaacaagtccaccatagaggccgcgtgaaaggaggcagtgtgcggcgggcgggggctgggggcgggggcgccggcataaaggc

SEQ ID NO: 110268 - DNA, 122 bp, Homo sapiens
acagaggacactattaagaatccagcattgtaatctgaatactcattttaatccttccaacgatcccccagatcgttgtctcatttcacgaaagaaaaggagcctctaatcccatccctacc

SEQ ID NO: 110269 - DNA, 122 bp, Homo sapiens
ccagggtcccctggggtcattcagccactcaacagtttcccagcagcagcagcgaggatccgcacatcattgccagtgctctaaggagcgggcgagccccagtaagcggccgctctgaccgc

SEQ ID NO: 110270 - DNA, 122 bp, Homo sapiens
catacagtaaatcatctgcagcttacaccaatcgtgtgaatattttacacatggggaaagcgaagctcagagaggttgaattacaggccagagcccacacagctggttagttgcagagccag

SEQ ID NO: 110271 - DNA, 122 bp, Homo sapiens
aaaacagggttaagagatgggtaagaaaataggtctctttactttccttggtatagtgaacgttattatacatgttgtatttaaatgtttttgacctaacttgattgacaacaatgtaaaca

SEQ ID NO: 110272 - DNA, 122 bp, Homo sapiens
ccctcaagagggttacttgagagctaagactggaaacaaaggttggggccccacccctcccgggccaggccccgcccccggtccccgccctcgccctctcgaggctcccattggaggaggcg

SEQ ID NO: 110273 - DNA, 122 bp, Homo sapiens
ttcgtcttcttcatcttcggcatcgtcggcgtccagctgtgggcagggctgcttcggaaccgatgcttcctacctgagaatttcagcctgtgagtggtggacagggtccagggaggacctgg

SEQ ID NO: 110274 - DNA, 122 bp, Homo sapiens
tctgccaactctgcatatgccttgaactgattctcagacatcaaagtgaaaagtgcctcccgtcaggtagtacttggtggtcatttattgtcacatactagttcataattcacattcatccc

SEQ ID NO: 110275 - DNA, 122 bp, Homo sapiens
aggacggaaaagtgccaagatggatggacatatggctgtcgccgcactcccgtgtccaagcgccaaggccgaatgaccacttaggtcaggagatttttcccctccaggctgctgttcccggg

SEQ ID NO: 110276 - DNA, 122 bp, Homo sapiens
actactatttgtaaaagaaaagggaatatgtatatgtatatatgtacatggatctaaacacgtggtgtgtgtgttccctgctcgttcacaggtcatctctggaaggattcacaagaaattgg

SEQ ID NO: 110277 - DNA, 122 bp, Homo sapiens
catgtcagtgccactgccatggtgggtcccctgagagtctaggaggccttagaaagattccgaggcctggccatgcatggattttgctcttaaaaaatgtctctcagctgggcgcagtggct

SEQ ID NO: 110278 - DNA, 122 bp, Homo sapiens
ggactggaacgtctgggcccttcctgggtctctcaccagggctatgttataaggacagggcggttctggagaaagccagctggtaaacatcccatccccccaaattttcactttatccccca

SEQ ID NO: 110279 - DNA, 122 bp, Homo sapiens
caagtgagatcattggtgatcctgagccttttcccatgacttaattgaccaagagaagaccgcccagctaaatctcacagaatacattcgggggtaattggcttaaagcctccaggatcttg

SEQ ID NO: 110280 - DNA, 122 bp, Homo sapiens
agcatcctcatctcacacacgggaagcgaggttcggggagaggaacagctggctgggtcacggagctttgaaggggcagaaccagaaacgaacaccttctgcccatctcagggggtaagggg

SEQ ID NO: 110281 - DNA, 122 bp, Homo sapiens
ctgttgcccaggctggagtacagtccccatctcggattctgggatcactgcaatctccgccgcccgggttcaagcgattctccatgttggctggtctcgaactcctgacctcaggttatccg

SEQ ID NO: 110282 - DNA, 122 bp, Homo sapiens
acgagggaaaagagccgcaccggccgcgttagagccatgtttcccttagtgcgggagaagcgcacatcagtgacgtcacggacgcgccgcgacctcgcgtacggtggctggcgaggctcagt

SEQ ID NO: 110283 - DNA, 122 bp, Homo sapiens
caaactcctgacctcaggtgatccacccgccttggcctcccaaactgctgggattacaggcgtgagccaccgtacctggtctagactctgccgaaattctaatacttctttggtaatgcaac

SEQ ID NO: 110284 - DNA, 122 bp, Homo sapiens
gaccccaccccaggacagttctccgcagaggccgggagcccagcagggctgtgtctctcccgtctccttcctcggggcctggtttccatcagacccaggggaagcaaagagttacacctgga

SEQ ID NO: 110285 - DNA, 122 bp, Homo sapiens
aaaagccgactcacccctttccaagcgcagtgaaccgtccgcaaagcacgaggccggttgcgagctgcagaaagcccacgctcgccagcgggacccaaggaacgctagaactatacgtccca

SEQ ID NO: 110286 - DNA, 122 bp, Homo sapiens
tgaagtgtgatccccagtgttggaggtggggcctggtgggaggtgtttggatcacgggggcggatccctcatgaatgacttgtgctgtctgtccacttggtgataagtgagctcccgctttg

SEQ ID NO: 110287 - DNA, 122 bp, Homo sapiens
ttaaacatctcagagaagccaacaaggtcagaaacaagatcgcacatcctaagtccactccgagcagctttggaagaataaactgggccaatgcccttttttgttgtacccaaattttttcc

SEQ ID NO: 110288 - DNA, 122 bp, Homo sapiens
accacccccaaatcagtaaagttaccccctgcccagctgagccagaccgccaacaccaatcgccaccgcccactcaaatatgaattaaaatggctgcgcccctgccggccgaggaggaggtg

SEQ ID NO: 110289 - DNA, 122 bp, Homo sapiens
cttgacatttgacagccaagcaagggtggcaggtaccagggagatccagtcccaaccctgcgtggtgtggtgaggagggcctggggttctggaagcctgcctgcaagaaggcacccaggcac

SEQ ID NO: 110290 - DNA, 122 bp, Homo sapiens
ctttctcacccaatcccactgccttgaaggcagacagggttgtgtaacaagttccgcctacggggtatgagtgagtatttaggaaccttcctgtgaagatgtaattggagaggaggcttggt

SEQ ID NO: 110291 - DNA, 122 bp, Homo sapiens
ggggcggggccagagcgggcggcaccgcctcctccccgctgtctgggtcgcaggccttagcgacgggctgttctccggccccgccccattcccaggctccgccccccgcccctcttcctcgt

SEQ ID NO: 110292 - DNA, 122 bp, Homo sapiens
attcaagaccagcctgaccaacagggtgaaaccccgtctctaaaacaaaaattagccaggcgtgatggcgcacatctgtaatcccagctacttgggtggctgaggcaaaagaattgcttgaa

SEQ ID NO: 110293 - DNA, 122 bp, Homo sapiens
gggtgtccagggaaagccgggctaattctggggctggaaatgtctccggggaacctgcggcgacggccttggccctcttattccccggggtgatactggccccatgtgtccagagagggagc

SEQ ID NO: 110294 - DNA, 122 bp, Homo sapiens
tctgaggagatgctggggtgattcggggtccctgcctgacagggtggagggatctaaggccgggatggagctgctgactctattatacacactcctcttctggggtcccttgctgtccacat

SEQ ID NO: 110295 - DNA, 122 bp, Homo sapiens
tgagaagccaggcactgtacagggcactttacatggatcactttcatttgacccttacagcgataggctctttttcccatttggcacacaaagacactgagactcagattaagcaatagggc

SEQ ID NO: 110296 - DNA, 122 bp, Homo sapiens
aagggaaagaagatcccaccagtggaaaatgaccactagggacagcagctctagacagaccgacgtgcgagtacatggcttgctggctcattcatttatataattgtgcattttccccttaa

SEQ ID NO: 110297 - DNA, 122 bp, Homo sapiens
gacaccctgtctctaacaaaacaaaacaaaaactgccgtggggctggctgatggtggccacggggtcgcgggggaggtccgctcccggcaggctccagctctctgggtcagcggaggtaccc

SEQ ID NO: 110298 - DNA, 122 bp, Homo sapiens
gcctccctaggagacaatctgcatgtcctaaataacctcttccagatccagcagctcccccgcctcctccccaggctccttctgaggcgggacagaaccggtgactttcctgcccggcctga

SEQ ID NO: 110299 - DNA, 122 bp, Homo sapiens
gtcggtgagcgagctgtcccgggccgtgcggaccaacatcctgtgcaccgtgcgcggctgcggcaagatcctgcccaacagccccgcgctcaacatgcacctagtcaagagccaccgcctgc

SEQ ID NO: 110300 - DNA, 122 bp, Homo sapiens
aacgcggtggtgcagtgtctcagcaacaccgacctgctggccgagttcctggcgctggggcgctaccgggcggctccgggccgcgccgaggtcaccgagcagctggcggcgctggtgcgcgc

SEQ ID NO: 110301 - DNA, 122 bp, Homo sapiens
cctctgcattaaaaaaaaaaaatccccgttgctctttacaccccggaaacggcaagggaacgacgggctccggcggaggggccgctgtgggagccggttcaatccagcccggcatggttctc

SEQ ID NO: 110302 - DNA, 122 bp, Homo sapiens
agcgccggggccgccgcgccgcgccgctcccatctcgctcccccaccgaactaacccgaacgggagattcaactaaacccctcagccacaaactcctcgggctgcgacagcggtcgccgcgc

SEQ ID NO: 110303 - DNA, 122 bp, Homo sapiens
cgcaaggattcagggagcttcctttcctggctgcgagggatcttcctgagcagagctctccgggttccccggctcgcggggcccggcgaagggcaggtgggtgcggccgtgcgggtgctggg

SEQ ID NO: 110304 - DNA, 122 bp, Homo sapiens
ctcatgctgttcctcctgcatagaatactctcctctcctaggaagccttcctggacaacacgtgacagttagcacctttctcttagtgcttccactgtactttatacatcatctcgattatt

SEQ ID NO: 110305 - DNA, 122 bp, Homo sapiens
gcagcccactggctggtgaagggggagggcagacgggaggggagacacaggagggggatgcgctgcataggcagcagctcttcgaatgcccgcaagtaggaagaagggggtggttggaaggg

SEQ ID NO: 110306 - DNA, 122 bp, Homo sapiens
ggaactggcgccctttggcgcacccgcctcgctgcccatggcctccgcctgcctcccctgcgctcagctcccgcttctggtccctgtagcaaagctggaaggcaggcctgcaaggcagcccc

SEQ ID NO: 110307 - DNA, 122 bp, Homo sapiens
tcccaggtgagctccagcctgcgacgtcggcaggggcgaggccccacttccgcgcctgcgcgccagcctcccgccccgccccagccctacctgagcgctccaggtgagaaccttggatcgcg

SEQ ID NO: 110308 - DNA, 122 bp, Homo sapiens
aagcgcagcgcggtcggtcgcgcgcccctgaggcttggaggcctgggcttcccccagcagcgctcgagcaccgcccagtcgagcctcacaccggatgccacttcatatttgggcccagagct

SEQ ID NO: 110309 - DNA, 122 bp, Homo sapiens
ggaacggaaagggagattaagcaagacaagactgttaacagttctagagctcgtgggctccgcagggcagcagtcaccctaccaccaggtcccagagcccagggctgtgtgttccactggga

SEQ ID NO: 110310 - DNA, 122 bp, Homo sapiens
acccagcgccccccgcaccctccaggattgccccactcaccactcggccagaaaacctctcggtggcccgcttgactttgccgtaggtgcctttgcccagggtctcctgcagctcgtagcgg

SEQ ID NO: 110311 - DNA, 122 bp, Homo sapiens
atctgagtcatccagccggtttaatttctccttaccccatggatcaaagcaagatgagtccggactggggaagggttggttctccgaaggaaggggtactgaatagattgctcagaggaatt

SEQ ID NO: 110312 - DNA, 122 bp, Homo sapiens
aggctgctgccgctaatccaatgtttgctctagccccgctagagtttacactcctctctgcgccacacccacaggatggcgcagacacatgctaattttaataattattcaaaacaccccgt

SEQ ID NO: 110313 - DNA, 122 bp, Homo sapiens
acgtcacatgcaaacaggctttgtttgggctggctcagcctggtgccagagccccagtgacgtgtgggtgggacttggccctggggccatggatggcacagggcagggggattatctcccac

SEQ ID NO: 110314 - DNA, 122 bp, Homo sapiens
gctttcgagcacatacaaacctgattacaaaagtcagatttctttatttcgtcttgggcacgtcattttaaccccgctcagcctctcttttgtgtatgaaactgaaagtaatagcttctgct

SEQ ID NO: 110315 - DNA, 122 bp, Homo sapiens
tctgagcaaaagatgaatgagctgagaagatgccagacatgttacatcaccacctttaaccgtgacaacaagctgggcagcgtttactccctcctgaatatgaggaagctgaggttccagga

SEQ ID NO: 110316 - DNA, 122 bp, Homo sapiens
atgctgtccactgtgtcgtcagctgcagcaggctcccagtcggtgccgggctctcctctgcgtccttcgtgactgtccagagggaaggctgaggtgccacgacatcccgccagctccaggcg

SEQ ID NO: 110317 - DNA, 122 bp, Homo sapiens
atattactgccctcatttgctgctgggctgcctgaagccattgatttagtcaggctccatcggagtggcctcttcccgggttctgggagctggtgcgttgcctgctcttgaaaagtagagag

SEQ ID NO: 110318 - DNA, 122 bp, Homo sapiens
cgccagcctggtcctgccttctctgccccctcactgatgttggggggcctcacaccatcacgacttctctgagaacactgaccatgttttctcaaatgcccttgcactcacccaagcacaaa

SEQ ID NO: 110319 - DNA, 122 bp, Homo sapiens
ggcatctcctgagcctaggcaatagctgtagggtgacttctggagccatccccgtttccccgccccccaaaagaagcggagatttaacggggacgtgcggccagagctggggaaatgggccc

SEQ ID NO: 110320 - DNA, 122 bp, Homo sapiens
accgcatgagggccctgggcaggtgggggtgggtcaccctgcactggtaggtctccccctcgatccagtctcgggtgcccaccggcagggtggacgtgacggttaacgtgccattgcgctgc

SEQ ID NO: 110321 - DNA, 122 bp, Homo sapiens
actgtctaaattcacttggaagaataaggcaagaacagaaaacgctctgaaaggcggtagcggccctcccaggtgtcagagcgtgaacagagcatggcactgcctgcgcgggtcacccgtga

SEQ ID NO: 110322 - DNA, 122 bp, Homo sapiens
ggtgagctctgcccaagccgaggctgcggggccggcgccggcgggaggactgcggtgccccgcggaggggctgagtttgccagggcccacttgaccctgtttcccacctcccgccccccagg

SEQ ID NO: 110323 - DNA, 122 bp, Homo sapiens
tcttatttaattcttacagctactcttaaatagggtttattactctccttttatagatgacgaaaactggggctttgtctcattccaaagagcagaggagggtgggggtttctgctctacag

SEQ ID NO: 110324 - DNA, 122 bp, Homo sapiens
gctggctggggccaccaacggcctgatgatgggcgtctgaagagtagccaggccaggtgccggggctaacggggccggctccgtgcctccctgctgcgctccgcccgggccccggccggggc

SEQ ID NO: 110325 - DNA, 122 bp, Homo sapiens
tagaaaattaggtaagacactgttcaataatgaggcaaaataggatgtggatgtcacctacgctatcaaatagaaatgtggggtttcatcgaataaatctgaggttgaatgtatagaacatt

SEQ ID NO: 110326 - DNA, 122 bp, Homo sapiens
gtttgaactacatccctgaggtttacttatgtatttaaaacataagtttagttttgcagtcgagtaaaaaaaggaatacttgggctaagttcaaaattcacaaaaagtacttttggttcaca

SEQ ID NO: 110327 - DNA, 122 bp, Homo sapiens
gatttgctgtgtgccttcacgtgggtcactgaacttctccccttcactgtcttgggccttcgcatcattagcatcccctaaaagctttcaatcatcaactgtccaatcaaatctgggagaag

SEQ ID NO: 110328 - DNA, 122 bp, Homo sapiens
ataaatgcttgggtcccactgagcatctgatttaattggtcgaggatacagaacgggcatcgggaattttaaaagaccttggtgatcctaaagtgcaggtaaggttgagaactgctgctcta

SEQ ID NO: 110329 - DNA, 122 bp, Homo sapiens
ggcggtgagcggtgtggagaagacgcgcgggtggctgggccttgcattgttggcggctctcggtgaccctcgtgctacccccctttctccaggccctgggacatcttgctggggaggcagcg

SEQ ID NO: 110330 - DNA, 122 bp, Homo sapiens
acgcgaacgggaaccggggctgcgcacggcgcttgcgggccagctggagttccgggtgggcgtgggcttggagggtcccgcactcagagccctgctggccccaggcagtggggggcttagca

SEQ ID NO: 110331 - DNA, 122 bp, Homo sapiens
ccttggtctggaccctgccccccaaaagtagggccttgctcctctaccttgctctgagcacggagagccctgaccccaccagtaggctcgcccccagaagggcccaagtggccgtctaccgt

SEQ ID NO: 110332 - DNA, 122 bp, Homo sapiens
tgaacttgagagatggaggttgaaatcagctgtgattgcaatgttgcactccagcctgtgcgacaaatgaaactccgtctaaaaaaaaagaaaaaaagaaaaaaaaaatctcgaagcagtgc

SEQ ID NO: 110333 - DNA, 122 bp, Homo sapiens
attgtttatttcttgaattggcccaattctcatttttaaatattctgaggcttctatcttcgggtagttgccctcatgttcaaaaatctcttaaatggagaaataattataaggtcacatag

SEQ ID NO: 110334 - DNA, 122 bp, Homo sapiens
agacaggaacagtgacactgagtattaaagtcattccccacccaaccactatcatcaccacgacccccagggtaagggctttaggacctggaatccccaggcacattcccttgtgagttatg

SEQ ID NO: 110335 - DNA, 122 bp, Homo sapiens
ttcattctccagctcctacacgcccgggaagcagttttactttacagcaagttcaagagtcgcaccgcagatgctgtaaaaacgaaagaagcccacagttgggacgaggattccagttttgc

SEQ ID NO: 110336 - DNA, 122 bp, Homo sapiens
cctcgggataccattggctataggctggcctccgaacaactggacggtccaagtcctgagcgtctggttacccgggcaaccgcatggtctcgcgatacatacctcgcgcctgcgcactgccc

SEQ ID NO: 110337 - DNA, 122 bp, Homo sapiens
tctcgcagccggtagccaccttcttttaaccgcacgaatatcgatcgctctgagtcctcgcgccgcttgctagggtcacaaagaggtttggggtcatttatcacaaaccaaaccagaaatgt

SEQ ID NO: 110338 - DNA, 122 bp, Homo sapiens
tctacatgtccttcctctctatttgtgtatgatagtgtctgaaatcattggatggatcaccggtgaaccatattgacagctgctatatggtcagggagattggttcccatgtagtattccga

SEQ ID NO: 110339 - DNA, 122 bp, Homo sapiens
cagaatataaagaaacctcaatctgataaaggccatttaccaaaaacccacatctaacatcgtactcaatggtgaaagactgtctgctctcatcacttctattaaacattgtaccagaggtt

SEQ ID NO: 110340 - DNA, 122 bp, Homo sapiens
aacgtccactttgagagaaactcacaccctgcataagccactaaccggtggggactcccacgccacacatcgcaccaatacaagctccattcacagaaaaccccactgcaagtcggttatcg

SEQ ID NO: 110341 - DNA, 122 bp, Homo sapiens
aatgatccttctgcctcggcctcctgagtagctgggactacaggtgtgcgttgccatgcccggctaatttttgattttttgtagataggaggtctgtctgttgcccaggctggtctcgaatt

SEQ ID NO: 110342 - DNA, 122 bp, Homo sapiens
agttctgggcagccaccggaagcaccggccctcagtcctctgataggtgggcggtgatatcggtcctctgataggtgggtggtcctctgataggataggcacgctccgagatggccccgtct

SEQ ID NO: 110343 - DNA, 122 bp, Homo sapiens
aaccccaggctcggaggactgggtgtgagcgctgcccgggagaggctgacctgccgggaccggagtgcccggggacgctgtgcccccacttgcccaacgtgcggaatcggctaagcgcgtcg

SEQ ID NO: 110344 - DNA, 122 bp, Homo sapiens
cctgtgcaggcagggccctgccatgccccacatagatgtccacggtgtttagagaggtgccgattcgtatttggtcaaggaagagttaaaagtgcttattgggccgggcatggtggctcatg

SEQ ID NO: 110345 - DNA, 122 bp, Homo sapiens
caggtgtagatgaatacgcccaactgggaactgcaagccggctctctggcagcgggaaaccgcctttgtcttggcctttccggagtccttcccagccttaccgccagtcatttcgaattctg

SEQ ID NO: 110346 - DNA, 122 bp, Homo sapiens
aaatattgacagcagctgagactaccgtattggtaacgctgggcacgaggaagccgaggccgggcatccacactcccgtgattctacggtggcatggctggggcgagtcccgcgctggacat

SEQ ID NO: 110347 - DNA, 122 bp, Homo sapiens
cgtgccacgcgggctccattaggtagaagacgtcggggtgctggttgaagagttggcccacgaaggacgagcccgagcgccacgaggacagcaccagcacatgcacgcgcgcctcgccgcct

SEQ ID NO: 110348 - DNA, 122 bp, Homo sapiens
cctccccggccacggacccctccctgtacaacatggacatgttctactcttcaaacattccggccactgcgagaccgtacaggtaggacatcccctgcagccctccatggccattgggttcc

SEQ ID NO: 110349 - DNA, 122 bp, Homo sapiens
agtgatgagagacagctgaaaaatgtcatgcctataagaaaacctcttctttttgacaaacgccagagggcgctaagatacaggtagatagagatatatagctattgatatactgtatatat

SEQ ID NO: 110350 - DNA, 122 bp, Homo sapiens
ccttaccacagcccggcacccaggcagcccctaaacggagatggtctgcatctgcaggcgcggggaaaggcatagcaggcagcgccctgaacaaatcagaaaaacagccttcggctctggag

SEQ ID NO: 110351 - DNA, 122 bp, Homo sapiens
tgtaattattttacagaaaggaaacagggacgcccccaaatcctctgcttaccccaccaccgtgcatacagatatggttatcgtgtatgtgtcaccctgcaggaatgatgggaatgtcctga

SEQ ID NO: 110352 - DNA, 122 bp, Homo sapiens
gcgcgaattcgagctgggcccggatcctggaggaggcgtggggctgacgaatggggcgcccgggacaaggcagcctaaagtgaggctgctggttgggtggggtagatgcattttcctcgaga

SEQ ID NO: 110353 - DNA, 122 bp, Homo sapiens
tgtgaattatagtcattgtgttgtacattagatgtcttgaactgactcctcctgtgtcagcgtgccctagccccctcctgtgccctttagtcagcgtctctggcccccagatcctggtgacc

SEQ ID NO: 110354 - DNA, 122 bp, Homo sapiens
gctgcagagaggaaggagatcctgactggcaccaagtgcatctgggtgaaggccgcccggcggcgctcgcgggccctgggaaccgaggggcgacacctgctggcacccgcgacagagcgcag

SEQ ID NO: 110355 - DNA, 122 bp, Homo sapiens
ggggctgctgattggcctgtacagaagagggctggttctccagcgccaccaatgagaagacgcagaataggggagcgtcacacccagtcccaggtagtatgcaaatataatgtcacgtgacg

SEQ ID NO: 110356 - DNA, 122 bp, Homo sapiens
atatatgagctacagaaaaagtaaacaaatatgggctgtacacccaccaccttcacttctcggaagaataagagaagagagagaacacaaaaagactcgtattctgacttgggggaaacaaa

SEQ ID NO: 110357 - DNA, 122 bp, Homo sapiens
ttttaaataaatagagacgggggttgggtgtcactatttgcccaggctggtcccgaactccgggcctcaaatgatcctctgcctgggcctgtccaaagtgttgagattacaggcgtgaccta

SEQ ID NO: 110358 - DNA, 122 bp, Homo sapiens
cgggccgagtagcagactgggccttctgcagtcacggtgtcgtcctaggctccctggagacggtggcagtggtggcaggtccggctctcccatgcctggccttctgcttggtggggtgggca

SEQ ID NO: 110359 - DNA, 122 bp, Homo sapiens
agctcgaggagggaagcagggacgcggtggggtgcgcacctgcggctgcggcagcaaaggcggaggaggagcgaagtggacgagcacccgaggctgccagaggatctgggcagcctgggtgc

SEQ ID NO: 110360 - DNA, 122 bp, Homo sapiens
gtggttttctgaaatgggcgcaggtgttccatgtaggtaagagtcacctctgtgaacacacgcatttctctttcctgttagaaaatacctgaaatctcttccgaatgctgtgcagactccag

SEQ ID NO: 110361 - DNA, 122 bp, Homo sapiens
ttcataacgacagtgaccatttatggagcacgtcctctaactctgctagtgcagacacctcggcattatcgcatccctccgcgggccaggtaatgacacccccaatccacaccgagcaggcc

SEQ ID NO: 110362 - DNA, 122 bp, Homo sapiens
cggcagctgccacaccccgaggaaggtctccagtttccctcgaagctttctggccgtgagcgggatacacctaagggccgcgaagcaccctattcagatcctgccctcccttcctcattctt

SEQ ID NO: 110363 - DNA, 122 bp, Homo sapiens
tactgaaaatgacaagttaattggcagagaaattaatctataaaagggttgtgtccagagcggaggagcctcattagcaactgaacagaacccactcagaagacgcactcacccacacgtgc

SEQ ID NO: 110364 - DNA, 122 bp, Homo sapiens
cccatccggggagtttcccatttggtccctcgtgctgtgtgtggtggggggcattgtggtcgaggtctgaacagccggggaagtgaaagaccccgtcctctccgggagcttacgggagtggg

SEQ ID NO: 110365 - DNA, 122 bp, Homo sapiens
ggagagacgcgagggagccatgcagacaggggctgctccgtggagagcccgggaagcctgcggggcgccggaggggtgggtcccgggacagaccagtgaccatccgcctcctgcgtagcgct

SEQ ID NO: 110366 - DNA, 122 bp, Homo sapiens
gcaggggccagccctgtgaggtggagcagccgcgaggacacctgtgtggctgagtgagcccgtgcaggcaaagaggagtgccggcaggttctcagcaagatgggaccgctgggggaccctgg

SEQ ID NO: 110367 - DNA, 122 bp, Homo sapiens
cgcggggcctcgtttggggtcgcaagtctgagcgctccggctctggttggcgctaggtggcgcccgagagcgcgccaggctcaccctggggagacctggggccagccggggtctccctgctc

SEQ ID NO: 110368 - DNA, 122 bp, Homo sapiens
cagcatgaaattgcacatgctacccaggcagggctttgcatttcacattttaacttgcatcgccttcacacagaattccaggccttttaaattaaattgttaaaattagtttttatttactt

SEQ ID NO: 110369 - DNA, 122 bp, Homo sapiens
tggcttggggccgcaggagcgccggagggtgagggcgggagcccggcgcgggcgcttcgacgccccccctcggagaggagagcctgctgttccgtctgctactgccgctgccgccgccgccg

SEQ ID NO: 110370 - DNA, 122 bp, Homo sapiens
ctttccacgcctcccatatttgggtagaaaaagtcagataccatgcatatattatgggtacgggttctacatgtgtaaagacttccagggctaacccgagagagtgtagctgaggcacggtg

SEQ ID NO: 110371 - DNA, 122 bp, Homo sapiens
aggaaggcgggtggggagagcaagcatgaggggacctctggcgagccccggggactctttcgaaggtttccttcgaggggctcggccgggaagctgcacggcggcggttgccagctggccct

SEQ ID NO: 110372 - DNA, 122 bp, Homo sapiens
agacctctctacccccagcaaagtgcagctcccgtgcccctccaccttgcccggggctggcggttcctgtgtctgatttcaaggtctctggggagcacctttgggattcgggagggcgtggg

SEQ ID NO: 110373 - DNA, 122 bp, Homo sapiens
ttcacctaggacctcattatatactaataaacatactgaatcacacacccaccaataccacgacagttctggggaaatccatatttggtataaaaatgggtgacaccacagttctgagaaat

SEQ ID NO: 110374 - DNA, 122 bp, Homo sapiens
actgcccctccccttcctgcctgcccttcttccggggcacccagcagctcggtcctagggcgatgttgacagacagacagaggggcggatgcagcctacctcctgggcagtgagctgcggtc

SEQ ID NO: 110375 - DNA, 122 bp, Homo sapiens
atttcacctcgataaaaaaacaacaaggcatctgaagttgtccacaggcttcacacagcacgtggaaaggcgggccggggtgactcacccctctgggggtcaggaacgccgttctggataac

SEQ ID NO: 110376 - DNA, 122 bp, Homo sapiens
gcattgccctgcacctcgaggggcagcggggcttaagtcaagctctgtaaatgcggcacccgacgtctgaggcccgccacgctgcaggttcccatctccaaagcccgtggtgctgggcacgg

SEQ ID NO: 110377 - DNA, 122 bp, Homo sapiens
gcttccctccccctgcttcccagcgcttgtcatatcctgtctctggcctgatatttcacgcgagcaattggaaggagattacaatggagatttatgtgtgttctgagcactgctagtttccc

SEQ ID NO: 110378 - DNA, 122 bp, Homo sapiens
cgtggcacggagggggtggaatgatcctccatggcacgagggggcagtggaataatcctccgtggcacgagggggcagtggaataatcctccgtggcacgaggacggtcactgcattcgtca

SEQ ID NO: 110379 - DNA, 122 bp, Homo sapiens
tggcctcctctccattctgcgggccgagaagaaccccaggagagcagcggggaccgggagcgaggagtgggggtggcaaaccctaccctgcctgccaccttcagtccagtggtggacaatac

SEQ ID NO: 110380 - DNA, 122 bp, Homo sapiens
ttttttttggagacacactttcactctttttgcccaggctagactgcaatggtgcgatctcggctcactgcaacctccgcctcctgggttcaagcgattctcctgacttagcctcccgagta

SEQ ID NO: 110381 - DNA, 122 bp, Homo sapiens
gaagtccttttcttactatatacccagaatcaacgaagtcaaaaatcaaagtctttgccacggtttagaatcatatataaaatgatagctacatgtgaagtataaaccaaagagaatgatat

SEQ ID NO: 110382 - DNA, 122 bp, Homo sapiens
tcatgtatctcatcagagtttctcaaccttagcactattgatatttggggttgggtattgcgatgggctgagtattgattatagtggaatgtttagcagcttactggcttctaacctttaga

SEQ ID NO: 110383 - DNA, 122 bp, Homo sapiens
catgacagtatgacccagagaaccctgacccacatgtcaaaatgctgccggcctcaatgacgccagctgggaggtgtccttgtgcgcttctgcacacctagaagacacaggaaggatttacc

SEQ ID NO: 110384 - DNA, 122 bp, Homo sapiens
cctgccgcccggtggtgggaggggatattgcaggaggcttggggctgcggagcgagcgagcggggagcctgggaaccctgctgcattgctgcaggaacggtgaccttgtgctgctgcggcgg

SEQ ID NO: 110385 - DNA, 122 bp, Homo sapiens
gggcacccgcgtgccctcaggcgcgcccccgcgccgggcccggccggcagagggcggggtcgctcaccagtccgcagctcgtgcttgacagtgaggagctgctctcctccgtcgccgccgtc

SEQ ID NO: 110386 - DNA, 122 bp, Homo sapiens
agaaaaccccgcacagaggagcttccagagaccacctgagggcgagaagaaagatcgtcacggcagtcatttattgggtgcgttctctgtgccagactccgtcaaagccctttgcatcgttt

SEQ ID NO: 110387 - DNA, 122 bp, Homo sapiens
catcagagagcggacaaaggagcccggccccacaagtgcaccggggctgggggtgcagggcggagaggccctggggacgagggatggcccgggcgccgaggccctgggggtctgggacaggc

SEQ ID NO: 110388 - DNA, 122 bp, Homo sapiens
acaggtatgcactggtaacatgcagatgatttcatccagctaagctggttggagtaggagcgataccaaagggtacacccatctgtgagtcacatcttgaaaaacactgagaggaaccttct

SEQ ID NO: 110389 - DNA, 122 bp, Homo sapiens
gaaattctatgtatttgtaattacaagtatgctaactctgtagctaacactacaataaatcgcagggcaaagaactgtttccaccttctaggtaaaggtctggtacctgcctactttttcag

SEQ ID NO: 110390 - DNA, 122 bp, Homo sapiens
catccctttgatgccttcagggaagaggaagcggttgtacagcgtgctcacggtgtcgtccgggagcacctcacactccttctgcagcagcaggtctccggtgtccagaccatcatccgccc

SEQ ID NO: 110391 - DNA, 122 bp, Homo sapiens
actccgcagggcggggtttaagtgctcccaccgcccagtccccggaccgactgtcccacccgcgacccatgctggccccaggttaacgcctgcaaccccggagggccacaaatcaaaggtct

SEQ ID NO: 110392 - DNA, 122 bp, Homo sapiens
gggcgacactgcaagacccagtctctacaaaaatttaaaaattagccgggtgtggtggcacgctcctgtagtcccagctagtcaggaggctgaggtgggaggattacttgagcccagaagat

SEQ ID NO: 110393 - DNA, 122 bp, Homo sapiens
cgttcctgtttctggagatctgcgcgtatttgtatgttggggagggcgggctcgaggctccgagagttgtgttcagacccaactcttaacctcaggggacctttctcaggccaagcgagggc

SEQ ID NO: 110394 - DNA, 122 bp, Homo sapiens
atggcatctgtcacacactctccccactccgtcttggtacctaggtcacaggctttcaatcgcccatcttgcagaaacgactagactaggttttcttttgtcctttctgttctttttcactc

SEQ ID NO: 110395 - DNA, 122 bp, Homo sapiens
aggctcgatcctccccggcagggcgcctggccaacgagtcgcgccgcctcctctcggccgcgcctgctggtgaccttcccgagagccacaggggcggcctcggcacccctccttccctcgcc

SEQ ID NO: 110396 - DNA, 122 bp, Homo sapiens
gatggaggtcgagtgctgcagcttgggcctccgcgtgcgctgctgttgccccggcggccccgagtacagcccataggctcccactgacgtgtgctcgtagtgatccgggctcaggctggaac

SEQ ID NO: 110397 - DNA, 122 bp, Homo sapiens
tgaggtcttcttttaccctgcccccgcctgtcctaggtctgttctcagagcgatgggccgcggagactgatctgccgccatgattggaggcttattcatctataatcacaagggggaggtgc

SEQ ID NO: 110398 - DNA, 122 bp, Homo sapiens
taagtgaaaggggagggacttaatgagcttctgaactttttaaagtctcaatccatccttcgatattttttattaaaagccacgttgttaggtaaatgcagtcttgatgtctcagaataaat

SEQ ID NO: 110399 - DNA, 122 bp, Homo sapiens
ctggcagcctaattcttctgtagtttatgatggctagtggcagggttgtctttccctgtccggagtgtataagataaggcatttctgtgaataatgctgttctcctcagtacctggaggtca

SEQ ID NO: 110400 - DNA, 122 bp, Homo sapiens
gagctagcttggtggtggaagccactgacagcgccggtttcccgatgaaaacttgacgttcgtgttttgagagctagctggggagactgggagctgggtcctctcggagtgccaggtcagcc

SEQ ID NO: 110401 - DNA, 122 bp, Homo sapiens
gtgtgtgtgtatgtacgtttgtgtgtgagtgcaaatgtgtgtgagagtgtttggaggtcacgtttctggggggttgcacatgtatgtgaggccacacatatgtgtatgtatgtgtgattgtg

SEQ ID NO: 110402 - DNA, 122 bp, Homo sapiens
tctggcctcagaacggtgtgagaatctgtttctgtggtttaagctgagccctctggggtacgttgttacggaagcccacgtcagctaatacagcttcctgtgtgaacagaacatcctggaca

SEQ ID NO: 110403 - DNA, 122 bp, Homo sapiens
gggtggcagccagaggctggggcgggcaatgggctgtttcacggggacagagcttcagttcgggaagacgggaaagatctggaggcggaggcggcgggggctgcacagcaatgtgactgtac

SEQ ID NO: 110404 - DNA, 122 bp, Homo sapiens
tgggaagtagatagtgctgctttcaccttgttaataaatcttacaggaattttccagtagcgtcggcaagcctgttacaatagttacagcagacgaaagtggcctcgctttcagagctttat

SEQ ID NO: 110405 - DNA, 122 bp, Homo sapiens
ctcagttcgttggcggcggcagcggccgctctgcccgccccgcaccggctctgctggtgacgctgcagccgccgggcccagaggttccggaccggcctcaagtcacttccggggcggggcgg

SEQ ID NO: 110406 - DNA, 122 bp, Homo sapiens
ctttgatgcatctcagctacaggatcatgtactagtattcaagattcccacattgctccacgtgtcttttctcagccctattgttccacctctgctagcgttgactcgtttacttatttttt

SEQ ID NO: 110407 - DNA, 122 bp, Homo sapiens
acttgtcgcagaactggcaagggtatggcaggcccgtgcccccttcctcctcgccgaggccgaggtcacaaccatctccgatcatctgcgtgggtgacgcaacatccttgctggagggagac

SEQ ID NO: 110408 - DNA, 122 bp, Homo sapiens
gcaaagtctgatgacggctcacatggactaatgcagaagtgaacccgcagggctgacggacgcctcagggttctcgccccactctgagcacggccctgcggcctctctcgagcccacccact

SEQ ID NO: 110409 - DNA, 122 bp, Homo sapiens
tacggcggcagcgtaagtgcgtgacgctcgtcagtggcttcagttcacacgtggcgccagcggaggcaggttgatgtgtttgtgcttccttctacagccaatatgaaaaggcctagtaagtg

SEQ ID NO: 110410 - DNA, 122 bp, Homo sapiens
agaagctcctacagggaacatatgaatacaaatgacgagaaggtggagccgcctcagtgccggtatgaaaaagtttccgtggtctgcgccgaagatcaaaccagtcacaatattccttcagg

SEQ ID NO: 110411 - DNA, 122 bp, Homo sapiens
ggtgtgagagaatgaatgatgtcaagagcgcgctgggcgcagggcgcagggagcgggccgcgcgcggcgggcggggagagcgggcgcggggccgcggtcaacactgagcgccgcgccgtggg

SEQ ID NO: 110412 - DNA, 122 bp, Homo sapiens
aaaggagagaagctgagaaaacctcagccccgaggctggccttctcctctgatgagaatgcgaagttactcatgctgctccgaatcccagcaggctggaacacaacatctggcagaagccgg

SEQ ID NO: 110413 - DNA, 122 bp, Homo sapiens
agaaaacctaattcattgaattaaacattggaaagaatctaagtgagtcactgtatccttcgcttggtctttaggcagcaccacaccttgatcattccagccagaagggaggtaatcatatt

SEQ ID NO: 110414 - DNA, 122 bp, Homo sapiens
tgcaagggggcaaccctgggcctgtgtcactggctgcggagggacaagtgagaggtcaggcgcaaacactaggcacggggcccagtccatggccgcgatcagacgagccgggctctctcagg

SEQ ID NO: 110415 - DNA, 122 bp, Homo sapiens
tacaggcctgagacctggacttaatcaatttgatgcttcttccagaagctgggactcttacgtgagtaaaagagagacactgggacaggtgagaaatgatcacgagtcaggaggcgcaagga

SEQ ID NO: 110416 - DNA, 122 bp, Homo sapiens
agggggttaaattcctgtggtgggggcgccggcgcgcgaggctgaggtcttgctaggcaccggcgaaggggggcgctcccctgcgcccggacggcgccgccctcgggctgggtaatgggggg

SEQ ID NO: 110417 - DNA, 122 bp, Homo sapiens
cgctatcgagccggcaggtgatgggtccggccgtctgggttctgtgggtgctaatgtagccggaaatccggcgcgatcgatggctgagacccagagcagagcagggaccgctggccccggtc

SEQ ID NO: 110418 - DNA, 122 bp, Homo sapiens
aatctcgttgagcgttcggcgtggatccacggggccaggccaccctgcgggagcgccacacgcatccacttcggattcagtgggtgaagacagaactctgagagtctgcaggcggctcctgt

SEQ ID NO: 110419 - DNA, 122 bp, Homo sapiens
aggaaatagccggctgaggaggccagggctcgggtttgagctttcatcccttggcaccttcgcgcttccccgcgtgacagccccgtaggtttttcccggttacccaagtggagaggggaccg

SEQ ID NO: 110420 - DNA, 122 bp, Homo sapiens
attgactttgagcgagggagcccgtccccgtgtaaacctagcagcaggctcggtgcttgccgccgggatgctgcgaatgcaaggctagactttaaataagggtgtgattattgtgtgaataa

SEQ ID NO: 110421 - DNA, 122 bp, Homo sapiens
ctacctcctcctcggattggctacctctaggtgaaatgagcggtggttgagccctacttccggtggtgctgtggtctgcccctggagaacccagaagaacacagctgtgcgcgcccacaggc

SEQ ID NO: 110422 - DNA, 122 bp, Homo sapiens
aactggagaaaggacaaggccacatttcaccgtctcctctgttcttggtaccagccctggcgtccccggcaacgccaatccttctcacatccagcttgtgccaagttttcctccctgctcgt

SEQ ID NO: 110423 - DNA, 122 bp, Homo sapiens
gccccacgcggccgcggagccggacctgctctactacccacctggcgtcgtggtctacagcggggggcgctacgacctgctgcccagcagctctgcctactgacgcaggcctcaggcccagg

SEQ ID NO: 110424 - DNA, 122 bp, Homo sapiens
ctgtctgtccccgtcactcccgtcctcccattaccctctcccagctgcagggatcacggacgccaagcggcactattttactaggagctgcaactacaaccacaggatcgcggcggggtcgc

SEQ ID NO: 110425 - DNA, 122 bp, Homo sapiens
gcctggagccactgcctgtgggggtcgagggctgggccccttcccctggacaggcagcctcggtggtcttttttttttcgagttggagttttgctcttgctgcccaggctggagtgcaatgg

SEQ ID NO: 110426 - DNA, 122 bp, Homo sapiens
gggtgatttttttgctcctgggagccttggaaacccagacagcgttactgacctggttggcggaggtcaccgcgggcgccaggcgtgcgcgggagctggagcttaacacccagccgctgtcc

SEQ ID NO: 110427 - DNA, 122 bp, Homo sapiens
ggacctgctggggaagcgccaaggacaataccaggggccaagaacaagatcaaaggggcacggcaaggaagaaatgtgcatccaatgagtgctaaactgtagatgcgataaaggcgtcaggc

SEQ ID NO: 110428 - DNA, 122 bp, Homo sapiens
gcggcagtggcctgggcctcttctcaccgcccttcaaaggtgggatgtcagggaaccttccgggactgatgtggcctgaggaccgtcctggagcctcgctgtgactcggtttccccagatgg

SEQ ID NO: 110429 - DNA, 122 bp, Homo sapiens
tggcccattttacagatgagaaaactaaggctcagaggacgggagcagcgttcccaacgacgcgcctggaaaaggcgaggcctggagtcgccatcggactgtaattccaagcccagtccttt

SEQ ID NO: 110430 - DNA, 122 bp, Homo sapiens
cttctcgcagatggggcacttctggaaggccttggctcggatcttcttctccaccttctgcgaccaggccgggtagacgtcgccgtcgtgggcgccgctgaagtacttcaggtagtagtcca

SEQ ID NO: 110431 - DNA, 122 bp, Homo sapiens
agtaatcaaaatagctaccatccagctgctctattgaatcttaaatctagtcagggctgtcgaattgaacagtgaggtagaggctcttggaaagatttcaaagacacagtaagatgatgaaa

SEQ ID NO: 110432 - DNA, 122 bp, Homo sapiens
ttccgggtgagtcttcctccactttcacgggcaaaagtccgtcgcgttgggacggcgccgcgtccttggacctcgcagccatcacccagggtcccaactcggcgtcactgccgcgcctctgg

SEQ ID NO: 110433 - DNA, 122 bp, Homo sapiens
gcttaaaatgaatccctccgcccatctgagcccgccccccgggagcgcggggcccaatcccgttacaaggaccacggacttccgtttcgttccgcctgtaagtcccgcctggtcccgcctcc

SEQ ID NO: 110434 - DNA, 122 bp, Homo sapiens
cttcttcctggccaacgtggtgaaggccttccaccgcgagctggtgcccgaccgcctcttcgtcttcttcaactggctgggctacgccaactcggccttcaaccccatcatctactgccgca

SEQ ID NO: 110435 - DNA, 122 bp, Homo sapiens
ccactgggagggatggcggctagaagtcagaggcattgactgattgaggaactggtgaagcggagcccatgaggtgctgaggtactctaaataggaggataaggtatgaggcaaaacaaggc

SEQ ID NO: 110436 - DNA, 122 bp, Homo sapiens
tttgattttatcaaaggttaccaataaatacatttctccaaaggagccaacctcaatctccgcatttcttacacacttttgccaagactgtcctgtaaaggactgtgtaaaactaaagagac

SEQ ID NO: 110437 - DNA, 122 bp, Homo sapiens
acccgctcctcgccagcgcccgcggccaagcggacccggccttccgaaggagccatcttgcgcgcagcagcagcagcggctgagcctgagcccctaaacagctgcagaggtgtgacaggttt

SEQ ID NO: 110438 - DNA, 122 bp, Homo sapiens
accgtcacacccagtcccctcaaacatttgtgcctgctgtccctgcgttcgcttcccacccgggtgcttgcctttccacgtctccctgctgtccagcagctggcaagtcattcctgccctgt

SEQ ID NO: 110439 - DNA, 122 bp, Homo sapiens
tgcctcagcctccagagtacctgggactacaggcccacaccaccacacctagctaattatcgtatttttagtagagacagggtttcaccatattagccaggctggtctggaagtcctgacct

SEQ ID NO: 110440 - DNA, 122 bp, Homo sapiens
gatatacaatacatgaacacatttgaatgcccagcaccttctttcagatagaaaaacttccgcagtagtttcaacagtcctgtgggctgaatcattagatttgccaagaaaatctattactt

SEQ ID NO: 110441 - DNA, 122 bp, Homo sapiens
gagtgcctgggcaggaacccacgggccgcgagggtagagtattggctcagcctgcagggacggccgcccgagaacccccgagggacgctgcagtgcagcagggctcagtgaccaggtgcggc

SEQ ID NO: 110442 - DNA, 122 bp, Homo sapiens
agactcccagctgacatgtggtggcacgtgctctggggttcccggggtgctgtagggagccggcgcgcagctctctcgtccaggacacacgagcaggagtgacctgcgtccagaaggtccat

SEQ ID NO: 110443 - DNA, 122 bp, Homo sapiens
ctttcactgctagagtcctctgcatgtacactgtgaagccatagtaatcccaccggctgacgtgtgtctgtactcaccctgtgcagggcccttctgaacgagtctcacctgtattaactttg

SEQ ID NO: 110444 - DNA, 122 bp, Homo sapiens
tgttgacaaactcatttggagtaaacagagtagtcctaattgtaagttctaatgttttaacgctaaattgggcgataagtcagtgtttcaatgtggcacagtcaaccacacgttttccagaa

SEQ ID NO: 110445 - DNA, 122 bp, Homo sapiens
gcggcgccgctggtgaggaacacgcccaggagcagaggaagggggcgactcacccgtcggcgtcagctccaagcaaggcacagggagtcccgggggccaggccccgtccttccctctctctc

SEQ ID NO: 110446 - DNA, 122 bp, Homo sapiens
tgagcacaaaacgtgaacacggaccagaacgagttggcatgcaggactaggttgccttgacgactctgagttctgacagggaaatacaatgagttttatgtggacagagttccacggtctat

SEQ ID NO: 110447 - DNA, 122 bp, Homo sapiens
gtcactcttccttcagtccagcatctgatcacatctcccgtcactcagggcccgaaggggcggggccttaaacgttatccaatcaggaacgctgggctgggaaccatccaatcaggcacgca

SEQ ID NO: 110448 - DNA, 122 bp, Homo sapiens
gacgaattccctttttccctctacagcaatccctcagatttctgggggaaaatggggccccgttttccagtacacaggccaccccaggaagaccgcgtcgggcgctgtgtgatctggagagt

SEQ ID NO: 110449 - DNA, 122 bp, Homo sapiens
acgtagtaatcgaagaggaaacaaaatacgtgtctttatttcttcactgatcttgtctgacgatgacaaaaaatatcttagtgactgtgaccttagcagcatggctacctgatttatcccag

SEQ ID NO: 110450 - DNA, 122 bp, Homo sapiens
cgttggagtcggagagctccagcacgggcttggggtgccaggggaactcccggcagtcctcgtcgttcagcacctccacccgcccctgccgcgtgatcacctcgccctgcgggtccagcatg

SEQ ID NO: 110451 - DNA, 122 bp, Homo sapiens
cttgggatcctacctttgcagctagccacattccaaattataagactctctctggaagcccgttgtagacaaccaaaagccctgatgatgtaagggagctcgccagacacacactttcatac

SEQ ID NO: 110452 - DNA, 122 bp, Homo sapiens
ggggactgttcacctctgagagggcagccctgccccgcggccctggccctgccctgcacccggctgggtctcatctgacacgcagccttccagcctctcattgcccgaggggtgggccctgg

SEQ ID NO: 110453 - DNA, 122 bp, Homo sapiens
cgcagcgctggtgggctggcattgctgggggacccagtacaccctcttcagttgctggcccgggtgctaagccccccactgtccggccggcagggccggccggctgctctgagtgcgtgcgg

SEQ ID NO: 110454 - DNA, 122 bp, Homo sapiens
aggggtgtgaaggcggagccactgggctggcaacaccctcccgaaggtccagcccttacccgccttcctaccaccttaggggatttggcccggagaacgagatcaccctctcaatgaaaggc

SEQ ID NO: 110455 - DNA, 122 bp, Homo sapiens
ggcgcgcagagcacgtcgtccggggagaactaaaactacatttcccagcatcccgcgcgccgcagacccacttccggagacctcacacaagatggcggcacccgaggaacacgattctccga

SEQ ID NO: 110456 - DNA, 122 bp, Homo sapiens
cagctgccacagtccaccaacgttaaaaagaaagcgcccctatccccagcaccgctttggcggggtgtgtggctagagacaaccaaggaaaattcggggctgtgaagcacagcctggggtca

SEQ ID NO: 110457 - DNA, 122 bp, Homo sapiens
tccatcgccccaatagctcagtccttagcgcgcgcacctgcgaatctgggcttttgggttcgcggccaccctcagatttgcgaggcaggctttactgctgctggataaaccaaccaggttat

SEQ ID NO: 110458 - DNA, 122 bp, Homo sapiens
gacaggcaggtagagagggaggtgtgaggacaggcagacagggaaggggtgagggagaagcgagcaggagacagacaattgaggaaagcataatcatggtgggagagagcagaaattggggg

SEQ ID NO: 110459 - DNA, 122 bp, Homo sapiens
gcggggacctggtggctgccggcccactgcggcgggagccctcgctccttttcccaccgtcgggacggtgcagagtggcagcttccctccgtggattccaggtcctgcctggcgagccgtcc

SEQ ID NO: 110460 - DNA, 122 bp, Homo sapiens
ccatcctttctctgctcactgtcgagcaccaacacgctcaccaaggtcggctttctaccgcgtgtagtctgctggcagtgccgctctgtacttgcactgctcaaaagtacctgcccaatcat

SEQ ID NO: 110461 - DNA, 122 bp, Homo sapiens
tcatagtagtaccgcaaggcccggctgagcttgtcgtaattcatgttggtcttgttcttgcgtagcccccacagccgggccacctcctctgcatccaccagcttgaattcaccaccatcccg

SEQ ID NO: 110462 - DNA, 122 bp, Homo sapiens
gtactcgagctgattaattttcagggaattcagagcgattcctgattagacctcagagcacgtggtttgaccggccatctggaaagggagggacaagccacagacagttcatataaaggtaa

SEQ ID NO: 110463 - DNA, 122 bp, Homo sapiens
tctaccttgtactcaacgaatattaaagcaggatgccgctttgtgtcaagtactagattacgatgaacggtgtcacgaagaacactccactcttgataccgtatatgtgaccttgagcaaga

SEQ ID NO: 110464 - DNA, 122 bp, Homo sapiens
tagtggagatctgagtgacaagtaaaagatgcaagggaaaaactctccaggcaaagggaacggatacaaaggctctgaggtggtcaagagtcaagagatggaaggaaggcctgtgtagccaa

SEQ ID NO: 110465 - DNA, 122 bp, Homo sapiens
ctgtgtttttggctgggtaatagaatgtgctgagtgctgcggccgccgccgcgccccctccgcagctgcatccccagtaggtctgtaatggggcttgaaggagaaagtctcagacatctgcc

SEQ ID NO: 110466 - DNA, 122 bp, Homo sapiens
gggggtcttgccccgctcccgcaggggtcccgaggggctagcagcctccgcagcacaggacgtggccagcacctgggactcgaactgcagcagctgccccatgaagctgaagttgggcgaga

SEQ ID NO: 110467 - DNA, 122 bp, Homo sapiens
gtagtaaatcagctaaactcttccaaaagttttgggagttgaccctttgttagctctcaacgttcccactgtgttctcacagcatgaaagtgctccaccatgatccatacaataacaggcac

SEQ ID NO: 110468 - DNA, 122 bp, Homo sapiens
tagtgggttttgtttgtttgtttattcgtttcactcacgcctgcataatggctgcttcgccgcccgggggcgacctccccgcaccacacgcttccccgaggtcgctcttctcccgcccccag

SEQ ID NO: 110469 - DNA, 122 bp, Homo sapiens
gtcattaacaacagtgcacttaaatataactatagatttcacaagggtatttattttagccgcaaacatttcttacaagcaacaacaacaaaatgctcagaagctatactcagtagtctcag

SEQ ID NO: 110470 - DNA, 122 bp, Homo sapiens
ttgtccccacctgccccttgctttcttgtgcagctcttcacggcagctggccccagccagcggaaggcgcctatgagccctgagcctgtggtcctcagcttgggcggccagcggcctctagc

SEQ ID NO: 110471 - DNA, 122 bp, Homo sapiens
aggcacaagactgacacgatccttgccctcgtggtgtggctctacaaattactgtggaaacgcgactgtctcgagctgaggagagggcagaacatctacatttcccccacccggactccagg

SEQ ID NO: 110472 - DNA, 122 bp, Homo sapiens
agcagacagtgagacgggcgcttgtccactcgtctgacaccgtggggccataggaggcagcgactgagaaggtcagtcccattaaaaatgccctttggctcatctggaagctgtatctctgg

SEQ ID NO: 110473 - DNA, 122 bp, Homo sapiens
ccaagcaacattgtcctgcccagggagatataagtggaagttggctgacaggtttctagccgtggtgtgctggggctgtttgaaccagaacatgagagctgaccgtccattgttcgggaatt

SEQ ID NO: 110474 - DNA, 122 bp, Homo sapiens
tgtggtgtgaccaatggtgtgcccagagcactactctcaaaatcactagtgttagcaagtcgtcccgggctggggagcgttcgccgtagtctttggaagctttggctttagatttaccaagc

SEQ ID NO: 110475 - DNA, 122 bp, Homo sapiens
tcctgactccggaagcacttacagcccccattccacagagcctgctgggaaacagaggcccgaggggaggcccggcctacaagacccagaagccttagcgccggcaaggcggccagaagtag

SEQ ID NO: 110476 - DNA, 122 bp, Homo sapiens
aacgcagcagtgtaggcccaggtcggcggcggggcacgggaaacttttccgaaacggtagcgttttgttttgcgtgggaggttccagcagtatctcttggttattccaaatttatgggcggc

SEQ ID NO: 110477 - DNA, 122 bp, Homo sapiens
attctcttgcgagggtctttgagagttgcggtgttagccaatagcgtaagatagcgcacgcgcagtgctttccagtgcggtgaatatttgcgtttagctttattcttgtgcttgttttaaag

SEQ ID NO: 110478 - DNA, 122 bp, Homo sapiens
cgagctgacagtgcatggagggactctgccaagatttgcacgcccactgtcatcctttgtcggcccagagccttgtgttcagggctggggtctaagtcggagacagattccccactcagggg

SEQ ID NO: 110479 - DNA, 122 bp, Homo sapiens
agcacctgccatccagggccctcccagggctgcgtgaactttagtcacgtggtgacaggccgagtcaccatgccaagtcactgtgcgcctccttgctgctgtgacgtcagcttccccatcct

SEQ ID NO: 110480 - DNA, 122 bp, Homo sapiens
ggccgggctgtgccaggcacaggtgcaggaatggctttcagagggagctccaggggctcccggctgagctctggggagccgtgaagaggcttttaagaggcctcctgccccagccgtggatg

SEQ ID NO: 110481 - DNA, 122 bp, Homo sapiens
ttgttgtcactgttggagcgcagcaggacccggggggcggccagcgtgttggggggccgccgccggcggttggagtacgccggggcctctcggaagggcactggggagaaggacatggagag

SEQ ID NO: 110482 - DNA, 122 bp, Homo sapiens
caatgagctcttctcctgctcgaaaagagccagcctgctgagcttgctgccagggcccgtcgcactgcctgcgctgtttcccgtcgcactgcctgctctgtgtttcccgttgcacagcctgt

SEQ ID NO: 110483 - DNA, 122 bp, Homo sapiens
atttaccaaagaaaaataaaaacatatgtacaaagacttgtacgccaatgtccatagctgcgttatctgtcataggccagaacaggaaatgacccaaatgtccatcaactggtaaatgaata

SEQ ID NO: 110484 - DNA, 122 bp, Homo sapiens
ggtccctggacaggtccggttgctggtcccgtgcccatgctgctaggggagcatggggtgcgctccgcctccagccaacgtctccgcatcggtgcccttgccatcgccgggggatagagcag

SEQ ID NO: 110485 - DNA, 122 bp, Homo sapiens
tcaatgtggcataaatactgcggcagcattcttcgaaaaccgcattttcaaatttatccccgtaatcaatgtgggcctattaaaaaaccaaatcatgatacaagaaacaaccttggaaaagt

SEQ ID NO: 110486 - DNA, 122 bp, Homo sapiens
gaccagcggcggctgggaaaggcgggcatggggctgtcccggggggcaggcgggctggcccgggagggggcaggaacagacaccggcagcgctgtgggagaggagaaccgagagggcctcca

SEQ ID NO: 110487 - DNA, 122 bp, Homo sapiens
cctggaggccagggagggaggcagtgatgcccaggcaagtggcgggacctgcccacctcccggaggccgaggagggcggcggtgatgccggggcaggggacgagtctgcctacctcctctcg

SEQ ID NO: 110488 - DNA, 122 bp, Homo sapiens
gacgcccaggggactggagggacgcactgagcatgtgcagatcagctcggtggtggctgccgcggccggaggcgagggcccggtgctgatgcgaaccgccggctcggcctcagcccgcgcgt

SEQ ID NO: 110489 - DNA, 122 bp, Homo sapiens
tggcagtgtggtgggcaggacggcccttttacatgcagccagtggctcatgcccacatcacgccaaccccgggatgccacgcctcggagaaacccgtggtgacaggagagatgggcaggaga

SEQ ID NO: 110490 - DNA, 122 bp, Homo sapiens
ggcccttagtggcgctgggtggcaggggctggagcaacctgtgggaggggtggtcactcacggcagaaggccggggtcctccagtccacgcacacacccttgtccagacaggcttgggcgta

SEQ ID NO: 110491 - DNA, 122 bp, Homo sapiens
acacatggggtctccatgtttttacaagtagggaaagcaaggctcagaaagatcaagtggcgtgcccagctggacacagactattaaatggggcggcgacgacgaccccagggcttcctcac

SEQ ID NO: 110492 - DNA, 122 bp, Homo sapiens
agcgcccaccctttctcctcccgcccccagcatctggagctgctgccctgctagaggctgcggcgacaaaccagcaggaaaatttctccccgcggctgctctggccagcccttcagccccag

SEQ ID NO: 110493 - DNA, 122 bp, Homo sapiens
cgcctcagcgtggcggacaacgcgtccccaggaaagtcaataagcagcacgctgccagggcggcctcagcgccaaggtcagggccagggctctccagacagctctcacccagcaaacaccag

SEQ ID NO: 110494 - DNA, 122 bp, Homo sapiens
aggccaagcaacgtgactattacagatctatggattcacagcactgctttactattattccgtacttatttgcttatatttataatatagaaataaagaggcagcaacagttagccactaca

SEQ ID NO: 110495 - DNA, 122 bp, Homo sapiens
cgcagcctcttaggtttctccattgtgattggaaatccgagtaccgcctacccctcccctcggctcgctcaatccccttcaaggacaagggctcaagtatgcacactccctcccccaccctc

SEQ ID NO: 110496 - DNA, 122 bp, Homo sapiens
ggcaggcggaggctgcgcgcctctcgcacctccacgcccaccctcccgccgcccccccctcggcctgaaagatctgcgtccacaccaccctgcacccagggcccgtcaggttttgcagaagt

SEQ ID NO: 110497 - DNA, 122 bp, Homo sapiens
ggggcggcgcaggtgtcctgccctggggatggggacgaaggctgaccgctccgatgctgtcgcgcccccggctcccggtcggcctttgtcatgtctaccgggagagcgaaggtccgtgcgcc

SEQ ID NO: 110498 - DNA, 122 bp, Homo sapiens
cgaactcccgacctcaggtgatctgcccgccttggcctcccaaaatgctgggattacaggcgtgagccactgtacccggcagcttcaaccttttcataatcacaagttgggaagaataaagg

SEQ ID NO: 110499 - DNA, 122 bp, Homo sapiens
gatcttcctacttcacccccgtggttctgctatgtccaagttcagactgtaaacacactacgtgtagatttatctaattaaaatgcagttcaccagctgtgtgatgcttatgtcaatgaatg

SEQ ID NO: 110500 - DNA, 122 bp, Homo sapiens
ctgggggagttttctccccaaacacacttaattgccaagaagttgatcctcccctgtggccggtggtacagtccgtcaaaatgaaagaaaactggctttgccccggccaggagggggaaggg

SEQ ID NO: 110501 - DNA, 122 bp, Homo sapiens
gaggtgaccgtgtcagaatcttagctgctttcaaattccagtgagaaagagcctgaggcccgggatgtccagtgactgctcgaagtagcccagactgaatgagaatctgggccttcggagtc

SEQ ID NO: 110502 - DNA, 122 bp, Homo sapiens
gttcctccctcacagagctttcagcaagatagatggtcattcttctgtcctcactgctcccggcataaggggaccccagggctggatgacttccctaaagaggaatctctcagggtttcctg

SEQ ID NO: 110503 - DNA, 122 bp, Homo sapiens
gtaattctggaaaggctgacagccagcagtaggtaatggaaaaagccagtatcctctgcccgagaaattaaggtgtgtattattcaggtggttaaagaaactgcctaccacaacagcaatag

SEQ ID NO: 110504 - DNA, 122 bp, Homo sapiens
ggattacaggtgtgatccacctcgctggaatgcagtgacgctgtctctgcctactgcactcgctgcctcctgggctcgagtgatcctcccacctcagcaccccaagtagctgggactatagg

SEQ ID NO: 110505 - DNA, 122 bp, Homo sapiens
aaataaggaacaaattgacaatttcctgccccggcttctcctggctgcccgggcgagaggcgcgcactcacctagcctggcgtccaggaggtcggcatgagacagcatcgcgcaccgctcca

SEQ ID NO: 110506 - DNA, 122 bp, Homo sapiens
attttttgtagacacattagagtcggttgaggccacacctgcggccacagactgcgaccgcgattgcagggaggagcatctgaggtggtcacggggtttgcccagctcacaccaactgcagg

SEQ ID NO: 110507 - DNA, 122 bp, Homo sapiens
ctgcgcccggaatccggggcctctccttcgtgaccccggagtgggcaagtgacgagggcacggccagaaacgcattggcgtcaaggaaaccacgacccatcttcctggaaggaaacttgggg

SEQ ID NO: 110508 - DNA, 122 bp, Homo sapiens
tgggaagcgcgtccggaggccccagcagagcgagggagcggctgtggcctggggagcgagcgcctggcgaattttatacccgaccggggcgtgtctggtacgcgaggatccgcccccttctc

SEQ ID NO: 110509 - DNA, 122 bp, Homo sapiens
acagactgaatgagagcgacacaggattctaaatgccatgggaattcagaggcgtggaagcggttaataacgaatgaattctggggtagttgggaaagactccctggagcagatgggccttg

SEQ ID NO: 110510 - DNA, 122 bp, Homo sapiens
acggagttaaactgcgccttctggaccgggtctgaacaatggagactgcgctagcaaaaacgccacagaaaaggcaagttatgtttcttgctatattgttgcttttgtgggaggctggctct

SEQ ID NO: 110511 - DNA, 122 bp, Homo sapiens
tggccagagatgatttgatgatgcccttcgggacttactggcgagggacttaggcagagacgcccagacacgaaacggggctcggcccagggctctttcctccccagcagccccgcgtcccg

SEQ ID NO: 110512 - DNA, 122 bp, Homo sapiens
ctaacatgtcctgcattcctcaatactctgctttattttctgcatcacacagtacaccatcgatgtattatttacttgcttattctgttaaaagataattttcccaaaaaagtatgtcatga

SEQ ID NO: 110513 - DNA, 122 bp, Homo sapiens
ggacaggcttcctaggatatttcaagcaacagcccaaggctttttgttgatttcaaaacccgcttaatcaagattcaagtagtaagtaattctgaacattttggagaaatcaactgttattt

SEQ ID NO: 110514 - DNA, 122 bp, Homo sapiens
tttatttcagttctaacctcagtccagaaacatatgtgaggttgtttccctcttcagccacggctacaataccggaaaatgctagtttttatttatttttttaagtagtgcttcctaaatgg

SEQ ID NO: 110515 - DNA, 122 bp, Homo sapiens
aaggcctctaaaatgtagtctatctaaagaagcagcctacagtgttaattctatggcatccgctactcagagaaacccttgctgagtgctgtgactgtgtcctgcctgccaggttaagtatc

SEQ ID NO: 110516 - DNA, 122 bp, Homo sapiens
agccgttcgagattctgtctcccatgttcttgaggttcctaaacccctaaaccaggacaccgcacacccgggacgccaccgtaggatagagggggtttgtcctaaagaaacactgtcacgtc

SEQ ID NO: 110517 - DNA, 122 bp, Homo sapiens
tgtgtgacctcagctgcatgggagtggtttttctcccccatcattcatgtacactttatccgcccactttcttcctacttgtaagctcaacttggctcatcaggaaccttaaccctcaggcc

SEQ ID NO: 110518 - DNA, 122 bp, Homo sapiens
tgaggccttcccgagggcggggtcaagaatgcaccaatgcccgggacagcagccaacccacgcctgttcctgggcaaatcccgcctacaggccgggtcccagcttgcagccgtcggagggtg

SEQ ID NO: 110519 - DNA, 122 bp, Homo sapiens
gctgcacaggcaggtaagagctggctttcccctttcctctcagagccgtggccagagcaccgccgccgggcagcccgggctcccgttgcgatgcagtcaggatggaaatgatcagagaccat

SEQ ID NO: 110520 - DNA, 122 bp, Homo sapiens
gtgactgatactgcctctgttcaaaaaaacaaaatgaaacaaaaacgaaacaaaaaaaaccggtgtctctatatccagttcagctttcacctcgttgctgacctggcttcgtaactcaacag

SEQ ID NO: 110521 - DNA, 122 bp, Homo sapiens
taggggcggcaggagcccgttacaaggggcgggaagggaagggtcttacattcaggggagcgtttgcctcgcctgttaagctgtggcgtttgagggcccttgagtgctgcagtcggctgccc

SEQ ID NO: 110522 - DNA, 122 bp, Homo sapiens
aggtgggaaaacctggaactgaggaccactgggtcacggggcggggggatcagtcaagggcgacacacattgagtccttgggggtttgcaaggaagacacttgaacagttaaactgatttga

SEQ ID NO: 110523 - DNA, 122 bp, Homo sapiens
ctctcgtagtggatggcatgggagaaagctcctctccgccgtgcctactccagttcctctcgtagtggatggcatgggagaaagctgctctctgccgtggctactccagttcctctcatagt

SEQ ID NO: 110524 - DNA, 122 bp, Homo sapiens
ccaagattccacatggcaccatcgactggagcccactatagaaacagacatactcactcacgtccacacccacttgctatgaccaaactcttacaggctgcagacagcatgcctaaagtggg

SEQ ID NO: 110525 - DNA, 122 bp, Homo sapiens
gggtcccccgatagctgaagcagcggtgctctcattggctggtagttcgtcctgacgaggcgggaccgcgcttgaggaagcctcctacaattggcaggaatctacgtccgtcaccttgcacc

SEQ ID NO: 110526 - DNA, 122 bp, Homo sapiens
gtcaggtactcaaatgtgaacttcctcagcctggaactgaagaagccattgttttcttcccggttcaggtcactgtggcatgctttgtaaaagaagtctctcttcccggaggttccaggtgg

SEQ ID NO: 110527 - DNA, 122 bp, Homo sapiens
tagaaatggatgaaattattctactcagaaaacgtaaccctaacatacggccatactatccggaacatgcccaacctcctctgatctcagaagctaagcagggtcaggagaaaatgtaaccc

SEQ ID NO: 110528 - DNA, 122 bp, Homo sapiens
ctctctctctctccgccccccactctcgcactcccccatcctcctctctccccctcccttcgcagagccacaggaaaagaggaaagtcggcttcgactgccatcttttggggatttcgaaaa

SEQ ID NO: 110529 - DNA, 122 bp, Homo sapiens
cactgccctctggtggcataatgttgctattgcacagtctcctttcaaagcatcctgtaacgtttcttcttgtcagtcatcctgttgtccatcctggaaaaatagaattcttctcaaccttc

SEQ ID NO: 110530 - DNA, 122 bp, Homo sapiens
atgtctgaacttcaaccctcccctttccatcccaactgcggtcgttttttttcaggccatcgccctttccagcgtgggcgattcctgcctagcatttgtccatgtgtgtcccgtcctacacg

SEQ ID NO: 110531 - DNA, 122 bp, Homo sapiens
atctctggcctaccgcagtggccccggctgtctgcacattttttgtagacacattagagtcggttgaggccacacctgcggccacagactgcgaccgcgattgcagggaggagcatctgagg

SEQ ID NO: 110532 - DNA, 122 bp, Homo sapiens
ggtcgacaacaatagcgttggccctcggtacgcgtgggggactcaagggcccagggcccacgacgctcagtcctgctaggaaaggcgtgacagctgtgcatcccccacacacatcccccatc

SEQ ID NO: 110533 - DNA, 122 bp, Homo sapiens
aaagcagaaaaagtgttttggggctaggcccttgagttcacacctccccaggggacccagcggaaggagagggattacctgctggagagaggcctgatggaaatttaagtcaaagcccaaac

SEQ ID NO: 110534 - DNA, 122 bp, Homo sapiens
gagagaagtgatactgtaagagtgactgactgtttccctttctctttattttaatattctcgggaaaaaggtctgcccctgtggaagttagatagatttcagatcattataacaaataactc

SEQ ID NO: 110535 - DNA, 122 bp, Homo sapiens
agggcctgacacagcctctggagtggcccctgggcctgtctggctgcagggttggttggccgtgggcgtgtgcggctcagggtttcctccacgccctttcacgaatgtccccacgggacccc

SEQ ID NO: 110536 - DNA, 122 bp, Homo sapiens
cgggcacttccgcgtggaataggaggcgccaggctcgtgctttgggatgccgggtggcttcggcggggtaacgagtcacgcagagacggcttgaggcaagccaagaaaatacgggtgtcggc

SEQ ID NO: 110537 - DNA, 122 bp, Homo sapiens
tagttgggactacagacctgtgctaccacacccgactaatttttgtatctttcgtagagacgggtctcactatgttgcccaggctggtctcgaactcctgggcttaaacgatccacttgctt

SEQ ID NO: 110538 - DNA, 122 bp, Homo sapiens
agcccagaagcctcagcacttaccgagtagagagctccgccgccgaacctggttaatccacgtgctaggggtggggccccccagggccctccggttcagctcctggctgatggccatcacag

SEQ ID NO: 110539 - DNA, 122 bp, Homo sapiens
cctgtgccctcgctgaggccctcagccggggggtagtacagagccatggctgctgctctccgatggctgatgtgttggaagagtgaaaaccgcaataggttttgaaaataatttagcagcat

SEQ ID NO: 110540 - DNA, 122 bp, Homo sapiens
tgtatgcgctgcgatccttcgactatgagcagttccgggacatgcaactgaaagtgatggcgcgggacagtggggatccgcccctcagcagcaacgtgtctctcagcctattcctgctggac

SEQ ID NO: 110541 - DNA, 122 bp, Homo sapiens
ggccagggttccggcttcccgtggctggagagtggaggctgcacagttctcacagggctccgtgactgcccagacctctgtaaggattctctgcgtttaagctcttttcagttttatccttg

SEQ ID NO: 110542 - DNA, 122 bp, Homo sapiens
gtcttctttgctgactcaaagttggaatcctccccgaccccttctgcgattctctggttacgtgtatgatgggaagaattgagtcctgtctagaggtttccttgacatgcacttcccacctt

SEQ ID NO: 110543 - DNA, 122 bp, Homo sapiens
gaaagagggattaaaagctacagtcagtgtctctgaggacagagctcacccaaagaagcccgttaaacaaactgatgtttccttaaaagttgtctgcaaaatgtgcaaactgacaaaatgtt

SEQ ID NO: 110544 - DNA, 122 bp, Homo sapiens
gctggaactccaacaggcacatgcctccaagcctggctattttttttttaactttatggacgcggggtcttgctatgtgacccaggatggcccatattcagtcttctattgaagcgattggt

SEQ ID NO: 110545 - DNA, 122 bp, Homo sapiens
gagacaggcccaataacaggccaaggaatcctatagcagcagaccagatattgtgctcctcgacccaaccagtaaatgttgtaaatgtttatctttggggagagaaggggaagggcccaccc

SEQ ID NO: 110546 - DNA, 122 bp, Homo sapiens
agaaatagaaagaaaactcaagaccctgatttgtgattcggcaggcagtctccatttccccgccccaacatgctaaccaaaaggtaggatagcttctctcctgagaatccccactgttgccc

SEQ ID NO: 110547 - DNA, 122 bp, Homo sapiens
ctgccttggtgccagagctactgccagagggagtcagtgcagtcctgtgtcggacacgcccgcagcctggacccgggatccccatccccctaggatctctgagcctcgggcctctgcaccca

SEQ ID NO: 110548 - DNA, 122 bp, Homo sapiens
ccacagggagaggccactggcgatttggttctgatttccttcctgcccaggctggcccctcggggaagcgcccctcgctggggcctcgccgcagggccagtgccctcttgccgccctcacgt

SEQ ID NO: 110549 - DNA, 122 bp, Homo sapiens
gctctgaggtcgggactggtgcaggcggatgcatgtatgtgcccgggtcccgcctccacacgcctgcctggcgccagcctgcctgtcctccctgcacccgcccccgctccctgcacccacct

SEQ ID NO: 110550 - DNA, 122 bp, Homo sapiens
aacacagcctgactcacgggagccaatctccccctccctgtagcctagaccttctgctctcggaaaaggaacatccaagggctgtggctttgagggcagcagcccagtcttcctactgtctg

SEQ ID NO: 110551 - DNA, 122 bp, Homo sapiens
ggggaggagggtggaaggcaaaggcaacttcggggaaactgggaaaggcggccgggacctcggggacactgcgtaccacccggcgcacagcccctcccgcgcaaacccgagccaaaggggcg

SEQ ID NO: 110552 - DNA, 122 bp, Homo sapiens
atatgttgtccactcacattctgttggcgaaagcaagccaatagccaaaccccaaatcagcgggagggaaagccagagtaggccagagagggaagagagaattatgaataagtaataccatc

SEQ ID NO: 110553 - DNA, 122 bp, Homo sapiens
atgccttgctgttcagaggccagtgcaccatgttttttcatgttgatttgaaacttccttcgcccttctttcaaaaggcctctgaactgggaatgagcctctgcgctgggaacattcttaaa

SEQ ID NO: 110554 - DNA, 122 bp, Homo sapiens
gtatttcttttatacttttaaatgttatttttgctcgtaatgacaggcaactagttgattcgctgagtcactgcagctgcagtaggaatttgggttttaccactgttactcatctcattttg

SEQ ID NO: 110555 - DNA, 122 bp, Homo sapiens
gcggctgtcccctgagccttctctcactgagcagaatggcaccgtcacggggtcgcatggcggctgtcccctgagccttctctcactgagcagaatggcaccgtcacggggtcgcacggcgg

SEQ ID NO: 110556 - DNA, 122 bp, Homo sapiens
ctcttcaccgctggtggatgtctgggccgtttcaccctttgctgctgttcatggcgctgccgggccgtccctgctccaggttcgggggaaaccctggcttcgtgtctcttggacgtaaatct

SEQ ID NO: 110557 - DNA, 122 bp, Homo sapiens
gggggtggggctcgggcggggccaggagcccggcgggaggctgccttcatcgagtaaacgcgtgggactgggaaggacccagtcatctgtatattggttaccaacacgtggccgcgtagaat

SEQ ID NO: 110558 - DNA, 122 bp, Homo sapiens
aatagcagaacaggagctatgaggaagatttggaggaattcggggtggatggtctggggacgaggcctcttgggggatgtcatactgtctttgagcatctggaggtgagtcccatgaaagga

SEQ ID NO: 110559 - DNA, 122 bp, Homo sapiens
tattcataagggcgtgggaagaagcattattagtaagcatgttgtggagggcggtgggggcgggtcctctgagtgcccaggcacagtagctgtacacacttgttcatacgtcacatgtctca

SEQ ID NO: 110560 - DNA, 122 bp, Homo sapiens
gggcaacttattaaatctctgtgggtcattttaataataattcttccttcacaagtgtatcgttagaccatagatagcaaaatgataggcgctcagtaaaaaccatgtgcttattctcgtgc

SEQ ID NO: 110561 - DNA, 122 bp, Homo sapiens
ctaagtctgcaagccctagaggagtttttccaggctgtctgtgaagcctggggaacacaacggcaactgggagatttgtgagtgaacactgtttcatcttaatatgcttctgaatttatttt

SEQ ID NO: 110562 - DNA, 122 bp, Homo sapiens
tgcttcattagagataacatacattccctttggtatcacaggaagttactggggattactcgacctcattacttagctaacgactggataaaatttcttaattgtttgaagtaacattgtat

SEQ ID NO: 110563 - DNA, 122 bp, Homo sapiens
ggaatcaccaggggggagagtcacatcttcctcatctttgggtttagacctgtgcattcccgtatggtcctcagtggcatatgtgcccattcatgttaaaataaatgaaaaaattcataacc

SEQ ID NO: 110564 - DNA, 122 bp, Homo sapiens
tagagttcatcctgggaaatggctcatcttgagggcatttcagtgcagtaactgagatttcgtctgctccttcccgggccgccgcactgcccatcccctgcccagtgatttccccaggaatc

SEQ ID NO: 110565 - DNA, 122 bp, Homo sapiens
ctccagccttccggtggcagtgactagcatgaacgccgcgccccccccaccccacatactcgctatagggcgactctgttacctcgtgagacacacattccagcgaccgcagttcgctacaa

SEQ ID NO: 110566 - DNA, 122 bp, Homo sapiens
gccggggcgtgggccgggaagaggggtctcctggtgcagcgggttggcgtgactcatcaccgccgcgcactctggcctctgggcctaggttaacagactcccgggtttcaggctgggcccag

SEQ ID NO: 110567 - DNA, 122 bp, Homo sapiens
ggagcaggtggaaagaaacggagatccagccttagtgccaaagtggttgccatagtgtctcgaaggagtagaagcacatcccagcttagtcaaacaggtgagtgatgtgaattcaacctaaa

SEQ ID NO: 110568 - DNA, 122 bp, Homo sapiens
cccctgcgaagtcagttccactctagttacaggattggggcggggccagaaaggcgcaggcgcaacgggcggcggaagtaggagcctgggaaggaagagggaacgggtcctggcggtgcttt

SEQ ID NO: 110569 - DNA, 122 bp, Homo sapiens
aatacgtgaagctttcagaggctgaaatcttccaatgcaaagggtgtttttaaagacacacggtgtccttatgtggcacttcatagttaccagaacacaataaaaggaactgctgggcaaca

SEQ ID NO: 110570 - DNA, 122 bp, Homo sapiens
ccacactgtatggactatccctggccacacctggggagtaggccaagaaggaaaatctgacgaataaagacccccgctgccccatagcactgagtggtcaattggctcctacccttcttggc

SEQ ID NO: 110571 - DNA, 122 bp, Homo sapiens
atttcgtttaataaataattacaagagattgtaaagtggagtgctttggaaaacatctaccgcgggagtccgtgcagccagccgtcacctgctcctaaggcgaacaactttattgttaagcc

SEQ ID NO: 110572 - DNA, 122 bp, Homo sapiens
tgcgcaccaccaagcctgagtaattacaatacttttttctttttccttttcttgattttccgtagagatggggtcttcctattttgtccaggctgatctggaactcctgccctcaaaggatc

SEQ ID NO: 110573 - DNA, 122 bp, Homo sapiens
tttcaaaatttatataatcttgtgcaagaactggtttgtcagggctgccaagtaggacagcgagccctaggagggcttctccaggtggtggtgacttcatgtttggaaagcaacagcaagat

SEQ ID NO: 110574 - DNA, 122 bp, Homo sapiens
agcctcctaagtagctgggaccacaggcatgagccaccacgccctgctaattttttatttcgttgtagagacggattttgccatgttgcccaggctcacaagcaggtttctaaagacaaaaa

SEQ ID NO: 110575 - DNA, 122 bp, Homo sapiens
cctcttgtgcaaaatgcctccccaccagggctgtgggtacatcagtaccagcctgggccccgcagagagctggagcaacccctcgaagccagggtgtggctcagagatggggggtccggctg

SEQ ID NO: 110576 - DNA, 122 bp, Homo sapiens
accgaaagacaagaaagggctctggtgagaagacaagacaccctggagatggtgtaccagcgtcattcactctgtattggagaagtcctgagggctgcgggtgtcaaggaaggtatgagtcc

SEQ ID NO: 110577 - DNA, 122 bp, Homo sapiens
tccaaggcgcggggctgggccagagctcggttcttgtgctacagtagaatagtgttccagcgtggctgcctctgcagcgcctggcaattctagaaattttgccatctgcagctcagctcagg

SEQ ID NO: 110578 - DNA, 122 bp, Homo sapiens
gcccccgcctcctctctccattccggaccccgcaaccgcgaggcgagagagcagcgccggcgaggcactggctgggctctgactgtcacgttaattccctgctgctttttctagtccccagc

SEQ ID NO: 110579 - DNA, 122 bp, Homo sapiens
tgcaagattagggttagaacggggcggggtcaacaaaggcctggaagacctcaagtctcccgcatctaacagcagcgttcccagaattaattaatgattcccgttcctcactgcacccagtc

SEQ ID NO: 110580 - DNA, 122 bp, Homo sapiens
cccagagggaggtcacggaggccggtaaatatgtaaacgtgggtttttcggtttccgtttcgcatgaatacaaaataaactgcggccctgcccacgctggaaagttcttccttaaagttaat

SEQ ID NO: 110581 - DNA, 122 bp, Homo sapiens
agaattactttggtgcagccgcccaagaggagcttggggaggacgctggcccgcgaggctcgtcgcagacaaggtggcggcgatgtccgggagccaggccagtgccgcggcggcagcgtcgg

SEQ ID NO: 110582 - DNA, 122 bp, Homo sapiens
ctggtgtcatgcatactttgcactaacttttcatttggttagtcactgaacaaatattttcgggttcccttccatgagccatcatgagtaagatagggcccctgctctgccagagctcaagg

SEQ ID NO: 110583 - DNA, 122 bp, Homo sapiens
aggctcgatttgaccatgagactgacgctttgctttcttgtcgcgtgctgacgtcacatacgtgcttatgcataggcgagggccacatgcatcctcgtttttgctttctaaagcagcgcatc

SEQ ID NO: 110584 - DNA, 122 bp, Homo sapiens
taaacatgcaccctgagccctcggagcctgcgacaggtggtgcagcagagctggattgcgcgcaggagcccggcgtggaggagtctgcgggtgaccacgggagcgcaggccgagggggctgc

SEQ ID NO: 110585 - DNA, 122 bp, Homo sapiens
gaactctagccatgctctgacttctcaagcagagttcagtcaccccgaggaggtgggacccgtctctctcctccccacaaatgaaccagttctccagtgatcctacttccttttttccctct

SEQ ID NO: 110586 - DNA, 122 bp, Homo sapiens
acagtacaaatgagcacgctgccatgtactggtttgagcagtaggggctgcatcgcacagcgctcgtcccccgggacttacactgcatgattccctcactgtatatcctcaaccctcccata

SEQ ID NO: 110587 - DNA, 122 bp, Homo sapiens
tggcgggaaatagcttaaaaattatattgatgctttgaggcctttccttgcagctgcttgcgcccacaagctgcagtcctttccccggtcagcagccggctgtcccgcaccccccggcagag

SEQ ID NO: 110588 - DNA, 122 bp, Homo sapiens
gaggcttctaaaagggcctcacatgccccgggagccacgtggatacagaacgagggttcccgctctcggagagttggtccccagttcccatgcagggagtggagcctctgagcactgccaga

SEQ ID NO: 110589 - DNA, 122 bp, Homo sapiens
cgggccaagcccagccaccgtggttctgggccgggaggacgggctgcagagacactcggacgaggaggaggaggacgacgaggaggaggaggaggaagaagaggaagaggaaggtggtggca

SEQ ID NO: 110590 - DNA, 122 bp, Homo sapiens
attagttcacatgtaagctggttgtttgaaagcacctagcatctctcttgtgtgctgtctcgccatgtgacacatctgctcccccttcagcttccaacatgagtaaaagattcctgaggccc

SEQ ID NO: 110591 - DNA, 122 bp, Homo sapiens
gttccatggcccgtcacactccggcaaaaatctcttcccaaaaaatcacccatgggcacacgtgccaggctgcacctgctcccatgcacatcctctgctgccctgagcaggcaccaggggaa

SEQ ID NO: 110592 - DNA, 122 bp, Homo sapiens
aggtgggtgtataagaaatgcaccaatatgggcaatctcagaatagaggtttgcagaaaccgttcctagaggcaccaaaacgtagttaaccgggtgtctgaccacatggctgccaggagcct

SEQ ID NO: 110593 - DNA, 122 bp, Homo sapiens
atgcccacccgcttgcagcccagatgacctgtggtgtggacgagttccgctgcaaggattcgggccgctgcatcccagcgcgttggaagtgtgacggagaggatgactgtggggatggctcg

SEQ ID NO: 110594 - DNA, 122 bp, Homo sapiens
actcccctgggatctgacttggctcttgcggtcgcgggcaccgtgaagccctggggtgtgcgtggctcctcctggtaggcgccctttcccggcgtccggcttggggtggtggtggcgttgac

SEQ ID NO: 110595 - DNA, 122 bp, Homo sapiens
gagaggagacatttgaagcttatgaaagactcagcgtgcctggatgggacgctgttgcctcgaggatgaagagaactgcaaggaactaaagttctgctgacaatttgaatgagctcgaaagt

SEQ ID NO: 110596 - DNA, 122 bp, Homo sapiens
cccacggcgcacagcttccccaccgcacagcccccagcgtacagggcccctgccggccgccgcctgcccaccctgcttgccgcccaccggtccccgctcggccccatctcagcctcatctct

SEQ ID NO: 110597 - DNA, 122 bp, Homo sapiens
gtgaacagcagtgagtcaggagcaggagagtgcggacgagagactcacagcacctacgaccgcgtcttcctccaatttaaaaattttgaaattaggccaggcgtggtggctcatgcctgtaa

SEQ ID NO: 110598 - DNA, 122 bp, Homo sapiens
tgactcaagcgggcaacctgccgggagtaagaaggcggcggtggcagaggaaagcttgcacgaagcaggcactcaagtgttgatgaaacgatgaaatctactgaatgcactgaaaggatgag

SEQ ID NO: 110599 - DNA, 122 bp, Homo sapiens
gtgggatctgtgcatgagtccccggctggagtgagtggttcctgagctccagtctgtgcacgtgtccccggctggagtgagtgtttgctgagctccggtctgtgcgtgcgtccctggctgga

SEQ ID NO: 110600 - DNA, 122 bp, Homo sapiens
tgggcgcggggactgtggctgccactgaagacccatggtgtgagcggcagcagacaggcccggcaggaaggagaaatcagggcccgtggctgcctggcttctgacgggcggtcctccactga

SEQ ID NO: 110601 - DNA, 122 bp, Homo sapiens
ccaatgggtggtggcagcgctgattctgttcctccaataggaaaggggcagaaggagaggcgttacttcctggagacttcaggtgtggtagccggcgccgcgcccatagccggacggggatc

SEQ ID NO: 110602 - DNA, 122 bp, Homo sapiens
gaaagcttttttttttccttgcaagaaagacttacaccccagcagctgctgtcatgctaccgccagtttagtcctgagtaagaaacccccaggctttgacacaattacctctcttgctcctt

SEQ ID NO: 110603 - DNA, 122 bp, Homo sapiens
cctgatgggacttcttaattagacctcatattctgggaggcatgagggcaagtgtgtttacgttatacagggaaacctgcaatattggagacttagggggtaacattcatatccaggggttg

SEQ ID NO: 110604 - DNA, 122 bp, Homo sapiens
gagcccgacagacgcagctccagggggttctcccgatcctagacccggggcgggccgtgtcgaaggtgagagaggagagaaatctgtatccctagctggactctgacccactgccggggtcc

SEQ ID NO: 110605 - DNA, 122 bp, Homo sapiens
gtagtccagggtgccacacatttgtcttcctcctcagtgagggggcgtgcacagggcagccgaagtcggcaactttcagctcgccctcaagccctgagagtagattatctggcttcatgtct

SEQ ID NO: 110606 - DNA, 122 bp, Homo sapiens
gccagtacagcctccggaagcagccctacaacaacctgaagcacaagttcccatggctgtcggaggccgggctgcgcctgctgcacttcctgttcatgtacgaccctaagaaaaggtgctga

SEQ ID NO: 110607 - DNA, 122 bp, Homo sapiens
aatgaacactgccgatctggattcaaatcctggcactggcaacttctagcacttccttctcggagcctgggattgctcactcatgagaggggggaatgggaatgctccctggcaggtcggag

SEQ ID NO: 110608 - DNA, 122 bp, Homo sapiens
ttccactaatatatctctcctacttcctagctttatgaagctctgatgtatactgtatcacgtacttttaatctttccttgatgcctgaacatgttcatcattatcaccatatagtgaccag

SEQ ID NO: 110609 - DNA, 122 bp, Homo sapiens
ggtgaagaggctggggaagtcagaggttaacctgggcgtcaggggacgttggagttgatccgtcagggtcccggggcggtctgggggcagtagagacggggcttgggcgcggggcctgagag

SEQ ID NO: 110610 - DNA, 122 bp, Homo sapiens
cagtaagagaagcatgccttattatcaaacaggtgcatggtccccttgtgggggggtgcccgtcacctgcgtccccgtgcgtcacggcgttgccgcacaccattaacacatcaaaacggaaa

SEQ ID NO: 110611 - DNA, 122 bp, Homo sapiens
aacccaagcacggaatagcgcagtcccttgcctaaggacacacagcgaggaagcgcccagcggggactcgaacccacgcactctggctccagagtcgatgctcttaatattatgttgagccg

SEQ ID NO: 110612 - DNA, 122 bp, Homo sapiens
ttggaacctgtgcacatgcctgcctttctgatgcacgtccatgttttctctgcacctccccggtggtgttggtataaaaagcaggcttacatcagcaagggatgattgtcgtctcatgcgat

SEQ ID NO: 110613 - DNA, 122 bp, Homo sapiens
agggctttgcagtagtggtggcagccgcggcagaaactggctctggggaagcaattgattcgtctactgccagcagcccggagttgcctacgcggactggaaaggaagggagaagggagaga

SEQ ID NO: 110614 - DNA, 122 bp, Homo sapiens
gccattgcggtattctttgcggtattcttgtccccgtcccccagaaggctcgcctctccccgtggaccctgttaatcccaataaaattctgagcaagttcagagtgccgcttcgagtctttt

SEQ ID NO: 110615 - DNA, 122 bp, Homo sapiens
tggtagaggcatcagtattgtatccaaggccatgcttatatttattgagatctagtcactcgtggtatattagaattgtggcggcatggttgtcatcttgaataatttcattagggacatct

SEQ ID NO: 110616 - DNA, 122 bp, Homo sapiens
tggttctgcaaagatctccaactcacagcttgattcaacaaatgtctatcatttgtctaccgagtactagggttggtagaaagccctgggacacagacatgacaaagacaagtccctgaagt

SEQ ID NO: 110617 - DNA, 122 bp, Homo sapiens
gtcacccactaacacacgctcccgctagcacggtgggcgtcacccactaacacacgctcccgctagcacggtgggcgtcacccactaacacacacggcagccctggactcttctttcctgga

SEQ ID NO: 110618 - DNA, 122 bp, Homo sapiens
tgacaggtaacaatagactgaagagcattctgggagaaaggagcagggagcaggaggtaacgctcttaggcaattcagaatcatggtgaagagtagtgtctggcatcagactgcttcagttt

SEQ ID NO: 110619 - DNA, 122 bp, Homo sapiens
acgctgcgcgatcacacagcggggagaacaccgggtaaacacacactggggaaaacaccgcgtgaacgcatagaggggagaaccccgggtgaacacacagaggggagagctccgtgtgaaca

SEQ ID NO: 110620 - DNA, 122 bp, Homo sapiens
gacaacagggtctgcaattagtgcttccacgcctgttttgcagtcaatattcaactgatacgtcttctacctggagtgcctaggtatctgaaacaaataatgagaaagctgtttcaggaatc

SEQ ID NO: 110621 - DNA, 122 bp, Homo sapiens
caataggagggctgactggtacttcctgttatttgattggcttaaaattttgcaaccgcccggacaaacttgccgaggattggctgagccttcagttttgaaaatcatagttttcgcccgcg

SEQ ID NO: 110622 - DNA, 122 bp, Homo sapiens
cgtggtaagtgagtccctgaacgtgccactgatgtgcagatggtgtggtgggtgcacagccgcaccggagcggcccccgaaccacacaggacagtgctgcggaggggatgtttcatgcgggg

SEQ ID NO: 110623 - DNA, 122 bp, Homo sapiens
cgctggctggggtggccggggcacgcagcaggcacatcccgacctgcgggccagcacctgcgccccatccctgttacacctgttctgaagccttcaagagcaaagactgatgttcatcatgg

SEQ ID NO: 110624 - DNA, 122 bp, Homo sapiens
agcagtgcccgcggccaaggacggtgctggactggatggtggagctggagggtggggcctcgcctcatcccgggggaccgcctagtggaagggctgccaggcactcagtgtccccctcgtct

SEQ ID NO: 110625 - DNA, 122 bp, Homo sapiens
cgcagaaggctcgggcctgggctcgcgccgcgaacgcgcatgctctgccgaggcccgccgcgggcgccagcgcaccctgatagagccatcacgaggcccattcagcagagctccagtggcgc

SEQ ID NO: 110626 - DNA, 122 bp, Homo sapiens
gactgggacaaagcctttgctttgggtctccagaaagattttcttcactgtagtaatatgcgaactgttccaaagagggaagtctttggacactggaggggactgaattggagaaggaaagg

SEQ ID NO: 110627 - DNA, 122 bp, Homo sapiens
tgggccgcggcggtgggcgcacgttccgcggggactcatgccacgcgcgtcccggcccgacgcgcaattagcagccacctccgcagcccgccgccaccgcctccctgccctcccgggctgcc

SEQ ID NO: 110628 - DNA, 122 bp, Homo sapiens
tcaaagccgacccccttctcctcccacctcgttttgtaaggaagtaatttcggggccgagcgctctgcgccccccgccgcgggtcggcgccgccgcgggtcgggagcgtgtccgggcaggtc

SEQ ID NO: 110629 - DNA, 122 bp, Homo sapiens
ggagagtggaaggggcacacccagtggtgccatttgtattctgcctcatctgcctactaacgatgtggtcttaacaagtggttgaatctctatgagccttagtttcattagctttttttttt

SEQ ID NO: 110630 - DNA, 122 bp, Homo sapiens
tttatcacatggtagccagtacagttgccagagaaagtaactgaagacaaacaattctgccgttgttaggaatttattgtcagtcacagagcatgtgatctggctaaatatagacttcagaa

SEQ ID NO: 110631 - DNA, 122 bp, Homo sapiens
ggcatgacaacatgtggccgcagtgccctagggggatgagccctgactcttagaacctggcgaggcccaggtcctcccaagttcgaatccgtctcatacgccccttctcagcctctcttttc

SEQ ID NO: 110632 - DNA, 122 bp, Homo sapiens
gccgttctctcctggggtagggggctgcgggctcctgcgggctcctgagcggttcctcctcgcagggacaccgggtggggcgctgtggctgggggtcctgcggctgctgctcttcaagctgc

SEQ ID NO: 110633 - DNA, 122 bp, Homo sapiens
tcgtggctgggagccagggctcctgggaccgttccaagtcccccgcctgggagtgggagtcgggaatgtggggcacgaatcttcccctccgggtccgttttccgaagtgtaacgggagctgc

SEQ ID NO: 110634 - DNA, 122 bp, Homo sapiens
cttccctccctcccgggcgctaaaaggaaaaccccccgacccccatcgcccatttctactcgtctccaagacaacatcgcggtccccgccagcttccgtaggagcctttcattccaggaagg

SEQ ID NO: 110635 - DNA, 122 bp, Homo sapiens
acgagctgtcactccgcgcccgccggagttgccgctcagttaccaacttcaacccggggccggccacggagcctcccgccgcccctaccccgcgtccccagcacccccgcgcccccggcacc

SEQ ID NO: 110636 - DNA, 122 bp, Homo sapiens
cttcgaaaagagggaggaggagaggaggcggaggggggaggaggggggcggagggggatgcggattgctctggaagcttggtttgctttcctgtaagttctgtgcacccggccttgtaaggg

SEQ ID NO: 110637 - DNA, 122 bp, Homo sapiens
tgaagggtctcctaactgcattaggaattgagagaaaggaaacatcctttctagttggaacggtaacagagattatattatatatagataaacaaacagatatttaagagaatgtagttatt

SEQ ID NO: 110638 - DNA, 122 bp, Homo sapiens
gtgagactgagcatgttttcttacttccataagaggttgtattacttttcggggaagtgtcggttgatgcttttgtccatttcctgtcagcaccccacccccgtgaggaaacgtgccccaga

SEQ ID NO: 110639 - DNA, 122 bp, Homo sapiens
gcaaagtgctgagtgaagggaatccatgacagattcagatgcacaaggttgaatattacccgtaaactacctgactctgctaaggtcttaacagcacaaaacgctatgtcatgcccagcttt

SEQ ID NO: 110640 - DNA, 122 bp, Homo sapiens
ctctgttttggcccgccgggccctcgtagggcgaggggagctctgggaacggggcctgtgcgcacgcgcatctgacggttgtctcggttactcatgtaagcggaaattcggtgggctcttag

SEQ ID NO: 110641 - DNA, 122 bp, Homo sapiens
tggagtgcaatggcgtgatcttggcccactacaaccgactgaacacctcctaggtttaagcgattctcctgtctcagcctcccaagtaactgggattacaggcgcccgccaccacgcccagc

SEQ ID NO: 110642 - DNA, 122 bp, Homo sapiens
ccaccaaatgtgccttgttgtggaacctgtccatgtgctgtaaacaatttcagtggaggccgaggcgcctgctgtcttctagtgaaatcctgggactcaacccacccccagacgcatgactt

SEQ ID NO: 110643 - DNA, 122 bp, Homo sapiens
atgcagctcacccggcggatgcaagttctcacggagtcgggcgcgtcctggcagtggccccggcggttctcctcgtggttgaacatgtccctgcagtacacgcaccgcgagcgctctccgtc

SEQ ID NO: 110644 - DNA, 122 bp, Homo sapiens
aaccacaaaaaaacccagaggagccctagctgcatctcactcatggcaagaagccaatctcgaaaggctacgtgctgtatgattccaatgataccacagcctggagagggcaatgccaaggc

SEQ ID NO: 110645 - DNA, 122 bp, Homo sapiens
gcctgagctctccaagggggtcttttccaggtgtttaaaagctcccaggagatccaggagcggcttgtccgggcctacgagctcatgctgggcttctacgggatccggctggaggaccgagg

SEQ ID NO: 110646 - DNA, 122 bp, Homo sapiens
gcatcaccgcgcctggccaggagtctagtttcaaaatgcagttgtaggtgttttcttcagcgataaccaaaaataagacaatctgggcaaaacttggggagcatgtcctatgcgattccttg

SEQ ID NO: 110647 - DNA, 122 bp, Homo sapiens
agcataagctccaatgaagcctcattggatatcccgtgatcccaccattgcactccagcccgagtgacagatactgtttcaaaagaaaatatcttgatggctctccctgggggcataatcag

SEQ ID NO: 110648 - DNA, 122 bp, Homo sapiens
caccccagcagtggtttctaccaggaacggggagtgggaggagaacttgcaggaagtcagcgaaagaatgtggctgggcagagcacatgtgaagcaagggattatttctgaactttaaaaag

SEQ ID NO: 110649 - DNA, 122 bp, Homo sapiens
caccgccggccccagccccaacgccaaatccagccttccgccgccattctcctctcctctcggccacttccgccctagaacttccgccttccgggggtcccatctattggcctccggccgga

SEQ ID NO: 110650 - DNA, 122 bp, Homo sapiens
catgatgcttagagattaagtgggatggggactgggcagatgatgctgctttggacccagcgagtgaggtgagactgcgacaagacagagccactgagcagtgacctgggggatgggcattg

SEQ ID NO: 110651 - DNA, 122 bp, Homo sapiens
ccgcccgcggccgccatgttgttgcgtcccagtgttgtgattagctcgcagcgctgcttacgctgccgtaagggggccttgccgtaagcggcggccgggaatggcgcaggggatgcgctggc

SEQ ID NO: 110652 - DNA, 122 bp, Homo sapiens
gggatgtgtgggcagccagctgggtctgttcaccagaaccatcttctcccctttgatacacggttggctacatgcttacacccccgtgccacacaggtgactatgtgactgagctctagaca

SEQ ID NO: 110653 - DNA, 122 bp, Homo sapiens
gttcgcattctactgtttctctccttgcaggggcccttgaatctttcttcaatctactctcgcgtctttcgtgatctcatccagtctcctggtgctaggtaccatgtcgacaccaatgtaga

SEQ ID NO: 110654 - DNA, 122 bp, Homo sapiens
cctaggccctgggacctcccggtcccttgcctgcttccggctttcgctcgcttccatatccgctcctctagtcgccctccgctggccccgccttcgtccccggaagattgggtcttctggcg

SEQ ID NO: 110655 - DNA, 122 bp, Homo sapiens
gtggggggctggggacgaggtactctttcccatacccttggcttttgtgtggcctggagccgctgatatagagattggagtgggacacgaggtattcctttcaaaaacacaaaggcctatac

SEQ ID NO: 110656 - DNA, 122 bp, Homo sapiens
gacttcctcttcctgcctcctgtcttctggagttgtgaccgcagggtggcccaggtggatcggcttcagaggccaggaggcagctctctgcagccgaagagcaggagcctcacccacggtct

SEQ ID NO: 110657 - DNA, 122 bp, Homo sapiens
gcaggagagctgcccctgccccgcacaaagcagctgctctcacagggttgcagggttggacgtgggtgggagccatggtcactctgcagccttcccagcaaccccataagcaccaaactccc

SEQ ID NO: 110658 - DNA, 122 bp, Homo sapiens
tactcggttacgaaacgcctgagaaggtggacggctgccacggggtgatgtatgctcctccggcggtgaaggaggtctacttttgggaacgtgtgcatacttcgagcattccttcggcgtga

SEQ ID NO: 110659 - DNA, 122 bp, Homo sapiens
cgacttggcagcacgtctcccccaaatgaggcaatcatacattttctgatcggggccggccgggccgaggctcattcctcagccagccacctcggcttccctatctggagacagcgcgggtc

SEQ ID NO: 110660 - DNA, 122 bp, Homo sapiens
ctctgcgccccgctgctggctcttgaacgcagagaggggccacagtccctgcggctgcatcgcgcttccctgcagtcccctccatgttcccctgcgccactgctccccttcctaaggctgcc

SEQ ID NO: 110661 - DNA, 122 bp, Homo sapiens
tctctctctcccccacccccacccccgctacccacccccaggagccacccgcccccgggacgtcctgagagtccagggcagaactagaggttaaagattttcatgcctcttggaggaaacag

SEQ ID NO: 110662 - DNA, 122 bp, Homo sapiens
aaagaattctcatcttttatattaaagaattaataatacagctacacttagaccaaatcacgagccaagctaggatagacacaactttgaactatctcaaaaacacaatgaggccaatatca

SEQ ID NO: 110663 - DNA, 122 bp, Homo sapiens
gcatgcctgtaatcccagctacttgggagactgaggcatgagaattgcttgaatctgaggcggaagttgccgttgagtcaagatcacaccactgcacaacagcctggctgacagagcgagac

SEQ ID NO: 110664 - DNA, 122 bp, Homo sapiens
ccgacaaagttttttcagctgctacaccacgtgcgttcccacagtccgggaagagggaagcgtgtagccattggtggacactgaatggctgtttgcagccgtgggcacagagagggggagga

SEQ ID NO: 110665 - DNA, 122 bp, Homo sapiens
cgcgggccgccgccggcgggcgggagggggcggggggcaagcccggccgggccgcggcggcgcccctcgcgcctcagtcgcacactccggggtcaccagactcaagcgccgccccctcactg

SEQ ID NO: 110666 - DNA, 122 bp, Homo sapiens
cggtctgcagcttcactcctgagccagcgagaccacgaacccaccagaaggaagaaactccgaacacatctgaacatcagaaggaacagactccggacacgccgcctttaagaactgtaaca

SEQ ID NO: 110667 - DNA, 122 bp, Homo sapiens
ttgataagcaaggggatgaaagtaccaagaggtgaaagcttataaaattgtggttatatgcgtggaatattaaggtttatgatttcagagatggagaaccattgcattataataagaaacct

SEQ ID NO: 110668 - DNA, 122 bp, Homo sapiens
tttcctggcagtagagttttaggactggctgactcttgatgcgtcctcctgccaacaggacgttggcaagcaaggacattaaaaatcttccttgagataatcctaacaaaaccctaaaaggg

SEQ ID NO: 110669 - DNA, 122 bp, Homo sapiens
ttcagcgctctgtcccacagggaccgtccggcccgggtccggcccactggttggggtccacggactcacctcactttgcaactaaggtcaaaaataagcattccctggggcacgggcggcca

SEQ ID NO: 110670 - DNA, 122 bp, Homo sapiens
acttaaaatggaaaaacaaaaacatgcaactggccaagttcgcattttctcctttgtcatcggatctaaaagtttatcctggcaccggcacaaagaagtaatgattccatcagcagcctaac

SEQ ID NO: 110671 - DNA, 122 bp, Homo sapiens
gccacagtttccccaccggcccctgccacggggtaaataggtctggggtggtgcttaggccggggaactgccccagctgcctgccgtccttgctgtggctgacggggtcgtcccggctgcag

SEQ ID NO: 110672 - DNA, 122 bp, Homo sapiens
actctgattggtgacgggtgaggcggcccgaaatcgtaggacttccgaaagcagcggcggcgtttgcttcactgcttggaagtgtgagtgcgcgaagatgcgaaaggtggttttgattaccg

SEQ ID NO: 110673 - DNA, 122 bp, Homo sapiens
cagggagagggggaatgggagtggctaccagatgagcccaggatagagacttcacatctgcgattgtagatgtggtcaaagatgcccgaagggctactgctggtaattggtggaacgtggat

SEQ ID NO: 110674 - DNA, 122 bp, Homo sapiens
accaggaagggtctggcgtcgatttacacttcctaacggggcagagacctggaacggccgcgagtgcttgggaataaaaatgtactgtaaacaaggccaatgaaataagtgtctcgctcccg

SEQ ID NO: 110675 - DNA, 122 bp, Homo sapiens
ccaggggtgctaagtcgtgaactacagccagcactcaagggggagaggaacccacactttcggagcactgagagggaacacagctgcaactgtgaagaaacatacaggagcaggagtctacc

SEQ ID NO: 110676 - DNA, 122 bp, Homo sapiens
ggcgaggtaagcgcggctaggcgggcgtggggcgggggccacaaacttggggccgttgggcggagttgggagcgcggcggggctcgcgggccggggtgcgcccgggaaggggccaggagagc

SEQ ID NO: 110677 - DNA, 122 bp, Homo sapiens
cccttcagagccagcgccggtggcggggtgctggcgcggcgaagctggagaggcggggctcgcgggcgcctgtaggacctccgctgggaggggccgtgctcgccggccacgcgccggttttc

SEQ ID NO: 110678 - DNA, 122 bp, Homo sapiens
cgttgctttgcggtgggcagctgcagagagaccaggacaatgccttttggttagctgggtcgcctagaggaccaaactaagccgaatgtccctgggctatctttcaaggacccaagaccaaa

SEQ ID NO: 110679 - DNA, 122 bp, Homo sapiens
agagtcatcccgtaaatatttatcaaacactgacttagacatcgacgcttcggcggtgaacgagacccgcaggtctgcggtgtgattacactggaggtttctaggaagccgtgctcctcggg

SEQ ID NO: 110680 - DNA, 122 bp, Homo sapiens
gcgcggtggctctggactaggccttttcctctgggttgtggatcctcttctctatgactccgtccgatccctagtctttcttccaaaacatcatgaaaccccccctccaggagcctttcatg

SEQ ID NO: 110681 - DNA, 122 bp, Homo sapiens
ggtgtcagagaggctgccctgcaggcgggaagaggggtcaaggatcctgttactgtcgggcgggcccagctctcagacaatgggaatcccattaacctccgctagggagatcaccatctgtc

SEQ ID NO: 110682 - DNA, 122 bp, Homo sapiens
tatgtttaatgtcagatagcaataaagtagaagctgccggtcgggccccgcggaaatgggcgagcataatctcctgaatcccgggtttgtggggccgctggtaaacatccacacgggagaca

SEQ ID NO: 110683 - DNA, 122 bp, Homo sapiens
cctggaggggaggacagcggaggtgctgtgagagtccttcagggccagactccgaactggcgccatcccggtgccccgtccctcttggcggccacccaccacttaccggtgcccccggcctc

SEQ ID NO: 110684 - DNA, 122 bp, Homo sapiens
gacttgaacacagatattcacgaagaagggacagatgttccctgacttaacgatccatgccggccacttcccctcgcgatggcacagctggctgggactgctgctccctgccaccgctcagt

SEQ ID NO: 110685 - DNA, 122 bp, Homo sapiens
aaatattctaagtgtgcagggccttctccttggcacttttcagctcttctcgagaagagccgggtccgcttttgtcaccagtgtcgtttcctccgcaaatgcagcagtgcatgaaaggccca

SEQ ID NO: 110686 - DNA, 122 bp, Homo sapiens
ctagaaatgctgcgaaaagggcttctggagtgggacggccctcgtttgcattatgtcccccgcttcttcctaggtaagcgcccttagttaaatcatttagccgttctaagttgcagtcttcc

SEQ ID NO: 110687 - DNA, 122 bp, Homo sapiens
ggataattactcagcactttggcagaggagagtcctagagaaaggatctgatggaggttgcgcatatttaaatgaatgctggttttgtgagaattctcaggtaagaccgggcaagaataatt

SEQ ID NO: 110688 - DNA, 122 bp, Homo sapiens
catctggggcattcagtcaggcagctctgctgatttcgatttccagaactgtctgcagatcggctggccataagctgctgctccgcatgcctctcatgcaggagccagctagcccaggtata

SEQ ID NO: 110689 - DNA, 122 bp, Homo sapiens
cgtgggcctcgatgagggccacagagttaccaaaaatgggagcaagcctggcccagccaccgccaaagtgggcaactgaccaagcacaccaagttcatgcgggacattattccaaagatgta

SEQ ID NO: 110690 - DNA, 122 bp, Homo sapiens
aacttcccaggctcaagggatcctcccacctcagccttctgagtacttgggactcaggtgcgagccatcatgctcagctaattttttgtatcatttgtagaaatggggttttgtattgttgc

SEQ ID NO: 110691 - DNA, 122 bp, Homo sapiens
cgggcggcgtgagaatccgactcgatctgaatattgatgatctcgctctccgagtctctccggggctgggggtgtgaggtgttgatcattgcttcttactgataagcagaatatttccagag

SEQ ID NO: 110692 - DNA, 122 bp, Homo sapiens
tacaggagagacctcccaggatcctgcagacagggcaggatgatgagaaggaaagcgtgtcgttcccagaacttgtctgtgaagattgggtggtttaataatattcatccgccatctagtgg

SEQ ID NO: 110693 - DNA, 122 bp, Homo sapiens
acagcttagaaagaagagggcaatggggcttcctcccagaggcggtgcggcacagaggagcgctcgcttcacaaggtgaccctagctcccaccgccaccgccgcggtcgcggtccagaccgc

SEQ ID NO: 110694 - DNA, 122 bp, Homo sapiens
gtcaaggatcttcaaggacgtctgaactccttgaccaccgttcttggacaggaagtggaccggtttaacaacctgctgaagttaattcatgtatgagagcttactttcatcattgctattga

SEQ ID NO: 110695 - DNA, 122 bp, Homo sapiens
tttgccccagctcccactgctttttgtcccccccgccgcggctttttgcccccgccccggcggctttcttccgccgcggctttttgccccgccgccgcccatttttgccgccgcggcttttt

SEQ ID NO: 110696 - DNA, 122 bp, Homo sapiens
tcgctggaaccctttgaccccctctccgcacctgaagaccggctgtgcccactgcccctgcggacgctccccagtgttcgcccttggagatttccaagtccagatctaaagcacccataatc

SEQ ID NO: 110697 - DNA, 122 bp, Homo sapiens
aacgcttgcccagatgaggactcttggtgataatgttcccagagaaacaaggttctgaaccgaacctttcatccattaaaccagtgtttgcaaagtggctccactgtatctccccatgtctg

SEQ ID NO: 110698 - DNA, 122 bp, Homo sapiens
ctggaacaaaactttctgtgctgtttctgcccctcccgtttgctgaggagggaaggcatgcggccgcagttacagcatgctggctgctcctcactgcccatttgggatatctagaggttgtt

SEQ ID NO: 110699 - DNA, 122 bp, Homo sapiens
cagttgcccagcgtcttaggcacacagatgtacacacaggttcataactgcacaaccaaccggactcgcattcaggctcacagcagaccctaaggcactcggacacacacgcttatttccca

SEQ ID NO: 110700 - DNA, 122 bp, Homo sapiens
agacccacagccgccgtggcggtggccggggtgtccggcagcagtaaacgctcctggtaccgctgctcgccctgctctgtgctccgcttccaggtttgcattacggtttcagctcacggcca

SEQ ID NO: 110701 - DNA, 122 bp, Homo sapiens
gcagccagcgcagcacccaaggcagcgcctccagagtcagagccaggcccacagccgccgcggccgccacctgccaactcaaccgtcccatgccgccgctaatccgggacccacagccacgc

SEQ ID NO: 110702 - DNA, 122 bp, Homo sapiens
tgaacttgcctgcaattcccaagcagtagaggaagttggtcggatgattacttgcaggttcgtgttgtctgtgaaaaaaacaagtttgattaaataatcagcaaaacctggatagtcagaaa

SEQ ID NO: 110703 - DNA, 122 bp, Homo sapiens
tcaaactggagaggcgcggaagcgcgtgtggagcgtcggactacaaatcccagcatgcaacgctctgggctgcggcggtgtattctggggccactgtgtctgccatctgcaggtttgtctgg

SEQ ID NO: 110704 - DNA, 122 bp, Homo sapiens
gcaaagaaaacagagaggaagtgaccagacaagtaggagaaaagcaggagaatgttgacacgtggctcaagtaacgaagtttcaagaaaaagagtcagagatctgaactatacactgagaac

SEQ ID NO: 110705 - DNA, 122 bp, Homo sapiens
caatcagatctgacttactttcttgtccactctccggatgcaaagagctgttctctgctacgaaacaattttcagagctcatctttattctcaagattccctagttaatctcaggtcaagtc

SEQ ID NO: 110706 - DNA, 122 bp, Homo sapiens
agcaggtctgtggcggaagtgggtgttcccgggtctctgctgcccagctgtgcccgctgccgtcttggggtcccggggtgcgcgggttgggctgggtgagctcagaggcaccttgtcggcag

SEQ ID NO: 110707 - DNA, 122 bp, Homo sapiens
acttgaaacgtcaagagaagcaaataactctcgcggcacctcaggcttggaatctcagaacgggggtgccttgatactcccagtgcgtgaggtcagcccccacgccctgttgagacacacat

SEQ ID NO: 110708 - DNA, 122 bp, Homo sapiens
agaagtctgttttaacacaatatattgaaaattacaagtttaaacactggtagctggagacggggtatcacactaccacatgacttctcagtgagtcataaaaaatagtaccggcttgttta

SEQ ID NO: 110709 - DNA, 122 bp, Homo sapiens
catcagaagcagttcacttgcagctggcagggccaacgatacaccttcagtgtcccccctcgggctctcctggattcctcagcccagcactcactatgtgagggggtctggtctgcagcaac

SEQ ID NO: 110710 - DNA, 122 bp, Homo sapiens
agcgcgaggcgccggtgggggcggagggggctgcgcggcggaggctcccgtggcctcggacgctcctcctagctagcggccgccgcccgccgccgcctgcgcctccagctccttcgccccgg

SEQ ID NO: 110711 - DNA, 122 bp, Homo sapiens
gaaagctgagcccggctctgggggatgctgaatcggtttaaagcccttgtctcagggctgcgagtttggcaacagttgggtttcagcttggccccagcaccagccgtttcctgtttgatgcc

SEQ ID NO: 110712 - DNA, 122 bp, Homo sapiens
aggcagtggggtgacggcgacaccaaaacccacagtggatgagtatcttttctacgggcacgtggcctgcaaggagcagagggaggatgagaacccagatctttcgaatgccagcccagtca

SEQ ID NO: 110713 - DNA, 122 bp, Homo sapiens
ctaccttgaggagctattcctccggtagttcaccttgttatgttccaagcagtggggatacgccagacaccataaggtagctgaaagagctgtctctcgtcccgtttttgacatatttattt

SEQ ID NO: 110714 - DNA, 122 bp, Homo sapiens
cattctggacatcctgaccaagataatgaacgtgaagagtgccaagcagtgtctggcacacgagaggcactcagtaaaagagagaccttcttgctaagatcactgagcccttctgggaggga

SEQ ID NO: 110715 - DNA, 122 bp, Homo sapiens
cgcggtgctgcgggtggacatcttcgggacgcgccctctcccctccccccacccaccggccgttttctagtctggggctgtgactttaatggtctggacctgcttcagattcgtacgcgagt

SEQ ID NO: 110716 - DNA, 122 bp, Homo sapiens
agaagggaatagatctgggtaggtttcctgtttttacagcttttgctgaggggaaggtcccggagatcagagctgcacaaacagcagttgaaacccagatcaaaatctttagtcttactggc

SEQ ID NO: 110717 - DNA, 122 bp, Homo sapiens
cgatgctaatggacaacaagaaatgtcttctccaataaaagaagcaacaggcccccaagccggaccccactccctgtttcatgccacagcctatcaaattaacattggatagctcttccatt

SEQ ID NO: 110718 - DNA, 122 bp, Homo sapiens
cagctttgtgggcggtggccgcagctcttccttgaagcccagtgtaggcgagcaggtgggcgagtatgccttctgcaggccggcgtcaaacaccgtgggtgggtgggccagcggtgggaaat

SEQ ID NO: 110719 - DNA, 122 bp, Homo sapiens
ccttaccgaggtaggaatgggccaggctatagaggtcagattcatccaggctggagtcctcgtcctccgggcctgggggctgctggggggcgctggttgctggtgggaaggtggccatcgtg

SEQ ID NO: 110720 - DNA, 122 bp, Homo sapiens
ggggcctggtgacctggcatccatccttgtggggtcctggtggcccagtgtctgtcctcgcgcaagcctcaccccaaccccacccgtcgccctcagctcagccttcttgttccccaggcctc

SEQ ID NO: 110721 - DNA, 122 bp, Homo sapiens
acgaggcctcatccttcagccctgtcctcagcctgcctagcccagtttcaacaagaatcccgggaagtcatcctgggcctccctgttaggcaagtttagcaagaatcccctacacttaatgt

SEQ ID NO: 110722 - DNA, 122 bp, Homo sapiens
actgcccagggacggggaacacagcccttggggtaggcacaggtatctgagtccctgaagcgaggagaatggagccagaggggtggagaggagagggaggaggcaggaccagagaggcagag

SEQ ID NO: 110723 - DNA, 122 bp, Homo sapiens
ggccagctggagttccgggtgggcatgggcttggcgggacccgcactcggagcagctggccggccctgccggccccgggcaatgaggggcttagcaaccaggccagctgctgcggagggtac

SEQ ID NO: 110724 - DNA, 122 bp, Homo sapiens
aaaccaaagggtcaacagcaaaataatatgattcttacacaaactcttttccacacaggacgcagaggcccagttggagaagggatttgcccaggtagcagagcccagacccaaaatccact

SEQ ID NO: 110725 - DNA, 122 bp, Homo sapiens
cccaggagaggcagggatagctgtctctctctgacatgcggggataaggcaattgacaaacgtcaagtgcgtggaccatgcccggcatccagtgagggcccagagagggtgcggtctcatca

SEQ ID NO: 110726 - DNA, 122 bp, Homo sapiens
gaaggtctgggctggcctgggcccttgccctccccacggtgggggctcacccagcctgggcgcgctggtcacactcagctctggccaggcatgagtcagcactgtcagcctgcgtgtggcca

SEQ ID NO: 110727 - DNA, 122 bp, Homo sapiens
cgttgccatcgctgccgctggtgccctcgaggtttccttcccataggtggccaggaactccggcgccgccgccatctttttcttctccgccgccatctttttcttctccgccttgggctcct

SEQ ID NO: 110728 - DNA, 122 bp, Homo sapiens
ccttgtgcgtcagaaagggatttcttgcttgtctgccggtctttggtgggtttctttctgcgtctctccctgggtcctgtccagctgtccatcgttttcacggcggttccactttgggtttg

SEQ ID NO: 110729 - DNA, 122 bp, Homo sapiens
caccccggcgtctgcagaggccgaggcgcaactggtgcgagggctgggtccttgcctcgccgtcagccccagctcgcggccgccggggctcgggccgcgcgcccgccgagtggcttttgcaa

SEQ ID NO: 110730 - DNA, 122 bp, Homo sapiens
tattgaacacattttgagttcttcagggcagtgcttattaaattcagcgtgcgtttggatcgcctgggaatcatggtaaaatgcagattccgatttgaaagtgctgtggtggagcctgcgag

SEQ ID NO: 110731 - DNA, 122 bp, Homo sapiens
caatgcgcaccagtgatcagaaaacccccaggaacccaagcaagtgggaactgagggggccggctcctcatcagctggggaaaagggaaaatgggcctcacagaagccataacagggtggaa

SEQ ID NO: 110732 - DNA, 122 bp, Homo sapiens
ccgcccccgccctgaccccgccctaaacatcaaacttagaaactcatctttcagcagcagcggtagagcagtgaccaggcgtctccgcgatgggccccggggacttccgccgctgcagagag

SEQ ID NO: 110733 - DNA, 122 bp, Homo sapiens
taagttcattcctttctaccctctttagacatccaaatcgaatggggagttctcagaaaccggcccctgtgtgtgttgcaagattggagcagttggaactgccactttaggaggacaagact

SEQ ID NO: 110734 - DNA, 122 bp, Homo sapiens
ttattctaatcctgtctactattcctcagtctcgaagctgcttttgaagccagaaagcaccggcagtggagtgcagaaagcttgctccagacattgaatgagcccacagaatacctcaatct

SEQ ID NO: 110735 - DNA, 122 bp, Homo sapiens
tgtggattggtcacagggagaaacctctgatctgttcctattggcccgtccgtcaagggacgatgatgattggtagggcagagcaatctgagtcctagttggtggagttctgcccggatgga

SEQ ID NO: 110736 - DNA, 122 bp, Homo sapiens
acaaagagccaagaaggaggtgtgcacaggaacccacaaaggctccacggagccctgggccggccagcctaggaccagaggggcagatgctgaccaccaagcagaggggcatccactgaggc

SEQ ID NO: 110737 - DNA, 122 bp, Homo sapiens
ggatcagctgggagctggatagcacaggccacaccccacaccaaccagtcggaatcccggcgactgccccaagccagcggaacctctccagccatgcccacgtgcagccgcttccgaagccc

SEQ ID NO: 110738 - DNA, 122 bp, Homo sapiens
cacgtgttgcggtcggaccccatgcgaaggagctaaggacacaaaggtgagcagcagagacgcggttccagctctcccccggctcccactccagcgggataggtagataatttcggtaaatt

SEQ ID NO: 110739 - DNA, 122 bp, Homo sapiens
agggtgcgaggggcagggccgcagggcaggtatcacacgagacgccccgagtctggactccgtgcagaacgcagaatgcggtgcgctctgtctaccacataagatggacagatgaaggtcca

SEQ ID NO: 110740 - DNA, 122 bp, Homo sapiens
ctaccttgacataatcatagaagcagccttcagaaggctccaggtcaaactgctggaagacgagcttcaccctgtatcccgtggggactgtgatcacagtggttgtttcaaagttgttgggg

SEQ ID NO: 110741 - DNA, 122 bp, Homo sapiens
cccacagctggctcctggccccaaggcagccacgggcaggggtcgtgatcgggggcgggacggggcccggacctcctgaccgccccccaccccccgccgagcgggggtgtatttgcatgtcc

SEQ ID NO: 110742 - DNA, 122 bp, Homo sapiens
caagagtgaaactccatctctaaataaataaataaatgaataaaaataaagtctgttattcgtttggctttatttttggtatacttaacaaaaattagctgggtgtggtggcacatgcctgt

SEQ ID NO: 110743 - DNA, 122 bp, Homo sapiens
ctgcttttttgccttagagttgtggggctcctctgccacacctcagaacctctcagttaacgcctaagcccatggcatcacgtcctatgataacatttccaaacacgataaaattaaaagga

SEQ ID NO: 110744 - DNA, 122 bp, Homo sapiens
gattaggagagaacgtgaggagcgaacagacctagccatgaataaccaacaaataaaactcgaggaaataaaaaggaactcaaatggcatgcgaccaacggaagacatagcttctgtactct

SEQ ID NO: 110745 - DNA, 122 bp, Homo sapiens
aatcctagacccagcctttactttgaacatctggcaggcctcagggaaataatggagattcgtgtctgtaaacagtctttgcagatgctctgatgaaaaggtgccctaagaggcccagaaca

SEQ ID NO: 110746 - DNA, 122 bp, Homo sapiens
tttcctgtcttttaactttgtttacggtatcttttcatacaaaagttttaacactttttacgtaataaaacatactgtggtcctttatgaaaaaaaaagttatcttgactaaattaagagca

SEQ ID NO: 110747 - DNA, 122 bp, Homo sapiens
cccgtctgggatgtgaggagcgcctctgcccggccgcgaccccgtctgggaggtgaggagcgtctctgcctggctgccccgtctgagacgtgaggagcccctacgcccggcagccgccccgt

SEQ ID NO: 110748 - DNA, 122 bp, Homo sapiens
agtgcctagcagagtgcttggcagatacgctgggtgccaagaaagcaatggccaaatgcacgaattcacaaaggatggaaggaggagtccataggccagtgcacagtgcccaaaggacagag

SEQ ID NO: 110749 - DNA, 122 bp, Homo sapiens
ctcagccggagccggagctgggcctagctgtcccacgggccaccactacctcctttggttcgggagaaagctacgaccaagtacgcccagctcgggccttagaacttctgaacgggcagtgc

SEQ ID NO: 110750 - DNA, 122 bp, Homo sapiens
gggcctctccagctctgatccgagttcccggctgcagctggtttgggtctgtgggggcctcgcgcagggaagcggaggccccttctctaggctcctacatcctcctggcctgccccagcaga

SEQ ID NO: 110751 - DNA, 122 bp, Homo sapiens
ctgcagctgccgcaggacgcaacccccgccgctgccccgggctgcagaacccggaggaagcggttgccaagctgcagaacgcaggacccccctggcagtccccgctgagcgtctcgagggat

SEQ ID NO: 110752 - DNA, 122 bp, Homo sapiens
tggctatccctgggtggaggcataaaggacttgaaactcaatgctgtttccacatagggccgggcagacaggctatggaggtgttttggcatccaaggaaatctatcagtttcccaagcttt

SEQ ID NO: 110753 - DNA, 122 bp, Homo sapiens
ggggctggtacccagacggaggcgactagcaggacttgtgctctaggcggctcttggtcacgtgacggccacgtcaccagtgcgctctggcccccaatttccactcccacaagcagtgcggc

SEQ ID NO: 110754 - DNA, 122 bp, Homo sapiens
ctctgtcatccaagctggggtgcagtggggtgttcacggctcattgcagcctcgacctcccggactcaagcagtcctcccaactcaactcccaagtagctaggacgacaggcatgcaccacc

SEQ ID NO: 110755 - DNA, 122 bp, Homo sapiens
cactgaccgtccacactcaaatatgtgcgtgtccacactgaccgtccacactcaagtatgcgcgtgtccactgtgcctcagggtctagagcattaatttaacccatgcaattatttgcaagt

SEQ ID NO: 110756 - DNA, 122 bp, Homo sapiens
ctgtgacatcccatccccctgaaaacccttggtctgcagtgacttgctcaaataagagcacgctgctgccaccacagaccattttagcaggagagagaggttcagctgctaattcgaggctg

SEQ ID NO: 110757 - DNA, 122 bp, Homo sapiens
catggagacagaccgtccccttcctgccttcctttcctgatggtgagtgcactgggtggtcgtaaggaagttgatgtatctcaatttcaaggatattcatgttccattttctggccaatttg

SEQ ID NO: 110758 - DNA, 122 bp, Homo sapiens
ccctccagacctcggtggcctcgcctgtaaaacgaggatagtgctgggaacagtagtatccggtgctgtgggggcctgaatgattaacttccttatgacgccaggaaccgccctggcctgag

SEQ ID NO: 110759 - DNA, 122 bp, Homo sapiens
ctcgagaaaggtgggaggggccggggcagtgtcagggccgctgtgcacatccgtgcaggtcgtgcactgactggcagcacacatctgagatccagcccgtgctccgctcatcgggttgtgaa

SEQ ID NO: 110760 - DNA, 122 bp, Homo sapiens
ttgcactggctctttcgagacctcagcaggtcttcccttctgatttgcacttacgagacgcgttcagattcactgcttcaaaggacttcagaaagtagttgtcagatcttaacaatcttgaa

SEQ ID NO: 110761 - DNA, 122 bp, Homo sapiens
ggacacgccccctgatccaaaggcccgagaagctcttgcacaggacagcctctggaaccccgcgccattagcgcctgcgccgtctctaggccccgccccctcacccctccggtcctggagct

SEQ ID NO: 110762 - DNA, 122 bp, Homo sapiens
tctgaccctgtgggaaatatgctcccctgaatgcatgtgcagtttaaatcaacaaatacccgaaccttgaaataattcaacatgatatttgattaattgtgtgcatgcttgggcatatgaac

SEQ ID NO: 110763 - DNA, 122 bp, Homo sapiens
ctttcttccttcgtttcttccaagtatgtacctaatctaccctattccaatgacactgtacgttgctcaaaacatttaaaaaattcctcttttggaattacttgcagaatcacgattttttt

SEQ ID NO: 110764 - DNA, 122 bp, Homo sapiens
acttcctgtgtgccaagcactgaggctgggctgagggtatagagagataaagatgacaaacgaagcagacatgttaaacaataactaaagtgtgataaatactatctttgtacgatgtacac

SEQ ID NO: 110765 - DNA, 122 bp, Homo sapiens
caaaatggctttctttcccacgggctgatggcagaggaggcgacagcgcagctgagcgagcggccagcagggggcgcggccctgccgtcctcacacccaccccggacacggagacgcggggc

SEQ ID NO: 110766 - DNA, 122 bp, Homo sapiens
gatgagataatggcagtagaattcataacaccctgcagggtgtattcagccaacacttagcgcctacaatatgccaggcgctaagggttttaccaccactatctctttaataatgcaccata

SEQ ID NO: 110767 - DNA, 122 bp, Homo sapiens
tgtgtctaccagacacttgctacagtgatttattcacccttctagtactttaggtaaggtcgtcagaagacaccctactattaggtctaaattcttgggaagagttgaaatagtttcagaga

SEQ ID NO: 110768 - DNA, 122 bp, Homo sapiens
ggagcggggcccgggcttgtgtgggcttgtgtgccccggggacgcgcacgtaccttgtcccgcggcctgagactgcgctgcaccgcgcggaggccgaacccagaggaggcggcgtggcgccg

SEQ ID NO: 110769 - DNA, 122 bp, Homo sapiens
ccttgtctgccctgggctgtgccgccccagctctgatcagctcaggacacttgcaggctccgtggtactgtacattaactctgcagcagcctggctcagctgcagagactgctgcctgacag

SEQ ID NO: 110770 - DNA, 122 bp, Homo sapiens
tgttttcagaatgccctatctgcgaagcgtaataaaacgaggtatgccatagtacagtggcgccgcgaccgacaaaggaaagcctccgggaggtcaaaagagataccagagagtgcgtcccg

SEQ ID NO: 110771 - DNA, 122 bp, Homo sapiens
ggtgcatgcagcctgatgccggctcacagtaaatgctctgcaggtgcgagctgtgtggcccgcggggcgggggatgctcacttttggcccccctctgtgacacgccctggaagtatttgtgt

SEQ ID NO: 110772 - DNA, 122 bp, Homo sapiens
gaccaaccagccggcagcccccgaagcacatggctgtgtgggggcagaacctgctgtctccgtgcatgcgtgccctttcggccctcctgggacttgcctccgggctagcagcactgctcgag

SEQ ID NO: 110773 - DNA, 122 bp, Homo sapiens
ggaactgtcaaaatggggaaatgtgggttgtctgaattctgagttcagggggcagtccttcggaggctgcatttggtccagttgcccctgttcataggggctgccttgtttctttcccttct

SEQ ID NO: 110774 - DNA, 122 bp, Homo sapiens
acacagtttcagggatgctccttctgcattagaacagagcatcttgactccctggagattcgcacactgcaaagaaaagagaaaagtcctggttgtaaggttcataattttgttcaaattag

SEQ ID NO: 110775 - DNA, 122 bp, Homo sapiens
tgcgttctggcagaacccctgggaccaggggggcctggcagtgattatcttattcatcaccgctgtcctgcttctcatcttatttgccatcgtgtttggtttactcacttccacagaaaaca

SEQ ID NO: 110776 - DNA, 122 bp, Homo sapiens
agcgccgggcctcctccggcaggggcgctgggaactcgcggatggccggctctcgtccagcgcccgatcccgcgcccacctgggcctgcggcgctggaacttttcttaggaatacccgctac

SEQ ID NO: 110777 - DNA, 122 bp, Homo sapiens
gtgcttatttaagggaattaaaaaaccaaggttaagtaactggtattggaactgttggggcggctaatgtaaggaaaagcattggactaagtgttagagtctgtagtttgaaatcctacctc

SEQ ID NO: 110778 - DNA, 122 bp, Homo sapiens
cagctcttccgggagcttaaggcttctgacgggggccagcccaggcttggagtgggagggcggggagggtgcactgacttagccttaccaccaggtggcgacacgaacacacccaccgggga

SEQ ID NO: 110779 - DNA, 122 bp, Homo sapiens
aggcctttttcttcttcatctagttttctgttttcccatatagtggcaggcagatcggcacgcggttatcccggtcagggtttacagcagtggcaggctgccctatgcagtttaacagcggg

SEQ ID NO: 110780 - DNA, 122 bp, Homo sapiens
tgtgaggatattttccttcccatgcccaggagagagatcattaatctaatgtgtcactctcgtcaagctcagaccatagccttgaatctttctatagacatccctttagatattgaagaaca

SEQ ID NO: 110781 - DNA, 122 bp, Homo sapiens
tggttttatagaactgtagaactgccacaagtaaagacacaattaatcattagtgacagacgaagggatgtttggcagaacacagatgtgttgccaatctataggccattaagtgacgacgg

SEQ ID NO: 110782 - DNA, 122 bp, Homo sapiens
aaaatttgcaaaactttccacagtactttcttgaattataatactgaatgttttctgttccgatagagaaaagtgaagcaaatatgtgaggaatgaagtgatctagtgcaagttggtaattc

SEQ ID NO: 110783 - DNA, 122 bp, Homo sapiens
aaaggtcacattgaatgtttctgtggtcatttgctttctcacacatgtgggtttcaagtgcggctggtgccatccctctgagcagacgctgaaagagaaaacttctgagatagcacttgtga

SEQ ID NO: 110784 - DNA, 122 bp, Homo sapiens
cggcggccgggatgggggccgtccgagcggatggcggtgtccctgaggatgactgtgggccgcacgctgcaccaggtctccacccggcctcccgcatcgggctccgtctgcatggctgtgtc

SEQ ID NO: 110785 - DNA, 122 bp, Homo sapiens
gcttggtatctatttctgcaagtgtctttgggcagtccgatttcctcttgcgtgtctgttcgttgcacgtgagctccgcccattgcgttcacagggttctggcgcctctagggaggcctcgc

SEQ ID NO: 110786 - DNA, 122 bp, Homo sapiens
atataaaaagcacatttattttaaaaagatcaggacacatagctggcaaaggatttttatcgcacatcagtgacaagagcagcctaagagagtatgaatgccaaactatagtcattcctgaa

SEQ ID NO: 110787 - DNA, 122 bp, Homo sapiens
tgagtactttcctcccacgcctctgctgctacctccccgcgggcccttcccggccagcttcggatcagaggttagcgtggcctcgctgcccagttaggaactgcttctagagagggcagcca

SEQ ID NO: 110788 - DNA, 122 bp, Homo sapiens
ctgggatactcactgtgtgctcctttctaccttcatgaaccccctggattctgatcctgtcgccttactgaggtcgatgggcctcacttgctctggctagcatcttcttggcctttccctgt

SEQ ID NO: 110789 - DNA, 122 bp, Homo sapiens
aggcgggcttgggccgcaggttacctgctcccggaggctcacaaaggcagtgccaacaggcgctcattctcagcaatgggtgaaagtaagaggaacctgccctccctcctctccacacctcc

SEQ ID NO: 110790 - DNA, 122 bp, Homo sapiens
ctgtccgggccgaccttgccgccgtcgcgctgcgtcgccctgctcctgctgcgggtggaacggctccacgtggctgtctacctgccgcgtgaggctctccaccagctccaccctctggctct

SEQ ID NO: 110791 - DNA, 122 bp, Homo sapiens
agaaacgctgactcctgggccgactccctactaccccagggtgggcagggccccgggccacgtgaccctgctcgctgcagtctttccgtgcctgcggctcctcgcattcatctcccacacga

SEQ ID NO: 110792 - DNA, 122 bp, Homo sapiens
agtagtaatggatgttggggaagaggcggatgcatttggtacatggttaagcagatctaccgtatgcagtgccccgtgctgggttctgaggatacagcaattataggatttattaccttaga

SEQ ID NO: 110793 - DNA, 122 bp, Homo sapiens
tgtagccagaaccattgctgtgacaggtttaacatgttcccagaaactctgaattttgtgcgatgccatctctgatagggacaatgtgatgaacaatgtctgagattgctaggtgggcttca

SEQ ID NO: 110794 - DNA, 122 bp, Homo sapiens
ctgggtgtgaacagaaacgtgtgaggagcttctcgcttctgtccccaccttcctttcctgcgtgtcctgccctcctccctccagcgctgccccaagtgcccggccgccccctcggacctcct

SEQ ID NO: 110795 - DNA, 122 bp, Homo sapiens
tcaactccttgaaaataaattggataaactttgttgaaaaaccctctgactgatatgtatcgccttaggttctgaacttttcactttttatcttacttaatgaacccattcattaatttgga

SEQ ID NO: 110796 - DNA, 122 bp, Homo sapiens
aaaaaaaaaaaaaaaaagaaacgaaaaaatgaaagctggctttgtataggtgctggggagcgcaaacacctggcctccccaagaggctggaggatgaggagggtcaccgactgagcccacct

SEQ ID NO: 110797 - DNA, 122 bp, Homo sapiens
tcatgggagaggtataggtccataagaaacaaagtcatcttaccaactggatatctgctccgagctgctgctgcttcctcttcctttttttggggggtgggggccgattttggaagggcaaa

SEQ ID NO: 110798 - DNA, 122 bp, Homo sapiens
ccgaaggaaaatctagttccttcgggcgcctgggactcctttctggaggatcagacgagtcgggctccgcgaagcccatgcgggctggaggatcggaaaccacgcgggagaggatagcgccg

SEQ ID NO: 110799 - DNA, 122 bp, Homo sapiens
tgtaaatcgagtaaggcttatttaatacagcgtctggcatacaccaggcattcagtatggcgccagtcattaacaataggtggttactaactgcgattcactcaaaacaatacagatgcaca

SEQ ID NO: 110800 - DNA, 122 bp, Homo sapiens
cagggacaagaatatcaaaatctatgacatgtacgtaggcctcgtaaacctcagggtggccggcaaccacacccagtggtatgaggtgaacagggtgatcctgcaccccacatatgagatgt

SEQ ID NO: 110801 - DNA, 122 bp, Homo sapiens
caaggcacctgtaaagtcacccagccctctggcggcttcccgtttacccagggccagcaccgagggcataaagggcgttctaacccacataacagaagacattgcgttgctattctgtactt

SEQ ID NO: 110802 - DNA, 122 bp, Homo sapiens
tgcctttttaaataaatacagtttaatttacaaaattaagcttgcatgcactctttcagacgcagatcaaaaaagtaactgtttatacttggcattgtgagatccagcaactttaaaaagtg

SEQ ID NO: 110803 - DNA, 122 bp, Homo sapiens
actgtattttatgctgcagaaagatggcattatgcctacgcttggctaactctaaataggcgttccactgacaggagcatctggagggaccttagaaatccaacatgtatctgggcccctac

SEQ ID NO: 110804 - DNA, 122 bp, Homo sapiens
cgaccccgctaaccccagccagactgccaggtcaccaggccggatccaggagcgctcggacggcccactccccagctccgcagcccccggcccaccccacagccccccgagtccactgcaac

SEQ ID NO: 110805 - DNA, 122 bp, Homo sapiens
gcggcggccgtgggtgccgagggccgcgtgaagagcctgggtctggtgttcgaggacgagcgcaagggctgctattccagcggcgagacagtggccgggcacgtgctgctggaggcgtccga

SEQ ID NO: 110806 - DNA, 122 bp, Homo sapiens
aagctgctcggcatcagtggcaatacctgccagctagcctaggaaactgacaaaacacctcgtccttaaaacatcccttatttacctaaaggagagaactgttctcaggctaagctcccttc

SEQ ID NO: 110807 - DNA, 122 bp, Homo sapiens
ttgcacccccaagcggcgagccacacccaccccggaaggaagacgagatacaggacatctcgctccatgggggaaagacgcaggtttattttgcccttcacacacttcttttccaaaggatt

SEQ ID NO: 110808 - DNA, 122 bp, Homo sapiens
tggggccacgaggatgttcaggaaccgaggtggagatggtcgcatcggtgtgaaagtgcccgttgcctctgaaccttgcactttgtttacttactcattttgagacggggtctcgcccggtc

SEQ ID NO: 110809 - DNA, 122 bp, Homo sapiens
acttctcccagaaacttttgggcgcaaacgccctcaagtccggatcattggaaagtaactcgaagagaggagagaactagcgcaagcgtagcctcaaggcggccgcaatcaccccgccccgg

SEQ ID NO: 110810 - DNA, 122 bp, Homo sapiens
gtttctcctcagggagtttgaaactgtaactagttcagagaagagggtggagggcagccccgaataccccagcatttaccaatagagcaaacagggactcaggagcctggggagtgaggtta

SEQ ID NO: 110811 - DNA, 122 bp, Homo sapiens
gatatttctctggccaagtctaccctgcaacacgctggtaaaatgtaaaattccttcgcacgagagtgaagaggatgatccccaggtgcgtctctccattcccgggtcctaacgattcctcc

SEQ ID NO: 110812 - DNA, 122 bp, Homo sapiens
ttagggagcatccaacaagtggttctgagcccgagctgctcacagaaatcctagggcactcgctggccccacaggttctgattccattaatggaagtgaggcccgggcatcagcatttttaa

SEQ ID NO: 110813 - DNA, 122 bp, Homo sapiens
agggtctcccttcaaaaatctgacagtaaatagggcctctctccctaggaagatatacatcgccactcctaaaaacgtgtgcacagaatttcagggattccctgatgcccagggaggaaccc

SEQ ID NO: 110814 - DNA, 122 bp, Homo sapiens
ccgccgctgcatcccccggatggggccggcctgcgtgggtggggacgcaggcgccctgtccgccgcccctgccgggagcagcctgaactccccagacccgtgccagcttctccctgggacag

SEQ ID NO: 110815 - DNA, 122 bp, Homo sapiens
atttggtaaggaatgaggacggggcagcggcgacacagttgcacattctcaggaaacaaacgcgcaaatgatattcgcatgggatctggacagcacccagcggaggcttcggattcccacag

SEQ ID NO: 110816 - DNA, 122 bp, Homo sapiens
ggtgagagtcccttcttccttcctggcctgcccttctgtaatcatggcggctctaggcggcggatattggtcccctgctcaggtccgggccccagtttggggagttcctctgtcgtccctgt

SEQ ID NO: 110817 - DNA, 122 bp, Homo sapiens
ctccacgctgtcgcctggggctacgagacgccattattctgtttccggcagttttacttccgtttgtttaacagctggcccggaagtttaagtgaatatgcggcttgggctccaaaagttgc

SEQ ID NO: 110818 - DNA, 122 bp, Homo sapiens
taggacctgagcttggtctccagcaggtcctgctccttcatgaggctctcgagctcctgccggagctgccgcttctcctgctgaagctgcagtacctgcaggtgcaggacctgctgcgcgcg

SEQ ID NO: 110819 - DNA, 122 bp, Homo sapiens
ctcttagggaaggtacctggcttccccagtctctgccgcgggagcctgttgggtggcattcgtttccagcaacttctggggggtttccagtttctttcgagaggcaagacaaccgccccgtc

SEQ ID NO: 110820 - DNA, 122 bp, Homo sapiens
ctggctaccgccgctgcggctccgggccgctcgctgtggcgatctccgccaggccggccgcggcctggccgccgcccacggcctccccgagctcctcgctccgcctgcatctggccgccgct

SEQ ID NO: 110821 - DNA, 122 bp, Homo sapiens
ctcctcacctcccaggcgtggtggtggggcagagacactcctcacctcccagacgatgggcggccaggcagaggcgctccccacatcccagacagggtggctgggcagaggcgctcgtcacc

SEQ ID NO: 110822 - DNA, 122 bp, Homo sapiens
ccccaggaggagactaggtggcttagctcctcagcctaactactgcagaaaccaggagtgcgtcctccttttcggattcttgacgtcaagctccgacagccttggagcgtcgcaagggcggt

SEQ ID NO: 110823 - DNA, 122 bp, Homo sapiens
tgcgcgccggcacgagggtgttttcgacgttggctgtggggaaacagcaagcggcgtggacgaccgttgctgagctggtgtggaacgtctgtgatcaggtaggtgtagtctcgtcgctctac

SEQ ID NO: 110824 - DNA, 122 bp, Homo sapiens
ccgacctaagacgtggtaaactgaggccggcgaggagggaggctgagtccggggaccaggcggcccctcactgctcctccggcccatcgccccctgcgcctgttcgtacgggcagggccggc

SEQ ID NO: 110825 - DNA, 122 bp, Homo sapiens
tctccttgctgccgctggctagcacagaacatccagtccccgctgctgtactaagcaacacggaaccgggtggcacctagacttgttccctgtcgctgcagatgtagagtagtgtctttccc

SEQ ID NO: 110826 - DNA, 122 bp, Homo sapiens
tctttccttcgcactcccagggatgccgtccccaccaaaggggtgaagccatgaaccaatcggagccaatcagagaactccatctccccaaccacagcaatggatcacagcccggccgtcgg

SEQ ID NO: 110827 - DNA, 122 bp, Homo sapiens
tacctcactggctggaatggaaactcattgcgagcagagacaataggttttgctctcccgcggatcacgtcccagcctccagctcagcaccagacacttgagggcgcaggataaaatatctg

SEQ ID NO: 110828 - DNA, 122 bp, Homo sapiens
gcccacaagattcgagccctgggtatgtgtccgccttgctgacagcgagggcagcagctgcggggggatccgtcccgaatggccatatgctgtcagaacagtgccggcctgggagctgcatg

SEQ ID NO: 110829 - DNA, 122 bp, Homo sapiens
catgagaacatccctctgctgtttgcagaccgaggcccatgggtgcagaaggaagcgtgccggtgcagggcacgcagggccgatgggagatggactgaccagtggtctggaccgagcaggca

SEQ ID NO: 110830 - DNA, 122 bp, Homo sapiens
ccaggaaaacagaggccaagccagggctggaactcagagctcctgtgttcacagcagggccgtgcccactgcccaccctcactgcctctgcctccctccaaggcagccgatctacagcatac

SEQ ID NO: 110831 - DNA, 122 bp, Homo sapiens
gaatgtgaggccactgtgtggaggaagacaccacggtgctctactgagccatgaaagtcacgcctgacctaaacagaagactacgtcccctggctaaaagaggaaatagtgtaagtgcaccc

SEQ ID NO: 110832 - DNA, 122 bp, Homo sapiens
tcctccgctaatcacttcctcccgcaggctggctgggcggtcttgggtgcggctttggcccgccagacagccaggccgacaccgtagtctgtgtggcaggtccatctggccatggtgcgcta

SEQ ID NO: 110833 - DNA, 122 bp, Homo sapiens
ccccacccaccactgttctgggggcagcacagactggcttccccagccgcctgcctgcaccgaagaaaggcccagacagtagtgggacaaaacggcaccccatgagggcccaaggggtgagt

SEQ ID NO: 110834 - DNA, 122 bp, Homo sapiens
gggtgcagtagctagaaggcttcaggtaactccaaagccaacactgggtgaggcaacacacgccgcctcaggactcagcatttctttcaggctgcgttttcgtggcagacctacccagattg

SEQ ID NO: 110835 - DNA, 122 bp, Homo sapiens
atcgcgggcggtgcagactcagcaggggcgggtgcaaggacgaggcggggcctctgcgcccggccctcttcccggactataaagagagccgccggcttctgggctccaccacgcttttcatc

SEQ ID NO: 110836 - DNA, 122 bp, Homo sapiens
gacttaccatttcatgttttcacacatgtcaaagtcttgaagcttcggtcattagtcttccgcttcctaaagcaagaaactaaatgctgacttgtgtcgtttgccccagatgccaccggaaa

SEQ ID NO: 110837 - DNA, 122 bp, Homo sapiens
aataacaaaaccttggttttaattacaaaatgttgtttggtggctggtggatcaaatcaacgaggattagctagaggcaaactgcaaagacagagtatgaggcaatcaagaaaaacttaaaa

SEQ ID NO: 110838 - DNA, 122 bp, Homo sapiens
aagttgttttaattattccaggtcctttgcatttctatatgaatttcaggatcagcttctcgatttctacaaaatagcctgctgggattttgattgcagttgtgttgaatctatcgatgagt

SEQ ID NO: 110839 - DNA, 122 bp, Homo sapiens
ctgagtcctgccgggctgtgctaggggcttgtgcagggacgtggggagctggatctgagccgagtggctggggccaaataatggtaatggcagccaccacaagtgaccgtctgctgcttggc

SEQ ID NO: 110840 - DNA, 122 bp, Homo sapiens
tatagagcatggtgatgatgagtatagactctggagctgcgctgtctgggtcaaaatccacgctcttccatttatcagctgtgtgactctaaacaaacctctgtttgtgcctcaatttcttt

SEQ ID NO: 110841 - DNA, 122 bp, Homo sapiens
tatctgaaataactgttaatatttaataaagacatttaaaattttgactgttaacttgaacggtatttatacagaattaagattaaccaaatggtgtttgttagttggtagagataggtaat

SEQ ID NO: 110842 - DNA, 122 bp, Homo sapiens
gggttctgactgatccccctttccgcctgcacagccccgggtctgacagttcccatcagccgacccccaaatgaggcagcaggagggaagaaatcaggctgcgaaaagagaaaaacgagcaa

SEQ ID NO: 110843 - DNA, 122 bp, Homo sapiens
tccccagacaccaactccaagttcctccacggggatgtgggatttcagtttatgctcttgcgtccctctgcagccacaggccgcagagcccgcccccagggccccgcccccgctctccgggc

SEQ ID NO: 110844 - DNA, 122 bp, Homo sapiens
gcggtgggacccgggcgaccttagagacggcggcagcggtgctgtcgcggggacaaatgccgcagcgcttgtcacagccggcgcaaaaaaggcggggccccgggcggggcctcaggaacacg

SEQ ID NO: 110845 - DNA, 122 bp, Homo sapiens
gccggcgctgcgcggtcgccgagggacccacgtgcgggacgagctccccgggcccccacgcgccgccagcccgagccccgtctccccgcgcgtccctcctgcgccccctcctgggcaagctc

SEQ ID NO: 110846 - DNA, 122 bp, Homo sapiens
aggtagcctgcgcctgccgcctgcagctcagcagaggatctccaggttatcggaaggacccgtgctttggttcttctcattacaaaagctgtccctgcccagggtgagggacttagacgcag

SEQ ID NO: 110847 - DNA, 122 bp, Homo sapiens
ctggcatgggcacaggcaccatggtccctctgcccccacccctgccctgccccatcctcccgggccccacctcggagatgagcagcttcaggaagttggccttgtgccgcagcgggtcatgc

SEQ ID NO: 110848 - DNA, 122 bp, Homo sapiens
tttgaggagcctaccagggaagacaaacactagagcatgtgaaaactaaatcagaggttacggagtactactggaacataaatgtgcagataatcaactggaatggagcatggatgggcagt

SEQ ID NO: 110849 - DNA, 122 bp, Homo sapiens
cccgctgccaactcccggtgcaggaggaactggcagccgcagacgtgaggaaagcggccgcggcttcaaactccgtagtgcgcaggcgccacacaacgcgcaggcgccgcctagaagtgact

SEQ ID NO: 110850 - DNA, 122 bp, Homo sapiens
agactcataccacactcaggaaggcccctaactggtctaattcccagcagtggccttccccgcacccgcccctcgcccctccccgctctagcttcccgactttcgtggggaaggggcaccgg

SEQ ID NO: 110851 - DNA, 122 bp, Homo sapiens
cagccgttcctggtgggtctgcattcctgtcacgagctggtcttctgcagcctttgaacccgtcgcagctctcgctcatccatgagtctaatcacatctgctccatgcatgttcccaaatca

SEQ ID NO: 110852 - DNA, 122 bp, Homo sapiens
ggacagaagtcaacttgtcaaatcctcttcctatttctacttggagctcgtagtgagaaacgttggcggaacatactacttcactggctctagtggatggaggcgaccaggaaagggttggc

SEQ ID NO: 110853 - DNA, 122 bp, Homo sapiens
cctgtcttctccaccttctacgtttcaaccggaaatagtcgtacccatttaaagccacgtcggtactggcctcggtcccgccccccacactgcggaaccgtttccggggtcagggcattccg

SEQ ID NO: 110854 - DNA, 122 bp, Homo sapiens
aagagccctttgcagctttctttgtggcagtcatttgcaaaggggtttggctctcagctacggcggaggcagagggggcagcagcaccgcttccttctatgccgatcccgggcgcaggtcag

SEQ ID NO: 110855 - DNA, 122 bp, Homo sapiens
agcacagctgtggatagaagccgggagagctgtggagggaagaggaggaggagggagtctcggggcagccccagctgccaggcagggcctctgcaagtgagatgcagatccagcctgttggc

SEQ ID NO: 110856 - DNA, 122 bp, Homo sapiens
cacctcacgcctcctgcggcagtggcggcgaccctagcttcgctcgctttggggctgcgccgccgtggcctccaacaacgccggctcccattggccgaggctcctagctcctctctccgcga

SEQ ID NO: 110857 - DNA, 122 bp, Homo sapiens
atctgggagttccacaggctatctagggttatctggcctcccctccgttttccctcctaccgaagaagaaagcgtctgtgttagttgtgtctagtattagtttagccttacttggagtgtgg

SEQ ID NO: 110858 - DNA, 122 bp, Homo sapiens
aggatggtgactctgtccacacggccagcgaagtcccgctgaccccacggaccaattccccggatggaagacgctcgtcctcagacacatccaagtctacatacagcctgacgcggaggatt

SEQ ID NO: 110859 - DNA, 122 bp, Homo sapiens
ggccgagtccacgctgatgacgcagaagacggggattgtgagcggcttcgggcgcacccacgagaagggccggcagtccaccaggctcaagatgctggaggtgccctacgtggaccgcaaca

SEQ ID NO: 110860 - DNA, 122 bp, Homo sapiens
cgggcttgcccttcccaccagcccctgacatccaacttctccctaccaggagccccaggccgggacccaccaagggctggtgggtgcgtggtcaaaactagtgatcatccaggcacgacccc

SEQ ID NO: 110861 - DNA, 122 bp, Homo sapiens
gaggcgcccgagtcacccagccaagattcgagggtgacttggagtattttagagatgacccgaaaattggaagccaaagggcggctgcttcctgtatggcttctttatgcatgaggatgaaa

SEQ ID NO: 110862 - DNA, 122 bp, Homo sapiens
gtctaggacttcagaacttcctgtctttgttgtcatctgaccccaccccagatggctgctcgcactccccatgcacccagatagatggctaggatggtgcttggctctcggcaggggcttag

SEQ ID NO: 110863 - DNA, 122 bp, Homo sapiens
gaggctgcgtatgcccgcccctctggctgtcggagccgcacctcttcctcttccggcccccgtagcaattaggtttctttgcaggaggtgagattttggtacctctgtcctggcgtccggag

SEQ ID NO: 110864 - DNA, 122 bp, Homo sapiens
tccccaaagataagacttagtgagacgcccggtaatagggttatcccttcttcctgacagcgtctaataaagagcaaaaccttgcttccttaaatgctttcctaaaacaccaaacacaagcc

SEQ ID NO: 110865 - DNA, 122 bp, Homo sapiens
tctgcctacggggcaggcctgagccaccacaggatggcagggtctccagggtgcagggcccgcaatgcttcaaccctcccacgaccccagcaccttcagagaaaacggaccctcgtgccgag

SEQ ID NO: 110866 - DNA, 122 bp, Homo sapiens
gtcaagaaggaatggaaggagggggagccgacaagtccacgttcaccgcatctgcgttggcgattgcgctattgatgcgcatgcgcaaaaggaagaccctgattggtttgtgggacggtctc

SEQ ID NO: 110867 - DNA, 122 bp, Homo sapiens
aaactaacaaatcccaagtgacctatcacatatacaaacatacagggcagagtttggattcgcggtagaagaaagggaggttagacattaagaagaatggtctggtgatgacagttgtgaga

SEQ ID NO: 110868 - DNA, 122 bp, Homo sapiens
gcaaggtttatggggaaaagtagccagagagcaatccagttatcagcctcagccccattccgctcaggtacagctcgggaagtaagcccccaaccctagttgggtctggaccaacaagacac

SEQ ID NO: 110869 - DNA, 122 bp, Homo sapiens
gaaccctcgggacagaggcagggttctgagggcagggattccccctcgtcttggccccaccgcccgggctgggcactaaactcgggccgcggcggggcgagcgaggcgggctccggagggag

SEQ ID NO: 110870 - DNA, 122 bp, Homo sapiens
gaagaaggacgaggcggaccacgacggcgacggccccccctacgacacgctgcacatctacggctacgagggctccgagtccatagccgagtccctcagctccctgggcaccgactcatccg

SEQ ID NO: 110871 - DNA, 122 bp, Homo sapiens
gccagctgaggcacatgccttgggagctaagtggttgctgcccttgaccactatgaagaccggtgtgggaatgtgggaagggtcgctttggatgcacttgagcaggggtccccaacccctga

SEQ ID NO: 110872 - DNA, 122 bp, Homo sapiens
ccggaagtaaccctgccgggccaggagccgggaagaagagccggtgttctctctgttcctcgctagcagcttgggacattagcgccgagatgtgccccatatctgagctgccttcagctcct

SEQ ID NO: 110873 - DNA, 122 bp, Homo sapiens
aactgtttctagacaaatcggagtgactatgggacaagcatatggtcgcaggactttggacgcaggcagtgaggacacctatgagcgatcagtggggtcctacggcagccgtggaactgctc

SEQ ID NO: 110874 - DNA, 122 bp, Homo sapiens
cagggaccgaggcgggagcggagaggttgggcagagccgagcagccggtgcctggcgcagcgctgcagccgagcccacgtgcccgccgcggtccgcagcctgtgctcggcggcccccggggc

SEQ ID NO: 110875 - DNA, 122 bp, Homo sapiens
tggaattgtctggcacctcctctattctctgcctctaaaaagagtctaactgaaggcagacgatggagtggggtgatgtttgttgtgcacctaccataccaggactgggtcaggcatgctcg

SEQ ID NO: 110876 - DNA, 122 bp, Homo sapiens
tttccgacggcgaagggcgcccctgatggtcctcctggggacccgattttttgtgatgaccggccttaaatttaaaaataattttccataatgtgtattagaaaatagataattaaaaataa

SEQ ID NO: 110877 - DNA, 122 bp, Homo sapiens
acaccctggtcactggaggggtggttttctgagctaacttgtcacctttggctgcgagaacgtgagaaagactcagcgaactgacatttcttgctcatcatatggccacattcagttataag

SEQ ID NO: 110878 - DNA, 122 bp, Homo sapiens
gacgcggggatgactcagcaggacagaagggagggaagctccagacgccacggccctcttcgagatgaaagtacctcccatcctaagggactggcgttccaggaacagctgcgctggctgag

SEQ ID NO: 110879 - DNA, 122 bp, Homo sapiens
caacaagagtgaaactccgtctcaaaaacaaacaaacagcaatccctaaagccacgcggccgccaactccagggagctgatgcttccaaccactgcacgttgctcccgggctgtcgcagtct

SEQ ID NO: 110880 - DNA, 122 bp, Homo sapiens
tgcgcgacaccctctgtaagggagccttgctcccacagtcctccggatcgcttttcctggcgtggagccctcacatgcatttccttttggggagtttccttctgggctacgcacacgcacag

SEQ ID NO: 110881 - DNA, 122 bp, Homo sapiens
gcaccaccccctgggcttctgctgcaaggtggcagtgggggaatggggggtggagggcagcgtgtgagggtgcgggcagctctgacttgctgtttagaatcatttctccatcaacacctgag

SEQ ID NO: 110882 - DNA, 122 bp, Homo sapiens
ggccggtacagctctccacgcaaggcgtggtagcgccagcggagaataacagcccccagccgtagggcgccccacagccgcagtgcccagagccccacacacagcaggggtgacaggtgcca

SEQ ID NO: 110883 - DNA, 122 bp, Homo sapiens
cagaccgggtgcaactgaggaccctcccggtggtcacctgatcgtactgggggtatcagccggacaccccgcctccagaacccgctgcctctgtccagagcggcccagccccagcaggctgg

SEQ ID NO: 110884 - DNA, 122 bp, Homo sapiens
tctcacgacgtagagagaacgcggctcaaaggcgtgacctgtgatgttggtgcaatgaggcgcgtgccccatgcagacgtccccaggccccaggtgaggcacatgtggcctcacacacggat

SEQ ID NO: 110885 - DNA, 122 bp, Homo sapiens
cccgccccgcccccatccggcttcgctcgcgaagctgcccccactcgtctctgttcaccgcgtcctctagattctagaatctagaaactcatctaggacgcgaggtcatctatcgcggggag

SEQ ID NO: 110886 - DNA, 122 bp, Homo sapiens
tacagttgtgagccaaatgagactgagactagttcccgccctccaagagcttgcaagacccgcagtggcgtaaaaacactaacatcttttagtgatcgattctgcactccaggggttttcaa

SEQ ID NO: 110887 - DNA, 122 bp, Homo sapiens
ttcgtcctgcacagggttgtaagtgtgtgcagggaattccagactgagtgtccaatggagcgatgtgctgacctcagagcaggaaggggagcccagatcaggccaggcacgactgcaccaag

SEQ ID NO: 110888 - DNA, 122 bp, Homo sapiens
agatatttggttaaacattatgctgagtgtttctttgagggtgcttttgggtgaaattaacgtttcaattagtagactttgagtaaagcaggccaccctccctgatgtgggtgggccttgtc

SEQ ID NO: 110889 - DNA, 122 bp, Homo sapiens
tggcgggcccgaggggagccaatcggaaactgatgatgtgtggtgttggcaagcggattgcgtgagagcgggcaggggtcgcgggagcgcgatcgccgccgcggcggccggcagccaatggc

SEQ ID NO: 110890 - DNA, 122 bp, Homo sapiens
ggaggcaccgcccagagcgggtggagcgcctagcggggtggggtgcagagcgggctggggcgccgagcagggtggggcaccgaggctgtgttccttgttgctggggggatacagatgccccc

SEQ ID NO: 110891 - DNA, 122 bp, Homo sapiens
acaaggtcaaccttgagcagaccctcggggcctgtctgccactagagggagctcccagtgcggccatatatgccttctgggatgccgaggggctggggcccaggcagagggacccgtcctgg

SEQ ID NO: 110892 - DNA, 122 bp, Homo sapiens
ttctaatcactgcgctaagcatctgtccccggcaggcagcttgttcaatctagcagataacgaatgcagcccaatggtggctgtgctggcccttccccacgcacgcgaggagctagtgttcc

SEQ ID NO: 110893 - DNA, 122 bp, Homo sapiens
aggggtagcagagacggagatttctaacactgggtgagcccgcggtcgcaaatctcatcgcgatttcacctttgggtgaaaaggtgggagggaagcactaagtttcagcctcggctccactg

SEQ ID NO: 110894 - DNA, 122 bp, Homo sapiens
taacttttattttttccactttccatgcatcaattgtaactactttctcctgggtgaatgcgctgatctaagcattgataattctgtcttcccctgctctcaccccccatagctttattgtt

SEQ ID NO: 110895 - DNA, 122 bp, Homo sapiens
ttaaaaatacttttttttatactacaaaaagctgccctttttataaaagcaacataatttcgacagccctttgtgacgccaagggaggcaaggctcagagaggtaaaatgatttgtctgaaa

SEQ ID NO: 110896 - DNA, 122 bp, Homo sapiens
gggacaggccggccggcgccctctccctccccagagcccagcatctgagccctcggcgtccgcaaagtccagacgctgccactcagccctgaaactgacacgaaacggacaagacaagctgc

SEQ ID NO: 110897 - DNA, 122 bp, Homo sapiens
ggcacgctgaggatgaagcccgagcgattcttggtgaagtcgggctggggctggttgagccgcgtctccacggagacggtgcacttcttcccgtgcaggctgcactgtactgggttggtgac

SEQ ID NO: 110898 - DNA, 122 bp, Homo sapiens
tgaccttgtgatctgcccgcctcggcctcccaaagtgctgggattacatgtgtgagccaccgcgcccggcctatcctcactttgaacatgtggagtttgtccctttgtgacgatgtcctatg

SEQ ID NO: 110899 - DNA, 122 bp, Homo sapiens
aacgtgaccttctcaaagattccttttttactaggaaagattgttaaatccctctccctacgtcccctactcaatgactcatcggccccacggacttgttcgggagtgggagcgcctgtgta

SEQ ID NO: 110900 - DNA, 122 bp, Homo sapiens
ccaaggtccctgtcaaggaggaccacatctggcctgttgcactcttctcctttgccccaccgaagcctctgtcacactgtcacagcagcgggcctgccatggtctccccatgtaaggcttcc

SEQ ID NO: 110901 - DNA, 122 bp, Homo sapiens
gcggatgggaaggggcaaggacttctagacctttcctctcactttaactcagcagtggagcgggtgcctgggcaccagtcacggcagtgggaggaaccggctccagttctcaggctgtggag

SEQ ID NO: 110902 - DNA, 122 bp, Homo sapiens
acagccccatccgacacgggcggggggtaggttctaggttcagtcccttgaagcaggaatcgcgttcttctgaaaggccatttggcgatccctgaggagggagccaggcaggaaaagcgcac

SEQ ID NO: 110903 - DNA, 122 bp, Homo sapiens
tcgcgtcactgagtcgcgtcacggctattggcttgttcctactgtggcgtcattagagcccggcctccggctggggccacccaggcaaccgatatacacagagaaccacgtggaggaaaagc

SEQ ID NO: 110904 - DNA, 122 bp, Homo sapiens
ccaccccaggaggcaagtactgttaccatctccatttaaacagaggctcgggggcttttccgaggtcactgagccagcagacagtctggcttcagagcttgtgttcccagctcctgtgggaa

SEQ ID NO: 110905 - DNA, 122 bp, Homo sapiens
acctggcccaacaagaatatgaggcagaggcagagaatgccagaagagagccagggggcccggcaatgcagaccaccacacagattaggagtggacgttctcagcattttggccttgggaac

SEQ ID NO: 110906 - DNA, 122 bp, Homo sapiens
ggcgggcagaaagactgcattccagaggctagtgccagctcccttccttagatgtgtggccggagtgaaggcagagacaagctgtggggacagaccgttccgtggctccgtggggcccgggt

SEQ ID NO: 110907 - DNA, 122 bp, Homo sapiens
gcccctgcctcagggcgttttttggcaaggaagggaaccccaccatgcccggcgctgcgccgcggctgtagccctgggcccatctgtccctcgccggcaacgttagtcagcacattcctggg

SEQ ID NO: 110908 - DNA, 122 bp, Homo sapiens
cactctccaagcctgtgctgagcagtgtgagctttcagtggtgctgcttctgctgtgcgccgctctcttcaccaccttccttttcctttgctaccacttgctcttctaagtttatatttggc

SEQ ID NO: 110909 - DNA, 122 bp, Homo sapiens
gttcagacccggctcgggaagccgaggggctggctgcggggccggtgctgcggggccaggcgatttgctccccggaggcaggggcgcgacttcaagggcccgtgcgccgggtgcagcctttg

SEQ ID NO: 110910 - DNA, 122 bp, Homo sapiens
aaggcgcagataaggaaagtggctaaaactgaaaacaaggcttgatttgagttccctagtcgtcaatccttaaagaaaaacatgaagaattaacctgagtagggtatcctattgtcctatgg

SEQ ID NO: 110911 - DNA, 122 bp, Homo sapiens
acaagcatttgaccactgcagccggcctgggagtgttgacacttgaaaagcccaggcaggcgtgggcaggccatcagctatggcaacaggaaactgccccggagacaacactgagaaaacag

SEQ ID NO: 110912 - DNA, 122 bp, Homo sapiens
gagccttgcttcaggggccactgcctcggtccctcctccacgagcccgcacagctccatccgctccacatcacgtcactgcgggccccgccccccagcatagctccgcccctaacagcctcg

SEQ ID NO: 110913 - DNA, 122 bp, Homo sapiens
attcccccagggccaataccagctctctcttttgtcatttccatcagatcttttgttttacgatttctgttgcttattatccttattcctttctggtgtttataaagccaaagatgaggggg

SEQ ID NO: 110914 - DNA, 122 bp, Homo sapiens
ggatgaggatggagtctagagcctcccagagcctggagaggaggcctcggtcagccactccgtggacgtgggccacggtgacccaccatgaagtccccactagccactcgattccctgctct

SEQ ID NO: 110915 - DNA, 122 bp, Homo sapiens
cttagcgcaggtcacataggcgctttcagttctcgcgagatgagcagaagtacgggatagcggaagtgagcatgggtgggcggtacttccgggcgagattaatcagggcctgggaggtaaag

SEQ ID NO: 110916 - DNA, 122 bp, Homo sapiens
agtagttatcttgtgaccataaggattggggaaaatgggggcggggggggggggcgggtgcgtggggcgggtgcccagtgtgggatatcaacaacatacacagcggagccagtcacttagcc

SEQ ID NO: 110917 - DNA, 122 bp, Homo sapiens
taactggcattctctaagtttctacacgtgttgggggatgcagtgccgtgccacatttcccgtctccagcaagcgcagtcagattggcgacatcgcaggcaagaggcagggctggggctccc

SEQ ID NO: 110918 - DNA, 122 bp, Homo sapiens
agggaagaagggagggcaagggatggggcccttggcccccgcgtcctcagaggctcctgccggctcccaagagcgctctccactccacacatcgcgctagggtttgcactgccagccgcggt

SEQ ID NO: 110919 - DNA, 122 bp, Homo sapiens
tctctgcggcactcttctgcctggtgactgacaccttggaaatgaagtttatgacgtcatcgttgcggctggccaatagaaaaagctcccgcggagaggtgttccttccccttcgactcagc

SEQ ID NO: 110920 - DNA, 122 bp, Homo sapiens
ctggtccaggtaagagaccatggagtctggccaagcacgttggctcctgcctgtaatccccgcactttgggttagggttagggcaggaggatcacttggctccagcagttcaagaccagtct

SEQ ID NO: 110921 - DNA, 122 bp, Homo sapiens
aggtgtgcatgtacttgagtgtgatgataaatcatagggatgtgtttagttgtgtgtgtgcgtacgtgcgtttatccaaattttcatcagggctgttcggtgtatgtacacatgcatgcaca

SEQ ID NO: 110922 - DNA, 122 bp, Homo sapiens
cacatgtaatcccagcattttgggaggccgaggaaggcggatcacctgaggttgggagttcgagaccagcctgacaaacatggaggaactccgtgtctactaaaaatacaaaattagccggg

SEQ ID NO: 110923 - DNA, 122 bp, Homo sapiens
cgactcctgatgggccctagctcaggtttgttgtggcactccatttaagttttctgtgtacgataatagcaacaacaaaataggaattcacctaagaaacaagaagatacacaggtaaacca

SEQ ID NO: 110924 - DNA, 122 bp, Homo sapiens
tttctggcagtaccctggatttgatatttgcttggaaactattactatttcttagttttacgccatttgcaatcaggcgaagctgaggactttaaaaatcatccaaagtcgtcaaggtccat

SEQ ID NO: 110925 - DNA, 122 bp, Homo sapiens
ctcaattatacttgaaggtcaaagctctgggcaatccaataaatatgcacattaagaacccgatatccctgggttcttaatgtacattagatatgtttgttctttctttctttttgaattga

SEQ ID NO: 110926 - DNA, 122 bp, Homo sapiens
gtgagtccacgtaaagccctgaaaaccagagagatcgctgggaagtggcacagtggccaccggtgcccgagcgactcggatcacattctcaaagtgaatcaacgacaccaacatcaagccac

SEQ ID NO: 110927 - DNA, 122 bp, Homo sapiens
ctttctgctagagaggcacatcctgtcatagcattgcaccttgcagcaggggtggcgaaacgattggccacttgtacagttgcataatgggggaagccctcgtggttagtagaggtggatgg

SEQ ID NO: 110928 - DNA, 122 bp, Homo sapiens
ctcgacgttggggagcgaggctgactctcctgggagtgctggtacggagggcggcgggatcggccgtctgtcctgcggtccccacacctggaaagaactgcgaagtggacgcgtcgcgtctg

SEQ ID NO: 110929 - DNA, 122 bp, Homo sapiens
aggccctcccagtcttgcctgctccgaaggcctgtggaccagaaatggtctgatgaagctcgcgagcttacagcagagcaagggccccgcccccgcccccgccccgggggtgggtgggggaa

SEQ ID NO: 110930 - DNA, 122 bp, Homo sapiens
acctcttcagctgggatgtggacgggtgaccccctcctccccagcccaacctcgggcctgcgtctgaggtggcccaggaccccaagctgcagagcccagggaagagcagctccagagccctg

SEQ ID NO: 110931 - DNA, 122 bp, Homo sapiens
tgcccggtgccgttctgcctaaacatcaagcagaagctccggcagcaacagctgcagcaccgactacagcaggcccaaatgcttcgcaggaggatggccagcatgcagcggactggtgtggt

SEQ ID NO: 110932 - DNA, 122 bp, Homo sapiens
gcggggctgcgggctggggccgagctccgagcccgggaatactggtgggctgctgtttgccgggccgctcgggaaggaagaaactcagtaacaggagacagcgtcttgccagttaatcctca

SEQ ID NO: 110933 - DNA, 122 bp, Homo sapiens
ggggtactcatgccctgggactacctggcaacagggtgagggacatgctgcagccataggcgcccagaatgtgcatgggtgtgacttcaggctgaggccaaattgactaggcccggggtagt

SEQ ID NO: 110934 - DNA, 122 bp, Homo sapiens
gggtggggaacaggatagaaaacaatccaaaactgaatcaagaacagtagctctaggttacggaggtcataacattcctatttgaatgagggtagggaataatggagtggggcaaagacata

SEQ ID NO: 110935 - DNA, 122 bp, Homo sapiens
gggcgattgggaagagggcctggccagcagggggcggtagcgcaggcagaccgggttccgcggtgcctcgccggcttcggggtgggggtcaccgctcagaaggggaggagagcgagggactt

SEQ ID NO: 110936 - DNA, 122 bp, Homo sapiens
ttttattgctgccgggaggaggaaggggaagcgggggaagcgggggaggcgggggggcagcgtgttgtaaaatcagtttgaagtaaacaaaaagttatgttttccgaggggccagcagcgcg

SEQ ID NO: 110937 - DNA, 122 bp, Homo sapiens
cctctgcgaagagacagggaaagggggactcagttctcaagcgcttcacgggtccgctagcgagttcaaagggggccatcctgccataccccgccatgctcggatgcccggtgccggcacat

SEQ ID NO: 110938 - DNA, 122 bp, Homo sapiens
ttccacggtggggtttccaaattattctcaatggggtgaggatgtgtgttatcacacccccgagccatcagatgctgtcagaaagtgatcactctgaagtctttgtttcaaataagcacagg

SEQ ID NO: 110939 - DNA, 122 bp, Homo sapiens
tactgtgcagttaaataacactataaacagacatggtgtttctaacatctcacccacccacgcatacccctctcccaatcaggtaattttcgtctctcttgtctccctgaccacactggatt

SEQ ID NO: 110940 - DNA, 122 bp, Homo sapiens
agtgctgtgattatcattattgttcaagtgctattattattttgttgacatatctgcccccgcctttagattgcaggctcctggagagctgtctcctgcagtgccccagtgtctagtatgag

SEQ ID NO: 110941 - DNA, 122 bp, Homo sapiens
ctcttgccggcaatttcaccagatttttgatttcttatccagtctcacgggaagcctttccggcatctcccaccctaccgatcttcccgtctatctcgcctgctacactgtgagttcagaca

SEQ ID NO: 110942 - DNA, 122 bp, Homo sapiens
agtggaaggtgccaactgcatccctagccagggcaggagaacaaagagaggaacccacatcgtgaccacaaccatctcagccccgaacgacgctgctctcatagcgaaggtgttcagtttca

SEQ ID NO: 110943 - DNA, 122 bp, Homo sapiens
gggagtggggagtgcttggggtgggtgcagggcgggttggcgtcatctgtgggctgcaggcgcgggcgtggccgggcgataggccaagtgcggggacgccgggggggccttcacgggaggcc

SEQ ID NO: 110944 - DNA, 122 bp, Homo sapiens
gaggctggccagaaaaccacagttaggactaccaagtgggaaacatgtctctgggatgcacgtgagaaggttggcaaaccactccgaggtgtaggagagggctgaggctagtggatggacct

SEQ ID NO: 110945 - DNA, 122 bp, Homo sapiens
gctgcgttcgcccccgccagagctttgattggacgaatctcgacccgggccccgcctacgcgcccaagttccgttagcaggttcggttgctccagaatgccttttcgccccgaggggcggga

SEQ ID NO: 110946 - DNA, 122 bp, Homo sapiens
atgtggtccataaaaaccaccattaaagctgccctttcacctgatctgggtggggctaaacgaggaaacgagaagtttcctgtatgcttcaaaatataaatcaatgccaggaaattctgaaa

SEQ ID NO: 110947 - DNA, 122 bp, Homo sapiens
ttgacccacccctgcagctcagccacgcctcctagggaggtgggcagccttgcaggagcccgcgcgaggctgcagtaccgccctccgccacatgagggcagcacggcctacccgtgcagcag

SEQ ID NO: 110948 - DNA, 122 bp, Homo sapiens
agccacctccctgaccctgaatcattcaagcgaggagcagaggagctcttgactgggggacggggatgtgaggatccccagggcctcagaagttgttatcaatgttccagacatccccgcta

SEQ ID NO: 110949 - DNA, 122 bp, Homo sapiens
caaaagagcaggcgcgacctcggaccagctccgaggcaaaattcactcagcgcgggacagcgacagggaatccggccgcacctgtgcctgcagtctcattgctcggaacggcgcgccactgt

SEQ ID NO: 110950 - DNA, 122 bp, Homo sapiens
ctagcttttgatttaaagtgagagatgtgcgactcttcctatccctcgaacatttagaggcgtggactgaaattcaatattgttgtgtcttacaggctagggagacctgagaagagtgagag

SEQ ID NO: 110951 - DNA, 122 bp, Homo sapiens
cgcccgcgtctggagctccgattctgggaggtccccggcgcccacttcattcacccctctcgttgcagccagaatagggtcgcgccacgctctaacgttgagcccaggcccttcgcggcaag

SEQ ID NO: 110952 - DNA, 122 bp, Homo sapiens
cctaggggctgccggcccctctgcctcccccgcacctcgctcccttcccttccccgcacccggacttcgcagtcagcggttctcaacctctgccccgccccgccacgcgcgtccgccgccgg

SEQ ID NO: 110953 - DNA, 122 bp, Homo sapiens
gaaggcagctccctggcctccagaaactcacagtcagtggtgggagggccgtaacagacccgcgcagttaagaaccagatgatgatgttgctgtagtatagtttggagagtgcagagaagga

SEQ ID NO: 110954 - DNA, 122 bp, Homo sapiens
aggccgtggcccgtcggccccccgggggcaccagccctcccaacggcggcctcccggggccgctggccacctctgcggctcctcccgggcctccagcggccgcctccccctgcctggggcct

SEQ ID NO: 110955 - DNA, 122 bp, Homo sapiens
aaacaaaaatgggaattagatactagaatactaaaactcttctagaccaacccttttgtacgacaaggaggaaactaatattgctatggtttaaaagtgtcccccaaatttaatgtgttaga

SEQ ID NO: 110956 - DNA, 122 bp, Homo sapiens
gcagatgcgggacccacatttggcagcggtgcccggccactgtcacgagatggtggccagcgcatcacccacacgtgggccaggatggcagaggagatccacagagatggctccagcaggag

SEQ ID NO: 110957 - DNA, 122 bp, Homo sapiens
ctctggtacacgatctgggccaggaaccgaaagcctgctaggctgaggttagactgcctgcgtgcatctgcttaccccttggaggagacagtggcagagggagagagcctagaggactgagg

SEQ ID NO: 110958 - DNA, 122 bp, Homo sapiens
gccgcgggagccgtgggtggagcaagaggggccgcagtattgggagtggaccacagggtacgccaaggccaacgcacagactgaccgagtggccctgaggaacctgctccgccgctacaacc

SEQ ID NO: 110959 - DNA, 122 bp, Homo sapiens
tcccccctccctctggcccctgttctccaaggtccagagtcccagtggggttctggagcccgcccccgccccaaaacctggctcagggagcgacaggcgagaggggggaggggaagcctggt

SEQ ID NO: 110960 - DNA, 122 bp, Homo sapiens
tctggttccagggagactgggtccatgtgctgtaagcaagaagcgtccccacccaaggtccgtgtctcggtgtcaggttagaccatggctgaagatgcatctttgtccccgccagagagacc

SEQ ID NO: 110961 - DNA, 122 bp, Homo sapiens
ttaatccagacgcgaatttaacgaccgattttgatagatccgggaaattctgtccaccagcgtcacccaacacagcaacttttacagacaatgcgtggcgtccgttcctgctcacccaaagc

SEQ ID NO: 110962 - DNA, 122 bp, Homo sapiens
cccaggggcggagcgagaggttggcccggtaggatcgggggactgagccgagagtcaccgcggttcctgccccgggagcccgggctggccacacccaggtgagtggcactgtggggcgcggc

SEQ ID NO: 110963 - DNA, 122 bp, Homo sapiens
agtgggaagaccatgaaatacaccatgacgcagtcatgaggagtcaaatatttcaacaggcgaaccaagaaggcaaacagggagaaaggaaagagccgtgagcacgcgctatctcccaacat

SEQ ID NO: 110964 - DNA, 122 bp, Homo sapiens
gtccggggtgagagggggagggaagctgcagcaggcactgaaggccgctgtccctctcctcgcctgccccaggcctgccccaggcactgccattccttgggcccagcccgggtgcctcctcc

SEQ ID NO: 110965 - DNA, 122 bp, Homo sapiens
tgccctgtggacccaagagcctgctagggcgcgaaccacctctcgcacatccacaatgaacgttagaagaaacgagacaagaaatgctctcggtagagaacttggcatttaaccgcgagctg

SEQ ID NO: 110966 - DNA, 122 bp, Homo sapiens
cagtgccctcgacccacatcggcccccggaccacccgggcgcagggcatctcggccgagccgcagacgtacaggtccttccacgacctccgacaggcattccggaagttcaccaagtccgaa

SEQ ID NO: 110967 - DNA, 122 bp, Homo sapiens
cctcccccatgccttttcaattgcaagttgaaagctgcccccagaggacacattttatagcgcaacaaagaagacatatttttacatgctaccttagtgagtcattttgcttctcagacttt

SEQ ID NO: 110968 - DNA, 122 bp, Homo sapiens
gcccccccaagatgtctgcctgcctgagcccagcaagcagcctggcccacagctggatgccgggagtttagcaaagtgcagccccgaccaggaactttcatttcctaagaataaggaggccg

SEQ ID NO: 110969 - DNA, 122 bp, Homo sapiens
gaacttcttccacccacagggcgtgcccagccctcagcggccctccttcgaggggggcggcgagtatggggccacccccaacccctacctctggttcaacgggcccaccatgaccccgccac

SEQ ID NO: 110970 - DNA, 122 bp, Homo sapiens
agcagagaaaatttacaccttgaaaaaaagttttccacctgaatcggaacatcagggaaacgctttagagcttgaggcgagggttttatggccagggaaaccggagaagcgggcggagctga

SEQ ID NO: 110971 - DNA, 122 bp, Homo sapiens
atgcattcagcacaggcagaaaactcgatttaccatagctacagcaatgaatttccattacgatgacagcttcaaccacatcatgtccggaaaaccagccaaccactggcttttaaagaaca

SEQ ID NO: 110972 - DNA, 122 bp, Homo sapiens
tcgtgccgtgagcgatccggtccagcatcccggcgctgggagccggcagctgctgtgaggcgggaggagggctctgtccactatttcctgcctgaggcccacgaagggtcccccgccccagg

SEQ ID NO: 110973 - DNA, 122 bp, Homo sapiens
tggcttttccgtgtgcggcaaagctgcggggaaacatggcatgagaaagtatcggtcacccgcagacaccagcacaagttataccataacgagactgaaactcacaaggcatctgtggggcc

SEQ ID NO: 110974 - DNA, 122 bp, Homo sapiens
ttattaaattattcaaatcacttaccgggccccaattccacctctggatgcacaacagctcgtggctcaactcccgaagttaccagtttcaaacttcccgccacgccccctgccctgaccct

SEQ ID NO: 110975 - DNA, 122 bp, Homo sapiens
actccaggctggaggtctatggtccccaggagtgcaggcaggtcccttggaaccatctgtcgcagagaccagaccaaccaccccacaggctccatggggtccaccagggcccatgctgacag

SEQ ID NO: 110976 - DNA, 122 bp, Homo sapiens
cactcgcacaaggccctggagaaccggacctgccactggggcttcgactcggccaactggcgggcctacatcctgctgagccaggattacacgggcaaggaggagcaggcgcgcctcggccg

SEQ ID NO: 110977 - DNA, 122 bp, Homo sapiens
ggagggtggggctgaactcggtgacgcctccctcacacccagcttcagtggcgccaacgccgcttccccgcaccctcagggcgagggaagacttccctggctcaccaacttgctgccgccca

SEQ ID NO: 110978 - DNA, 122 bp, Homo sapiens
ccaggcagggaaagggaggagtctgagccgagtcacgccccttctcctgtaaacttgggtcgcctctagcttagcgagcgctggagtttgaagagcgggcagtggctgcacacgccaaactt

SEQ ID NO: 110979 - DNA, 122 bp, Homo sapiens
cagagttgtgggagggaacactgcatcaacctgagagtctgaactctttccaggaagcatcggcaacttcaaattgccagctaagatttgttttggttagttatatttaaggaacacattga

SEQ ID NO: 110980 - DNA, 122 bp, Homo sapiens
acagaggaggaccagcagcagtgaagggcaagtccacagagttctgaggtgtccaacctccgggacgctgcactgactttcaagtgcccagaggtcctcctagaataacacatccctccgcc

SEQ ID NO: 110981 - DNA, 122 bp, Homo sapiens
tcttcttgtcttgctagatcggggcagcagtgcttagggcgggcctcagaggctcacacacgtatcgccagggggagaaccagctctctccggcttggactcggggcggctccccgcctgca

SEQ ID NO: 110982 - DNA, 122 bp, Homo sapiens
acttccggaagacctgtggcccaaaggagaatcctgttgggggaggcgggggccggtggtcgctaaccaatccgacacccgccagcaggctgaagagaggggctttcccaaaaggaaaactt

SEQ ID NO: 110983 - DNA, 122 bp, Homo sapiens
ttttacagagagcttggtatgcagggacgcagcctggactgtttgtctcagaggcgcatacgttaacctgatcgccctgtccccaggaaagacggcaaaggagttccttaacgtctcgctcc

SEQ ID NO: 110984 - DNA, 122 bp, Homo sapiens
aaatattgaaagagccggagaaaacagtttgggaggagtctgagacggcaggccgacgagcggacgcattcaggcttgcagtctttctaaagggctgaggtgctggggttattcacacagaa

SEQ ID NO: 110985 - DNA, 122 bp, Homo sapiens
cgaagacgcgacccggcgaggctcgggctggaacccgggcgcagagctgcctcgcacaaacgttctgggcactacatcgggaccacagatatttacaaagcaagcttgcgccacttcaggcc

SEQ ID NO: 110986 - DNA, 122 bp, Homo sapiens
ctattgactatagaatgacgcagttgtttcaaggtatgtgtgatcatctgttaacatactcggtgagatatttaatcataatttttatttgcctttgagggtgcatcacccaatacaatttc

SEQ ID NO: 110987 - DNA, 122 bp, Homo sapiens
ggcgtgtgagccgcctccgtctgtattaaagttcagagtgcagtgtgcaaaagtgggactcggttttcagagataagctgttacccaaccctgcttgagttccagcagcggaggctgcgaag

SEQ ID NO: 110988 - DNA, 122 bp, Homo sapiens
ttagctgtaattccctgtgcatgttaccttacctttactgtccgtaaaatgccctactgccgagcggggcgggtggtggtatggagagaatgctgttgctttatccaatcagtggcgctggc

SEQ ID NO: 110989 - DNA, 122 bp, Homo sapiens
tgaagccccctggaacaccctcacactggcaaagaagctgcctcggctatctgcgggctccgctgcgttctccttacttttctccccctcttaaatggagttaaaatggctgaattccggct

SEQ ID NO: 110990 - DNA, 122 bp, Homo sapiens
ggaggcgccggtggcaggttcccgcgggccccggtcggcgaacagctctgcaaggaccgccgcaggccacaagtgcacggggtgccaggagctccccgtccccggcccccagcccgggctga

SEQ ID NO: 110991 - DNA, 122 bp, Homo sapiens
aagagtgagaagctcggctgtttccgtgaacaagtaggtgacatagtgcccagagcgcaccgggagcgggagggaggagatccacacgccccacccaaaggaagcagctccagccagctatg

SEQ ID NO: 110992 - DNA, 122 bp, Homo sapiens
tctgtaacccgctgcttattgttaaggcgcctggggatactgaaaccgtgtgtttcgagtcgccagttcccattattggggtgttaggtccactattgggctggtttccttaaagtactgtt

SEQ ID NO: 110993 - DNA, 122 bp, Homo sapiens
tggggagcggcccccagcatttaggagttagatggtcatcgagacccaaaacattagagccggaaggtgttaggaagatataaacgtagagagcgagtaacaggaggcaattccacggccaa

SEQ ID NO: 110994 - DNA, 122 bp, Homo sapiens
gcgtaagccacgcgccacccaggtgggcagggtggtgacgcgaaagcccggatagacttccgcgcaggggcggggcggggcgaggaggcggcagcgcgtttaagtgacgtcttggctgtccg

SEQ ID NO: 110995 - DNA, 122 bp, Homo sapiens
atcactgcagctaccttttttgagtggaacatgaggaactgttggatcacaactatgaatcgcataccttaaagtgaacacgaagattggaacctcttgatttgcatgctagaaaataaaac

SEQ ID NO: 110996 - DNA, 122 bp, Homo sapiens
gggttacgtgccagccgccgggggcgggagtttcagcaagccgctggccaggggaagagacgcgctggggtgcccgagttcagtattggaagaggcaggtaatccttccccatggagcctgc

SEQ ID NO: 110997 - DNA, 122 bp, Homo sapiens
agaaccgttaggcacctgagcagaacctttaggcagctgagcagaaccgttaggcaacagcgcatgcgcaactcagcagacctgggagacacgcgaggcaggaaaccgccctggctgcgctt

SEQ ID NO: 110998 - DNA, 122 bp, Homo sapiens
agatagaaaactggtaacctggtaagtttaccaggtgttggtggtagggaggaatgggaacggattgcttaaggggaaagggatttttcgaggcagagtgatgaaaaagtttaggtggtggt

SEQ ID NO: 110999 - DNA, 122 bp, Homo sapiens
gccctcaaggagatggatcttgccagccaccacatggacgtggaccttccccaagtaagtcgtgaaatgacagcagcccagatgacaccctgattacagtctatcagtgaccttgaaccaca

SEQ ID NO: 111000 - DNA, 122 bp, Homo sapiens
agagcgcaccgcgtcccctggcctgggcgagctctgcttccagggccgtggctcgctcggcggtgaaatgcacttaatttgtcacccaagtcggaacactgattttcatgcgcgtccgtgtg

SEQ ID NO: 111001 - DNA, 122 bp, Homo sapiens
ctgcacggtattttcccatcagcctccctagtgcactatcaggcttggcggctgggaggacggcaaattggggtgtcttccttcagggccccaattactccttgggtgtagggcaaataata

SEQ ID NO: 111002 - DNA, 122 bp, Homo sapiens
ggctctgctccaagcaacttctttcagttttggatatccaatatcctaatcggtaaaacacggataataatttttgcttagtctatttttcaaagttttggtacaaatggcaaataatgtgc

SEQ ID NO: 111003 - DNA, 122 bp, Homo sapiens
cacctttcgcccctcaccctagctcccccaacgccaaagacaaggttaagaaagtgatatcgcgaaatagttttttaaagcattttattgcattttatgacttggagtttatgtgaaacctc

SEQ ID NO: 111004 - DNA, 122 bp, Homo sapiens
gggcgctgacccccagcgcgggccccgcagcctcacctctcccggccgcccgccggggtccggctggccctgctcggtccctggcactcaggacggtggctcccactcccccctgcccccct

SEQ ID NO: 111005 - DNA, 122 bp, Homo sapiens
cagtacaaaagcagttgagatttggatttcccaccccactgtctcctgtctccaaccctccgtctgagctcccattacacacacacatgcaaacacacacacacacacgcacaagcaccact

SEQ ID NO: 111006 - DNA, 122 bp, Homo sapiens
cgtgtcagaccttttcgtggcgctgctggtcatgccctggaaggcagtcgccgaggtggccggttactggccctttggagcgttctgcgacgtctgggtggccttcgacatcatgtgctcca

SEQ ID NO: 111007 - DNA, 122 bp, Homo sapiens
atgaatgaatctgcaccattcagctataccccattttccaggatatttatgcatagcgaccgtgatgcttaaataaatatttccagtgacataaagcaaggaaatacagtctataccaatta

SEQ ID NO: 111008 - DNA, 122 bp, Homo sapiens
tccagaaatctgagttttacacaaactcacacatgatttttttgtacagaaaaaccttagcgatttcggagctacatgttttttgttttctgctttttggccactgcacttactcataagtg

SEQ ID NO: 111009 - DNA, 122 bp, Homo sapiens
atatattttctacttttccttgctaaatcaattccctaagacatcaggactgtgagacatcggtaaacctccctacttctaaagaaagaaaacagtagatgaaggaagggaaaggatcactg

SEQ ID NO: 111010 - DNA, 122 bp, Homo sapiens
cggcgcggctgcccattggccaggggggtaaactgagccagggaggctcggacttgggttcgggtctggcctgcgcggggccggccctcgttcatcctcacttctgagtacccgcgacgcgc

SEQ ID NO: 111011 - DNA, 122 bp, Homo sapiens
tgttctggaaggaggtgcctgagtctggtctttaaggatgtcatttctcagggagctgcccggttgggctatcctgtccctcattaataaatgccctgcccttcagatgcagtgtcagttcc

SEQ ID NO: 111012 - DNA, 122 bp, Homo sapiens
tctcatctatggcagacgtcttaatgaggtcagtgggaccaatgccactcaatatacattcgccccatggggaaaacctgttactaacatcatacaaacatcataggcttcccctctgaatc

SEQ ID NO: 111013 - DNA, 122 bp, Homo sapiens
ggcgcgggcgcccagcagcgtgaagtcggcccagggctgcgcggagtggcggtactgcagcggggccgccacgccctcgcggtacagcacgaagctcatgttccgcaggcggcccgcgcagc

SEQ ID NO: 111014 - DNA, 122 bp, Homo sapiens
gccctggcggtacctctcccccgtgggggtgagccaaacccaccagggactccttggttccgtttagctccgggaaggcctcccccaccgctcagcttggatcttctctcctccttctccct

SEQ ID NO: 111015 - DNA, 122 bp, Homo sapiens
tctgccccctaggtgccgggcgccgcccgtccccacctccatcagaactcgggtcatctgcggagccttggctgcggcccggtacctgggtgtgactccgccactaacattttcccagcagg

SEQ ID NO: 111016 - DNA, 122 bp, Homo sapiens
ggtttcaatcccaggaacctgtgaatatgtcatctcacatggcaaaaggaacccagttaccgtaatgcaggagctggatctgttttaaaagagtttgggtctttcagaaccaccaagcagtg

SEQ ID NO: 111017 - DNA, 122 bp, Homo sapiens
gcttctctcttgtccttgatgctgccggccaccttcttgaattcttcttccatgacttcccggaccccggacccccttggcattttctcccagactgcctgcctctcatttttactttcttt

SEQ ID NO: 111018 - DNA, 122 bp, Homo sapiens
ccttccacagcaagagagagccctcgggatccccagagtgttagcttcacaaataaagtgcgactcagtgtattcgcccaggcatcccaggataatctggccaggctggtaaacaggaaaga

SEQ ID NO: 111019 - DNA, 122 bp, Homo sapiens
ttaccatcttcagaaggcttagcttgcagtttcagcagaaggatagactcccaggaagaccgtgagacagatttggggtccagttgatattatcaagtacactgaatttgactgtgttcacc

SEQ ID NO: 111020 - DNA, 122 bp, Homo sapiens
tcgcataggtccacaattattcctcatcagtttgctgagcccagatgtgtagctctacatcgttttgcatgcagcttgccatactgctcctatcagcgcagctgttggtgctgccgctgctg

SEQ ID NO: 111021 - DNA, 122 bp, Homo sapiens
gttctttattcccgcacgccctaatccccaagtagctcttccgggtcactgcagtcttcacgggctccagactccgcccatggtccgtccttcaggccttgactccgcccacgcatcgacgt

SEQ ID NO: 111022 - DNA, 122 bp, Homo sapiens
aggccacccagcaagggtgggtggagagaggccacgcgcccgggatgaggggagaggggccgagcccccggagccggagcctgcctctccaggaagcctctcaggctctatccgcaccccct

SEQ ID NO: 111023 - DNA, 122 bp, Homo sapiens
tctaactggctgccctaattagctacgattttcacactacagacaacatgatgagctaatcgaaatttgcaaaataatgacgtacctccagcaaatattcctcctcctgaggcccagtctta

SEQ ID NO: 111024 - DNA, 122 bp, Homo sapiens
cttgactgactgactagccggctctgggattggctgtctcttccagactgacttggtaaccgtgggtctgactgtgacccctgcgtcttgactgaccgccttgattgcatgcctgacatttt

SEQ ID NO: 111025 - DNA, 122 bp, Homo sapiens
agacggcgtttggagagctttttccagaaactgtccggagcccagctcgggttctgacatcgcccctaaggatttctcagggaaggcatcccagccacggcttttcctgccgactttgctct

SEQ ID NO: 111026 - DNA, 122 bp, Homo sapiens
gacctgactaatatttagcctcttttaaataagttgtctgctgcttgaaaatggattgtgcgtaaagacggagggtaattatagatataccacctagtcttcttgatccgaggcctacagct

SEQ ID NO: 111027 - DNA, 122 bp, Homo sapiens
ccaggaccggctcagcagcacatagaggggaccttcctggcgtgcaaagcgcttcgctgtcgcgatgtcggcgccgaggtctcgcagcggccgctggggcagattcggagccgttccctttt

SEQ ID NO: 111028 - DNA, 122 bp, Homo sapiens
ttcagccatctttctccaacaggttgtactgctgactgcacagtgtcccctgaaggactccggtcgctgtagccttggagagcgaccagattcctcaccccactcaggaggagccagggcaa

SEQ ID NO: 111029 - DNA, 122 bp, Homo sapiens
ctcgatctcctgacctcgtgatccgcccacctaggcctcccaaagtgctgagattacaggcgtgagccactgcgcccggtcaagactcccaaatttcaaactcgccagcacctcctccacct

SEQ ID NO: 111030 - DNA, 122 bp, Homo sapiens
tgactgccagcccattggccaccttatccaagaagctcatggagccgtacacgaacgctccgctgttctgtggagacacaggcgaggtggtcagcgtgcaccccgagatctaggacccggcc

SEQ ID NO: 111031 - DNA, 122 bp, Homo sapiens
ggcctcttcttttcttagttccgctgtcttctaggcgtggggaccggggctgtaggggggcgggctgtgcagtaggaggaaggtttcatccaacaccacatcctgtttatgccctttctggg

SEQ ID NO: 111032 - DNA, 122 bp, Homo sapiens
ctatccaaacacccactgggggcttagtgcaaagttgccttaactgtattcactgcagcacgggtccctctgcagatcttagtaagcaaatgggcagtggtatgttgtgagactgtggattc

SEQ ID NO: 111033 - DNA, 122 bp, Homo sapiens
gtttgactcctctccccgccccccaccaatcccccgccctactctccgcgcacccagagccgagagaaatttgactgccctaatcgccaatcaaaagagaggtcgaggatttgagccaatcg

SEQ ID NO: 111034 - DNA, 122 bp, Homo sapiens
gagaggcccgagcactttgggggtgcacggtggtggtggggggaatgagtaaaagcgcagcgttatcgtgaaccccaccccagatgattacctcgccgttggtgatgttgatcgccaaatag

SEQ ID NO: 111035 - DNA, 122 bp, Homo sapiens
ctctggaaccagcaggatggtaccttgtccctgtcacagcggcagctcagcgaggaggagcggggccgactccgggtgaggtggggccctcagggctgggtgtggatggggatggagggttt

SEQ ID NO: 111036 - DNA, 122 bp, Homo sapiens
agtggctcaaagagaagcacttctcggaagcttcccttgctttttgtcagcaatgaaaagcggtgggcagtctagcaacctcttaagaggaaaaggggagtttgcttttaagaggaagacaa

SEQ ID NO: 111037 - DNA, 122 bp, Homo sapiens
ccgctcctagaaaggcgaaaagatattcaggagcccttccattttccttccagtaggcaccgaacccagcattttcggcaaccgctgctggcagttttgccaggtgtttgttaccttggtaa

SEQ ID NO: 111038 - DNA, 122 bp, Homo sapiens
ctggtgaatgagagacccacaggagatatttggtcttcttgtctttgtgctttttaaaatcggtagagggaaattactagttgcctccaacataaattcaacctctatgaggaaaatatatt

SEQ ID NO: 111039 - DNA, 122 bp, Homo sapiens
tatgatactctctgaacgagtcccactgaaaccctcttttgccagttcagttcactgtgccgggaatgccctgcttcttgaagccaccagctgagccctgcctgtgccccagggatgggctt

SEQ ID NO: 111040 - DNA, 122 bp, Homo sapiens
attagaaaatcattcaaatgataccataatttgtacgggacagggtgcgggcaatggccacgtggccaaggccctgcaggaacgcgccgaggtctccctcaccctccaggtgtccttcgcac

SEQ ID NO: 111041 - DNA, 122 bp, Homo sapiens
ggttatattttaagctgaaaagttatgaaatagcactgcaaatcttactttgcactatcacggaacaggggctgtgggctacagacgcccctggggctggatgatgggggctggggagttcg

SEQ ID NO: 111042 - DNA, 122 bp, Homo sapiens
tggagggggaggaggaggcggcggcggcgaagggaggcgtttggggccgcctccagggtccgctctgccattcctgaactggtccctcgtccccgtgactctggcatcagggaagcgaactg

SEQ ID NO: 111043 - DNA, 122 bp, Homo sapiens
ggccttctcatttcccaggcgaaaatgagcaagttggtcttgcattggccacttgtcagccgatgacaactttgacttgggctcccctccccctcccgaaatccctagctcagcaaatattt

SEQ ID NO: 111044 - DNA, 122 bp, Homo sapiens
gcaggtatcctaccccggccctgggaggccgactgggcggagcttggggtccggaccacgcggagccctggcagtgtctatgcctagatctcgccgccctgccgtccacccatttctcccta

SEQ ID NO: 111045 - DNA, 122 bp, Homo sapiens
gaagaacaaggcacacaacatcttcccccacatcacactctgccagttctttatggtgagcggcagcgcccccacccctgggaagcctggctcctaggatcccagccggccctttgggacct

SEQ ID NO: 111046 - DNA, 122 bp, Homo sapiens
agtggcccgcacacgggacacccacacctgtgaagaaatctgtggctggaaaagagctgacggactcagcagtcacagcgtgaactgcccttatggacagagaagcttcacaaagacttcaa

SEQ ID NO: 111047 - DNA, 122 bp, Homo sapiens
cgcggtccttgtccaacagcccagaggccgctgtccagcgggccaggaggcggatcactgcgtcggcgttgaaatttccactcgcgctccaccgcccttcccgcgggccccgagcgcgcgcc

SEQ ID NO: 111048 - DNA, 122 bp, Homo sapiens
accacccaacaccccatcttgtgtacagtctctcggcttcggaatacaaacaccttgggccgggctttctgtctactcttcactgctgtgtccctagaaactacaaggtgtaggtgagagga

SEQ ID NO: 111049 - DNA, 122 bp, Homo sapiens
aatctcacttctgagcccacgggcaagcagtctcaacaataaccaaaaaatgtcactttacgactggtagtctgtttctgaagtaaaaatattctcgccagtaatcaaaatttgtcatgagg

SEQ ID NO: 111050 - DNA, 122 bp, Homo sapiens
ccccgctggtggggcacagtgaggggggctgtggtcagacctggtctctggagggccagccgggggttcccgtccacctgtcagggggttcgacgccactttgagatgacaagtgaggccac

SEQ ID NO: 111051 - DNA, 122 bp, Homo sapiens
attggctccctgcagccacgaggggctgtgtggtcagagccagcaagtcagcccctgcctcggtactcccaatcctggggcccagagcacaggggtgacccctcttcctgcacccagtctgt

SEQ ID NO: 111052 - DNA, 122 bp, Homo sapiens
ggcttggcggggtctgggggcggcggggcagtttgtccccaggagtaggagcaggcccggcgccagcccggcctgggccttcggcgtccggggtggtgaagttgcttttcctcagacacgca

SEQ ID NO: 111053 - DNA, 122 bp, Homo sapiens
ttaattttccaaggagacagtcacttaccttttaaaaaacattattagagaagcaccgggcgggagcatatctagcattaaaaatgtgggatgaataccatctctgcttggtaaaggtggtt

SEQ ID NO: 111054 - DNA, 122 bp, Homo sapiens
aggaggtctccgtccccggggagcggcaccgggcagtcccggctcagggtgacggcctcgcggaagttggggctcagccgggtcaccaccagcttctgcatggcttggggaatggcggagcc

SEQ ID NO: 111055 - DNA, 122 bp, Homo sapiens
acttccctgaagccgctccagccccacttcccgaaggtcccgcttccgggtggctcgcttcgccacctgcggtcccctgcctcggcttgggaacgccaaggacatcccccacggaagcctgg

SEQ ID NO: 111056 - DNA, 122 bp, Homo sapiens
tcggaggagggtctctgggtcgggcaggggccacctcttggcccgccccttgtcgctggacgtccgaagattgggccatttcccttgccgcgcccttaccgcatatcggggtgcgcccggcc

SEQ ID NO: 111057 - DNA, 122 bp, Homo sapiens
cagctgtttggaaaaaacttgcagtgctgatgacaactcgggtgtgtcgatgcatctctgcgtttgtagagcttgttagcgtatttggaggttttgtgcgccagagtgatcagagtgattgt

SEQ ID NO: 111058 - DNA, 122 bp, Homo sapiens
gccatgacgcgctgggtgcccaccaagcgcgaggagaagtacggcgtgggtgagcagcgccgccgccgccgcgcctctcgccccaagcccaggctccggcggggcgggtgtgccgggcgcct

SEQ ID NO: 111059 - DNA, 122 bp, Homo sapiens
atgcagataatacaggcatgatttctgcctcctgaaatgctcagatgatatgcacttctccgtccccctaaagatttaaggaagtacacatttatcatgggatgtaatgagtaggaaagagc

SEQ ID NO: 111060 - DNA, 122 bp, Homo sapiens
tgtttggcacaagagccgtgtgccgtcccagagcgccctgcgctgtttggcagcagtgcgcgctgtgtgaagtctttgagccccctgcgttcttttccaggagtgagctgggctggagtcct

SEQ ID NO: 111061 - DNA, 122 bp, Homo sapiens
tagcattacaaactgctaagccatctcacctttcacctgtctcagtctctgtcttggggacgacactcttcatgagatttctcggaggacattttggtgtcttggggctggcaacacgagag

SEQ ID NO: 111062 - DNA, 122 bp, Homo sapiens
acgtcctcctggctcgggctggcctggcagctcggggagctgttggatgaaacgtccatgcgtgtggctgtggctgtcacgtgcaactgcgaggatggtcggctcccaaagcggaaccgcgg

SEQ ID NO: 111063 - DNA, 122 bp, Homo sapiens
tcctggctagtcgtccgcgaccgcgctctcgggtagccggggatggcggggcctggggcccggggccttgctgaccttgctccagccacacagccggagggagctgcagcagaaacttgcca

SEQ ID NO: 111064 - DNA, 122 bp, Homo sapiens
ttgatgtggttttaacagaccccgttaacctctgcgcggcagtgctggctaagtacctgtcgattcctactgtgttttttttgaggaacattccatgtgatttagactttaagggcacacag

SEQ ID NO: 111065 - DNA, 122 bp, Homo sapiens
ttaaggcaaattagcaacagggagatgagagacaatgcttcagaaaaccatttcatttaacgagcttcagaagcaactggggttttttgcatagaaggcatgactgagcagaacagagagtg

SEQ ID NO: 111066 - DNA, 122 bp, Homo sapiens
agtgaagcaacgcgagcacagcgctggcccggatctaacttggcggtgacagcccagccccgagctggacatggcaggcccctcggcctggccgttgcctgagaaccctaggatcacagcgt

SEQ ID NO: 111067 - DNA, 122 bp, Homo sapiens
aagacactcgctctgcaaaagagttggagaaagtcactctttgggcgccacaaaaccgtgcgcatgcaatgcagtctctgtaacctcctgcccggggacactggggcaggcgtggagggcat

SEQ ID NO: 111068 - DNA, 122 bp, Homo sapiens
cgcctctcgcggtgctaaaaggatgggcgcgcaccctccttccggcatccgtagaacccccgcctttgacctagcttcaggagattactttccgggtcagcgtgcgtttagggcgaagacgg

SEQ ID NO: 111069 - DNA, 122 bp, Homo sapiens
ccacgcggatgttcagaagaagtctcttatcccggcagcctttcacaggctgtggggcctcgtgccctctgccccccgacgccgtgagaggccggcagccaattcgcggcattgtctgaaac

SEQ ID NO: 111070 - DNA, 122 bp, Homo sapiens
gatccaaggagtttactaagaggctttggagtactaacgccatctagtggagtactgggccgaggcattgtgttggacatcgtcagagagggagctggcagtccaggaataaaaacctttcc

SEQ ID NO: 111071 - DNA, 122 bp, Homo sapiens
gagaatgaaccctccccgaggcatggggcccatgggtcccggcccacagaattacggcagcggcatgagaccaccacccaactccctcggcccgccatgcccgggattaacatgggcccggg

SEQ ID NO: 111072 - DNA, 122 bp, Homo sapiens
ccattagcagtaactagaaagacacttggctgacagattctgaaagactgctttcctttgcgcattgtttcttccttctcactcctttctcagttgacatccaaatttattatatgctctgc

SEQ ID NO: 111073 - DNA, 122 bp, Homo sapiens
tggcgcagggccactggtggtggcgctgcaggtgcgcgtggtggaagcagagcagttgttcgctgaggtgaccgaagtggcggcgctgaggcgccagtggctgcgggacgcgctcgctgtct

SEQ ID NO: 111074 - DNA, 122 bp, Homo sapiens
tggcatgccacttgttgagaatgctttcctggacacccctgagcccctggcatgtgctgacgccctctcttcttctgaggcccagcttcattgacacttcttctggtgaatgttccagatcc

SEQ ID NO: 111075 - DNA, 122 bp, Homo sapiens
aaccgcagtaaagaactttgcacccccaacaccggcgcttactatgggctcatggcaggccggcccaccagccacaactagggaacagccaagcgcgtttaaaagccaaaggtagaacttct

SEQ ID NO: 111076 - DNA, 122 bp, Homo sapiens
ggcgccggggcttccgaagggctggggacaggctctgggggcggctggagcggggtgtgccgaggaacccgggccccgcgaccggagcgccggagccgaggaaggccgggctgaggcggcgg

SEQ ID NO: 111077 - DNA, 122 bp, Homo sapiens
agttcatttgggtgtttttaaatgggtaagtaaatcttcctttgttcttagggtttctttcggagaagtattcaacaaaacatccagtacaagaagtgcctgaagaatgaaaactgttctat

SEQ ID NO: 111078 - DNA, 122 bp, Homo sapiens
ttgtgcttgcccttggatggtcagaagggtttgactccaatgctaaatctttgggcatctcgcggtcgctgatgtgctgcaggtggtggccctcgccttctccgaaatcaaactcgggaggc

SEQ ID NO: 111079 - DNA, 122 bp, Homo sapiens
ctcacttaaattgggaggcttagaggagctgacggggcctgtggggaagggggagttagccggccacccctaggcaagccactttgcagtggaaactgcacgcagcccctgcaaggcgagct

SEQ ID NO: 111080 - DNA, 122 bp, Homo sapiens
ctcctccattcctctcttccctggcaaccggctcagagcttggagactcaaaaattgattcgctctgaatttcctaagtttatctattaactacctaacaggccattcgcttgttcacagtg

SEQ ID NO: 111081 - DNA, 122 bp, Homo sapiens
cgaggccccttcccgggtgtcagggaatgcaagccttcacagctgacaccacagtgccttcgagatggaatcagcgtcccagtgtgggtgcccaggggattgtgggccgggggatgagggag

SEQ ID NO: 111082 - DNA, 122 bp, Homo sapiens
gcagtgcacttctgggagctgtgcttatctccccggggtctatttcgccccaaggtttggcgggttaaaagctgatatgcaaccggcacgacatgaacagtatttcatgattaaagacatcg

SEQ ID NO: 111083 - DNA, 122 bp, Homo sapiens
agcacgatttaggcctgcagaggtcgccgggaggcccaagctgggcctagaggagcccaccgaccggaggccgtttggggcctggagatgccgtcggagggcaggagctgagcctggcgagg

SEQ ID NO: 111084 - DNA, 122 bp, Homo sapiens
tcccacggcaccaggtgggctagggcaacagtatgtacaggcgagcagtgctcctggacccggtcggggccggctggggccccattctgcggcaggggagctctggggcacagggtctgagt

SEQ ID NO: 111085 - DNA, 122 bp, Homo sapiens
gtggtttcgcgaccttgaacaggtgactccaatagctccaggagggcagcgagcccttcgcggaactaccagataagccatgcttgaggctgtcgtagcctagtgggtagtcgtgaaatgca

SEQ ID NO: 111086 - DNA, 122 bp, Homo sapiens
gagcgggagcgggtgcgatcccgatgcgggtcgcggccccggccccggccctctggcccgcggccgctgctgtccccagacatagcgccaattcaccgtgcaacttcggaacggcggaagtt

SEQ ID NO: 111087 - DNA, 122 bp, Homo sapiens
ggcctggggcggggcttggctggggtgctcagcccaattttccgtgtagggagcgggcggcggcgggggaggcagaggcggaggcggagtcaagagcgcaccgccgcgcccgccgtgccggg

SEQ ID NO: 111088 - DNA, 122 bp, Homo sapiens
caggggtcaaaggtcacaaacccgctctagccgggggcggtgctagctgtcagatcgctgcggctgcaagcctgcaggtcgggcccaaaagtaggcgccgttaccaagagcgtgggggccag

SEQ ID NO: 111089 - DNA, 122 bp, Homo sapiens
gatctagaaaagctatggagtctcgctttgtcgccaggatggaatgcagtggtgtgatctcggctcactgcaacctccacctcccaggttcaagtgattctcctgccttagcctcccgagta

SEQ ID NO: 111090 - DNA, 122 bp, Homo sapiens
tgcaagagaaaaaacacttttattgaaacgatccaaccagcggcggcggagaaaagcgaccggccgcgggagcttaccccacccccgcctgagcggctcgccgggggcagcgcgacccctgc

SEQ ID NO: 111091 - DNA, 122 bp, Homo sapiens
agggcccggctggtgctgcgggggccccgggaggtacggacctgggaggcgaggctcgtccggcgctaggatcggcctccgcctccgggccgctttaggtggctggtctctgcctctcattc

SEQ ID NO: 111092 - DNA, 122 bp, Homo sapiens
tctgtcaaacgaaatgttcaactccgttagttgaggacacacatcagaaacaagtttctgcgaatgcttctgtgtagtttttatgggaagatatttccttttccaccataggcctgaaagcg

SEQ ID NO: 111093 - DNA, 122 bp, Homo sapiens
gagttccgtccgtaagccggccccgcggtcctggggcgccctgggcgcccgagctcctcgcgcgctgcctccgcgccccgcggcagagtttattttcctgaagctgtcatttctcttccggg

SEQ ID NO: 111094 - DNA, 122 bp, Homo sapiens
tccactgaggggtgtgggtaggggcgtggcccgttcccttgctggtcggcgcccggaaggcgtccgcgtcagccggagctcgacgcggtgacggtgtgcgtcgacgtaagtgacgcgcaagc

SEQ ID NO: 111095 - DNA, 122 bp, Homo sapiens
agggccccaacccctcccggaggccccgccctgtcctgaggcaccgcccatcccgggccgcggctgcaaacctcagctcacccttctgacctggtctcccagttccacgcagactcgagatc

SEQ ID NO: 111096 - DNA, 122 bp, Homo sapiens
ccagccggagccacagtggctccgggtgtcggggctgtcctttcttccctttctccctctcgtctcctgtctcccgtctccctctccccacggtctccctctccctctccctctcctgtctc

SEQ ID NO: 111097 - DNA, 122 bp, Homo sapiens
caagaaccttgcatggggattttcctgaagcaacctaaaggtgaccctagagcacacctacgaatctgggtttgcacggcactgagctccgtgccggctcccgtatctctaccctcaagaaa

SEQ ID NO: 111098 - DNA, 122 bp, Homo sapiens
ctgcagagccctgtgttcttaacctgcagttaactctggcttccaagtatctcctggaatcgccaccacagccctgctgtttagatgggaggctttatgcttggaacgtgggctctgatctg

SEQ ID NO: 111099 - DNA, 122 bp, Homo sapiens
tcagctgccgggcaccctgctcaggggccttgcttcggggcactcctttagagccaagtccggggacaaagagtggctcagactgatggtcctcaggccaagggtggagtgagtagtgggct

SEQ ID NO: 111100 - DNA, 122 bp, Homo sapiens
cacttgtctgaaagggaacattctttcaaggagccaacaggcttcactgggctccatttacgaccctttcccccagagccatggttctctgggtgtccataacagccccgggactgtccaca

SEQ ID NO: 111101 - DNA, 122 bp, Homo sapiens
ggtgccagagtgagacaccgtctcaaaatgcccctccccccccccaaaaaaaaaccagatcgtgaccttactgtcttccttgtggtttcctcatttgggaaaaagcaggttaacactagtgc

SEQ ID NO: 111102 - DNA, 122 bp, Homo sapiens
aaagatgcaggggcaatgcatgcgacgctcttcacccgagcaactcggtgcgcggccggccgggagtttgacagcgactctgtgaaacagaaaaggcactagccaatttgcaacttaggaat

SEQ ID NO: 111103 - DNA, 122 bp, Homo sapiens
tggccagccaacagaactactcttggttgcatcctaagaacccagccttgtgcgaggggccgtggagaatgcagaacacaacttcacagtagcaaatcctatactcacccacctgcgctggc

SEQ ID NO: 111104 - DNA, 122 bp, Homo sapiens
gtctgcagctgagtaagtatgagcccacgtgatcctgtataccgcacatgctgaagcaaccgaggagtatatgtgataacggcatgttttccattgatggcagggtaacgcatagccttacc

SEQ ID NO: 111105 - DNA, 122 bp, Homo sapiens
cggttcagcgtcaggtgggcggccaagccggcttgggcggcggcgcgcgggggcggcaggcgctggtgaagcccgcacacgcgccagcgcatccagccctaccaagccccgggctgggagct

SEQ ID NO: 111106 - DNA, 122 bp, Homo sapiens
ggaggccctccgcgcccaggctgggtcgacgacccggccccgcaagccgagggccgcccgcgctcatgggggggctcacttacgagagctatggtcgccgtcgccatcttgcgtccgtcgcg

SEQ ID NO: 111107 - DNA, 122 bp, Homo sapiens
agataatgcctaggaacttgggagaagtccgtgcagtaaatccctttaaaatggtggcgtcgaaggaatggaggctgggttataagcatagagaagcaggcttttattatatgataatattt

SEQ ID NO: 111108 - DNA, 122 bp, Homo sapiens
ccatgaactccttgctcctgttgaagtcggcttcaccaattttgtccgatccttccaggacgaacgccacatccagaaccatggagttcctcttgggccccagggtcgaaacccccaagagc

SEQ ID NO: 111109 - DNA, 122 bp, Homo sapiens
cacgccttccacctgccccactgcttcttcgcttctctcttggaaagtccagtctctcctcggcttgcaatggaccccaactgctcctgcgccgctggtaaggaacgccgggttccgtgcct

SEQ ID NO: 111110 - DNA, 122 bp, Homo sapiens
ccaggctgagctgggcacttcagaaacaaagatgagtaaacgcaatccctgccctctagtcggggagacagacttgatgcagagaatcatgcccaggtgcaggagggcgctaagttagcacg

SEQ ID NO: 111111 - DNA, 122 bp, Homo sapiens
tctctgccccgcgcagaccccttcccaggcctcctcctctggcgggggcagggggaccagcggggctggggaagggcaccagcatttgctgatcacctacagggtgctcagcaatctgcgaa

SEQ ID NO: 111112 - DNA, 122 bp, Homo sapiens
gcccttcccatcaatgcgtacatctcctacctcggcttccgcttctacgtggacgcagaccgcaggagctcgcggagactgttcttctgcagcctgtggcacctgccgctgctgctgctgct

SEQ ID NO: 111113 - DNA, 122 bp, Homo sapiens
ggttatgctctgtgccgcactgcgagcccttggcgggcacagccgccagggtgggagaagcgtaccagaagcagctccagaatggcagccccagctggctgggcagcctgcgccgcctgggt

SEQ ID NO: 111114 - DNA, 122 bp, Homo sapiens
ttttcttcgccacgggactttgtgttgtttttccttgtgtttaatctatcagacatgacccggccaagggagaaagagtggaatgtaccttcaaggggatgcttttgctctttatgatttat

SEQ ID NO: 111115 - DNA, 122 bp, Homo sapiens
taatatgcatttaagattcctccatgtttttcatagtttgacaacatttcattttgttgtcgaatgatactccattgcatgaatgtaccacagtttgtttatccactcatcttttgaaagac

SEQ ID NO: 111116 - DNA, 122 bp, Homo sapiens
tttctcatgaaatggcctgaccccatttgcccttcctcaatctgttccacagctctgatgcgtggtttaaaggtagaggaataacagagaacctgaggatccatgcaaactgaaaaatccaa

SEQ ID NO: 111117 - DNA, 122 bp, Homo sapiens
gaaatggtatcattcccactttgacagctgaggaaatggacactcagagaggctaagtaacggctaaagtcacacaattaataagcagcaaatctaggatgtgaatccacgtctgacttcag

SEQ ID NO: 111118 - DNA, 122 bp, Homo sapiens
gtgcgtgctgacggcatgtgcgtataggcgccgcgcgaacgtgtagttggccgggtggagcggcggcgacctgggcaccgtggagcgccgttggttccgtcatagcagctgtcggagtgggg

SEQ ID NO: 111119 - DNA, 122 bp, Homo sapiens
aattgttctgggtttccgggaggtgcgagggcgttcctcctccagggcgcgtgcaggccacgctgagcagccctgctgaacgtctcccggtgtgccgtctctctgtttctctgttccccttt

SEQ ID NO: 111120 - DNA, 122 bp, Homo sapiens
cgggtggtcgggggcggtgatgcgggcgcaacgggggcgggacgcaggggcggggactgccgcggggcggggcctgaggcggctataaaggtggccgccgccggacgccgggctctgtggtt

SEQ ID NO: 111121 - DNA, 122 bp, Homo sapiens
tcctatgctaccaacattgtactacaatagtattccatagcttattttccacacatacttcgctacttctttcctgtgtgtgtgtgtgtgtgtgtgtgtgtgtgtgtgtgtgttttccacta

SEQ ID NO: 111122 - DNA, 122 bp, Homo sapiens
tcgcggccatgtctgtcatgcggccggagctgatcatgaagtccatcatcccggtggtcacggctggcatcatcgccatctatggcctggtggtgacagtcctcatcgccagctccccgaat

SEQ ID NO: 111123 - DNA, 122 bp, Homo sapiens
gcgcttccgccatctttccagcctcagtcggacgggcgcggagacgcttctggaaggtatcgcgacccggcgggcccggcacggccgggcggggacaggggtggcggcggcgggataggggt

SEQ ID NO: 111124 - DNA, 122 bp, Homo sapiens
gagagaggacagcgctgagagaggggagggcgcgacttgtttgtattggccacgtgcagccgggcccccacccttggccctgatgagtgcaaaacaggaggttgtggtggagagaaaccacc

SEQ ID NO: 111125 - DNA, 122 bp, Homo sapiens
agaggagtagaatgggacactaagtggttctcatcctaagcttgcagggccaagtgctgccgggtgttggagaagtagtttggttctgatgtagatggataatacaggatctagtgggagat

SEQ ID NO: 111126 - DNA, 122 bp, Homo sapiens
gccctctaacccatggcttaaacacccgcttcctaagcctgggtaagtgcagtagctcttcgctcgagaggagccacgtggaagagagtcgggaggggccctgcgccctactcctcctctcc

SEQ ID NO: 111127 - DNA, 122 bp, Homo sapiens
gttcatgtgcgtagcaccaaacttggagtgagcttttgtgcatgagtgtcagcagattgacgtgtaacatgttcaaactggagagaaaagaagcactgcccagctggaatggggagcaagtg

SEQ ID NO: 111128 - DNA, 122 bp, Homo sapiens
tacttggctagataatgtcatggttagaaacacagattctggagccagattcccggggttcgagtcctatctcgaccacgtcccatctcctggtcagggttagggcgctacccccagcatct

SEQ ID NO: 111129 - DNA, 122 bp, Homo sapiens
atgaacaactctgccgatagaaaagtcgtccctaccaagaccgactcgagcgagttggggcggagaggttcagggcaatgctttcctgtttcccagacttttctttaaggtggctttaaaat

SEQ ID NO: 111130 - DNA, 122 bp, Homo sapiens
ccaaatgaaattccgcgtctccccgcggcgggtgccgcagagccaccggcgaggggcgggcgccaccacgtgactgattattcaaatggaccgatgattaactcggtttatattgatgcaaa

SEQ ID NO: 111131 - DNA, 122 bp, Homo sapiens
agccaacgactctgctctcgtcaaccagctgggcaaaatcctgggtgccgacctggacgtcgtcatgtccctgaacaacctggatggtgagtgccacagtcagggcgccctgccgggctcag

SEQ ID NO: 111132 - DNA, 122 bp, Homo sapiens
caaaggcacagagctaaggcttcaggcttcaatactgtcatttactgaaacaaggaaagacgagtgtaggtaaagccccagttacaacaagatggccaggaaaagcttcttaaatgcttggg

SEQ ID NO: 111133 - DNA, 122 bp, Homo sapiens
cgggtttaaatgcgccttaacagaacccgtgcaaaggcttgcctacttgtctggctgcaccggatgagtagagcatcttccttggtggcaggtgggtgcgaggaggagggggctgggctttt

SEQ ID NO: 111134 - DNA, 122 bp, Homo sapiens
cccctccagaccatgcaagccagagaggtggagcacttcacaaggcctgatctgctcacacgggtccacaggttccttccggcacacagctggctggccacaccctctaacagggcccatgg

SEQ ID NO: 111135 - DNA, 122 bp, Homo sapiens
gcggggcgggggcggctgattctaatccgaggcccaagatggagattgggcgccgggaggcggctggcttcactgggtcctggccctgagccggtttgctgggctgggcctaccaaaggccc

SEQ ID NO: 111136 - DNA, 122 bp, Homo sapiens
aggccagtccatagttcttttgcttttcagtccttccttacgcatcggtgagtcccaggtcgagagtagaggtagaattcgtgcacgtaaagtgcgatgaaaacgggcaagttcactttgtg

SEQ ID NO: 111137 - DNA, 122 bp, Homo sapiens
tctactggtttttgcagctttttcttccctctcctctttttgggcttcagggtgaagtcccggccctcaggcggctgcacatggtcccctgcatcctgagcagaggccttggaactctggtc

SEQ ID NO: 111138 - DNA, 122 bp, Homo sapiens
gaagagaggtagggtgcattggagccctggaggcagctggggccagtgcgcctgagtggccgaccccaggggcctccctcacctgccctctggttgtgtcgttgtagacagatatctaagcc

SEQ ID NO: 111139 - DNA, 122 bp, Homo sapiens
ctcggtgtgacgtcatgccaagttccccatgtctgtgtgcgacgtgctgcatctgcacgacgccatcgctatatctcttcgtgacgtctacatggccacgtgacgccatcaccacggtgata

SEQ ID NO: 111140 - DNA, 122 bp, Homo sapiens
gatgtaagtggagtcccccaaattcttgcaaaatgcaatgactgttgcgaggttaattaacgagtagtttaggagcgagacggaactttgggggtgcagggtggccaaacactttgtattga

SEQ ID NO: 111141 - DNA, 122 bp, Homo sapiens
tttggtgttgacacaaaggagacacacattggcataaccacctatgtgatgcagattccgcggtgtgacatgaatgcatagaactcatccctctgtgactccttctgtggaactgaaaagtt

SEQ ID NO: 111142 - DNA, 122 bp, Homo sapiens
tatatatgtgtgcttgctgttatttttttgttgtatctagttttgtctcttgtcagataacgctgggctgtcacaatatgccaagcactaggccaaatccttgaaatgcatcatgtcaggag

SEQ ID NO: 111143 - DNA, 122 bp, Homo sapiens
ccgcacattccacacgcggcccaaacggtctctctctctctctctcaaacaccgcctttccgtctttgttttatcttgagtagcttagaaagattggagaagaaagcttacgtggaatgaaa

SEQ ID NO: 111144 - DNA, 122 bp, Homo sapiens
gcatttttgagcaccggggagggcgtttctgtgaacacagagtccgaggtgctgttggcccggaagaactcattatgcccagggaactggcccaggtgtgctttctcctggtttccaggtaa

SEQ ID NO: 111145 - DNA, 122 bp, Homo sapiens
tgtggcacctcctagaaggcagcaccttccagctcaactccagcggctgcagggaaggggcgggcggcgggaactaaatggtccctgggctcccgggcctctaaagggcgctccgcaggcgg

SEQ ID NO: 111146 - DNA, 122 bp, Homo sapiens
tgcccccggggcgcggcggcggggaccccggggctcgcctccgcccagggcccccctccacgccctcgggagccccgggcccccgctgagcactcctcccgcacgcctgggtccctccggcc

SEQ ID NO: 111147 - DNA, 122 bp, Homo sapiens
ggaacaaagccaggtcattcctgtggggagggagcgccaaccccagggttggggggggcacgggccctgggtcaggggtacagataagcctgggctcccagaacccttgtcacagcggcacc

SEQ ID NO: 111148 - DNA, 122 bp, Homo sapiens
ctgcttggccaaggggctctcaggagtttcactctaaaaacatgtactggccatctgaggcggtctatttggtgggaggccagtgtttcctagagaagccaaaaggccctggcataggcctg

SEQ ID NO: 111149 - DNA, 122 bp, Homo sapiens
tagaactacaactcccagaaggccttgccactaccgcgaggaacagcgcccaaagtcacgcgaagatgcagtttctccgtatccgcaggcttctttcgctggcgccattacctgagttctcc

SEQ ID NO: 111150 - DNA, 122 bp, Homo sapiens
gggcatgccgtctagagggctgcagtgtcaccaggctacagctggggtcatgctgcctggcgccatgctgtgccttgatttcctgattgctaattagagggcacttttcctgcccaaggtca

SEQ ID NO: 111151 - DNA, 122 bp, Homo sapiens
ggcacgatatatttgtagttaactcatgcaacttccaccttgcaggctcagccaaaaaaccgaaaaaaagaatgtgagaaaaatcaattcatgtaattaaaaaacaatccaaaagcattttg

SEQ ID NO: 111152 - DNA, 122 bp, Homo sapiens
aacccgccgaaagcgcgggcgcttcccacaatgccccgcttcttccctgcgccgcggccgcgcgtgcggctgcctaagcgttcccggccctgtctggtgcattccccctgctgctgcccggt

SEQ ID NO: 111153 - DNA, 122 bp, Homo sapiens
cgcgtcgcacctgcagctctgctggaagctgggcaaacggtcgagcaggcggccgagcgacgcctccacgtcgccaaacaggcggtggatgcgctcggtgcactcggcgccgcggatgaagg

SEQ ID NO: 111154 - DNA, 122 bp, Homo sapiens
aaatggaacttcagaaaacccccagatatacactgcgttaggtaaggatttcattctaatcgagtccaatgtgaccctggctttccctcccgtagttatgcattcctgtctatgagtgagat

SEQ ID NO: 111155 - DNA, 122 bp, Homo sapiens
gcttccacctcctgggaaggaggcccagctgagagcctgccggaagccacagcttcctctcgcactttcgccaggcaggcagcaggtgtgggcctggccccggctgggctgggccggaacct

SEQ ID NO: 111156 - DNA, 122 bp, Homo sapiens
tgtttcagatgaagaactggaagacaaccccaaccagagtgacctgattgagcaggcagccgagatgctttatggattgatccacgcccgctacatccttaccaaccgtggcatcgcccaga

SEQ ID NO: 111157 - DNA, 122 bp, Homo sapiens
cacactgtctaacgtaggtctctcttgtccttctgtatctcggatttttttcaaagcacacgtcataatttgtaattattcatagtttatttgccagtatactttttgcctctcccactaga

SEQ ID NO: 111158 - DNA, 122 bp, Homo sapiens
gaggacggacttaacttccactgtgagagttacccgaagctgggcgtccgtgatggtctacggagcttctgaggtgattgggcagtgtcagtcttcagctgctaagccgagaagcagtccgt

SEQ ID NO: 111159 - DNA, 122 bp, Homo sapiens
tctgttccgaatggggaaatacaagaaagaggattgaggaggaggcagagggaaggaaagcgagcgctccagcgtgtcccacttgtactttccaaggccccctccgccccctccccccacac

SEQ ID NO: 111160 - DNA, 122 bp, Homo sapiens
tcacagcccatattaagcacttcaaaaatgttagttcctttcctctcctaacacaacacgcggcacattataggtgcttggtgcttgttaaactgaactcactataacacacagagtgtaag

SEQ ID NO: 111161 - DNA, 122 bp, Homo sapiens
gcggggacttcatttcctacactcccgggttcctcccatcctgcaccgggatctcaagtgcgacaatgtctttatcacgggacctactggctctgtcaaaatcggggacctgggcctggcca

SEQ ID NO: 111162 - DNA, 122 bp, Homo sapiens
caacttgaattttctcagtggattcccaaaatctccccctgcggacatggtgctggcagccggggccgggagaggaggaggaggaaaaagcgaaggagcagggaggggagagtaggagggcg

SEQ ID NO: 111163 - DNA, 122 bp, Homo sapiens
gcacctccccgttgacctcctgcccctggtcttggtgctcagcggctgcggcctggaggacgtccttaatggaggggaactggcccagggtatccgcaggaatctcctggccgttgaccata

SEQ ID NO: 111164 - DNA, 122 bp, Homo sapiens
agcgcatcatgtctatttttcacgtagcaactcccttccgggcattcggaaaacgctcctcgtcggatatttctacccacaggatgctctttctgtttaacatggaagtagctttgaattct

SEQ ID NO: 111165 - DNA, 122 bp, Homo sapiens
agcccccgacgcctgctccccagctgcggcaggcccgagtgaggccatcctccagctgcgcggttgcccacgttatggacaaaactccgccgccatcgcccaggccgcctccggaggccggc

SEQ ID NO: 111166 - DNA, 122 bp, Homo sapiens
agagcatgctccactggggagttctgtgcagtctatttttaatgctatttaatgaaggagcgagcgcctcactcagcaataaaagaagcatgagggaagacagagcagtgcatggttatgga

SEQ ID NO: 111167 - DNA, 122 bp, Homo sapiens
aaagggctatttcccggacccgcccccttcagcttgggaaagcgaaagcgtggcaggggccggacctgggagcggaggaggcgggtctccatagaaacctccacctgtttccggccgggctg

SEQ ID NO: 111168 - DNA, 122 bp, Homo sapiens
ctcccagacagggtggcggttgggcagagacactcctcagttcccagacggggttgccgccgggcagaggcgctcctcacatcccagacggggcggcagggtagaggcgctccccacatctc

SEQ ID NO: 111169 - DNA, 122 bp, Homo sapiens
cgaagccagttgatcgagttcacccttcacttggcattctctgttggactccgagtgggacggggaggccaacttttgaaaggggctgaaattaggagaatgtggagcatgtgcctaggtgt

SEQ ID NO: 111170 - DNA, 122 bp, Homo sapiens
ggccaccatagaggaagctgtagaggtcttgttcttcaggatccccttgactggccagtgcgaggcagtccaggccgccatttctgggcgctctggctgttggctcagggtcgctgcttggc

SEQ ID NO: 111171 - DNA, 122 bp, Homo sapiens
tggcagtggctacagtgcgtctcctgtgagcaggggctgtagctcaccctctcggagctacgccgtgctacggcggcaggagagggagcccgggcgctctcggtggaggaggctggggatcg

SEQ ID NO: 111172 - DNA, 122 bp, Homo sapiens
ttttcaccagacgttcactgacttcgtgactttgaggtgagacatgggatctctcagaagcgtctctgcatctgcatttcaggagatgagctgctgtccctggtggacagaggcggtctctg

SEQ ID NO: 111173 - DNA, 122 bp, Homo sapiens
cgcatgagaggcagactctgaacctgcacaaagccagagccttgggtgatgtggggacctcgcaagagttactgggaatggagatcctggccttgggacagagggagtggggctgcacagga

SEQ ID NO: 111174 - DNA, 122 bp, Homo sapiens
aagatgagcgagcagtcgactctggttggaagggtccagggaaatggggtcactcggggacgtgggccgcctccgggcgggcaacgcctgagaagcacgcagcgctcggcgcccagtgcgcc

SEQ ID NO: 111175 - DNA, 122 bp, Homo sapiens
cgagaccatgttaacccgccacacgacgatggtggtggggcccaccagagggggcaagtccgtcgtcattaacactctgtgtcaggcccagaccaagtgagtatgacctccgtagggagggc

SEQ ID NO: 111176 - DNA, 122 bp, Homo sapiens
ttggacatggaggaaacctgacaaaaccttgggtgctatgtgattcaaatcacagcccaccgaagcggccaccgcgcgtaccaagccttcccccctagcatacgccttctgtgaacgggctc

SEQ ID NO: 111177 - DNA, 122 bp, Homo sapiens
gagatttaagatgctaatgagtcatgagatgtatgaacaagcatgtacagctactgcacacgtgcacccagaagaccgcccagaacatgcttgctagtaacacctcttcccacccacctcct

SEQ ID NO: 111178 - DNA, 122 bp, Homo sapiens
tcaggttgaccagccgtatatccgcttgcgagcctgcaccaccctgggcgcgcgtggtctcggcagaatctcgttcacacgggtcccactcgtaggctgctgtgtctccttcctctcacggc

SEQ ID NO: 111179 - DNA, 122 bp, Homo sapiens
ttgtgagctggagatgctgaaacaagcaccggtgtgctgggttggccaagatctaagtcccggcatgctcgggtggtgctggcgccgtgggataagggctacatgtgctccaaccctgcctt

SEQ ID NO: 111180 - DNA, 122 bp, Homo sapiens
tctctgcctcagtgtgaactgtatcggagagatgtcctcccagcgtgggctgctgtcctgcgggtgagaatcataacgtggtcattcagaaccactcgtcttaaagtgtcttctctagacaa

SEQ ID NO: 111181 - DNA, 122 bp, Homo sapiens
tgtccagcgcccaggcgagacccagaccacccacgtccagcatgcgcccggctcacaccacgagctcaacagttaatgacctgctcgctgactgatgtcggctcttactgttgtctgtggtc

SEQ ID NO: 111182 - DNA, 122 bp, Homo sapiens
ggccgcgtccccgccggccctgcagacgtggcggggcgggacccgctgggcactcccgcgcgtactcggccgcctgagcggtaagagccccgggcactcggtccccatccccttccccgggg

SEQ ID NO: 111183 - DNA, 122 bp, Homo sapiens
cagagcaaaaatcatcactgggacaaagactactatgtagggtagcaatcccagctgggtcgtggggactccattcccactccaaaccacaaaatgagtgccttcaaaacatttaagcaatc

SEQ ID NO: 111184 - DNA, 122 bp, Homo sapiens
ctgggagaggagatgggacaatgggaagagaggcctcgggaaggggcagggcagaagaagcggataggtgctgtgcttcagagctgtccttcccaggagctctggcctgaagagggacaaac

SEQ ID NO: 111185 - DNA, 122 bp, Homo sapiens
ctctcgctctcggtcacggtctctgtctcctgatcacgctcccgttcccgatatctctcccgctccttgtcccaaggtgtcttgattgtggagggtgtataatccccaatgtcttcgaaaat

SEQ ID NO: 111186 - DNA, 122 bp, Homo sapiens
atgcagaaatagtgtggtcctagggctgagataagggaccggtttggagaaaactgtcagcgtagaagtatttctttgaaattaactgtctagtaacagttgagacttctaaagcttagaaa

SEQ ID NO: 111187 - DNA, 122 bp, Homo sapiens
ttctcggctttcagagcaggagccggtgtgagctgggaggacgcgggttgcagacgtgaccggcgacagacagaccaccggatgcacagaaccagagagcaggcccgaagccgctgcggccg

SEQ ID NO: 111188 - DNA, 122 bp, Homo sapiens
tcgttgtgtagacgatggtgaaggaatcagtgctgactagaccagggactcctgtggggccgcaccaacttctggggaacaaatcagagctcttgttcctttccagctttccaaaccctcct

SEQ ID NO: 111189 - DNA, 122 bp, Homo sapiens
tacccaagaggaggtatcaaataggcaagtgcctctcaaagttaatctgcatatgagtcacgtaaggatcttgtttaaaatgcaaactgtgatgcaatgggtatggagtgaaggctcagatt

SEQ ID NO: 111190 - DNA, 122 bp, Homo sapiens
atgcaaaaatgcaaatccatggtatatttcccaaaataaaaatcattaggtttaacagcacgaacacctttaaatttggaagatattccaattcgttcatcctagagagtataccaatacca

SEQ ID NO: 111191 - DNA, 122 bp, Homo sapiens
gagcccgactgcgggcttccctatgcctctcatttccaagcctggcttgtttccttttaccgctcctctccaacgaggatcgcagagccctcatgccgagcggctcgctatggggccggctc

SEQ ID NO: 111192 - DNA, 122 bp, Homo sapiens
cgggggcaggggcaggagcgcgatcgcgcgcggggcccccggggtgtgattagcaggcgccgcgagccgggaggaccccccagcccgccctggcagccagcaccctctccacacccgcccag

SEQ ID NO: 111193 - DNA, 122 bp, Homo sapiens
taatgtgtaggtgaatgcaaactccatcgttgagcctggggtgtaagacttcaagccaagcgtatgtatcaattctagtcttccaggattcacggtgcacatgctggcattcaacatgtgga

SEQ ID NO: 111194 - DNA, 122 bp, Homo sapiens
agggtgtgataaaaattacttgacatattgtgacacctgtcacacagtgagtgctcaatacgttggttctttgcccactatggtccaaatcgaatgtaccagtccaaagtccctccttcaaa

SEQ ID NO: 111195 - DNA, 122 bp, Homo sapiens
atctccacttctctggtgattcttaaagaagtctttgttcacagtccctttggaatctgccggggttccttcccaaaacacaccactcctaaaagaggtgcagactttcgtgataactgaca

SEQ ID NO: 111196 - DNA, 122 bp, Homo sapiens
ggcgacttcacccaagaggccttggggtgacttcactccccaaatctcttacaaagcacacgcatctcctcgggctgaagtgcaccctggcgtggtccctggaaggcggtcattggccgggg

SEQ ID NO: 111197 - DNA, 122 bp, Homo sapiens
tagtgtagggttaagaagcgtcagacctcggagaagggcctcacttcctcttcgttttgtcgccctttgtgttacatacggggcaagcaaggtctgccaatcactaccatttctctttcttg

SEQ ID NO: 111198 - DNA, 122 bp, Homo sapiens
tccttattaagctccagtgaggtaggtttgccgttactttttaacaggtggagaaactgacgcttggagagaaaaattaacttggccagaggcacaagtggtttcccttgtgccttcaattc

SEQ ID NO: 111199 - DNA, 122 bp, Homo sapiens
ctaccagtgtggcctccctcctccggacactctgccccggggcgctggcgaaagtccttccgtaggactcagacccacatccactgtgcaaccgtgtgaggcacaccctcctcgccggaggg

SEQ ID NO: 111200 - DNA, 122 bp, Homo sapiens
tgcaatttggcacccttaaatgtacttggctatgttccagaacagagaaaaggcaatgttcgtatctgtttcacgcttgcctcgtgccagagactgctcagtatttcacgggaacaacactt

SEQ ID NO: 111201 - DNA, 122 bp, Homo sapiens
gagtttgtgatagactcacacaatggagttaatgttttttgcaggttcggatcagaagaccggcctcacattagatggtcatgggcactaatgacattaataaacaggtttgtagggcctgg

SEQ ID NO: 111202 - DNA, 122 bp, Homo sapiens
gggagaattattgtaggtaggcctatgagggcatcattatatcagggaaacactgaatcccggcatgaaatgaagatggacaggcctgtgctcccaatttctcccaatgcatttattctcat

SEQ ID NO: 111203 - DNA, 122 bp, Homo sapiens
cactcccaaggtccagggaaggggccagccggcgcttgagcgcgccacgtggagcgcgcgcgcctgcagccaaacctcagtcggtccttaaagtggggtccccgcccctcccgccctgctcc

SEQ ID NO: 111204 - DNA, 122 bp, Homo sapiens
agtgctagctttaaatggattgtcttattcaatcttgacacttggaaataggcatcctcacgtccctttgcagatgaagaaactgaagtcgagagaggtttaaaaactggcccaaggactca

SEQ ID NO: 111205 - DNA, 122 bp, Homo sapiens
atgagtcggcccctgggtcaaagccgccggagacctcctgaccctattgctcggtggcaacgcagccggcgacttcaagctgaaggccctgctggggtacccctcggagaacccgtgtttcc

SEQ ID NO: 111206 - DNA, 122 bp, Homo sapiens
aaatacaaagaactactaaatcagaagtctgatgctgggaagatttatttgaaaatttcacggtcaaaattttaaagttgaaatgtccttgaagatctcttatgttaggcttctttattttc

SEQ ID NO: 111207 - DNA, 122 bp, Homo sapiens
tccgagctcggcctgtcctgggggtggaggaggaagttcgccccgcgcctgcctcgcaaccgcagccgcctccgtgcgcttcctgcccgcgccgccctccacactgcgctccgtgtctggca

SEQ ID NO: 111208 - DNA, 122 bp, Homo sapiens
gagtggggaaagaacatcgtctgcgtggggaggaactacgcggaccacgtcagggagatgcgcagcgcggtgttgagcgagcccgtgctgttcctgaagccgtccacggcctacgcgcccga

SEQ ID NO: 111209 - DNA, 122 bp, Homo sapiens
gtccccgcctccccggggatgcccaagttgcacttgcagaaagtttgagcctggcctgcgcgcgcagcgccccgctcttccttgacgcacctcgcggagcgcgcgccggcacgcgggcagag

SEQ ID NO: 111210 - DNA, 122 bp, Homo sapiens
tgaaggctctccttcccgcgagcccgcggccgggacctgcagtgtcagacctaaactcctcgttggcccagatgtcccatgaaggccttggcgcgtgaacagccatctcacccacaaaccca

SEQ ID NO: 111211 - DNA, 122 bp, Homo sapiens
gtcgggggcctgtttcattctacttaagattccacaaggcacagacagcagcaactcgtgcgttatttttccctctagaatttccaggacgtcgaggagacgctgtgcagcaagttctgtca

SEQ ID NO: 111212 - DNA, 122 bp, Homo sapiens
gcgagaggaggggggtgccaggccagaccctgctctgggatcacacgcacctccagcaggcgtgagatggcgtcaggctgggcccgcgggcagctgtcgtaacagggccacaccacgcggcg

SEQ ID NO: 111213 - DNA, 122 bp, Homo sapiens
ctacagatccattatataacagggagtggtgcagttggactggatttgggctgtctgccccgcagaagtggcctgtgctgaatctggtaggggcagtaacttgtggctttgggagaatgaag

SEQ ID NO: 111214 - DNA, 122 bp, Homo sapiens
agacagtctgtgtatgctttgcatttcatcacactagaaggcacatctgagaaggtaccccgagcacactgcttacaccgcacatcctcagtctctgtccctttcttccgcacaccccaacc

SEQ ID NO: 111215 - DNA, 122 bp, Homo sapiens
tagggtccctgtcgccccggtaaccatgatgcacggcagccaatggaaaccagcaagtcgcggccctgctccatgattgggactgaagtaaggaggtagcggcccaatgggctgtgggaacg

SEQ ID NO: 111216 - DNA, 122 bp, Homo sapiens
gctctgtccaactttgctgttggcaaacagcgggtgcagtggtcccatcagatgctctggcggagttctggccgggagtggccctggtgagccatatgtcaagggaatgctgattgaacaga

SEQ ID NO: 111217 - DNA, 122 bp, Homo sapiens
cccgagctggtaaaagggagcaggtcagcacactagccccaatctgggcgctggtctcaccgcccccgccctgctatcgtccctacctccttccagccctgcggcgtgcgcgcaggccagcc

SEQ ID NO: 111218 - DNA, 122 bp, Homo sapiens
ggccagctgcagttcggggtaggcacgggcttggcaggccctgcactcggagcagcctgccggccctgccgccccaagctgtgaggggcttagcatcttcgccagcagctgcggtgctctgg

SEQ ID NO: 111219 - DNA, 122 bp, Homo sapiens
gtttttataggaagctgccagactgttctccagagtggctaaggcgttttccctttccaccgacaatggaggggtgattccgtttctccacatcctcaccagctttcagttgtcattatctt

SEQ ID NO: 111220 - DNA, 122 bp, Homo sapiens
tacagaagtcttcaagttctattttttaatcattcatacagccataacatgcatactagtcgaatatgagccttggataagggattagggtagataagcagcagagtggagtcctgaggtga

SEQ ID NO: 111221 - DNA, 122 bp, Homo sapiens
ccacacctcatcgagctctgggcgttgtgccagcatttgaagaagcgatctgttgcaaagcgatccacacggagagccttagttatcgcgagacttgacaggcaccctcaactttagcccgc

SEQ ID NO: 111222 - DNA, 122 bp, Homo sapiens
cctctctctggtgagtccccaggacgcccctggccctaatttcctccagctgcgcacctccggccctcactgcacgcgccagccttctttgtgcggtcgggtaaacagagggcggagtcccc

SEQ ID NO: 111223 - DNA, 122 bp, Homo sapiens
tcaggcatcagaagtgagcggctccccctctcgcagtcagaggcacagcgggtgggtgggcgtctctgctgcagctctgcctggctgggtcctggccagcagacgaggggctggaaagcctc

SEQ ID NO: 111224 - DNA, 122 bp, Homo sapiens
actccgcctctggggccccgcccaccgcgagcggcaggtggggccggcagatcttctttgcgcatgcggaaaccgctgcccgcttccacctctaacccaggctcagagtagctgctgtttct

SEQ ID NO: 111225 - DNA, 122 bp, Homo sapiens
tgatgaaacttccaagaactgcatgataacaaggacaccgtaagccaaaatggtggcgaccgagagtagcgctgatgccctaagttttggtgacactctcagtgagagccgtttgggctaaa

SEQ ID NO: 111226 - DNA, 122 bp, Homo sapiens
gggatggcgggggcctgctggtgtcgcatatgttttgcattccagctcaggattttgcagcgcatagagagcgggcgtcaccactagggggatatgctacccacaaaatgcaggtggaggct

SEQ ID NO: 111227 - DNA, 122 bp, Homo sapiens
aacactctagcattcatgccaccaaaaagaggagtgttttgcagttacaagacctggattcgaatcacgactcctcttagctgccctgtaatcaggcacaattacttgggtctctgagtctc

SEQ ID NO: 111228 - DNA, 122 bp, Homo sapiens
tgaagtcttcccctaccaagccaaatattgcctgcacccagcagtgatgtcaccctaatgcgcagggcttggttcactgccattctgctcagagaaggcaacagatccttggccatgtgtgg

SEQ ID NO: 111229 - DNA, 122 bp, Homo sapiens
tggttgatgtatacaatacccaaaggcttaatcaatcaccagcacaagttggtggttgcccggatgtgagagaactcagtctgtcttaagagtccccagggtcaggaacaaatggattgctc

SEQ ID NO: 111230 - DNA, 122 bp, Homo sapiens
ctaccgcggaggcactgtggcctcgggtcggccccggagcgaggcctccagaactaccatcgctctgtcttcagcgacttcccggtagccgccggaaaacttccgccgagaccggacgtgac

SEQ ID NO: 111231 - DNA, 122 bp, Homo sapiens
tttaacaaacagacccgcggaacttgttagagagcccggcgaagagttggctgctctccccgtccacacatacgataccagagccaggggcgagggctggaggcagagttgggagcctgcct

SEQ ID NO: 111232 - DNA, 122 bp, Homo sapiens
tgttccgtcacagatcaaatctgcctgcactaagaggatgggttcctctgcaaggcctttcggaattctgagtcttgtctgtcaaactctaccctctctcctccacatcccccaccttttct

SEQ ID NO: 111233 - DNA, 122 bp, Homo sapiens
gtgaagcgtgttctctacataggcaacacagccgcctaagtcacaaagtcagtggtcggccgcttcgaccaacatgtggtgagcattccacgggcgcatgaagtctgggtgctgtgctcgag

SEQ ID NO: 111234 - DNA, 122 bp, Homo sapiens
ggtggcgggcgggcgtggggccgggtcgtccctgcgcctcgccgccgcctcctccgccgccgcctcccgagttcggggctctgctgcaatgtctgcgaggctgactttgagcgcctcgctca

SEQ ID NO: 111235 - DNA, 122 bp, Homo sapiens
aaacacctgatcttcaaataccatcacatcggcagttagggcttcaacatatgaattgaacgtatgggtgggggtgtgtagggtagaggaagagatacacaattagtccatagcagacagtg

SEQ ID NO: 111236 - DNA, 122 bp, Homo sapiens
aactcctagtcagaaaaggactcacctgccatagggaacagcctctgtccttttttacagcgttggaaagagcctcagagtcaaaaatgaaagtaaactatgtatttccttattgcaaaggg

SEQ ID NO: 111237 - DNA, 122 bp, Homo sapiens
agccaatgaactagtcaacagccttttctccagtgctcaacgaagacacaatccggcccacgaccaggtgctaagtgctgcttggtagcacttgagggagaggatgcgcagagagagtatta

SEQ ID NO: 111238 - DNA, 122 bp, Homo sapiens
taaagtgtgaggtttactctgagtgactcgtgcaggccctgctggcccttgtcccagctgcgtggtgttccatgggtgacatttgttcgttcgtgttccgtcaatggagggaggttggttcc

SEQ ID NO: 111239 - DNA, 122 bp, Homo sapiens
cctccgagggcgcacggctttaacccgagttgccagcgcttttcgggccccgggcgatgtcggttgttcagggggctctctgggtgcctggctggcctccgttcccacctttgaagtgagct

SEQ ID NO: 111240 - DNA, 122 bp, Homo sapiens
tggggatcgatcctccccacccgcgcgtacccgtcaggtgagccccccatcccgcgccttcggggccatgccttgggaggaaggacaggaaactttgaccggtcctctctccaaggccacga

SEQ ID NO: 111241 - DNA, 122 bp, Homo sapiens
tcctcgtggctcctccgacagggtgggcactgtggcggtcgtaaggggcagggatgagcgcgctcagggagaccccgcggttaccgcagcctttcagggaggagggaggcggcggatgcggt

SEQ ID NO: 111242 - DNA, 122 bp, Homo sapiens
tgcgccccgggccggggtcactcaccgtcctcgctctggttgtagtagccgcgcaggttccgcaggctcactcggtcagcctgtgcctggcgcttgtacttctgtgtctcccggtcccaata

SEQ ID NO: 111243 - DNA, 122 bp, Homo sapiens
gcttactcccgggctggaccttggggttcgcatatttgaaagcgtaaacttgaggaatgacggcggggtgatgggtattttatagagtgggactcaatcgtgctcagcaacagatttctcca

SEQ ID NO: 111244 - DNA, 122 bp, Homo sapiens
cagcagaaggttacagcttcacactcaccaggtccccagccggcagccggcgctctcagccgggacctcccggcgtcacctcccgcagccccgcccaacccaagtcttcacagctcactggc

SEQ ID NO: 111245 - DNA, 122 bp, Homo sapiens
atgacccgggccaggcaaaggacccgcccgagcggtataggcctgagcctctgggcactgcggccgcgtccggcagggctgccacggcagtacagggcctgcacatccgggagctcacgccc

SEQ ID NO: 111246 - DNA, 122 bp, Homo sapiens
tgggatggtcacggagcacggtgctttgaggctggctctgcgtccctgactagttaactccggcccacacaggccacgtggtgtttaatggggagggacggagacgcagcagcagggctggg

SEQ ID NO: 111247 - DNA, 122 bp, Homo sapiens
ggacgtaccagggacatggagcatcagaatttcagcaacacaactgaaaataggttcccacgttgtggacaatatggctcactagctagatgctacacaacggggtccaatcttttggcttc

SEQ ID NO: 111248 - DNA, 122 bp, Homo sapiens
ggaaacgagtaggtctctggggatgctgtgggcaatttccacgacgggaagaaaggatggcggcacgtttcaacccatgtgcttccccttacatgtgcagcctgtcgccccccaccctgatt

SEQ ID NO: 111249 - DNA, 122 bp, Homo sapiens
gctgcataaccacattcctctcaagtttcaggatcatttacaattccaacagcagctgggcgtggtggctggtgcctgtagtcccagtaccagggatgttgaggctggaggattgcctcagc

SEQ ID NO: 111250 - DNA, 122 bp, Homo sapiens
ctcccccagcccatcttccctatccacccacccctcaccgggccaccacaagaaactggtcgatctgccggtctgtgagagggttgtctgggtcccagaccttcatctccatcttctgctgg

SEQ ID NO: 111251 - DNA, 122 bp, Homo sapiens
cacttgtaaggtttctcaccactatgaactctgcgatggcttgcaaggtatgacctcagacggaaggtcttgctgcactcattacacttgtaaggtttctctccactatgaattctagtatg

SEQ ID NO: 111252 - DNA, 122 bp, Homo sapiens
acatcctgcattcactggaaatgattgtagattgtgtccttgttctctggtatattctaacgctgtcctgtacatactgctctgtgttgcttttatttggattgttagtgttttctaaattt

SEQ ID NO: 111253 - DNA, 122 bp, Homo sapiens
gtcagggcgtgcctgcactgcatgtggctgtggccagatgcccagtaagctccatgtggccgagggcaaaggcacacatgggcttttgcgtgggtgtccccgtgtgtgtccgtgtgtctggg

SEQ ID NO: 111254 - DNA, 122 bp, Homo sapiens
cctctaggaacgttagattggtaatagaagaacgtctcaagtgagcatgcgtataactcccgtaaacacactgcgcatgcagcccttcccaagcactggtagggcactgggcatgcagacag

SEQ ID NO: 111255 - DNA, 122 bp, Homo sapiens
ctaattgttaatttgaaacagtacaggatatctggtggacaaaacatgttagaagcttaacgtttgctttatttaggcagactggagctaaggccagtgagcaccacccagtggtgaatgct

SEQ ID NO: 111256 - DNA, 122 bp, Homo sapiens
gcttccggggccccgggcggcccagggcgggaaggcaggagcggagagcgtcgcggcccgcgatccagcagttagaggctagcgccgaagccgagctgccgccgcccaccatcaaaccgtgg

SEQ ID NO: 111257 - DNA, 122 bp, Homo sapiens
ccacctaggctaaactgcaaagccactggcaatggagacgcaggcgctgcacccccgggacgcaggcagaggtaccttttccgcgaggcagaggggccgccggtgcccagaggccagctgcc

SEQ ID NO: 111258 - DNA, 122 bp, Homo sapiens
aggtaatcctattagacctaaaccaaaggggcaggctttcccctagatggatcatgaagacgcaaaaccgtggggtgggctggcagggtcacccgaaagtgaggagcactgccatctgtttt

SEQ ID NO: 111259 - DNA, 122 bp, Homo sapiens
gagggtcactggcctcaggtagggcacttgcagcgctgacctggggaggacattgctctgcgggagggcaggcttcacagtggggaggggggctgggctcacttccccttccaggagggctg

SEQ ID NO: 111260 - DNA, 122 bp, Homo sapiens
cctcggtttttgcccaatgtccttttcctgtcccagggtcctgtccaggctcccacacgacgcttaacaccacgtcttcttgggctcctctaggctgtgaccgtttctcagacgttcctggt

SEQ ID NO: 111261 - DNA, 122 bp, Homo sapiens
gttgggcacattgtcttttcataggctcatgtttgtgaacatttctccactggaagagaacgtctccgagtccctcaactctctacgctttgcctccaaggtgcgattaccacccgtcagcc

SEQ ID NO: 111262 - DNA, 122 bp, Homo sapiens
ccaaattctcttccaacccccattgttttctcaccattcaccctctaaatgggttgtcagcgtcagctgcatattcattgtttcaggggagaattctttagccaaaagtcttaaacccctta

SEQ ID NO: 111263 - DNA, 122 bp, Homo sapiens
gtccatatggtctttcagtgaggcgcgtggagcggtgatttatgactgtcaccagcccagcgctgtctccgagacattcaaggaccgcgtgggctggacactcaccttcggtggcagggcca

SEQ ID NO: 111264 - DNA, 122 bp, Homo sapiens
cttggattccagtcccggtgggactgattccaaaccctgtgttttgtccctgcctcatggcgtggcctcacactacaactcacagactttggaaagctgagggagcttggtgagcctaggga

SEQ ID NO: 111265 - DNA, 122 bp, Homo sapiens
gctgggggctgtgttcttccctaggactgcgggctgcagctgagcggggaggagggacgccgttgctatcccctggcgggccacctactgtgtcgtcgttgccacctgcggcgcctccaacc

SEQ ID NO: 111266 - DNA, 122 bp, Homo sapiens
gcacgctggggcgctgaagttagacgctagcctactgggctgcacttccagggaccagggcggcgggggccgcccaccaccaggaccgagagggaaagcgaggctttcctttcctgctcgac

SEQ ID NO: 111267 - DNA, 122 bp, Homo sapiens
tcgttttgagatgtgttctcacaggcagttaagtcacttgcaatcatttggatccgtctgcgctttgcttttcagctttgtgagggtgggtccggagaagcctttggtttcgggattacttt

SEQ ID NO: 111268 - DNA, 122 bp, Homo sapiens
ttcttgaggcaggggaagcccttggtggcgttgaagtagaagtgcttgtccgtgacgacccgtttcaggcccaggaagtcctgcacgcggccgacctctccggccgggtcgctgaccagacg

SEQ ID NO: 111269 - DNA, 122 bp, Homo sapiens
cctgggagccctgagagtaaagaccaggtggcctctgagaaaccatgtgtaaaaggggcacgtggccctgccttcaggtctggggccctactgactgggcggtcccgctttctgagggtggg

SEQ ID NO: 111270 - DNA, 122 bp, Homo sapiens
gctgggaatggaagaaagctagatttttctattaagtcccgaaaccttgttttttcttcacgtcctttttttgtatgtgtgcattttgcttagtctttagtcagccatttctagtgcagttt

SEQ ID NO: 111271 - DNA, 122 bp, Homo sapiens
tccatcttccctgcggcttctccccctcctccttcttccctcccgccctccccggctctccgccctggctgtaaggccttccgtgtgctcatgactccacagttatttttacatctccagaa

SEQ ID NO: 111272 - DNA, 122 bp, Homo sapiens
tttatatatattctcacagctatttctcacacataaaaaactatcttttatgtgttcccccgacccccactggattggaattccctaagggcatggatgtttctgattcatctttgtatttc

SEQ ID NO: 111273 - DNA, 122 bp, Homo sapiens
ttgcaggtgcttggtccgtgttttaatggggttgtctgactcttgttgttgagttgtcctcgcttgattttaggaccagagttaaggcccacactccatctgctctcaacctccctcccccg

SEQ ID NO: 111274 - DNA, 122 bp, Homo sapiens
tgattttgatgcacaactagttaaaagcctttcataccagtcagtattcccagccttgagcgcacgcgcgcacacacacacacacatacacacacgcattaatttttgtactttgcttcttt

SEQ ID NO: 111275 - DNA, 122 bp, Homo sapiens
agtgccagacagtgggcgcaggccagtgggtgcgcgcatcgtggacgagccgaagcagggcgaggcattgcctcacctgggaagcgcgaggggtcagggagttccctttccaagtcaaagaa

SEQ ID NO: 111276 - DNA, 122 bp, Homo sapiens
gacgccctggccggggagtttctcggccccggccgcgaatagcagcagcagatgcagcgccgccgacaagcggaacatcctccgtacacgtccacacgccgccatcttgagtccgcggcgag

SEQ ID NO: 111277 - DNA, 122 bp, Homo sapiens
cctcctcctcaggctgcccctcagctcggagctcagccctgctgtgtggctctagcctggcgccctctgggcgttgacttcttctctgtggtctgggaggagatgtcgaggcccccgaggga

SEQ ID NO: 111278 - DNA, 122 bp, Homo sapiens
ggtggggatcgcccggcgaaaggaggggaaacggcgcgtttttgtcgccaggcgcgggcgcgcggagctaattgcgactctaatcctctgccccgcggcgcagccgagccccgagccaggag

SEQ ID NO: 111279 - DNA, 122 bp, Homo sapiens
agtgcaatgttctacctttgtggccttttccaagttaacaaccttgctccaatttcctcacgtgtaaagtgggagcagagaagtacctggtaataacctgcagggttgtttaggaaaactga

SEQ ID NO: 111280 - DNA, 122 bp, Homo sapiens
ccctggaggggctggaggaggccggccccagcgaggctgagctggacagcacgtggcgggcgcccggggccacctcgctgcccgtagccattccggctccccggcgtaaccgaggccggggc

SEQ ID NO: 111281 - DNA, 122 bp, Homo sapiens
tcgccgtcgttgttatttagtagtagtagtaacggctgacatttacagcgacgtcgatggcgccaggtgccaagctctttccttgtataatttcatggacactcacgcatcaactctaagcg

SEQ ID NO: 111282 - DNA, 122 bp, Homo sapiens
aagcggaaaggtgcgaaaggggaaggagatgggggaaaggggtggtccgaaaggggcgaacgcccaggcaatcaaatgctgaaccgaacttttaccgcgagaatccgctacccagtccagtc

SEQ ID NO: 111283 - DNA, 122 bp, Homo sapiens
aatgggacaaaggccctcagctgggacatttcttggccacaatgagaacagcagaaggcacgagtcctgaagatggaagaaaacaggcttgaaccacaaggatacttggtttttgctcccaa

SEQ ID NO: 111284 - DNA, 122 bp, Homo sapiens
ccagggtgattaattcggaagcggggcaggagtcaagttgcctcctagctgttttgctgacgctccagccccatcaagagccagctcctcaccttctgtaaggcacagaaggtgcctcaaat

SEQ ID NO: 111285 - DNA, 122 bp, Homo sapiens
ccagtgagagggtctgggaactcccactcactccagtgtccggagcttagcagggaacgccgtccccctgcacctcctactgagtctgaggtgttttagagagttcccggccaccatggtca

SEQ ID NO: 111286 - DNA, 122 bp, Homo sapiens
aattcagtgcatggtgttaaaatgcgaccaaacgctctatccggctgcaatctccccgcacgggagtgatttatgcagtagctggaggttagtcaggactccaggatgcaccgcagacaccg

SEQ ID NO: 111287 - DNA, 122 bp, Homo sapiens
taagacttggtagctctttcgctttctctgtaggttgaagagaagggaggtcagtgagtccgaatcatcacaggcagctttcaaagattaatcttaggatgattttttgaatttaggtattg

SEQ ID NO: 111288 - DNA, 122 bp, Homo sapiens
atcacgtgatggtcctgccccgggagagcgttgcccgtggagctgttttcccggtgatcacgcagggatctggatccctccaggccgtattttcacggatgacagtttcaggagggggtaga

SEQ ID NO: 111289 - DNA, 122 bp, Homo sapiens
ggagaaactgctgatacttgtttaccaagtgttgctttcaaccatgataccgcctttacgcgtcacagtgatgctgtgtcttccccattatggcaacagggctataggcatggagggcgggg

SEQ ID NO: 111290 - DNA, 122 bp, Homo sapiens
ccggacgccggcccaggctttttacacttttttgcctgtgagttcttaacggcgttttggcgagggacgcatcgtctccattatattaatgagaaacagattatgcaacctagatgatgcgg

SEQ ID NO: 111291 - DNA, 122 bp, Homo sapiens
ttcgatgtgctttggggccggttggcgtcccccccgccccaacccagtacatcgatggtgcgtccgcgcgccgaaggctgctctttgtgttctctgcagccacagcttagaagcgtccgagt

SEQ ID NO: 111292 - DNA, 122 bp, Homo sapiens
cgtttccagtcgcgcgcgcggcacggagaccgcccgctgtgccccgcgctgcgctctctccgcccctctcccgcgcaggcctccctgtgccagccggctgtcgacccaggttaggaagcccg

SEQ ID NO: 111293 - DNA, 122 bp, Homo sapiens
agttctttttttaacaggcataggttcccgaggccactttcggctctgtcggcctgaggccgagcccaggatttaatgttccccaccctcccgcactccccaagataggttggtagtgttag

SEQ ID NO: 111294 - DNA, 122 bp, Homo sapiens
cgcagcaagcgctccgcggagagcctggaggcggggcgcccttctctgagtccgcggggtcgcaccccgagccagtcggccagacctgcatcccgcgtagcatccctgccctctctgtgcag

SEQ ID NO: 111295 - DNA, 122 bp, Homo sapiens
ctctgccaagcacgaagatctcctcccagctcggatggattgctacctgggaaaatggaccgacccagggagtggcaggtcccaaggaagagggtcagtgaggctggacgtcacttgcactg

SEQ ID NO: 111296 - DNA, 122 bp, Homo sapiens
ccctctatccacgcagagaacagcctgccggccgccccaattcacatcgaaactcacttacgctgaaaggcaagtgaagacgtcccatgcctttgggaaaacagttgtcccctggagccatc

SEQ ID NO: 111297 - DNA, 122 bp, Homo sapiens
ctcccagctccgagcgtcctgggcatgtccgcattggcacggcgggcactcccggccccacggcagttgtgggtcatctctcccacccggctctggaaaaaagcgtgcagtcaggtgaccag

SEQ ID NO: 111298 - DNA, 122 bp, Homo sapiens
ttcatcatagatggggtatcctaaggcttctccctgttttaggggcattaggaagaaggacggcctaattgtccccagtacacaggcccctgaccatttagctggcagttgtcgatatgctt

SEQ ID NO: 111299 - DNA, 122 bp, Homo sapiens
aacacgtgcgaagttctctgggagaaaagcaccatctgcatttgcataaagcagagctgccgaggttaagctgtcaacagcttcctagggaaaatgtccctgaaacagataagacatttacc

SEQ ID NO: 111300 - DNA, 122 bp, Homo sapiens
tctctatacctttctctctcttcccctctccttctctgcctgtccctcaaacacactcaccgactctgggttcttgacaaagaccttggtgctccccatctggtactggtcgggctccatgt

SEQ ID NO: 111301 - DNA, 122 bp, Homo sapiens
cttacttcctgcctggctaagaggcaaagcagcatgcagttccaaagcccctgggttgggcgccagagcctgcaggttcagagtcagctaatgtttgatcttcttgaacctgactcagcagc

SEQ ID NO: 111302 - DNA, 122 bp, Homo sapiens
acagctttgtcctgggtgggtctgtctgtgaccgctctcgggtgactgtcacgctcatcacgttaaaaacgatctccatctccctctgtcaccctctgcacccccggctgcaggacgcgagg

SEQ ID NO: 111303 - DNA, 122 bp, Homo sapiens
tttaggcttaattatcactgagtaaacattgcctttatattactttggcgatctgcagaacgcgcagccctcgccattcaggagttgttagttccctaagcctcaggtttctttagtctggc

SEQ ID NO: 111304 - DNA, 122 bp, Homo sapiens
cttaagagtactcgggtgttccccagcgtagttccacgttctccaactgtcgcttcggggcgacccttcgacccgggttcaagcccccatgttgggcaccgcttgccgagaccagctcggtc

SEQ ID NO: 111305 - DNA, 122 bp, Homo sapiens
ccgccgcagtgatttattcgcttcacccggcggaatcaggtgctgaaccgagccccggaacgagagaacagatttctcccaggaaaggttttgtgaactaaacgatgctaattacggggtgg

SEQ ID NO: 111306 - DNA, 122 bp, Homo sapiens
tagagcagttcctgaccatcctgccccaggagatccagagcagggtgcaggagctgcatccggagagcggcgaagaagcggtgacccttgtggaggatatgcagagagagcttgggagactg

SEQ ID NO: 111307 - DNA, 122 bp, Homo sapiens
gcgggttccaggggtcccccacagatgaggtggagctgggacatcgaggtggcctggtctcgtttgttaccgtcagagggccccgagagctgcagcttgcggtgctgttgcctcggcttcag

SEQ ID NO: 111308 - DNA, 122 bp, Homo sapiens
cagccccaccccagggagccagagaggcttgcactcaggagagaaccacccccaagtctccgttctactgccgtgaactcatgtgttgccatgtacagaggccacagcagcatgaagggttg

SEQ ID NO: 111309 - DNA, 122 bp, Homo sapiens
cgggcttctgggagggaaaggaccggagggcccggcccccttctcagacgccgtagttcccgatgtgccggccgcaatgcctcctggggcttgaagtccacaccgcccaggccggtgaaccc

SEQ ID NO: 111310 - DNA, 122 bp, Homo sapiens
ggtcctgcaggtacttggcgggcggcttggccggctctgggaggtagggctccaggggcccgcaggccggaaagcgggtcagccgcgggccgcggggcggcgcggggtgcaggtgaggcgca

SEQ ID NO: 111311 - DNA, 122 bp, Homo sapiens
tgcgccaggtggtagctcacgtgcgggctcaggagcgcgagctgctggaggctgtggacgcgcggtaccagcgcgactacgaggagatggccagtcggctgggccgcctggatgctgtgctg

SEQ ID NO: 111312 - DNA, 122 bp, Homo sapiens
accgtgactactgctgctgtgatgatgtgactgtgctgccatgatcttcactgttcctaccgcctctgtgactaccgcctctatgaccgacgctgttactacgactgtagccattgttccta

SEQ ID NO: 111313 - DNA, 122 bp, Homo sapiens
caatttcagcatttctgacttctgaacagtatgactcagcctgccctgagaacttggaagcgacactcaagccctctgtagatggtgtgtgtgaagctctggttgggaatgaggtcgctgga

SEQ ID NO: 111314 - DNA, 122 bp, Homo sapiens
cgactcgacgaaagcccaattgaacgaggtgcccagactctgctctcaccagtacagttacggggctcggccactgtccctccttcctccctgcaccccaatttcgttgaccctctccgtca

SEQ ID NO: 111315 - DNA, 122 bp, Homo sapiens
tgagccgggagttgtcccatatggcattctaactgcctggctttgggacagtctaatagccgttccacacttcattttcctcatctgtaaaatgggatcgtcgtggtgcctacctggctggg

SEQ ID NO: 111316 - DNA, 122 bp, Homo sapiens
tcaggctccttcccccgctccccaccccccgcgcccccctcccccgcccccacctcctgccggcatcagaagcacctgcaggattttaggactgactttgtcatgctgttccaggattctaa

SEQ ID NO: 111317 - DNA, 122 bp, Homo sapiens
accttcctcggcttatagcagaagggggcctgtcacatggtgtgcacgtcagagcgctgccgagggaaggaaagcaagcctaggaaatcagcccttctcgggagagaaaattcacccgtagg

SEQ ID NO: 111318 - DNA, 122 bp, Homo sapiens
atgatttccatgggttaggagtccaagggtggcttactgagtcctcttctcagggtatcgcgaggctgcaatccaggtgttggctgggctgcattccattctcagggttctcttccaagctc

SEQ ID NO: 111319 - DNA, 122 bp, Homo sapiens
gccaacctgacttcctcaccctctgggcctccccgtctgagtctcagtaaacaagtttcccgccggtcctgatctgcagagatggcacctgccacccactctgcacatccccctcccgtcgc

SEQ ID NO: 111320 - DNA, 122 bp, Homo sapiens
gagcacatctgtcactcagggcctgagggggcgggttgttaaacgttatccaatcagggacgccgggctgggaacggtccaatcaggcacccagctggagcggacatgacgtcttccgggag

SEQ ID NO: 111321 - DNA, 122 bp, Homo sapiens
acttctatgtaccaggagttgttctaagtgttggagataaaacaatgaataaggtagatacggaacctactcatagtggggaatatagacagattaacaatcaattaaaaccagtgtgataa

SEQ ID NO: 111322 - DNA, 122 bp, Homo sapiens
acaataaactgctcctttattgaccttctcactcctctcctctcaacccaaagaggttttcgggaaaatggcttatggatggcagcagtttgcacttgttactattcactataacaggtccc

SEQ ID NO: 111323 - DNA, 122 bp, Homo sapiens
ggccgggcgggccctggagggtacgtttgcagtggcagcagctccctatctttatggttccggcgatcagagaaggcggcccgtcttttctctgcgggcccacaggcccagaacgttggccc

SEQ ID NO: 111324 - DNA, 122 bp, Homo sapiens
gatggaaacacaacagacatcagctagtccagagacagaaatgagatgggagcacattagcggtgaattgtgagactctgcatgatcccttcaggagactgcagccgtcagttacatgcaca

SEQ ID NO: 111325 - DNA, 122 bp, Homo sapiens
cgggcggggcgagaccacttctggggaggacgcccaatctggggactttctctaggtgcccggggagaaggcggcgcagcagcaaagccctggagggcccagtggcggaaacagacggaccc

SEQ ID NO: 111326 - DNA, 122 bp, Homo sapiens
ttacagtgtcatatttggccccactatgtctcagaggcactgcataaatatgaacagaatcgtctaatgcactttttcaaaacagtgcttctcagccaggggctagtgtgaattcattctac

SEQ ID NO: 111327 - DNA, 122 bp, Homo sapiens
cgatcctcctgcctcggcctcccaaaatgctggcttgtgagtgagccaccacttcacgcacggtctccttttgaagtagaattagacaatgttttacaccgtgccagtgaaagcaaactgta

SEQ ID NO: 111328 - DNA, 122 bp, Homo sapiens
aattcgcatctgcaaccattattatctgcttatacgttcacctcattccagaaacattcccgaggcgcggcaaacgtgtgcccatcccatccccggcaggacagggcttgtcaggcgctggg

SEQ ID NO: 111329 - DNA, 122 bp, Homo sapiens
ccagcagtctcagtggtggctgcagccaccaacctcaacagctggaagcaccagagcatgcgattctcaaggctttgggttttacccatgggtcaagctgcagctgcccccagagaatgaca

SEQ ID NO: 111330 - DNA, 122 bp, Homo sapiens
tccctggtctccgcctccaattccatcaccatgacacccaaggtggactttttggtttgccgttcctcacaggttgattgccacttccagtaaatgatggttcagttacattatttataaaa

SEQ ID NO: 111331 - DNA, 122 bp, Homo sapiens
gtggcagctttcgctttgttttccgttcccacatatcggtttggcatcgaacgatgcgtccgctgctggctcccgtgctcggtttctccacgccgcctccgggcggtgcgcgattcagctcc

SEQ ID NO: 111332 - DNA, 122 bp, Homo sapiens
tctcccaagctattttataagcttcttcaggtctctgatgtttacttttcatgcatgccacgcccgccgcccccatccagtcaggagggttggcctaaaagcttagtctgtatcgaaacaca

SEQ ID NO: 111333 - DNA, 122 bp, Homo sapiens
gagggcaaaggggtcgaggtccagatgggagatgtacaggcagacggatccgggccagggcggggaggtacaggcccagttgaggagcataaggaaccataggagcccaaaggaggcgcccg

SEQ ID NO: 111334 - DNA, 122 bp, Homo sapiens
ctggcgatcagtctgcagttccccagccagtgcaggtttcgtgtgcaaggggagagcttccgcggctaggagctgccggccttggggggtttgcggtgggcgggcactgcgctcttggacac

SEQ ID NO: 111335 - DNA, 122 bp, Homo sapiens
taacatgaggtttttcaggactagatcccatggccatacagccctgcctgccagattggacgtgaaaagtatttccgcatctgacattcctgtttcacccacacagggcatcgttttgccca

SEQ ID NO: 111336 - DNA, 122 bp, Homo sapiens
agggtagcagagcatggctgtttccctccacaatttaaaaacaaacacaaagattggtgccgtcgcttctctcctctactcagtctccgtgtaggtcccacgagtggagaaagggagaggag

SEQ ID NO: 111337 - DNA, 122 bp, Homo sapiens
tagctttgtgggggtcctgaggaggccccaacacaggagtccagggcgggaaagacaagccgcctcctcggactaacgcccgcccaccccgattccccgccaaaacccagaggtagcagctg

SEQ ID NO: 111338 - DNA, 122 bp, Homo sapiens
cttttccttcctctctgttctaggtctctggggtctgatcaataatgctggtgttcccggcgtgctggctcccactgactggctgacactagaggactacagagaacctattgaagtgaacc

SEQ ID NO: 111339 - DNA, 122 bp, Homo sapiens
ttacgggaattgtgctgaggagaaaaagcctcccccgaaaggtcgcatgctgtgtgattccgtatagataacattctcaaagtccaggctgtagggatggagatcagatggtggttcctggg

SEQ ID NO: 111340 - DNA, 122 bp, Homo sapiens
ccttttctgattaacagaaggcatagagaaagcaaatcgaggcttttcaaaccttcaattcgcactgtactctacatgtgggtccactagatgccgtggctcgtgatagatcttcagatggt

SEQ ID NO: 111341 - DNA, 122 bp, Homo sapiens
ctcccacctctcccgcagcctgcgcctgagcctgagccaggtcgcggagtttgagactgacgcaaaggaggcacccccgcagcagagatgctcgtctttctgccacacaccctggaggaccc

SEQ ID NO: 111342 - DNA, 122 bp, Homo sapiens
ccgcgggtgagggtgtcctcaagggcctgaaaatgcctggtggccaggagcagagagcagcgaggggacaggggtgggccgccgaggccgatgtgggggcgcgggggcgcagggtctgggga

SEQ ID NO: 111343 - DNA, 122 bp, Homo sapiens
gcttgagaaactggcaggctcactgattagtcacataccactgctcatttaagtattgttcgacaaaacaattttctcatttggagcaagaaagattcagatctgtaaggcgccctcaagat

SEQ ID NO: 111344 - DNA, 122 bp, Homo sapiens
actcctgccaggtttgccacagaggtggagctgaaccaatcagcgggcgcgctgggcccgcggcgcggttaagtgagaagcagaatccgaagttgattggccaaaaggggatttgccccacc

SEQ ID NO: 111345 - DNA, 122 bp, Homo sapiens
gcgccttcaccagacacgcccggcaccaccttccaggtcagcagtcccagccctgcgtatcggaggcctgctctcccacagcgtccacagtcactgggccaggctcgcacctgtgaggggcc

SEQ ID NO: 111346 - DNA, 122 bp, Homo sapiens
acgcagccgcgccccacgagggccgcaccgggctgtactctagcgaggccagaggctgcacgacccgccagcggagcccagctgaggcccgccccaaaccacccaagagagaatgtattttt

SEQ ID NO: 111347 - DNA, 122 bp, Homo sapiens
cacatcctgcgcaaggccaagcgccgcgccctgggcctctaccaggccctgcagagccggcgccaggccctgggcccggaggccccggcccccgccaaacctgggccccacgccaaggagcc

SEQ ID NO: 111348 - DNA, 122 bp, Homo sapiens
gggcaccagccagagttgggactgggaggactctgaggaccccttccacacttttccctgcgttgagattcttggatggcacaggcccatgagaccatcaacaatcccaggtctcaagaggc

SEQ ID NO: 111349 - DNA, 122 bp, Homo sapiens
tgggcctggggatgtccccaatgctgtacctggctgaccccggattaaaagcctcatccacgaccgtgtccatctgtctgtccagctctccctcccatccccccaccccatgtccgcctccc

SEQ ID NO: 111350 - DNA, 122 bp, Homo sapiens
gaggactactggacggccagcggccaaacctacgcatgtgacctacagcgtatttcaccacgtcaggtgaaacctgagaaccgcgggggcaaaggtagaacttttttcttttttcttttttt

SEQ ID NO: 111351 - DNA, 122 bp, Homo sapiens
ttttcgcccgcacagcaggagcccaggctgaagtctgcagctgccgaggggccttcttcccgaatcctgcgcggcagatccaggggctgtgggcagccacgcccagcccgtgtaaacaggtg

SEQ ID NO: 111352 - DNA, 122 bp, Homo sapiens
acttcaggttcggagacgaggaggtggccgtcccccgtcccgcccccaacccgatgagggcgttgtcagccagggggcctgccaggtgttcacccctatcccacggacatcctgcattcctg

SEQ ID NO: 111353 - DNA, 122 bp, Homo sapiens
aagccaactgtacagagtggttgggcgcgatgggtgggtgggctacccggaaagcagcgacgatagaaattagcgggagctctagttcttgtaagtgactttgttggtttcacctactttct

SEQ ID NO: 111354 - DNA, 122 bp, Homo sapiens
ctccgagttcccacaggagaatgcacgtgcgctgggcaaggtgccaccctcggctcgggacggcagccttggcgtctggctacgggcgccgctttcacaggggtggctgggccgcctagagc

SEQ ID NO: 111355 - DNA, 122 bp, Homo sapiens
gcgcaccgccccgctccacgcccctatcaggattcgggtcctcgtgaggagcagtccaggcgacagcgttccaacctaatacgcctctctcgcccgccggggacaagacgggctggggaaag

SEQ ID NO: 111356 - DNA, 122 bp, Homo sapiens
caggcaggcggcctccctccccggaactcacacatggtggcgagcatgttggccgtggctcgctggtgctctgggaaccacaaggcagccagcttggctggagagaagatgaccaggctctg

SEQ ID NO: 111357 - DNA, 122 bp, Homo sapiens
tctggatacacccattttgtctgtccatgcatcagctgatggacccactgaggtgccttacgcgagcccagcactattctgcgtgcggggggtccctgctttggtccagtttcatgtttgtg

SEQ ID NO: 111358 - DNA, 122 bp, Homo sapiens
gctcatcagaacgaattctaacgggtcgctgaatgtgaagctcacgtcaccaacaaagcgcggtttcctccctcgccatccttcctcatggtcgcgcacccggttcacctcaccaacaaagc

SEQ ID NO: 111359 - DNA, 122 bp, Homo sapiens
gctggccaagtgctgccagatgccccaagtgacccagagaaatggtcatctggatttccacgctaaacatttcccgatttttaaatgctgccaagtatcttttcaaagatacacttcaggcc

SEQ ID NO: 111360 - DNA, 122 bp, Homo sapiens
gggccgctgcgctgggtttcccatgggtggcggtgggagctcacctgtttccttccctcccgcgtcagcccctccgccgcccctccttctctccccctccttttccttcccttccccacccg

SEQ ID NO: 111361 - DNA, 122 bp, Homo sapiens
ctgtgtgactggggcgagtctgggagcctctctgcgcctcagtctcttagggagggtggccgggttcatgcgcggggcgcgctgagaacgagtcgccctccttgtagtttctgtttttctcc

SEQ ID NO: 111362 - DNA, 122 bp, Homo sapiens
tccggcatccagaccttgatgctgctgagggccctgagcaggtgcccgcctcctggtggacgagcccctggtagctgcctggagacaatgggtagctggccacactgtgggagctgccctgc

SEQ ID NO: 111363 - DNA, 122 bp, Homo sapiens
taagcatcagatccttacaaggttagtgtgcctcaaattgccaagtgcatgcagatcacacggcgatcttgttaaaattcagattctaactgggccggactgtgtggggcttgggattccat

SEQ ID NO: 111364 - DNA, 122 bp, Homo sapiens
tgatgacctgcgatctggggaagccgcgccagggctctgcgaagctgcggacgagggaggcgtcagtgtgggggctgcagctcagctccgggggggacgcgcctttctccacgggacctggg

SEQ ID NO: 111365 - DNA, 122 bp, Homo sapiens
gaggtggccaaaatgaaggaaggtgaatctgtagtttgggaatttcattgccaccacatacgaaagccagcccaagaaaaatgtcagcagtgacggaagtagagctatgagattaagagtga

SEQ ID NO: 111366 - DNA, 122 bp, Homo sapiens
ggggaggctgtaacttgcgcaagcgcactcaggcagtctccgagcccgcgggcgcaggcgcgcttacagccgacagagcgcttcagccgcttccctcgagcctgcagtgcgcaagcgcggga

SEQ ID NO: 111367 - DNA, 122 bp, Homo sapiens
ctctgaaccaatcaggaccggcctggcagtgtcatggctgcccacaggtctgcaggcactcggtacgccgctaacgcggcgaggtagctcggtgcgtctcgcggtaccagtgcgaatcatcg

SEQ ID NO: 111368 - DNA, 122 bp, Homo sapiens
gccgtgattcaggctgtgggggctgagagggtgcgggcctatatccagagcttgccaccacgccagcctgtgccctgggagacagtgtacccaggtgccgaccgccaggccctatcactgct

SEQ ID NO: 111369 - DNA, 122 bp, Homo sapiens
tatctaaaatccttcactggctctccattgtctttagaatcaagtccaaagtccttagcacgatactctggctcttcaagacctagcatcagaagacttttttccctctttttctgaatcat

SEQ ID NO: 111370 - DNA, 122 bp, Homo sapiens
cgtggttgtgtgtgcctgtaaccccagctactcgggaggctgcggagaattgcttgaaaccgggcggcagagttcgcagtaagccaagactgtgccattgcacttcagcctgggcagagtga

SEQ ID NO: 111371 - DNA, 122 bp, Homo sapiens
cccaagccgtgccgctccgctcgcccgggccccgccgaggccgctgcgcccccgcctcctcgcgggaggactcgctccaaactccctgaacttcggggacagtcccccgaagcggcgaaact

SEQ ID NO: 111372 - DNA, 122 bp, Homo sapiens
tgcacggccctccatgagctcacgtgtgtcagcgtctgcaaagcccatcggcggcgtgcacggccctccatgagctcacgcgtgtcagcgtctgcagagccctccacccgcacatggggtcc

SEQ ID NO: 111373 - DNA, 122 bp, Homo sapiens
aaaagagaattacaacaaccaaaacaacaaacgaaactatagccataaaatcaattatatcgtctgtgagaaaaccggaaaggctattggacacattaattcacttgtcatcagtcatcccc

SEQ ID NO: 111374 - DNA, 122 bp, Homo sapiens
gctcagtgatgggcctggagaaaaccactgtttccctccaggtggggagggtgtcaccttcgaggatggctgggaagaagtggcagtgacacaggactggggtttgccctgggtcagtgggg

SEQ ID NO: 111375 - DNA, 122 bp, Homo sapiens
acggggtgtggggaggtgggggaggaacgtgtacttcccccagtttcccagggattctgacgccccagataaaacttgagagccacaggtgtaggagatatagaaaaatattgttttttgat

SEQ ID NO: 111376 - DNA, 122 bp, Homo sapiens
gctcgggtagctcagcactgctggctctgccccacaggcattcagggacttgctaagcctcggctgttctcccggtggagcactcgaggttggcgaggggtaggcgaggctgcctctgctgc

SEQ ID NO: 111377 - DNA, 122 bp, Homo sapiens
acatcccccatagcaaagaatgatctgactcctaatgtccatagtgcaaaaggtgggaaccgtagtatactctattcaaaagtcataaatgctatgaaaaaacattaagggaagaaaaaatc

SEQ ID NO: 111378 - DNA, 122 bp, Homo sapiens
cccagccccagcccatggctgagcaaacgacttgcccaaagactgcctaggaagtggcagcgcctggattcgaacccaggtctgacagaatcctacgcccgggccctttaaggctgaaaggg

SEQ ID NO: 111379 - DNA, 122 bp, Homo sapiens
gagtgctgaggtagttagttgacaccaccagttcattcagttcactaccttttcaatgttcgttagttctttcctgttctcacttcccttctggacatttaactaccagtgtctttgagcac

SEQ ID NO: 111380 - DNA, 122 bp, Homo sapiens
ccgccggggaacatggcggaccctctttccctacagaggggctaagaccggcatgcactgcgcgtgcgggggtgggggcggggtaggctctagggacttgggcaaaattactgaagctagga

SEQ ID NO: 111381 - DNA, 122 bp, Homo sapiens
gtctttccctactttaccatcttcagttttagtcagtaaatatgttcggagatcctaccacgcgctaggcgccgttcttcctgcttgggaggggtaaatacctagaaatgcgcgaagtgtgg

SEQ ID NO: 111382 - DNA, 122 bp, Homo sapiens
cgcttgaacctgggaggcagaggttgcagcgagccaagacggcatcactgcacttcagtccgggcaacagtgcgagactctgtctcagaaaaaaaaaaaaagactcagcttacgtgtcattg

SEQ ID NO: 111383 - DNA, 122 bp, Homo sapiens
ccgccatgcccatcagtaggaggtgaaataaattacggagcctccttctgatgaatcccgcgcagtcaaaaggtaccgcaggtctctgtggagatggaacagtctcctccacagcgaaagtg

SEQ ID NO: 111384 - DNA, 122 bp, Homo sapiens
acttcactcaggtatagtgttccctggaaccgggaggctgccagctgccagccctcctgccgctcatacggtgtcgtcagcagttttgtcaggtgcccccgccacgtcactatggcctctgc

SEQ ID NO: 111385 - DNA, 122 bp, Homo sapiens
gccacccggttcctccactcggggcacgttgtgcaccgggaccagaaggtgcggttcccccgcccccgctatgccacgtggcccggctcccggccccacccagccccggggcctcagcctgc

SEQ ID NO: 111386 - DNA, 122 bp, Homo sapiens
ctgactcccagctgcggagccgggagggaagctctgcattttgctttgactgtggggtgacgtgtcagttactgtccaaatcagaacctttctgagagtcgacgtgggtactgctgataatt

SEQ ID NO: 111387 - DNA, 122 bp, Homo sapiens
atctgcaacttgcacttttccaattacaagcccctctgcagcctgggtgggaaagcgcaccgctcccactgagggagcaggctccgagccggcggggctggggacgatgccgcagtgggtat

SEQ ID NO: 111388 - DNA, 122 bp, Homo sapiens
tcctttcccacccacaatgagatgaacactgtgggtgtgcctttgatccctaggcctccccgacccagtgacagagctcagtctgggaagcatgtggcaaggggaaagaaatagatccaagg

SEQ ID NO: 111389 - DNA, 122 bp, Homo sapiens
ggcggggcctgggcgaggtaggggcggggcgcgaggcggagagaccttgccttttagaaccggcagagggcagggccggggcgggatctgcgcgtctctcagcctcgctcccagcgtctctg

SEQ ID NO: 111390 - DNA, 122 bp, Homo sapiens
ctacgcggccagttttggagaactggaactgtgtagagcgtccggcggcagcggacccagcgctgctccattctccctccctccctccccccccagccccggtgactcactccgcggcccgg

SEQ ID NO: 111391 - DNA, 122 bp, Homo sapiens
cacatgagaggctcagtgtaggcgtctggacaggggccagtcccacaaggctactgactccggaccacaaagaagctggaagcagcagctccgcctctgcagccaattgcagagcttttttc

SEQ ID NO: 111392 - DNA, 122 bp, Homo sapiens
ggcagaaggcatattaacctaggacccagagcctgctaccataaattcaccataaaatctcgttgacattggttgactgtcagggatataaaactcagtgcccatgttttcaattatacagg

SEQ ID NO: 111393 - DNA, 122 bp, Homo sapiens
tctttagtttaattagataaggggatgatcctaaagggacgcagtggtcccgcccatcgccgcctctacagggagggagccgcggccccgagctggccacgcgatggcgctgtgcacccggc

SEQ ID NO: 111394 - DNA, 122 bp, Homo sapiens
tgaagccacggtcttccggtagcgtaaagtcacttccgtattcgagagccttctaggcttcgagccacgcgatgtcgcgccctctggcggctgggaggagggaccgactttaccaaacggtg

SEQ ID NO: 111395 - DNA, 122 bp, Homo sapiens
ggaaatatgaagagacgctgcagctgcggtggcggtggcggccactgcagctcagagcggcgcacgcggcggccggggcgggacgcggggccgggcgcggagaagtcggggcgggcggcaga

SEQ ID NO: 111396 - DNA, 122 bp, Homo sapiens
tacaagaggccctggggagaatgcctggaggagccagcggctgcgggtgcgcaaagggcccgctctagctcagccgccgccgctccgcagtatgaccagtggaccatctccaaggcctgcgg

SEQ ID NO: 111397 - DNA, 122 bp, Homo sapiens
gagcagcagccaggcttctgctttttgagggtgcggagacgcagcagtaaggagacaggacgtcactctcagagagctcctgacctctgccccacacaccagagacacgtcagctcccgtgg

SEQ ID NO: 111398 - DNA, 122 bp, Homo sapiens
ccgcgcggcgaccaggagctctggtcaccgaaggccaggctggaggccagagcagccgcccgcacccggtcaccgcctcgacagtggagacctcagctgaccgcgagcccccggcccgcccg

SEQ ID NO: 111399 - DNA, 122 bp, Homo sapiens
ggccgggggctaagcccctcactgcccagggccagcagggccggccggctgctccgagtgcgtggccgccaagcccatgcccacccggagctgcagctggcccgcaagcgccacgcgcagcc

SEQ ID NO: 111400 - DNA, 122 bp, Homo sapiens
ccttccttccctccaagtagggataatgctatgggttagagacattcaacagaggcctgccgcaggtggctggagatggaaagaggaggaggttagggtccccctgggagacagaggggagg

SEQ ID NO: 111401 - DNA, 122 bp, Homo sapiens
gaaaccctcccgggaggctgtggggggagccccggggctagtgcggcttcccctgggggtcgtgcgggggccgagcgccgggggttgtggaggaccagcccggggtgcagccctgccggccg

SEQ ID NO: 111402 - DNA, 122 bp, Homo sapiens
gctttgcgcctctccccggcttgaaggcctcggttcttgtcactaggaccaactcctggccgctcactgaagcacacctcatacacagccatccccgtgatcggcagattttgttcctacga

SEQ ID NO: 111403 - DNA, 122 bp, Homo sapiens
tcggattctcttcggtttctcctctacttagtggggcacgggacggcctccagatgggaccgtccagcagcgcccaaacttggcgactcgggttcacgttttgcgctcaggacgccgcccgc

SEQ ID NO: 111404 - DNA, 122 bp, Homo sapiens
tccccaacctcctaaactgctgtcggatgtagaagactcgcattcactgctctccacagtcggtgaagggagaacgccgaaaagggccgcattccctcctgccggtcccctccccttcccgc

SEQ ID NO: 111405 - DNA, 122 bp, Homo sapiens
tttggaggtctggctggcattatcttgatttcagcccaatggtagtggagaaaatgtttgcgactccccctaagcacaaggattctgtagttggggctctgcacttggtttgtttcaagatt

SEQ ID NO: 111406 - DNA, 122 bp, Homo sapiens
cctccgatgctggcctttgcgcctctagaggcagccactcatggattcaagtcctggctccgcctcttccatcaggaccactattaagccataggagtcctgggggtgcaaagggtgcccct

SEQ ID NO: 111407 - DNA, 122 bp, Homo sapiens
tttggggaccggccccggtagcgggaactttaattagactttctctccttggatctcactcgctgccgcgcttctgggaactgccgtccctcgggccctcttggtccctgcggactcccgct

SEQ ID NO: 111408 - DNA, 122 bp, Homo sapiens
acctcaggtgatccacccatcttggcctcccaaagtgctaggattaaaggcgtgagccaccgcgcccggcacacaactcttgtttctgtaatatattattgtatataggacgtgtcagatac

SEQ ID NO: 111409 - DNA, 122 bp, Homo sapiens
ctgcattttcttctctgtgtctcttcctcaactggcacgtcccaccagaaactccttcaccgtgagtccttgtgtcagtctgattctgtggaactcaagctaaaatgtgaaattcacaccta

SEQ ID NO: 111410 - DNA, 122 bp, Homo sapiens
tgtagatttttatgtgaacttttacatgtcttgtgcacagttacccgggggcaggattaccgggtcacgtggctcgcgcatgtttaacttcgtaagaaagcaccaaacggtcccaccaggtg

SEQ ID NO: 111411 - DNA, 122 bp, Homo sapiens
gtgggagtatcgcttgagcccaggaagtcgaggttgcagtgagccgagatctaatgcaggcgtcaagtacgttaccacgatctgatcctcagaccccatgcaggttccccacgtttcgcagt

SEQ ID NO: 111412 - DNA, 122 bp, Homo sapiens
caatacaaatctttttccaccaaagggagcttctttcaccaaaatgtggggtgtttgttacggggcacaccgagaagcacagtggtcatgtaaacctcggggaacccaagacaccagtcatc

SEQ ID NO: 111413 - DNA, 122 bp, Homo sapiens
tttgtcatcacctgcatatctgttcattcgttcactcactcaactacagtgcctgagttccgctccgtgcagagcactgtgctaagctctgtgggatatggcaaactaagactgacacagac

SEQ ID NO: 111414 - DNA, 122 bp, Homo sapiens
tggagttcctgccatgacatggaaacctggtggtatggaagcatgtactcaaaatatagacgtgcacgatggtggtgtggcttacccaggatggaaacactgcagttcttacttgcattccc

SEQ ID NO: 111415 - DNA, 122 bp, Homo sapiens
caagggccgggcagccccctggcctcccaggctccttctctgtgtccctgcccaactccccggggttcctaggctgcagccaggtttgaggctttgtgcagtgccttcctcctggaatgcgc

SEQ ID NO: 111416 - DNA, 122 bp, Homo sapiens
ggaaagagtgctttttgtctgtagtggcagagcccaagttagctactaaacaagctaaagcgcatgggatggtctgctaaaccaaactgtctttcagaaatagtcaacagtggcaaggttga

SEQ ID NO: 111417 - DNA, 122 bp, Homo sapiens
gggccaagggcggccatcagactaggagcccgggacccctcagaggccgcaggcgctattcggtggtcaagcggtcaagggcagcctacccccactgcccaagataggcaggaaggaggctg

SEQ ID NO: 111418 - DNA, 122 bp, Homo sapiens
cctccatcctgccagctgcctgtcaggctggcgtcgtgccccttggctggcagtattaagcgtccggaggccactatgtacccaaaacagcaagcccgttggcctggtttgctggagaagcc

SEQ ID NO: 111419 - DNA, 122 bp, Homo sapiens
tctgggaccctctgggggtggggcgggcggggtgaacttgaccccaggccgcgtgccgggcgtgccatctgccgctccgctgcaaggtctcgcccgggaccggggctggcggagcgcgcgcc

SEQ ID NO: 111420 - DNA, 122 bp, Homo sapiens
aatgagagaataaagagtaattaactctgccgtccttcctccctgaatggacttcttgggcgcctctcagctcacatcttgagggtttttttttaatttagtaaaatataaacaacataaaa

SEQ ID NO: 111421 - DNA, 122 bp, Homo sapiens
gaggccttctctagccaaggccggtcgaaaccaccttgtttgtgatagccacacgaataacggagctttacaagatcccttatacccaaaatagaggtggcagcattggctagcatctctgc

SEQ ID NO: 111422 - DNA, 122 bp, Homo sapiens
atgattatgattttttttttttttttgagagaaggtcttgctctgtaacccaggctggaacgcagtggcatgatcgttgctcactgctgcccaacttcctggcctcaagcgatcctcccacc

SEQ ID NO: 111423 - DNA, 122 bp, Homo sapiens
tatcttacaataaaaatagagttttatcttacagtttcaagcttctacttggaagtaacacgtatggaggctcccagggcccctacagtctggaatcccgcccgtgcgagcctgagcgcctt

SEQ ID NO: 111424 - DNA, 122 bp, Homo sapiens
agcctcctgccccggccgtgccctccgccgggagccgcggaccaggagtcgcaccgcctccggggaccgcaccccgcatgcagcctccagcccctgcctcttgctgctcgagggcacacgac

SEQ ID NO: 111425 - DNA, 122 bp, Homo sapiens
cccttactgcatcttcccaggccagatgctccgagaagccaagaggcctcccgaggagcccgtcacaggcttctgtgtgcagacagcagcgagccaccgagcagagctccagggagcggcat

SEQ ID NO: 111426 - DNA, 122 bp, Homo sapiens
ggctcccgggcccggggtgggtgggtccagggctcccaggcctggggcttggacaagggtcgtggggcccgcgggaggggacgggggctcaccggcccggggcgggcggggcgggcgccgct

SEQ ID NO: 111427 - DNA, 122 bp, Homo sapiens
tagtctacttggtgagtaaggacccagaaggcggaagcctctacccgacctgggctcctccgggcagcccctacataggcgcaagatattagaccaggaaggaacactcagtggtatatccc

SEQ ID NO: 111428 - DNA, 122 bp, Homo sapiens
aggcaggagcgatgggctggctgctgaaccaaggcaactgcacgcctgctctctcacccccgctccacacacaccgtaaacaaaatgaagaggtaaatcaccatagtggggacgggaatatt

SEQ ID NO: 111429 - DNA, 122 bp, Homo sapiens
gtaagatacgcagatggaggtatctagtcaggagaaagaaatcaccaagtcatgggctatcggggcaggagggaagccatcaagtccaactatcgcatcaacacagtcatgcgttgcttaat

SEQ ID NO: 111430 - DNA, 122 bp, Homo sapiens
cccggccccgccccggctctttccagaggtccgcagcctggccggcccagcgggcggaaccgatagtgtctggcacttggctcgcccggactctgaatcctggagcaccaggcgcccacgag

SEQ ID NO: 111431 - DNA, 122 bp, Homo sapiens
gttttattgattcatccttgaaatcagtataatgtgctattaatggaaccaatagtaattcgaggactagttgggagattctggggtaatcagggaatattcctgcaacacatttaaaggaa

SEQ ID NO: 111432 - DNA, 122 bp, Homo sapiens
gggagggcgcgagggcgtggggatgttggcagcggggtctcttgaaagcgtttcgccttccgctgtcccgcgccgggggcctgctgggaagcctgttggccccaaatcggccccctgcaaac

SEQ ID NO: 111433 - DNA, 122 bp, Homo sapiens
cttcagcagcccggggaatgagctaagagcccggctcctcacgggatcagacccaagccccgcccctcccgagccccgccttgtgtcgcccggcgcggggcctcgcccctcacctgtaagtc

SEQ ID NO: 111434 - DNA, 122 bp, Homo sapiens
gactaaagggaggcaggctgcgaggtgggctgtgacccaggaatcgtgggcagcttgggccgccgcacccagagcagtgccagcacctccgggccagttgccctggcacccgaaacttgcaa

SEQ ID NO: 111435 - DNA, 122 bp, Homo sapiens
cccgccgatccatctccctcacttctccaaatggaaccagttcaagggaggccaaataagcgaatggctcggataatgccgggtggagctgcacggcctgagtttgaatcccagctctgcca

SEQ ID NO: 111436 - DNA, 122 bp, Homo sapiens
aaatcaaagccccccccgaggctgctagacgtaggcgttaggcatgtcccacccacccgccgcctcccaccgcacctcggggacaccagagctgccgacttggagattcctggtctgtgaag

SEQ ID NO: 111437 - DNA, 122 bp, Homo sapiens
gcctcaggcccgcgggactgtgacagccggcgacccctgcgacctccctttctacccgggcgcccccaccttgagatagtcgttctccgagcgcagctcctccagctcccgcaccaagccgc

SEQ ID NO: 111438 - DNA, 122 bp, Homo sapiens
acctccgcaataggggacttggagaccccctcaatatggagtagggcctccaagaaggggcgctcagggaaagaaaaccccggaaatcctctcattgtgggggtgtgccatcaccgagaagg

SEQ ID NO: 111439 - DNA, 122 bp, Homo sapiens
ggggtcggctaggacagaaagcagcgggaaaagcggctccacgtgttccatctctggcctcggccttcagcccccaggttcggtaaccactgggcgtggcgagtccgggtaacccgcagtcc

SEQ ID NO: 111440 - DNA, 122 bp, Homo sapiens
tggctcccacctcccacctgcggggaactagaggccgggggacagcaaaggcggcggtggcggcggcgcttccgctctaacgggtcccagctgcggcggcgctgacggcggcgcctctcccc

SEQ ID NO: 111441 - DNA, 122 bp, Homo sapiens
gacgcttcacctctgcaggatagggtccagaagataatgcctaggaacttgggagaagtccgtgcagtaaatccctttaaaatggtggcgtcgaaggaatggaggctgggttataagcatag

SEQ ID NO: 111442 - DNA, 122 bp, Homo sapiens
taccggccgccaggaaccatgtgagcgacaagatcacccaccagatggagctggccatgccgaagaagtagaccagcaagaagaccacggtgcacagcgcggggccggtggtctcgtagcgc

SEQ ID NO: 111443 - DNA, 122 bp, Homo sapiens
aaaccttccacgaaagtgaatcccagcacagccctgctgtagctggctctcaggcgcaagcgcagagctgcgaccgctgctgatacgttgctcagtctcagtgtggtctctgttttgcaact

SEQ ID NO: 111444 - DNA, 122 bp, Homo sapiens
tgaatgggtaataatgtaattttcggtgccacttttagagaccaattggaggaatattcacgttaaatataaagcagtagcatcattttggaggaaattcctaacttcccgagggaatcggt

SEQ ID NO: 111445 - DNA, 122 bp, Homo sapiens
tgaactgaaactggccactggaaagacttgtttatagatgttcattttgactcaatagtacgctggagtcctactctttatttaatgatatggtcaagtcatgcaggctgatgtggatgtga

SEQ ID NO: 111446 - DNA, 122 bp, Homo sapiens
aaagatcccatgtccacgtgacatgatcatgacaggagctgtggggggtcccagggaggccggcgctgggcttgaacttgccccgtgaaggccccgagcccccggctgccgcatcctgactg

SEQ ID NO: 111447 - DNA, 122 bp, Homo sapiens
aaaaaaaaaagtttcttttccctaaatgttttcctgaagctgaatcttaaggcgagaggacgtcagtcatcctcgtcattctcactgaggtcgtcatcgttgttgtcctcctcctcttcctc

SEQ ID NO: 111448 - DNA, 122 bp, Homo sapiens
gtggtaccttatcaaggctgggattgattgcttctctggacagattgggcatatggcatgcgccagtgaggagggtatctgtgttgactaatacattaactccatctttgtcgctgtggcca

SEQ ID NO: 111449 - DNA, 122 bp, Homo sapiens
cagtcccaatgcctgcgccaaggacctgcgcgcgcatgctggcgagcatgttagggtgtacggcgtgcgtgcccttcttctcgaggcttttcccggccgttacgacaggcctttggtcgtac

SEQ ID NO: 111450 - DNA, 122 bp, Homo sapiens
gctatttctgggacacccagctctgccaggcccctacccctctggtgggccaggctctgacggtggccactcatggcctttctagctctggtgccagcatagggaaggaggaggcacagcct

SEQ ID NO: 111451 - DNA, 122 bp, Homo sapiens
ggtgatccacccaccttggcctcccaaagtgctgggattacaggtgtgagccaccgtgcccggccaggattagtgactttttaagagggagagagggagagatgcaacccaggaagagggcc

SEQ ID NO: 111452 - DNA, 122 bp, Homo sapiens
gcgagggggcagagtcttggaaacaggtcctgggccaactgcaacagaatatacccgccgcgtgtaggggaaggcggcgccagggagagggcgcagtctctgaatctttccacggggtccat

SEQ ID NO: 111453 - DNA, 122 bp, Homo sapiens
cggtcacttctgtgacagcctcggccgtggtcactaccaacctgaccccagtgcagaccccggcacggtctttggtgccccaagtgtcccaaggtaaagccaggctgggagctttctctgcc

SEQ ID NO: 111454 - DNA, 122 bp, Homo sapiens
gcttctggaggggacatgccggtggttctcatagcaaccagcaccaaatgaaagagtacacgtcatgggtaaggcaaggtccaggcaatacttggagttggatgtgtgagtgttgcccagag

SEQ ID NO: 111455 - DNA, 122 bp, Homo sapiens
ggcaggcagcctgttttctgaagccatggcacagacaagaatactcattcctacttgtgtcgggttaaacgccgctacactgttgggctgtatctgagttgtttttgatgtaattatttaat

SEQ ID NO: 111456 - DNA, 122 bp, Homo sapiens
cgcacagggtggcacgacccttgtctgagccacttgatgccacaagaggtcattgatctccgaggagcagcaactgtcagaaaggaaggggtgaatctgattgcagtcatctcttgcttagc

SEQ ID NO: 111457 - DNA, 122 bp, Homo sapiens
ttccatcagtatcactaatggaccagtattctgtggcgtggttggagcagtagcaagacacgaatatacaggtagaataggacattggactgttatctttgtgacttaagggaggaaggtgg

SEQ ID NO: 111458 - DNA, 122 bp, Homo sapiens
acacagcgaaaccccgtctccaccaaaaaaaaatacgaaaaccagtcaggtgtggcggcgcgtgcctgtaatcgcaggcactcggcaggctgaggcaggagaatcaggcagggaggttgcag

SEQ ID NO: 111459 - DNA, 122 bp, Homo sapiens
agggtcttgggtgggtaatcgggggatcaggggtgggggtcgagggctgcatccctgggccggcgcggggaggccccgggacgccggggtctgggcccgggggtggggtctgcattccctgg

SEQ ID NO: 111460 - DNA, 122 bp, Homo sapiens
ccccaacttttgttttgtaaaatgtatgagttttcaaatgacaccacgtttatccgtattcgatttcgtgttaaaaagtgttttccggccgggcgcggtggctcacgcctgtaatcccagca

SEQ ID NO: 111461 - DNA, 122 bp, Homo sapiens
ctgccaagtcaggggagtggcctgccagccttgctgcgtggcctgccatcctggcgaggtcgcctgccagcccgggggtgtggctagctgcgctgggggtgcctgcgggccctggggaacct

SEQ ID NO: 111462 - DNA, 122 bp, Homo sapiens
agggggacccccgccccatcaccttcccccagttaccggccagaatgtggagggcccctgcggtggccgccagcttggctttcctggagagctccaggcccccaatgttggtgcagcgcagg

SEQ ID NO: 111463 - DNA, 122 bp, Homo sapiens
agcctcacacaggcagattctgctcagatcaaaagcaatcacgagcacagggcctcagggcgatgggcaagacatgggaccccaggattgctacagtgttcactcggaggaagcaggagcct

SEQ ID NO: 111464 - DNA, 122 bp, Homo sapiens
gagggagagctgcctgtgaatctattgcacagtgggtgggaccctggtctaatggtgccacgcccacggggacccccacgggccgctgctacagagcagcgggtgccagcaggtcaggcgct

SEQ ID NO: 111465 - DNA, 122 bp, Homo sapiens
cttcttctgggagaaaattcccacggctacctagtgagcctgcaaactggtaggcgccggcgtaggcgcgcgggcggggccgggggcggggcctgcggggcgtggcggggcgggcagagggc

SEQ ID NO: 111466 - DNA, 122 bp, Homo sapiens
ccctcctgcagcaggccagacaacacaggataccctacagctaaagaacagcctggagatcgagaccttgggaccagtctcatctttgggaatgtcaccaaggctgctgaaggtctgggtag

SEQ ID NO: 111467 - DNA, 122 bp, Homo sapiens
tgtggtggttgttataaggaaaacttggcactgtaacatccccccaaactgggaaagcgtcgagagaccaaagaataatatgggcaagtccagcttgatgaatagatgagtttactaggact

SEQ ID NO: 111468 - DNA, 122 bp, Homo sapiens
ccgctcttgcctccagccccgccatcttggatccgggcaccgttcgggcgcccgccctgccgctaggggtcagcctggcccagccttgtgcatccgagggtggtcccacctcccatcctcgc

SEQ ID NO: 111469 - DNA, 122 bp, Homo sapiens
agtccgggtgcaagtcagaactctttcatctttgctaaaccagagcgagatgttttctttcgactgtttcatctacttagaattaatagcatttctcctcccgcctcccggcccccgccccc

SEQ ID NO: 111470 - DNA, 122 bp, Homo sapiens
tggggcaaaaggcagccctgcttactgcacattagaaaagatttgggtttcctggccaggcgcggtgactcatgcctgtaatcccagcactttgggaggcgctggcaggcggatcacctgag

SEQ ID NO: 111471 - DNA, 122 bp, Homo sapiens
gggcaggtcagttgattagattttctgtggagaattccacgaggaaattcccttcaaagccgaagtgattaactgggggctattctggaaatggagcagacaatggctcaatagtctgtaca

SEQ ID NO: 111472 - DNA, 122 bp, Homo sapiens
ctgtgagcagcggggcctggggggcttccagccgcgcgtcctgcaacgtcaaatccagtgcgcccagaggggggacgctgtctcggggtgcctgtgaacagccttcaaaccatgggccccaa

SEQ ID NO: 111473 - DNA, 122 bp, Homo sapiens
ggccggttacgcctgcttctgtggctctgaaagcgacctggcccggggacgcctggcccccgccaccgactgtgaccagatctgtttcggccaccctggacagctgtgtggcggcgatgggc

SEQ ID NO: 111474 - DNA, 122 bp, Homo sapiens
ctcagtagactcaagttcagcccacatattacatcaccaaaaattgctggagactgggggcgggaatctccttaggatttcctctttgtagccttaaataggggggtgggatcagcaggagg

SEQ ID NO: 111475 - DNA, 122 bp, Homo sapiens
tcctcacattcgcctgcacacagcgcgtgcggcccctccgagggcgatccccgcaaaccacgacgcagggcccccgccccaggcaatccccgctgctggggaggctgcctccgcgcgcccac

SEQ ID NO: 111476 - DNA, 122 bp, Homo sapiens
tttgctctcaatgatgtcactgtctgcagtcgggtagaagaccctgaatttcctgttttacggcatttatttttggaatgagaggccctcatgactgttgggtctgttaatcctggtttccc

SEQ ID NO: 111477 - DNA, 122 bp, Homo sapiens
tgaatcagataacctaggaggttgtgctctaatctagacaatgtgttgtttttattcattcgtttgtttattccctcatttcttcaacaaatgtcttctgcgttttctatcaagccttgtgc

SEQ ID NO: 111478 - DNA, 122 bp, Homo sapiens
tcctgtcaaattgaaacctcctgcatcctgagtgcctcatgtctcacgtatttagggtaccgtgaatatttagtgcctccttggtctttctgtcccttttgatctctgtacacacgaatatg

SEQ ID NO: 111479 - DNA, 122 bp, Homo sapiens
ccactccccatgtctagagaaggagtgaaggcttttttttttcaatttgcctctgccccccgcccgtcaggatattagacagctaaacagcccagcgcctgtttccttcagataaccagctc

SEQ ID NO: 111480 - DNA, 122 bp, Homo sapiens
tttcattcccttggagagacggctcttctggcaggtctccaaatggtcgactctgtcccccgaggccccgccctagcctcgttcgggccccgccctagcctcgttcgggccccgccctagcc

SEQ ID NO: 111481 - DNA, 122 bp, Homo sapiens
acccagcagctctgctgcgtttgctaaccccatcttctcaccggtgtttatgcacgatggcgttgaaagctagtccatctctccagctggtggtgaagttgtgtacattgacgttgggataa

SEQ ID NO: 111482 - DNA, 122 bp, Homo sapiens
gcggtgaggcgaggagtgtctcggcacttcgtgtctcttgcctggcaacaccacagggaccggacattctgaatcttcccagacccgctctgagaacataggcagccaccgcatcttctcag

SEQ ID NO: 111483 - DNA, 122 bp, Homo sapiens
cattatattcccacttggcagacccagaaaatgagacccaaagaggagaagtgatttgcccgagcaggagagcatgtcacacgattctaggggtgctgctcacaccctggtcagtggtgctc

SEQ ID NO: 111484 - DNA, 122 bp, Homo sapiens
agcaggtgaggcaggacatacctcctggggtttttgtttcctgcccttcatatgccctttcgtgatcaatataataattttttcctggggtagcctttagtcagaggcattatcctgagtgc

SEQ ID NO: 111485 - DNA, 122 bp, Homo sapiens
atggatcttccatcttcctcagttctgttcaagtctccaagatgctttcttgctatcccacgtgactgagcagttcttagtttggcaagagcaggtgtatgcctctctggcacctggcccat

SEQ ID NO: 111486 - DNA, 122 bp, Homo sapiens
ggcaagatacctggccatggcttaagtgctcagtgaatatttattagaagtgtgactgcacgagcattgggtgagggcagagggaggtagctcccgaatcctccaaatggcttttagatgga

SEQ ID NO: 111487 - DNA, 122 bp, Homo sapiens
cccatcaggggccatatattagaaactgtataatcaggcatgcagctggagagaacaggacgcctccgtaattttaccgggccttttgtgtttctctgcgtccagagctccagttcttctct

SEQ ID NO: 111488 - DNA, 122 bp, Homo sapiens
ggagagtcactttctagcaaaataagaccactctttgcacattgatttttcttttcttcccgagctccaggtgaacatttgatttgctggcattctttctgaacactttccaggctatttca

SEQ ID NO: 111489 - DNA, 122 bp, Homo sapiens
gtctcaaactgctgaactctagtgatccgcctgccttggcctcccaaagtgctgggattacgggcatgagccactgtccctggccagtaacaaagttttagaagtacagagtgttagggcca

SEQ ID NO: 111490 - DNA, 122 bp, Homo sapiens
cggactggagttctcgcagggagggcagggtcagggaatatgaggcgggaggggattccacgggagactttatccctgtcttgtcttagaggatctgggcctgatggggtgaggcggctcct

SEQ ID NO: 111491 - DNA, 122 bp, Homo sapiens
gatgggaaacaaaataatcagaaaaacataattatccctagccataccatacttgctagacgctagaaagtatacatatatgtaatctctgtatacatagagaaagcaaaaagcatgtgcac

SEQ ID NO: 111492 - DNA, 122 bp, Homo sapiens
cccagattcccctgccagtcccctgggtgggagacgagtcgggtacttcgcttccacctgcgggcccccagcgcagagcctggaattggctggacggagctagccgcgccggcgccccgtag

SEQ ID NO: 111493 - DNA, 122 bp, Homo sapiens
ggcggtcagctcgcggatggtctccttctggctcaggatggtctccttctgctgcagcaccgtctcgcggagctgcagcacgctgctccggagctcctcggcgccgccggcggccacggacg

SEQ ID NO: 111494 - DNA, 122 bp, Homo sapiens
gtagccagagctcttggagatgtgaatgccagcagtctcaggatgcattccacagcattccgttgcacagaaagttttggcccctttggtagagaataagctcaaaaggacaaaagtagaag

SEQ ID NO: 111495 - DNA, 122 bp, Homo sapiens
tacttcatcaaattgttgccagagttaaattcttttttttgagacagaatctcgctctgtcgcgcaggctgaagtaaagtggcacaggcgtgagccaccgcacccagcctaaattcactaat

SEQ ID NO: 111496 - DNA, 122 bp, Homo sapiens
tgagccaggttccaccctgttgggaagatgcccattgccttccccgcgtcatccagccgtcgggaagctcactaacttctccagacccccgaggcttccctgtctggcagtgttctgtcccc

SEQ ID NO: 111497 - DNA, 122 bp, Homo sapiens
gtccacgacacggacacactgtggcagacgtccctccgtccaccacagcgctgacccctgcgtccacgacacggacacactgtggcagacgtccctccgtccgccacagcgctgacccctgc

SEQ ID NO: 111498 - DNA, 122 bp, Homo sapiens
gagagcatgatgaagaacaacatgaacaccaggatgacgctcagtgccaggtctgtggggcgcttgccaaagttgggtggcagggtgaagttgaatggggcagacgcgttgtgggcctccat

SEQ ID NO: 111499 - DNA, 122 bp, Homo sapiens
acatagaactccggaatggctttttgtcaccaacatagtgaagttctatttcccttttcccgaacagggcttgcagttcccaaaccagacacaatctcccagttagagaaagaaaaaggatc

SEQ ID NO: 111500 - DNA, 122 bp, Homo sapiens
gaatgaggtgaccccctcctccagcgagtaaatgcggggcgatggcgagagcgcagggggcggcggcgctgccccaccttggggagcgaattcacccccctagtcgcaccagcctgggcgca

SEQ ID NO: 111501 - DNA, 122 bp, Homo sapiens
atgtcttagttctacagctgaccttcttttcactgtttttaaggtcaatagctgtgggttcgcacttctgcattttataaatgttactgtgattttcttgtaaggaagaattaaacgtcggg

SEQ ID NO: 111502 - DNA, 122 bp, Homo sapiens
cctgtgcccggacccagcccagtcccactgcagtgggtggctggaggatggcgagtgtcccgggcaccccttgggccgggtgaacgtggttgggcacggagagggcggggcccgtgggcacg

SEQ ID NO: 111503 - DNA, 122 bp, Homo sapiens
tttgctgcagaatggaatacctgcagagggcacaggtcccagatatgcagtactgactgtcgcccagcaaagacccccagtaaatacccagccccactaggagcacgttgccaggacgccag

SEQ ID NO: 111504 - DNA, 122 bp, Homo sapiens
taggccgagctcagaccacttacatagccactggtggtcttcgaatggatactcatgttacgcatcccagactccagccggctctcctcaccctccagcagcttcctgtaggtggctatctc

SEQ ID NO: 111505 - DNA, 122 bp, Homo sapiens
cggcggcggctgcagggggcgcggggcggaggctgcgagggcgcgcgcggggaggatggacgggtccggggagcgcagcctcccggagccgggcagccagagctccgctgccagcgacgaca

SEQ ID NO: 111506 - DNA, 122 bp, Homo sapiens
caccgagcggggaggggggtaggacatgcgggggcagcggcgcctggggacaggtagagacgcaggctcccctcctgccccacggagcacactctgcacccaccagctgccagagactcccc

SEQ ID NO: 111507 - DNA, 122 bp, Homo sapiens
ttgcttcataaactttcaccactgccatcgaccaaaaagcaaacagagacttggaaaccccgtgtacaacacgtacactgcgctctcgttgatcactattgggtaaactaaaatgtagctta

SEQ ID NO: 111508 - DNA, 122 bp, Homo sapiens
atggctcctatcctgtggattcagctttacggggatcttcgccaatgcctggctgagaggcggtctcagggggttgagaactctattcttagaggtctggtatctgggagactgagaaagcc

SEQ ID NO: 111509 - DNA, 122 bp, Homo sapiens
gaataggtctaataacgttctttttatgggctgctgttccctccctgtattactttcccacgttcctactgatatttcctgcacttctcaataagttacttgcattggaatcattgtctcag

SEQ ID NO: 111510 - DNA, 122 bp, Homo sapiens
cctaagtgattgccccaggactgtggatgatggctgcagacatcccgagagtgaccactccgctgagctccttggtccaggtgcctcaagaggaagatagacaggaggaggaggtcaccacc

SEQ ID NO: 111511 - DNA, 122 bp, Homo sapiens
atttgggggtaggtgcagttttagagcccctcctctatctgccacctatccaaagtcctccgtggcccaacaatcaagtgcatgtttagactaataagcaaatgaagccacctgcagctcta

SEQ ID NO: 111512 - DNA, 122 bp, Homo sapiens
ccgccgcccctgtcgcccccgcctctcccggggccccgcgcatttggcgccgcagctccgcgctcccagccgaagtcgagcagccccaagcggcgctcccaaactgaacggctccgctggcc

SEQ ID NO: 111513 - DNA, 122 bp, Homo sapiens
caggccactgtgagaagccatcaccccacgaccagggtcacccctgggaaaatctggggccgggcagccagatccctgaaggccagaggatgtctgggaagaaagggcgtggacggcacctg

SEQ ID NO: 111514 - DNA, 122 bp, Homo sapiens
gtgacgcccctgagcgcggggtacgccgggagttgtagtcctgacggcacagccttgcagcgtctccggaagtggaggcgggagcggcacggcagccactgcttggggtagcgggagggcag

SEQ ID NO: 111515 - DNA, 122 bp, Homo sapiens
atcagaaagaaggcccgggagggacccgggaagcagtgggaggtctgcgccctggagccccgcgagagcccgccggtttggcacgggctcctcccgggccgcccggcggtccaacaaaggcc

SEQ ID NO: 111516 - DNA, 122 bp, Homo sapiens
caggatgtgggtggggccagataagagaataaaggcaggctgcctgaggcaagcgcggcacgccgccacggtccgttttcaggctgtggtagctttgtttttttgctttttgtaataaattt

SEQ ID NO: 111517 - DNA, 122 bp, Homo sapiens
ctggtggggccttggagaacctgtgtgtggaaactctgtatctaagtaatctgatggggacgtagagaacctttgtatctagggcagggattgtaaacgcaccaatcagcgccctgacaaaa

SEQ ID NO: 111518 - DNA, 122 bp, Homo sapiens
ctcgggcgctcgctccgaaggatcggcagcgagagggcggaaccggatccgtgagagtcgcggcccacgctccgagcgtcaccctgtcaccgcccagctgcgcatgagcgctgcaactcctg

SEQ ID NO: 111519 - DNA, 122 bp, Homo sapiens
cctactgacatccaagctactcgtttgccacagctgctccaaggatggcaataatgagtgcgagctgcatcagagatgagagattgaactttaagaaaaatgtcgccgggcgcggtggctca

SEQ ID NO: 111520 - DNA, 122 bp, Homo sapiens
aggaaaacgagctcactctgctctgggtccttggatgtgttttcttctgcctcctggactcggttcatttccccatggcgtctttataatttgcgtcccttcagcaaatgtttgcttgagcg

SEQ ID NO: 111521 - DNA, 122 bp, Homo sapiens
gaggatgtgttcttttgagaggttttatttttaattacttttcctttctattgttagtgtcggtgatttgagatggatacgacatctattttggtacacagtgctccataacatttgtcaca

SEQ ID NO: 111522 - DNA, 122 bp, Homo sapiens
ctaagaagaccaaagacattttcaaagaggtgaggatattttaagcgaggtcttagaggacgctgttcacagggaagaggagatgtaaaagcattctaggccaatgcacctgcatgagagga

SEQ ID NO: 111523 - DNA, 122 bp, Homo sapiens
cagcagaatccagttgccttgtgcttcttgcttagtcatggctgcttattctttggtgtccgtcagaattagggtctcacttataaaaataacaagcagtgactcagtctgaattgcattct

SEQ ID NO: 111524 - DNA, 122 bp, Homo sapiens
aaaaggcgctgaagcgcaagatcaccaaggaggagaaggagctgcgcctgaagctgaggccgctgtaccagttcatgtcatgcaaggagtttgatgacctttttgaaaacatgcacaaagaa

SEQ ID NO: 111525 - DNA, 122 bp, Homo sapiens
gcactggcctagctttcctagggagattagtcacagcagggcatgctgggagtgatgcatcgctggagcagagcatgccaggagcaactgtgtgcttaaggcaagacatgctgggaacagtc

SEQ ID NO: 111526 - DNA, 122 bp, Homo sapiens
gggaaaggggtgtgatctgtctttcctgtctgcctcctctctgcttttttcatgtatacacgtaagggaaagatgtaatagtctctgttttctatgtacagggatatttagatatgcaaatg

SEQ ID NO: 111527 - DNA, 122 bp, Homo sapiens
gataagatgaatgatttcaacaaaaggaacatttacattttaagagctgaatcaagaactcgcttatgtcaaagaaagagactagtgagtatccctcaatgtcttgggcactggaaacaggc

SEQ ID NO: 111528 - DNA, 122 bp, Homo sapiens
ccatccagtcgccccggccgccctccctgacgtccccgcagccctggctgctggcccgagcgggaagcagctggaggcataacacatttccaggtaaatccccacccccaccttcagcctgg

SEQ ID NO: 111529 - DNA, 122 bp, Homo sapiens
agggttgattcatgtgtcagcgctgctgggccacgctgcccagtttagtcaaacgccaatcgcaatttggtgtgcaggtgtttttaaaatgagattgatttaaatcagcagacggcatgagg

SEQ ID NO: 111530 - DNA, 122 bp, Homo sapiens
cccacctccacccttgacacacaagtctgtctcttccttgttataggaccaaacacacaccgaggttccaaatagggtctttcccaagcccacatccacagatccggctgtcatcaaacagg

SEQ ID NO: 111531 - DNA, 122 bp, Homo sapiens
gctattttcctcatttgttaggaaacttttggaaatgatactttaagggaaggaggaggacgtgagagttatctggctgccgctccactgagtgccagggttgattcagctgatctggctgg

SEQ ID NO: 111532 - DNA, 122 bp, Homo sapiens
cctgccgctgctgctcgggctgctgctgctcccgcgtcccggccggccgctggacttggccgactacacctatgacctggcggaggaggacgactcggagcccctcaactacaaagacccct

SEQ ID NO: 111533 - DNA, 122 bp, Homo sapiens
aggaccactgttttcccaagaaggtcccatgaaggagcagccatgcctctaggccccacccggccttcagggggtccccaggctttaaggggactcctggctcagggccaggcccttggtgc

SEQ ID NO: 111534 - DNA, 122 bp, Homo sapiens
tgggctccatacctcgggcggccgctatgcccagggcttggatcctaggaaatgccaggccgtccaccctctcggggcccagaaaggagattgagaagggtctggagcacgggattaagtct

SEQ ID NO: 111535 - DNA, 122 bp, Homo sapiens
aacacagtagataagaagaaaggttctgaagctggacagctggctggataaaaagctgtacgagttttggttgtgctatttagattcaaatcttagctaagttacttattagtgtaaatttt

SEQ ID NO: 111536 - DNA, 122 bp, Homo sapiens
cgattggttggctcgggactgacgtctcagtcctattggttacgagagccgcggttggggcgaggaggcgggagtttggcactggttctgataggacgggtgtttgcgttcccagagttcct

SEQ ID NO: 111537 - DNA, 122 bp, Homo sapiens
ccaacatggtgaaaccttgtctctcctaaaaaatacaaaaataagttgggcttgatggtgcgtgtctgtagtcccaggaggttgaggcaggagaatcgcttgaacccaggaggcaaaggcag

SEQ ID NO: 111538 - DNA, 122 bp, Homo sapiens
gagcgccatttcagactgaatcaaaccgtagatgccatgtgtacctacgcaacaaatctgcgcattctgcacgtgtatcccggaacgtaaagttaaaaaaaaaaagaataaataaataaata

SEQ ID NO: 111539 - DNA, 122 bp, Homo sapiens
ttgtggtcattctctccacagttaacatacagccacatggcagagataaatgataaaccacgctgacgataatcttaggaggtaagtggtcggcagagtgaaaaatcactgcacgggaatct

SEQ ID NO: 111540 - DNA, 122 bp, Homo sapiens
ccttccatttctctcacactaacggacaataaggaggcctcgagctaggcaggccagggccgtacccgagctgctggcagggagcaaacctcaggaaagtcaagccaccaaaaaactgtaag

SEQ ID NO: 111541 - DNA, 122 bp, Homo sapiens
agctgacttacgaagtgaccaggagagttgctcttcacctttcttcaggtacttctttggcgctgctgcttgcctgtgctaacgtcaaaacgcagcaaaacacaaaactccacaaaactcaa

SEQ ID NO: 111542 - DNA, 122 bp, Homo sapiens
caagcaggatccccaggagtccctgaccccgtgccttggctggagcgccgtttccctggacgactgtggctgggatggcctcccggcagtaatcttgcgcaaacaccctgccacgcgcaagg

SEQ ID NO: 111543 - DNA, 122 bp, Homo sapiens
gccccagcccagccatcccccgccaccaccatcctcccccagtgtctgggccgagccctgcggcatcgccagctcttacctagcgggcagggaccctggactttcgaagggcgggcagagcc

SEQ ID NO: 111544 - DNA, 122 bp, Homo sapiens
gagctgttccgtgtcgttacctgtgacaagctggacatcgcgtgcaggacgagcacggggcgcaggcgtggcgcagccagggagtcccgcgtggtctgggctcccggcggttgagcggggcc

SEQ ID NO: 111545 - DNA, 122 bp, Homo sapiens
cagctggggccagggtctgtggtgctgatccatctgctgggccgtcacctcccgagagagcgtgtgttcctccaaccacgcgtgtcttagcaccagtctctggcaggagccaggagatgggg

SEQ ID NO: 111546 - DNA, 122 bp, Homo sapiens
gtgtgaggcacaggaacacgtccccaccagcctggaagtggcgtgtggcatagacatcctcggcctcggggatgtctgtgcgtctctcgaagcggccaccggtccagtggaagagcacgggc

SEQ ID NO: 111547 - DNA, 122 bp, Homo sapiens
ttcaggggcgtctccgcatccctcgctgaggacagagaccggtcaggcacacttcccccccgcccccgagccggtccctcggcccccagccctacctggcgaccaactgcacccacggaggc

SEQ ID NO: 111548 - DNA, 122 bp, Homo sapiens
cccagaccccgcccggcccacctcctcggcccgctgagcctccatgtgcttgtccaggtacgtcccctccagcaccgagcccacgatggtcaggcccttgccggccttcagctgcgacgtga

SEQ ID NO: 111549 - DNA, 122 bp, Homo sapiens
atagagtcattaggacaggtgggggtgggcggcgagggggtggctggacttcctcgggagcgcagatctgtgtcctcgcggagatcatcgttctgcacagaggaagtctgtgacgtgcgctg

SEQ ID NO: 111550 - DNA, 122 bp, Homo sapiens
gagtcaataatccgagatgtgaaggagaccttaaaatattattgatcccaacacaggccgcgtgggacctgaaccgcctcaccttggcaaccacatttgtaatttccgcaaatgatctatat

SEQ ID NO: 111551 - DNA, 122 bp, Homo sapiens
cccttttctgagtgcttggaagtgactgctgcaagtgacaagtgaccacgccttttcccccgcgggtataaattcagaggcgctgcgctccgattctggcagtgcagctgtgggaacctctc

SEQ ID NO: 111552 - DNA, 122 bp, Homo sapiens
agggtgaaagtggagacgcaatctcccttggaagacgttagtctccatctctaacgctcccgagacacggttcgcaattaattatgacgtcacagccaatcgtcaacgcgaaagcctgacgc

SEQ ID NO: 111553 - DNA, 122 bp, Homo sapiens
ctcgctaaagccccgcagcctggattcagttgtccttattgcataaacctaaccgcattacggcacttggcatgcaaatcgcttctgtgctgcaggccgggtgctgggcagggctcgcggaa

SEQ ID NO: 111554 - DNA, 122 bp, Homo sapiens
ggagggggcgtggtggcgccctcgagatttatgagaaccaggcgtcgacttcctccgttgcgacatccaggcctcctccaggctcccattgtccctgctgcggagagtctggccacagcggc

SEQ ID NO: 111555 - DNA, 122 bp, Homo sapiens
gaggcagggaggctgcaagggggagtggaggacaggaagaggcgggctgcagcagcgcggcgtgacactgtgtctttgcaactggatgccccaccagagcatcttagaagaggagaaacaag

SEQ ID NO: 111556 - DNA, 122 bp, Homo sapiens
cgtggctggactggagaagatgcctgcccgccgggcttccttatcccaccccagagacatcggctgtgaccagcacaccagctgcccggtggggcagacctgctgcccgagcctgggtggga

SEQ ID NO: 111557 - DNA, 122 bp, Homo sapiens
ttgggggctggctgagtgcatctcagcctgttcctccttctgtaggtaaagccgtggctccgggaaagctgggtgatttctgcagccctctgggtgtgctggggtgtagggatgggctgctg

SEQ ID NO: 111558 - DNA, 122 bp, Homo sapiens
cccgaggagggcgcgccccctgccacctcggccgagaggactaatgggggtgcggagccgcgcctgggcttttctgacattcacttcaactctcgcaacacgttccaggtgagccgcggtca

SEQ ID NO: 111559 - DNA, 122 bp, Homo sapiens
acggctccggggtcccgcttggcctacaactcccagaaacacttgcattgctctttctgccgctcccaaaatacactgctccccctccccccgcgtttactttctgcgcctgcgcgcggccg

SEQ ID NO: 111560 - DNA, 122 bp, Homo sapiens
ggtttcgacatgttggtcaggctgctctcaaacacttgggctcaagtgatctctccacctcggcctcccaagtagctgggactacagacgcgcaccacaaaaattatgcccagctaattttt

SEQ ID NO: 111561 - DNA, 122 bp, Homo sapiens
ggcccattgaatcctcttgttccttcatcacctttggctccaaagtgtccctggggtccccgagctccgggctccccatctgctccctgcagggttgagggaaagcagagacaaggacacag

SEQ ID NO: 111562 - DNA, 122 bp, Homo sapiens
cgcctttagaggagaggctctgcctggtgcccggacgtgggcgcggaggaaagcagccctcggagatttcgaaagatcgcggtggccgcgggcgtgctccggtctggcggattgcaaaacgg

SEQ ID NO: 111563 - DNA, 122 bp, Homo sapiens
cgtgggcggtgctgtctcggctatctggcttgtttggttgactttgaaaagctttctgtgcgccctagaagttatttatggagtatggtctgcttcagggctgaaggaagaatgcgatcctg

SEQ ID NO: 111564 - DNA, 122 bp, Homo sapiens
agaatcaggcagggaggttgcagtgaaccgagattgcggcagcacagtctagcctcggctcggcatcagagggagaccgcggaaagtgggagacggagacgtaggggagagggagaggagga

SEQ ID NO: 111565 - DNA, 122 bp, Homo sapiens
agatgtctgtaagttttagatctcatcgttgatggtttccttgggaatttcttgttaaagcggaattacagggtaggaacatttgacacttttaagtatgcaccaatttacactcccatcat

SEQ ID NO: 111566 - DNA, 122 bp, Homo sapiens
ctccgccagccgcaaccgaacttggaccaagtacgtcgccccagatgggcaggaggacaccggcccaggtgcccagcatcgaccggcagcctccgcacagcacaccttgcctgcctactgcc

SEQ ID NO: 111567 - DNA, 122 bp, Homo sapiens
gtggcaccggcactgtccaagaccccagccaggagcctcgcagcgcaggccgggtctgtccgagaccccagccaggagcctcgcggtacaggctgggtcccagctgaccccacccgatgacg

SEQ ID NO: 111568 - DNA, 122 bp, Homo sapiens
gaagggttttattggaggtgaagaacatgaatttaggtgtgaatttgaggtgattttgagcgcactcagaaagaaatgtcaagcaggaagttgcacatttgggcttgaagctaaaaggagtg

SEQ ID NO: 111569 - DNA, 122 bp, Homo sapiens
gtcctcatctcgcgtgggcgggctccgaggggggtcccttcagccctgggggaaagggggcgggcaccccggctccgccccgcaaacagggtgctgcctcctggcggccaagcgccaccaaa

SEQ ID NO: 111570 - DNA, 122 bp, Homo sapiens
cacggcaggctcgtgggggacccggccagatgcaaggacaacctgtggccgacagcagcgcggcacgccggctgcagacatggcactagccctgccttctgcatacctagctcttccctgag

SEQ ID NO: 111571 - DNA, 122 bp, Homo sapiens
gcgcaggtgggtggagaagacgccgcgggctttttcaaccacacactcctctgggaagcgcgcctgattgacagttcccacgaacccgccccacggcccttactggatacggcgtcaggtgc

SEQ ID NO: 111572 - DNA, 122 bp, Homo sapiens
gatcatatatggaaagcacttgagcagagcctggtgctcacccgggctgggtatcttcgtcgctgtccccaggccttcaccaacacctatctcttctacggtgcgtaccgagtggggccgga

SEQ ID NO: 111573 - DNA, 122 bp, Homo sapiens
aaaggaacaggaattgctgttttaaaatatgcaactggcatttcacacctctacactggacgacgtattgcgtggaggatggagaaggaagatcacccctactcccaaattcgtagttataa

SEQ ID NO: 111574 - DNA, 122 bp, Homo sapiens
aggctaaggtgggtgttggaggggcagcttgaaaataccctcaaaactctcctccagctccgtgctttcagatgcaaatgcctcacggagagatggatgggctgcagcccctcctactttca

SEQ ID NO: 111575 - DNA, 122 bp, Homo sapiens
cgaattaaattgtggagttgggcctttaacccatttatgcgcagtgttccattattggaacgctaagcttgtgggagttatttatatcctgctcaaagtcatcgccaaggtctcatttaaaa

SEQ ID NO: 111576 - DNA, 122 bp, Homo sapiens
ttgttacctaaattattttggtcattttctaatccatctcggtgttacacagtgcgatagcgtggtgtggtgaataagggcatgagtgatagagccagtgctcggttcaaatcgtagtactg

SEQ ID NO: 111577 - DNA, 122 bp, Homo sapiens
aggcgggtcgggctgcgagctctggagaaaggggcggcggccgcacgtgcggatcggccgcgccccactgagcagagagcccccttctgccgccgacagcccgcgtctgcaccgagccggtc

SEQ ID NO: 111578 - DNA, 122 bp, Homo sapiens
aggctggggcggggacccagaactcattgaaattcccagtgcacaggcccaggctggtggcggcttccctctgtgaccgatccccaggtgcccactgggctgtgccggctggctggcccctc

SEQ ID NO: 111579 - DNA, 122 bp, Homo sapiens
ggagctgggtgccgagcgtctcagggtgggcggggcgacacggtcccctttttactgtcccgggaactggtcgcctggggcaagtctggatacttagcagcacaggtcctgttctaggactg

SEQ ID NO: 111580 - DNA, 122 bp, Homo sapiens
acttattctcttctccttgaagcttcgtgactgccccgacgacatccttctcctctggtgcgtgcagctcagagaccgatctccaggagtttaatccagtccctagaacatcaagagcccct

SEQ ID NO: 111581 - DNA, 122 bp, Homo sapiens
actgtgtagctataaagcgccaacgaaaaggaaaaacagcgtgagcagggtatgacaaggcgcttttatatagaatcgcttatgcaaataaggtgaagagttgaagtcttgtgtctgattgg

SEQ ID NO: 111582 - DNA, 122 bp, Homo sapiens
agcgcctctcgctggttggggcgggggtgggcggagccagcaccgtctgggctgtggaagcggagggggtggggacactctggcccggttctcggtggtgcgggagcgggcgggagcagcgg

SEQ ID NO: 111583 - DNA, 122 bp, Homo sapiens
gctcttcctcaggtgagatgatattctcggtggattgttctgtctcctttctttcagaaacgctgggccttcgagttgggagtcttctctgagtctgaagtgtcctgcctgacaggtttgct

SEQ ID NO: 111584 - DNA, 122 bp, Homo sapiens
gcggtggtgaagacgcggtaggagtgcaggaaggtgttgaggaagtcgatgctcaggaagcgcaggtccgtcagcctctccagcagccgctccacactggcgtagcggatctgcagcacttt

SEQ ID NO: 111585 - DNA, 122 bp, Homo sapiens
gcgcggagcctccagcagctgaaattagaagcagccagccccgggcagggaagccatctgcgcggcgcccagcagcatggagacgtctgggtcctccctgacggcatgcgaagcggcacccg

SEQ ID NO: 111586 - DNA, 122 bp, Homo sapiens
gttgagtgaatggaaggcagagaaaccgccgcagatattgaagctggggggaatcggcagcggtgacttgtgctcgggaagctcactgttcttatgaagttaggtttatccaaagcgtgtct

SEQ ID NO: 111587 - DNA, 122 bp, Homo sapiens
gacgcgaacctcggcaaagagacgggtcttaccggtctccgaatgttctcaggccctaagcgcgcagccccgcacccgggtgcagccggcgcggtcccacgtgtccctaccgcgagccgctc

SEQ ID NO: 111588 - DNA, 122 bp, Homo sapiens
tgggcagtagcccttggtgtgctctgaactcctggacctcaattgcccatcactgagtgtcgtcgaaccttgtagttaacgaggttcgactttgtgcaggcgcgtggagttctgaacgtcca

SEQ ID NO: 111589 - DNA, 122 bp, Homo sapiens
ttactggcaccagattgctcaatccttcgaccaataagacaaagaaggaaagtacttcagcgcttgctgttttgtaatactggctttgattgggagaaaataagtgggaaacaagagtagct

SEQ ID NO: 111590 - DNA, 122 bp, Homo sapiens
agaggccttacacaacttctccatttcacagagcggcagactgagtcctgggatgtcaggcgacttgggttagctcacatgaaaaagacccagatgactgcattttcttgctaccttatatt

SEQ ID NO: 111591 - DNA, 122 bp, Homo sapiens
cacgcctgcgcctccacgggggtgcagcagccatgggggaacctgcagcgagtctcactgcgtgaggagaatgtggagacgttgtggggcagtggtggggtcatggctgagtgagtggcggc

SEQ ID NO: 111592 - DNA, 122 bp, Homo sapiens
ttcgcagtcagacaaggacagtgattagggttttataaagcaggcattctgaggaatcgtcgtttactaacgttaaatatagctcattaaaataaataaatattaacgcaaaaaggtactaa

SEQ ID NO: 111593 - DNA, 122 bp, Homo sapiens
aattcttgttttatatgagtccactcaaattcaaagcaattgtatttttaaatgtttctacgttttaaagacttaggttatattacacttctcatctgtctttacttttcaaaaaaccctcc

SEQ ID NO: 111594 - DNA, 122 bp, Homo sapiens
gcccgcctgcatcgccctcctcctctcccagggccaccgtgcccggcagaacccagctcccggaccggtgcgggttctcaccaccaaagacggagcagacggccaccccagcctccactcca

SEQ ID NO: 111595 - DNA, 122 bp, Homo sapiens
gagctggcacgcacacacgcaagtgcacaggccggtacccacgtgtacacagcacacacacgtgaacagggctggcagaacacagatgtgactgggctggtgcacacacgcatgttatcaag

SEQ ID NO: 111596 - DNA, 122 bp, Homo sapiens
gtcagggaacgtctgcatcttcacttttattgtgtcgaagggctgcccagtcagtacacacgctgtcccccctgcggcccccgctgtgaggtcgatggcggcttggatgccaggaccggact

SEQ ID NO: 111597 - DNA, 122 bp, Homo sapiens
ctcaaacgaccgacagagttccctgttagagcttctttaaagatgaagcctctccactcacgcctcaaacaggggtccttggaaaaagtggtaatttttattaaagaaaaaaaactttcaga

SEQ ID NO: 111598 - DNA, 122 bp, Homo sapiens
taggacagaattgcacaattagttcatccagctgactatggaaaggatcaactttaacttcgtatacacagtatttatctgtggcattaaaggtagatataaatgaatcaattgtagggtat

SEQ ID NO: 111599 - DNA, 122 bp, Homo sapiens
cctgggatgagacacactgtgtgaccgccagctcactgcttcccccgcatgtgtggccgacgtaaagtccacccagtcctcagcagcttcccccagcacggacaggtgctccacggcctctg

SEQ ID NO: 111600 - DNA, 122 bp, Homo sapiens
ttgtaaggaatccattcccatgaaatgccattcccatgaatggcattaatctattcatgacggtggagcctaaccacctcttaaagatctcacctcttaatactgttacagtggcaattacg

SEQ ID NO: 111601 - DNA, 122 bp, Homo sapiens
ggtcacctccctctgcagaaggaccctcaggggcctccgcagccggtcacctccctctgccgaaggacccccaggggctccacagccggtcacctccctctgcagaaggacccggagcaggg

SEQ ID NO: 111602 - DNA, 122 bp, Homo sapiens
gcacgggagggagaaggaagaggacccatctggggacaacgcgggtggcccggctcccagcgtccacagcagggacttcctcccacacagatcaacgaggctcccggaccccaacctctgag

SEQ ID NO: 111603 - DNA, 122 bp, Homo sapiens
tttgaaccccagcgaccccatccagaagaaaccaggagaagcacaaactggcgctaggttcgctaccatccacctgacccttgagcccggggaaacccacgggtgcagcaagccgggaaagc

SEQ ID NO: 111604 - DNA, 122 bp, Homo sapiens
agctgctattaattgcacttgacacagaggtggggcctgagtcttggcaggcggtccacacgggacagggtcatcaggagtgaccaccaagcgggctggggccctggcccactcgacatctc

SEQ ID NO: 111605 - DNA, 122 bp, Homo sapiens
cttaatgtccatattggtcgggatagtaaggttcttgtctgtgttgcgggtaattgttaccgcaggattgtccacgccactgattggatcgattgtcacttggccacccccatctgccgtcc

SEQ ID NO: 111606 - DNA, 122 bp, Homo sapiens
cagagagggcacggccccacactgccccagagacatataggagccaggcaaacaccagggcgagtgagctcgggccatctgctgcctgcctgtggaaggagcgctcgccagcctcacccagc

SEQ ID NO: 111607 - DNA, 122 bp, Homo sapiens
acatggtgaaatcccatctctactaaaaaacaacacaaaaattacccaggcatggtggaacgtgcctgtaatcccagctactcgggaggctgaggcacgagaatcacttgaacctgggaggc

SEQ ID NO: 111608 - DNA, 122 bp, Homo sapiens
ttagctactcttattattgcccattcctatgctcctattcagtccttctaaagaggcaatcgtttgacagatgctcccacattctttctcaaatggccctgtgaggtggaaggaatagccca

SEQ ID NO: 111609 - DNA, 122 bp, Homo sapiens
tcactgttgggtatatatttaaaagaaagaaaattgtaacatcaaagagatatctgcaatcggtgttcctatgtttattgcctcactattcacaaatagccaaggtatggcatcatcttaag

SEQ ID NO: 111610 - DNA, 122 bp, Homo sapiens
ggactcgagtcgggtttgggtcggctacacagggcgccccgagagttattaactcgccagcgaggcctatgccgtgccacctgggcgagacggtgggccccaaccaggctctgcgaggcgcg

SEQ ID NO: 111611 - DNA, 122 bp, Homo sapiens
ggcgctggggctgtcctgggtcgtcacatgcgagaaatcgtctcaccccagccagtgtgacggagtgagagcaaaagaaagttttgatagcagcgtacgatttatattcagctgtatgctgg

SEQ ID NO: 111612 - DNA, 122 bp, Homo sapiens
ctcgctgtccaggagccaggtgcctatttggtagagcagctgcgagtaccagtggatgcccgcggtggcccccgcacccggagcgtcggcagcacctggagcggttagggctactctgccgc

SEQ ID NO: 111613 - DNA, 122 bp, Homo sapiens
tgcacaacttggataatcaagtaaattataaagcaaatttcagtactcttgcctcagaaccgctgccatctctgcacctgtaatgtagacagtgaaaacgctggttatttattttgtacttt

SEQ ID NO: 111614 - DNA, 122 bp, Homo sapiens
attggctggtgtgctgggcccagcatgggcagggggcggttccacttaaaaaccctgggacgagagcggtccttgtctgcgttccgtgtccaggcaggtgcaggcgccgcggggccggatcc

SEQ ID NO: 111615 - DNA, 122 bp, Homo sapiens
gccgccggttgctaggtgacgacgccaaacagccgcggcgtcctgcctaccgggagctgacggacgacgactgccaacaccttagccccagctggcccaggaaactgctgcggtggcaggtg

SEQ ID NO: 111616 - DNA, 122 bp, Homo sapiens
tgtcccgcctcctcagtccccagcgactcgcaggggctggtggggctggggtccagctgccgtgctcccctgccctgcgccgcgccgcgcgtcttggtaggcgctgcgctgccggggccggg

SEQ ID NO: 111617 - DNA, 122 bp, Homo sapiens
ccgcgtacacgtacctggggcggtgcagtcaccgctgcctctgccagttcgtgtgtgggacgccggccatcaccgcatttccgcgtggacgccggcagggtggaacgcctggctttccccgg

SEQ ID NO: 111618 - DNA, 122 bp, Homo sapiens
ggcccccaggagactgaaggctccttgttctcttcctcatttggactgtgcctctcttttcgtttcagttcctcttttcttgaaagttgcgtcttccattcttctgtcttgaggtcgcgtct

SEQ ID NO: 111619 - DNA, 122 bp, Homo sapiens
cttgcctgacctggtctccagctgccgctcccgtccggccctctcgccactgggggacatcgacttctgcccacccaacccaggacccgatggcccccggcgccgtggccgcaagcccacga

SEQ ID NO: 111620 - DNA, 122 bp, Homo sapiens
gccattggccgcagagctcgggggcgtggtcgagctggggctgggggcgcccgcggtgcccgcccgcgagtctcgctgcctccctcccggggctgcgggcccggcggccgggctggctgggc

SEQ ID NO: 111621 - DNA, 122 bp, Homo sapiens
ctccgcagctcctccatcagaaacatcaccagcatcagaaacaacaccagcagtgagaggcgaatggacatcctgtgcccaagaaagacacacactctttcttgtggcgctgaagccaaaaa

SEQ ID NO: 111622 - DNA, 122 bp, Homo sapiens
gacttagccaagttcacggagtagaacccgggattggagcccgggacattgaaatgaaggcgtcttgcattgcagctccgttgcagcgcagaggcgcaggaaggcagactaccacgagcctc

SEQ ID NO: 111623 - DNA, 122 bp, Homo sapiens
cgagctgagaaacaaaaattcacactcatgttaatgttacccatttactcaaaagtgctgcgacaaaatattttgggctgctctgctgtctctggccagagataaagtgcgtttaaggaaga

SEQ ID NO: 111624 - DNA, 122 bp, Homo sapiens
gtctgatggccgctttctcggtcggcaccgccatggtgagtgagcgcatccttcgtccgccgggaacggttttattttcaaggagagcaggaaacacacaaagactcgcaagctcgacctga

SEQ ID NO: 111625 - DNA, 122 bp, Homo sapiens
ttctggaagcggcgctgcagggcggccagctggtagctggagtagatcgtacgcggctttcggaccttcttgggcttcccattcaccatgcgcacctctgcttccggctcctccttcaccga

SEQ ID NO: 111626 - DNA, 122 bp, Homo sapiens
taccatttgttttaaaacacagctcaaatgagatccatgctacatattccacaagtgatgcgatatttatttttgaactatttaatagcccagagatgagagtacagtgaactcaccaaatt

SEQ ID NO: 111627 - DNA, 122 bp, Homo sapiens
gtctcgccgctgcagtcgcagagcaaccacgcggctttgaccgtctatttcaaagggcttcggggtcttgcggatggggatcactgcgggcactggaaacctgccggcccccacccagccgc

SEQ ID NO: 111628 - DNA, 122 bp, Homo sapiens
gggccgggaggcgggcgaggaggcagcgcgcatcactcgggtccccttcctgcacccagccgccacttgccggttgctaagcagttatcattgtttctgtggcgattgcagaggctgttgct

SEQ ID NO: 111629 - DNA, 122 bp, Homo sapiens
agatatttccaacaaaatggcaagctaaaaaaaaggataattaaaaattagtgcagtgaccggatgtgaggcaaaagtggtgagcttagtgacattatttttacatcaaaaagtaaaagtca

SEQ ID NO: 111630 - DNA, 122 bp, Homo sapiens
gatgctgggggaggcggtgcgcgacggtgggcagcacgctcgcgaccccgtcgggggctccgtggagttccagtttgtgcctgtgctcaagctcgtgtccaccctgctggtaatggcttcct

SEQ ID NO: 111631 - DNA, 122 bp, Homo sapiens
ataacatcttatcaggagacaggtttgagcagacaactggtctgaccaaaatttattaggcgggaatttcttcgtcctaataagcctgggagcgctacgggagactggggcttatttcatcc

SEQ ID NO: 111632 - DNA, 122 bp, Homo sapiens
aaggttaatatcactagcaccgaagggataccacacacctcctgatggggttcccgctgccgtgcacggcctgaatttaatcaggagaaagcaaggggcaaactcaaattcagggaaattcc

SEQ ID NO: 111633 - DNA, 122 bp, Homo sapiens
cccccctccctctcactcctcttgccctctgctttactctcatgtggcaaacgtgcggctcgtggtgtgagtgccagaagctgcctccgtggtttggtcaccgtgtgcatcgcaccgtgctg

SEQ ID NO: 111634 - DNA, 122 bp, Homo sapiens
accgcgcaagggcccctgcctcccgggagactgggatttctggcctcctcacctcgggaccgctgactgtggagtgtcaaagacggaacagggtttagtgatcttgtccaaccccctccccg

SEQ ID NO: 111635 - DNA, 122 bp, Homo sapiens
tggtcccggggcagggaagccttctggggatgtggccatcgggcatctcctgagtggtcccggggtagctgaagcctcctgggggcgtggttgtctcctgagtggccgcagatgctgttttg

SEQ ID NO: 111636 - DNA, 122 bp, Homo sapiens
tctcactggtctttgaagttggcctttctcttttccacaaacgcggtcatcccttctttccggtcatcctggcaggaaaaggaacagaaacagagctggacgcgcagtatcctcacagagcc

SEQ ID NO: 111637 - DNA, 122 bp, Homo sapiens
atgtccattgaagaggtggagaggatcctggacgagacgcaggaggccgtggagtaccagcgggtaggtggcaccctgaccggcctgcccccaactgtgagaacccacaaggccaccctcga

SEQ ID NO: 111638 - DNA, 122 bp, Homo sapiens
cgcggtgagttgacttctctcctcctggctcggactcccggaaggcctgtgcagtgagcacggctccttgttctgtgcaggatggcctgtggctggtcgctcagcagccggccctcatccat

SEQ ID NO: 111639 - DNA, 122 bp, Homo sapiens
ccggcggcggtgggcgagctcgcgggcccggccgcccccagccccagccccgccgggccccgccccccgtcgagtgcatgaggttgacgctactttgttgcacctggagggaagaacgtatg

SEQ ID NO: 111640 - DNA, 122 bp, Homo sapiens
tggggcccttcccggggttgtagacacatttctacagctgtgggccgggcgccgctccaccggctggcacgagcctctgctgcccactctgtgcctggttcctggcctgctgggaacaggag

SEQ ID NO: 111641 - DNA, 122 bp, Homo sapiens
tcaagttcttatttttgtttgttcttttaatgacccagtgtgggtgaagtggagcatgtccgtatactgcagatggagcagcggatacagatgcaaatcgatccagaggactgtttggcgat

SEQ ID NO: 111642 - DNA, 122 bp, Homo sapiens
catttttttattttgcaaaaaacattcaaaaataaaccctgtcaatagcagagtcactggcggctgacaaggcgagggggtggctgtgtggatctgagccaaccgcacttcacaaaaggaag

SEQ ID NO: 111643 - DNA, 122 bp, Homo sapiens
tgtgtgaggctgtggttggaccaacaacactgcaagcagtttggaatggtggtgcattggcgcccagaagcttggagatgccaggaactgcagggccccaaagagggagttacattcttggc

SEQ ID NO: 111644 - DNA, 122 bp, Homo sapiens
caagtctgccagggagctagaaaaactgtacggtggggctgcgtgagcaccaggggattacgcgggaggcgggggcgagtggatgagagcagagtccctgtttctttcatggggttgaccgt

SEQ ID NO: 111645 - DNA, 122 bp, Homo sapiens
cggaggcggcggcgcccccaggatccactcgcccagcgccgggccctgcactccgagccgcggccgccacccgccccgcagccaacttgggccgaaacttccccgggtcccgcgctccggag

SEQ ID NO: 111646 - DNA, 122 bp, Homo sapiens
gacatttggactcccaaacaaaagaagggaggggcatatctctctgtttctatggttcctcgttgagggaaaaaggctttcaagttcttgcgtgagcactgacaggcttttatgaatagttg

SEQ ID NO: 111647 - DNA, 122 bp, Homo sapiens
tccagagtgcccgtcgccgctgcccaactctgcccccaggtgtgagtccctcgagccctccgcataaacctctgtgccctggaacccgacggggacacaagcgggaagttgacagccatgcc

SEQ ID NO: 111648 - DNA, 122 bp, Homo sapiens
gctgtgtgccattcttttgctgggcttggctgccaagaagaaggagataaacatgaccatcgtcaaagacctgctcaagaaatttttaaaaaagaaacaaagttatggggttaatctcctac

SEQ ID NO: 111649 - DNA, 122 bp, Homo sapiens
gtgacaggtgggtccctatagacaagtgctagcagtgccctattggcctaccaggggcaccgtgtgctttagggagtggcaggcagcagctggaccacacacatggaatgaaggaggccaga

SEQ ID NO: 111650 - DNA, 122 bp, Homo sapiens
acctctctttggtggggagccctagtctgtaacccccatggccccaaaatgcacctctcacggaagggtccccagagctagctggaggcccctctgcagccctcactcaggacacggaagat

SEQ ID NO: 111651 - DNA, 122 bp, Homo sapiens
tgggagccccagctcagactgggccagctccagctgtgcagcctgaggactgcgcacaaacgcccctccgttccaccccacccccgctgcacgccggtacgcgtctcccctcctcttcacac

SEQ ID NO: 111652 - DNA, 122 bp, Homo sapiens
cggagaaacggggcgggctgcacccagcagaatggggtgggcctctcagaagccccaggccgcaggggaggggcgcgcccccaacatcttcccacaaagagctccagctctccaaagcaagg

SEQ ID NO: 111653 - DNA, 122 bp, Homo sapiens
ccagaccccaacactggcaaagtacataccctactcactgtggaagtattcggtgttatccggtcactcatggcctttaggctgacaggtggcaccaaagactacattgtagttggcagtga

SEQ ID NO: 111654 - DNA, 122 bp, Homo sapiens
tgcaactttgaatgcacatggggtggcgaggaaggaagaagagtaagaaaacaggaaaaacgaagtaggatagagagagcagcctctttgtctttacagcagagaatcagacacccaattag

SEQ ID NO: 111655 - DNA, 122 bp, Homo sapiens
actaaacgctcctgggaggccctagtgaagcatcacagaccattagaccggggcttccgccgaggactaattgagcagcccttagggcttttcatctgggcaagaatccgaactcctccagg

SEQ ID NO: 111656 - DNA, 122 bp, Homo sapiens
cagccacccactacacatacccttttaactcaaatggaacaccatttgccttactacatacgatatgttctgtttctcttctattctgttaaaaaaaattctagacactcccactaaactga

SEQ ID NO: 111657 - DNA, 122 bp, Homo sapiens
cacacgttgccgggtaagagtcacgctttggcaaataagcaacctgcctcatccaatcagcgtctcgcctgcccggttagttccttgtcttgcccaaccagattcttgcctcctccataccg

SEQ ID NO: 111658 - DNA, 122 bp, Homo sapiens
gaggcggtgtgagtgtgccctgacctctgcagcagcggccctcctgccgccgtctccacgcgcccttcccagacctgttcagtttcccagcagcgggctggcgcctgccttctctctgttgc

SEQ ID NO: 111659 - DNA, 122 bp, Homo sapiens
gagtcccttctccgtggcatctacgcgtatggttttgagaagccctctgccatccagcagcgagccattctaccttgtatcaagggtgagacctctcagtcccagaagacattgtggactgt

SEQ ID NO: 111660 - DNA, 122 bp, Homo sapiens
gcctcggcctccccgctgcccacaggcatgtccggccgcaggactcccacctctctttgccgggtcagctctgctctgacaaggtctcaggacacaaggcggctgccaggtcctcctcctca

SEQ ID NO: 111661 - DNA, 122 bp, Homo sapiens
acggccccgcccccggggtggagtcggatacgggtagggggagcccactggtgacgcctacgcctcgccctccagagtaacccccgtgcactctgggactttgggatattcattttctgccc

SEQ ID NO: 111662 - DNA, 122 bp, Homo sapiens
gcttagaatgagtgccttgacacctacatatggctgcattccatacctcagtgaagaagccgaaggatgctgacacacagtgatgtggagggcattccggagaaacttttgcaacagtgtat

SEQ ID NO: 111663 - DNA, 122 bp, Homo sapiens
ttgggctaggagggcgagaactgctgcgccatcaggtggcagctttggggtcagcaccctcgagatgtcctgccctttctccagcggaattgggaagagcccctcaagggctaaacagattc

SEQ ID NO: 111664 - DNA, 122 bp, Homo sapiens
ggaaggagagggagaaggaggagtaggagggaaggagggaagcggggggaaagaaagatacgtgagataatattcaggtcaaatatggacagttttggctgggcacggtggctcacgcctgt

SEQ ID NO: 111665 - DNA, 122 bp, Homo sapiens
cacacccagacacacacataccccacagacccagcagtgagaccatttcctaacagcacccgagctggctgctgtgtatggtttgtgtacagtttgacactgctggggcttagaggacaata

SEQ ID NO: 111666 - DNA, 122 bp, Homo sapiens
cggggtcggaggcagggttcaaggcagcacttacaggaggatctcctgcttcgtcaggaacgtcaagtcctggaaggcaaagccagagcggggattagcggaccgctgggaggccgcggccg

SEQ ID NO: 111667 - DNA, 122 bp, Homo sapiens
cgccgcggcgggaggtggcgctcacactaactatagctatccagggcgcgggtcgagtggcgagaccagctcccctgggtatgagaacgcatctttgtgcggtcggctggctggggcctgaa

SEQ ID NO: 111668 - DNA, 122 bp, Homo sapiens
ataggggtgggggcgaagcaaggggatgcagtactgggggcgcccccaggtatggcggtgcggggagccgaggggccagagtagggtccgagaaggaagctagggttagagtaggtgcacct

SEQ ID NO: 111669 - DNA, 122 bp, Homo sapiens
ctccctgcagctggacagactcgggcgcccggcccaaagcccggcaggggcgtgtccgcgcgctcacctgctattggccaggtggggctgtcggctgccagcagtgcttatgctttaagtgc

SEQ ID NO: 111670 - DNA, 122 bp, Homo sapiens
gctcttcttgtacatggccatgcgcgtcttgccctcactcctctggatcttgggcagccgcgccttttcctgttgctgccgcaccttcagctgctctatcatgcgctggttgtagcgctgca

SEQ ID NO: 111671 - DNA, 122 bp, Homo sapiens
atggctgcagttgggccctcagatcttgcagattatgaccaggcagcaggctcgccaagccgtgggcactaactcaagctcccctggagcgcagtcactttacaaccaccttcctccccaaa

SEQ ID NO: 111672 - DNA, 122 bp, Homo sapiens
gggagcagccgagcaaaggccccagcggggcgcgtgtctgagcaacagcaaggaggccaacgaggccggagtaggcgtgcggggagggcagagggtgggaagcgggggtagaacggagggtc

SEQ ID NO: 111673 - DNA, 122 bp, Homo sapiens
tgcacgtgagtcactgttctctagggagattccgattggctagagggcacgcccctgccccgccctccttctcaggctgaattccctcctttggtccttaaagaacttctgttcactgtgat

SEQ ID NO: 111674 - DNA, 122 bp, Homo sapiens
ctccccagccccccggccgcaccgtgcccaccccgcgctcgtcgtccccctcgcccccagcgccaccctgcactgcggacccgggaccgcctgggaaacgccctggtctgacatggcttggg

SEQ ID NO: 111675 - DNA, 122 bp, Homo sapiens
ggcagtcctggccatacccaagtctctttcaggtcctcgtcccagtgtggtatatagacacggcttccccactggacccagggaaggagctgcaggagtccacccagtcagggaggcttgct

SEQ ID NO: 111676 - DNA, 122 bp, Homo sapiens
agggcggggcgggggaaataaactccacagagacaataacctgctgctgccccccaacaccgactcaaaacagcgaaactcctggccgccgccctcccctgcagcgcaggccccagttaccc

SEQ ID NO: 111677 - DNA, 122 bp, Homo sapiens
gagaggctggccaagtccttcagggcttccagcttggcatccatactcgaggactggattcgttcatggagctgctgggcgttctgagccttatggggcaaaagcaaagggaagagtgttga

SEQ ID NO: 111678 - DNA, 122 bp, Homo sapiens
gtagcaaaaaaagaggcggtgcccaaggcgaaaggctctgtgactacagccaatcagaatcgaggccgggctttggcgggaggtgggaacgctgtggccattcggatttggcgcgagcgcgg

SEQ ID NO: 111679 - DNA, 122 bp, Homo sapiens
aaaatccccaataaaagcaaaggcagagaagacaaagaggcaggaggaggctgcaaggagcgtccacaacaatggagaagatggagcgagcgaaactcctgaggacaatgaagggaggtgga

SEQ ID NO: 111680 - DNA, 122 bp, Homo sapiens
tgctcgtgcctctccgtctcctcctcgcgcttcagccaatcgcgcctctcctcctgctcgcgcttcagccgctgctcgcgcctctcctgctcgtgcttctgctcgtgcctctcctcctcctg

SEQ ID NO: 111681 - DNA, 122 bp, Homo sapiens
ctccctccctgttttttcgacccatgtgcgccctctctctcacctggctaacatgctttgcgcccgctacctctacctggcttggcctctgagatccaaaccgcgccctcctggcatgtccc

SEQ ID NO: 111682 - DNA, 122 bp, Homo sapiens
cgccggctgctggggctgccaggtgccaggagacgcctccctcgggcctgccccggcgcccgccctcaccggcgtctgtcctgccgcccagctacaggcctcgggcctccccggcagcgcgg

SEQ ID NO: 111683 - DNA, 122 bp, Homo sapiens
ggggggatttatgttgcgtttccaaactgcttctgcctgtcggcgcctgtgtggaaactgcgacgagtctgggagcggctgccggagaggcggggcagaggtgtgacgtcatcgccgcgggg

SEQ ID NO: 111684 - DNA, 122 bp, Homo sapiens
tggcagaggcggggcggcgagcggacggtcactatgtctctgcgcaggcgcccgcttccccgctctggactctactgcgcaagcgccttcattcattgcctaacctaagtggctaggtgtcg

SEQ ID NO: 111685 - DNA, 122 bp, Homo sapiens
acacgtccaggtgtagactgactacattgagtatcgctccaacaccgaacttccctttaacggtttaaaaaaagggtcatgagtgtcaacacagttcagcagtgttttcatgggagaccttc

SEQ ID NO: 111686 - DNA, 122 bp, Homo sapiens
gacaccccatcaaaattaagtctcccatttatagtagagcccctaacatcttataatttccgcctttttttatctcttgtcaccatttgcaattatatgtgaatctgattagtcctgagcat

SEQ ID NO: 111687 - DNA, 122 bp, Homo sapiens
tcccagtctctaacaggtcccttcccagcctccagagcaagccaatcagggacacgctctcgtggcccagttcggaaacaatgcttggtgggaacctgcaatcttggctgccggaaccttcg

SEQ ID NO: 111688 - DNA, 122 bp, Homo sapiens
ctgccgaggaacgagagcgcgaagctaaggtatgtcgggctcccggggcctggagatcttcgtgcgctgtgagcaaggatcagggaaccggaagggcttggtttgatggcgagcggatgcgc

SEQ ID NO: 111689 - DNA, 122 bp, Homo sapiens
tcttgctctccagtcaaactgtcagcacccttgcttcatctttgtctgtggccaccattacgtgaggctcatttactgaggacaaattaagtttgtgtgggcagccagcaagctcagaggtg

SEQ ID NO: 111690 - DNA, 122 bp, Homo sapiens
cgagaggggggtgatatttctccccgatttttcctagaatcctgtttatactgccaccctcggttgacaccctgggacactatcttccatattctagcaagatgcagctgctaaagtcgcag

SEQ ID NO: 111691 - DNA, 122 bp, Homo sapiens
ctctctctctctctcgcctgtcttcatgtcgtggattgatgaacgcgaatcgcgtgtaagcgccgccaccgccgggagtctgaggaattcgcctgggctgttagaggaaagagctaagtgag

SEQ ID NO: 111692 - DNA, 122 bp, Homo sapiens
tcccagaatgcctgaaacaggaaaaagagaaagaaactttataaatgcacttttgaaccccgagacccagctcctggccaggagacaggcaaactcttttaatatccttattctggattcac

SEQ ID NO: 111693 - DNA, 122 bp, Homo sapiens
tcccgcttgaggagggggatttattcaaattttatttaaatccctatctcccgagggtcgcgcgcttgggggagggggagaggtcgggggtgcgcgcgggctggggggggcggggccggagc

SEQ ID NO: 111694 - DNA, 122 bp, Homo sapiens
atccatgcactcctgctactttctgtgctatctcggggccttcccacagtcaacactctccgcatatccacattttcagtatgcatctctctgggctctagttttgcacacatgccattttt

SEQ ID NO: 111695 - DNA, 122 bp, Homo sapiens
cactctccttggaagcatgcagcctgggaaaacctcccttcccactgtgccccagaaaaccgagtcccataggatcagggtagggagtgcacacacaggtggcaaccaaaggacagacccct

SEQ ID NO: 111696 - DNA, 122 bp, Homo sapiens
ggctcaggttggctggggttaaagggcaaagtcagggtcgagggcaccagcttttctcggcggtaacagctgccacccaaattatgccccctcaggaagcgaatgaattgttcctttctccc

SEQ ID NO: 111697 - DNA, 122 bp, Homo sapiens
agggacactacccagtgagcaccttggcagccaggatcccgcctcctccctctaattggtcgcgaccggaaggaggccactacggggcggggctagggaggggagggcgggggtggagagga

SEQ ID NO: 111698 - DNA, 122 bp, Homo sapiens
cccagggacccttcccggaccctcccgggcgcagccctcacctgctgcccgcaccgcctccgaggaaggccctcgggctccacctggcctcatcaccgcttcccttatccgggaggaggagg

SEQ ID NO: 111699 - DNA, 122 bp, Homo sapiens
ccgccatggcgcctcagctgctggcaggcacccacccaccagggtgcttccggggcagcgcgcgccacttccgacctgtgccggaaaagcccatagagaagccacctggctgctagagtgcc

SEQ ID NO: 111700 - DNA, 122 bp, Homo sapiens
ttggcaattcctactgcattcttaacaatattttgctaaaatttcggaagattccagcaccgtaatactcccttcccaggctgaagcttttgagggaggtggggatggaaaatgaaagaagc

SEQ ID NO: 111701 - DNA, 122 bp, Homo sapiens
acatgggtggaaggagcttcagtggcccaagctacaagatgctccctctagtgtcttgtacgctcacaagtttttttccgaccttggagaggcctagtgatctaaagccttccacttaagtc

SEQ ID NO: 111702 - DNA, 122 bp, Homo sapiens
gatttccacatgttcttggacatggtcttctcgtttctgtactcgtcgtgtcctgcgggccgtctgagtgttccgtgctgacgcaccctctcctcctcgggggtttcatggcgtctccctcg

SEQ ID NO: 111703 - DNA, 122 bp, Homo sapiens
gcttccaacggaagagcagcaaagggatcccagccatcatccagaccacgacgtgatagccgatgaccctccatggactgccacagtagccgctgagcctctgcgaacgcagcgagagaggg

SEQ ID NO: 111704 - DNA, 122 bp, Homo sapiens
gcggggcttactgtgcagcgcgtgccaacccctgggccagacccgctcctgccccctgcccggagtgaactctgccctgaccccacccccagccctgcggcctgccagcatggatctcctgc

SEQ ID NO: 111705 - DNA, 122 bp, Homo sapiens
tgtggtctgctctttggagacaggcatggctgctaaattttgagactctccactctgttccggaaagatctcctctaaagctcaccacgccagactgattgcatctcacaatggttgaggtg

SEQ ID NO: 111706 - DNA, 122 bp, Homo sapiens
aaccaggactcaaacctggctctacgccggcactcacctcgtcgatctcacactggaccacggactccacggaggggtgcttcaccacctcccgcaggacacctccatctccgcccccgatg

SEQ ID NO: 111707 - DNA, 122 bp, Homo sapiens
cttcaagatatcctgccctttcaagccaaaaccaaagtgtagcctccgtgtactgatgtacgattttgtctgtaactgctgttttcctgaaatttacccctgcctttaaaaaccctgacctc

SEQ ID NO: 111708 - DNA, 122 bp, Homo sapiens
gctaagcccctcactgcccggggctggcagtgcccgccaagcccatgcccacccggaactcgcgctggcccgcaagcgccttgcacagccccggttcccacccgtgcctctccctccacacc

SEQ ID NO: 111709 - DNA, 122 bp, Homo sapiens
ctacttctttatatgaccctgcacctttcacagtgctaatatttgtttaaggttgcttaacgttgttcctctcctctagaactttggaagtaaaagccattctcatctttagaaacagtaga

SEQ ID NO: 111710 - DNA, 122 bp, Homo sapiens
cactagcccgtccgcgccaaaacctagcggggacgcgctcagagggccgagaaggcgcctcgaatcacaaaggagcttctctcacgcacacgttgtactacaagtcccgagatgcaccgcga

SEQ ID NO: 111711 - DNA, 122 bp, Homo sapiens
ggccccgaggcaggagtgagcctggctgctggaggagcagcgctgagtcccggcccccgccggaggagccctgtcacttggctcgcagtgaaacatgagtcaagtctgggggtagtgtcaag

SEQ ID NO: 111712 - DNA, 122 bp, Homo sapiens
ctcccaaccaagccctccagcaaggattcaggttggtgctgagtgcctgggagggacacccgcctacactctgcaagaaactcaaaaagggagatgaggggatcgtgggagggaggtaggga

SEQ ID NO: 111713 - DNA, 122 bp, Homo sapiens
cccctctgcggagagctggcaccgaggggcgggccaaggaaaagacaaacaccccggctccgacacagtccaagcgcgagcccggagacacttcaacaacattcctaactttttttctcagt

SEQ ID NO: 111714 - DNA, 122 bp, Homo sapiens
cggcctcccaaagtgctagtattacaggcgcgagacacctcgcccagcctatgcaacattcgtaaaatgacaaaatggtagaaatgagaacagattactagttgacaaaaagaggttaacgg

SEQ ID NO: 111715 - DNA, 122 bp, Homo sapiens
acagctccgcgactgcgcctgcgtcggggagggggcggtgcgctaggtcaagctagggcgcgggagcagcggagtcctggttgagtgaccatccaaggaatatgtcctcgcgcgcggccgcc

SEQ ID NO: 111716 - DNA, 122 bp, Homo sapiens
agtatgtgtaaaatgtaatttgaaaagttacacaacatttatagtcgacgaggactggtgcgttggcactaatcactacgacttaagggcaagtgaagaggcagtggttgaataaactgagc

SEQ ID NO: 111717 - DNA, 122 bp, Homo sapiens
aagatgatgaaaccccgtctctactaaaaaatacacaaattagctaggcgttatggcgggcgcctgtaatcccagctactcgggaggctgaggcagggaattgcttgaacctgggaggcaga

SEQ ID NO: 111718 - DNA, 122 bp, Homo sapiens
aaattaggcttcttgaataaatgatgaataaatgagtgaatgaatgaatgaacaaatactcgctctgtgctcctcctagggacccggatgccccactccttggcccagactttccaggtcag

SEQ ID NO: 111719 - DNA, 122 bp, Homo sapiens
tgtttttaccacagcggtgattgttcccaggacacctttatacctaataacactggacgtcgggcattcaccttggacctggaaataagaaaggtgcagaacagaagggagcgaaattgagt

SEQ ID NO: 111720 - DNA, 122 bp, Homo sapiens
attagcatgattatacctagtagccatttctaccctcttgagagtctgggcttggctccccgcacgtctgctttcctcagccgcagggctcccgcgttctcatgcctgacacagtccgcgtt

SEQ ID NO: 111721 - DNA, 122 bp, Homo sapiens
aggggtgggtggcctgcctagagtcaggatccagctggaggatcactgtgctgtgaccagcgtcacactagttgttcaccagcctagagtggcatgggaaacagagtttacagaactatagc

SEQ ID NO: 111722 - DNA, 122 bp, Homo sapiens
ggaccgctacgtatacaaaaatccatacataaagtcccacagtaggccctgtggaacctgcgaatacaaaaagttggccctccatgaatactctattttctatccaaatttgattggaaaaa

SEQ ID NO: 111723 - DNA, 122 bp, Homo sapiens
cctttgttccccgctctccttttccaggctgagagacctggggccttggaagcaagcacacgctggctgagctgtgattcctccatgttgattataatttttatcacattatatgggatccc

SEQ ID NO: 111724 - DNA, 122 bp, Homo sapiens
atcttctatagcttcttttttctcatccttgatacctatcagccctcaggtctttttgaccgtttctccattgtctcttgaatcatccagtcacatcagattgtacaacagaaaagttgctc

SEQ ID NO: 111725 - DNA, 122 bp, Homo sapiens
taaaaagaaaaaagtgtcattggcgtggagtggggctagtggagggtgaggtgaatgcgccgtttggaaaccacaggacagtgaacgtttcgtctctcccagcgagactctcccgcgggccc

SEQ ID NO: 111726 - DNA, 122 bp, Homo sapiens
cctgattctgcagaatctggaaaacgcctctaggctgtcactcagtatttccttcctgctcgccagaatcctccatcttttgttgattagcttggatgagccgcttcttaggatgaggaatt

SEQ ID NO: 111727 - DNA, 122 bp, Homo sapiens
cctggtatcctcaggcccgcctggcggctgacacaagttgttctaacagggtattccgtgcgctcacagttgcctgacagagcagcaggttcctttgctcccctaaactgaaaatttagggg

SEQ ID NO: 111728 - DNA, 122 bp, Homo sapiens
caaagtcaggcaatattcattcttccagacagatgcttcttagcctctgacctcatcacgcgctgatcagtgttttctagctctctggagcatcagctctctgcaggcatcttgccaatggg

SEQ ID NO: 111729 - DNA, 122 bp, Homo sapiens
ccccctgggcctgtgaggagaacccctggcttagcgtttctgtccaatgccagaaaccagcgggtggctagctccattctacccagcgctcctgactgaccctcatcagccaccaaaacttt

SEQ ID NO: 111730 - DNA, 122 bp, Homo sapiens
ccatccgcacataccaggtgtgtaatgtgcgcgagtcaagccagaacaactggcttcgcacggggttcatctggcggcgggatgtgcagcgggtctacgtggagctcaagttcactgtgcgt

SEQ ID NO: 111731 - DNA, 122 bp, Homo sapiens
gagatgtgagagggaattgtgcttcacggtcaccaccaggtgtcgcgacatcaggtgccgcgccgtcccgcttctgaggcgcggtggcctgagaaactggttgcagagcccgctcttcctag

SEQ ID NO: 111732 - DNA, 122 bp, Homo sapiens
gtgtgcggagagaattcgggaagatgcctgccgactccttggggagccaacatgcgtacacgcagatatacacgtacccaaacacgctggcatggagctcacaggggccacgcagagtggtg

SEQ ID NO: 111733 - DNA, 122 bp, Homo sapiens
ctgcgggcagcacctgcacccatctgtgcattttcagatcctcgccctcctcacccgccgcgctctgcgggcagcacttgggcggctggtccattctctggatctccttggtggccggcagg

SEQ ID NO: 111734 - DNA, 122 bp, Homo sapiens
aacttgtattatcaagaaaatgtcaaaccaagggcaccttgctttgcactgacgcaaacccggcctttcccaaggagatatagaaagcgcctctcctgcctgagccaaacccagtcttgtca

SEQ ID NO: 111735 - DNA, 122 bp, Homo sapiens
tccttttccacaatgccaaaatgtcacccaaaaagctagtgcaacaacttgctttgcaaacgacccaggagcctgccgagaaagccctgcggggagcagccccctcctcccctgcaaggtgc

SEQ ID NO: 111736 - DNA, 122 bp, Homo sapiens
gaaatcactgctttcccttaaatatggaacatagacatgaaacagatccagagagctccccgtctccacccaggaggattacatttaagcaatctaggcagctcttatgctgaggacctaag

SEQ ID NO: 111737 - DNA, 122 bp, Homo sapiens
gagggggctgtagcgggtgggagggcccaggcctggctcaccctgccctggccatctgtccgcagaggccgcggggcccgtggggccggcgctggagccaccgacgctgccgctgcaccgcg

SEQ ID NO: 111738 - DNA, 122 bp, Homo sapiens
cttcctcaccactaatgaaagacaggtccctaatcttcaaagcaagttctgctttcacatcgcctctccacacagcaaataaatcactacattacagaagtattctccccttcttccacgtg

SEQ ID NO: 111739 - DNA, 122 bp, Homo sapiens
tctctgtattgcaaatgacaacatctctgggatccagtctcttcatacttaaaatagaaacgaaatcagtttccacccattgataaggtataaccttatcaagaccagcctggccaacatgg

SEQ ID NO: 111740 - DNA, 122 bp, Homo sapiens
atgaaatgagcccaagaggaggggcagtgggcatgggttggtccccttccgtccctgccccgaggggacccacaactcccagactggtcccccaggaggatcttggggcctgggccggcgaa

SEQ ID NO: 111741 - DNA, 122 bp, Homo sapiens
attggcgactgctgcggggctgagcgctggtttcacgcgtctcgggagccaggttggtggcgcgatgagttgcagcaaggcctacggggagcggtacgtcgcctccgtgcagggctccgccc

SEQ ID NO: 111742 - DNA, 122 bp, Homo sapiens
ccagagtgcccagagacaacccacgcagacatggggagaacaaacagacgccacagacagcggccccagctgggattcagtgtttttcctcatcagtgttacaacgaagcaaggttggatga

SEQ ID NO: 111743 - DNA, 122 bp, Homo sapiens
cctctatatttctgtgtgtgtgtctttaattcctctagcgccgctgggttagggtctccccgaccaagctggtcttggcagctaataatggtatccagatcaatactggtttgcagactaca

SEQ ID NO: 111744 - DNA, 122 bp, Homo sapiens
ggcagcgccatacgtgacaagacccgcagcatcatcccccgccacctgcagctggccatccgaaacgacgaggaggtcaacaagcagctgggcaacgtcactattgctcagggaggcgtcct

SEQ ID NO: 111745 - DNA, 122 bp, Homo sapiens
aggagggaggaggagcagaggctttcgggagaacccagcccttcaccggccaggggaggccgcgatgcatcgcgactggttgtgaagagccaggggaagaactttaccgtgcaggtgagtgg

SEQ ID NO: 111746 - DNA, 122 bp, Homo sapiens
ctaatcagtaatgttccgtagtgactgacgcagagggccacacagctctcagccctaaatcggcgtctctaaggactccggcctcgctgctgcctgctcggctggcccaggaggggcatccc

SEQ ID NO: 111747 - DNA, 122 bp, Homo sapiens
cccagtctcacctgaggacaagaacagaaaaagccaccaaggagtaagcaagcatagtcccgatggacaagaggctcacaaggtcactgaactcaaacaggaaagccatgattgctatagtc

SEQ ID NO: 111748 - DNA, 122 bp, Homo sapiens
cagcacgaggcagtctgttcacgtcagaaggggagggaagtgtctgtagtgcttctgtatcggcacctaaaagggcaggtaagaaggaccagtggccagcacagagaggggaactggaagga

SEQ ID NO: 111749 - DNA, 122 bp, Homo sapiens
gggtctgcggcaagggcaggcgtctggcccctacaccgtgtgcggggacgctaggctgggcggcctgtgtcactcttggccttggcaacttctggccaatccgccctgcccctctgggtccc

SEQ ID NO: 111750 - DNA, 122 bp, Homo sapiens
tgtagtcactaagcatctgatgcctgatccagaagaacagagtgaccaccagcccagactcggtcaccaaaaggactttcctagacttggtcaccagcttcaactttcccagcttcctacta

SEQ ID NO: 111751 - DNA, 122 bp, Homo sapiens
agcttctctgcctgctctaaaaccccatgtgaggccatcgggggctctgaaactaggcagcgctggggcagaggcttttagagcagaggatctcacgctttttggcacactgatgaaagcta

SEQ ID NO: 111752 - DNA, 122 bp, Homo sapiens
cccggaaccagcgaagccactgggcaagcctagaggcctctacagaggctagagacgcctcgccccaccagatgcattaggatgaaacgcgccgaaccgaaggtttagagcgccaggggaga

SEQ ID NO: 111753 - DNA, 122 bp, Homo sapiens
cgcaacgctgagaacgcaaatactaaagggcgctgttctttcctcgtggagctcacagtccgctggggagaccgtgagatgacagcagagaaactagcgcgatcagtagtactcagcgcaag

SEQ ID NO: 111754 - DNA, 122 bp, Homo sapiens
cagagtcctgctcatgtgagtggtggggcccagcccgttcccctaagaccagaattctctcgctcagagcaaagccccggggtgccgggattctctctctgctcccgctccctggatggagc

SEQ ID NO: 111755 - DNA, 122 bp, Homo sapiens
ccgggagaccgaccgaccccgccgtcgcccgtcctgtcaccaggggtcccctccctctcacgcacgtggcactccctgaaattaaccgactgactcgccagcttttgactgtccgcctcccc

SEQ ID NO: 111756 - DNA, 122 bp, Homo sapiens
gaaaaaaagacataactctgcaggttccgaatactgcctaaaaatcttgatggggcacatcgaagtcacagacatgggtcctctctggtcctggggaccaccctgtatgccctaggatatgt

SEQ ID NO: 111757 - DNA, 122 bp, Homo sapiens
gaatgtacactgtatgatcacccatctttctcagtgactacaaactagcccagcaccaagcggcacgtgaatttgtttcacctgcaccccatgactggacagctgcaataccaggggcctga

SEQ ID NO: 111758 - DNA, 122 bp, Homo sapiens
gtctcgggcaggagaagcgggccctgtatctggttatcataaattgtcttgatgtttgttcgaaagggaaataaggctttgagcttgggatcagtgctcttcagtccacagagacatcttgg

SEQ ID NO: 111759 - DNA, 122 bp, Homo sapiens
tccccgcccccatgcttggactccgccccgtctgggtcagggattgtcacctaagagcttcgtcctggcacctgattggctctctttccagctccgcctccatctcctcccgccgcccgccc

SEQ ID NO: 111760 - DNA, 122 bp, Homo sapiens
tcccaggcctgatgctgctggagatcccgggaccctctgtgtgcagcctgggatggaggccgccgcccgtcttaccgcgcgctctgggaagggggctggtccggtggaactctgtcccgttg

SEQ ID NO: 111761 - DNA, 122 bp, Homo sapiens
tgcgctccgatggattgcgacccctgttcctccatgctgtctcctcctccctttccttggcgtgaaggagactgagtggtgctggcagccactccccagcatctggcggaacattctgcccc

SEQ ID NO: 111762 - DNA, 122 bp, Homo sapiens
gggtggtgttcaaattcatggtacaatgtcagcaggcgcccagatgggaaaagagagggacgtgcacctgggcacaagaagctgcaggggcccctcccagggcaggcgagagcttggacagt

SEQ ID NO: 111763 - DNA, 122 bp, Homo sapiens
gatttccggttcccggggctacgaggcggaagcgaaggcagacgcagtctccgtcgttgacgttagtcgcagtcttcgctgctaacggtaataactcttaggttgcctgttttcccccaatc

SEQ ID NO: 111764 - DNA, 122 bp, Homo sapiens
cccactcagggagcttctgggcactctcccctggccaatcctctttcatgaggcaggtctcgtggttggaattcctgacccatgaagtgggaagaagaggctgccgggtctggtttttctgt

SEQ ID NO: 111765 - DNA, 122 bp, Homo sapiens
tgcttccagagtacggaatgcagcccaaagcagcacattgctctcattctttctgctgaccgactgtgtgaatatttttagaaaccacaccctctcgcagtgccagataaataatttccaat

SEQ ID NO: 111766 - DNA, 122 bp, Homo sapiens
gaaccagcggcgccgccggtccatccgccgtcgggacggcaccttcaattacagccctgacgtctactgcaccaagtacgacgaggctacaggcctctgcccggagggcgacgagtgagtga

SEQ ID NO: 111767 - DNA, 122 bp, Homo sapiens
cgcggcggcagatcttcagttgcggtgcggagctgagcaggtatccgagagcgactgcatcgccgggctctgggagggaaggctctgccctagaactttgctattccacccccaggagcgct

SEQ ID NO: 111768 - DNA, 122 bp, Homo sapiens
caaatgatatgtactctaggcaaattaagacttctttcttgaaatttaaaataaagctaacgttcacttgctttgcagatcactggctctgcaggtcactggttgagacatcaactgactat

SEQ ID NO: 111769 - DNA, 122 bp, Homo sapiens
gtggtcttacccgtgtttataattcagccgtcgcctaacctgagaaatcaaggatttctgcgtcgtgcgcgtgcccgctgagctgagctctgctgggatggggagtccttctccggctggag

SEQ ID NO: 111770 - DNA, 122 bp, Homo sapiens
ggacctccagtcatttcggagaggtgactgggagcgccgagggctgggggccggaggagccgctcccatactcctgggctttcggagagggtaagttgcagcgctgcccacaaaatccgggg

SEQ ID NO: 111771 - DNA, 122 bp, Homo sapiens
tctctcaaagaaacacctcaactggataattatgactatcaagggagcagtttaaataaccgtttcctttcatttactgtggcttcttaatcttttcacaaataaaatcaatttgcatgact

SEQ ID NO: 111772 - DNA, 122 bp, Homo sapiens
gcctcactgccgcccccgagtccccttctcaggcaggctgtgggggttggggttgggcttcgcgagcccaagcggacgccgcaaagagaatgagaacctcggagcgctcggggcgggcgggc

SEQ ID NO: 111773 - DNA, 122 bp, Homo sapiens
ctactgcccctggtccccaccgcgagccctttcccggggaatgagccgccgcccgagccccggagttccctgcgggtcttacccaccccagcctccggccgccgaccccaagccccctgcac

SEQ ID NO: 111774 - DNA, 122 bp, Homo sapiens
taaagtataataaaaaaaataaaaataaatttaaaaaagaaaatggggctggggtgtgggcggcagaaaaatggaacccatgcatcctctgaggaagccaggatccatcctcaaagccccgg

SEQ ID NO: 111775 - DNA, 122 bp, Homo sapiens
gggtttgtgacttacccccaggtcatgctctggtcattgataaatccttgagaagtttaccgtgggtatctaaaagatatgttaatcatataaagtcaatttcttcccccaaccttatcctt

SEQ ID NO: 111776 - DNA, 122 bp, Homo sapiens
gagggggcaccagtagggaagggcgggctggtccaacaccttcttggcactcgaggagggcgggggaggaagtgccgatggcacctcccgatacaaaaacatggagagaattctttaaataa

SEQ ID NO: 111777 - DNA, 122 bp, Homo sapiens
tcctccctgcaggaactcctgcgttgcgagctgtgcctgggcatcatgggtgggaaaccgcgacactcactgtacttcattggctaccaaggtaggcccaccccctcctcactcctcccacc

SEQ ID NO: 111778 - DNA, 122 bp, Homo sapiens
gctgctgccgcagtcctgccagctgtccgacaatgtcgtcccacctagtcgagccgccgccgcccctgcacaacaacaacaacaactgcgaggaaaatgagcagtctctgcccccgccggcc

SEQ ID NO: 111779 - DNA, 122 bp, Homo sapiens
gaaagtaagctctgaaaaccaaggtggccctgagctcaattcagaagcaggacttgaacccgggtctgctggcttcctgtgaatcagtgttttcctaagtcttaagaggattccaccccgtg

SEQ ID NO: 111780 - DNA, 122 bp, Homo sapiens
gtgtggcccacgcgtgaggcctggaacggggaagcactgaggacccacgttaccggccgtcgatcatcttcctgggaggggtcccagtaccactatgaagaacgagagggggccggagctgg

SEQ ID NO: 111781 - DNA, 122 bp, Homo sapiens
ctgcctggcctgggactagctatgtcacgtctccctgcctcagtttcttcatctgcacagcgaggataataacagtgcttacctcttaggattaccatgaggctcaaagaaggaaatgcaga

SEQ ID NO: 111782 - DNA, 122 bp, Homo sapiens
gacttagtattttatgactgtccatcattttaagagttgagtttcactgtgaaacaatgtcgaaagcactgactggactaatggagtggctttacagtgcttactgtttcttcagtaatacc

SEQ ID NO: 111783 - DNA, 122 bp, Homo sapiens
aggtggcaagcagggggttacacccacagccccgtccactgacaccttcagactcaagagcgagtgccaccgccctaaacggaaagacactcatcacggcagcatctttcaagtgaacagaa

SEQ ID NO: 111784 - DNA, 122 bp, Homo sapiens
ggagccattccccaataaattgccgcgcgaggcctccgaggacctggggggattttcctgcgcgtccggggagttctctctccgcccctccatggtaaagcagactatcccaccctccaccc

SEQ ID NO: 111785 - DNA, 122 bp, Homo sapiens
ggaggagacgctactcgggagagctgcagccttctgagaggtgcgaagggatgagaaacacgggcatcaaagagggcggcttccctggagtgctagaaatagaagccagaagattgcccggg

SEQ ID NO: 111786 - DNA, 122 bp, Homo sapiens
taaagacttcattttctgaaatgttctggaatcaaactgaaataacctgaatccaaagcacgagagtgacagcacgttcttattctttgtttctttcatattccctgtccaccataggggaa

SEQ ID NO: 111787 - DNA, 122 bp, Homo sapiens
aggcattgaagttattggactgcagagggcactgcctcattcagttaagatgaaaagcgtcgctagagatcttcctgagacagccagggactctcattcccagcaaaatgccaattacggca

SEQ ID NO: 111788 - DNA, 122 bp, Homo sapiens
cacgcgacaggaagtattgcgtaaccggttgactgccacatgcgcattggcttccagggccggaagtcccacctttttgtgccagttcacttttgggagctgactgcagttgcagaaggtag

SEQ ID NO: 111789 - DNA, 122 bp, Homo sapiens
gctggcatcttcacagctccttcctcccaccccaggacaagggcccctggaacactggcccgcagccacaataagggtgtccatggattcctaggactacaagtggtggaaggcagcccctt

SEQ ID NO: 111790 - DNA, 122 bp, Homo sapiens
ctgcctctgtatcaggcaatacctatcccacacgaaccattagctggagcaaattgcccacgtcctatgcactgtgattcaagcgaagagtaattattgggaaaaagtgtcccaccgcatca

SEQ ID NO: 111791 - DNA, 122 bp, Homo sapiens
gcaactcttttcttgccaagaatagcacattgttcttttccttttcaggtaatccctccccggaaagagaagatcacagattttgtcatattaaatacattgtagaaattcatggtagcagg

SEQ ID NO: 111792 - DNA, 122 bp, Homo sapiens
tgctttcctgtctcttggggagactggacagccggcggggcgtggcgggtgctggggtctcggcccgccgctgccctcgcccccgccccaaggggccagcactcaccggcatggtctggctg

SEQ ID NO: 111793 - DNA, 122 bp, Homo sapiens
atcttctgggccttcccatcatcccccagcccaagaccaattcagcctttcttttgtgtgcgtgtctggttagctcctttccaaagaaccatgagttcccacatcagccagaattactgcac

SEQ ID NO: 111794 - DNA, 122 bp, Homo sapiens
ggtgtgtggccaaggggacatgacacgttttaggaaaagtaaacgtgctactaagttgcacgacttgtcaagaaaagaggcgcttccgagtttgagaattgggagcaaatggagtccgagtg

SEQ ID NO: 111795 - DNA, 122 bp, Homo sapiens
gatggcacaaatgcgttgcacttagaaagttgcccttcagttgtaggcattgtctcaatgcgtgcaacaagcttgcaacagcctaccatgatcccattagcaggcagggaacttgaggctct

SEQ ID NO: 111796 - DNA, 122 bp, Homo sapiens
ctcagctcctgaatcaggtcgaagttcagccgcatccaccggtagctcttcttcttcttgcgctccaggatgtagcctggctcaggggaggtggcagctctggtctggaacccaggcatccc

SEQ ID NO: 111797 - DNA, 122 bp, Homo sapiens
ggcctcattgatcctcccacctcggcctctgaaagtgctgggattctaggcgggagccaccgcgccccgccaaggctgggtaatttataaacaaaggaggttcctggactcacagttctgca

SEQ ID NO: 111798 - DNA, 122 bp, Homo sapiens
ggaaacgggtcccaggccctgggcggcttgaagccgtctgtgtggatgagcgcacactcccgtgggcaggagatggctggggttctcccggtcctttttggtaaagtggatgagaggacatc

SEQ ID NO: 111799 - DNA, 122 bp, Homo sapiens
ccagtcgttgtggaccactgacttgtaatctttacgacctcagtgagggtcagaagtgtccgcgagccctgtaggcgaggagaggcctggctgagggcgcacagcctggaaggggagaaact

SEQ ID NO: 111800 - DNA, 122 bp, Homo sapiens
gcactttctacactcctcgccggcaagcaggctcgtgtcgagggtagcagattccactggcgattccactggtgctgtgagccatctgctggctttgcacctcttagaatctggtgtttttt

SEQ ID NO: 111801 - DNA, 122 bp, Homo sapiens
aacaattgtagtaacaaggtgagttcataagattcatttgcaatgaaactttccactaaacgtgtgtaggagaaataagaagcagcagcagttcttgctgctgtcattgcaagtcctgcaca

SEQ ID NO: 111802 - DNA, 122 bp, Homo sapiens
aaaaaaaaattgaaatggaaagatgctgccctggtagtgaaacctctgtggccctggctgcgtgctaagttcagggcatgtggtatcctgttaaagtcaattgcagtttcatagtgaaaata

SEQ ID NO: 111803 - DNA, 122 bp, Homo sapiens
cagggactcgttgctcatgttcacccggcaggctggacacttcgtggagggctccaaagccggcagatcccggggccgcctctgtctctcccaggccctgcgtgttgcggtgagaggagcat

SEQ ID NO: 111804 - DNA, 122 bp, Homo sapiens
gaggctgccagactgggtgcctgcctggctttcctgcctgaggcatttgacttcattgcacgggaccctgcagagacgctacacctgtctgaaccactgggtgggaaacttttggaagaata

SEQ ID NO: 111805 - DNA, 122 bp, Homo sapiens
aaaccagtctgtggcttaaataaaaagaccacaagttccttctggtgtcttgggaggcagcggtgtgaaaacaccacgcaagggtctggaggaggcaggagatggggagagatgaaaaagga

SEQ ID NO: 111806 - DNA, 122 bp, Homo sapiens
ccagagtcattcgcccaaagttgcgtgagtcgatagttggtcaaattcttacttgtagcccggtactctttccactgccccacactgtctgcagacactggccagatgtcccctgttatgcc

SEQ ID NO: 111807 - DNA, 122 bp, Homo sapiens
tcacctcactgcactgcaaatatttcgtccactgagtatttgctgatcgtcactcagtgccgggtgacccagcttgaccagcacccgcagccgccctgccactgttgggccgggtatggtgt

SEQ ID NO: 111808 - DNA, 122 bp, Homo sapiens
cggacgtagtgggcccgtgattgggcatctcgcgttattacgtagccttgcccgtgaacacgtctctgtgtttctcaatcaacttcatcaccgtcagtgttaataattacaatcgccacagt

SEQ ID NO: 111809 - DNA, 122 bp, Homo sapiens
tcccgaagtcgctcgcggccgcttgtcctcctctgcctgtccctgcccccgcccgtcgcccggaagtccgcttggacgccgggctcttctccaggaaacctgggcttcctgcttccctcgcc

SEQ ID NO: 111810 - DNA, 122 bp, Homo sapiens
cactcaaattgctcttatttctcctttgcggtcaaagatgctggttttgtgatttctatccgaaagacaagggattgcttgacataatgatttcatttgctttactgggtctacacagaatt

SEQ ID NO: 111811 - DNA, 122 bp, Homo sapiens
gggcgtgcgcgcttgtgcggagccggaggtgggggccgaaccagccaaggttgcgggggccgcagagccggacgaagacggagggcggagccggcttcgggactgcggagactacacaccga

SEQ ID NO: 111812 - DNA, 122 bp, Homo sapiens
gagccactgcaacctgcccaagaagtcctttttttaaaaccaaactgagagctggccaggcgcggtggctcacacctataatcccagcactctgggaggcaaaggcgggcggatcacaaggt

SEQ ID NO: 111813 - DNA, 122 bp, Homo sapiens
cgattcacagccagctgctcagaagttccagaggtctggacgtgtgactggcatctgaggcgggggacagtcctgggaccgagccctcgtcctgtgggatctgatgctacctccgggtagac

SEQ ID NO: 111814 - DNA, 122 bp, Homo sapiens
acatggggttgatggtgctgttgacgtagcacagccagtagcccagctcccacagggtctcgggaacacagtccttgcagaaggtggacaccagcaccatgatgttgtacggtgtccaggtg

SEQ ID NO: 111815 - DNA, 122 bp, Homo sapiens
ccttggggcacaggaagaaagcaactttgactgagaagagacactgccccccagtggcctcgtggcaggggggtcaacaagaagctcaaagtggaagcacaggcaagagaggaagcacattg

SEQ ID NO: 111816 - DNA, 122 bp, Homo sapiens
gcccacttgtgtgcagcaagaggaaagcacttcgtgtctaacgtagtggaatgagagtaacgtagaagaacaacgaatcccaggtctggcgtttatctcctaggaagggtgtgggagagctg

SEQ ID NO: 111817 - DNA, 122 bp, Homo sapiens
aatacggccactgcggaagtcaagaggagactgctgcgttccctttgaaacagcccagggcggctcatcaaggctgcagaaaacattacagccccacaggcagggctgctccggccttcgtt

SEQ ID NO: 111818 - DNA, 122 bp, Homo sapiens
gaggcaggcgggggacgacccgccctgagctgcgctccccgcccgggcctcttccgcctccgtttcctcagctgccgggagctgcccggagaaccaggcgcctcccagttgctttcgcctcc

SEQ ID NO: 111819 - DNA, 122 bp, Homo sapiens
cgcccccgccccgcccggccagctcgccaccctattggatccctcacggctccggctccacggccatgatgggcttggctcaatttagttttaaaaagcattggccactcggattggtggtc

SEQ ID NO: 111820 - DNA, 122 bp, Homo sapiens
ccagcagctggcgcaggggaatgccgtggggggctcggcgggggcaccgccactggggcccgtgcaggtggtcaccgcctgcctgctggccctactcatcatctggaccttgctgggcaacg

SEQ ID NO: 111821 - DNA, 122 bp, Homo sapiens
ggaggctagtggcattgcattgtgcccctttttgccacccttctctgatgtgattttgagcgaagaggagtcagtaagcccattgagaccggctgctcccaaagcccgaggactctagctgt

SEQ ID NO: 111822 - DNA, 122 bp, Homo sapiens
aagggcagccctctgggcccagccgtcaggtccttcggaagaggttactgagaaagccaccggcgggcccggggcccaggcgcagcgagaagcggggcgcggcacggcgcggggtcgacgac

SEQ ID NO: 111823 - DNA, 122 bp, Homo sapiens
gaacactttggccagaaatgctctcctcccccatcccactcaaaccactgagtctggagacgtgctaagtgttgttggttgtgggcacctttagtgataacaccctccccctctcccctcgc

SEQ ID NO: 111824 - DNA, 122 bp, Homo sapiens
gtggttccacgacaaccaggagtcagaactcagcctctggttatagagtggtcctagttccgacaactgatgggataagatgtggcagggcgttcaggcacgggatatagaaagttcaaatg

SEQ ID NO: 111825 - DNA, 122 bp, Homo sapiens
actgtgtgaacattagggtttgctatcctgagtttacatgtcaccatctgaaaaacccaacgacaataaaccttcaactttgaatccttcccaaatacaaaaacatggaatagaagcatctc

SEQ ID NO: 111826 - DNA, 122 bp, Homo sapiens
tccactcacctgtcaccccgatggcagacacggggcccacacgctggccaccgtggaagccgtacaggttcatcttgtacttgttgtctggctccaggccggagatggtgaccctgtcctca

SEQ ID NO: 111827 - DNA, 122 bp, Homo sapiens
cccacacaacgtggtgaaggacaggtgccaactcagaagccgccgtttgctcaatgtccccgccagccttgtcggtccttaccgccgtttgactccactgtttttctcgtggtttctgctgc

SEQ ID NO: 111828 - DNA, 122 bp, Homo sapiens
tgccgcggtaggtgagtttgcggaaggtccgcttcttctgctctacctcggccatcttgtcggatcctcagaaaagttcacttccatttttaggcagctcgtaaagctttaaaattttttgg

SEQ ID NO: 111829 - DNA, 122 bp, Homo sapiens
ggggtcgggacgaaagctggcaagaatttcggctgagttcctttaacaagtagaaacgtgcggggttgtgtgcgattttcctggaaaatcctcacaaccctatgagataaacattattccca

SEQ ID NO: 111830 - DNA, 122 bp, Homo sapiens
tgctgtgagtgtgagcccgagagccgcggagaacacgtggagctcttgcagtggcgaacacgtttcttcctaaaggagacacacagcaattttgctttccatgtccattcttgggattgtct

SEQ ID NO: 111831 - DNA, 122 bp, Homo sapiens
agtgaaccacagggagccgcctccttggccctgtgatcacccagggactgaatagagaggcggccctgggagacttcagacacttagaggatataagggggtgaaaggggggcctggctttg

SEQ ID NO: 111832 - DNA, 122 bp, Homo sapiens
gcacgcggctcccggcccagctccccgcgtccgctccggctcctgccgcgttccagcagccgtcactcccgccgccggcccccgccgcccgccccgcctgcccctacccctccgcgcgggcc

SEQ ID NO: 111833 - DNA, 122 bp, Homo sapiens
agtgagggactgactccaggttacaaagtgctgtggtcatgtgacctgagaatacgtgtgcgcagagtgtgcccacagtgtccttgtaaagttgagcatgtacatgtcctgccagtgtgtag

SEQ ID NO: 111834 - DNA, 122 bp, Homo sapiens
ggctgagggagccggctccagcctccgccatcccaggaacgggctcccacagtgcagcggcggcctgaagagcccctcaagcacagccagagtgggcaccgaggccgaggaggcgccaagag

SEQ ID NO: 111835 - DNA, 122 bp, Homo sapiens
gtcactgaaagtttatcagggcaataacagacatggagctggcatctcctatgataacaacgccttcttctggatacctcctgaaggacctgcctgaggctgttgaaagttaactttctttt

SEQ ID NO: 111836 - DNA, 122 bp, Homo sapiens
gtgcaatgacttccagaatggtgttctgggcacgtcagcttccctaagtacaactggagccgtcggtggagaagagcggaaagggagagttcagttggtaggagggaggggtccagcgagag

SEQ ID NO: 111837 - DNA, 122 bp, Homo sapiens
agtcggggccccgccggtctggcagatgcttcctagcgaacccaggggcagcgcgctgggcggaggccctccctggggagcccccggggtccccggccaacagctgtgcctgctgccacacc

SEQ ID NO: 111838 - DNA, 122 bp, Homo sapiens
cgcgcacgctcaggaccgggggcttggtgggaaaggaaggagggacttagggtgcgcctgcgcatcaggggcgcgcgcaaggggctgatttggtgatccctttaagaaaccgcaggcggagg

SEQ ID NO: 111839 - DNA, 122 bp, Homo sapiens
tgaacaggtgtggctcggcagaggccttccgcacctgcgttatggagtggtggccgctgtcggcgatggggtccccgcgagggcacaagtgatcgcgtggccacggcgaggctctgcctccg

SEQ ID NO: 111840 - DNA, 122 bp, Homo sapiens
accaaggagcctgcagggcagagagggacaccccaggctttgatgccacctctctcctgtcgctcctgcctctagtctccacctattgttaggagtgtgacctcagccgaatttcttatcct

SEQ ID NO: 111841 - DNA, 122 bp, Homo sapiens
ttcctcacaggctggggtagacataacaggagattcagggccttcggtctcgtgtgcagccgtgatcagaaacacagccggacgttcctagaacatcgcacatccaaagggcctttccttgt

SEQ ID NO: 111842 - DNA, 122 bp, Homo sapiens
gattactcagccgagcctcagtctggggctgccctgtgctgggagctttatgcagatgctcggctccctaccctggcttgtgagccgtgtggcgcagaaaccgcatctcactcagagcgagg

SEQ ID NO: 111843 - DNA, 122 bp, Homo sapiens
accggagcccgcgggggcggcagagacccgccccggcccgcaggacaccccctcggaacgcgcggccccccggctaagtcatgtttaacagcctcagaaattatcttgtctccgcgttcttt

SEQ ID NO: 111844 - DNA, 122 bp, Homo sapiens
ccacacaggggcttccggtgcgttcgctgtcgtctgagaagccagaccctggacacagcacgtcccagtgcagcacacacgtgcagcagctgcttcttacatacatgctcatcttaaagtaa

SEQ ID NO: 111845 - DNA, 122 bp, Homo sapiens
gatttgccccccagggttgactctgtctcgtcctggcctgcagtggcgggcacgggatgccgagggaccgcggcagctgtgctggggacaagtctccacatccccgaccccggggcctgctc

SEQ ID NO: 111846 - DNA, 122 bp, Homo sapiens
gggaagggggagtcctgccagcacccagctgggccttgcctcgggaggcaaggaccaggacgaggcccgagggctcgcgtctggggcatacttgtgccgctgcaggcgggcgcggcgcgctg

SEQ ID NO: 111847 - DNA, 122 bp, Homo sapiens
gttccctgcccaggacgtctcgaggccgggagatgatttcccagtttcttctggcactgccgttcccccctggctggctgcactggagcagggctgagagcccgggcagcctctccacctcg

SEQ ID NO: 111848 - DNA, 122 bp, Homo sapiens
catcctgatacaatccatttgatgtctctgggtccaggagggagtaggcagcctatgaaacgctgagatgctgtgattttatgacccagtctgggccctgcttccatcccctccccggggat

SEQ ID NO: 111849 - DNA, 122 bp, Homo sapiens
cgtgctgaggtgcagaaactgcagatggaagctccccacatcatcgtgggtacccctggccgtgtgtttgatatgcttaaccggagatacctgtgtgagtaattcggttctccaatcccctg

SEQ ID NO: 111850 - DNA, 122 bp, Homo sapiens
catttcctcccaaagctcttgggtgctgatgttgacctaaagccaaagaggatcaaatgccgtattactgagggctcaggcagggaaacaattcaatctatttgctctagatttctctcttc

SEQ ID NO: 111851 - DNA, 122 bp, Homo sapiens
gggcctcccggcaggagtccagccccagcacccggcgcaagtgtgagtgcctggacttctcggagaagttcctatccccaggagtgatttgcagaaccagagactcccttttcaggcttggg

SEQ ID NO: 111852 - DNA, 122 bp, Homo sapiens
ccccttccctttccgcactgtccgctttgtgaggctcagaggaaggacagtctgcaagcccgcctaggaggtccatccccagcaaatgttttggaggtccccccagagagcagagtgggcca

SEQ ID NO: 111853 - DNA, 122 bp, Homo sapiens
agcctggctgtgtcccagcagacccaggaccaagactgcttctgccactgactgtctctgcgacctgggaaaagtcatcccctcccttaactgggcctcagtgtccttatcactatgttgga

SEQ ID NO: 111854 - DNA, 122 bp, Homo sapiens
ttgttctagtccgggtcccttcccccagccctcccgccgatctccgtctccctgcagggccgactcttcagcgaccgtccctagagccagcggacggaaccattccaaacagcctagtctcg

SEQ ID NO: 111855 - DNA, 122 bp, Homo sapiens
tgtgtgaagtcactcccaggcagctgcaacatccccagcacagtgctgcggtgcctagagcgaccccccacaatccccattctaggggtcgcttggcagagcccccaaggcactgcgtcagt

SEQ ID NO: 111856 - DNA, 122 bp, Homo sapiens
ggggcccggggtgcagagatcagaccctgcagcggttccagcgctgggggggctttaaagcgaaggagtggctgagggcgggggcggggctgatgggcggggtgaggcggggctcgggctgg

SEQ ID NO: 111857 - DNA, 122 bp, Homo sapiens
tggggtgtgatcagggcctacgggccgcagccaggatgcctccctgcctccctgcagaagcggatgcagcagatcatggcccactgctttctggccgccaagcccaagctggactgcaagct

SEQ ID NO: 111858 - DNA, 122 bp, Homo sapiens
taaagacctgaagatagtcttttctgtccaaagatggaaaacagtactactaccatttctcgggaggagcttgaagaactacaagaggcatttaataaaataggtatgcttgagaaaaagta

SEQ ID NO: 111859 - DNA, 122 bp, Homo sapiens
ttcacagcacagggaaatttcctgagaagaagggtgggtggggcattagggcagttctcacgttttttggggtcacagatccctttgaaagactgttgaaagttatggcccttcactctgag

SEQ ID NO: 111860 - DNA, 122 bp, Homo sapiens
acctggtagatgcccacagagagtgcgcctccggccgtgggctccccaatgaccgtggcccgctgcaggtcctgcatggtgtgtgcaaaggcctcggccgcagagccactggtgtggctcat

SEQ ID NO: 111861 - DNA, 122 bp, Homo sapiens
acgagttcctgcaatttgctacggtttgtttctaatgtgtggatgttgcggctgcttggccgacctcacgtctggctgctgagggcagggaagcactgcagccattccatttaccctcgagg

SEQ ID NO: 111862 - DNA, 122 bp, Homo sapiens
cgcttctgtcccaagaaccggacggagagtgagggcacgagggtcgctgtcgggggctgtcgtcttccacgtacacgtcgtcgtgaggagcgcagtccggactcttcccgcaacccctccgg

SEQ ID NO: 111863 - DNA, 122 bp, Homo sapiens
gagaaataaaaccccatctccttcagccaaaaacattacatagaaacatagacatagaagcggaggaagaaaggcacaaatgtagaagacatactttggccttcattctatgaagctcctgc

SEQ ID NO: 111864 - DNA, 122 bp, Homo sapiens
ggctgtgtctgctgctggcccgcgtgctgtggctgtccagtgagtagtaagtcctgctgtcggccgccgggcacagtggcggcgagtccgagcgcagcgcgtcgtgcgccccacgcaggccc

SEQ ID NO: 111865 - DNA, 122 bp, Homo sapiens
ttaaaaatcagtgtacctaggcagtgcacagcacgaaataagtggcccttgcagcttccccgtttaacccactgtgctatagttgcgggtggaacagtcaacctttctagtagtttatgata

SEQ ID NO: 111866 - DNA, 122 bp, Homo sapiens
actcccaacctccagccctttgtcgggggcacctatttccctcctgaggatggcttgacccgagtcggcttccgcacagtgttgctgagaatacgagaacaggtgggtgtgcctccgggagt

SEQ ID NO: 111867 - DNA, 122 bp, Homo sapiens
ttggctgtgaggaatgcacagtgagtgcctggaccctgacctccaacgggagatccttcccggggccattccctaaatcgtgggcttgtttcttgctccctctggctattctgtgtccctgt

SEQ ID NO: 111868 - DNA, 122 bp, Homo sapiens
ctacctctttcccggatggcctcttagacgaccttggattggttaaagttctttagaacccgcctatacactgttcctattggtccctggatacaaacaacgacgccattttcccaccagtt

SEQ ID NO: 111869 - DNA, 122 bp, Homo sapiens
gtcgcgctaggccgtgaggagcgggggaggtgaggggagtgacaactcgcgcccggtcctcgtacctgcagcgggaagagtaagtatggacgcttacctacaactgggggcggccaggctag

SEQ ID NO: 111870 - DNA, 122 bp, Homo sapiens
tgccccgtgcccaaccccagagggtgcgggatgacagactctgacaatcattaaaccagccgggcctgatttcccagcactgcctgctaagatccgggccaagtggcactgaatatgcaaat

SEQ ID NO: 111871 - DNA, 122 bp, Homo sapiens
taagagttgtcaaaaaggttccttgcgcagtggtcgtcatagttcagaagcgaccgggagcgtgtgtggtgcgcgcctgccttgaggccaggcctcagagaagggtgtcccagatgtaggca

SEQ ID NO: 111872 - DNA, 122 bp, Homo sapiens
ggggcacacagcgacaagagtccaggcagccagccggcagggacagggagtacaaagaagcgaaaacaggatggcacaggaagaacgaagcacagctttccaggcggcaaagacagggagaa

SEQ ID NO: 111873 - DNA, 122 bp, Homo sapiens
catgcaaaatgatgaataacgttatgtgaagtccacctcagtttctttaaatgatcaacacgcaaacactttgaccctgcagctccatttttaggactttaccccacagatacatcagcctg

SEQ ID NO: 111874 - DNA, 122 bp, Homo sapiens
tcaggttatgtgtgtggtctgactttttatgagatctgtaagactatgtaggatttactacgaatgggagaggcagggattgcaaatggccatgttgtgtaatttctaccaaagtggctgag

SEQ ID NO: 111875 - DNA, 122 bp, Homo sapiens
caccaggcatacttgactgatggccggtgcttcacacacacaggatgcttcacagtctaccgcaaaggacagaactttggttgctcaagagcctgtcttaagtctcctatgagcttcaagcc

SEQ ID NO: 111876 - DNA, 122 bp, Homo sapiens
gtgctaagctcctcactgtcgggggcggcagcgctggccggctgctccaagtgcggggcccgccaaacccacgcccacccggaactctagctggctctcaaacgccgcgcgcagccccggtt

SEQ ID NO: 111877 - DNA, 122 bp, Homo sapiens
ggctcttggtgggttctcacatcacagggcactgcagctgagacttgcttgaacggcccccgttttctacccgcaaattctcaattgctagataaacaacaataacaacactttattgggcg

SEQ ID NO: 111878 - DNA, 122 bp, Homo sapiens
gctacaaaggacagggggcagatccagggggcagagactaggttctgtgtgccagcccagcgcaagttagctggagagacagctatgtctacctttcccctttccctgttctttccttccac

SEQ ID NO: 111879 - DNA, 122 bp, Homo sapiens
tgcgcgcagtgcccggcccggagcagccgggacccgagcccgcccgacagccgggtccggcgccgccactccaagctgctctgcgggcgctcggcaatgtctgacttcgggagggttccgtg

SEQ ID NO: 111880 - DNA, 122 bp, Homo sapiens
gccgaggtcaggagcctggggactggctcctctgcgacagcggctggttgggtgccgcaccggtggagacccggcgttccgggccgggcagctgagcaggcgttcccttcgtgagcccttgg

SEQ ID NO: 111881 - DNA, 122 bp, Homo sapiens
cggagggcccagattgggcaaatccggggaagaagccatcctcccagacagctgcttggacgaggccagggcgccacacgctacgtgaagcgctggctggaggagaaatggtctgtcgtagg

SEQ ID NO: 111882 - DNA, 122 bp, Homo sapiens
agtctggtgggcagtggcgcaatcattggcttactgcagcttccaactcctcggctcaagcgatcctccagcctcagcctcccaagtagcaaggagtataggcacgtgctaatttttttaat

SEQ ID NO: 111883 - DNA, 122 bp, Homo sapiens
ccacccagtttccctgggaaaacgccccacagatccattaccgggaacccaaggctcccccgctggctcccagcagctgagctccactctgggcgcgctcgctcctgcgcctacccacttcc

SEQ ID NO: 111884 - DNA, 122 bp, Homo sapiens
ccctagccaggagcctgcctggttggaggctggtcagtgacgttgctgtggagaccaggacggtccagcaagtgaccatggcactggccccaggtggctgctgggtgctgccctgggagcaa

SEQ ID NO: 111885 - DNA, 122 bp, Homo sapiens
cgagcctcctgaacctcgcagggcctggaggagtcggggcactggagctgcacccctccccggttttggggaacccctgaggaaggagtatagcctctccagcgccgctgcgcggggtgggg

SEQ ID NO: 111886 - DNA, 122 bp, Homo sapiens
ctgaggactccgggcgggtcgggtgttgagcgaggcctcggaccttcggcctgtcgggggcgccctgccggggtgggcatgggggcatctgaggggtgaaaggggcaagggaggctggaggc

SEQ ID NO: 111887 - DNA, 122 bp, Homo sapiens
catcccagtggaagccggagtcaggggcgccttcttcttcatggcctaggcgatggcccacggcaggggcgcgccacacctgcctcccatccctctgccgaggggcgcttgggtggcttccg

SEQ ID NO: 111888 - DNA, 122 bp, Homo sapiens
aagggctttaccttaatattgcagttgtcatcgagcagtatattttccagcttcaagtcccggtggaccacaccgttctgaaatgagaagacaaagagggaattgaatgggagcggctggga

SEQ ID NO: 111889 - DNA, 122 bp, Homo sapiens
ccaggaccttcatcatccttagtgtctttcagtgttcatgattcatttagatgatgcagccgccatcccagttccttgacttcctcttctcatagggcagccttggaagtgtgtctatacat

SEQ ID NO: 111890 - DNA, 122 bp, Homo sapiens
gcaatgctgcagaagcagaagcaacacagaaagaagataccaacagcctcctgaaactcacgagagtggacactccagtgttgaccacctaagataccactcctgctccaaagattacagct

SEQ ID NO: 111891 - DNA, 122 bp, Homo sapiens
caagtgcgctctgaatagctttgacaaaactcctcttggatcatagcctaccactcgggtcgtccaaactctctggcttctcattgtcagcctcttctccgcctgctttgctccatatggcc

SEQ ID NO: 111892 - DNA, 122 bp, Homo sapiens
tgaggctgggaccaggggtggcactgacacggctggggagcccactcccgaggttcgacccggggatgtgcacagccacattccaaaggcgcacgggatgagatcagcccgggtgaccctgg

SEQ ID NO: 111893 - DNA, 122 bp, Homo sapiens
gattcccgagaagggagcctgcttgcgaaggaactggcactcgggcctgcctgaagggggcgctgtccagacaacacccagcctcccgtcgtggcaggcgctgtcggagccatggatgattg

SEQ ID NO: 111894 - DNA, 122 bp, Homo sapiens
aggctcttctgtggcgcatctcacgtgaccgcgctgcgggagagggatgaaacaagagggcggctgaagccgatcctgagtggggccccagcaattcggaatgagccttttccctccacccg

SEQ ID NO: 111895 - DNA, 122 bp, Homo sapiens
ccgcggctccggagttgaacttgagtctttggctcttgggcaacgcagagagaaccctggcgctaggttcgtgggctggctggggagttcccagaagtcgggagcagtggcgtgctaacgcc

SEQ ID NO: 111896 - DNA, 122 bp, Homo sapiens
gtaatagaaccagctgccattcagaacttgcccatctgaggtcataaaggaaagcctgcacgtttcttttcttcaaacagcttttcaggactggggagaggaagaaacgctgtctagagagg

SEQ ID NO: 111897 - DNA, 122 bp, Homo sapiens
cccggcctaaggctgcctcctttcttgcataatttttctttgttttctgacccctggacccggctgcgcaggtgtgaaagatacagagcaagggatgaccccactgacctgcgtctgcaccg

SEQ ID NO: 111898 - DNA, 122 bp, Homo sapiens
ggcgatctcgatgtccagggcagcttgacgttcatcagctcctggtactcacgcagctgccgcccatgtcctgcttggtccactgcagggcggcctccagctcagacagcttggcgttggca

SEQ ID NO: 111899 - DNA, 122 bp, Homo sapiens
attgtagaaaaaaatactagtcatagctaaaatgtcacacgtctcatttttttcaagcttcgtgtgacacttaaaatgtctatagcgcttactacgtgccaggctcacgtgagattatagga

SEQ ID NO: 111900 - DNA, 122 bp, Homo sapiens
cctcagcctgcagtgcgtctttcagatgctctgacagctgctgacccagctgggaggtcccgggaactgagaagggcacgacggttctgccgtactcgcccaaggtcagcctcagcatgggg

SEQ ID NO: 111901 - DNA, 122 bp, Homo sapiens
tcaagctgagaaaagggcaggaatatggggttgagtcacgtcgttccgccattttctaagcggaggaggaagacatgttggaacaaaaacacaacaaaagagcagccatttcccaagccagc

SEQ ID NO: 111902 - DNA, 122 bp, Homo sapiens
ctcggcccagttcgacatgcccgcctccctcagatgagtggccccaccgcactgctcacccgggtcagccagcttgtgtgcggcctggcagggcagaagtcacagctataactcagctcccg

SEQ ID NO: 111903 - DNA, 122 bp, Homo sapiens
ccgcgtgctcaggccccgctgagcggtcccggctccgctcgcgccctgtggggtccacggcgcgctcttccagagcctttgggacccgtgcccgctcgcgtcctcaagtgcacgcgccgtcc

SEQ ID NO: 111904 - DNA, 122 bp, Homo sapiens
gaagcacagtgtccgccgcttcctggttgcgggtcagcgcccaggtcctgggctggccgccgggatgttgccctacacagtgaacttcaaggtgtcggcgcgcaccctcacgggggccctca

SEQ ID NO: 111905 - DNA, 122 bp, Homo sapiens
gccgcgatgctgggggcggcggcccggcccactcggcgcgagcccacgtgtccttctttccgaacgcccccagcaaggtcaagactggaggcgcggtatcccagctgcctgcgggggaaaaa

SEQ ID NO: 111906 - DNA, 122 bp, Homo sapiens
ccacaactcccagcaggtcacgcggagtagggcgggtaagcgcgccttcttattggatggcgatggacagcgtgctcttacgacccaccccagaaggcaagtcccctgcgcgcggggcacgg

SEQ ID NO: 111907 - DNA, 122 bp, Homo sapiens
cgagcgcccgtcggctcctcttggcagccgctgaatgtggtgcagaaggagcccagctcgcgcccggagccctgcccgcgcgactgagcatgcccagagctccgggcgccggcccgcgcgca

SEQ ID NO: 111908 - DNA, 122 bp, Homo sapiens
acgagggccaggggaaggtaaggggtttggtgctttaaactatccttggaagagggctcacgaagttgggggcatggcaggagcaaatgagagatcttcgggatctccaactctggaccaag

SEQ ID NO: 111909 - DNA, 122 bp, Homo sapiens
tattgagagaaagctgcatgtgtgaggccagtcagcactgcaggacaatgggagctgctgcgacttagttcctaagctgggggagaaggggcagggcctagagtgaggaaagtgggctggat

SEQ ID NO: 111910 - DNA, 122 bp, Homo sapiens
ggcagccttggccttagacacctttaccactttgcccagcagggggtgtcacacccttcccgggcgcagaggtccccaggccctccacgtcagaccagccaagatcacacctggtgtcacac

SEQ ID NO: 111911 - DNA, 122 bp, Homo sapiens
tttttttaataggtatggtcctcttttaatggtctctgatcctttttaatgagtgccatacgccaatgatatgcctgcaggtttgtgagcattcttgggatgtcaggtgacctggtgtgttc

SEQ ID NO: 111912 - DNA, 122 bp, Homo sapiens
ctctttaaaagaaaagcgttgagtaaatacttgttgattaattccatttctggaaataatcggatttatgaaagaggccctgcccacctctttgatatggacttgtactaatgaactacaat

SEQ ID NO: 111913 - DNA, 122 bp, Homo sapiens
gcgggcagtgcggaagcctaggaggcagccgggcgcccaggccgcgctgcgcggagcagccggagcagccacctccccagttaaggccaggcccacccggcctgggccttttcctgtgccta

SEQ ID NO: 111914 - DNA, 122 bp, Homo sapiens
ggagaaggaccgcagcctgcggcgcatcacgcgcatggtgctggtggttgtgggcgccttcgtggtgtgttgggcgcccatccacatcttcgtcatcgtctggacgctggtggacatcgacc

SEQ ID NO: 111915 - DNA, 122 bp, Homo sapiens
ctcctagaaggtgggcttgtggaagagggatgggaaacgagaccaaggtcgacaccaacacggagcttgggtctggctctggaagctcagcccccaccaaggaagccctccaggctggggag

SEQ ID NO: 111916 - DNA, 122 bp, Homo sapiens
gccctaagagttgttagtgttcccaagtagaagatactgaaagcactttaatcctttaagcgcttatattgcaggtgggggaggcgctaaagttagcacagaggcaagaggctccctgaatg

SEQ ID NO: 111917 - DNA, 122 bp, Homo sapiens
agaggattaaatccaaatctaaaatatgaccagttaaaaaagaccatttacctggccgggcgcggtggttgactcctgtaatcccagcactttgggaggctgaagcaggcggatcacctgag

SEQ ID NO: 111918 - DNA, 122 bp, Homo sapiens
gcgggagtgtgtagatgcagccaggctgtgtagacaccaccggggttgtggagaggcagccggggctgtgtggacgccactggggtgtgtagacatggccaggttgtgtagatgcggccagg

SEQ ID NO: 111919 - DNA, 122 bp, Homo sapiens
gaggcccgccgtgggggcagagaagtccaacccctccaagcgacaccgggaccgcctcaacgccgagttggaccacctggccagcctgctgccgttcccgcctgacatcatctccaagctgg

SEQ ID NO: 111920 - DNA, 122 bp, Homo sapiens
ctcgctcccctcagagctgcagccaaaacccggagagtggaataagcgccctgaagatgccggagctcccggctgagcaactggacacgcgacgaacagcagacgctacaggttctcctacc

SEQ ID NO: 111921 - DNA, 122 bp, Homo sapiens
ctctgttggggaagccgtgtagatggtctcggccatgggtgtctgctgtgttggggaacccgtgtagatggtctcggcccggggtctctgctgtgttggggaatccgtttagatggtctcag

SEQ ID NO: 111922 - DNA, 122 bp, Homo sapiens
gggagccagcaggcactgtgctgaggaaatcctgtgggcacccgaatgggggggcctccccgctcgtggggccctcccctgccctcccgcccgcccgcctcatcaccttctcctcttgtctc

SEQ ID NO: 111923 - DNA, 122 bp, Homo sapiens
acgcatggccacgcgacagagggacagaatgccgtggccgtgtaggggagctgcactctgcgtggccctgggatgggaaaatccagggaaacagacactgttatggatgtgagcatcggctg

SEQ ID NO: 111924 - DNA, 122 bp, Homo sapiens
ccgggggtggtcggcaatgattgaagaggccgcgtcctggcgaccagcgctgctaatgaacgggagggagcgggtcagggatcgcccgcatggcagcccggcaagggcggagccgccgtcca

SEQ ID NO: 111925 - DNA, 122 bp, Homo sapiens
ggaggtgcaggcagagtgggcaggccctcactggagcagccggaggagcacggtctgccccgccagcaggtagatcatgctccgagagcatgagagctgttacgcgatgtcctccgcagctt

SEQ ID NO: 111926 - DNA, 122 bp, Homo sapiens
ggttcagatgcctgggtcctggaggtccgggtagtggcggaggaaccgccctcgggttcccgatggattggggacaaatgctcagcccagtctgattccagaaatccttgtaacccaatata

SEQ ID NO: 111927 - DNA, 122 bp, Homo sapiens
attcttcctgtcattactctcaacacttagcaggatatcagatattgagggttggaggttcgtagtcttgggggctgactgtaggctgcagatgtgtttatgcacaatctttttatttgaat

SEQ ID NO: 111928 - DNA, 122 bp, Homo sapiens
gtgactcacccgtgtccctcgctctcagccatcggaacagcagaagcgggtcggggagagcgcgctgccctgacacctgcaccccatccccacctccaactccatctccagaatttagcctt

SEQ ID NO: 111929 - DNA, 122 bp, Homo sapiens
ctcagagacaggcagatgacccctggctctagggatgctccaccgggggttcctccccatcgccctgtggacgttcaaggctcagtcatcctctggggtggggccgccctgggcactgcagg

SEQ ID NO: 111930 - DNA, 122 bp, Homo sapiens
ttatacaggcggcaatcaagcgtcctggacgtcaagaaatctagtttgtctgtcgcgccacgcagtcaactggagtgtcactgtgggttctatttacaccgttatgagaaaaacctgtggcg

SEQ ID NO: 111931 - DNA, 122 bp, Homo sapiens
ggtgatccgccctcctgggcctcccaaagtgctgggattacaggcatgagccaccgcgcccggccacatcgttatgtctcattgtaaatccgtttctgtagaaaatccttccacatgggtta

SEQ ID NO: 111932 - DNA, 122 bp, Homo sapiens
acccggctctgaaattaagagcaaacttccttcgagaggcgagagacaggaggcaagaggcgtcgccttctggggcgcctcctccaggtccgcgccttctgatgatccgtgggccggcccgg

SEQ ID NO: 111933 - DNA, 122 bp, Homo sapiens
gtttggttagaaataaaattacttgggctctctggtggatgggttctaggcaaacaactccgcccaacagcagaggccctgcactgcgttgtgcctgcagcacctcgtgcgccttctgcagc

SEQ ID NO: 111934 - DNA, 122 bp, Homo sapiens
attttgacaaggactccgtcgtcccggatgatagtgctcaggttaatgccagtgggagggcggcgcccaatagtaacttcctttggaggttgtagtaccgcccccagagccaattttccact

SEQ ID NO: 111935 - DNA, 122 bp, Homo sapiens
tgttaaatgactttgtgctcttgaaaaaaatgtataaaaagcacattgccaactgctctgcgtgatatcctttgtttggattttagacgcagcttgactgacacagagatcctgaataagag

SEQ ID NO: 111936 - DNA, 122 bp, Homo sapiens
caaaacaaccccttctgagaagtgtcctcctcgctctcttataaaaacaggacttgttgccgaggtcagcgcgcgcatcgagtgtgccaggcgtgtgcgtggtttctgctgtgtcattgctt

SEQ ID NO: 111937 - DNA, 122 bp, Homo sapiens
gagggactgaggaccccacggaccacagctcctcccacccaggaacgcggcaccccgaggcgggattctccactgaagatccccaggaggtcaccgcacaacctgaggaaatgcatggttgc

SEQ ID NO: 111938 - DNA, 122 bp, Homo sapiens
tcaccagaaccactccatggtcagtgtctcttatcagtaaggaatactggtcaattgggccgaaactgcaaatgagagagttgttatcagcggtggagtctttcgaaagcgctggtttccgt

SEQ ID NO: 111939 - DNA, 122 bp, Homo sapiens
gggtaggcggcagggcagatgcccgagggcctgcgctggaacgccccacgccgcaccggccgctcccctgtgctccgcggcctgggcctgcgccgctcagctctctggaaactagcgcctca

SEQ ID NO: 111940 - DNA, 122 bp, Homo sapiens
ctccaaggtccgcgcagccacccgggaacagtcagaatataaaaaggaagcagcaggacacgcccggaagccctgaccacagagacgcgtccaggtaggaggccagctctggaggactgatg

SEQ ID NO: 111941 - DNA, 122 bp, Homo sapiens
tcaccagggcagggtggcttcggtggccgagggacccgggaactgcagccggagccggcgcgcacccagccaacttcctgtttccgcggtagcgcgcgggcctgtcactgaagccccgcccc

SEQ ID NO: 111942 - DNA, 122 bp, Homo sapiens
acctctaggaggaattgttaaaatcccaaatctgagccttttcctcagtagaaaaccactcgctgctgccgactgtcttcggaccctgtccagttctaaattcagccgcaacccctttcagt

SEQ ID NO: 111943 - DNA, 122 bp, Homo sapiens
ctgtcggccatggccctgagtgcggtgtctggggcctggctccctgggctgctcgctgcccgctgcacaaggcctgggcagccgctgctctttggacatctgacccttgagcctctgggctc

SEQ ID NO: 111944 - DNA, 122 bp, Homo sapiens
cagccagagggggccctggagggaggcggagggaccccctccctgggccagccaggccagcgtctgccagagtcgctgttgctaagtcctcttcttgcagcctggggatcccagaggacccc

SEQ ID NO: 111945 - DNA, 122 bp, Homo sapiens
ccccctcgagtcaacctgtcactctgaggagagaattctttttatttccagagtcttcgacggtaggcagatttattttcatccaacattaaaacccctcggtttgtggagaggaaggagct

SEQ ID NO: 111946 - DNA, 122 bp, Homo sapiens
acggtcacgctgaacagtaactgtgggcagggacagcactgcacgtttgacatcggggcacgcagctccgacgtggccggtcccgactggcacacctgccccgagtcacctgggacggactg

SEQ ID NO: 111947 - DNA, 122 bp, Homo sapiens
actgtttgggagaatctgcccttctaagttccagatgattaataaacagggactgacaatcgtcaggttatgggattaataattcaacaaaatatactgagctcttactctgactttatatt

SEQ ID NO: 111948 - DNA, 122 bp, Homo sapiens
ctgaaagttggagcaagcaggaagtgaactgagggccaccctgggaggaagccgactaggcgaattcacttactgaccggcctgggctgctctgagacatggtgagccaactgggaactagg

SEQ ID NO: 111949 - DNA, 122 bp, Homo sapiens
ctcccaggattcggatgcagctggagtttggggaccactctgtgagtcatctggagagcacgctgataactcagtttcatttctgtggccagatcaagtagtttcatttctctccctgtttg

SEQ ID NO: 111950 - DNA, 122 bp, Homo sapiens
caaaggcagctgagaggtcaggcaagaagagactgaatgtgtcatttggaggaagcaacacggaggtcacagtctcagtggagccatgttgggcagaggcggagctccatgggttgagtgag

SEQ ID NO: 111951 - DNA, 122 bp, Homo sapiens
gctactacatttccgtgctgttggccattacccaggagggctatagcagggtcagaaagacgttagggaaaagaggctgacgcaagacggaagtggggtgtgaggcatctctaagggcgctt

SEQ ID NO: 111952 - DNA, 122 bp, Homo sapiens
ccctctcaatgaagggaacccttgatggtgggataatgctttgtttaaaaaaaaattaaacgtcaacagtgaataattacattcaagtcacaaaatgaacagagtgttaacaatgctgataa

SEQ ID NO: 111953 - DNA, 122 bp, Homo sapiens
agcaatcccggcttctgctctccatgccaggatgaggcagcgaacgcggccagaggaccccggctgctgggcgctcagtgatgaaggaatgaacacgagcaccctcaggagccaggctgggc

SEQ ID NO: 111954 - DNA, 122 bp, Homo sapiens
gtttggagcgatttatcactttgatttggagatcttgtcagatggcaatcgccgaggaggcggagaaagggagccgcggggagggcggcggggggcggggagcgaacgcagggagccagagg

SEQ ID NO: 111955 - DNA, 122 bp, Homo sapiens
gccaatgctgaaatggcgaggcctcccttccacttacctcgcccactgcggcccacgaagcgaaggtcgttgaacctggccacctggttcttcatgacggccgaggcattgcgcagctcagc

SEQ ID NO: 111956 - DNA, 122 bp, Homo sapiens
accaagggcaggatgaccagatggcacagggaggggccaggaactggcacacgcaggacgcgccacggcacatgtgcacacggcagatgctcctcgtatccccgggcacctgggtgggcacg

SEQ ID NO: 111957 - DNA, 122 bp, Homo sapiens
cccagcagtcctggcaggccccgtggtgcccctggaacccactagtcatggcataggcctcggctgggggattcaaccctgtagctcacagagacccctgtaccccccaccccccaagtgac

SEQ ID NO: 111958 - DNA, 122 bp, Homo sapiens
tgggaaaaggggaggaggcagagaaagaggtggtagcaagagaaagaactgtgtggagctcgagctaaaagcaggagctaagactgcaagatcaaatgattcccactcagttgtcctagtct

SEQ ID NO: 111959 - DNA, 122 bp, Homo sapiens
accgtccgcagtctccccggggtctctcagggaaccgagctggtggccgtccgaggtaagcgccgaaccaaggagaaagcgccgagcgcgtccacaaaacgcccgaggccgcccttctcgcc

SEQ ID NO: 111960 - DNA, 122 bp, Homo sapiens
tacaatgataaacactggctcaagtgaaacgtatccaaggtagtttttgttcattctttccgaagtaaacaatcaaattaattctggattgattaatttttggattgcttatttttctcctc

SEQ ID NO: 111961 - DNA, 122 bp, Homo sapiens
ttgagctaaagcttcttaagtcttcctggtatgcatgagacagggagggtcttagaacctcgggtacagctgagcctgtgtgcaggaattcagtaaccccaggtgtggactatcagtttgaa

SEQ ID NO: 111962 - DNA, 122 bp, Homo sapiens
agcctctcactcccgggagcgggcgcctcgcgctccctccctcggccccgccccgcccgccgctcgcccgttgcttcccacctgggcccgaagcgcccagcgccctctcccgggaccccgcg

SEQ ID NO: 111963 - DNA, 122 bp, Homo sapiens
ttgtgagttctatcacattcctgtaattacttgtatatatctttctcttttactaaactgcgaaccactggagtgtgggctctgagtgtgattcctctttgtatacccagattataaaaata

SEQ ID NO: 111964 - DNA, 122 bp, Homo sapiens
ggtcctgcaccttcttccttcaacccctgggcgcacagcttgaagccctcctgggccggacgacgtgggaaatgactgcaccccggaggccaggagctcgcgctcacctcccaatgacttca

SEQ ID NO: 111965 - DNA, 122 bp, Homo sapiens
ggaccgcaagtacagggcctgaatccaagtggcagttggggacccagtgatgcggtgacccgtgtcctgggagtggggtgatatttgactctctagttccccgttaggctgggtcttcgaag

SEQ ID NO: 111966 - DNA, 122 bp, Homo sapiens
gctcaagtggaagaacttgccttcaaatgtacagaaaaggcacgtttccttaaaacgtggcgggacctatggaaagaaggctatgattctttgaaacctgatgactaatttggcatacttcg

SEQ ID NO: 111967 - DNA, 122 bp, Homo sapiens
ttgctacatttttgctcccattgctcaacaataagtgatgagtgaagccagatcttcacacgatgccctgaatccgggtgatgtctccttgttcccaagcacctgcttaaacaaaaggcatg

SEQ ID NO: 111968 - DNA, 122 bp, Homo sapiens
gatcaagatgcggggcgatttggtttctggagagggcacttttcctaacttacagacagccgccttctcactatgcactcacatggctttcctaggccccgcatgaggacagagcgccctct

SEQ ID NO: 111969 - DNA, 122 bp, Homo sapiens
ctggtccagactccagcccattcatggtcttgagggccctaggaagaccacagcaattcccgcagctctcctttgggagtcagggggacctgttaccgaaatcagtccttgtgccaattaaa

SEQ ID NO: 111970 - DNA, 122 bp, Homo sapiens
atgccttcaccactgccatctccgattgtgaaagtccaaatgggtgccgaaacttgtgggcgcgcagcttgcagatcctgggcggtggccaagcaggccatgttttagaattctttccaggc

SEQ ID NO: 111971 - DNA, 122 bp, Homo sapiens
taggaaaagagaaaaattcagtctccaaaccttttcttggagacaaaatttaccacatatcgaaaatgaaaaaaatttagaaagcgatttgattattttttaatggagtttaaccagcttaa

SEQ ID NO: 111972 - DNA, 122 bp, Homo sapiens
tgtgtgtaagccagtatttaaatattttttcattaaatttaaaattcagtttctggttcacgctggccacgtttcagatgctcagcagccacatggtttattggataatgccaatatagaac

SEQ ID NO: 111973 - DNA, 122 bp, Homo sapiens
ctgctgtaaggtactcattaaaataaagagtagcaagaaaatcaccaaatgggccgggtgcggtggctcatatattcagtatatgataataagttcctcaaatcagtgggggaaatagttaa

SEQ ID NO: 111974 - DNA, 122 bp, Homo sapiens
tcttccgagcgcaaagcccaccaaggcgcaaagtgccgatgcggcgcccagagtttcaaccggtgcgttcagcctgcatccctcgaattccttgacccagcccggggctggagcctggcggt

SEQ ID NO: 111975 - DNA, 122 bp, Homo sapiens
ccggtgtccgtaggcgctgcgccctcggccgggcccatgtgtgtgcggcccgcccgaggccgcccgggctttgcctccaccagcgccctggcctccgctcgggcctccacacgggcctccga

SEQ ID NO: 111976 - DNA, 122 bp, Homo sapiens
gaaagggagaaaccccgaaggaattcctcctctctcggggctgggtctccgcatccacgccgggtttggtttcccaggctatcccacgtgttcgggcgtccgtgtcaatcaggttttccccg

SEQ ID NO: 111977 - DNA, 122 bp, Homo sapiens
tggacgtgcagaaccaatcccccatggttactgagggacgactgtacatctctgagggtgcgggagaggatacttcccaggcccccgagaccctacacaatgtctactggtgtttatgatcc

SEQ ID NO: 111978 - DNA, 122 bp, Homo sapiens
ttctccgcaaactggtttctttttaaagcaccgttctgaagtccttggagattttgctcccggcagctggagtgcaaggagctgcctggagatgaagtgattggcgggctcgcctagctcag

SEQ ID NO: 111979 - DNA, 122 bp, Homo sapiens
aggcgcgctgggggctgggtttgagggtgagcaaaaggcaagattattagtttgggttgacgtgggggtcaaggggagagcagaggaataatctgtaagatctgagtcccgaagctctttgg

SEQ ID NO: 111980 - DNA, 122 bp, Homo sapiens
gcgcaggcggcgctgaaggcagcggccagcagctccatagggtcggcggcggggcgggtgcgggggccgggtcgggggccacgccggggccctgggctgggtcgggggcgactagcgggctg

SEQ ID NO: 111981 - DNA, 122 bp, Homo sapiens
ctccatgtacccaaaagcgccaatcctgtttgccatatctctgccttcttcaggtttcaccggctcctagcaaagaaaaaaaaatagtccttttagctaatagtgtggcatacatatagtaa

SEQ ID NO: 111982 - DNA, 122 bp, Homo sapiens
ttgtattgcacatggattgcacaacaaaggtttctattttcctactttttttctttatcacgtgccaactaagcctttttttctacactcccttaaaatctgaccctttctcatcttctatg

SEQ ID NO: 111983 - DNA, 122 bp, Homo sapiens
cttgtcctagatctgatgcgggatcttaacccagtctcttctccctgtctttccttcttccggttccctcctggatctgacttctcttttccccagtgggcctcttctcttccagagagtaa

SEQ ID NO: 111984 - DNA, 122 bp, Homo sapiens
gtggaggcgctcttccttcggtcagtctcaaagaagcacagattcgagatgtggctccgacggtgggggaggggacagaagacccccccccgccccccgcaaactgagcgttcgtcctcaaa

SEQ ID NO: 111985 - DNA, 122 bp, Homo sapiens
gagttaattgtcaatctgaactcctaaacctgtgtttcctggactacggtaatttacctacgctttaaggatggtttgacattttaattacctctcactatagttttacctaatgattttct

SEQ ID NO: 111986 - DNA, 122 bp, Homo sapiens
acttccacgaagctgggacgaggtgggcaagattagggacagggtccgcagctgggatcccgggctgggctcaaccccatctccctttcccgcccctggtcccggcagcccccagctccttc

SEQ ID NO: 111987 - DNA, 122 bp, Homo sapiens
agcaccttaaccctgacccctttcagccatgatgatggagccacctttgtctgccgggcccggagccaggccctgcccacaggaagagacacagctatcacactgagcctgcagtgtgagtg

SEQ ID NO: 111988 - DNA, 122 bp, Homo sapiens
aatgaatgaatgacagggaaggcgcttcaccggaaaggctgaaggaggtctcccaaggaccgctgtgaggaaacggggggcggcgtgggtgggtggccgctacccacggttccggacggccc

SEQ ID NO: 111989 - DNA, 122 bp, Homo sapiens
cgggggcacgcttactgacaccgtccgtgcgcgcgggaagggcccagcctcgcggcccggcgtggctttgtgacgggcctctggtggcccagccccttccagcagcgtcagcagatcccagt

SEQ ID NO: 111990 - DNA, 122 bp, Homo sapiens
ggtaattttacttccatgaggaatcatttggactcttcagtcttcctttcttcagttttacgtagggctttgctggaggaaaatggggctaagggggagagaaacatagtctcggagtaggg

SEQ ID NO: 111991 - DNA, 122 bp, Homo sapiens
tgtgacaaccagaatgtctccagatgttgccaagtgtcccctcaaaggcaaaaccaccctcgattgagaactgctactctgtagtatcccatggtttggatggcactataatttatttaacc

SEQ ID NO: 111992 - DNA, 122 bp, Homo sapiens
cgcagagctacgccctccccccgggtgccccggaccctgcacttgccgccgctttcctcgcgctgctctggaccttgctagccggctctgcacctcccagaagccgtgggcgcgccgctcag

SEQ ID NO: 111993 - DNA, 122 bp, Homo sapiens
tgcgcccagcgccccatccccctagggcgggtccaggagctctgtgctgcagatagagcccgcggctgcttatgccagcgtctgctgagggggtggatgctgcagatagagcccgcggctgc

SEQ ID NO: 111994 - DNA, 122 bp, Homo sapiens
ggaggggaggacacaggacacaggatgcaagacaggcgcccgtcactcagggtcgcaatccgccatacagagccactgttgtccagaggacagacacatgaggacagagaaagagaggctcg

SEQ ID NO: 111995 - DNA, 122 bp, Homo sapiens
agagctgaaaacagcacagaaggctgtctcttcccttttccccacacccctacctgtgtccgagcattgagcagctgctggaagctctcaacctctttgctgtcatctgcagcccgctccta

SEQ ID NO: 111996 - DNA, 122 bp, Homo sapiens
tccaggtcgtgtgttttgcattctgtgtgggaaacgtcatcttaccccaaagccgtgagacgttctctcgcgttcttgtcccagctttccagccttacatcacacagttgggtctaccagcc

SEQ ID NO: 111997 - DNA, 122 bp, Homo sapiens
ggcagggcgagatcacaggaccacaggaccggggcgaaattaaaattgctaatgaagtttcgggcaccattgtcatcaataacatcgtatcaggagacagggtttgagagcaaccggtctga

SEQ ID NO: 111998 - DNA, 122 bp, Homo sapiens
gtttgggcggggacgtagggctccgggaggtcacacagccctaacaggacagtgggaaggcgcgcgagccagatttggccaaacgctaagctcgctgcggcctcgggccctcggcccacggg

SEQ ID NO: 111999 - DNA, 122 bp, Homo sapiens
acatctatagcttccattcggctacggagcaagaggatttgctttcagacatccagcaggcgatccgcctgcagcagcagcagcagcagcagctccagctccagctccagcaacagcagcag

SEQ ID NO: 112000 - DNA, 122 bp, Homo sapiens
ccgcaggccctgcaaaggcaatgtgagagccaaacctcaatgcccactccagacccagctcgctctagtcacagcagcccaccatgcctgctcaggcctgggaaggggccccagaactttca

SEQ ID NO: 112001 - DNA, 122 bp, Homo sapiens
cgcagtcgggaggtcctggccctccctgcacctgctcagagtgtgtctgcagaatccactcgggtgcgtggggcgtgacgtatcatcctcagcggggagcgggtggagggcatccgtagagg

SEQ ID NO: 112002 - DNA, 122 bp, Homo sapiens
cagagctccacgcataagtggtgtgaccagaaaccttttaacaagacccgcctgagcctgcgttagagctcccgctcggaaagtaaaagaccatcctaatccgcggcgctgcggaaccggtg

SEQ ID NO: 112003 - DNA, 122 bp, Homo sapiens
acaccattcagccactcttttctcacccacacactgatgccaacttcctgagtaacattccgagtaaaacgtgcacgactcactccagacagtccacttagtgtccacccacactcacgtgg

SEQ ID NO: 112004 - DNA, 122 bp, Homo sapiens
tggccggggggcgggatttctaggggctgcggagctcgcgtggcaaagtgaaattactaccgggagtgcgtgcgagcgagcaagcgagcgatcggcgggcgggggcgcggagacagcgcgcg

SEQ ID NO: 112005 - DNA, 122 bp, Homo sapiens
tgttgattacgtagatggcgtagatgacgtagatgacgttcagcaccacaaacgaagagccgaggcacagagtggggccttggattcatgagatggggatggagcagaaatgagaattcgga

SEQ ID NO: 112006 - DNA, 122 bp, Homo sapiens
ctctcctggcccagaggctctagggtggtcttgtctgtctcactccgggggcagagaggacgcagacagaccccaacaccactgctcggccgcgatggtgccttagacccaggtcctgtggg

SEQ ID NO: 112007 - DNA, 122 bp, Homo sapiens
cttcacagccaaattgcttgccgcagctgtctacacttgctgcctccaccttcacatccacgcattcccccagaacaactgcctgatgctttcctgacatccttgggagttcatcagtgacc

SEQ ID NO: 112008 - DNA, 122 bp, Homo sapiens
ctgtgtagtcatggaggccagggctatttgtacctagggagcctggctggtcctacctaccggggcacctggtaggtcatgaggcctggctcccagcccgcccttccaagccagggctgctg

SEQ ID NO: 112009 - DNA, 122 bp, Homo sapiens
ccaggaaagggcctttgaactaaagtaacgggaagtcacccaagggctttaaattaaaaacggttacaataaaactggagtcactttggctccagttcgcgactggtttagagggaacaaga

SEQ ID NO: 112010 - DNA, 122 bp, Homo sapiens
atggccagttgggggcgtgagagagcagccgcagcggggcggcgggaggatgggagcggccgcagcccgtgtgcttcccggggacttcccgtccacctgggggtcccagcagccccgcccag

SEQ ID NO: 112011 - DNA, 122 bp, Homo sapiens
agcattgtctggcattttctctgctggcgcttcttctcttgcctgctgccgtgcaagacacgcctttcaccttccgccgtgatcatgaggcctccctagctacgtggaactgtgagtccatt

SEQ ID NO: 112012 - DNA, 122 bp, Homo sapiens
aggcagcaccgcttggtgcatgcccagcacttcccctaccgctgccaggaatgtggggtgcgttttcaccgtccttaccgcctgctcatgcaccgctaccatcacacaggtgaataccccta

SEQ ID NO: 112013 - DNA, 122 bp, Homo sapiens
accagagcgcacctcggtgctggcctcggcgggggtgcggggtgcgggtcgcggggtgtgcggtcacccaggaggctgcgaagagtgcaggggtcagctccatcccgacgaaagcagatagg

SEQ ID NO: 112014 - DNA, 122 bp, Homo sapiens
cccgcagcggcctcgccccgcagcacccccactaccgccccgcagcgcccccctcctccccgcagcgcccccgcccgcgccgccgcagacccccctagccaggcttccagcccccttccacc

SEQ ID NO: 112015 - DNA, 122 bp, Homo sapiens
cttagcacctgggccagcagctgctgtgctcaatttctccccgggccttagctgccttcccgtgggtcagggctcaggacctgcagcccgccaggcctgagcctcccccccacccccgctcc

SEQ ID NO: 112016 - DNA, 122 bp, Homo sapiens
tgggggtgggggtcggccgggcggttgttgttgttgactcgcgttgccgggttgcttggtcgccacgactaccgtggctatggcgcctccgtttccctcaccggggcaactgttgctaccca

SEQ ID NO: 112017 - DNA, 122 bp, Homo sapiens
tgctcttctcacaactggactccagacttcacggggtctcatgggaaatgtagtcctcatcggcttccgcatcactttccttgttttttttcccacgcatttccagacttttcaaccaattg

SEQ ID NO: 112018 - DNA, 122 bp, Homo sapiens
ggaaaggggtggtgtgcttggaatatctgctcagtgcaggcgcgtggcagaccccagacgcgtggcagaccccagacgcgtggcagaccccagacgcgtggcagaacctcagtgcagatgcg

SEQ ID NO: 112019 - DNA, 122 bp, Homo sapiens
ccagcctcgactattattttatttattttgggtcgtgcacaagcctcagtgcctgcagtccgcgcctcctcggcccgcgggcgcctcctcccttggctccggagccccagaccccggccacc

SEQ ID NO: 112020 - DNA, 122 bp, Homo sapiens
tggctatccagctttggtttcttgaatctcccctcatcaatcatacccccggctattcatcgtgtttgtctctcggagccatcgttctatgtctctcctgtgtgtagcaatgcttatccccc

SEQ ID NO: 112021 - DNA, 122 bp, Homo sapiens
acttagcctgggttcctcaggaggaggctcaggctagggggttcctcacagggcttctcacggtaagggagcccttcagtgcaggagcccctcttgaatgtctctgccaatggccctttgga

SEQ ID NO: 112022 - DNA, 122 bp, Homo sapiens
gctggagccgcaccgaggatgggctcctggtgaaggcctttgctctgtggcgggtggtcccggtcgtcccagctttgactcgtccttgagcacagccgcttgtgcccccacctgtcacctcg

SEQ ID NO: 112023 - DNA, 122 bp, Homo sapiens
ccactgtgcctggccccaagtttcttttgcagcatcaacatttaacttctaaacaaaaaacgagctgcccttttttacagtaagatagtactatgaactacagcagccattcactgagtact

SEQ ID NO: 112024 - DNA, 122 bp, Homo sapiens
tggggtctgagggaatgttgacgggcagtttcacacagataaatctctgaaccagccgggcgcagtgcctcacgcctgtaatcccagcactttgggaggccgaggcggatggatcacctgag

SEQ ID NO: 112025 - DNA, 122 bp, Homo sapiens
attccttctcaaaaaaagaaaccttcaggggctctccacggcactgggaagcagccagcccgacgggtggacccttttcgtgggtgcgggtctctgacctcggtcggcctcggacctcatct

SEQ ID NO: 112026 - DNA, 122 bp, Homo sapiens
atggggggggtataatgtccagtttgagggtctctgcattcccttctgtggcacagggtccgtccctgtgggttagtcctgaggttcatggtgacagctgtgtggcatggatgggcagcttg

SEQ ID NO: 112027 - DNA, 122 bp, Homo sapiens
ttttgcggtagttcggattacttctttaagtgtctgttctcttttttcgcgcaaaaatgccggatccagcgaaatccgctcctgctcccaagaagggctccaaaaaggctgttacgagagtg

SEQ ID NO: 112028 - DNA, 122 bp, Homo sapiens
tgagcagatgacgcgatggaaagcatgtgaacctgaaggagccgcgccgtaccggcttctcggaggccctggcctgtgctgcctctcagtcctggaggtcgcccgcccactcctacctccat

SEQ ID NO: 112029 - DNA, 122 bp, Homo sapiens
ggccaaatcctgtccctggaagagccacaaagtaggaagcctgggtacaggcctggcaagcgagaacaatgtgtcactgcaggactttggagctctcagctttggagtcagttaagaccagt

SEQ ID NO: 112030 - DNA, 122 bp, Homo sapiens
tgcgacagtttcccgaggtacctagtgtctgagcggcacagacgagatctcgatcgaaggcgagatggcggacgtgctagatcttcacgaggctgggggcgaagatttcgccatggatgagg

SEQ ID NO: 112031 - DNA, 122 bp, Homo sapiens
cacaagaaacacaagcactaacagtgtacgctgactgagtatggcatggaatcgctttagcgaacacccgactaagaggtgtttgggattctttggctccgctgaggggtttgaagccacag

SEQ ID NO: 112032 - DNA, 122 bp, Homo sapiens
cggagaagggggtgttggagtccacaggggcggctgtggctggtggtgctgtgggccccccgggggcgaggccgccgtgggccagctggaggccgcagagctgctggtggcggcatggggga

SEQ ID NO: 112033 - DNA, 122 bp, Homo sapiens
gctcagttcctggcgagcgaagaggggcgctcccgctccggcttcgcgaagcaacctgagcgccccaccgggagcagctcccgcgccgccgcccggccctagcccctgcccggacgctctcc

SEQ ID NO: 112034 - DNA, 122 bp, Homo sapiens
gaagtggggacggaatagactcacattaggtttagtttgtgaaaactccatccagctaagcgatcttgaacaagtcacaacctcccaggctcctcatttgctagtcacggacagtgattcct

SEQ ID NO: 112035 - DNA, 122 bp, Homo sapiens
cccacaggcgggtccaggtccccgcggacaggagtcagggtcacagacagccccccagggcgccggcccctacgcccctcgcccccgggccgatggacccattggtgcttggccatgccggt

SEQ ID NO: 112036 - DNA, 122 bp, Homo sapiens
tgaggaaacagtcttgcctcatgttggaggatgtgaaacaacagtctgattactaggagtcgttatgaataggtgaattatgtgctaaataatcatcagagtaattcagcatttattaattc

SEQ ID NO: 112037 - DNA, 122 bp, Homo sapiens
agccctccaagggagcgcggcagggcccgcccgatagccctctcttctgggaggccttcccggacacgccttcccgaagccctcggctccccacgcctccgtgattccccactccaccttgc

SEQ ID NO: 112038 - DNA, 122 bp, Homo sapiens
gcatgcgcactgggcccggggccgggtgggagagttctagactcgatgtttgtcagcccgcgtgcagctgggcctgagcactccaggggagggtgtgttttttttttttctaaacgattctt

SEQ ID NO: 112039 - DNA, 122 bp, Homo sapiens
atgggtggtggtagcaagtgggagtcttgggtgccctgtctcgaatctacaaggtgggagcgggtgagaacccagcgactgcgcggctgaatgacagggagtagccccgccgcctccaacat

SEQ ID NO: 112040 - DNA, 122 bp, Homo sapiens
gacagaggcgggggaggctttgctttctgccccagggaatggcgattcgcgtcctggggccgtgccggggagaatcggccgaggagaaagaaagagtgatagaaaaagagctgcaggaagga

SEQ ID NO: 112041 - DNA, 122 bp, Homo sapiens
ctcttccgtcggcgcgtggactggatcctgttccgtcggtgtgtggactggatcctgttccgtcggtgtgtggactggattctattcccgtccgtgtgtggactggattctgttctgtcggt

SEQ ID NO: 112042 - DNA, 122 bp, Homo sapiens
tcttaagaaaaaagccacaacttttgcttatcaccagcacacaatataagaattgaaatacgtgttaagatcactatcttctgatgtatgagttcaagtaaatacacagcattataaggaat

SEQ ID NO: 112043 - DNA, 122 bp, Homo sapiens
tttgcgtagggccttgggtgcactagcaaaacaaacttattttgaacactcagctcctagcgtgcggcgctgccaatcattaacctcctggtgcaagtggcgcggcctgtgccctttataag

SEQ ID NO: 112044 - DNA, 122 bp, Homo sapiens
gccgcgcgccggggaccaggaacctccagcgctgagatgtggccgtgaggcgttggcgggcggcgaggagaagctcggcggcgtcccggggccggagggccgtggggccggggcgcaggggc

SEQ ID NO: 112045 - DNA, 122 bp, Homo sapiens
tggcagagctgcgtctgcactgttttcccttgtggcgttgtggtgtcggcccgtttggtgcgcagctcagcatccgttcagacatgtggctgccatcctgttcctgatgaggcaaatggctg

SEQ ID NO: 112046 - DNA, 122 bp, Homo sapiens
ggacagcaggcggggcggggcggtcatgcatgggaccactgcaacctgcaccgtggcccccggtttcggctcagccacctctaaggggccccacctagacgctgacactgccgtatttcctc

SEQ ID NO: 112047 - DNA, 122 bp, Homo sapiens
agaatattaaacaacccccttacagtgtaatcaatagtagtgaattgaatcttctgtgtacgttagcctcatctagaaaatgctgtaattacgtacagcactcctgtttttggtgatataaa

SEQ ID NO: 112048 - DNA, 122 bp, Homo sapiens
aaatagatcacacactctaacaactgaaatgtacagaaaagatgaaagtgcatccgttaacgtttaaatgcccatttctactgatggcattcatctgcacgctcgcacagcggagcagctaa

SEQ ID NO: 112049 - DNA, 122 bp, Homo sapiens
ctgtgcccgggagatggccttccgctacgggagggcaggaggtggccggggagctgtccccgctcactaacctaaccgtggttcggatttctggcctaaacccaggcatttgagcgcctcat

SEQ ID NO: 112050 - DNA, 122 bp, Homo sapiens
aggcatgtccttgtacccacctgagcacactcactcaaattcttctttccgaagcacatgcgtctgcagaccacaagtagcctctggctatttgttggcagctgaatcctatggtctgtctc

SEQ ID NO: 112051 - DNA, 122 bp, Homo sapiens
agccaacccaagtaacaggacgaggctcggcattcagatgttaatccgcataagcccaagcgctgataaccatgacgttttggaaaccagacaccatagatcattagacaacaatgccaagc

SEQ ID NO: 112052 - DNA, 122 bp, Homo sapiens
taagaattatccaatcagggacgctgggctggaaacgtccaatcaggcaagcagccggaccgaacagggcggcttctggtttggcgggtcctttgtctctcggtgcagccggagctccaggt

SEQ ID NO: 112053 - DNA, 122 bp, Homo sapiens
cctgcagattcaaaggggacattgtaggtcatcctattatatatttcacttctgtagcttcgtgaagtaaatttagctgctgacttcaggaatgggctgagcagaccgaaatgcaacctgca

SEQ ID NO: 112054 - DNA, 122 bp, Homo sapiens
aggccgcggtagcaggagatgccgcggtagggggcggcggtgatgcagcagcggcttggccggggcccgcaggcagagacacagctgaagtttccagggcggaacccacagcctatggagtt

SEQ ID NO: 112055 - DNA, 122 bp, Homo sapiens
accaatgactgaagttcaaaactttagccaatccaatacatcagaaatggaaccctcattcggctgtgattactaagtgatttatctttagaaatcatactacattttaaagatcaaccagc

SEQ ID NO: 112056 - DNA, 122 bp, Homo sapiens
ttgtttatttaactgtccagttgggccactaaagtacagataaaagctggggaatgtaagcgagactggtcacttccctggggtgagagaaacgctttcaacactatccgtccatcgtatca

SEQ ID NO: 112057 - DNA, 122 bp, Homo sapiens
agttggcgtcctcagagtggccgctgccatcagactctgcgggtagagctgggccgggagcgacgggcgacattggtagggacccggggacagcggtccctatcccaggcctgacgtgggtc

SEQ ID NO: 112058 - DNA, 122 bp, Homo sapiens
gccagtagcagcagcagcaacatctaagtgagaggcggccatgaggactggaccgagccccgccggcgcggcccgcacccggagactactcgacctcttgccggttgcctcgcaggctccga

SEQ ID NO: 112059 - DNA, 122 bp, Homo sapiens
tcttctaaaaggcattttccagcagattacgaacgtcgtcctttctgagtattgtgtcatcgccgctcccttcccgttcactgcagagcctctccttatctccctagtgctccctcttccat

SEQ ID NO: 112060 - DNA, 122 bp, Homo sapiens
cccctacttgtttcccatggtgaaccctaaggaacctccagggaaccccaagagctcctccggtttgcaaaccactagggtaggtgatgggaagaatcccaaaaggttttcagcctgagcat

SEQ ID NO: 112061 - DNA, 122 bp, Homo sapiens
cgaaccacatggtgcgcatgatggccttcagcaggaagtccacaaccctgcaaaagagggcgctgcgtcacgcgggcacacgtccgcagtctcggagtctgtgtgaggcacaggggcggtcc

SEQ ID NO: 112062 - DNA, 122 bp, Homo sapiens
gcccaagcctcaccctcacacaggaaagcagatgtgttctggccggaagttgagtggggccgcggggcctgctgggaggtgttgtcctcggaaacgtcgctggcgcggagggatggttcggc

SEQ ID NO: 112063 - DNA, 122 bp, Homo sapiens
ggaggtaggggcgtagggccaggggcgagggcatcgcactttgcagggggacaccagggccgctggagtgaatgaagagactaggggaaaccgcgggactttggaaacatgactgactactc

SEQ ID NO: 112064 - DNA, 122 bp, Homo sapiens
aagctccagttgtccctccatctacacagggacatcggttccaggacaccccgggtttaccgaaatccacgcgtccgcaggacccgcgcccaccctgtggagctgcatgtaggaaatgtcgg

SEQ ID NO: 112065 - DNA, 122 bp, Homo sapiens
agggaaggtcactatttcaattttggacataggcctttgagatatccaaaagaaaatgctcggtaggccactgcatatataagtgcagtcagtacatttgagaatcatttagtagctgatgg

SEQ ID NO: 112066 - DNA, 122 bp, Homo sapiens
ttgcgacacatttttgtgcctttcagcccctggtgtctgcagtgggggatttaaggcacccgcttccacttctttcttgtttggagttttctgttggaaccgccggcgttggctccgaagac

SEQ ID NO: 112067 - DNA, 122 bp, Homo sapiens
aggaaaacggacacgcacgaacaagagcctgtacaaaggggcataggaagaacgcggcggcgggcagtagggagaggagggactggcacaaaatgacacagcagcaaaaccggttcccagaa

SEQ ID NO: 112068 - DNA, 122 bp, Homo sapiens
tgctgggattacagacgtgaaccacccccctggccagaattttttaaattcatttttttccgggtggtttattgcaagtgtttagaaatataattaactgttgtacattgattttgtgtcct

SEQ ID NO: 112069 - DNA, 122 bp, Homo sapiens
tgtgcaccccacaggtgagaggggtctagagacctcgccttctacagtggcatcagtcctcgctcctgtccccttactcctggtctcggaccagtccgcccggtctgactcttgtggtcccg

SEQ ID NO: 112070 - DNA, 122 bp, Homo sapiens
ctactggagtctctcccagcccctaaagaagggtatttcctggggccctgtcttcctcctcgggcatcaagtttatttctgtgtctgtcctagcaaagaggaatgaaaactcctttagggag

SEQ ID NO: 112071 - DNA, 122 bp, Homo sapiens
aagacccgtcaaagcgcccaaagcaatttgtcccttcttttcttcgccagcggtggctcacggatccctaagggacagctggggacccaggcgcccccagcccagccccagaaacgctggac

SEQ ID NO: 112072 - DNA, 122 bp, Homo sapiens
cgtgatgtccttggtcaagggctctcctctgggccggtggtggttgcagagagaagcccccgccgccgtcgctcctcgggaaaggaagtcgcgggtgaacaaccgaatatgcgatgaaaagg

SEQ ID NO: 112073 - DNA, 122 bp, Homo sapiens
cagcctccaccgggaaccaggggcgcgagtcgctgctcagtggcctgggcctgcatgtggcgcggcgggagctgctgcctagggccgcgcagcgacggggggtgaggactacatgtcccgac

SEQ ID NO: 112074 - DNA, 122 bp, Homo sapiens
aaagcaaggaatatacccgccacactctcggctcccaaaccgctctttccctccctctgccggccacgcctcttataggcccggaagtttaccccaccctgcaccgtgattcaccggaagcg

SEQ ID NO: 112075 - DNA, 122 bp, Homo sapiens
tgcaaaataataaaatcgagggtgagttactataagaaatgcatccattgaggtcctagtcgtgggctacatgtggttactgattttctccaagaacatccctggtcacaaatagagttata

SEQ ID NO: 112076 - DNA, 122 bp, Homo sapiens
tgaaaaaaatgaatccatggttaatatattttaacttagttttgtttaaaagattaaagacgccactatgatcaaattactttctcattgctggcttgggttttggtggtagttcctttaat

SEQ ID NO: 112077 - DNA, 122 bp, Homo sapiens
gcaggattcgcgcctggggacggcgggtgaaggaatagctgggcgggagtcgtggggctccgtcacctcttgggtcctgggctctcacatggtgaagtttgggctcgtggctgaactcggga

SEQ ID NO: 112078 - DNA, 122 bp, Homo sapiens
cggcgttgggggcctggttcggtgggagcggggaggccgggtggaccgggtcggccgtcccgcgctcttgcgttgagacaggctgtgggagggggaggggagcgagagttggagacctcctt

SEQ ID NO: 112079 - DNA, 122 bp, Homo sapiens
gctcttggacgacccaggacataggccagccagtacgtaccccagtgtgttggagaatcgcgctcggcttcttcctctgtgctgagtcatgaaagttgccggagcaggtgcagttacacaac

SEQ ID NO: 112080 - DNA, 122 bp, Homo sapiens
cagaccgcatggaggggcaagtggctgaaaactcctgaagggctgcactgtgaagaaggacgggacttcagcagcacgcggagcctgaggctaaatgctgcaaaacacagcaccggcctccc

SEQ ID NO: 112081 - DNA, 122 bp, Homo sapiens
gccaaggtcctcagagataggaatttttctatttcttagagcatgtctcctgcatgaagtcggcatagtgtaagtctgactaccctgagactgcagacaacaggaagcccagggtaatgtgg

SEQ ID NO: 112082 - DNA, 122 bp, Homo sapiens
ctgggtaaagaggcctgaggccaacaaggtcatgttgggccatgtacatggttggtgacccggccctaggtcttctggctcaaattcctgtcccctttccaaatcagcctacgtgctgtaga

SEQ ID NO: 112083 - DNA, 122 bp, Homo sapiens
cacgcccgccgtgcctgttcctggcaggtactaccgctgtgaccgaaacctggtgtggaacgcaggcgcgctgcactacagtgacgaggtggagatcatccaaggcctcacgcgcatgcctg

SEQ ID NO: 112084 - DNA, 122 bp, Homo sapiens
cagcccgagcgcaccttccgagcaatcgttacgctcagagcaggagggaaggaggtcaagcgacccaactcgtctgtttcacagatatggaacctcagattcagagacagggtttgacttgt

SEQ ID NO: 112085 - DNA, 122 bp, Homo sapiens
cccgcaccgaccggcctgggccccgcccccgggcgtgaggcgcccaatgcgcgtgcgcggcggcgtcggcgccagttatttctgtcccgccccccggcctcggctctttctgcgagcgggcg

SEQ ID NO: 112086 - DNA, 122 bp, Homo sapiens
tggtagccgtggccagggagctcgaggccgagaattaccacgacatcaagcgcatcacagcgaggaaggacaatgtcatccggctctgggaatacctactggaactgctcagggcccggaga

SEQ ID NO: 112087 - DNA, 122 bp, Homo sapiens
tccttcagctttatcaacttatatgcctactaacaacccctaagagtgtctgtttccctacgtcttcatcaacactggataacatcagtctttaaaatgtttaccaacctgaaggggaaaaa

SEQ ID NO: 112088 - DNA, 122 bp, Homo sapiens
cctggcattctgcataaggagcctaatggacgtgaagcactcgtgtcccgtgtgtcagcgcgagctcttctactaccaccgcctgtgagcccccaagaaataaatgccaggggtgccacctg

SEQ ID NO: 112089 - DNA, 122 bp, Homo sapiens
tgagatattggcaactggggctccgggatttggggcacgagctgcggcgggaagcatcggcggccggccgggcagaggcgcctccctccccaacggccccgggcgccacacagcgcggcccc

SEQ ID NO: 112090 - DNA, 122 bp, Homo sapiens
gcacgcccctgcgcaggcccgcaagccgaattgccggactgcagctcccgggatgcactgcgacggtattgacaggcgcagcaaccaatagacggtagagaatgcccttggcaggaggcggg

SEQ ID NO: 112091 - DNA, 122 bp, Homo sapiens
gattgaaaaacaaattagtatgccctgttgcctcgtactgagtatttacattacccttctcgagtactgcctgaaccagcaccctgagggaaggcagtgacccctcagcctctttcaactct

SEQ ID NO: 112092 - DNA, 122 bp, Homo sapiens
tatttttttttgagatccagaaagaaggccccaatctgttctaatgaatttaattagagacgggcttggagagcttcagaacctcttaccgggatcacaataaacagagttaacaagataaa

SEQ ID NO: 112093 - DNA, 122 bp, Homo sapiens
cctgcctctgagagctcctgggttagtgggaggcagaggcgggcagacctagggtgcacacgggccagcctgccaaggctacagaaggaaaggacagcattgcaatggaggggcctggctga

SEQ ID NO: 112094 - DNA, 122 bp, Homo sapiens
actcatttggggagggggcagggtgacacaggagagagaaggagggtgggggctgcatcccgcgtggccacgcagccctaacctggccctcttggattagaggggagctgatgtgctttgga

SEQ ID NO: 112095 - DNA, 122 bp, Homo sapiens
ataaaagatcagggaaatgtcagctgtccacttaacggatgacataatgaattaagagttcgataggcggcaggcacaactaaaagccaaactcgacctaagtcttatgaaatcctacttaa

SEQ ID NO: 112096 - DNA, 122 bp, Homo sapiens
gagtcctttcgggttgtgtgacggccggcggtcacacatgccacacccccaagcctgggccgagggccatcccggtcacacataggcctctaccttggaggaagtgtaagccacccatgtcc

SEQ ID NO: 112097 - DNA, 122 bp, Homo sapiens
acactggcagaataaatttattcaggccctttacccacccaacatcagagctgcacttcacgtgtggctcctgagtgcctggaatgtggctgggtctacactgtgatgtgctggaaaggcaa

SEQ ID NO: 112098 - DNA, 122 bp, Homo sapiens
gggagaaacttactgcgaggagcacggcgagaagatctacttcttctgcgagaacgatgccgagttcctctgtgtgttctgcagggagggtcccacgcaccaggcgcacaccgtggggttcc

SEQ ID NO: 112099 - DNA, 122 bp, Homo sapiens
aagctataaggtcttatttgtgtttctgtctatgtatgtatgtttttgcatgtcgtatgtcgtgtctccaagttgaaatctggcatggtcagctagacatcccttaagaaattctatttggg

SEQ ID NO: 112100 - DNA, 122 bp, Homo sapiens
atcaaatgctaaattgggcgatgtgggctataaattaaccagagctatccccacaggctccgtgagaaaggcagcacttccaaggcgggtaagatgggccctgagaaagggacgccttacaa

SEQ ID NO: 112101 - DNA, 122 bp, Homo sapiens
tttaatgaatttctggtttgtattaaatatgtccttccaatggataagttctaaaacatacgctatcattggcccatgttgctgaggtgcattgtgaacaatacctttagtgactgtggaac

SEQ ID NO: 112102 - DNA, 122 bp, Homo sapiens
aagacaccaggagtttctcgggcccagctgtggctgctgccggggagccccaagccttggcgggtccttgcggcgaataggagtctggtcaggcgtcaggctagtccgacgaagagtgggta

SEQ ID NO: 112103 - DNA, 122 bp, Homo sapiens
ccacagtggaaagacatccaaagagcaggtggggacgaccgtccagctcagagactgttccggaactcccaaggcttgttgctgcttctcactccacagagcgttatcacaaagaagaaaac

SEQ ID NO: 112104 - DNA, 122 bp, Homo sapiens
tggacttaatcaagccttgcttgtggatcttggtggcaataagcccataactgacagcaacgatggacatgggtgcgctgaagccaatgatgaaccggatgatgcctctcaccgtcaacatg

SEQ ID NO: 112105 - DNA, 122 bp, Homo sapiens
tctttctcatcagcctggcttgcccatggtgggcatgcgacagttgctaaaaatacccttcgggcgggcggctggagaaatcattttcatggggcaccctccctcccagccttatgagatgc

SEQ ID NO: 112106 - DNA, 122 bp, Homo sapiens
ccgggtcccagggtgtctgattcagtgagtccagaggcgtgcctatgtgtggacagacatcgctgaccgaccataacctcacatctgccaaacagacacggcctcagaaattaacaatggat

SEQ ID NO: 112107 - DNA, 122 bp, Homo sapiens
tcctgaacagcgtgtccaaagccattgcccccgagaacagggaagctccgagtgtcttcacgaccacgaggaacaacactcaccacaccccgccccacaccatgccatgacgggcaccacag

SEQ ID NO: 112108 - DNA, 122 bp, Homo sapiens
gggtgcacctgggtagaggtgaaaaggtgagacaggtgccctcagctcaagtgcaggaggcggtgtggacgagagaccaccttccttgcccaggaggtccaggaggcccaggacacacagag

SEQ ID NO: 112109 - DNA, 122 bp, Homo sapiens
gtaatttcatggcattgctaggtccagatatcgcgatatttcctggtggtcgctgtaatacggaaaacttactacgctgctgtgggacttgtgctcgctccgccaggaggccgagggcgtct

SEQ ID NO: 112110 - DNA, 122 bp, Homo sapiens
aaagatcccaacaagagagtggaaggaaacttagacgaggctttgtttgactccgtgtagcgacaacaagagaaacaaaactacctatttgtaacggacgtgctgccattgccctccgcatt

SEQ ID NO: 112111 - DNA, 122 bp, Homo sapiens
agtttttcttgctatttactcttcctggttggtttggcagaactggttgaggcagattatcggtgtgggtggtgtcagctgatccactgagctgattcaaggattgttgtctcatgcctccc

SEQ ID NO: 112112 - DNA, 122 bp, Homo sapiens
gcgccactggtccctgggatttccaaacggacggaagggcttcccgtaagccaggccggccgcctcacccacgccaccccaacacaccccggccggcagcccggctacgagacgcgcaaacc

SEQ ID NO: 112113 - DNA, 122 bp, Homo sapiens
tcttctagtgtgctttcagaaggactcatctaccctatttctatggcagattggaagacacgtggtcttccatatttccatgtctgaagcaagacaataatgctacagatacttaccaactc

SEQ ID NO: 112114 - DNA, 122 bp, Homo sapiens
aggtgtccagcggtggtggcggcggtggcgggccatgctgcaggagagcacggtgctttccgcggtgcttgacagaaccatgttccgtttccatcgttccaccacatggttagatcaagcac

SEQ ID NO: 112115 - DNA, 122 bp, Homo sapiens
tgacagagcaagaccctgtctcaaaaatcagtcgtacaaacgtaaaaacctctcatttgacgtgtactttatgcgttagggcacaatacactttgaatacactatctatgattctttttcta

SEQ ID NO: 112116 - DNA, 122 bp, Homo sapiens
acagaccctaagacagccttccttctcttttttctctttcttctttctttcttctcgaaacggagtcttgctctgtcacccaggcttgagtgcagtggcaccatctaggcttagtacaacct

SEQ ID NO: 112117 - DNA, 122 bp, Homo sapiens
aacgaaaactgaagtcctctatttatccacagtctaggtgcggtgcaggcagccgcaatgcgagattccatacactactaccctggtaatgatctccaccctgacctggaggagccatcctc

SEQ ID NO: 112118 - DNA, 122 bp, Homo sapiens
tcagcgctattgatgctgctttgccggagaagatacgttgcctcacattcagaagaagcccgggaccgtgcctggatcaggtcagacctgtcgattcccgcaagattttcaagagcattcac

SEQ ID NO: 112119 - DNA, 122 bp, Homo sapiens
tcatgagcagaagaccaggcaatttcaggccataggagagaaaggatgcagaggacaggacgagacttgtaatgccaaaaggggcccagaggccgcgcatcccacctatcgaagcctgggcc

SEQ ID NO: 112120 - DNA, 122 bp, Homo sapiens
gggccctgcaggaggaggagaggcaaccacgcttctgccttttctcgcctgggcagaaaacgctgggccagggaactggaaaccggaaaacaggagaaagggtttctggaaggcagcgggag

SEQ ID NO: 112121 - DNA, 122 bp, Homo sapiens
ggaaaaccataaggattcgaatctgccgtcatactctcaggtagtgctgccacaactctgcgtagctcctccaggaccagccccaggtagggctgaggggtagcaccgggctcctccatagc

SEQ ID NO: 112122 - DNA, 122 bp, Homo sapiens
gagaacgctggtgaacgcacagcggggaaaacgccatgtgaacgcacaaaggaaggagaacgccaggtgaactcatacagggggtaggaacgccagaggaaagcacacagtaaagagaaggc

SEQ ID NO: 112123 - DNA, 122 bp, Homo sapiens
acccaacttgccactgctgctgggaaagcctggggttgtcagcaggactcacattaaatccgggaatggaataagctagattgagcattggaaaacaccaggcctgtctacctcccctgttc

SEQ ID NO: 112124 - DNA, 122 bp, Homo sapiens
ttggtaaccaaaacttgatttaacctcccaaagagggagccagcctgctgctggccactgcgtgccctaggcctcagcttcctgctgctgactggctgcctgcatctcctctgcggccccgg

SEQ ID NO: 112125 - DNA, 122 bp, Homo sapiens
attaaatgaattcatatttataaattgcttagaccagtacccagcacaaggtaagttctacggcagtgattattaaataaaatgggtatccatcacaggtttttgaacagggaagtggcatt

SEQ ID NO: 112126 - DNA, 122 bp, Homo sapiens
tggagtgtaaagcgagcaaaccagacgactccggtgctggagaaggcccgagtctgggagcgccaagatgtagggcaatcggtcatgagagtgcagagaagccaaaccaaaaagcttgctgg

SEQ ID NO: 112127 - DNA, 122 bp, Homo sapiens
aggggcggggcgggggacgggacgcaggtgttctgcagtcaagggtgccaggtgggcagccggggtggggtaggggtcccgtccacaaggtagaggctgcagcgtcagggggctcgtgtccc

SEQ ID NO: 112128 - DNA, 122 bp, Homo sapiens
ttccagtggaaaccctggtcagagggtcagagtgattgcttggagaaaatgaagcgtgggcgatgctcaggttctctggatggccaaaggagttttagtaggagcagaactagtcagggaaa

SEQ ID NO: 112129 - DNA, 122 bp, Homo sapiens
atctggtacttgtggtttgcaaatcatgtgattaacagctgctatcatctatcctagaaacggcaggaagaagtgttattattttatcacataaaatagtagtcacaaagagaatgaaaaca

SEQ ID NO: 112130 - DNA, 122 bp, Homo sapiens
ctcggtgccagcgtctgccggggttactggcggtcactggccctcagctcccgcccccttcgttaaagggtcaaagcagagaagtcctggcccaacacaccagaactctgtgttcgaaatca

SEQ ID NO: 112131 - DNA, 122 bp, Homo sapiens
gcgggaaagggcaggagggctgacctggtccgtgatgctgaggatccccatggctcggcccgggctccgtccgcatcgagctcccggcggcggcggcggcggctccaccggggacacggagc

SEQ ID NO: 112132 - DNA, 122 bp, Homo sapiens
agccggtggccgcgggagcgtccctggcaggcagccggggcaattcagcgctgggttcggcgcaacagccttcagtggacttgacgaggagcgcgtcgggttcggaaaactcgctaaggtgg

SEQ ID NO: 112133 - DNA, 122 bp, Homo sapiens
cttctggtctcaagcatttcagataggggtactcaacttttattacaaactgccctgtaacgttgctcttctttgattactgcttccttcgtatcaaaagtttgttgactgttttagggaga

SEQ ID NO: 112134 - DNA, 122 bp, Homo sapiens
attcaaggtggttatcccatttataaccataaagtaatcacattccatgaagttacagtgcgctcacaggctctcacacatagtgtcttaggacagtatttgccttatatatgggaggtcac

SEQ ID NO: 112135 - DNA, 122 bp, Homo sapiens
cccagagcccacggggctggacgcagcttgcaccaaattgcaatctttgcagagacttttcgaaccgactactccggccccccctctgcggccccctgactccctttcccgtgccccggccg

SEQ ID NO: 112136 - DNA, 122 bp, Homo sapiens
ggcagactctcactatcttaaggtggttcgcctgagccttcttaaagtggtaccccaggccgggcgcggtggctcacgcctgtaatcccagcactttgggaagccaaggcaggtggatcacc

SEQ ID NO: 112137 - DNA, 122 bp, Homo sapiens
agtagttctcaggtcggcgggctgtggaggtgatcagagtgggagtcaggcgggctaggccggacccggagggaggggctcgggctccgggaggcagctgcggctccgactgctcaggaacc

SEQ ID NO: 112138 - DNA, 122 bp, Homo sapiens
gcggctgtggttgccagatctggcagtacagagccaaggtggcagggccgcgctaggacacggatggtcccagggggagggcaacaggaaaaacaagcactgacacaactgccccatttccc

SEQ ID NO: 112139 - DNA, 122 bp, Homo sapiens
ggagcctgggctctttctgccctggaggttggggaagtcctgggtcagcaggggtgggctcgggcgtcctcttcaccgtgcgcgtgtgttgggggcgtatgtaggtgtgtaatgaatgtgcg

SEQ ID NO: 112140 - DNA, 122 bp, Homo sapiens
cctattatggtatcttctttttgccttcacacacttggtgtaagagattactgcaacaatcgtttgactttggccacaaaccatgactactctcagggcgaaagccgttggaaggaattatt

SEQ ID NO: 112141 - DNA, 122 bp, Homo sapiens
ctgagatgtagggagcgcctctgccccatctgggatgtgaggagtgcctctgcccggctgcgaccccgtctgggaggtgaggagtgtctctgcccagcagccccgtctgagaagcgaggagc

SEQ ID NO: 112142 - DNA, 122 bp, Homo sapiens
gccgcgcaggcgggggcgggcctctgcgtggtgcggccaatggggaccgagcctgcaggccgaggcgtggcggcccaggcgcgacgccccgagtggcggttgtttcaagatggcggacgtgg

SEQ ID NO: 112143 - DNA, 122 bp, Homo sapiens
actgggagaggccaggccaggcccgggtataaaggctgtggagggggcggccgccgcgggcgcagaaaggcgcgccgctagctgctgtctctcctcacctcccgggccgcccctgcgagtcc

SEQ ID NO: 112144 - DNA, 122 bp, Homo sapiens
cagcccggcctgccgggactcgtgctgccctacaagtaccaggtgctggcggagatgttccgcagcatggacaccatcgtgggcatgctccacaaccgctccgagacgcccacctttgccaa

SEQ ID NO: 112145 - DNA, 122 bp, Homo sapiens
gcggctctatgcctgggggaaggggcaagtcaacatcagggcctgctgatagacaagggacgagcaatgcttgggctcctgattgggaaaaccaggggtttagccaaggcagcatagatgct

SEQ ID NO: 112146 - DNA, 122 bp, Homo sapiens
ccaggtctcgacgcccattcccgcctgccggcccatgtgcgagcaggcgcgcctgcgctgcgcgcccatcatggagcagttcaacttcggctggccggactcgctcgactgcgcccggctgc

SEQ ID NO: 112147 - DNA, 122 bp, Homo sapiens
aggtcaaggaaagttcgcaccgagatcccctctaatttattcaaaggtttggcggcggcgcgtaattttttccccctcttccgcctacacccgctgcgtctcctggtgtctcgttcctttcc

SEQ ID NO: 112148 - DNA, 122 bp, Homo sapiens
ggagcgggtccgggtgctgcagggtgtccgggtgagcggcgccgcctgggccggggcgggcgtggaggccgcgggcgcgggggggaggtgcggggcggagcgcagggccggggctctttcca

SEQ ID NO: 112149 - DNA, 122 bp, Homo sapiens
aaatgtacaaaagtcccctccttctatccaagaggcttcccaatacacccaacactgagccgctggggtggctgaataagacagaaatcctttaaaatgaccccaaatgtgatctgaaccta

SEQ ID NO: 112150 - DNA, 122 bp, Homo sapiens
ctggacggccgccctggggaccgggtgaatctctcctgcggaggagtctctcatcccatccgctgggtctgggcacccagcttcccggcctgcaagggcctgtccaaaggacgccgaccgat

SEQ ID NO: 112151 - DNA, 122 bp, Homo sapiens
ccagttccccgcaggctcttcctccaagctgtggcgcggtgggctctcaggagggagtggcgtggctgttctcaggccccaggctagtggggtttctgggctgggcgggggctcagagcaga

SEQ ID NO: 112152 - DNA, 122 bp, Homo sapiens
gacctttttttaaaaaaagatgtttgaagcccaaagtctgtatgcttagcctccatagaacggtcctttgtgagtgagtaagggtggtagatccagttttggcaacctcagacgatggatga

SEQ ID NO: 112153 - DNA, 122 bp, Homo sapiens
ctgtagctcccatctccttaacaacaaacacccattagcacagcaacaaaaagaaatctacgtaaaaaacaacacgtctcagtccagggtggtgatctagcgtgtaggctcctcaagaaggc

SEQ ID NO: 112154 - DNA, 122 bp, Homo sapiens
agaaagcctggcgagtgaggcgcgaaaccggaggggtcggcgaggatgcgggcgaaggaccgagcgtggaggcctcatgcctccggggaaaggaaggggtggtggtgtttgcgcagggggag

SEQ ID NO: 112155 - DNA, 122 bp, Homo sapiens
ctacacatagcacttcagacaggcaaattaggagggaaaagaaaactgaatctgtaaactcgggaaaaactggtgtatcttttgaggtcccagccattttgagaaactctgatgctgaaaaa

SEQ ID NO: 112156 - DNA, 122 bp, Homo sapiens
aatgagaaggaatgagctcggagagaaaagcaagcaagtggaccttgggccgggaagggccggaacacatgcatcaccggagatacagctagattgttatcattaccttgaataaatgtcat

SEQ ID NO: 112157 - DNA, 122 bp, Homo sapiens
gtcctcaagcggcctggatacttacacgagctgcaggtacttgaaggtagacagctgtcccggaaccagcgtgaactggttcccgtccaaatagctgcagagagaacacagcggcgttagtg

SEQ ID NO: 112158 - DNA, 122 bp, Homo sapiens
cggctgcgcaggctaccgccggcagccgctttgctctttcctggaggagtgggaagctgtcggccaccgccccgaacaggctcggagaaaagattctgaatttcctttgattagcggcgtta

SEQ ID NO: 112159 - DNA, 122 bp, Homo sapiens
tgctagcgtgggatagagggagcgcacgcggctaggctccagcagcgactcggcttttcgcgtattctaagcactgaagagcctcttaaggggagctgtccaaatcgcccaggagtggtggc

SEQ ID NO: 112160 - DNA, 122 bp, Homo sapiens
gacgccacgaacgtcttgtcacattgcaggcacttgaacggccggtcgcctgtgtgcacacgccggtgcatggccaggtccgccggctgccggaagtccttgccgcacttctcgcagtggta

SEQ ID NO: 112161 - DNA, 122 bp, Homo sapiens
attaagataatatgtatttttgtctagcaaaataaaatataggtatcagttttggtgaagcgaaagcataatggacattaatttgccgattggtgctgaaagtataaattgattcaacattt

SEQ ID NO: 112162 - DNA, 122 bp, Homo sapiens
cgaagttgccagcatcttggggtggggctaggggcgtgggtagtcctgacctcctttctccggccagcctgactttgtcggcatcatctgtactcgtctctcaccaaagaagattattgaga

SEQ ID NO: 112163 - DNA, 122 bp, Homo sapiens
gccgccgctgcggtggaatctggtcccaggaggcggcgtccgcccggggtccggtctaggcgtgcgtgggggccacggtcacggtcatcccagccaggcccggctccagcagccccacggcc

SEQ ID NO: 112164 - DNA, 122 bp, Homo sapiens
agtttgtgtcagctaagatgtggaagtctggggtgagagaggttttttgagagaaaattacgagttcagttttgaacatgttacatttgagagagcacctattcattgttatcttaagtagt

SEQ ID NO: 112165 - DNA, 122 bp, Homo sapiens
atctccaggctaccagttctggagcaatgatctgtgcattcattcacctgcacattctcacgtctcaaggatttaaattttctagtccccaaatgggctggggctcaccccagccacccaag

SEQ ID NO: 112166 - DNA, 122 bp, Homo sapiens
ggacgcccaccgctgacctggccctggggcgggagaggccagccgagcagggaccagggacgcccaccctggacctggccctggggcgggagaggccagccgggctcagcggggaccgggga

SEQ ID NO: 112167 - DNA, 122 bp, Homo sapiens
tagtcccggggaggtcgaagggcgggggctccgggccccgcttggggagggcgtggagggcgccgaaggggttaacctccctggggctggaccgcggggcgagcccggggtgtggagtgggg

SEQ ID NO: 112168 - DNA, 122 bp, Homo sapiens
cgccgccaccaaaggaggaggaggagccgccggagccgccgccgctcgctgccgccgcctcgagaaccaaactccagtgagctgcccccgcgcggagtactctgggtagtccgcgccgcacg

SEQ ID NO: 112169 - DNA, 122 bp, Homo sapiens
ggtccggagcgcggatctcggggtcaggagtctggcggttgtgccaggcctctgctagcgcgaccctagacccgcggcatgtggggccgccgagctgggcgtgcaaggagagttctgggtgc

SEQ ID NO: 112170 - DNA, 122 bp, Homo sapiens
ccttttttgaaaattaggcatacctcaagattcagaaatgaccaagacatattccatctgcgtgtgaaagtgtcacagtcattgtgtcttgccctgctcctactcccatgatctggtaacta

SEQ ID NO: 112171 - DNA, 122 bp, Homo sapiens
ttgagttaagctgtctttataagcaggatgctcatagtggtttcccggagccagtagtcacggtggaccattccctacttgcttttccttggatcactaaggtgggagagtaggagtaactt

SEQ ID NO: 112172 - DNA, 122 bp, Homo sapiens
cgcagagagagggtgcagcgccgtccacagccctctccccgctctctctcctcccctgcccgcacagccagcagcctggtccagctctctgcgtcccatcgccagggtagtatcctccaggt

SEQ ID NO: 112173 - DNA, 122 bp, Homo sapiens
atttaccttagataaagccttacaactttaacttcttgctgcctcttagctatgctctaccgtattgaatacacaagtatcaaaaatcatgagtttctccttttttgctttaccaattctct

SEQ ID NO: 112174 - DNA, 122 bp, Homo sapiens
gccgcgggcttggagcgggtgtctgggaaacacagtctcacttgtctcctcaaggggctccggggcaccgtaacagcgtgcagagcgcagtcaggctgccgtgctgctgctttgcgaggtgt

SEQ ID NO: 112175 - DNA, 122 bp, Homo sapiens
cttatagactaaggaatgggcataagtcagttaacgtccaactgcgttttgtctgagagccgatgggagtaagagtgtctgcagcttgtcgatgtgtacgcggttttatgcacttcttttaa

SEQ ID NO: 112176 - DNA, 122 bp, Homo sapiens
gtgcctgcgccctaatctcctcctcttatgaggacaccagacaggttggctcagggaccacgggaatgacctcactgtaccttaaggacatccttatttctttttatttttgtttgttttat

SEQ ID NO: 112177 - DNA, 122 bp, Homo sapiens
gctctctgacaaccccgccgacgccgccattcgctgcctcagcaaaggggtgctcaaaaacggaagtgatcattttaccaaataggcattttccagcttaaaaaagatgtgcacattatttt

SEQ ID NO: 112178 - DNA, 122 bp, Homo sapiens
aatgcaaccatgatttctaagactgtacgagtttaaaataaggattcttggcagatctgacgaccacaaaccttctgtcattgatgatgtagcttctgggcttgctaaagcatctcttgtcc

SEQ ID NO: 112179 - DNA, 122 bp, Homo sapiens
agtgttatcacttccttgaagggattagatctctccctccccagctcctaggcagggaaccgtagctactggggaggggcatatttgggaggcctgaggcctaggaatagcctctagacccc

SEQ ID NO: 112180 - DNA, 122 bp, Homo sapiens
tccatctcaaaaaaacacaaaaaaacaaaaacccgagaccctaacgggcacagacacaagcggctggatgtcgagatggacacactagcagaggaacacacaagcagctggacatcgagagg

SEQ ID NO: 112181 - DNA, 122 bp, Homo sapiens
ccatttaaattccatacccttcccttaccagctaggtggctcacagcaagtcacatcccccgagtctctgtttcccaatctgtaaggtgggtcccctagggctaaccttgcagagtggtaga

SEQ ID NO: 112182 - DNA, 122 bp, Homo sapiens
gcaggcctatttgtcagtgggctgcccctgtttgttgtaatctataatattactgcctcccgtggccccagagcagctgccgcgggagaatccagggatggtgggcgctaggtgtgcgctga

SEQ ID NO: 112183 - DNA, 122 bp, Homo sapiens
taagcacgtctgtaggttcaggctaaggttttccgtcagaaggccgcgcaagtgcacttgcgtgtcaccgttaccgtagcgactgggcttctggactgtatatcctagctgccttgtcaaca

SEQ ID NO: 112184 - DNA, 122 bp, Homo sapiens
cgcggccagccggcagctctgagtgtggggcccgctgagcccacgcccacccggaactggcgctggcccacaagagctgcacacagcccctgttcccacccgtgcctctccctccacacctc

SEQ ID NO: 112185 - DNA, 122 bp, Homo sapiens
agaagcaccaggcctagctgggtggcagggctgggcccagtcctctaactggtctggtgccgcctcctcctcgcccacaccccgggctgtagactgaagcccgacgtggccccggcgcctac

SEQ ID NO: 112186 - DNA, 122 bp, Homo sapiens
gaggagctgcgctgtgaggccctcagtgccccctttctcctgttaaaacttaaacaggcccggtgctgggaatagaggcgtgagccaccgcgcctggcctagcgtggagaacttgtgacagc

SEQ ID NO: 112187 - DNA, 122 bp, Homo sapiens
gtcttcaataaagtagttatggcaagtcctgatccacgtagatagctgaaagagtgctgacgtactactcatctgaacagaacctgaaacaaaccatgatgaaacgggttcaatactcttcc

SEQ ID NO: 112188 - DNA, 122 bp, Homo sapiens
agtggcgcccaggcggggaagcaggcttttcacctactccttgctttcctatatgcagggcgggtgagagccaacgaaggcgtcgggcaggtactggggagtgaagatgtgatgtagctctc

SEQ ID NO: 112189 - DNA, 122 bp, Homo sapiens
cagtgtctcgccggcggggttcggcctgagctggattgacatagcccttggcgggtgagtcgccccggacgcccgggaggagggagcggggcggccgagctgggtggccagcgaggtgtcct

SEQ ID NO: 112190 - DNA, 122 bp, Homo sapiens
attacgtgccgccacctcgcgcccctgcacgtacccaacgtgccctgcgtggtcccgttacgtgtcccatcatgtttcgtgcgcttccattacggatcatacctcgcacctcaccgcgtggc

SEQ ID NO: 112191 - DNA, 122 bp, Homo sapiens
ggaggaggaggacccggggaccttgtgtcgctcggtgggagccggtctgtgtttctgtttcgctagggtgtgtttgggttggtagagtttgtggggaggggtgcctcgtgtggatgggagga

SEQ ID NO: 112192 - DNA, 122 bp, Homo sapiens
caatcattatgattagatcccccagagaagggcggggtctttccaccacgctccctctatcgaattttggtttttgttttgagacatctgtcacccaagctggagtgcagtgatgcaatctc

SEQ ID NO: 112193 - DNA, 122 bp, Homo sapiens
cgctgggtgggtgcgcgggacccgggcgctcagcctcgggctgggcgctgccgcttggtgcgcacagacacccacagcaggctgtggcctgggtgctgcttaattcgattgccatttgcctc

SEQ ID NO: 112194 - DNA, 122 bp, Homo sapiens
tattttggaagagctaaaataaacgcgagaagaagtccctgcagcccgagtgggagaccccggggcgacgggaagcctggggaaaggaggatgggggagaggccagtgcgggctgcagaagg

SEQ ID NO: 112195 - DNA, 122 bp, Homo sapiens
gcatagcacggcccagagcagcggccgcaggaaggcctccaggatgaagtagaccagcaccgcggcgccgcagcacaggcacacgaacagcacggccccggtgttgtagaaggcctgcttaa

SEQ ID NO: 112196 - DNA, 122 bp, Homo sapiens
gggactcccacccagggcagcggttaggagccccctcctggactgccagttttcaagtgacgtatttaagtatccccctcccggtcctggaaaagtagagaggcagccgggagcctgccttc

SEQ ID NO: 112197 - DNA, 122 bp, Homo sapiens
ttgcaatatattatctgtgtgtgtgtgtttgtgtgtgtgtgtgtgtgtgtgtgcgtgtgtcgtttcattagaaatctctaggtgttattttaggattgtttctgagttagcgtaattcctga

SEQ ID NO: 112198 - DNA, 122 bp, Homo sapiens
tggcttagtggaataatgaaagagccccaaaggtaagatgcaaagtagctacttttcccccgagcagagcacattccagcagtggctctggttttaagatggtatcatgtttcagcattttg

SEQ ID NO: 112199 - DNA, 122 bp, Homo sapiens
gaaagttgacagggtagaaatcatttttgtagacaagaaaattgaagcacaaggcgataacgcaacttgcccagcagcacatggttattaataggtggagcgggaattagaagccaggtttt

SEQ ID NO: 112200 - DNA, 122 bp, Homo sapiens
aggccacgtagacctctcctgagtggggaggccgcgtagacgcctcctgagtggggaggccgcgtagacctctcctgagtgagggaggccgcgtagacctctcctgagtggggaggccgcgt

SEQ ID NO: 112201 - DNA, 122 bp, Homo sapiens
ttcagacactctgtctctggatctgaccaccgctcgggaggccagcacacgcagagctggcgtctcatccccagccattggtgatcatcggcgaaggcggagttcaggtccatcgttcctga

SEQ ID NO: 112202 - DNA, 122 bp, Homo sapiens
aagttactttaaggagatgaactgcacatttccaactctagtgagtaaccttgttcctcccggcactcttgtcgagttagcgtttacgtgcagaattcttccagaaagaccacctgagcaat

SEQ ID NO: 112203 - DNA, 122 bp, Homo sapiens
cgcggcggcaactcaccccgtggaggtggaagccctcggcgccgcctgcgggctgctcagcgctgacgcccaggcccatggcagcggctccgctcggcacccaggtccagtcccgctgcgcc

SEQ ID NO: 112204 - DNA, 122 bp, Homo sapiens
ctaaagggaattatgtcagcaaccctccctgcctggtgggggtactgtgaagagcaaatgcgacaaggaatttgaaagaaagttccaaacaacaggacaatacaaatatgtttcattattgc

SEQ ID NO: 112205 - DNA, 122 bp, Homo sapiens
cgccattctcatctcctccagttttgtgcctggggcagcccgggagcttttctgggcctgcgtcggtggccgcagcccagctccgccctgcggtgcccaccaggaggctttgccggggcggc

SEQ ID NO: 112206 - DNA, 122 bp, Homo sapiens
caagggcgggatcttcacgtggtcctggggtgcctcccacacaggacatattttagttcccggggaacagccaggcagagcccgccgtgagggacgagcaagtcacaccactagccctgcac

SEQ ID NO: 112207 - DNA, 122 bp, Homo sapiens
aggctcttccttgcgtgtgcgtgcacgttgggtgctggggggtggagaccggatcttcctcgcttgggtactttcctctcggtgtgtgtttctggccggagccgtttcgcgacggcccgggc

SEQ ID NO: 112208 - DNA, 122 bp, Homo sapiens
acctcctagaggctgtccctggacctggagctgcaggcatcagagaaccagccctgctcacgccatgcccgcccccgccttccctcttccctcttccctctccctgcccagccctcccttcc

SEQ ID NO: 112209 - DNA, 122 bp, Homo sapiens
tctccagattccacgttcctcttccttaggttgttcagagacagtggttcttgcctgtcccggtcggggtcccagacgctgaggctcggccgcgtgccccacgcccaggccggcgcctcggc

SEQ ID NO: 112210 - DNA, 122 bp, Homo sapiens
tggttcccagttgaagctgactcccagagacatctgcatgagtgaaaggtggaggtgaagcggctccggtgctgccgcagctcagccaggcacattctgcattctgtggctccacgggctcg

SEQ ID NO: 112211 - DNA, 122 bp, Homo sapiens
ggcgtcccaagatggcgtcgtggctgccggagactctctttgaaactgtaggacaaggcccgccgcctagcaaagactattaccagttactggtcacccggtctcaggcaagtgcgagccgc

SEQ ID NO: 112212 - DNA, 122 bp, Homo sapiens
gcaaaagcgagccagacagtgcggcagacgtaaggatcaaaaaggccacctatcattcgccggggacgcctgcctccttaccctgataacgtaactatttctctgcataggattttagtttt

SEQ ID NO: 112213 - DNA, 122 bp, Homo sapiens
caggggcgccccgcatgggcaggggcctgggtcagcctcgggttgggtccagggagcgaccgccggggccgactccacctcccgcgctccaagccgattcgtcccttcagggcagggcctgc

SEQ ID NO: 112214 - DNA, 122 bp, Homo sapiens
caagccgtgccgctccgctcgcccgggccccgccgaggccgctgcgcccccgcctcctcgcgggaggactcgctccaaactccctgaacttcggggacagtcccccgaagcggcgaaactct

SEQ ID NO: 112215 - DNA, 122 bp, Homo sapiens
ttcgcccgacgatcccgccggcctcttggacctgcggcaggtgagacgtgccccgaccctcggtagctggtctcgcgggagacccctaccgcccctctgggactcccttctccctcccgcac

SEQ ID NO: 112216 - DNA, 122 bp, Homo sapiens
cataatgggttgaatcatatcaaatcgtcaatatttgactgttttgagctacataaccggcgatttcatagggtacaacttaatctatacctgaatgaatgatttctgtcgtttctgagaca

SEQ ID NO: 112217 - DNA, 122 bp, Homo sapiens
gaagcaagtcggagagtggccaagacttgggctttctgctcctgcaaatctgattccatacggattggggtgccctcaaactgggagcattgagttttctatgtatggaagtaaatatttta

SEQ ID NO: 112218 - DNA, 122 bp, Homo sapiens
ccagccgcccggccggccgcgatgcattctggggaaggagcagcaccaaatccaagatggcggccagcaggaggctgatgaaggtaaaagccattctctggcagcggccgggcgtggggcgg

SEQ ID NO: 112219 - DNA, 122 bp, Homo sapiens
acgacaggcgccccttcccccagccccgagctatctgctgagcagcccccgtcttccaagcgtgggttcagacccccaggatgggtagcccactcgcctctcctgtggacaccccgcctccc

SEQ ID NO: 112220 - DNA, 122 bp, Homo sapiens
ggtttctgcgaacactggtgagaggccgcattagagggtcaggaccctcaggtctggactcgtggtcaccacataccttcctccctgctgacagtagctggtacctgttacctactcagagt

SEQ ID NO: 112221 - DNA, 122 bp, Homo sapiens
ggccgggtgtccagtggtggctgatcctccagccttgggcacggctccaatccttggcatcggacatccggggagctggtcatgcagcatcgggcgatcgggcatccggggaggtggtcgtg

SEQ ID NO: 112222 - DNA, 122 bp, Homo sapiens
ccaaatctgagtgctgaggctctggagcggacagagaggaaatgacggctgtgaaccacacgtccggctcagccattttctaggcggaaaaaaggaagcccctttggctctctcctcccttt

SEQ ID NO: 112223 - DNA, 122 bp, Homo sapiens
cgttgccggtggcccgggagtcgactctgcttctgcctcgcacccggcctgggggtgttccgagatctggttggcttttgtgtttgcgcgtttaacagtgttatttacccgggatttgaata

SEQ ID NO: 112224 - DNA, 122 bp, Homo sapiens
gcggggaacgggggcacagggagggtgacggggtgaaggaaacaggcctgctggtggctccgaaggaaggtttgggccaggcctagctggaatcccaaaactcacctgccagcaaccgcgag

SEQ ID NO: 112225 - DNA, 122 bp, Homo sapiens
aaccattctctgcaagctaagccctgctgtctgcagggactctaggattgccgacatgagcgcaccaacactgaaatgatgagtcaggttgattatggtcagaagatcttcttgcacctcca

SEQ ID NO: 112226 - DNA, 122 bp, Homo sapiens
gctgacccgggcctgacagtgtctgggtgtaaagttcctcctctgaggaggtcactgttccgacctcgcccctgtcttcctgtagggcctcctctaagtcttgagcccgcagttcctgagag

SEQ ID NO: 112227 - DNA, 122 bp, Homo sapiens
ctcggccagggcggcgcccttgggggtctccggcggcccctcgggactgggcccccaggccgcccacacccctgaccagccgtatctggacaggaaccgctgtgggagagaaaggcacccta

SEQ ID NO: 112228 - DNA, 122 bp, Homo sapiens
catacaattcattctccaggctcagtagttggaatttactgtctgcattcatcttctcttcgtcagtttattctttgacaccctgaaatcgcatctccctgccccgtattgctattaatatt

SEQ ID NO: 112229 - DNA, 122 bp, Homo sapiens
tcaaaagcacacattgattacaaatattaggtctggaaagggcagctgcaacagctgaagcgtgttcactctgggggcttgagagcgcagaaggctcgggaaagaggtgacaatgacaacaa

SEQ ID NO: 112230 - DNA, 122 bp, Homo sapiens
atggcccgagcggcggttgggggcatcgcccgcctttcccggcccgggcgactgcggcggcgaccgctccagagtctcgctctcgctcctggcccggccgggcctgctcacaaaccgaaacg

SEQ ID NO: 112231 - DNA, 122 bp, Homo sapiens
gcaactgtgctgaaattccgtacgcgtgacgttcccaccctctgccactcggtgacgtcacgatcaatcccaccactaagttcccagccaagcgctaccgccgctatctcgcgagagccgta

SEQ ID NO: 112232 - DNA, 122 bp, Homo sapiens
ctccccaccccatgccacaatgtctcagtcgcacggtgcgacagtgggtctggggtcccacgcagcatgacaatgagcctggggtcacactcaacctgagtcaccccaccctgcggcacagt

SEQ ID NO: 112233 - DNA, 122 bp, Homo sapiens
ttaggaaccactgctgctagtactcctcctgtgccaattctgtaccctctgtcagacttacgacaggtaagcaagggtttaattaagattgcaaaatgacagcaggctacccctaaagtctc

SEQ ID NO: 112234 - DNA, 122 bp, Homo sapiens
ggcgcgagcggctcagggcccctttccggcctgttgtgcagcccgagccgtctgcgcgtgcgcgagaccgaggcctggcctgcctctgggcgcccacagtgatcccgtcctccgctcggcaa

SEQ ID NO: 112235 - DNA, 122 bp, Homo sapiens
ctctccagcttttctggtccaaccctcttctgcgcctaacactggcacctccttttcttccggctgatgaataattgtccgcaaaccagcctctctggggcactgaggggcgggaaggttag

SEQ ID NO: 112236 - DNA, 122 bp, Homo sapiens
tgacgatgtcataggacgagggggcgcgtgtgcacactgcatatatgtgtgtgtgagacccgtttgcacactacatgtatgtgtgtgatacccctgtgcacactgcatgtgtgtgatacctg

SEQ ID NO: 112237 - DNA, 122 bp, Homo sapiens
ccggagggtcaagaactctccaccggcggcagcggcccggtgtctgccccggcttcgccccggcctaaggctgcctgtgctataaatacgcggcccacatgccgcggtgacacggtgttccc

SEQ ID NO: 112238 - DNA, 122 bp, Homo sapiens
cctcggtttctaagacctgctggctaacatccaaaggagaatcagccgtgatcactgagccgaggaggaggcccctccgccatgccaactgccatctgtccacagtaaatagtgcgacagaa

SEQ ID NO: 112239 - DNA, 122 bp, Homo sapiens
tatgatatggaaagaaaaatacttaacaagacaggaagcatgagtcaggaataagtggtgcgcagtgtgagtcatgcctgtaagatcaataaagaagctggctctgctcctgactgcattac

SEQ ID NO: 112240 - DNA, 122 bp, Homo sapiens
agagggttcgctgggtgggcggatgcacaaagtgtcagctcggctgtggcctggcttcatcgccagcccacaggcagaaccttccgggccccagctcctccaccctggccagagagcctggg

SEQ ID NO: 112241 - DNA, 122 bp, Homo sapiens
aaaaaatgtgggcactggagctttagagtagactggagaggtcttaacttcatctgcgcacgtgggccgcgtctttagtgactttttaaactctcgtaagggaagtagagtttgttttccgg

SEQ ID NO: 112242 - DNA, 122 bp, Homo sapiens
aggggagcctgcaggtgccggctggtgaggggatgacgcgctgtgggtgggaggaggcagcgcccatctcagcagcaccaggactgcctgggactccctggcaacccagcaccggggaagcc

SEQ ID NO: 112243 - DNA, 122 bp, Homo sapiens
ggcctggagaccggccgccgtggggagttgctggggaggaggaggaggaggagttgggcgcgggagaaaccacccgctctgctctgggtgcgagcttcctcccagaggggctcggacctctg

SEQ ID NO: 112244 - DNA, 122 bp, Homo sapiens
gttattcacccgccaggccctgggaatacaaggccggcttcaaaaaaaccagggcacccgcgacctcctcgcagacgcgcgcccccatacccgggcctcaggcagccacgaggtagacgggc

SEQ ID NO: 112245 - DNA, 122 bp, Homo sapiens
gaagtcttggagcctggcatacggagtggaataaatagaggcccagcatccttaccaagccgttccttcctcctgctcttaaatatcacacttctgaagtcatctccccctggaactcccag

SEQ ID NO: 112246 - DNA, 122 bp, Homo sapiens
tgggtgagctcgacggtttcgggttacagaggtttcgaacccatccctcttctcgtgctgcgatttttgcttattcacagcccctttcctcggaaaagcccagaagtgtttcaagtggtgac

SEQ ID NO: 112247 - DNA, 122 bp, Homo sapiens
ggcgcgggcgtcccaggaagcagcccacccagttcgatgaggactccagagaccaaatgccggtgctggaaaaatgcatcgacctgcccagcaaaagaggccagaagcccagcctgagcccg

SEQ ID NO: 112248 - DNA, 122 bp, Homo sapiens
gcagtgcccagcgtgttgacacccgggagatggcaaaggggatgatgatttctgcagggacgtagaactgcagggcataggtgcacaggatgccggcaatgtagagaagcttgacagactgg

SEQ ID NO: 112249 - DNA, 122 bp, Homo sapiens
aagggcacatacaaaatgcggggtaattgccgcttctctaattcgcggccctttgtgcggcggcgcggagccggcggccgcgctcccaagcccgggcctttcagccacccagggggggcccc

SEQ ID NO: 112250 - DNA, 122 bp, Homo sapiens
cccccgcttcccccaggcgagggacagtgccaggccaaggacaagtcacaggtgcaacaacgtgccagaactggatccggagccccagggcgcaagatctcccgcagcgtcacccggcagag

SEQ ID NO: 112251 - DNA, 122 bp, Homo sapiens
ttcatgggcattttatgcaggagggaaccgttaagcagggaagctgaaagagacagatcacgggaaaattaaatgtagggtttaactgagaaataatcattttctatgaaagataatgactt

SEQ ID NO: 112252 - DNA, 122 bp, Homo sapiens
gccactcagaacttaggaactgaacctggccattggcggagtggaccccgatgggtgggacgggggcggcagccgtgacagccgcgggaagacatgagaggctgctagaaggacttcccgcg

SEQ ID NO: 112253 - DNA, 122 bp, Homo sapiens
ctctgcctgatggggagctgttgcttggtgaccccaccaaccgatcccagtgggaacccccgccccacagcctctggctcctcaactcccacccctagcctccatctccagtttctaggtca

SEQ ID NO: 112254 - DNA, 122 bp, Homo sapiens
ccacaggtccgggacgtgcctggaggagccagcgggggcctggcagggttcgtgtgctcccggggaccctcatagcttgctcaatgcccagatttgttcttcctggttgtggttatctcaca

SEQ ID NO: 112255 - DNA, 122 bp, Homo sapiens
gtagcccaaggtcatgacataagccagtggcagggctgaatttaaaggcacaaagcagtgcgccccagagtcacgcgggtggactctgacagtgatagtgtccatttcccacatctgccagg

SEQ ID NO: 112256 - DNA, 122 bp, Homo sapiens
gtgctgtcatctctgttcctgcggggacaggcacccatttgtcggctcacttcattgctccgtcggccgggctactatttcagggctccctggaagagtaagtccctgaaatgggcagggac

SEQ ID NO: 112257 - DNA, 122 bp, Homo sapiens
gcactgccccgggccgcagcgcagcggcgccaaccaccacccgcggccaccatggccggacgggctccctaagccaccgaccccagcccgcgggccttcgagccttctggggcctccggcgc

SEQ ID NO: 112258 - DNA, 122 bp, Homo sapiens
cgcaccaggtgtaccctttccagtccctgccgtcgccttattcccggtgctggtcaccaccgtctagggcttacttgggacacaggctagttctctcctgaagctattgagcagtatgtgtt

SEQ ID NO: 112259 - DNA, 122 bp, Homo sapiens
ggaagagaccgatgccttcctaacagaatggctgtcgtcccaaagtctgagtttaccaggcgttgaggaagagaccgatgccttcctaacagaatggctgtcgtcccaaagtctgaggttac

SEQ ID NO: 112260 - DNA, 122 bp, Homo sapiens
taactcagttagcaaattagggatttttccaaagaggagctggcaaaataaagtacagcccgaggaaactggaaagcagcttgtatgggctgtttgagtctcaactatggaaaagcacattt

SEQ ID NO: 112261 - DNA, 122 bp, Homo sapiens
cgcaggcggtgcagtgctggaggccggaagctgcctgctaatcggctaccccgagtggagcgccggggcggcaggcgtgggatggctgcgggtggcggggccggcggagagggagctgcacc

SEQ ID NO: 112262 - DNA, 122 bp, Homo sapiens
aattatctccattggattcagccctaacagttctcgtgtgtctgtgataccacgcggggtcgtgatctccttactcagctgtggcttggtttcagtggtccctccagtcccgtcccctgtcc

SEQ ID NO: 112263 - DNA, 122 bp, Homo sapiens
cctccagaggctcaaaaatatcatctcctccagttcctcctacccagagtatccaagcgacgctggaagttctttcaccaatttggaagtctgcagcatttcctctcagaggtccacttttt

SEQ ID NO: 112264 - DNA, 122 bp, Homo sapiens
ctccgagaaacaagggtcagccagattcagtcggcaggccagcagacaagtggaggtgggcggggaatccaggcaggagtggcctggcatttcctggcagagccctgcctcccagctgtcta

SEQ ID NO: 112265 - DNA, 122 bp, Homo sapiens
gaccttaaaggtgatcggctttaacgaatatgtttacatatgcatagcgctgcactcagtcggactgaacgtagccagaggaaaaaaaaatcatcaaggacaaaggcctcgacctgttgcgc

SEQ ID NO: 112266 - DNA, 122 bp, Homo sapiens
gagggtggctacagctcgaggcttgcaaggtgcctgcgccacccctgggttgaggccgaccggagtcagctgggatcacgttaatgactccaagcgatcgccagcccttccgccctctccct

SEQ ID NO: 112267 - DNA, 122 bp, Homo sapiens
acaacatattgtcttccagaatcatagccaaattaccctctcctgagaccttctcagactcgggtcaaagaacccaacatttacaatcttagcagggaaacagagcttgaaaatgattcatc

SEQ ID NO: 112268 - DNA, 122 bp, Homo sapiens
cccaagcaatcctcccgcctcggcctcccacagtgctgggatcacaggcgtgcgccaccgcgttgcaatggctgcactaaccactcagagcgtccttggggttctggcctgcagggcgcggc

SEQ ID NO: 112269 - DNA, 122 bp, Homo sapiens
cctggcctcttggcagccaaaaggccacatggcccaggctctccagcatcactgtgtagccgacttggacaaaaatggacttctccccattgccacttgcagatctcttcaaagaatcagca

SEQ ID NO: 112270 - DNA, 122 bp, Homo sapiens
gtgtccaagtagaaagatcaaatcttccgacggcaggtaccttacatgggatttacgatccgacgggtccgaacgcagctcgggaacagaaagaaagcaggttatttgcaatctaccggagc

SEQ ID NO: 112271 - DNA, 122 bp, Homo sapiens
ccagcccgcggcagcagcgtggccgcggtgcagcatcagcatcagcagcagtagcagcagcgggcggccgcgtgggtgtttttgtcgggtctcggggtctggcagcagcatggcggactacc

SEQ ID NO: 112272 - DNA, 122 bp, Homo sapiens
cgttctgaaggaagacaattctgcagtgacacatggggcccggcacagggccaggctcgccgcaggctctcagggcacataaatgagcaccatgtccagggaagtgtgcgcgagggcctccc

SEQ ID NO: 112273 - DNA, 122 bp, Homo sapiens
gcccggctggggtctcgggaagggcggggtcgcgcagggacctgggagccgggcaggggccgctcgcagaccagctttcctgggagctggccccgctcccgcgttccccaccctgccgcacc

SEQ ID NO: 112274 - DNA, 122 bp, Homo sapiens
ccaccgtgaaatcaaacccgcggggttctgtatgcgccccatccccgctcctaccaccatcgctttgatttcaagaacactcacaagccccaagccctgccagcaggaggactgtcaggaac

SEQ ID NO: 112275 - DNA, 122 bp, Homo sapiens
tattcaatgattttctcctgcacatttttttttcagctttcttctgacagttctgttaggcgggtgtaggacttctattgattctctgattgtaacttttgtttcatactttctatttcttt

SEQ ID NO: 112276 - DNA, 122 bp, Homo sapiens
catcgcgggcctcgggcgcagggcacggagccggccgcgccgcagcctcccgggcaccggcggcggtgaccaacctgtaaccccagcgctcagagctgtcatggtgcccgcgggcggcggcg

SEQ ID NO: 112277 - DNA, 122 bp, Homo sapiens
ccattgtctgcctgtcccaggccatcatgctgggctttgacagccacgaggccatgtgtgcgtgggatgcccggatccgctatgcgctcggcgagggtgagtgacgggggccggggccgggc

SEQ ID NO: 112278 - DNA, 122 bp, Homo sapiens
aagccgttattcttaacgagtgtgacacacaccagttttgagcagtagcaaaaggaacaacgtgcatgttggagactcagatcagaacttgaaagtcattggaaaatggaagaaaggacaat

SEQ ID NO: 112279 - DNA, 122 bp, Homo sapiens
tcattgtcacaccaacaggccatcaactgtggcaacagttcttggggcaattagggtgcacggacggctcccttctctattcattttcactcagtccagtcgcagggcagcacacttcactc

SEQ ID NO: 112280 - DNA, 122 bp, Homo sapiens
tatcccaggctggaatggtgaggggcaggtgggagcagccaggcccttccctgggcaagccgtggtgagccacccgcccattccgcagcgggaggcggccgggcctgggggccccactgcta

SEQ ID NO: 112281 - DNA, 122 bp, Homo sapiens
tgtatctcctcgcatggaccctgcctggaacatgtggtctctgctggcccaggcttgtcacggtactaaatctggagactgagccctctgcctctgtctgccccccgccgctgcctccagct

SEQ ID NO: 112282 - DNA, 122 bp, Homo sapiens
tgcctgacggagagcacgtgctcaatgcacatttgttgaatgagtgatcgcgtgagtgaacgggtgggcgtgaaagtctccagtgccccagaagtgagtgaacggtggtgggcgggggtagg

SEQ ID NO: 112283 - DNA, 122 bp, Homo sapiens
aagagcaaggtaaaggcattgaggtgttggaggagtgagggatggcctggggactcgccacggggctttgaacataaatggtttaaaatgttaatgtgaactgagtgaactgatacctcccc

SEQ ID NO: 112284 - DNA, 122 bp, Homo sapiens
gatagagcttttgttgaatacctttggggtctccgagctccatttttatacaccactaggcggcctaaccaagcaatctggaagaaaggaatctatacatttggagagccctgtgttcaaat

SEQ ID NO: 112285 - DNA, 122 bp, Homo sapiens
cttcttctgttgcctccagcggcttcagagcagactttcctggaactccggtttcctgagcgcttgtccttgactcagtttccccagcccaagccccgccacatccatcgtgctagctcctc

SEQ ID NO: 112286 - DNA, 122 bp, Homo sapiens
aacatgggaggaaggcataggtttcaagcatactccctgagcactaagaaatcagagaatcggcgaagacttggcagaacagcaggtatggttaccggttcctagtgaaaagtgagaatcat

SEQ ID NO: 112287 - DNA, 122 bp, Homo sapiens
ccgtcctctcgctggttcagccagttgattcagtgtcaaaacccagcggaactgaaattccgccagttcacttccctgtgcctcaatttcctcatctgtaaaatgggccaaatgacatctgc

SEQ ID NO: 112288 - DNA, 122 bp, Homo sapiens
attgcagagaaatataatagagtgattcataaaacacattcagctaggcatagtggctcacgcctgtaatcccagcattttgggaggcccaggcaggaggattgcttgagcccagaagttca

SEQ ID NO: 112289 - DNA, 122 bp, Homo sapiens
aaaagagatgctcccacagaaacaaaacactgcagaccatgaggcttgctggggctggtgcgatagctgccagagcgactcccagggagtcacggagccttgagaaatggtcgttgggaaaa

SEQ ID NO: 112290 - DNA, 122 bp, Homo sapiens
ctgagtccgagggcctgggcccgctttgggtgccctgtttctccggcgcccaggtgtgtgcgcagaaccgtgtctgctccagggacagccgtgaacgagcgccgtccggagtggcagggcca

SEQ ID NO: 112291 - DNA, 122 bp, Homo sapiens
ataaatcattctatgttttgagacagtggactaaactttccttaaaaggcctctcactctcgtaggactgctctacactgggcctgtgccaatggccatgcagaagtagtaacacttctggt

SEQ ID NO: 112292 - DNA, 122 bp, Homo sapiens
acgcgcgtctgcccgcccacctttcctggggcggatgcgttcccgcagtgaccgcactcgcgattgtagaaaattcgctcccaattgttgaatgcttacataaactgcatagttacccatat

SEQ ID NO: 112293 - DNA, 122 bp, Homo sapiens
ggcatcgccgagcccccgcgcggggggctgccgcccgagctcctgattgacaggctgcctcgccaatgcctggagggagaaaggaggtaaagagcaagtgtttagggtaatatctgctaatg

SEQ ID NO: 112294 - DNA, 122 bp, Homo sapiens
agtcggggcgcagggccgccgccaccgcgacaacgccgcccgcgccccgggtagaccggccgcagcccctttagaagtgcgggaggctttgactgcagccgagccccagagaggcctcattc

SEQ ID NO: 112295 - DNA, 122 bp, Homo sapiens
agggcggtggcgcccgcgggacctgcggtgagtggggcccgggcaggcggggcagcttggcgtgagtgcccaacttcggccttggggctgggctctttgatccagctgcgggtccgaaggaa

SEQ ID NO: 112296 - DNA, 122 bp, Homo sapiens
agcgtccaaatgcccctgtaccgatccagggatggagaatcgccgggcagcgggcgactccggttctgagcttcccctggccatggggggctgccgtgcagtcttgtccctggctgcctgct

SEQ ID NO: 112297 - DNA, 122 bp, Homo sapiens
ggggtccttcaaaatccagcctcagattccctggtcccgcagcggtggcctcacctctggcgtggccgagctcacgtggtccggcttgtgcaagtcccaggtccaactccgggtctcctgct

SEQ ID NO: 112298 - DNA, 122 bp, Homo sapiens
ctgagtccagccccgtagtctccagctttcctcaccaggacctggaaaggcggaagttcccggctttaaactagacgttcaacaagttagaaaatcaggaatctttcaaggttccgtaaatt

SEQ ID NO: 112299 - DNA, 122 bp, Homo sapiens
ctccccgcacgggagtgatttatgcagtagctggaggttagtcaggactccaggatgcaccgcagacaccgaggcgatgatcctcggactcattaatagggagtcatttgtgactcaggtgc

SEQ ID NO: 112300 - DNA, 122 bp, Homo sapiens
aacctgccccctaccgtggagttcttggtgccgtgagttggagttcttggtgcctgggtgcgtccccaaggccactggtcttcagatctttcttacttgagaagaacgcctccgcctcctgg

SEQ ID NO: 112301 - DNA, 122 bp, Homo sapiens
ttagactctggaggctcctccccaatctctgtcattccctctccaaccaaatccacctgccgtcccagactcaaatgctcagccacctaactgcctgaggacccagcagttaatgagtttac

SEQ ID NO: 112302 - DNA, 122 bp, Homo sapiens
tggtcccagctcaagccgcagccaaaaccaaccactgctaggatggcaaatgcggaggtgcgtcggctgccgccaaaattcccgcccgtccccaggctctcgccttaccggattgccggcct

SEQ ID NO: 112303 - DNA, 122 bp, Homo sapiens
tggatggacctggagcttgaagctcagcagtccctgcatggggtctgattgtctttcattcggcgcatgcgtgctgcagctggcccttccccctgccctctgagttgctgcaaagagcagtc

SEQ ID NO: 112304 - DNA, 122 bp, Homo sapiens
cttcttcaagggcgcccactactggcgcttccccaagaacagcatcaagaccgagccggacgccccccagcccatggggcccaactggctggactgccccgccccgagctctggtccccgcg

SEQ ID NO: 112305 - DNA, 122 bp, Homo sapiens
ccgccctcaccctcttaaacccgcttcacagacctggctgaaactcacatccaggcgaggcgctcacgtgacccgttctaaacgcgtcatagggacacgtggttctagatacttctccccct

SEQ ID NO: 112306 - DNA, 122 bp, Homo sapiens
cccgacatattagatttgctgaattgcagtccatatttcgtagatatgatagctgaagcacggaatcattaggtaacttgcccaaagtggcattcacgactcataaatggcttaggatgtaa

SEQ ID NO: 112307 - DNA, 122 bp, Homo sapiens
ggctgccccgcagtagatgtcacccgccagccccgctgcaaacctttgctctgagaggggcgggcccgtgccctcaagcgcggggcggtctccgctgtgcagagactgaggcggcccctgct

SEQ ID NO: 112308 - DNA, 122 bp, Homo sapiens
taacccggtttccaggcctccaaatggaggctgtgacttgaggtcaaggttggtggcaggcgcggtgaggggacgcggggatgcttggcccggacccctctgggtgccgggtgccttctgct

SEQ ID NO: 112309 - DNA, 122 bp, Homo sapiens
ggggagggcccctcacgtttcacactgaacctcagctttggagggctcggaaagcagagacggggaggggctgccctgctggaaccctgcttcatggtccacctgaacatccacactcttca

SEQ ID NO: 112310 - DNA, 122 bp, Homo sapiens
atgaaagcatgacatcaaacggacctaatacacctaaatgcatttgaagctacttggtctcggttcttaccaacgatataatttaatttttttttccaaacgatgatgttgttgcatacctg

SEQ ID NO: 112311 - DNA, 122 bp, Homo sapiens
ccccactggtgctcacctctgttggccaccatgactttcttgatgggcttatactccaggcgccggacatttggggaggcagcgggggcggtggaggttcggcggattcccaggagcctcag

SEQ ID NO: 112312 - DNA, 122 bp, Homo sapiens
aaggaggagatggccaagggcgaggcgtcggagaagatcatcatcaacgtgggcggcacgcgacatgagacctaccgcagcaccctgcgcaccctaccgggaacccgcctcgcctggctggc

SEQ ID NO: 112313 - DNA, 122 bp, Homo sapiens
agtccagtccctgactcttttgctggagtgcctcaaaggcttccgagtgtctgaagcctccgtcctccttcggcccgtgggaatcggacttcagctggcggagctcttcctccagtctccgg

SEQ ID NO: 112314 - DNA, 122 bp, Homo sapiens
agatctcctattggccagagcagagaatgttcttacttatctccattgagcatgggtggccgtgatccctcaggataatgcaatttctcactgtctggaggtggaagctattgtcctgctct

SEQ ID NO: 112315 - DNA, 122 bp, Homo sapiens
cccacaattccttctaactctgtcccttgggtaagccccagagtctcctaagtgcatccacgcaggcttgttttaaggcgccatcgacgtgagcaaagtgcgcagtgaccttttctaaatag

SEQ ID NO: 112316 - DNA, 122 bp, Homo sapiens
gccctgctgttgcctctctgcgccgctgggcagcttcttccagggtctgcagacagccctcgcccattcccagcctaggccctggtgcccgtacctctcaagacggtgatttccaaccccat

SEQ ID NO: 112317 - DNA, 122 bp, Homo sapiens
cctcctgatgtcacggaaatgaagggcttcgcagaggatgtcccgcccgctcccttcagacgggcgtagctggcaccttcctgagatatgcctgcttgcccccgatttttttctccttgcag

SEQ ID NO: 112318 - DNA, 122 bp, Homo sapiens
ttcccagacggagtggctgccgggcggaggggctcctcacttttcagacggtgtggctgccgggtggaggggctcctcacttctcagacggggcggttgccaggcagagggtctcctcactt

SEQ ID NO: 112319 - DNA, 122 bp, Homo sapiens
aaagtggaccctgtgtgaaaacattgacgacgtggcaaatgagcagcaaattgatcaatacgaatgatcacgccccatgtgcatctcctcagcagccacaagagagacgaggtcactggagg

SEQ ID NO: 112320 - DNA, 122 bp, Homo sapiens
cattggtattcctggagcagcattatatcttgtattgtcgcataggtgaaggctctgatacggtcctgtaaaaactgggtgagatggtgtaggagacaagggccgaatgctaggaaaagaaa

SEQ ID NO: 112321 - DNA, 122 bp, Homo sapiens
tactcttgtaacgcagtgtgcaattgagcagttgctgactgctgatttagagttgaaatccgactatatttatgtctagtcttggacagtggagaatatttcagcctcattaattaatcggt

SEQ ID NO: 112322 - DNA, 122 bp, Homo sapiens
gggatctgctctggagaggagagggggacctgggagacaggaagcctactggtggggaggcgcagcctcgcctggctttacctcgagtgtcccgacctgggtctcggggagggggaagtgga

SEQ ID NO: 112323 - DNA, 122 bp, Homo sapiens
tttaacctccattagccctcagaccgaagccgtttagcggttccaggctgattggagctgcgcagttgctgtgcgggaagcacgcgttgcgcagcggctgggtggtaaggcggcgcgatgag

SEQ ID NO: 112324 - DNA, 122 bp, Homo sapiens
gactgtcagatggagtgggagtagccaccgggagggacccaggaaataaggcagggcaggcgctgatgtggcaagctggtaataaattttcatattcccgtgcaaagtcgtcacagcctgct

SEQ ID NO: 112325 - DNA, 122 bp, Homo sapiens
gggcgcgtcccggtttgcgttggggtgtgggacgaagcggcggccgcgggacatccccttcggtggcgaagcccgggtctgcccggggcctccgcggggtgcagagggctcccaacggcggg

SEQ ID NO: 112326 - DNA, 122 bp, Homo sapiens
gcacaaatctcgctttcaaccaacatggctgcgagtgcattggcaggtgttcacgggctccgcagcctgaagcccagagaccttccgggcagagcccaggagcagagaacccaacccgggct

SEQ ID NO: 112327 - DNA, 122 bp, Homo sapiens
actcccacccggtctccttcccgagcagctctgggctgcagagccagctgcgtgccatcccgctctgcttcagcgcacgctgaagacggcactaggacccagggaagtccccgagcggggtt

SEQ ID NO: 112328 - DNA, 122 bp, Homo sapiens
agatctgagcgctctcttggcatcgccacacccaggacttgctcgtgccgcaattccccacggaaacaaccgagttgaaacgagaagcttgctctctgggtgcagtagctagaaggcttcag

SEQ ID NO: 112329 - DNA, 122 bp, Homo sapiens
cggggtagcggtagccctccgctagggcgggtgggaagctggagtcggccccaggttgggcgggccccaggcggtagccggcccccagggacgggtacaattctcgtggatggtacatgttg

SEQ ID NO: 112330 - DNA, 122 bp, Homo sapiens
tgagctaggcttggttgaggctgggcaacaggcctggtggcagcacatgtagctatttatcggttttgctctatgtgtaatgtctgaatgccaacagacacactcagctcttctagacatct

SEQ ID NO: 112331 - DNA, 122 bp, Homo sapiens
agctgccgtcgccgctgccaccggtgccttgcgcgcttctccgctctgggggccgaaggacgcagggctttgacgtcccgagccctgcgccccaccccgtgcgcttttacgtcacctttcac

SEQ ID NO: 112332 - DNA, 122 bp, Homo sapiens
cagttgtccaccagccggcttaggactgcgcccgggatgggagaccagagcggctgctatcggtgcgggaaagaggggcactggtccaaagagtgtccgatagatcgttcaggccgcgtggc

SEQ ID NO: 112333 - DNA, 122 bp, Homo sapiens
ctccaggctggactcctaaagccgcagtgccccgtgcctgtttcctcatttggtgacacacgcagtgcatgcaagaagttggagtgttaccggaaaagggcttgaacccgtataaggctgag

SEQ ID NO: 112334 - DNA, 122 bp, Homo sapiens
caagctgctccgacctccggcgcccggccacgggaggcccctagtcagtcggcggctgtccgggacccgcggtcctgagagcaacgagaacacgtcccgtcaactccccagcccctcacgcc

SEQ ID NO: 112335 - DNA, 122 bp, Homo sapiens
cctctctggggaggcttccctgaccaagtgccatgggatcccgggatgcaaggaacttcccgtcaccctataatggccagtaggtccggggctcctcgcaagccctcccctggccgaggccc

SEQ ID NO: 112336 - DNA, 122 bp, Homo sapiens
tggggtgagatgggaactctttcctctggacggggttggcggcggggacgctgggcaggccggctgtgagacacaaaagagatacccttgacagctccgcatgcacagatgtaacgctgcgc

SEQ ID NO: 112337 - DNA, 122 bp, Homo sapiens
gtcctcccgtcgcagccctggaggctgcggggctgcagtgatttgagaggggtcaggctccggcgctcatggggctctggctgtgctgacaggccctccagccgccctcagcaccaagtggt

SEQ ID NO: 112338 - DNA, 122 bp, Homo sapiens
gatgatggtggctggaacacagttcccatcagcaaaggtagccgccccattgacacctcacgactcaccaagatcaccaaggtaggggtgtgtgtgggagtgggtgattcagctcaggttta

SEQ ID NO: 112339 - DNA, 122 bp, Homo sapiens
atcaacaggcgtagagagtacacgctcctatgtgtctgatttcttttgctcagccctaggcggggtgagcccccaactgctgcgtgtagctggagtcgctccttcactgtccccgctgcatt

SEQ ID NO: 112340 - DNA, 122 bp, Homo sapiens
gaccatggagaaaagccctccagtaatgtggcttttcctgtgcagtctgacagtcacccacgcctctcaaccccagcttaccaccttctgcaagttggcccacagtgttcagtgtcacacaa

SEQ ID NO: 112341 - DNA, 122 bp, Homo sapiens
ttcttctcggtgtctctaggactttgcccagcagctggccccgccccctccagcgctctccgcctagccccgcccccaggagatttccggcttctcggtactggcctagccgtaaagggctc

SEQ ID NO: 112342 - DNA, 122 bp, Homo sapiens
caataggtgctaaatctgtgagtgacaggaaacaggtttcggtacaaaaatgaatcaactcgccaactaatatccaactaccagaaaaacaaagactatattcttctactctaattctctgt

SEQ ID NO: 112343 - DNA, 122 bp, Homo sapiens
tggagggaggagggaatgcgggaggcgaggggagccaagagaaaggggtcatcctatacgcggttaccttcaccactcgcatgctcgccatcatgtcgggaccgagtgtgtggcacccgtgg

SEQ ID NO: 112344 - DNA, 122 bp, Homo sapiens
tggcaggctggaacaaaaccatgtggcaggtcatttgtccactgatacacagcaatgtatcggtggccttcgaaattaacctatgaaaagccaccatgtaatatgcatgtgtgatatgtacg

SEQ ID NO: 112345 - DNA, 122 bp, Homo sapiens
aggggcggggttaacaggctgagctgcggcccggcatgggtgggttacgggttttctccgcgaaagctccgggaaaagtgacctgaaatcgggactttcccgctgtcagctccaagcaggac

SEQ ID NO: 112346 - DNA, 122 bp, Homo sapiens
aggagaagtgcgtccgagacgccgcgcggtgatgctcctgaaaacgtctgcccggcgtagcgggaacccagcatgattttcagggtagtaaagtgtccctgtattttacttacagactgtcc

SEQ ID NO: 112347 - DNA, 122 bp, Homo sapiens
tctatcagctgcacccctgggtagagacacaaccttggggaaggcctcagccccatccctcgtacagcaggaatgagaacagccctgcctgttgggaagcttgagggaggctatggacgtgc

SEQ ID NO: 112348 - DNA, 122 bp, Homo sapiens
cccacttcgaagtcggagcaagagccttctctgtgtttgcgccccttggccgctggggggcgccagagacgcggcgccctttcgcgttctggaacgtgactcctcccctccatgggcagccc

SEQ ID NO: 112349 - DNA, 122 bp, Homo sapiens
ggaggtcgaggcagtagtgagctgtgattgtgccactgcactccaacctgggcgacagagcgagaccctgtctcgaaaataaataaataagacctgagaacccagtatgggaatggccctga

SEQ ID NO: 112350 - DNA, 122 bp, Homo sapiens
ggtgaatgtttccccctccaagaaggggcccttgcagcaccacaacctgcttgtctgccacgtgacggatttctacccaggcagcattcaagtccgatggttcctgaatggacaggaggaaa

SEQ ID NO: 112351 - DNA, 122 bp, Homo sapiens
aacctccaaatgcagtttctgtacaaatgaacttgcttccaattaaggaaaccttttgtccgcagggagagacgcactaggcctttcctccttttgtggctgcagtggagccgccagccgct

SEQ ID NO: 112352 - DNA, 122 bp, Homo sapiens
atcaaccaaagaaagggcagacatggccctattaaagctaactaatgtcggcgtcacagccgtcctggcactcagcgctgtttctgtggttgggcaggagaaaccgcagtcttgccatcatt

SEQ ID NO: 112353 - DNA, 122 bp, Homo sapiens
gttaaaaaaaaaatcagtaacacaattcagctatggttaccaagaatttaagtgctcccccgcccactgtcacagattccccgcccttctgttcacttccgcaaagcctgagtactttttca

SEQ ID NO: 112354 - DNA, 122 bp, Homo sapiens
tgcacgtgtcccttgtatgccaagtatttatattattcttgtttcgtgtactttgaactccgacatctgcaacatatacttcttgattatacgcatcttgattataaaacaaccaaatgcat

SEQ ID NO: 112355 - DNA, 122 bp, Homo sapiens
cgaatcttaaccggggccccgggtgtttgcagacccaaataaagccgccttgggtctccacggtgtcctccagaagctgctgcctgagaactctgagcctcagctctgtcttgcttcgggat

SEQ ID NO: 112356 - DNA, 122 bp, Homo sapiens
ccggacagggcacgggaaatactttctgggtcctgcatacgaacgtgggtttgtgctggccgctgagatgggacatctgactaaagttggagaaaagaaggctcggggaggggaggggctgg

SEQ ID NO: 112357 - DNA, 122 bp, Homo sapiens
accgcaagggcaagccgcccaatgtgtcggtgttcgagcccaaagccagcgccgaggacccgttcttcaagcacaaatgccgcttctgcgccaaggtcttcggcagcgacagcgcgctccag

SEQ ID NO: 112358 - DNA, 122 bp, Homo sapiens
aggtgagagtatctgcagacaggcctacagcccacaccagaaaactgggaatcctcaactcgccccactccctgatccctcatcatccactgaatccatgctgccactcccaccatcagccc

SEQ ID NO: 112359 - DNA, 122 bp, Homo sapiens
ggtgctatggcggcatgtttgttgagctaggaggactcggaacaaaattagcttctgcaccggctgtgctggagccaggcaggccgctccggtgtggccctgtttttcctggtttgtgtccc

SEQ ID NO: 112360 - DNA, 122 bp, Homo sapiens
tgaattgtagaggagtcccctttgtatcgaaacatttacagcttctattccaagagttaacgtggcgaattttcacaatctgtttgttgttctcattctttcaaccttcttttgcacttttt

SEQ ID NO: 112361 - DNA, 122 bp, Homo sapiens
atgtaggcgggaccccggatggcctggcgacggcccttctccctcagcgttgtgtgccggcgctgcatgtttttgaaggtgctgttcctcaacctatgggacaaggcaaagatgccctgtta

SEQ ID NO: 112362 - DNA, 122 bp, Homo sapiens
tcagcaggtcagggggaaggccagacactgcattatacaaatacaaaaaatttctcagcccgcaagacctagagatcaggtatcacattttcgaaaaggaaaaacagggagggaaagaagtg

SEQ ID NO: 112363 - DNA, 122 bp, Homo sapiens
ccactacaaccccgaggcccaccactgccaccacccgccgcacgaccaccacccgccgcacgaccaccaggcgtccaacaaccacagtccgaaccactacgcggacaaccaccaccaccacc

SEQ ID NO: 112364 - DNA, 122 bp, Homo sapiens
ttcactgtttagaaaatagtgtcaacgccctgccttacaccctcagggcagctcctggggcggggcggggcggggcggggcccttctctagtgagaaaggaactggaggcctagagaaaggg

SEQ ID NO: 112365 - DNA, 122 bp, Homo sapiens
gcccccctcctctgcacgagccaggtcccgcgatcagccggagaatgcaagatggaaatccgaatcaaagggcagcgccggacggaggtgcagaatcggccggtcccagatgctggcggcgg

SEQ ID NO: 112366 - DNA, 122 bp, Homo sapiens
cccggaggccccgagctgggcgacagggcggcggggggcgctgtctgctggagtccctggcgcgccagccgtcggctgggctgcggcacggcgggccgggaggggactgggaagtcggtctg

SEQ ID NO: 112367 - DNA, 122 bp, Homo sapiens
tgccaaccaccacactcacttctctcaaagcagttggctgttctatgatgataaggttgtcgttgctctacaacctatatgagtgggggcctctgtccagaaggcatgtggggcaaattacc

SEQ ID NO: 112368 - DNA, 122 bp, Homo sapiens
cgatgggccgcccctcgcgggcccgaccgggatggttacaacaggtttatgctgcgtgagcgatggcgtttgcatggctgacgccgagcaccgctgggacccaacagtgttgaaaacgagat

SEQ ID NO: 112369 - DNA, 122 bp, Homo sapiens
tgcctctgagttgacaagataccataagatactgtacatgaggctgggtgcagtggctcacgcctgtaatcccagcactttgggagggtgaggtgggcagatcacctgaggtcgggagttca

SEQ ID NO: 112370 - DNA, 122 bp, Homo sapiens
tttaaagatagatgaaatacaagagttccctgttccgaactgcacgttgcagatcgtttgcgtcctccgcggggcagagcgcagggcgggtaggtggacgggatgatccccccacaccccgg

SEQ ID NO: 112371 - DNA, 122 bp, Homo sapiens
cagatcccgcactggccaaagggctccggtccccagcaggctcaactgcgcacaggagctcgggagccagagccccggccctgggcttgcagagccccaccaacaggcaccgcaaccgctgc

SEQ ID NO: 112372 - DNA, 122 bp, Homo sapiens
taaataacacagcaccctcatagcccagagagacagttccaactattatgccaataaacccggaaaagaccaaatccaatatgacacatatttcctgtttcgttttgatttcatgccccctc

SEQ ID NO: 112373 - DNA, 122 bp, Homo sapiens
agaactctgtgctgaataaacagaaagcttctgccaaacaagcatccgtgtgtgtgcgcgcgcacgcagtttgctagagcagctaatgcaaatgaatagtttgactctgagaatggagatca

SEQ ID NO: 112374 - DNA, 122 bp, Homo sapiens
ggagaacacggaaggagcagcaaggcgctgcccggcatctgccgccaacttccccgtcgacggtctgattcaaatgctccctgttttccatgtagacttggagagaaactgcgccaggaaaa

SEQ ID NO: 112375 - DNA, 122 bp, Homo sapiens
aagaattttttttaataagaaattttgtagaaccttctataggcagtcgttttacagcggcgaagaacggaacccggcagatgacattgaataaatgttgagtggacaactttgttcttttc

SEQ ID NO: 112376 - DNA, 122 bp, Homo sapiens
tgggatttcttctttccatccctcagctagcgggtcgtattatcaccatcaccaccagagcgtctgtcaggatattaagccctgcgtcatgtgaacggaaagaggccaagcgatggccgctc

SEQ ID NO: 112377 - DNA, 122 bp, Homo sapiens
ctcggtgacgtccgaatgcaggtcgcccacgtacagggaggccatggggtagctgctggccgcagcgttcatctccccgccccccaccaccccgagccccgccaggaggacttcttatcggg

SEQ ID NO: 112378 - DNA, 122 bp, Homo sapiens
cagcctgaagttagtactaaggcaccagctcttgtcatacttttttctgcactgtgcacacgatcgtttacttaataaacataaattccaatcacaaatatttaagatagaactcccccagc

SEQ ID NO: 112379 - DNA, 122 bp, Homo sapiens
tcctggtggaagctgaggtgcctgattaaatgcctccctttctaggcagcagcccagacgcggcacagagagggcctgggagcttgctgcagcttcaggtgagtttgttcccaagccctgcg

SEQ ID NO: 112380 - DNA, 122 bp, Homo sapiens
taaagccagggcggaaggcggcggcgccctgtggctgcccaggggcctgggctgtgtggccggatcagagctgtaaggcacaaatccaagtgcgcgccgccgtggaaacaaagcccttccct

SEQ ID NO: 112381 - DNA, 122 bp, Homo sapiens
ccggagtccggctgaaagcaaaggttctcgaggctaactgtagcccccgcgctggtaacccgacacccctttcccagcgccgcacgcggggccgggagcgggcgcgccagggcagggactga

SEQ ID NO: 112382 - DNA, 122 bp, Homo sapiens
accccttcctgttcggggtcccgggaccagcccccgcctgggccctcacctggacccccacgttaggccttgggactgcactcaggcccgagatcacccaggctggacccagactaggactt

SEQ ID NO: 112383 - DNA, 122 bp, Homo sapiens
aaaaaggaaagtggcctacagaaaacggaagtgaggtacagaagcgatccggtcgtttaccgctccgcatttgccttatgcaacctcgtggcaggccagttttccctgacaaacacacaaac

SEQ ID NO: 112384 - DNA, 122 bp, Homo sapiens
attaaaattacttcaccccctatggttatctgtgggcgcttgtaacaaattgtttgctagcgctgagtgagccagtgctgattggccattgggaactctaacaaactttaaatttcagcaaa

SEQ ID NO: 112385 - DNA, 122 bp, Homo sapiens
caaaatttaagcaggtgggagcaaacaccaacagccacacgacctgcatgtgatcagcctcgggtgtgtgtgggaagggacagcaaggggacacctgacagacctgagggcagcaggccggt

SEQ ID NO: 112386 - DNA, 122 bp, Homo sapiens
ccagagttgaaagggagactcccgtcagatcatggactagctaatgttaaaaggacttaccggctggtagctccgttgcctcccgcctgcccgcgctcggtcctacaatctgtctccagctc

SEQ ID NO: 112387 - DNA, 122 bp, Homo sapiens
gagagggcgggaaaagcagctttcagcctattggaaaatgggttctcaccctagcagtggcgacaggaagatcccaccccgctaacaacatgcttccgtcttcagtttatttacaactggtg

SEQ ID NO: 112388 - DNA, 122 bp, Homo sapiens
tttcacatggagcttagaggacagggcgagggtccacactctccttactgcgctctgccgcggtcctgccccgctgtgccctcgcggcccccttagagccactgccggcgcacgcggtctgc

SEQ ID NO: 112389 - DNA, 122 bp, Homo sapiens
ggagcggctcctcgggggactccggggcctccgtgcccagttctgtggggctgggggtctcgtccacatcctcctgaggagctgagagaagagatagaggcataaagggctgctggctttgc

SEQ ID NO: 112390 - DNA, 122 bp, Homo sapiens
tagaggtggacactcaggtcattccagggctcctcagtggctgtgactgaagcttttgtgcggctctacaaggcggggttgctgtaccggaaccatcagcttgtcaactggtcatgtgcttt

SEQ ID NO: 112391 - DNA, 122 bp, Homo sapiens
tatatccccctgctgacatgtcacactgtgttatagacctaaataaccctgttcctccgacgtatcccaaatcccacccaacttgtgaactcctacttatctgttgagccccaacgcaaggg

SEQ ID NO: 112392 - DNA, 122 bp, Homo sapiens
ccccttcaacaccctccaattgctgaattttttccttaggggcattgtgacatataagtacggacctcaggttaaaaactcttgctctaaaatttggtcaacctaccccatttcttttcagc

SEQ ID NO: 112393 - DNA, 122 bp, Homo sapiens
cccctgcccaacacatagtaacagaaccaaaacacaaatttgcatcataaattttattcccgatgcgggacagattccttccatccccaaatgaatcacatgctgccctggaaagacctagg

SEQ ID NO: 112394 - DNA, 122 bp, Homo sapiens
cgggaccgtggatgagtgacagttcgactttccaataggcagagccctaggacctgcccacgtctggttcaggggctagaaaagagcgtcgatgccggcggcagtgatgagtcctaggaggc

SEQ ID NO: 112395 - DNA, 122 bp, Homo sapiens
tgtcatatttgctcagaagaaccgccaaatcagagagcacagaagatttcattggaggagcgccttcaacagcaactaatcctgtcatactgaaagaaaattgtaaatgttctctccagaaa

SEQ ID NO: 112396 - DNA, 122 bp, Homo sapiens
gatgttctttaaggggtttccacctgagaagcccccaggcaggggtccccggctgccccccgcccccaggctgccccccgccccccgggcagccatggccaccgctgctgcttccaccaggc

SEQ ID NO: 112397 - DNA, 122 bp, Homo sapiens
tacaaaaaattagtcggacacggtggcgggcgcctgtagtccagctacttgggaggctgacgcaggagaatggcgtaaacccgggaggcggagcttgcagtgagccgagatcgcgccactct

SEQ ID NO: 112398 - DNA, 122 bp, Homo sapiens
gcctctcatgcagccagtagtgataagcaagcctgggaaccatgagctctccttggatgtcggaaaatagcgacagagggacacccagtcgcccgggaagaccagagccagagcggggaagg

SEQ ID NO: 112399 - DNA, 122 bp, Homo sapiens
tgcctgacacagcatgtggagaaggcctcagcctctggggtcttctgctgccccctctgccggaagccctgttctgaggaggtgctagggacaggctatatctgccccaaccaccagaagag

SEQ ID NO: 112400 - DNA, 122 bp, Homo sapiens
ccatctgtccctccagaccctctctccactgcaaaagcctgctacatcaaagagctccctcgtcccctggcttcctgttgtgttcagccaacaggcattgctgccaggagggaagcagggag

SEQ ID NO: 112401 - DNA, 122 bp, Homo sapiens
ccatcacctggggaaaggtaccagagttgagccggggcgcccgcaggcctgtctgggcctcggggtaaggcggcgctggccccgccccctgcccctcccgccgcgagtggcctcgcgtggtc

SEQ ID NO: 112402 - DNA, 122 bp, Homo sapiens
aaggctccaacacctttgagctgtaactacctgccacctacgctgctgtgaatacccagacgaagtctccagacagaactcccaggcgggaacacgggggcagctacgtggttttactcaac

SEQ ID NO: 112403 - DNA, 122 bp, Homo sapiens
gccttacgggcagcacaggggccctgcctaggttggcccagacgctgttctaaacctccccgaggtgaccttgctgcctttgtctccatgagcctcggagtatatcctgaattttgtatgat

SEQ ID NO: 112404 - DNA, 122 bp, Homo sapiens
gctggagcacaaagacagcgattgttacccaataagcagtagtcacacacttctaccaatcgccttaggagggctggttaccatggaatccaccatctgttcactccccaccggaatgtgat

SEQ ID NO: 112405 - DNA, 122 bp, Homo sapiens
aaggcagcgcggtcaccagcaacaggtcaccggcgacaggtcagcagccacgacaccggccggccctgcaggctgagacacagagagacggttgagaccccaggccacccagggagaggacg

SEQ ID NO: 112406 - DNA, 122 bp, Homo sapiens
ctgccaggccattccatatgggaccacccactgggaacagctccggggctgggggagcagcgccccatccccaaacaacacggggcatgaatgagccctgggtggggaggccccgcctgcat

SEQ ID NO: 112407 - DNA, 122 bp, Homo sapiens
gggtcagggaggggacatttacttctctgcctcggctaggcgctccagcttgtagcgctccgcttccgctggcttccgcacccgggcctccagctccttctcccgccgggcgatctcctgct

SEQ ID NO: 112408 - DNA, 122 bp, Homo sapiens
gtggggagatgggctggaaggggcaaatgtggctagaaaagggcaaagggccgatccttgcgattatggaactattcagcaccgcaacacggcagggacgggggcccccagtggtgaacacg

SEQ ID NO: 112409 - DNA, 122 bp, Homo sapiens
ccggggtcgccccctgggctcacctgggctcagtctcctgggctcagggttcagcagctccgggctctcctccgccacctgggaggagccttgagtaagtcccgcccggaagtggaggagga

SEQ ID NO: 112410 - DNA, 122 bp, Homo sapiens
tattctagatttgcagatgaggaaactgagtcacagttaaatgatttgcatgaggttatacggctagtaagtagtagagctaacattcatattcatgtagagtgcactgaagtttccgtgca

SEQ ID NO: 112411 - DNA, 122 bp, Homo sapiens
ttccacccttctcaaaagaagtaagacagcagaatgctgctgccctctatttgatgcaaacgtcacatggatgagtgctaaaatgacccaaaagcagcattcatgagcggaaattctctgaa

SEQ ID NO: 112412 - DNA, 122 bp, Homo sapiens
cggggtcccggctcagggtctgactgaagtggctcccccggggcgcaggaaggagcttctcgggagtggcgcacggcctcctgcctcgctgggctggctgcggggactcccctctcccccaa

SEQ ID NO: 112413 - DNA, 122 bp, Homo sapiens
attagatgtgccaagtcagctatgtgaggctacagaagcactctctatttacaaaatattcgtatgcgttaacacattaaaatgtatttgtaaatcaattagatgtcataataaaactcaat

SEQ ID NO: 112414 - DNA, 122 bp, Homo sapiens
aaaaaaaaaaaaaaaaaaaaaaaatcacgcatacgggactcctggaaggcagcttctcaccgtcactgccgtctgccctgctacatgtgacggctgtgtttcacatgttcaccggtgtgtac

SEQ ID NO: 112415 - DNA, 122 bp, Homo sapiens
ctcttgtctgcctggaactgaaacttcctactgaaactgaaccctccaaccagggagccccgagtatcggcagcagtcagcagtgcccctggacggagagacccacgcaggcgaggacgtgg

SEQ ID NO: 112416 - DNA, 122 bp, Homo sapiens
ccaagtcttaaggatgctagaacactcaaatcaattctctctgctgcaagcaaatgtaaccggattgctgcaggggttcgactatgattttccagagtcttagcatcctggatgctacaagc

SEQ ID NO: 112417 - DNA, 122 bp, Homo sapiens
tccgcccttagttgtgtggagtgtggtttgttgttgttgttgctagtagacagtttgggccgaaatttttccagtataacacttggtttgtttctgctccaggaagttaacagaactggggg

SEQ ID NO: 112418 - DNA, 122 bp, Homo sapiens
gtgttccacatcacagctgtggtaagaaagaggagtgagagaggggctgggagtgaggcacgcagaaccatggagctgctaaggggagatgtctgtctgcaacctctaggacttggcaactg

SEQ ID NO: 112419 - DNA, 122 bp, Homo sapiens
caggaaccagaggccacatgtggctgctcgtatttaagttaattaaaatggaacgttggccgggcgtggtggctcacacctgtaatcccagcactttgggaggcggaggcgggcagatcact

SEQ ID NO: 112420 - DNA, 122 bp, Homo sapiens
cctcgaaggtgggccgagcaaaggagagtgacgcaagagtgggctgtgtcctggatgctgcgagcgcctctgcctccttgagaatgagcccattagccgcacaaattcgcagcaggcggctg

SEQ ID NO: 112421 - DNA, 122 bp, Homo sapiens
tttcagtcaagatgggggtgagatcgcttttcttcctatgcatttgtaaacatctgatcccggatctctgctgcggatgctggaagcgatggggcggtggggcctgtcttggctagtgtggg

SEQ ID NO: 112422 - DNA, 122 bp, Homo sapiens
gtatggaataggaaaagcatgaaacccaacagcaagcaacccacctttcccaacacggaacgcctaagtaaataccactgagaaaaagctgctgaatgggccaggaaacagggcagaggaag

SEQ ID NO: 112423 - DNA, 122 bp, Homo sapiens
tcactacagaacagcaatcagtattttattttgcggggagagattacaacccgcccaaatcgtagaaatttccacccaacattgtgatttggcccaaaagctaaataatatgttcaagaaaa

SEQ ID NO: 112424 - DNA, 122 bp, Homo sapiens
agcccacgccgtcttggcacgagccaccgttcaggcatgggtctgcggacaggaggaaggcggtctggtcacctaccttgcccccattagcccagtctgactgggatatgccttggattgag

SEQ ID NO: 112425 - DNA, 122 bp, Homo sapiens
caagataatgttgctggaaagagagggtcctgatccagaccccaagagtcttggatctcacgcaggaaggaattaaaggcaggtcacagagtgcagcgtgaaagaaacaagtttattagaaa

SEQ ID NO: 112426 - DNA, 122 bp, Homo sapiens
aatgagatacttctccacaccctcaagaatagctacacatttgaaaaaaacaaaacaaaacggggaaataacaaatatggtgatgatgtgaagaaatacattgctggtggttcatataaatc

SEQ ID NO: 112427 - DNA, 122 bp, Homo sapiens
aaggttagagactgtggaagtgctggcttctgcgagcacacagcgatttgcaagtgaatgcgaggggagggcgcatccgagaggagggctttgcttgaaaggcgtcccctcccccgcagggc

SEQ ID NO: 112428 - DNA, 122 bp, Homo sapiens
ccagcgccgcgcccctgccgcttcatctcgcagggcacacgagcagccccagcagctccacgctccccatgcgccccagcaggttctggtcctctctgctgggacagattaggacccttgca

SEQ ID NO: 112429 - DNA, 122 bp, Homo sapiens
attccttgcctgtttaagctgagcgtgacttgtgtcctgagtaggacagagggcattttccgggcaggacagactcacacatatcgttcttaggaaaatgaattgtttgaattatctggatg

SEQ ID NO: 112430 - DNA, 122 bp, Homo sapiens
tcccctgtcattccatatcgtcttgcactgacatgattcactcattgatattgcctgttgcgttcctatggcctttgagtttgcagactgtgtatggggagtaccaggagaaaatactcatt

SEQ ID NO: 112431 - DNA, 122 bp, Homo sapiens
ggcgagcagttcctcccagctgcactcctggactagtcactgcctatttgcagcagggatcgcaaaggcgacctcagttggatagggcaaccacccaggcccaagtttatgacctcttcccc

SEQ ID NO: 112432 - DNA, 122 bp, Homo sapiens
tatgtggtgctgatacagaggaaaaggactgacagtagccatgttggacaactgacatcccgaggtcccaccagcaaaatgacattagtaggcttaaaactgaagatctaagctggggcggt

SEQ ID NO: 112433 - DNA, 122 bp, Homo sapiens
aaaacggggtgggggatggaggtggggacgagaagtttccgaatgctgagttcatttggacgaggtgaggagaactagggtcctaacagcaggtccagaggactctcgagataggtttagag

SEQ ID NO: 112434 - DNA, 122 bp, Homo sapiens
tccccgcagggcagggctccggacctgcagcccgccatgccttgagtcccaccccgccttcgctgttggctcctgcacggcctgaacctccatgaacgaacggcgccccctactccaccgcg

SEQ ID NO: 112435 - DNA, 122 bp, Homo sapiens
agacgggaaagccatgaaaaactcatgataaagaatgttgcttctttggttaataacagtcgagtatcgggtgttttttttatttgaaaacatacatagattttttaaagtatgttttttgt

SEQ ID NO: 112436 - DNA, 122 bp, Homo sapiens
gaagagcaaagttggtgaaaacaagaatatgttagaaacgatgatgtaggaatggaaaaacgacaacgcctacctgcagaaaagtcaactagtaaaaatgtgatttttttttttgtattgat

SEQ ID NO: 112437 - DNA, 122 bp, Homo sapiens
cagcccgagcctgagttgaaacctggccctggaacaggaagtgcttggaagcttccctgccgttgccgtggtgctcacaaccacccaggaaaccaaggcaagctccccctgtcaaagcacct

SEQ ID NO: 112438 - DNA, 122 bp, Homo sapiens
gtttaccaggagcttgcatgctttgtctcagggacgattagtgacacagccaggaaggcacgctatccccattttacagatgaggaaacggaggctcaggttgggctggtgactaagggaag

SEQ ID NO: 112439 - DNA, 122 bp, Homo sapiens
gaataaatctataataggtattacttagtgtttacttgtgtcttaaggaaataatgtgtacgtactagttgattttccttatgtttttacagaaaaacaaatgggtgtttaacttaaaaatc

SEQ ID NO: 112440 - DNA, 122 bp, Homo sapiens
ggccagtgcccctggatcttgcctctgctccgacgccgttggggaccagttaggcgacagcgcccgcccctctgaggagacacgaaggtggttccccagccgctcaaatttccggaccaccg

SEQ ID NO: 112441 - DNA, 122 bp, Homo sapiens
gacccgcagcaggagcagcagctgttccggcgcctggaagaggagttcctggccaatgcccgggcccttgaggctgttgctagcgtgacccccactggaccagcccctgacccagctcgggc

SEQ ID NO: 112442 - DNA, 122 bp, Homo sapiens
ctcagggctgaagaagccttgcccgatttgttcctgtccatggggacagagtccactttacgctggcaggaggtgagtcacaccacctcacacttctggggaccgttccctcacctctagtc

SEQ ID NO: 112443 - DNA, 122 bp, Homo sapiens
aggaaaggaaaaactgatgaagttgcaggagttccacatattttcccaacctgcaccatgcgtgtagttcaaggccagaccaatgggtcctggatccctatcttctacctccaattctttag

SEQ ID NO: 112444 - DNA, 122 bp, Homo sapiens
ctgtcagggtctgcaaattaagccagccttatggaaagtggggaagtttaatgtttaaaacgtcctgattgaaatgctcacatgatgaaaaagatgggcttggtcacctgaaagggcgtgtg

SEQ ID NO: 112445 - DNA, 122 bp, Homo sapiens
tcccgctctctcgcgagtcctgtgcaggcccttccagggggagggggagggggaggggggcgcggagggaattgctgcaatggagctccaagacaaccctgcccaagtgaggcagtcggtgg

SEQ ID NO: 112446 - DNA, 122 bp, Homo sapiens
atactagaactgggacagtaaatataggagccaggataatataggtccagggggggccatcgtgtctccagaaccagaactggaaggtccaacttccagggggagaaaggaagagtgtcctt

SEQ ID NO: 112447 - DNA, 122 bp, Homo sapiens
cactgagcccgcccagttcgccggcgccgagcgcagggcccgcccccatcccaggccccccgcgcggccccacccgctgccacacacccagatatttcaccctgcccactctgcccgacctc

SEQ ID NO: 112448 - DNA, 122 bp, Homo sapiens
gtggccgcggcggtgggctgtgccggagtctcctccctttggtccgctgcaggttggtggcgggaggaggggacagctgcgggcgcggggagggggcgccgcgccgcgggggccatggcgga

SEQ ID NO: 112449 - DNA, 122 bp, Homo sapiens
caatatctcaggaaaaaatagacaacctcccagttgccacagacatgtactgtaagcagacgtcctcctagtacttcttaactggctcttctggaaaattctcactctctcagaagtgaata

SEQ ID NO: 112450 - DNA, 122 bp, Homo sapiens
cctgtagtggactgctgggacgggcccgatgggaagccggtcatctaccatggctggacgcggactaccaagatcaagtttgacgacgtcgtgcaggccatcaaagaccacgcctttgttac

SEQ ID NO: 112451 - DNA, 122 bp, Homo sapiens
gaattaactgctgtgtcactactctgtgctgggtaagaaaaaggaaaacaatcgctgaaccggtttcccagggtttgtaaaagaaaaccatcaaagccaccacctcatttcactttatttcg

SEQ ID NO: 112452 - DNA, 122 bp, Homo sapiens
cagggccagcagggctggccggctgctccgagtgcagggctcgccaagcccactcccacccggaactccagctagtccgcaagcgccgcacacacccccggttcccgctcacgcctctccct

SEQ ID NO: 112453 - DNA, 122 bp, Homo sapiens
cctaaggtgaaaagcaggaacggggttccttctcatttctttgtaaggcagagccaagctcgtgggtgtccccactctgtccctgaagggatagtttctctgtgtcatctttgcctcctctg

SEQ ID NO: 112454 - DNA, 122 bp, Homo sapiens
agcttctcgcctccagactgttccggctccgccgcctgaaattacctgctctgggggaggcgcggcgcgcggcctcatgacggaactacaactcccatgaggcgctgggcccacgcaggcgc

SEQ ID NO: 112455 - DNA, 122 bp, Homo sapiens
ggaggcgcagaggggctgagagccgaggctgggacgccttcatggactggttatcatggccgcgttgcagacgaccccaacactgagccgcgtccagcagcaaacgtgcacctcatccccaa

SEQ ID NO: 112456 - DNA, 122 bp, Homo sapiens
ccccgacggggtgggggggcgtggattcctccaggtgggtgtggggggtgtgacctcgcacggggaggacaagctcggaggcggcagggaggtgagcggggcggccggccctggcggtcccc

SEQ ID NO: 112457 - DNA, 122 bp, Homo sapiens
cggtgcagagtgaatgcagtacagagccaactacagccaggccacatttcattcctttctcgcatgttgtcacattgccgttgttttagattggacaaacatcttctcacggaagttctggg

SEQ ID NO: 112458 - DNA, 122 bp, Homo sapiens
ttccaggaactggctctgggccaagagcagtagaaatcactgggtggtccgcacagctcgcgggcatctaacctgcttcaaggctcagggctaaaagggagccagggcccttcctggaggcg

SEQ ID NO: 112459 - DNA, 122 bp, Homo sapiens
tggactgccccttgctgggccagcaggtcccttcctctgcttctgagggacacctgggaccgggtctgctggtgaccatgtgcccccatggggtaatgccggggtttggaggggggtgggtg

SEQ ID NO: 112460 - DNA, 122 bp, Homo sapiens
gaagtgcagtggtgcgatctgggctcactgcagccttgacctctggctctcgggctggagcgattctcccacctcagcctccagagtagctgggactacaggttcatgccaccatgcccggc

SEQ ID NO: 112461 - DNA, 122 bp, Homo sapiens
taaggagaaaatgaatttattgaatgggatgtcaagtagctcacaaaattgagaagttgccgtgggactagggtgccaagactgctgagattctggcagaggcactgccattggcacccctg

SEQ ID NO: 112462 - DNA, 122 bp, Homo sapiens
tgttatttgccttttgaattctcattatcttaaaattgtattgtggagttttccagaggccgtgtgacatgtgattacatcatctttctgacatcattgttaatggaatgtgtgcttgtatg

SEQ ID NO: 112463 - DNA, 122 bp, Homo sapiens
tgtaacttagtaattaaatcccagatgcagcaggctcgttctggttacctagcagcatgccggtgggcagctgagccgaggggtctttcatccagtcgtcattggccagttctatcacagcg

SEQ ID NO: 112464 - DNA, 122 bp, Homo sapiens
cgcgggacctgggaccgccagtgaagaacccctcctgggctctttaacgagcagcagatgcgcatgctgcttctctccggcaggaaagccttctaagcccggcgtgctcgggcacccgaggg

SEQ ID NO: 112465 - DNA, 122 bp, Homo sapiens
ggtaaaaatctaacagaaataaggcaaacctttatcagaaatcaggcaaaaacaaactctcgcatgtgattcagtctaacaaatatgacaaatatttctcacaagcatagaaagatgcaaat

SEQ ID NO: 112466 - DNA, 122 bp, Homo sapiens
ccgacaatggcctagttaagggcacccacccaatgacgccccggctgtgcatacaggaagcgtcgttgccaaccggacacattgctgccagaaacaactgagtgtgttttggagacgcctcc

SEQ ID NO: 112467 - DNA, 122 bp, Homo sapiens
agggtccgctccaggagggtgtgggttccgatgcctgggtcctggaggtccggggagtcgcggagggacctccctccggtaaccgacggattggggacaaatgctctgcccagtctgatccc

SEQ ID NO: 112468 - DNA, 122 bp, Homo sapiens
tggaggggacaaaggcccggcatgccatgcctgcttccctgcccccacctccaggcctagcggcagatcctggacattgacttcagtttggagccctgctgggggctccggcttacagaggg

SEQ ID NO: 112469 - DNA, 122 bp, Homo sapiens
ccctaaattatgatgactccaagtccaagcccacccttcccaaagattgggaggttccgccgttcccagaggctcctcctgcggtgctcccaagacttccatagaccatctggaccagtagc

SEQ ID NO: 112470 - DNA, 122 bp, Homo sapiens
ctgctccgcccccagctggcctgtaattggcgcagtcggcccaaggggcggctgttcaggcgcgggtgcgcgcgcagctgctgtggccctgcttggtgcgcccgctgtcaccgccatggctg

SEQ ID NO: 112471 - DNA, 122 bp, Homo sapiens
ctgtgtaactgctagctccacaggggaggcaaactacagatcttgctgtttgcataatgccggctgctttctcagaaagtgctgatctctaggccctgggatccgcagctgtggcacaactc

SEQ ID NO: 112472 - DNA, 122 bp, Homo sapiens
ttcgcatgagtagcatgaacgcatttttggctgagacacagaaattcttcccgtagatggcgatctgagggaggtggaaaggtcagagttaccaaggcgagctgcctggaccaggatggggg

SEQ ID NO: 112473 - DNA, 122 bp, Homo sapiens
ctgccttttgggactgaattttccaggccagctgccttacaagacgatggggtggcaatccgcttgtacttgcttcttagaatcccactcatctagaatgagtctttccataaggctggccc

SEQ ID NO: 112474 - DNA, 122 bp, Homo sapiens
acttagaatacaagaaaaagtgatttcatttctttcatcgtagctccaagtgtgctgtatcgtgtctgaaatagataaactgctctaagcagtttcaagtttatctcaatctctgtccttct

SEQ ID NO: 112475 - DNA, 122 bp, Homo sapiens
gtaggtaaacaaatgtttgtcgaataaataaaagaacacctgaataagtaaatgaatgaacgggtaagtgattttggaacggacaatttggggtttggaaagagggtaaaggaggtgaaagg

SEQ ID NO: 112476 - DNA, 122 bp, Homo sapiens
cctccgtcctcgcccggccgcggaccagggactagggtgcctaagcgcgccaggcttggccggacccgcagctgaactgacccgcagctgaacttccccgccggacagaggccgcaaggttg

SEQ ID NO: 112477 - DNA, 122 bp, Homo sapiens
actgctggagttgcggggcttgcctggggtggggcggggcggcctaggggtggggcggggcggcctaggggtggggccgcctaggggtggggccggcggccctcgggatgggtcctgccagg

SEQ ID NO: 112478 - DNA, 122 bp, Homo sapiens
tgactgacaggcgccacagtatcctacagacaccacggtgaccgacgccatggtgaccgacgccgcagtgaccgacaccatgtctgtctccaccctggatcccctgcacgcccactctcttc

SEQ ID NO: 112479 - DNA, 122 bp, Homo sapiens
ctaaaatgtttaccctttctcaagcagaaattggactatctctgggtgcccattccttgccgcatacattaaagcagtccagccattttcagaagtttcattgagaagagatggagaatgac

SEQ ID NO: 112480 - DNA, 122 bp, Homo sapiens
tttcgtggtctgcttctttcctgtgtgaccttgcaaaacgggcttgacctccttatttatcgacctctttatcttcttagtaaattgaagatattagtcgtactcatacacagagtcccaaa

SEQ ID NO: 112481 - DNA, 122 bp, Homo sapiens
gcccctgcgcctcagccccagtaaaggctgttggttcctcccggcgcagcccttcaaaagcgcccacgttcctccctgttcaggccacatactaattttaaaagaaaaaaacacaacccccc

SEQ ID NO: 112482 - DNA, 122 bp, Homo sapiens
cacatgaaaattagtgataaaaatgtacataggccctttttaaattaagctttataaaaccggtgagcagagcaagttcacatttatctttagggtagaaaatgatcttccagctaccctat

SEQ ID NO: 112483 - DNA, 122 bp, Homo sapiens
catgtgaggggccccctctcagaaagcacagaactaggcatgagaagggaaggtggtggccgtccatcagtccagtatcttcacagcacttgttacctagaaataggatcatcatttgcatc

SEQ ID NO: 112484 - DNA, 122 bp, Homo sapiens
aaatggggttttccttcaggtgagagtggaggccacaaaccacaaaagtaccagcagcgccggtgaaaccacagagtcttgcagcaacggaaaccacagagacttgcagcacacaatagtta

SEQ ID NO: 112485 - DNA, 122 bp, Homo sapiens
ggacgcggccctgcgtctcctttcctgagatgcgaggttatttccatctttcagcagtctcggcgctttgtcttgttctggaagcaattgctagatagacatttctggccgtgaatactatt

SEQ ID NO: 112486 - DNA, 122 bp, Homo sapiens
ccgggggcggggagctggtgcaggccgagagcggggggctgcggagcccccgggagtgggcgccggcgagaggagtgggctggcgccgccgcctctttcccctcctcctcctccttcttcct

SEQ ID NO: 112487 - DNA, 122 bp, Homo sapiens
tacataaacactactttttgttggtttgtttgttttaaaaacaagatagggttttcatttcgggaagtcataaaaacatcatgtccttcaacagtgattacaaaggaagtctgtggcagggt

SEQ ID NO: 112488 - DNA, 122 bp, Homo sapiens
agatcgccactgttccctgcagtaggtaaattcaccgggcaactttttgatgaggaaggacgcattcccaagggaacggggagaacaacagagcaagttggctgagcaacggccacctgtgg

SEQ ID NO: 112489 - DNA, 122 bp, Homo sapiens
cgccgaggggcgctgcagcgatccggtttctggggctgcgtctgggtggcacgttcagaacggggacctgcctggttcttcttcccagcccttcccctccagcacccggcaaggcccagtca

SEQ ID NO: 112490 - DNA, 122 bp, Homo sapiens
cgcagcaggtgtggggagccctccgggaatggaggagtctcgcagctgcgggtgaagtcccgggcaggtgcggtgtactcgccgtgtacgcagctggcgcaggccagggaatcccagctcgg

SEQ ID NO: 112491 - DNA, 122 bp, Homo sapiens
aaggcaagaaagaggaaaagctacacctgccaataaaaccaaacttgaatccgaggcaaacgacgaggccgcactctgccagctgctcagaggccgttgtgacggagaccccagcgacggcg

SEQ ID NO: 112492 - DNA, 122 bp, Homo sapiens
ttttccttggtgcgtttctctttaaatgcaaataagtgcaggcgtggtgttggcagggggcggagagggtgcggaaccactggctggggctccccactcccgcccccacgccgggctggtag

SEQ ID NO: 112493 - DNA, 122 bp, Homo sapiens
atgaagcctatttcattgtctaactatgaaaatattaagacttttttgttaattctcagccgatgtgaaggaagcatgaggagggatcgtcagattcagatttagaatagtgttcccgtttc

SEQ ID NO: 112494 - DNA, 122 bp, Homo sapiens
acatggtgcttccttgagccccgaggcagtgctagcgctgtcctgtgaagtgcccaaagccgtcactttgtggagaaatttggtgacagtgctttccctctatcctctccctcctccagggc

SEQ ID NO: 112495 - DNA, 122 bp, Homo sapiens
cggggtttcttagcgcctggaagctggctgggagcgcttgggctccttcccaggacccgacgttcctaggactgagttgagtaacagcacctggagactggaactttggagggctccttaga

SEQ ID NO: 112496 - DNA, 122 bp, Homo sapiens
tggcagcaggcgcccgtaatcccagctactcgggtggctgaggtgagagagtcgcttgaacgcaggaggtggaggttgctgtgagccaagatcgcgccactgccctccagcctgggcagcag

SEQ ID NO: 112497 - DNA, 122 bp, Homo sapiens
gagagcgcgaggctcagccaaggagtaatgaacagggccggggcggggctgtggctttaccggaccagcctcaaacaaagatgctttgagcagagcttcagaggtggcaggaaagggtcaat

SEQ ID NO: 112498 - DNA, 122 bp, Homo sapiens
atcttcgaccgcgaggaccaggccagcccacgggccggcagcctggcggcgctcgagaaacggcaggccgagaagaagaaagagctgatgaaggcgcagagtctgcccaagacctcagcctc

SEQ ID NO: 112499 - DNA, 122 bp, Homo sapiens
gccatccccctattatctcttcactgtgtgcatttaaatagcttcttaaatggtctctctcgactttatcctctaccctctgaggtccacaaattttcctacaaagttccagatagccaata

SEQ ID NO: 112500 - DNA, 122 bp, Homo sapiens
cagcttcggcatatttggcggagccgggaaggcccggagcgcaagaaggcatcgcagcctcgcagcagatctgaaagggttgtgggcggggggctcattttcgccggatttcttttccgtgt

SEQ ID NO: 112501 - DNA, 122 bp, Homo sapiens
ttctgagagcctggttggcacgtgatgtgctgggatcaggcagggcatctctcccatgtccgcagcatgggagagctgtggtatttttggcattggttcatcttcactgctttatagtatcc

SEQ ID NO: 112502 - DNA, 122 bp, Homo sapiens
ccgggagcctcctcactgctgccagagtaatggcctgaaacactgccctcatcctccacacgtgtctctgctgtactctgacgcgtgatattcttacctgtccaaactttccttctactgat

SEQ ID NO: 112503 - DNA, 122 bp, Homo sapiens
ggcagttactgctgcccaatacttggttagaagcaccccatggcagcttccctataatagcgaggaaataagctgggagacagctggagaatcaaatttctgggtgcttacctcaggaatat

SEQ ID NO: 112504 - DNA, 122 bp, Homo sapiens
ccgaggggggggtctctcctccaggggtggggagcagctcggagacgggagacaagtgtccggctcctccttcggcggccagggggctacaccatctcctcgcacaaagccgaggcgccggc

SEQ ID NO: 112505 - DNA, 122 bp, Homo sapiens
aacgtccgcacgcaggaattgaaccgtctcgcaggcagaggcggctgaaccaggagcgagcggaagtgacgcacaggccggtcgccagagaaggcggggcaccgaggtagcgcgcccaattg

SEQ ID NO: 112506 - DNA, 122 bp, Homo sapiens
ttgttcccgtgtctggcgttgtgtgtctgcggttgtttctgcctggcatgcttacatcttcgtatggtttgcgccttcttagttgtcagttaataggatccctctgagacagggtctcgctc

SEQ ID NO: 112507 - DNA, 122 bp, Homo sapiens
acataggccctggcctcggagtcttcctcaggaatgctttcgcagctggaggccttcagccggctccacctgtcgccactcagtaaccgattccggggatagccctgcgcctgccacatgcc

SEQ ID NO: 112508 - DNA, 122 bp, Homo sapiens
tgcaaattctgttactcaaggcccgagggcggggattggagtaatatccaatcagagtgtcggaatgagaactgcccaatcaggcccgcagccagagaggaggggttggcttccgggatctg

SEQ ID NO: 112509 - DNA, 122 bp, Homo sapiens
caaaggctgcgcggcctctctgacaacctacaaccgctccccggacaatgcccgcctggccgggggccagagggtttgcagagacctgaaggatttcaaacacaggaagcatttggggcggt

SEQ ID NO: 112510 - DNA, 122 bp, Homo sapiens
ttaactccattcacaaaataggaataatgatggtctctgtcatcatccaggggcttgctacggggctgcattaggtaatacattaaaaacgcatagagagcagggcccctgcacagtaattg

SEQ ID NO: 112511 - DNA, 122 bp, Homo sapiens
gctagtcctcagcaaagacgcttctgcaaacaaagcggatcccgaatgggttttagaaggcggcagtaacttaaataaatcatgggccgaaacacactgccgcccggaatgcacagggcgcg

SEQ ID NO: 112512 - DNA, 122 bp, Homo sapiens
ccccacaccagattgtcacagagcatatgtcctgcatgcacacacatgtatccagggcaccgcctgcctggcatgtgttagtaactaattgttattcatttaatgaattgatcaaaacttga

SEQ ID NO: 112513 - DNA, 122 bp, Homo sapiens
aattagctacaggaagagtttatatccccttctacaagaaaacttaaatatagctaccaccgctttgaaaggaatggtttgtgtccaaacagcattttccagacaagctctgtacttttttg

SEQ ID NO: 112514 - DNA, 122 bp, Homo sapiens
agagacggtgcattgcgggctaaacccgcagacactgagcggggacgccacttccgacggcgtaaggcacctaaagtagccacagaggaaactgggggtgcaggagctgcaggagccccggc

SEQ ID NO: 112515 - DNA, 122 bp, Homo sapiens
gggaggcctgcagtgagctggacacttcacagggttatcttggctgcccccaaaacaatccgtaagaaaggaagcactgtggccatggtacagatgaaagcctgaggctcagaggctcaaca

SEQ ID NO: 112516 - DNA, 122 bp, Homo sapiens
gatagaaatttccgagaatgcttctgtttagattttatgtgaagacaatcccgcttccaacgaaatcttcaaagacgtccaaatatccccttgcagattctacaaaaacagtgtttcaaaac

SEQ ID NO: 112517 - DNA, 122 bp, Homo sapiens
ccgctgtatccccagcgcctgggacccagcctggcacacagaaagcactcaagaaactgtcgaatgagttcccacaaaacagaagagaaaactgaggctcagggtacagcactgcccacagt

SEQ ID NO: 112518 - DNA, 122 bp, Homo sapiens
ctgctaggacatctggcacatacggtagccattttaattaataaacattgattacttggccgggcctggtggctcacacctgtaatcccagcactttgggagaccaaggcgggcggataacg

SEQ ID NO: 112519 - DNA, 122 bp, Homo sapiens
ctgcccccaaccatctcctcccgttccttcccccgcagagagctgggcaggctggaggaccgggagggttgaagagtgacccccgcagcccccatacctctagataaatctgagcctccaat

SEQ ID NO: 112520 - DNA, 122 bp, Homo sapiens
caaggacctgcccaatctgcgggtccagttgctagggcctccatcttgggggccagtggccgtggcgcccccggaaggggttgccgagtggggcattcacttccggtctggggcctgcggcg

SEQ ID NO: 112521 - DNA, 122 bp, Homo sapiens
ccgagtgcatctgcttagatctttaagaagaattaatccgtggaaagcggtgccatcaaccgacactcgtcctcccgcccttccctgcccagtcctcgcctgactggcctcttccctacatg

SEQ ID NO: 112522 - DNA, 122 bp, Homo sapiens
tccctctttcaggcaccttgagcacaggcctgtcagggcgattgggatatgcaaaggagacgtcttggaatttcacaaccccctgcagagtggtgggggcaagcgtgccaggtgaaggcaga

SEQ ID NO: 112523 - DNA, 122 bp, Homo sapiens
atgaacttcctatcacagggcgttctcaagtgtggcatgccaaagattctagatgacacacggactgagaattcaataatgctgagtcatataatgaaaaagggattccttttgcaactctt

SEQ ID NO: 112524 - DNA, 122 bp, Homo sapiens
cagccggagagttcatcgggagtagagccgtgcagcggcgcggttatctgaagctccccacgtggatggagagagaagtttccggggctcggggccgggcaggcgtctctgcactggagagg

SEQ ID NO: 112525 - DNA, 122 bp, Homo sapiens
tcatcattacgcgctcttaaggtttctccgtggtgttttggaaggtcccggcacggctaccgtcgccccacgctaggaaattttttttttattttcaacctttgttacatagcactgaggct

SEQ ID NO: 112526 - DNA, 122 bp, Homo sapiens
ccttgtgacctcaccacttggacaactcagcccagctgggttgcagccactccctccaaccgccacaagcagcaaagggcatagatgaccacaggagagccctagggggaggccggctccac

SEQ ID NO: 112527 - DNA, 122 bp, Homo sapiens
tagaccataatgttttaaatatgcgcgggaagtttagcccctacagctccaaaatgacgtcgattctgcatagcacacaaggacctaaaatctaagtttttgttttaaaggcaccctacacg

SEQ ID NO: 112528 - DNA, 122 bp, Homo sapiens
taacctgaaaagagttgagaagagtgttttaggtacaaaaattcatgaaaaaagcatagacgtgcttacaggaacttcttaaaatttggaattgttgtagagtaaaacataagagaaagaga

SEQ ID NO: 112529 - DNA, 122 bp, Homo sapiens
ctgacaccccttcgctatgacctgcgagacagaatcactcgactgggtgatgttcaatatcggttggatgaagatggtttcctacgtcaaaggggcacggaaatctttgaatatagctccaa

SEQ ID NO: 112530 - DNA, 122 bp, Homo sapiens
cacgcctcccacaggccccgcccacaatcggccccgccctctccggctcccattacttcgcgggccaagatgcgaaaccactcctgtgcgcctttccccaggccagtcccggggcgcgcgct

SEQ ID NO: 112531 - DNA, 122 bp, Homo sapiens
attcatctttcccttcccaagttaacgctcagttctgtcttggccgccttggcaccttcccggcccctcagtctcggtctccacagcacttggtcggctcagccttgttcgtgcgagtcaag

SEQ ID NO: 112532 - DNA, 122 bp, Homo sapiens
ccagctgagcaagctcatgaagataagttattacaaggaagcttagcaagaacatacgctcggtaaagtgactcaagatctttctacagccagcagcatgggaagaattaaatcactctgct

SEQ ID NO: 112533 - DNA, 122 bp, Homo sapiens
tccccgctagctcacgcttccagtgggttccgcctggcctctcgcgaagtcgcgtccgggcgccagtactcgtccccgtaaggttgtccgctcgtgccttggcttgtgttctcggctacccc

SEQ ID NO: 112534 - DNA, 122 bp, Homo sapiens
ttcaccaggcacgagaaataggggatttggatgcttggcagtttccagtaattatttcttcggctgaggagcccggagaacatgctcaagcacgctgggagccatttccttttaaaatatta

SEQ ID NO: 112535 - DNA, 122 bp, Homo sapiens
ggctctgacatccagccccaacttcagtcaggacgacctcggtgagccggtgctgcagaccgtgctggaacctggagatttgctgtattttcctcggggcttcattcaccaagctgaatgcc

SEQ ID NO: 112536 - DNA, 122 bp, Homo sapiens
ccctccttcgcgtcagctccggactctcagggcggaagtcggtggctgctggcgaggcggcggcggcggcctaccgggttttccccccaaaaggcttcgtaaccactaatgtgccctttgtg

SEQ ID NO: 112537 - DNA, 122 bp, Homo sapiens
ggtctgaagccgcacgtgaggaaagaggtgtggtgagtgcaggatgctgtgctgcccccacgcagggctcagcctgctctccagtagggaccggccactggggccccagctactctgtgaag

SEQ ID NO: 112538 - DNA, 122 bp, Homo sapiens
tcaaggttcacaagagacaaattccagaatgcaccaagaccgcgatgcacagagaccaagcgggtgttggggccgtgcacagggcactctgtgtgtcttctgggggagtgtctgtgtttctg

SEQ ID NO: 112539 - DNA, 122 bp, Homo sapiens
tcagtgatgctccctccacttgaagtttttctgtggggcttaaagcaccatgctatcaggcggtagaggattcagagaggaggaggaggagcagaaggtggaggaagggaggaggaggagga

SEQ ID NO: 112540 - DNA, 122 bp, Homo sapiens
tgaacatcggattatgtacgattctgcagtgccctcggaggcccattagagtctggagctcgagaagcataacaaactctggtctgatatttgtaaggagcttgacagccaaggagccactc

SEQ ID NO: 112541 - DNA, 122 bp, Homo sapiens
ctaaggcacagaaaactgtacatttctggtcctaactgcattgttgtccctcaggattctcggtgcctttgctaaagtaatgttacaacagtccagaaaatgctagcattagtattgcagct

SEQ ID NO: 112542 - DNA, 122 bp, Homo sapiens
agtcccacagagtcccacagtcttcatgtaaatgaggcacccagagagagcctatgcgagcgtggcaggggcgtggccttccacctcccgagcatcgctctgattcattgttaaaataaaga

SEQ ID NO: 112543 - DNA, 122 bp, Homo sapiens
tatccacagcctgtgtgcacagtcacatttcctaggagagtctaagcaaaatacagccttcggggatacacacttagtagtttttgcataacaataactaagatgctgatgccagctaatga

SEQ ID NO: 112544 - DNA, 122 bp, Homo sapiens
cggaaacagctccgccccctcgcttcctgagccgccacatcccggcagccctcctacctgcgcacgtggtgccgccgctgctgcctcccgctcgccctgaacccagtgcctgcagccatggc

SEQ ID NO: 112545 - DNA, 122 bp, Homo sapiens
gcggctctgggctgagaaagctgaggagtcactgtcctcggagtaggagcggggatgcggcgggcagctgatcccagggcctgggagcctcggcacctgctttatgctttgtaagcgaatag

SEQ ID NO: 112546 - DNA, 122 bp, Homo sapiens
acggcgacagcagctgcggggatgtatgcttcatggacaaaggcttgcagaggtaaagggcgctccgcagccaggagcgacccgcgcactccccagagccggggccacgagtggctggcggc

SEQ ID NO: 112547 - DNA, 122 bp, Homo sapiens
gcgtttgcgtggcacggggttgggatgcctggccatgggaagcatcccaagtggggggcgcgccggtctcccggagcttgacagtgtcggaggatggacaagaaaccagcaacgtggccctg

SEQ ID NO: 112548 - DNA, 122 bp, Homo sapiens
atttattttaaaatcaagcagatggctgcaacaggggtttgtttaagttcagctcagagccgggcccgcggccaggagcctggggcagctgtgccaaaaatttttcaatgactttggtcgtc

SEQ ID NO: 112549 - DNA, 122 bp, Homo sapiens
ccttctggacttccctctgagtattgagccctagtctgaacatgcctcccctgtctccaccgtcttctcccagacagctcttggtgtgcaaaccacgcctcccccagtgcttcctgtcttct

SEQ ID NO: 112550 - DNA, 122 bp, Homo sapiens
tgagcccgacacttaggctctttcagctttagttttcatttctgtgcacagaaagaataccgtctttcctgcccggcttggagattgttgggttgagatcaaatgtgaagatggccaggcag

SEQ ID NO: 112551 - DNA, 122 bp, Homo sapiens
actcacacgtatggacagacacagacacggacggggtcaccgcatgggggcggaggaggtcggacggcaaggttggcaacagagaaggataagcccgctgccacagcccccaggggaccgct

SEQ ID NO: 112552 - DNA, 122 bp, Homo sapiens
agaggcagggcccggccccgcatgggtgttctgaggtttatgcctcagcactagaagcctcgtatgcgaaatcacatcctcatagacccggttcagacacaggatagtgatgcctggactat

SEQ ID NO: 112553 - DNA, 122 bp, Homo sapiens
agtaaaaaatactgatgctttaactctaggttcccaaatgccatttagctccccaagcatcgtactgtggcaaaaactacatgcactttgaaatcagatctgaatttgaataggttctgtta

SEQ ID NO: 112554 - DNA, 122 bp, Homo sapiens
tgcgcgtcacccgcaagggccggctggagctggtcaacagccgcttcacccagcccaccccggaggacctggtctatgtggaccccagccccgactactgcctgcgcaacgagagcacgggc

SEQ ID NO: 112555 - DNA, 122 bp, Homo sapiens
gcaactgctatctgagaagacgtttcaggcaggctctgccggcggagacgcacgctctcccggagctgcacatagttggccttgctctgtgtgcattctcggtaatggatcacagggcaacc

SEQ ID NO: 112556 - DNA, 122 bp, Homo sapiens
gccccagcttccagggtccgggccagcatcccggggggcctcgtctcacccacgtcaactcgttattcctaggtggaatgtttcccacttaagagcccagtggtcccggaaagtaaagagat

SEQ ID NO: 112557 - DNA, 122 bp, Homo sapiens
ggccgcacgggtgtcctcgcgctgctagtccgcgcgcagcctggcagtttgccgcttcctcgtcctccatcctgcgtccatggccaccgctgcgactgaggagcccttcccttttcacggtc

SEQ ID NO: 112558 - DNA, 122 bp, Homo sapiens
caaagtccgtagttgagggttcactcttggtggtgtgtattccgtgttttgacaggtccacgattatagtgtcacagagtcgattcagtgccggctcatccctcacaccagcccccacaacc

SEQ ID NO: 112559 - DNA, 122 bp, Homo sapiens
tgctcgtccacctcacagctgtggtcggaagcatcggtggcttcctttccttcgacaccacgcactgaatcttctccttcgacatcgcgcactgaatcttccccattatcttgcacactcat

SEQ ID NO: 112560 - DNA, 122 bp, Homo sapiens
gaggtgtctgaaggcagcgctcaggtcgcagaagcatgaggatctggctgtcaccagccccgtagccagggctgtgaggaccagggcagccgctgtcccctgcctagcctggcagcctggga

SEQ ID NO: 112561 - DNA, 122 bp, Homo sapiens
taaagcgctgtttcagaacgagaggcatacatgtgatcttagaccactgagagcatggcacgttctctttgaaataaaaaaaaattttgctaactgaaagtttagtattaactaaaaatttc

SEQ ID NO: 112562 - DNA, 122 bp, Homo sapiens
atgtgcattttccttcaggatgagcaaaaatatttcgtcatcctccccgctcctcaacagcgcagaagatgccgaaaagcaattacaggaccttacagagctgctccgggggccgcgggaaa

SEQ ID NO: 112563 - DNA, 122 bp, Homo sapiens
gtgttgatgtgtgctggcttgggggaagggcttatggccttttaaacccatttcaatgcacgtgttcctggctttgatcttgcctggggtactgcaatttctcagctggtttctggatttct

SEQ ID NO: 112564 - DNA, 122 bp, Homo sapiens
cgggttacctgataacgctgccgccgccgcctccccgcgcacgggcagtgtggccaggggcggcagccagagcagcagccaccaccgcccttggcgcggccccatttcgttaggggtcagct

SEQ ID NO: 112565 - DNA, 122 bp, Homo sapiens
tctagcatccgtagactgtttgcatcctttagacaaagagaccgtgcagaagcagtcggccgagcatccattatggggcggggttggggaggggcggaaggagaagaaaggggactggggtt

SEQ ID NO: 112566 - DNA, 122 bp, Homo sapiens
atatgttcacatgcacagtgcccacacacggcatacatatgctaacttgcatagtgctcacgtacatggtatatatatgttcacatgcatgctgcacacagtgtacatatgctcatgtacag

SEQ ID NO: 112567 - DNA, 122 bp, Homo sapiens
cttcaagcaggtgacgggactacctggccctggccctgagcatgaggcctgcaccaggcacggggggacagtaaacgatgattgaggagctcacagctcaaggggtaacttgggatgcccat

SEQ ID NO: 112568 - DNA, 122 bp, Homo sapiens
ttttcacggcctcgcaaggaaagcaggtgccttctccacagagactcttggtgggctcctcgatttggggtcatctgctcctgcagcctgggctcgcgggggtgagaacacaacagggtgag

SEQ ID NO: 112569 - DNA, 122 bp, Homo sapiens
tttttcatgattttcttgattttattttttttccaaatcagtaaaatctcaaaacatcaacgagtatattaaaagagagagacaaagagagatatagaagacagtgatgtctgatgggaatt

SEQ ID NO: 112570 - DNA, 122 bp, Homo sapiens
ccggtgggggtggggggtgcggcgcggagcaaacatcctgggcggggtggcttcccggcccgcgcgcatcactgggttttattggctctgggctccagcgactccagtgaccttgctcagga

SEQ ID NO: 112571 - DNA, 122 bp, Homo sapiens
attgttaccaggcgaccacggcgtcatcaaatgacctggcaattccgtctactgatgtctcgaacatgtttcagactaagctacgaaatgaaacttgggaagacttgccaaaaatgtcctgc

SEQ ID NO: 112572 - DNA, 122 bp, Homo sapiens
tgcaccatggcccagtagcacccctttttctccatgagctgctggtgggttcccccctcccggatagcgcctccttccagaaagaggatgtggtcagcctgctccaccaggctgaggtgctg

SEQ ID NO: 112573 - DNA, 122 bp, Homo sapiens
ctggatcgctgggtaccggcattggcagctgggtttctttcagccctggggactggccaccgctcttccgcagccatgtgcctgcatgctgggtctgaggatgccattctcttctgcatttc

SEQ ID NO: 112574 - DNA, 122 bp, Homo sapiens
gaggaagataatgacattttatttcattaatgtcttcaaatctatgaaatctgggtactacggtgatgatgggaaagatctcagagttcactgctgtgaattcctgtcatagaaaagcaaac

SEQ ID NO: 112575 - DNA, 122 bp, Homo sapiens
aatccgcatcaaagaaaaaccctactgagatgaagtgctaggccatatggagactgaggacgaaagggcaggcctggtctccgccagagtctaagtgtctcggtgggggccaccggctcctc

SEQ ID NO: 112576 - DNA, 122 bp, Homo sapiens
gcggggacagcatagcattgaaccaaacgctgacacctactgaggctggccttgtgtgaccgcaccatcgccagccgtctggccctgctcttcataactctccattccctccgcgtgctggg

SEQ ID NO: 112577 - DNA, 122 bp, Homo sapiens
attccacagggacgcgatcacagacacccccaccagccacaggcctgctctgctctcacccgctctccaccacacaaaccctccagcgcccccagggctgcgtgcccttgaatttttccctg

SEQ ID NO: 112578 - DNA, 122 bp, Homo sapiens
gcccagtttctctccctgaccacaagaccctattgcagtggtccgtccctacaccaactgcgatagtcccggataaaatctgccttacccttttaacaagggtcaagagtaaatttttcctt

SEQ ID NO: 112579 - DNA, 122 bp, Homo sapiens
ggctgccagcgtcggaggaggtgcgggcgcggggttggcgggcggcctaacgggggcctgcgcggaccgcccgtggcgcagcctcgggtctctctccatctctaagtggtggtggctgtggg

SEQ ID NO: 112580 - DNA, 122 bp, Homo sapiens
caactggaattaaatattctaatcgggcgccagggacagacctaacggcctttacagtggcgcatgcgcaccaggctagggccgccgcgcccctcctcaggtgttttgtgttcctgccaagt

SEQ ID NO: 112581 - DNA, 122 bp, Homo sapiens
ctcatcttctccatcaacctcttcggcagcattttcttcctcacgtgcatgagcgtggaccgctacctctccatcacctacttcaccaacacccccagcagcaggaagaagatggtacgccg

SEQ ID NO: 112582 - DNA, 122 bp, Homo sapiens
ggggcatgcagggcaggtgtggggggcgcaggggtggggacgcgcagggcatctggagcccgcagggtggaggtgacaggtcagtgtgggcgtccacttgagggcgcctggccaccgcccaa

SEQ ID NO: 112583 - DNA, 122 bp, Homo sapiens
cttcctccacgctccacaacggccttccccgcccagaagcgcttcctccacgctccacggcggccttacctgctcagaagttcatgctcccagcggccttccccacccagaagcgcttcctc

SEQ ID NO: 112584 - DNA, 122 bp, Homo sapiens
acaattctgtctacttcatcgtcttctttggctcacgtggcttcctcatccccaggcgggcggagggggacaccaaggttagccaggccgtgctgaaggccaagattcagaaactggccgag

SEQ ID NO: 112585 - DNA, 122 bp, Homo sapiens
acaaaatattggccagttcaggtgaagcaataaagatgtttgagggaaaatgattctaatcgttttaaagctaaagctgaggaattgggctatctaaatgtagctttaggattgccatcggt

SEQ ID NO: 112586 - DNA, 122 bp, Homo sapiens
ttctttattcacatgtttacaggcatggagactgttctgttggtggtcatggcttatgaccgctttgttgccatctgcaaccctctccagtacaccatgatcctcaccaataaaaccatcag

SEQ ID NO: 112587 - DNA, 122 bp, Homo sapiens
ggaattaggagtgtttaaacagacccttctagtctgttcaagtgctgggcaatcattcttcgaatctaaactgcccagctaattagagccataataatttacctgagttatcaggctactgt

SEQ ID NO: 112588 - DNA, 122 bp, Homo sapiens
taagcaggtgatagaataggattcaaacccaagtggcttcattccagagtctgcacttaacgctaccgctatcctgtgcgactcaaatgcagataagggttgcaaaagcctggcacactggg

SEQ ID NO: 112589 - DNA, 122 bp, Homo sapiens
ccgcgccgctttttcaaaggctgcccgccgcggtgcattgtggggcggagactgtctttgcgagggaggttcgaatgcggagctcgctgcccgcggcgccgcgctgcgctgctcccgccgcg

SEQ ID NO: 112590 - DNA, 122 bp, Homo sapiens
ccgccgtcgtctcggctttatttacccagcccggcgcgcgccgcccgggaacaggaatagcgaggccttctcatgtttcctgactgccggtcccagccggcgaacatcctgcgggcgcggta

SEQ ID NO: 112591 - DNA, 122 bp, Homo sapiens
gaagcatgttgggcaggtggagatccactcagtgacttgttccatggcatgtcatgagcacgattggcagggccaggccagatcagtaaaaagggtgagagctgcgaggcataggcctgctc

SEQ ID NO: 112592 - DNA, 122 bp, Homo sapiens
tgaatgtctacaccaagctgctgctgaccaagatctccttccacctcaaggtggtttcctcgggggagtcatggggctgagggacccgtgggcttttcccactgtgacgttatggcacatgt

SEQ ID NO: 112593 - DNA, 122 bp, Homo sapiens
gggaagccccggggccccgccatcggaggaggtgctggctactgacactgtgtctctgtgcgtgtgtggcatccgtgtctctccagggcatggccaaggaggagacggagctgaggttccgg

SEQ ID NO: 112594 - DNA, 122 bp, Homo sapiens
ggggtgcggctgaggcgtggggctagagctggcggaacaggactgggtcaaacgggtcgccgtaagcgcgtctgttgtacacttagcttttgctgagtgcaaggccttatgtggtgtgagga

SEQ ID NO: 112595 - DNA, 122 bp, Homo sapiens
gtgccttgctcctcaaaaccctggtccacgactctgcggttgggggagccgggcagccggcgcagcaggagccgggccccgtccacaagtttcctacgagcagggcggaatcgacgaaaata

SEQ ID NO: 112596 - DNA, 122 bp, Homo sapiens
cgggtgtcccgagggtctgggcgggaggtccgggtgccccaagggtctgggcgggaggtccgggtgaacagatcattttaattccctgctggaccatcttgagatgctgctcaaccactttt

SEQ ID NO: 112597 - DNA, 122 bp, Homo sapiens
tgcggcctgacccacaggaagtccagtcataatattgacacaggcagggcacacagcagccgggaagctgggctgttgcgaagttggcgcagggcatgtgagggcaccccaggctccggtgg

SEQ ID NO: 112598 - DNA, 122 bp, Homo sapiens
ttgccaggaccctcaaggctataagcaggaaagcaggggcgagaccaccaggcttcttaccgctaggacaatgcttttttttttttctaactatgccagattgccagtccatatttttttta

SEQ ID NO: 112599 - DNA, 122 bp, Homo sapiens
ggccgggtaggttgaggcggagaccgggcattccagcgccctgctaggcaggcttgctaccgaggctccacgcctccctgggcctcagtttccaccactgtgcaaatggcccagcgcgggcc

SEQ ID NO: 112600 - DNA, 122 bp, Homo sapiens
aatcaatcaatcaatcaatcaagaggaggctggcgggagcatgctcgtgaccaccgggggcgacatagaccctaaccctaagtccaaccccaaggcagaccccaccgtcccgccaggcgcac

SEQ ID NO: 112601 - DNA, 122 bp, Homo sapiens
gccccgcatcctgacagcccggcggggcgtggtcgtgtgcagtgtggcccccaacctccccgccgtgtcaccctgccgctccgactgcgactccatccggaagaatggctgggacgcgggaa

SEQ ID NO: 112602 - DNA, 122 bp, Homo sapiens
tctgttttaccctggttggctttcagttgaccatttcatttggttcacctgctgagaattcggtaacgatgttactgtgaggcaggacgacaggacgacttctagccactgtatccttctta

SEQ ID NO: 112603 - DNA, 122 bp, Homo sapiens
accgaagaccggtcctcctctgttggggatggtcaatggagcatgcagctttgggagggacgcatgtggagcagtgagggaggaaggggacacccgtctagccagcaagatcaaccgaatca

SEQ ID NO: 112604 - DNA, 122 bp, Homo sapiens
tactctctatgcccacaagttcaattgttttaatttttacctctcacaagcaagtgagaacgtgcaaagtttgtctgtctgtgcctggcttatttcacgtaacataatgatcttcaattcca

SEQ ID NO: 112605 - DNA, 122 bp, Homo sapiens
tcctcataacccacaacatactctttcatatacaagcataacaaaaatagacttcacaaccgttcttagcagggcgtggtgttcctgcttctctccattctccccaacactggcatggattg

SEQ ID NO: 112606 - DNA, 122 bp, Homo sapiens
ggtgcgaaccccaacccgatataccaggtgctctgaggggatggtggccgcccacccgcccgagggatggtgcccctagggtccctcgcgcccaaaagattgaacttaaatgcccccctccc

SEQ ID NO: 112607 - DNA, 122 bp, Homo sapiens
gatcccgcacgccaggtgagcccacacactgagcggacattggggcaggcaggcaggcgccggggggcggggccagcgtcgccccgccccgtcctgcctcgccctgttcgcgcgtccgctgt

SEQ ID NO: 112608 - DNA, 122 bp, Homo sapiens
cttttgcgccgcagcctcggggaaacctacgtgaccaccttaagtttcccccagatgttgcggctgccgctgctgctgccgccgccgccgctgctcggcgatgccctagcgggcgcgagaaa

SEQ ID NO: 112609 - DNA, 122 bp, Homo sapiens
agagttgggtgctggggtctcacagcagcatcggtccgcctcgcctctcccccatctcctcgcagagcccccaactcccatcgcgcccccacagctgctgcgtgctggccccacctacctca

SEQ ID NO: 112610 - DNA, 122 bp, Homo sapiens
cttctgagcaaggtttctcgtctgcaaagtacgggcaataatccataatggcagggctgtcgtgaggttcagaacagtgtaagtgcagtctgcagcccagcttgatagacagcatgttcaaa

SEQ ID NO: 112611 - DNA, 122 bp, Homo sapiens
gtgaaggctgggggagtagcgatgtatgctgtgtcttggtgtttcatgtttagcatctggcgctttgcatggaggaagagcatcaagaagtaccatgcttggagaagcaggcggagtgagga

SEQ ID NO: 112612 - DNA, 122 bp, Homo sapiens
agtgagacacgtgtgaacagccactccctggaaatctgtgctgggagctgtggcaattcacgcgtgaaaatcactacacaggcaccacgtcggctccccggctcggccccgacctcgtttac

SEQ ID NO: 112613 - DNA, 122 bp, Homo sapiens
gggtcggggggcggcgggggatcccacgtggaagcagcgtcctggagctgggtggggctgcggcgcggactacaaatcccaggggcgtggggcgggagaggcggaaggggcgtcctggggcg

SEQ ID NO: 112614 - DNA, 122 bp, Homo sapiens
gtgtgagactcaaaagatactaaaagaaggcttattattctgagatggtcccaaacacaccgaataaagatgttcaggaactaggaatggattagacaccagtgtcagtaaaaggtagtaat

SEQ ID NO: 112615 - DNA, 122 bp, Homo sapiens
taaaagatatggcgtcagccaggcctgcatccaaactgtggctcggctatttacttagtgcgtggataagttatgtgtcctctctgaacctgtttcttcatctatgaaatgggaataataat

SEQ ID NO: 112616 - DNA, 122 bp, Homo sapiens
ggaagtcaccattaccaccagcgagcagcctcttctctctcctgagcacttggctgtgaccgctgcccaccccccaccccctcaatttgggtctctgtcaccatcaactcctcccactgccc

SEQ ID NO: 112617 - DNA, 122 bp, Homo sapiens
tccccaatgtctctaaagcataaatctcacggagccacttccctgcctaagacccttcagcgatggtccccttcttgtgagtaaggcccgaactccttcctgtggcctcctaggtcctacat

SEQ ID NO: 112618 - DNA, 122 bp, Homo sapiens
tggggccaaaatgaaagggcaggcgttctttacctgttggtctggccgaaagtctagctccgcactccaggaggcctgtctcagtttccagtcaccgccataacaagttaccccagtttagt

SEQ ID NO: 112619 - DNA, 122 bp, Homo sapiens
tggcccccaggctccaccttccgaccccatgactcatttcccaaatctggaaagtcagggcggcgtcggcgggagcggcggagcactgtgctgggactcccgcagcatgtgcagaaggagct

SEQ ID NO: 112620 - DNA, 122 bp, Homo sapiens
ctcacgcccggggcaactgctggaaggcattttgttctttcttttctttcctatagtgtccgcctggccgcctcagcgtcatcttcatgttcctggaatttgtgacaaataatgtacaccaa

SEQ ID NO: 112621 - DNA, 122 bp, Homo sapiens
tggccctgaagctctgcttttggctgcagctggttcccaggctcctgcattggaatcgggcggaagaggaggattctgaatgatctgattaggcagtcgagagcagccatggatcttggcaa

SEQ ID NO: 112622 - DNA, 122 bp, Homo sapiens
ttgttttccaaggtttctcggctcagaaccattcagcattcttttcacttgggaaatgtgcgtgctccttaggatattttccaggctgcagccacccctgtcctctagtcacggcagtattt

SEQ ID NO: 112623 - DNA, 122 bp, Homo sapiens
gctttttgtgggccgggtgggtttcctaatctggtttcgtctgcctggttcatctgtgtgcgatggctccggactcggatcccttccctgaagggccgctcttaaagctgctacccttagac

SEQ ID NO: 112624 - DNA, 122 bp, Homo sapiens
gcccggcggcggcggcggcatggccaaggccagcgcggctgagctgaaggtcttcaagtccggcagcgtggacagccgtgtccccggcgggccgcccgcctccaacctgcgcaagcagaagt

SEQ ID NO: 112625 - DNA, 122 bp, Homo sapiens
tcccaaccactgaacaaataaaatatccctgagctgccgacagtgcctacacaggaaagccgacaactttacagccatcctccccacagggcatctcagggtgccctcagctcaactgagga

SEQ ID NO: 112626 - DNA, 122 bp, Homo sapiens
gcgggtcatttagggtgactccagacatgggggttcctcctaggaggcccagggactttgcggagttccacggcacacacgaacctcgtttttccatatctggaacatcgccagagccacaa

SEQ ID NO: 112627 - DNA, 122 bp, Homo sapiens
gaggcgctgtctgtcaagcctcactctctcctggcgagggctctggttttccagccacgtcgctgcatggagagcaacgcacaaagacagggtctcagaggccacctgtgcccaccctggtc

SEQ ID NO: 112628 - DNA, 122 bp, Homo sapiens
gtgaagcttatcagggtcgcgctatgagttccaggctggctcctaattccgcagcctcctcgcagctggggagcagtgtgcccacttttatctcagctcctggcttctacagaggacgagat

SEQ ID NO: 112629 - DNA, 122 bp, Homo sapiens
aaggggacaaatacccaaaccacagcagaagctgagcaaccattagcaagttgtcattaacgtgaatacacaaaacccacaggcctggggctgccgccagctgggtagggcctcagatgcct

SEQ ID NO: 112630 - DNA, 122 bp, Homo sapiens
ggggtacaaagtctcagttatgcaagatgagtagttctggggagatgcacagctatgtgacgatagttgacaatattgtgtacttgaaatttgctaagaagatagatcttaagtgttctcat

SEQ ID NO: 112631 - DNA, 122 bp, Homo sapiens
ccattgggaaattgaaaatcaaagccgttcaagtcgctctcaggaaacagggatttactgcggcactgcccagctgtcccagggactaaggcatatcgttcccgctagtttctagataccta

SEQ ID NO: 112632 - DNA, 122 bp, Homo sapiens
tcgggctcctgaaaacctcgcggccccgcccacggaagggcccgcccacctgccaggccacgcccccgtctcggccacgccgcagctcagggttttctctgagggctgtgagaggctaggcc

SEQ ID NO: 112633 - DNA, 122 bp, Homo sapiens
ctgcctcaacctcccaaagtgttgggattacatgtgggagcccttgggcctggccacctacgtagcttttgaagacttgaaatgtggcaagtacaactaggaactgaattttaatcttgttt

SEQ ID NO: 112634 - DNA, 122 bp, Homo sapiens
aagcaggatttgccaattcttggattcctggggcgcaggcagtctcccaaaacacccttccgagctcacagcgggcttggcagaggtggctgggcttcgtcacgtcccctaccccatacatg

SEQ ID NO: 112635 - DNA, 122 bp, Homo sapiens
gcccagcgatcgcagcatgaagctctgcgctcccgagaccatcgagtggccagggctgggcgctccttcaacagcagcgaaggcagcggcgccggggcagcagccacctcccccgcgggccg

SEQ ID NO: 112636 - DNA, 122 bp, Homo sapiens
cacaaagtctaagggaccatggctgcctgccttggggaggaaccatatctccctctgggccgcttctggcctcttggagccatgggccaaaggccaaggggatgggcagaggtctgtgtttg

SEQ ID NO: 112637 - DNA, 122 bp, Homo sapiens
cttccacgcccacccagctgagctgctctgccctggggccggctggtggcccaaggagggcgctggggtctgggctgcggtccaggcccttggcgtgggtgggggtggcaccggcgctgctg

SEQ ID NO: 112638 - DNA, 122 bp, Homo sapiens
cactttgctgcttagaaatttcttccagtgcggtaacgtgaccgatcccggagaagccggcgggagccccggggagagttctcttttctttgtgaagggcagggcgccctggaatgggttcg

SEQ ID NO: 112639 - DNA, 122 bp, Homo sapiens
ccagcccgacacccatgaagggtctgtgctgaggagtagtgaaagagggaggcctctttgcggttgagataaggggaagttttctgtctcctgcacgtccctgggaatgaaatgtctcaggg

SEQ ID NO: 112640 - DNA, 122 bp, Homo sapiens
cttcctcactgctgtctcctgtcctttttcctagcctctttcttcctttccagaatttgacgtcaggagcacaatatgagacaaagcatgccgtcttcagatttaagatgttcctttttaat

SEQ ID NO: 112641 - DNA, 122 bp, Homo sapiens
gaaggagcaagcagccccctcccccacagacacgccctcggcccgccagaaacaggaaaccggggtttcctcacccaccccgaccactgcagccccctagggggacctggggacacggggag

SEQ ID NO: 112642 - DNA, 122 bp, Homo sapiens
aagcgcatagccaagcgcgtggcggccagtctacacaacacgcctatgggtgcccgcaggcgcagccccttccgttatgatctttggaacctcaaggtgagaagatagatctttctgccaca

SEQ ID NO: 112643 - DNA, 122 bp, Homo sapiens
tctgtcctatccgtccactgaaacagttccagctaaagtcacccgttgaggccactgcagcgccagatcagggcaggttttcagcactcatctcacatggttctcagtagcgcagggcacca

SEQ ID NO: 112644 - DNA, 122 bp, Homo sapiens
gaggccagggagcggtgggcgtgacgtggggcggtgcgcggggctgggcggcggctgaggcgcgtgctctcgcgtggtcgctgggtctgcgtcttcccgagccagtgtgctgagctctccgc

SEQ ID NO: 112645 - DNA, 122 bp, Homo sapiens
ccacagctttggagctgtgttttctgccaggtctgtgaggggagatggtgtgtagaggcgcggtcaatcctaagcactgttccaggccctgttggtgggaagcaggaggggcccgtgccagc

SEQ ID NO: 112646 - DNA, 122 bp, Homo sapiens
gaaattgctatgcagcaatagataaatagcacactaaattagttaatactattactttatcggtagatgctttaaggttttccacatataagataatatcatctgtgagcagagatgattat

SEQ ID NO: 112647 - DNA, 122 bp, Homo sapiens
aaagaaagaaaatatagtttctgaaatttgggattgccgagtagcagacccagtgggctccgggacaggatggagaggcctgggtggcgtccgtgaggctgcctggctagcagcggcgccca

SEQ ID NO: 112648 - DNA, 122 bp, Homo sapiens
caacaaaaccaacatcgggtgggttatttttatcctcctaaagatttttagccaagaccccggcagctaaagggcatcccgggctttgaggagacttctctgcagctctcactcccacgctc

SEQ ID NO: 112649 - DNA, 122 bp, Homo sapiens
atgaacatcattctcgggaaaatacagtgggccagcttcaagatctcttagctcatgagtcgctaaccctaagaagataggcagtgccactctgcatatgactaaactcttacatcatacac

SEQ ID NO: 112650 - DNA, 122 bp, Homo sapiens
aaattaaaccttcaagggaactagcatgtgaacgccaaggcataatctgttatttaattacgggtctccataggaccgaggcggagagagctcccggtagaaccgacgcaaccatcccggga

SEQ ID NO: 112651 - DNA, 122 bp, Homo sapiens
ccaaaattagttcccaaacaggcttttgcaagagctatcttttctgtttcaagtgtcccccgtaccccaccacctacaaccctaaatccctggtgaatttccactgcttttgcaggtcccag

SEQ ID NO: 112652 - DNA, 122 bp, Homo sapiens
acccggaaatgcacaagcctcttgatgcataaaaacagctgggctcccttggagacagagcgccatgggaaaccgggtctgctgcggaggaagctggtgagtaggctggaagggcaaagggg

SEQ ID NO: 112653 - DNA, 122 bp, Homo sapiens
agaagttgctcccggcctcctcttgagggctgcctgagctggtggcaccctcccctgggccggaagactgggaattcctgctaagtgtggcttctagagtgtttgtgtgtaccccgcttctg

SEQ ID NO: 112654 - DNA, 122 bp, Homo sapiens
tccatcatggtctgaaagtcaaacttcggcaaggcacggacgactgtgcagacacagcagcggcaagaagcgagaactgccctccccctcctctcggtgcagcccagccgggcccccttccc

SEQ ID NO: 112655 - DNA, 122 bp, Homo sapiens
aaattataaatcatataattaaatgaaaattcatatttgccatgctttattcgaacttaacgctgttttgaaagtgaagtcccttaattgtccttaggttttctgggtctctattttataaa

SEQ ID NO: 112656 - DNA, 122 bp, Homo sapiens
aacagccgcgggccctgctggcagaggaatggctgacagccgggcctctctccccaactgcgatgccgctcggctctggtttttaccgcaattacaatgtccgaagacagggaggaggcagc

SEQ ID NO: 112657 - DNA, 122 bp, Homo sapiens
acccgggtccgggctccggagtcaggatctgcgtgaagccttaggcctcagtgcactgggcgcacctgggtccggctcctgagtctgggtctgcgtgcagccttaggcctccctgcactggg

SEQ ID NO: 112658 - DNA, 122 bp, Homo sapiens
cagtaccatgctgggtgcctctggcgactacgctgatttccagtatttgaagcaagttctcggccagatggtgtaagtcatccagagaacaggagagtggttcccaagtagagaggggagtc

SEQ ID NO: 112659 - DNA, 122 bp, Homo sapiens
gacaaagggcgggagggtgccgagagggagcgggaaggagcgtggctcgaggggccggtgcgcccctcaccagcattgggctccagcagatgcacgacaccaccatgataccgacaagctgg

SEQ ID NO: 112660 - DNA, 122 bp, Homo sapiens
ggcgggcgggcgggctagcgccgggtcggccacgccctcgcccgtggcgggcgctggcgccgcggccccgcccacacgcaggccccgcccacactcccggacctggggttcgcggccgcagc

SEQ ID NO: 112661 - DNA, 122 bp, Homo sapiens
gcagttagggggtaaaacattgaggatgataaaagaggagacatccgcagctgaaaagtgcgctgcaaaaggcagtgggccgtttggtgtgccggaaacataagaaaccacagtacaaaaca

SEQ ID NO: 112662 - DNA, 122 bp, Homo sapiens
aacagcagggcacagcaaagaggcattacatcttcacatttcaagtcatttggctgtgcacggcagagttacttataaaacttagtaaagagaaatctacattaactgttgagccatccata

SEQ ID NO: 112663 - DNA, 122 bp, Homo sapiens
tgtttacttgtttactgtctttgtttattgtcctgtcttctcccactagaatataagttacgtaagggcaaaaactttctcttattttccactgtatggccagggtctagcacttggtagag

SEQ ID NO: 112664 - DNA, 122 bp, Homo sapiens
aagggctccttggtctagcagtaacgccagtgtctgggaagacgccccttgccgagcggacggtggtctagcggtagcctcagtgtcaaggaaaacacccgctacttagctgaccgggaaag

SEQ ID NO: 112665 - DNA, 122 bp, Homo sapiens
aaaaaaacaaacaaacaaacaaaaaactataaaaaaacaaattacctattgcaatacatacgtggtcatggaaaggtgtgtaggtgtgcataaacataccaacccatgttaatacaatctct

SEQ ID NO: 112666 - DNA, 122 bp, Homo sapiens
caggccacccggagcaccaggccacccggagcaccacaccacccggagcaccaggccacccggagcaccaggccactcggagaaccacaccacccggagcaccacaccacccggagcaccag

SEQ ID NO: 112667 - DNA, 122 bp, Homo sapiens
ctcacgcagccccactgctgctcctccctgcccacaccccttcgccacccaacactgacacgcacttttgtctgcattggtggcgtttctgccttggcgtgtaggtgagcagggcagggtaa

SEQ ID NO: 112668 - DNA, 122 bp, Homo sapiens
cggcgacggtggcggagccgcagagcgagctagagagcgagagcggtgagactctgcggacgtcttcccgcccgccgcgctccgccccacccagcctccgcagcctcgggccggatcgcccg

SEQ ID NO: 112669 - DNA, 122 bp, Homo sapiens
ctgccttgcaccgaccacgccaccctctgcaccatgcctaagcctctgtcaactcccaaacgtggttctgataaacgtgctcaccagcacgcatgggcttcccgttcgctcagcctcctgtg

SEQ ID NO: 112670 - DNA, 122 bp, Homo sapiens
ttttgtctgctgcactccctacagcgggcgattctgcacctgcgtggggtccggcaagcccgggaggccagtctcctgttcccaggcagcctgtatatatagactgcacacagtgtgtgatg

SEQ ID NO: 112671 - DNA, 122 bp, Homo sapiens
tagaaaatgggccttgtgccttcctggctgggctccgggcagctccaggaagctggggcccgtgctccacgtggagcccggcacccggcagctctccccgcggagccgggcacccggcagct

SEQ ID NO: 112672 - DNA, 122 bp, Homo sapiens
ggggccggggccggcggaggaggcgggcagcgaggaggcgggcccggcgggggagccgcgcggcagccaggccagcttcatgcagcgccagttcggcgcgctcctgcagccgggcgtcaaca

SEQ ID NO: 112673 - DNA, 122 bp, Homo sapiens
aatgaattaacaaaaggactggatactccatttctgatcaccatagagataaccaaattacgtttctcaaactctgtcatgctgagggctgcagtgacaacattttaggactagaacacatt

SEQ ID NO: 112674 - DNA, 122 bp, Homo sapiens
tgaatggatgattaggcagatgttttgttttgttactgaaatgcagtggattatatctaccgctcgtatctgctgtcacggctctagttcttaccgaacggccagcctggctgtgaattagt

SEQ ID NO: 112675 - DNA, 122 bp, Homo sapiens
gtgggtgtcaaggccgcatctgcgccagcctcccagcctggagtgggtggaggagccaggcggaccgcagacacacccaggcagcccaccctgcccaggacctggggatgcggggcgggaga

SEQ ID NO: 112676 - DNA, 122 bp, Homo sapiens
aagccactggccactctctaggaaaagctatggaagatgaagtcgaatcaagtttgaaaacggacaagtgggagcttatactacttgaactataaagataacctgaaaaatactggacctta

SEQ ID NO: 112677 - DNA, 122 bp, Homo sapiens
cttctgggagtcggaactacccaaactcagcaaacagtctagtatagaaccttgagcaaacggttcctgttccagcctaacaccgcctgctgctgccacctctgccatccatgcagcctccc

SEQ ID NO: 112678 - DNA, 122 bp, Homo sapiens
ctgggccccgacaggcaggtaaggctttcaggaggcggaggtctttttagggggcgggggcgctggccctttgaactgctctggggcctgaagccacagagcagacagctgagcagccgccc

SEQ ID NO: 112679 - DNA, 122 bp, Homo sapiens
gcgaccggattggtgcaggcgctctgctgatcgctgtggaaactcgggcggcggggaacgcgggaggatgtggaacccgaggcggggggagccggaggggcgggcagaggaggtgtcgaggc

SEQ ID NO: 112680 - DNA, 122 bp, Homo sapiens
gaatgtcccaggcttccactgccttgtgtgagtcactcccaactctgcaggaggctggggcgtggccaccactcagagccacagcggcgccctgtggccagagcgggcacggctcctctgcc

SEQ ID NO: 112681 - DNA, 122 bp, Homo sapiens
ggctggactctgccctaagccaggcgactgcaggggcagccggggcgcagtcctgcggggcgcgcaccacgtgcttttcagccaatcgccgcggccgcttgattcaaagtgaactcctcaaa

SEQ ID NO: 112682 - DNA, 122 bp, Homo sapiens
tcataccccctacagtacccagcgcgccctcaacacagaacagagtgcggctcaaagacccggagggaaatggaaaaattatctggcaaatctagccccagagaaagaacactatttcctca

SEQ ID NO: 112683 - DNA, 122 bp, Homo sapiens
gcacatcagggactgtggctcccaccttccctgctcctaactcttctgtcctcccaggcacgccccacctccagccctgggctcaccccaaccatcacttcaggcaggagagtccccatttg

SEQ ID NO: 112684 - DNA, 122 bp, Homo sapiens
gtggatgcagacgtgcacatgtgtgtgacgtttcgggtttgtttccatcctctccagtatcggcagtggctgaaggaagaatatggagagagccctttgcaggatgcagaagaagccaaaaa

SEQ ID NO: 112685 - DNA, 122 bp, Homo sapiens
ccagccgccgccgccgccgccgcggaggtcgcccaggtgggtggcagcctgcgctgcgggcgccccgactgatcctggcgcctcccacctcggggctccagcccgggcctcgccgtgcgccc

SEQ ID NO: 112686 - DNA, 122 bp, Homo sapiens
tggcggcacctgacttgctggatcctaaatctgccgctcagaactccaaaccgaggctctcgttttccacgaaacccacagtgcttgcttcccgggtggagagtgacacgaccattaatgtt

SEQ ID NO: 112687 - DNA, 122 bp, Homo sapiens
cggctctaccaatcagcaggatgtgggtggggccagataagagaataaaagcaggctgcccgagccagcagtggcaacccagtcgggttctcttccacactgctaaagctttgttcttttgc

SEQ ID NO: 112688 - DNA, 122 bp, Homo sapiens
gttggcgcggtcagggccgcgggcctgtgaggggaggccggcggacaggtccagtgaaggcgcgggcgggccgggggcggctctttctgggctgggcggggcgcggggggcacgtatcgggg

SEQ ID NO: 112689 - DNA, 122 bp, Homo sapiens
aggcggcagcgaggaacccggtgggggccggagcaacaagcggagcgcggggaaccgggccgccaatgaagaggaaacgaaaaacaaacccaaattggtgagtgctcccgcagcccccgccg

SEQ ID NO: 112690 - DNA, 122 bp, Homo sapiens
ggtcactctccaccccctggttccaggcaggactaactcagccatcccccacacaagcctcgagtttggaatgtctcgggagaaaaagccttcagccccgccatgaccacccgtgctggcct

SEQ ID NO: 112691 - DNA, 122 bp, Homo sapiens
cgacgctcaccactccccagaaccaagtggatatgctgctccaggaaatggcagatgaggcgggcctcgacctcaacatggagctgccgcagggccagaccggctccgtgggcacgagcgtg

SEQ ID NO: 112692 - DNA, 122 bp, Homo sapiens
ttttttcgactctgttctctccctgaaatgggtcctcccactttcccttttctacttgctcgctcttctttccccaggaaactttgcaagaaaggcaaaagcgaatcccaggaaaaagactg

SEQ ID NO: 112693 - DNA, 122 bp, Homo sapiens
ggcgagctggacgggcggggcaggcgtcctggttgtgacgcacgccaccgcgggcgtgcgcgtccccgcttagcaccggccctcagtgcgcttgcgccactagatgacccgccccctcgggc

SEQ ID NO: 112694 - DNA, 122 bp, Homo sapiens
atccctggcctccactagctagatgccagtggtacccctaacaagcttagatacccaaaacgtctctagacattgccaaatgtccatggaaggaggggttggtgtagaggagggctgcaaaa

SEQ ID NO: 112695 - DNA, 122 bp, Homo sapiens
aaggcttgtttggacacattttctcagccttttttttttttttttaacctctggtagaaacgggcatagttgaaagatccattgacctattgtattctgaaactcaatggatcatcagctta

SEQ ID NO: 112696 - DNA, 122 bp, Homo sapiens
gtcctgccaagcaagcccttggcagccagccaggcaggagtccttctctggagctggggccgaaggagagacgaggactttgaacaaagcagcaaccaaagtggtttggcttagggaagcca

SEQ ID NO: 112697 - DNA, 122 bp, Homo sapiens
ttggctaaaaaaaaagttgctactcctggcagccctggtttgtcaaaaggggatgtcaagcgctttacaatacctgggattgatgaggcgggcgggccaatgagctgcgcgcggcgcctcgg

SEQ ID NO: 112698 - DNA, 122 bp, Homo sapiens
agttctgcctggggggcgggggtcaaacccttccagctcagccccagggtcaaacgcatccgcccccacacccacctctggctggcctgggtcccaggttctcgggctccggaggcacagac

SEQ ID NO: 112699 - DNA, 122 bp, Homo sapiens
ttccatcttggatgctaatctgcaatattctgattaatcccagttccaacaattcatctacgatttctattttatctttttaaaaaaattattttttattttttattttttgagaccgagtc

SEQ ID NO: 112700 - DNA, 122 bp, Homo sapiens
tccatccgcccactcgagcccacctgtttgcggaccacagagcggcagcacatccctacacggggctgtcaggcaaggtcaacgcgctagagtgcaagagcctttgctttgcggattgccgc

SEQ ID NO: 112701 - DNA, 122 bp, Homo sapiens
aggcccacgtgatccgcagggcggccgaggcaggaagctgtgagtgcgcggttgcggggtcgcattgtggctacggctttgcgtccccggcgggcagccccaggctggtccccgcctccgct

SEQ ID NO: 112702 - DNA, 122 bp, Homo sapiens
accgtaccccgctcccttcagccccctgctccccgcattctcttgcgctccgcgaccccgcgcacacacccatccgccccactggtgcccaagccgtccagccgcgcccgcgggcagagccc

SEQ ID NO: 112703 - DNA, 122 bp, Homo sapiens
gtgagctcagtctgcctgccccagccttccagtctccaggacagctgtgtggttgccagccggaaaaggcctgaccccagggacacagctgagggttgagatatgaaactgcagagccactc

SEQ ID NO: 112704 - DNA, 122 bp, Homo sapiens
ttcaacgctgcacgtcgggagaagcaggtttttgggattttttttagagggatcgggtgtcgtgtttttcagcagtagtaacgacactcttatgttaacatgggggctttcacttttaccaa

SEQ ID NO: 112705 - DNA, 122 bp, Homo sapiens
atctttccccatcctacattctccagctgtgaagaggagctgcctggcaaggaaggtgtacggcaataggtggtgactgatgagaacaacaatcagaggaaaataagggatggaagcaaaag

SEQ ID NO: 112706 - DNA, 122 bp, Homo sapiens
ttacatggaaatcagtcccagtgacagcacaacaggctgcttttgtgtcttcatgaataacgcaatgtgctgggtaaatgcttttccccatttagaaacaggtagttaatgggaattgaagt

SEQ ID NO: 112707 - DNA, 122 bp, Homo sapiens
tgggctgagacatacaggacagagcatggatcgcctacagactgcactcctggttgtcctcgtcctccttgctgtggcgcttcaagcaactgaggcaggtgaggctggggagcaggaagacc

SEQ ID NO: 112708 - DNA, 122 bp, Homo sapiens
cctgctccatagcaaagagggagaaaaggagggtgcagcgagggagagggggagcagagccgtgactctgcagccggcctctgtgggtgagcagccggcctccagctgccctttccggttcc

SEQ ID NO: 112709 - DNA, 122 bp, Homo sapiens
gcaccagctgccaagcagctgcctggctatttatagcctctgtcatcagccccttcctcccgcccttggccctactcctgggaccactctccctacccccacccactttccaagggtccggc

SEQ ID NO: 112710 - DNA, 122 bp, Homo sapiens
acacgaaaggttccaacgtccatatacatacaatctttttaggtcaagctgctctctactcgggtgcaaaacatgacatgaagcggctgtgtctgcctttgcactctgagtggggatggctg

SEQ ID NO: 112711 - DNA, 122 bp, Homo sapiens
catctgcccttcaaagactgccttcccaccacacacacggccggggcttgggatggtgggcggtcggtggtcggggctgtaatttgcacacgtgtttgtgatttagtgattccgattgtcgt

SEQ ID NO: 112712 - DNA, 122 bp, Homo sapiens
ttaataatcagaaggggccagaggaagccacctgacacatttgtgagacaatttaaaaggcgttctcatacattctcactttgatacaacaaccctgcaaagtgcgcacggaaggtgttatt

SEQ ID NO: 112713 - DNA, 122 bp, Homo sapiens
aggctgaaggaggagcacagagggcttctcaaggagcatggctgccgggcctctgtgggccggattccgctcacagaccccacaacagggaaggccccaaggccaggctctggaaaactatc

SEQ ID NO: 112714 - DNA, 122 bp, Homo sapiens
cctgcggcctcagaactgcgctgttctggcgtctagccagacaccagcagacctgtcatccgttgccgcaagtgcccatcggctgggaagaccaggctgcaggagacccgggttgctgtcgt

SEQ ID NO: 112715 - DNA, 122 bp, Homo sapiens
tctcgtccaggttcttggggatgtgactgcatcctttccccgccagtttgtaacgtccctcgtcttcccctttgcaggcatggatggaacctcaccgtcctccccaataacacagggtccat

SEQ ID NO: 112716 - DNA, 122 bp, Homo sapiens
ctgtgctggcattcttgcctctctctctctttctctctctctgtctcttagccttgcagccgtttccctctgcgattcatgtaagtgtgactcgatttcagggaaagggaactcgcgtgggc

SEQ ID NO: 112717 - DNA, 122 bp, Homo sapiens
gcatcccacgtgggcctgcactcatgagggcagagggctggccaaggtagacgtgaccaccggaccagctgagccacgatgggcagcttgaatgtgttaatgaacatgaagcctgcttagca

SEQ ID NO: 112718 - DNA, 122 bp, Homo sapiens
tgctcactgctgactagagtcacagcactaaatacaaaattaacacccatttcgtctttacgaagtgttttttaaaagtatttaaatcagtaagagattcttaacaatcaaatataattctt

SEQ ID NO: 112719 - DNA, 122 bp, Homo sapiens
ctcctcacttcccagacggtagggtgaccaacagaggtggtcctcacttccccgacggggcggcagctgggcagaggcgctcctcacttcccagacggtggagtggccggcagaggcgctcc

SEQ ID NO: 112720 - DNA, 122 bp, Homo sapiens
gctttgcagcagatgtgtgacctggcgttcccctgagtgctcggaaaatggccttgtctccggtcgttcccgttcaggagcaggtacctggggtgctccggggatcccgttgtctaggatgg

SEQ ID NO: 112721 - DNA, 122 bp, Homo sapiens
ctggaaaagtaggggtgggggcgcggtcgtgaagggtgggacttctggagcaacgctgggcgggttgggggccggtcggagccggacaggcggctgggaggtgggatgggcggggcgcttgg

SEQ ID NO: 112722 - DNA, 122 bp, Homo sapiens
ttagcatgagatagtatactccaatcacctggatcatttcttgtctttcaaagattcattcgcctgaatttacatgacttgttttccatttaaatgctttctctgacttttcactgggtttt

SEQ ID NO: 112723 - DNA, 122 bp, Homo sapiens
acctgtagcgggtgctgggctccaggcctgagatgaggatcttgctctggtcgccgtccacgagcaaggcctggggctgcccattcgtgtcctcatactggaccacgaaggaatcaaagggg

SEQ ID NO: 112724 - DNA, 122 bp, Homo sapiens
ctgcatcttgccttccttgcggcttcgcatgcccttggtggaacccagctcggcggacgacgaggaggatgagatggaagcctgctggaaaccgggcaaatcccacagaaaactgatgagga

SEQ ID NO: 112725 - DNA, 122 bp, Homo sapiens
ggccggccgagcgtgcgggggcgcggccgggggcgggcgcggggcaggggctccgggggccgctctccaggcccagtccggtgcccgctgtcccccgcccccggttctagaacaaaagagcc

SEQ ID NO: 112726 - DNA, 122 bp, Homo sapiens
tgatggggttttggggttgaagggcatctgtgatgggcattgagccacgctggccttcgccgggtgctgtctcagctgacgccccctgaccccatgtgcaaccctcaggccgcaggaacccg

SEQ ID NO: 112727 - DNA, 122 bp, Homo sapiens
gaggccgaccagcttatcagcggaagctagggtgtacccccaggtgttgtgcagattgggcgaaattcggcctgtctttctgtattttaccagagggcccccctgttggggaagtctctgag

SEQ ID NO: 112728 - DNA, 122 bp, Homo sapiens
gggtgacagggatcgggggagagttgatgcctaaaggaggaggccgggctttgtggggcgcgtggccatctaggcgataaatgagggcatcgcccactcctgccctacgtgtacctgagtat

SEQ ID NO: 112729 - DNA, 122 bp, Homo sapiens
actgtgtacaatagcttctgaagttttggagggtattggtgtagctgttatttctgagaccggagaaaatgacggtagagtgacagtttctctaatcatcagttttcaaagagtatgttttt

SEQ ID NO: 112730 - DNA, 122 bp, Homo sapiens
tgtacatagaatatacccatgtgaagacatatttaagtggatgtgtattgtgtgtttgtgcgtttctctacagtgggtttacctgacacatttgtgtgcatatggactggaaagcattattt

SEQ ID NO: 112731 - DNA, 122 bp, Homo sapiens
catgaaggtaggtagtgaagaatctacagacatgactccaggaccctggcaccccccccccgccttgctctgctcttggcccaggtactcaagctgcagtttctagcaagacctcatgggtg

SEQ ID NO: 112732 - DNA, 122 bp, Homo sapiens
tggctgacaacgaaggggagctagtcacttttcctgccacgacgactcgcgtccgcctctcgcctggagtacccttcccgcggctttccctgcccgctgtgaaccgaaaagctgcggcccgc

SEQ ID NO: 112733 - DNA, 122 bp, Homo sapiens
tgccctaggaccaccaccttcttcatcaagtaactgcaaggattaaatgagataatattacgtacacagaaaagcggttaccagcacaggactctgggttcctgtcctacctcttgcacttg

SEQ ID NO: 112734 - DNA, 122 bp, Homo sapiens
gagcgcgcccattggccaggccagggggcgggccccgcggctgctggggaacggaaagcccgccccctcgttcgccgcgcgccccctccacgcgcgtcctgccgcacctgagagcgccggcc

SEQ ID NO: 112735 - DNA, 122 bp, Homo sapiens
tgaggttgcatcagccggggcgggggggggggggggggggggggggggaatgcacgcatgcgcagtcgtttctgtgtggtctcctaggagaccgccccaacagccctctaggttaaaggtct

SEQ ID NO: 112736 - DNA, 122 bp, Homo sapiens
ctcactacccgggctggcggggctgcccggcagctctgagtgcggggtccaccgagccgacgcccacccagaactagcgctggcccgcaagcgccctgtgcagctccggttccctcccgttc

SEQ ID NO: 112737 - DNA, 122 bp, Homo sapiens
agagctccccgagccgggacagtcacttactctacaggcagtggggcccgacacagacagcgccgcccccgccagccagcctcgcacgccctcggaagcgcaggctcccggcgctgcgctgg

SEQ ID NO: 112738 - DNA, 122 bp, Homo sapiens
ggaacctcctgttcctcgtccaggagaggaaacgcacacccgggccggacgcacagaagccgcaccctggctggggccacaagcctgacagctaccgacaagcccccacccacaggagcacg

SEQ ID NO: 112739 - DNA, 122 bp, Homo sapiens
caagaatcagagtcggtgcttttagaatccaagtacataggcttaagctctggtccctcccgttattgattctgcaatcttgagaaagttaattgacctctctgaaccttagctttttaatc

SEQ ID NO: 112740 - DNA, 122 bp, Homo sapiens
tgcagggcagggtggtgggggcggtcgatgccacgggtgtagatgccaccgccggccacgcgctccagggggctcgcggcccccgtttcggctgcgcaaccacctccctggatcccagccac

SEQ ID NO: 112741 - DNA, 122 bp, Homo sapiens
ccccctccagatgccggacgctgttttcgtctcatccccgtctgggttggatggcgaagacggcgctcagagcacgcagcaccgggaattaacagcgagttttgaaatctagagctcgcaag

SEQ ID NO: 112742 - DNA, 122 bp, Homo sapiens
gcgcggggaaacctggcgtactggctgtggcttctctagcgggactcggcatgaggctggcgcggctgcttcgcggagccgccttggccggcccgggcccggggctgcgcgccgccggcttc

SEQ ID NO: 112743 - DNA, 122 bp, Homo sapiens
aaacatttgatctgcacttatacagttaggcagtcaaagaactaagagatcagccaagttcgccctagtccagcacactttcaactaaagtatattgccacctgatttcaaaaactgtcaac

SEQ ID NO: 112744 - DNA, 122 bp, Homo sapiens
gctggaagccacacacatctggatctccctgccattctgctttatgtacatcattgctgtcgtggggaactgtgggctcatctgcctcatcagccatgaggaggccctgcaccggcccatgt

SEQ ID NO: 112745 - DNA, 122 bp, Homo sapiens
gcccgtttctggcgctggccaagtggaaactgaagcggcctccctgggaggatctgggtgcgctgcagggggagcaggccatctgtgtgcctggaaaagaaacccagcactaccgaagacaa

SEQ ID NO: 112746 - DNA, 122 bp, Homo sapiens
accacagcacccccaatctgccctgagcattccttctgcttcctcaagatggggaagttccggagcctgctttttacctcggaggacgatgagaggatccacatggtgaacaacttccggcc

SEQ ID NO: 112747 - DNA, 122 bp, Homo sapiens
ccccatcctgtgcctataaaaacccgagaccctaacaggcagacacaggcggctggacgtcgagaggagcgcatgaggggaggaacacacaggcggctggacgtcgagaggaacgcaccaac

SEQ ID NO: 112748 - DNA, 122 bp, Homo sapiens
gggaagggcgcgaccgccttcccttttccccactggaagggaattctgtcccggcaatcacggagacgacagcaaaagggatctggcccaggccgggcttccagacaccggcgcccttggag

SEQ ID NO: 112749 - DNA, 122 bp, Homo sapiens
tttgaagggccagcctccagggtccctttgtgtgaagcagtgtcagcagggctgcgtctgcgctgtcagggcacactgccgggaggatattgtctactgggttttagcccctctccaccatc

SEQ ID NO: 112750 - DNA, 122 bp, Homo sapiens
cacttgccctcatctcaagaagggccctatgcatggccacagaagtctgaggccatagcccgtgattttggcactgatcatgccctccctgggggtagcaggagccattagttcaatcctag

SEQ ID NO: 112751 - DNA, 122 bp, Homo sapiens
ttaagcaagcgccgcggaccggttggaaaccacagccgggatttacacgcccctcgtttacgccagcttcacacccgctcactagtgctcgcccctgtgcctgccatcgctgcctcacccag

SEQ ID NO: 112752 - DNA, 122 bp, Homo sapiens
cttctcacctaagggcttgcagagtttcttcacttttgattcctggcttccaatgcctcccgtttctgatccaaatgtatcatcttctgccagaagatggtctatgggttatgctttcttct

SEQ ID NO: 112753 - DNA, 122 bp, Homo sapiens
tttcctgtaagatttaatttgatattaacatccaagaactgcaagaaaattcctcaaccacgtatggcagacagtttctaaaaacattctgacataaaacacgctataatatctgaaaaaca

SEQ ID NO: 112754 - DNA, 122 bp, Homo sapiens
gcgttagagaccaggatgcggtgtttggagggccctggtgttggagaccaggatgcggagcgcggcggtgtgctgcggtgcactgtgtcctctgaacatgcgaagggccctgggcggctttt

SEQ ID NO: 112755 - DNA, 122 bp, Homo sapiens
gggaacagcagctctcagagccccctgcccctgcaggccccgcagaggcccccctcaacccggcaattctcccaacccggcggttctcccaaccccaacccggcggttctcccaaccccaaa

SEQ ID NO: 112756 - DNA, 122 bp, Homo sapiens
ccgggcggaggcgctgcctccagacccagcctgtgtgcagaggggctggcggagctcggacgccgggctcgctggcctttgccgatggacctcgggtgtgtccaggccgggcgagggccggc

SEQ ID NO: 112757 - DNA, 122 bp, Homo sapiens
ccctgagtaggcattgacttgatacccaataatggctgctaaggagccgttatgtagtgccgtgtcagtgatccgtgcgttgaggactccccgagtacgcattgacacgatagaccggaaca

SEQ ID NO: 112758 - DNA, 122 bp, Homo sapiens
tgagcggccgcagtttctggagggagccgctgcgggtctttccctcactcgtcctccgcgcgtcgccgctcttcggttctgctctgtccgccgccatggcccagtgagtgactcgccagggg

SEQ ID NO: 112759 - DNA, 122 bp, Homo sapiens
catgggtacgagtgggcgaggaattttttttttttaaggcagggacagcctggttctgaccgtgcaaagctgtggctttgcctcctatgggcgccttgtgagcagcagatccgacttcctcc

SEQ ID NO: 112760 - DNA, 122 bp, Homo sapiens
tgagtggagggtcgttgcgcatcctcctcctcactttcttcctgccgggacgttctcagccgggaactgacagatcctgcttagcccggggcccagcactgagaaatctgggaaggaacgtt

SEQ ID NO: 112761 - DNA, 122 bp, Homo sapiens
agagtttgcacaagaaacacatcaggatgggcttcctcttgccatagagcacaaagccatcgaatttggacaggtccacattgttgggaacatctttggatacgcaggagcttttggcagaa

SEQ ID NO: 112762 - DNA, 122 bp, Homo sapiens
gagctgtcgtggatagattgcagaaaaggatgaaaatgggcgcggtgaaggtagaaggagcgaaatgcaaatggtcagaagcgggctgaaagatgaagcggactcgctgaaggcaagtgggc

SEQ ID NO: 112763 - DNA, 122 bp, Homo sapiens
gaagcttgccagccgctagtacgcccaacgcaactctcacctgcattgcggcggccgaggcggctgccacgatttcacttccggttttccagtcagcaaacgcctacgagaaggcttcgtcc

SEQ ID NO: 112764 - DNA, 122 bp, Homo sapiens
gtggatgcagagggaatgggagggaaccaggctcagaggcccgttagagaacgtcctaggcgcccatcaggtgagccggcagcatgctccagctgaaccacaggcccatccttggccctgga

SEQ ID NO: 112765 - DNA, 122 bp, Homo sapiens
ccacgatgcagcggcccctgtgcccgggccacgggccctccagttcaggcagtggtgactcggcctgggctttattagaaaaggcaccctgaatacacagggctccgtagggaaggtgtctg

SEQ ID NO: 112766 - DNA, 122 bp, Homo sapiens
cctggatggcgatgggcatcatcttgccctcgggtccaaagtgcagcaggcagaggggggcgcagtggtgctgcttccggccgctgagctccacggtggggatgccctccatgatgcggtag

SEQ ID NO: 112767 - DNA, 122 bp, Homo sapiens
tcctccagcagcagcaccagcaaaaacttccatagtgatgatttccagctttgactagctcgtactctgtgccctgtcctgcactgtgtttcttatgcgttgttccactccatcctcataac

SEQ ID NO: 112768 - DNA, 122 bp, Homo sapiens
gaggaagaggaggggaaaaatgcacagtcgctgaagccaaagcgcggctggccggagggccgtgttggcaggcagagcgactgtcttcagacttgctcgcttcccagcacagaagcaggcct

SEQ ID NO: 112769 - DNA, 122 bp, Homo sapiens
ccgtgtgtctgtgtgtgttgtgcgtgtgtatgtgtgtgtgtgtgtgcgcgcgcgcgcgcgcgttcttcaaggagcctgcatacaagctgcaacagctccaggtaggagctcgaatgccgcca

SEQ ID NO: 112770 - DNA, 122 bp, Homo sapiens
tgtcaagctgccacaatcgccagggaagattccatctctctctgatggagataaatggaacgggagacgtggggctgaagagcgggggctggctgaagggaatgaggtgagaaacatcttgg

SEQ ID NO: 112771 - DNA, 122 bp, Homo sapiens
catggggtccaaatcccaaataatctctatttgctctgcgttacctttaaacttaggctgcgttgtgtgattcaagtgacagcctagtactgcttaacaattagtctagtgggataccaggc

SEQ ID NO: 112772 - DNA, 122 bp, Homo sapiens
ggcacaggccgcggcagataagggggcgcggagaggcccaggcccggcccaggcaggaggcgtcgggagacgacgcgacccaaggcgggcgggcccggggaaaaccgcccgcggccagaccg

SEQ ID NO: 112773 - DNA, 122 bp, Homo sapiens
ctctcaggagggcaaaggaccaagctctgtcctcctcccgatctaggctgaatcagcccacggtcccccgggtggaggagttttctgccaacgtgccaggtggacccctgcagcgtccgcag

SEQ ID NO: 112774 - DNA, 122 bp, Homo sapiens
aaaaaaagtttttaaacttttaaaaaataaaaatgaacaaactcggcggctcagcctagtcgcagtgacctagagggagagaagcaggaaggaaaggacacagcccctgatgctttctccag

SEQ ID NO: 112775 - DNA, 122 bp, Homo sapiens
gagtgactacaatgcagttttagggctggcgatagacaactgtaaaactccaggaaactgcggataggagagtcgttgataacctttctgtgagatggctcttttgagctgtgtttgataag

SEQ ID NO: 112776 - DNA, 122 bp, Homo sapiens
ttctttatagcaatgtgagactggattcatacagagctcttcctgagagaaaaaagaatgcgaaacacagtgagtgatcaaaggatcaggcaggaagttctaacatttgagaagggcctggg

SEQ ID NO: 112777 - DNA, 122 bp, Homo sapiens
atgccaccatcttcggtggatggccagagccaaacctccttattgttcccctttagtttacgaataaagctcgtcaggccctgacagaagaatcagccccaaagcagaatgaagggagtgtg

SEQ ID NO: 112778 - DNA, 122 bp, Homo sapiens
tgtgttgaggatagttgttaaacactgaatatacaactcaaactgtcaggttcagcatgacggacatatatgcacccggttattgcagtggaatatgtttgtaatcgcagtggaatgtgttt

SEQ ID NO: 112779 - DNA, 122 bp, Homo sapiens
cccggcctcctggggttcaaaggcgcacggcaggcgataaccgcactgggcgttgagcgccgtgagggaagcttctggagggagcgtgggactggggtgggggcagctggcgcagcttcgtt

SEQ ID NO: 112780 - DNA, 122 bp, Homo sapiens
gaggtgctgagcctgtgcagcgagcaggacatcgagggctggctcgagggggtcaacagccgcggcgaccgcggcctcttcccggcctcctatgtgcaggtgatccgcgcccccgagcctgg

SEQ ID NO: 112781 - DNA, 122 bp, Homo sapiens
acctgccctcatttctctccgcagttgggcatctttggtcttgaacagctcaggaaagtccgagctgacactcaggttcttactccttagatgagatccagtgtgcagcgttcttcctagtt

SEQ ID NO: 112782 - DNA, 122 bp, Homo sapiens
gggagtttttctcatggaggtggagtgagcaacaggggaccagatgactcccttgcctcccgcctcccccggccgggggctggtcccctgggaagcaggctgggggtcactccgtgtgaaca

SEQ ID NO: 112783 - DNA, 122 bp, Homo sapiens
aggatctaagggatgaggactaaaggggtctgttcctcctccaggcagctggcatggaaccgtccgtctcagcggctgcttggtggtggcggtgtggatgggtgtggctctctgtttgctgg

SEQ ID NO: 112784 - DNA, 122 bp, Homo sapiens
tagaatgtgcacgaaaggtttcaatgggaaattctaatttgaataaaaacgcacaaaacgcgaggaaagcctaggaacacatcagccgtatactttgccgtagagaagttaaggatgaggaa

SEQ ID NO: 112785 - DNA, 122 bp, Homo sapiens
cacagctgctccttgcgctgctgggggaggttgctgaggtatggggaagaggtacgctgtcgctaagcaacaagaggctgtgcacctggaggtcctaggaggagaccctggcaccatcggta

SEQ ID NO: 112786 - DNA, 122 bp, Homo sapiens
tgtgccggacctcccaccccactcacatgtctggcgagtgcacggtctgcacgtgcccggcgtacagcagcttgtcatccatggggatgagcacacgcaggccgtccttcagctcatccttg

SEQ ID NO: 112787 - DNA, 122 bp, Homo sapiens
gccgcagcacaggatgtactccagcacctcacccggcaggttgacgaggcagctgaggcccgctacctccggcgcggcctcctccgccagcgccggcaccacctccatcgcgctgtcgactg

SEQ ID NO: 112788 - DNA, 122 bp, Homo sapiens
tcctcaggcattcggtgctcagtgttgccttgtgctgtccaatataatagccattcgccacgtgtggctatataaacgtaaataaattagtctatatagaataaaatttaacatccagttct

SEQ ID NO: 112789 - DNA, 122 bp, Homo sapiens
gagtgctgcagtttgttttcacagtaagtgcatttgtctcaatcaatgtagatggacaagcgtaagttccctgtttgttttctttttcccagttgtccctcatatcacagatgcaatccagg

SEQ ID NO: 112790 - DNA, 122 bp, Homo sapiens
ctgcgcgcggggggcgagtgcaccgggcgctcgctccctgccgagctcttgtcgcccgcccgagcctttgccaggggatgaggtgggaggcgctagaaaccacttagctacagccaaccgcc

SEQ ID NO: 112791 - DNA, 122 bp, Homo sapiens
aagggtctcctggggaaggtgctagcacggctcaggcccggctggagctgccttcgctaccgaagccgtggcgccacacacccagtgatccatccaaaaacaaggactgaagcctaaattct

SEQ ID NO: 112792 - DNA, 122 bp, Homo sapiens
caaatgtgttgctattgcgtccatagcacggacttgcccatttcaactcaatatatgttacgcttggggtagtttattacaatgagcaataaacattctcataatcgccaagacaagccaag

SEQ ID NO: 112793 - DNA, 122 bp, Homo sapiens
ccacaccagccctggcccgtcagctgggcccccaacaagacattcacactggccctagtccgtcgtcccccaacatgacatccacactggccctggcccgttggctcggcccccgacacgac

SEQ ID NO: 112794 - DNA, 122 bp, Homo sapiens
agtcggtccctcccaggtccccaatctaggtcaccagcggggaagggctgcgctgggggtcgctagagagggtgaggggcgggctgtctgcttccgaggtgggcgaggagtgaaggtttcag

SEQ ID NO: 112795 - DNA, 122 bp, Homo sapiens
tgtttctgctcctctcccctctctgggcgtgaaacggggacatgggcacgcgtgtgcagccgtgtgtgcgtgtgtgaaacggggacgtgggcacgcgtgtgcagccgtgtgtgcgtgtgtga

SEQ ID NO: 112796 - DNA, 122 bp, Homo sapiens
ttgggcacatctgcaggctggcgcctggagatcctggagcctctgaaaaacgcggcggtccgggccggcgcacaggcatgcttcacctgcacgctcagcgaggcggtgcccgtgggagaggc

SEQ ID NO: 112797 - DNA, 122 bp, Homo sapiens
ccacaggtcctcggcggggctccgctcccgtgagccgcatgtggctggtgagctctgaaacgtggctggcccaagttgagatgtgctgtaagtgtacaatacacaccaaatttccaagactt

SEQ ID NO: 112798 - DNA, 122 bp, Homo sapiens
tacttccaccacccagtaaaaaacctcgcgcccatcctccaagcccatgtgtgttccgatcggtacactaaggcaagcacctgggaacccggaatacagaaagccctctgtcctcgcgataa

SEQ ID NO: 112799 - DNA, 122 bp, Homo sapiens
aagagttcgggacagtttggcaaagacttagggatggggtgtcctcagtacggcaggagacgcaaaggaaggtatacagtgggctaggagactaaggacgagaagacacagttacgacttgg

SEQ ID NO: 112800 - DNA, 122 bp, Homo sapiens
tagttttgacagaggtttcactcaggtgggtgtggccaagaagataggactactccccctcggctcccaatcaccagttatggtatctcaccaaaagggacaggctgtgagatttctcatct

SEQ ID NO: 112801 - DNA, 122 bp, Homo sapiens
catggctgagacccaatccctgggcgcccctggtatccaaagggcccagggaccctgttgcgctgccctggcctcggcattcgaggctcccctagggccgtgcctgtgcgtgtgcgtgtgcg

SEQ ID NO: 112802 - DNA, 122 bp, Homo sapiens
ctctgcgcggcagtgccccgtgtgtttgtgggtctgtgtctgggtgtgagcgtcatggtgcgtgtgttagagcccgtggggccccggtgaaaggctgtggctctgggtgactggtgtgtgtg

SEQ ID NO: 112803 - DNA, 122 bp, Homo sapiens
atttcctcttaaagaggtggctggagctgaaggcatagccaaggtaaatgctcctttttccgacctctcccaaatcagggtttaggctctttttcatcaaatataaaaactcaacccagttc

SEQ ID NO: 112804 - DNA, 122 bp, Homo sapiens
cggtggcatggctggccttattctacaggtaaggaacttgaagctaagcatcagtaaccccgtgaagtcacagttagtataggttggaattgggattcaaatctgtacctgactttataatt

SEQ ID NO: 112805 - DNA, 122 bp, Homo sapiens
cgccatccccagagagcaaagaccgcccgaaactgcaattcctttgctgaagttaggagccgcccggggctctgtggggcctgcgaggtggctcgagggactttgcagaagcgcgcaggaac

SEQ ID NO: 112806 - DNA, 122 bp, Homo sapiens
cttcctcctagactgattcatagaatgtttcctcccccaggaagaaggtctttgtaaaggcgactttgttctcacttgtttgatgcatcaaacttccattgagtgctgtgggcaaggcccta

SEQ ID NO: 112807 - DNA, 122 bp, Homo sapiens
cagcatcagctcctactgcaaaagcaagggctggcagcgcatccatgacagccgccgggacgactacacgctgaagtggtgtgaggtcaagagccgagacagctacggcagcttccgggaag

SEQ ID NO: 112808 - DNA, 122 bp, Homo sapiens
acctcttgcaatttgagtattgtctctgctgcttcatttaaactctttaagtgtgctcatcgccaaatctttcttcccagtcctcctcctgtacctccaacctagccagctgtatttctgtc

SEQ ID NO: 112809 - DNA, 122 bp, Homo sapiens
cagtgccatttcaggtgccaatcagtgaccaattggctataaactgggggttcccatgaccgtctttttgggtttaatttgctggggttgcccccagaacagaaggtaacacttcacttaca

SEQ ID NO: 112810 - DNA, 122 bp, Homo sapiens
ggaagaagggggaggaaatgctcgggggagccggaagaggcactgccagcatcaactccacgcgcgccccggcctcggcgcccggcctcggtcacggcttctctcggaggtcccccggggac

SEQ ID NO: 112811 - DNA, 122 bp, Homo sapiens
gctacagaactcccgcagcgctgcaaatcatatgccaatcctgcatatgaggtacaagaacggcattgggtcagcattttctgagtgtgtttgtaacctgctgtttggtgtatggttacaca

SEQ ID NO: 112812 - DNA, 122 bp, Homo sapiens
ccgggggctgctgagaaaggccctgctccctggaggcaacaggtgctgagagacctggaacgaaaaacggtcacagacaacccaccagcctttcaaagtcaacgtggtaggtggcgataatc

SEQ ID NO: 112813 - DNA, 122 bp, Homo sapiens
actgttctctgagcactgggagccaaggaaggaggggctggcctgggctgaccccttccccgagtcatggcctctgtgggcagtgctctctacctcagggtgaacccttcacagggcaacag

SEQ ID NO: 112814 - DNA, 122 bp, Homo sapiens
aagtgatcttaactacgttatgtgttcctaacacactacagctgtgttccgcgtcagcgacgcagggcagaaccatcattgtattaacctttcccgctcatgggacgcggtgcttagtcccc

SEQ ID NO: 112815 - DNA, 122 bp, Homo sapiens
taattattcttcaatgggttagcacggggcgcacgcacacacgcgcgcgcacacacaccccgccgaggtacccaatcaatgcacaaatcttcggggtccctttaacctctgcggatgactcc

SEQ ID NO: 112816 - DNA, 122 bp, Homo sapiens
gccctgagtatgatttcttcatgtactgaatgacatcccatcccagcatgccctctatcacgtcactacatccagattttccctccatcacacgatgtagtccagtgtgataaataaagtat

SEQ ID NO: 112817 - DNA, 122 bp, Homo sapiens
cttggttttgaagcaaaccagccccagcaactcattagaaggcctgtaggagcaggtccacgttccccccggacttcggccagctgctgtgtgcacgtgtgtgcgggggtggtcatgtatgt

SEQ ID NO: 112818 - DNA, 122 bp, Homo sapiens
aatctccccgtttgttggggaaaatgaccggacaacattgatgaacatccgaaactacaacgtggccttcgaggagaccacattcctgagcctgagcagggaggcccggggcttcctcatca

SEQ ID NO: 112819 - DNA, 122 bp, Homo sapiens
ggaagaggtctgcgccgaggcagcctgcgcgccccgaaccctagactctcggtccgccggcgggtgacagaaagcacttggaattctggccctcctggaacttccgcccgcgccctcgccct

SEQ ID NO: 112820 - DNA, 122 bp, Homo sapiens
tgtgtctgcttgtccaacatttgcacaggcagcaaggcaaagcaggtgtgctcccaaaggcggagtctgaggaggggccggcagcggcaaacggcagcatcaaacagaccactgctgccgcg

SEQ ID NO: 112821 - DNA, 122 bp, Homo sapiens
ggcagagagctggttttcgggaaaaccaatgtgttggaccccaaacatccaccctccgctcggatccaagttctctgagaactgaaacgacatcccgggacgaatgggagagttaggctgag

SEQ ID NO: 112822 - DNA, 122 bp, Homo sapiens
gccgccagcgagcgcagactgggagggagccggccgggctccccgccaccccttcctccgcgcgccaagacctgtcagtttcacccagcccggcttccctggaaaggcgggatccctctgca

SEQ ID NO: 112823 - DNA, 122 bp, Homo sapiens
aatttagtttgtgtgtttatcctataaaatttatctcataataaaaactgaagactaggacggtccttagaaaaacacttgattcggtgtatttattttataaaagggagtcacagagagaa

SEQ ID NO: 112824 - DNA, 122 bp, Homo sapiens
ggtttctgtctcttgctatgttgtcatgactgcagagttggaaggaacccagatgcacctcgtgtgttctagcctgtggatgcaacaggggacaacttcattttaagaactggaggcccaag

SEQ ID NO: 112825 - DNA, 122 bp, Homo sapiens
tctggcagctgcgcgctgcgaccccggggctcgcccgccccggggccgagaatgtgtcaccgtaggcaatgtgctttccgaggtttattttcgaaacacctcagatcactatttcagttttc

SEQ ID NO: 112826 - DNA, 122 bp, Homo sapiens
ttgcctcgggcccccacacacaccgccctgagagctaggaagacgaatcggtcagtcacacggattctgcagacagcttccttcaccaggcatggtagtgagggcagcgcccactactcacc

SEQ ID NO: 112827 - DNA, 122 bp, Homo sapiens
cctgagctggggacgcaggattggcgagtcccgccccggctgggcctgcagcccctcgtacgtggccccccggcccccgctccccgcgctccctcggctgccccctgccctgctcacctgcg

SEQ ID NO: 112828 - DNA, 122 bp, Homo sapiens
acgtcctgtttataaaatgaattccaaagcacccaagtcatcaactgccaaccaaggggacggggatgaagaacctgttggagacctgaacccagtgtaggagagttcagctgaaatcatcg

SEQ ID NO: 112829 - DNA, 122 bp, Homo sapiens
taatgtattttgtaaatcctccagggctgtgtggatgtgaagaactgaattggagcgccacgcagcggttctctggcgtacagtatccatccatacagtaggcgctcaataaatgtctgctg

SEQ ID NO: 112830 - DNA, 122 bp, Homo sapiens
aggctgcgggagggtcgcggggcgttaaggggcagcgggaaacgcagaggatgggggctccgtcctcagcgcgtccgcagccggctcgcagggctcggggcgccacgcggaggtgcagctgc

SEQ ID NO: 112831 - DNA, 122 bp, Homo sapiens
tgaagagccggcctcccctaagcagcagcccccgggtggctgcccaaggctgggggatgacgggcgggaaaagaatcaactcccgcctcggcccgccgactccgcagcccgcgccgcccccg

SEQ ID NO: 112832 - DNA, 122 bp, Homo sapiens
ttattcaagatctctcaagtgattgctggacgggcggggggagcacacagcagcccactccgagggctgttcccgggaaggttcctcacagtagcctcctttctcccctcgtggaggactct

SEQ ID NO: 112833 - DNA, 122 bp, Homo sapiens
ttcaggctttttcttcaatacttgtactgggcacatgctttttttttctcctagctgagacgattatatcttgccattgcggtgttccttttccattgaaagcaatcaaaaatgaaaatcca

SEQ ID NO: 112834 - DNA, 122 bp, Homo sapiens
ttcctactttgagatttgcaatacacttcagccttattcacttactgctgttagcctaaccgattaataccatttttatgaaaaaatgtaattgtatctctttaaagagacacaaggaaatg

SEQ ID NO: 112835 - DNA, 122 bp, Homo sapiens
ctgcagcaatgagactgattcatgataatacttaaccaggggcaaaacagacatgtccctcgccccgtcctgttcacctgaaggaaggcagggaggaaccactgcccaagaccataggcctg

SEQ ID NO: 112836 - DNA, 122 bp, Homo sapiens
acaaacaggcagtgtatgggggttgttagggttaaatgaaacagcatttgtagtgtgtagcgcacagctttgcaagcaataaatgctcaaaatgtgagatgccttctacctctggctttccc

SEQ ID NO: 112837 - DNA, 122 bp, Homo sapiens
aggtagcatttccaggggcctgtggcagcgacgtgtagctggaaagaggctactgccaggcggtgtggcaggatgttccctctgggctgccctggattggccccacccccagtcctagaggg

SEQ ID NO: 112838 - DNA, 122 bp, Homo sapiens
gaggttaagaggcccagaatgatagggctcccatatttaccaggcaaccatggtacccagcgcagcacagagcctgcttactcaggattggttttatttatatttttttaaattgaggtaaa

SEQ ID NO: 112839 - DNA, 122 bp, Homo sapiens
gatgggtttttcagcgagggtcgaaaggcagatgctgaaaaggtgactcgcttagactcacgggaccagtcggggcagctctgggactcccagagttcccaaagacgatggtccaaaaacca

SEQ ID NO: 112840 - DNA, 122 bp, Homo sapiens
ccgcgcgggcccagacaaaggtggtgtattcctaaagaggcggcggcccctgcaggaggccgaggggatggcggcccgggccgcagtgggccaggccccaggcctgagagtgtggcggccta

SEQ ID NO: 112841 - DNA, 122 bp, Homo sapiens
ccggacctgcaattcccctccagaccgcagggggcactgcaggccccggggagattggggcggagcgctgcgaggggccaggagctgtcgccccgctccagagcgcggggggcgctgtgcgg

SEQ ID NO: 112842 - DNA, 122 bp, Homo sapiens
aggtatccctaaggctcagccagagcccatcgaggaaggacagcagccagcctaaaagtccggacgtagtggcttacgcctgtaatcccagcactctgggtggccgaggcaggagggttact

SEQ ID NO: 112843 - DNA, 122 bp, Homo sapiens
cacagatttgggaggtcgttcagatttggggggttgctccaaaggaagggaaatgctccccgtaccatgagggtagtagagataattctgaagacacattttgaaggaggaaaggcagatgt

SEQ ID NO: 112844 - DNA, 122 bp, Homo sapiens
atacactgttctaagcaatatgctgccttcaggatcctggggcgtaagtactgtgaaaaacgtgtgctgtcagcagtttgagtgtcagcattgtgacaagacacttagccgatggatcactc

SEQ ID NO: 112845 - DNA, 122 bp, Homo sapiens
ggcgctcgtggtcgtcgcgctgagaaagttttctgcctcctgaagcgaataaaggggccgcgcccggccgcggcgcgactcggctgcactcctcacgcgcctgtatgtccgcgcgtgcgtgt

SEQ ID NO: 112846 - DNA, 122 bp, Homo sapiens
actcgctgctgctctgacttggccgggtctaagctgtgctcctgctgcctggctggcttccgcccggtcagactgacagggtcttgcaggcaggaaccgtgcacacagtgtctagctccgag

SEQ ID NO: 112847 - DNA, 122 bp, Homo sapiens
acaaggcgttgctgcagtgactgggacatgctgatgacccagagtgactatgagaaggaacggtgacaagtgtttggatttaatggtctcaccaaggaatgttgggttagaaaagtaaaata

SEQ ID NO: 112848 - DNA, 122 bp, Homo sapiens
ctcacttgtaaacacttctttttcaacttcgagtccgtgccctgcgccaggtttaggagacgccggctcccctcccgccctccatcttgcgtttccgagcccacacctagcgtgtctggaag

SEQ ID NO: 112849 - DNA, 122 bp, Homo sapiens
ccaaacaactaagctttggtcctcactttgcaagtgaataggaagtctctctcttttttgcgtctatctgaccaaaattaatcacaaaatatactccatttggggtggtaacagtaagtcac

SEQ ID NO: 112850 - DNA, 122 bp, Homo sapiens
agacattctacttcattctattgctagaaatctacatttggtatcttgatctgtgccccacggagtgtcacactgtgttctagtcacccttgcagggctttacgtcctacttttctctacct

SEQ ID NO: 112851 - DNA, 122 bp, Homo sapiens
cctaccaaggcttagtggagctgatcaacagcagggtctgtgccagcagaaaaggcccagcgaaggcactagaggctcaggtagagacaacaccttggaatactaagagaagggctctggga

SEQ ID NO: 112852 - DNA, 122 bp, Homo sapiens
aaaacaagggtttggggaaaactgtgcaaaaaatacttcacaacaagagaagacaaaaaacgaagcagagatggactgaataacagaagtgcccttctgcaaatatgactgtgttgcttttc

SEQ ID NO: 112853 - DNA, 122 bp, Homo sapiens
aacaaaacaaacaaacaaacacatcacaagcatttgctggagtctccacacttcattaaccgcctttcaacattttttttcctcccagtgttttttcactatagtttcttctaagcatttaa

SEQ ID NO: 112854 - DNA, 122 bp, Homo sapiens
agctgcagcgaagccaatctctaggtctgcaatcacccttaggggccagaaacccagccccgcaccagcggcgcctttgacggacagccaccttctgcaatcaccttgcagttcactataaa

SEQ ID NO: 112855 - DNA, 122 bp, Homo sapiens
tccgcgtgctcgcggcatttgttaaccaatcagagcagtctgtcagagcacatgggagagcgacagccagtcagaatgtacaagagtgcggggaggggtgcaccaaaagactgactccctac

SEQ ID NO: 112856 - DNA, 122 bp, Homo sapiens
cacctgagcctgaaacagacttattgttctcaggtgtttccttcatcatatgcatttacccgtctgaagtcgcaggaaatggtttttccatcagtgagcttgtacatggagccctctcccgc

SEQ ID NO: 112857 - DNA, 122 bp, Homo sapiens
ccttcactttgtctctaaaagaaccagccacgcagcaagcctctctggatgtggagaagccggttggtgttgctgcttccttgtctgacatcccaaaggccgcggagcctgggaagctggaa

SEQ ID NO: 112858 - DNA, 122 bp, Homo sapiens
gtggagacggaaagagctaaggattgtggggtagcgaaccccggggccggaagcagtgggcgtacccgccggctgtagccgtaagacgcatgcgctaggccgggccaacggagcccgccttt

SEQ ID NO: 112859 - DNA, 122 bp, Homo sapiens
ggtagcagctggtggatattcacacagaactctggctctgttgagtttcaagacaacagccgatgtcagcccggtcccattgattgctcaagttctaggcccgttgcttccaggattttaca

SEQ ID NO: 112860 - DNA, 122 bp, Homo sapiens
gtttggagggcatgttggttggaactgtccaaagtttgttactactgaggttgagaacctcgagacttcttagtgtatttttaatgaggacaaccttttccagcatgttcttagaaacatcc

SEQ ID NO: 112861 - DNA, 122 bp, Homo sapiens
aacaaggcctctggttccattggctcacttcctttttccccatagcctctggcataaaaacgcaaaccagagagacactttagaattcacttgtgcagtgctttttctgtcaatcagctgct

SEQ ID NO: 112862 - DNA, 122 bp, Homo sapiens
gaggctctgaaggaggcagggtccctggtgggcagatgggagcaggtgggcctggggagccgccagccttccgcccccacgtgcaggcatgcccgccaggagggcctgtggagaggccgccc

SEQ ID NO: 112863 - DNA, 122 bp, Homo sapiens
cctccctgcaaaccaccaaattgctgctgggccagtccttttttggacacaaaactccatcggagtgtgaggctgtactccagatatggggttgtgccctgggcatgcagtatttatgaact

SEQ ID NO: 112864 - DNA, 122 bp, Homo sapiens
ggagggctaagagcagcaggacttgagtgacacccaacagctggtctgatctctttcaggcgccaacgccagacgccagcctcccagcggaccctctcgcagacccaccttcaccccacgcg

SEQ ID NO: 112865 - DNA, 122 bp, Homo sapiens
agaagcatctggcgtcctttctggtcgcggacgtcagagctggctgctccggcactcagccgggtggttggtccccaggcagccgctggggccctgccaccaggtctcacctggccgagagg

SEQ ID NO: 112866 - DNA, 122 bp, Homo sapiens
aataggcatgtttacttgattgtcaacctcatcagagcagatctcatcctttcttactttcgtgaactggaacataacagaaagagccctgcacagacatcacatcaactctgccaccaact

SEQ ID NO: 112867 - DNA, 122 bp, Homo sapiens
ccaactcctgacctcaagtgatctgcccacctcggcctcccaaagtgctaggattacaggcgtgagcgactgcacccagccatgcacccagctaattttttatattttgtagacacagggtc

SEQ ID NO: 112868 - DNA, 122 bp, Homo sapiens
cggtcccccgggacccatgcaggggctgctttgaaggctctttagtcgaggacccaggcccgcctttttggcagcgccatttttttttccttccacaggtgcgtcccctttcaagccttatc

SEQ ID NO: 112869 - DNA, 122 bp, Homo sapiens
agtggaggaagcactgtggggagggttaggggttgaggactaagcattaaagcctccaagcgcttagagaggaagcaagtgggaaggggaaatcaagactcaaggaagcgttgatcccgcag

SEQ ID NO: 112870 - DNA, 122 bp, Homo sapiens
gagaagccatatgggtgccaggtgtgcgggaagcggttcagcaaaggggagcggctggtccgacaccagagaatccatacaggggagaagccctaccactgtcctgcctgcgggcgaagctt

SEQ ID NO: 112871 - DNA, 122 bp, Homo sapiens
ctttataaatttaacaccttttgttacttctgagttttcttctaagccactggacccatccgtaaaaaaaaaaaaaaaaactgcgttcccccttacgtgaaactcattggctaaaatccaag

SEQ ID NO: 112872 - DNA, 122 bp, Homo sapiens
gccttccctccccactgggtgaacagtcttgggcaggtgtaggaacccccaaagtgctcacgacaaaaccctaggcggtcagttcttaccttgtagtgcgccagctggagggccagctgcac

SEQ ID NO: 112873 - DNA, 122 bp, Homo sapiens
agcctgggcagccgccacagctgcccctagaccaggccccagatcccttgggacttctggcgtaacttttatgtgcataacctacaggcctgtgagtcttaagtgggtaatttgcatgatgg

SEQ ID NO: 112874 - DNA, 122 bp, Homo sapiens
gaaagtggggcaaatcagcggacccagcagctgctatttggggacggcttggccgcttgacgtagactctctgaggggctgcccactttcttccctgggtcgggcacatcctgtattttaaa

SEQ ID NO: 112875 - DNA, 122 bp, Homo sapiens
gaaggagaagcagctctcaggccctttcggcaacttctcggcttcccttgcatctctgaacgttagtgatccggacctcagatccggtttccgagggcgccagggtcctagggctgaggtcc

SEQ ID NO: 112876 - DNA, 122 bp, Homo sapiens
agcgagggcagtgcggcggcagcgcgcatgcccgaacacgcacgccgggagaggtgcacacgcgcaggagtgcaccggaagtccgcctcccagggcccactgctggtctccggacaagtact

SEQ ID NO: 112877 - DNA, 122 bp, Homo sapiens
gtacctctccccatccctcacttaatcctgggtccgaaatagccccgggtaatcccagggcgaggcagtcgggaattaaccccagccttgaagtaagagacagaggcgtccacagaagaggg

SEQ ID NO: 112878 - DNA, 122 bp, Homo sapiens
tggtctttgactccaaccccagcggggcctgcagcagagcctccgtcttcggaacaggctcgcttttcatgcacttttgcaaaaagccctgcgggtggctctccctcggcttcgtggccagg

SEQ ID NO: 112879 - DNA, 122 bp, Homo sapiens
aagtaggaaaaaagtgcatgtgacgcccagaggactctccacagtgtatattcccaaatacgtaatgtctagtttcctacttttagaatagtatggttttaagcagaaaaaaaaaaaagaaa

SEQ ID NO: 112880 - DNA, 122 bp, Homo sapiens
aaaaaaaaaaagacatttatggagacttagccttatggcctagtattgagttggtacattcgttttatcttttctgtttctttttccccctttgcttactttcctctggatttcttatcttc

SEQ ID NO: 112881 - DNA, 122 bp, Homo sapiens
aaaaaaaaatgttgaagaacacgaatctccgcaggaaatgatactcctgtacccccagctcgctctccctcacgacccctcgctaggcggggttcgggaccaggtgaacgctgatctgatag

SEQ ID NO: 112882 - DNA, 122 bp, Homo sapiens
ctgaaactgcagccagatgcagctccaagcaatcccagtgttacatatgatatttccccccgctggctgatggcaagtagatgtgataaagcagaaactggacacaggtaagactatcttag

SEQ ID NO: 112883 - DNA, 122 bp, Homo sapiens
agcgctcacggcgctccttgccccgcagcggagcccatctccgccaggcagccagccctgcggccccacgtccacaagcagccggagaagaccacccgcgtgcggactgtgctgaacgagaa

SEQ ID NO: 112884 - DNA, 122 bp, Homo sapiens
attttttaaattggtctgttcagtcaaggaaaaaagaacaaagcccctttgtgaactcagcgctggaaaaaaacagcttgctggaaacagacagctattatttatcaatgtaataaacacta

SEQ ID NO: 112885 - DNA, 122 bp, Homo sapiens
ggagccggccacaggcagcaggtgaatggaggagagcagctcagagcaggggctggcatccggtgccacgtccaaccgacccgcctgtagcgccatgcagagaggattctgaggaccagaag

SEQ ID NO: 112886 - DNA, 122 bp, Homo sapiens
ggtgggggccctagcacaacactggtcccgtcaaactgaaagagatgggctcgctgccctcggagagtttacaggcccctgagaaagataggtggaattgaaaaatttacacgactgtatga

SEQ ID NO: 112887 - DNA, 122 bp, Homo sapiens
tgcagtttgaggataaatactttttacttttaagtgtccccagactcaacaaggaggcaccgcccttaccagtcctagagagacacaaaggggaccaaacccttgcccaaggtgacccagga

SEQ ID NO: 112888 - DNA, 122 bp, Homo sapiens
atgataacctatgagcccttggtatatgctgcctgatgagagtctttgtatacctgaaaacgtaggtcataccaaataactgatggtaacaacgtgatttcttgtgagcacctgtttctgta

SEQ ID NO: 112889 - DNA, 122 bp, Homo sapiens
agctccgcccaagcaaggctcggtctcggattctcacccgggcaggggggcggcccgaagcgttgcaggcagctgctgcagcacttgttgtctgggttccagtattcaaggcggccgcagta

SEQ ID NO: 112890 - DNA, 122 bp, Homo sapiens
aagtaaggagcgtctctgcccggccgcccatcgtctgagatgtggggagcgcctctgccccgccgccccatctgggatgtgaggagcacctctgcccggccccaaccccgtctaggaggtga

SEQ ID NO: 112891 - DNA, 122 bp, Homo sapiens
cagccggaacttccgtccaggcagtgggaccttggcctcagccataagcatccaagccgccgtcgttgggagactggccttcccattggcagggtgcactgtccatcacagatctcagggct

SEQ ID NO: 112892 - DNA, 122 bp, Homo sapiens
ctatggtatgtgtttgtgtgtgtgtgtgtgcgtgtgtgtgcgtgtgtgtgcgcgcgcgcgcgcacccgcacgcagtctgcaatgccctcaccagtccccgcagctgggcaacccctccaaga

SEQ ID NO: 112893 - DNA, 122 bp, Homo sapiens
gctcccgaggacttccagaccttccacgcctccctgcagcaccggaagccccgcctggctcggaagcacatctacctacagccgataggtacgggacgcctgcagccatcggcacgctcctg

SEQ ID NO: 112894 - DNA, 122 bp, Homo sapiens
ccacgaacatgacccccacaacctgagacatttttttaagaaaggataaattaaccaggacgacacaaatgcaaacagggtatgatatgcaaaccagttttttaaggccataaaggagaaac

SEQ ID NO: 112895 - DNA, 122 bp, Homo sapiens
tatagatagacattttggagaagagtctctctttgaagacttcctctcagagtacaagtccgtggttacaaccattttgtttctcagcaaacatggggaagtttgcttttcttctctgagga

SEQ ID NO: 112896 - DNA, 122 bp, Homo sapiens
gagcctcagcacccagcatgtcagatatggatttacgagtattttctctgctccactcctcgaatgtggctaggtttgaaaaggtcacacttccccttgccctccacctctcagctttctgt

SEQ ID NO: 112897 - DNA, 122 bp, Homo sapiens
cggccgtctgcaggcctgcggctggagcctgcccgccaagtacaagcaggtgcgggcgggcgctgcggggaccgggcggggccccgcagaggcggggcgggggtaaggggcggggcgctgtg

SEQ ID NO: 112898 - DNA, 122 bp, Homo sapiens
aatcgcgggtcgcggacgctcgccgccggccatagctcagcctagcgccgccaaggccgacggccctcagcctctgccatggacttcgaggacggtaagcgctgcctctggctggtcggcgc

SEQ ID NO: 112899 - DNA, 122 bp, Homo sapiens
agtgagccttacgcatcttaccatgacatggcccttcctgtatttgaaaacaggtgtgagcgtcccccgaagacttcttttcttccagcagaacattctgagttccttataggacatgatat

SEQ ID NO: 112900 - DNA, 122 bp, Homo sapiens
ctcaaacaaacaaacaaacaaacaacaacaacaacaaaaagacaagatttcactctgtttcgcaggctgcagttcagtggcgcgaacatggctcactatagccttgacctcctgggctcaag

SEQ ID NO: 112901 - DNA, 122 bp, Homo sapiens
agcaagctatgtccacagtgcccaggaatttgctcaggtgatagtactctaaagcccccgcgtttgtgtccagcagatatcacccagagcccccacacctatcaccttgtgatgaatttaaa

SEQ ID NO: 112902 - DNA, 122 bp, Homo sapiens
tccacaaaaagagcctgacaccaaatatgcaatttggattaaatacttcacagactatctcgggaatacctctgggaccacgcaattctgtctgacttttagaaacacggggaatggggcag

SEQ ID NO: 112903 - DNA, 122 bp, Homo sapiens
gggctctgtcctcctggacatgccgagagcctgcctgatcctgggtcctgctgctggaggcggccacttcgcctggtccccgagcgtccgcaacaaaatttgtcagaaagaaaatcttgagg

SEQ ID NO: 112904 - DNA, 122 bp, Homo sapiens
aaatcagctgactgggtctcgtgacagcctgggcggtggcgacgcaggcgtattagagcgcgctcgctcaaagcctgagcgaagatggcggcctccagagtgaaactctgagaggcagaggg

SEQ ID NO: 112905 - DNA, 122 bp, Homo sapiens
gggtgctgggggtggcctcccctcatcgaatcccagggtctaccccacagcatcccacctcggaaatggaatcctcctcgcgcatattcagaggcaccattatcaggcccctgaatagaatg

SEQ ID NO: 112906 - DNA, 122 bp, Homo sapiens
aatgaaaattgtgatttatggcttccattttgcaggagactgctggctattagccgccatcgcctcccttacgcttaatcaaaaagcactggccagagtcatcccccaggaccaaagctttg

SEQ ID NO: 112907 - DNA, 122 bp, Homo sapiens
tgaaacacggtaggacttgaactcttggcccagagctttgtctatctgaccacatccttccgtaatgctaccaaccatccagggataaagatgacatggcctccagcaggtgtttttggcag

SEQ ID NO: 112908 - DNA, 122 bp, Homo sapiens
cacagcccagagatggaggagggagagtgcgtgggagagaggtcccaggtctgcagggcacgccaggcctgaggacacgttcacagatgtgcagtgagatgagaaggaacaggacagaggta

SEQ ID NO: 112909 - DNA, 122 bp, Homo sapiens
gttggcagcggcggcgcagggggcggggggcagcgcagaggggccgggcgaggccgggagcgcgcgcccccgcccccgcccgcccgcctcctgcccgccctccggccgcggagctggaaacc

SEQ ID NO: 112910 - DNA, 122 bp, Homo sapiens
ttaaaaactggcaatgagtcttatcatcccaaattaataaataacatggccaagctcacacgctttcattcaggaaatcctgcaattcggtgtctacagctattatcttgcaccctccatgc

SEQ ID NO: 112911 - DNA, 122 bp, Homo sapiens
atgtcactgattcccgggcctctgtgaccaggcaaggacgtggaacttcccaggagccaccgggagaggtgctgctggctttccagcatccagcctggcactgcctgcactgagccgcgccg

SEQ ID NO: 112912 - DNA, 122 bp, Homo sapiens
gtgcgggtgggtgggtataccgggaggggacagctggagccgcgaaggcgcgggggcccgcggcgcgtgggtgtggaggccgcggggcggcaggaggcactgggaagcggggtgaagagcac

SEQ ID NO: 112913 - DNA, 122 bp, Homo sapiens
ctcaaatagataatcaatttccctgaaagcatcaataaccagagtggacatttattgccccgtggatggtttatctttggggctggggacagcagggccgtgatgaataccaaatctgccag

SEQ ID NO: 112914 - DNA, 122 bp, Homo sapiens
ccttgggcgctacctgcctcactttgcaaccaaatgctccagggtatgcgggccctcagccggtttccaagcaaacgacccagaggtgtctcggataagaaacacacatacaccccactccc

SEQ ID NO: 112915 - DNA, 122 bp, Homo sapiens
tcgttttatttctaatttgctctcctcccgcgcctgcatacaacatctccatctgccagtcgctcagatattttgggaacgcagttttgaagcttctcagccacgtgcctggtccacctctc

SEQ ID NO: 112916 - DNA, 122 bp, Homo sapiens
ctcgttttctgtaaaatgagaaaaatgagatctctctcacagggttgttgtagaaataagcgaggcgtttcatctgctgcctggggcttaagtatacaataaatattaacaactaccattat

SEQ ID NO: 112917 - DNA, 122 bp, Homo sapiens
cctgaggacagcaggggccacgaggagagggtgagggtgctgggggtggcctcccctcatcgaatcccagggtctaccccacagcatcccacctcggaaatggaatcctcctcgcgcatatt

SEQ ID NO: 112918 - DNA, 122 bp, Homo sapiens
cggccacacactcttcagcggcatctcggaccgcatgctacaggacacggtgctggccgccggttgcaagcagatactggtgcctgtaagtagagccctgcctgccaggggcatggggggtg

SEQ ID NO: 112919 - DNA, 122 bp, Homo sapiens
ttggggaacctggtggtccctgctcccgggaggtcaccacaccgatgcggaacacagatgcgtgtcgccgcgcaatgggcacagcgcatacagcgcagagctcccgggctcaagcgctgctc

SEQ ID NO: 112920 - DNA, 122 bp, Homo sapiens
aatatcaaggattgctgaccacaccagaaaggaagagaaaggcatgaactagattctccccgagagccttcagagagatcatggccttgcctgataccttgatgttggacttggagcctcca

SEQ ID NO: 112921 - DNA, 122 bp, Homo sapiens
agcacaagccgacctgtgcacgtgtgtgaggtcaggcgtggacaggtctgtgggaccacacgtacgggcacgcgcacggggatagtgagttccatggaggcatcctgtagtagggaacccgc

SEQ ID NO: 112922 - DNA, 122 bp, Homo sapiens
gggttgcctggcacaccggcatgaatggcatgcaggggagaaagcaagcaggtggggagtcgatgtactagctttggtgctttatctactgggtagtcgagctggtgactgctggcgccttc

SEQ ID NO: 112923 - DNA, 122 bp, Homo sapiens
acaactgtcctcggagaaagttcaagaggaacttccccgcgaacaggtcctgccggcggccgggaatacgcacactttttatgttatgacttggactttcccgaacctttcgaaacagaggg

SEQ ID NO: 112924 - DNA, 122 bp, Homo sapiens
ctcccaggtgtgcggtggaggctgctccatggcagctgctgagctgggcctggctggccacgcagacgtggctccccttggggccgctccggcaaggatggttccccacaggcccacgaggc

SEQ ID NO: 112925 - DNA, 122 bp, Homo sapiens
ttctatccctttattatggaacaattgacccatctaaaatgaattctaatgccaggaaagcgtttagatttaaattacaccatggtcttctggatctgaaagatggtggcataaaaaagatt

SEQ ID NO: 112926 - DNA, 122 bp, Homo sapiens
tgagaacccagacccccaggggggtgagaccatagtagacgtctgcgtgaatgtgaaagacgtgaacgacaatccccccaccctggatgtagcctcactccggggcatccgtgtggctgaga

SEQ ID NO: 112927 - DNA, 122 bp, Homo sapiens
tgccaccatcttcccttggtgtccagccctgcagctccgcgggagtgtcctgggccttggcggggacttcccgagccgtctcaccgcccaggcccacgggacgccagcctatatcggtctgg

SEQ ID NO: 112928 - DNA, 122 bp, Homo sapiens
catttctaagtaccagttaacttacaaggctaagtattaacaggtttcacccttgcttgccggcaaagaaatctgtttctaactattccttttacctgttcaaacataaatgcaaactccac

SEQ ID NO: 112929 - DNA, 122 bp, Homo sapiens
gtgctgacatctgctccgcttctagggagacctggggaaagttttactcacggtggaaggcgaagtgggagctggcagtcacgtggcgagtgcggggagcaagtgggcggaggaggaagtgc

SEQ ID NO: 112930 - DNA, 122 bp, Homo sapiens
ccagcgcctggaggagtatttccagcacgcctggtcctacaccaatggcattgacatgaacgcggtgagccccgccgctccggctaatgccccgggcgtgggggggagccaagatcctgcgg

SEQ ID NO: 112931 - DNA, 122 bp, Homo sapiens
accacgccttgtcagtgccactgtggtgtgaattagacctttttacaggttacatcaatgcgggagaaggaagggcaatgatgggcaacagtgctgaaatatctggtgctcagaaacttcct

SEQ ID NO: 112932 - DNA, 122 bp, Homo sapiens
cagatacgcatcagtgcaaccaaacctgcgtgatcagcgcaaccaaacatgcatgaccagcgcttgtcacgtatttgaatacaacgcttatctcgccgcagcaccactgtcaataaatgcca

SEQ ID NO: 112933 - DNA, 122 bp, Homo sapiens
accctgaggcagagggtgaggagtaggtacaaggaagtgtagggaaatttatcttaaatgcgcttgtttactcatgttgtcctaaaaccgacctttcatccgagtgcatgactgctccctga

SEQ ID NO: 112934 - DNA, 122 bp, Homo sapiens
agtatccacctcgatgaccacgggctgagccccgcgccgccaccatgtccgtggccttcgcgtctgcccggccaagaggcaaaggggaggttacgcagcaaaccatccagaaggtgggccgg

SEQ ID NO: 112935 - DNA, 122 bp, Homo sapiens
gggcaggggcggtggggagcgggttcttttagacagaaccatggagacagcccaggctgccgggagcacctccttcccgactctagggctggcgtccaaacatccaccaggggctgcccggg

SEQ ID NO: 112936 - DNA, 122 bp, Homo sapiens
gccgggtcacccacctttcgcactctgcgggccgtgtagagccccatgccgtcctgaacccgggaggacttcagggagaacctgtccggcacgtacatgcccagcattttcccgggcgcggc

SEQ ID NO: 112937 - DNA, 122 bp, Homo sapiens
ccggccgggtccgctaggacagcggggccgctgggaagttgtgagagcggcgctcgggggcgcgcttgcgtgcacgagggcccgggccgcgagcagccgcggccgtcccggtcgccaccctt

SEQ ID NO: 112938 - DNA, 122 bp, Homo sapiens
atagcgagagaaccagacaggtaacctaaccaaacctgggctgcttcccggggaggtgcacgcaggtctctgcaaagagccccagaggacacccatacggccacaagcgtgaaatgcatgag

SEQ ID NO: 112939 - DNA, 122 bp, Homo sapiens
aaaatccaagcgcttcgggggcggaagcaacgaccaatccgcagtggccgaagtggaagtcggcgtaacggcactaaggggcggggccgaagcggcccagggggcgggcgtttgaaatcagt

SEQ ID NO: 112940 - DNA, 122 bp, Homo sapiens
actgaattttctgggaaatgcacaccatactactaacctgccaaaacaatgtttcctaagcgaaattttacataaattgcttctcgtgcaattttacttctcatgcacacacagactaaaga

SEQ ID NO: 112941 - DNA, 122 bp, Homo sapiens
gtttaagtttgaggaattgccaagttttccaaagtggttgtatcattttacattctcactcgcaatgtatgaagttctggttgctccacatcactgatactggtgttgcctttttttttttt

SEQ ID NO: 112942 - DNA, 122 bp, Homo sapiens
actgtgtgctgagcctgggggtaaacagggcacggacacgtttgggaggggattacaggccgggtttccacactttttggtccaggcaaacccagacgagccagctggctcaagaacttggc

SEQ ID NO: 112943 - DNA, 122 bp, Homo sapiens
tgcggaacagacctccagcatatggggtcccttcagggccctcgatggtgacctggaggtcggtgaggtcctcctcgttgggaaagaccttgatgccatcgggtgggtctgcggtcagtgtc

SEQ ID NO: 112944 - DNA, 122 bp, Homo sapiens
gctcaggggagggaaggggcgggccggccgcgcaccaaccccaggctggggccgccccggcgctgtcccggctcaggcaggtcaaggatccgcccagctaggagcagtccaagtagaggctg

SEQ ID NO: 112945 - DNA, 122 bp, Homo sapiens
cacgtggagttctcctaggtgggcttgcactcggggtcgcccagccgttctttgagggttcgagtgggtaggcttcccctgtaggacgggcttccccgtaggtttccacgtggggccacaga

SEQ ID NO: 112946 - DNA, 122 bp, Homo sapiens
ggcatgttcttggagatcaacatcctccaggtccgttttgaattccgacaccccaagagacgttccactcaccacctgactattcttaattcaacctcaagcccggagtcaccacgcgattc

SEQ ID NO: 112947 - DNA, 122 bp, Homo sapiens
caggcaggggccgtgcgggcgctgggggctgaacccgcgggctccgcctccccgagtcctcggggcatcttccacatggtccctcttcagaaggctctccttcatggcgtcctctgtaaagg

SEQ ID NO: 112948 - DNA, 122 bp, Homo sapiens
aggaccaccccacctgaaggactcccaactggaggaccctcttacctgggggaccccctccgctggaggaccctctcacctggaggaccctcttacctggagggcccttcacctgggggact

SEQ ID NO: 112949 - DNA, 122 bp, Homo sapiens
agactgcagcccaggagaacggcccacaagttccctggtgtttgcttgaggatggatctccgcggcaccaagtcagggcagccacggcgcacgagtggagggaggagtccctgaggcgagga

SEQ ID NO: 112950 - DNA, 122 bp, Homo sapiens
ggattattgcctggaaatacaccattataggttcatcgccgccaggtttaccgcgacactcggcgttctcgggcctcagcggaatgggttttaaaccgcggagggaggcccaggcggagagg

SEQ ID NO: 112951 - DNA, 122 bp, Homo sapiens
ctcgctctggggagctctagacccaggatccggttggaggggcggcaggatcctgcaaggcgcccttcccgcttcgaagagaagcgagcctgggtggggggtgcagggcgacccgaaacgtg

SEQ ID NO: 112952 - DNA, 122 bp, Homo sapiens
agagaaaagggcggggtctcggaaagggaagggggtgtggagaactaacagaaagactggcgcagttaggctttttcggaaattccaacagcaacaaccaaaatggaggcattaaaatcgat

SEQ ID NO: 112953 - DNA, 122 bp, Homo sapiens
gtgataggaataaaacatcaacagatgattaaggaagggcagttagcaaaagtgagaggtcgagaatcaaaaacgcggttggcaaccagacataaagacgggaaaatgaagaggaaggactt

SEQ ID NO: 112954 - DNA, 122 bp, Homo sapiens
gcggccggcgggggccaacagggcgggctctgaaggactgattggcccgtgggacgatggcgcggccgggaggatggccccggatccgtgggaccgctgcgccgccggaccgggggtcccga

SEQ ID NO: 112955 - DNA, 122 bp, Homo sapiens
gagttgtggggcaggtggagcagggcagagggccccgcacggctctgggatggctgtgctcggtgggggtctgattttgggggaagaggctggtactggggtgtttccgtggacttgttggg

SEQ ID NO: 112956 - DNA, 122 bp, Homo sapiens
gcccacagtccccgcgtgcgtgggcaccacgaagccaggggcctgggcagtctgggctggcgccggcgggggcggggcggcggcagcgggcggcggcgggggaagtgggccctcgaagcgag

SEQ ID NO: 112957 - DNA, 122 bp, Homo sapiens
ccgctcagcctgctccagacagagcgcgagtgaggagcaggcgggcaggcggcgggcagccgggcagccgtggacagaggcccgggcacagccagttgctgtgccagagggtgtggtgtccg

SEQ ID NO: 112958 - DNA, 122 bp, Homo sapiens
gagcgaattcagaactggaaattccaggcggcccagagggacacccatccctctccgaggcgcgccgggatccggcgcccagctgcggggcgagggcagggtcccgcgcagcaccccacccc

SEQ ID NO: 112959 - DNA, 122 bp, Homo sapiens
gtggaagcggtgagagggcctggacagttgttctgcagctgtgttctttgtctggttaatcgcgtgcgtctccagtctgtggctggccagccgcgtccacctgcgtgctccgggcacccaag

SEQ ID NO: 112960 - DNA, 122 bp, Homo sapiens
tacgggaagaaccgcgaaacaaccctaaaccaattctgaggaccacgaattcggattatccgggagttcttttgccatggcaccgcccccgccacttccgctaggaacccggaagttcctac

SEQ ID NO: 112961 - DNA, 122 bp, Homo sapiens
cgaggccacgcttgtctcagtgctgctccctgggttttgagcgtgcctcctccacctttccgtacttcacatccctattctttgttttccccgcctgctctcccatgtcttctcccttcccc

SEQ ID NO: 112962 - DNA, 122 bp, Homo sapiens
actgggaatcactagttgcctaaccccctatggtaattaatagcttgacttttaccttaacgtataatacagcagttgagtaggaaggtagttaagacccaggtgtttgatgggtgtgaaat

SEQ ID NO: 112963 - DNA, 122 bp, Homo sapiens
aactcatgttaagtattcaataaatgttagctagtattattattagttggtacttggcaccgtgcaatgaataaatgaaatgagccttgataccaccagctctgcagtttatttcaaaatta

SEQ ID NO: 112964 - DNA, 122 bp, Homo sapiens
gcacggctctgggttttggtgggagcacacggcacggctctgggttttggtgggagcacacggcacggctctgggttttggtgggagcacacggctgcttcccacagctctgctgcagaccc

SEQ ID NO: 112965 - DNA, 122 bp, Homo sapiens
gttttgcgtcatcctgcctgccagggagaagacatatagcagtgaggtctgggaactaggcgagggaaaaatacacagcacaggtgaaaggagagaaatagtgtctttgtcaagatcccagc

SEQ ID NO: 112966 - DNA, 122 bp, Homo sapiens
catgtgtaagccccaaactcatatactccttttatctaatgctgccaactgcaccagcctcggaaggatggtatgagcaaggcaactgtccttttattgacctctacgttaactctccacca

SEQ ID NO: 112967 - DNA, 122 bp, Homo sapiens
tggctgtcggagggagaggcgggcctgtgtggcggggatcgtgctgtaatggagcaggggcggcggggacccggaggtgagggctgcgagggccgcccgggagggtccgggctgggaaaagg

SEQ ID NO: 112968 - DNA, 122 bp, Homo sapiens
cgactgtctttaatagtgcctgcttagatctaacccctcatatgttcgtcctgacctggtcggaccatcatcattccacttcatagtgaaatgccttcattgccgtgccatgcatatttctg

SEQ ID NO: 112969 - DNA, 122 bp, Homo sapiens
gcgcaagctgggcggaaccggaagatggtgtgagccacgggctgccgggggcctggggctcggcgtcggtccccgggggatgtggagagctggcagcatgtcggccgagctgggagtcgggt

SEQ ID NO: 112970 - DNA, 122 bp, Homo sapiens
ttttatttcagagtgcaacagaaactagcttgtggcctattaagctactaggaagagcatcgtttatgccactgtatgccttcttaggccatttatcatttctctacacttgattgctcact

SEQ ID NO: 112971 - DNA, 122 bp, Homo sapiens
ccacgaaggggtcagcttgtggcttgggtgatgggggctgaaataaccaaagggtggcgacgcttagatggccacactgttttccaccacgctgggccgcaggtactcgtagggcatgtcca

SEQ ID NO: 112972 - DNA, 122 bp, Homo sapiens
gagcaagcaccgggccgaccgcatgaggcgcctgggagactttctgaaccaggagagcttcgacctggctttgctggaggaggtgagattgtgcagcacggtgcggaacccaggctgggagg

SEQ ID NO: 112973 - DNA, 122 bp, Homo sapiens
tcaccttcagagaggacggccgaggagacagagaggcgccgagtgtggcagcatggcaagcgagggggttttgtctttctggcactctgactcccatcacatcagcctggtgatgaccgagg

SEQ ID NO: 112974 - DNA, 122 bp, Homo sapiens
aagaaagttaatgatgtgttccattgcaatctgtcaggacctgggagcctcttcttcttccgccctggcagggtctccgcagaagatttgttgccgtcatgtcggctgcgattgcagctctg

SEQ ID NO: 112975 - DNA, 122 bp, Homo sapiens
gaggaagccgccgtccagccctgtggaaggtgacgcccttttctgttcagaagacaaagccgagaatgcggcaatgacctgcgccccagaggggatgacctgcgggccaccctgaccccggc

SEQ ID NO: 112976 - DNA, 122 bp, Homo sapiens
cagctggggcgggtctattgctagcacttagcgaggtgggggcggagctgagggtctctccgcagccttctatggatctagggtgggatggggaagaggctcttcaaagcccaaaagctgcc

SEQ ID NO: 112977 - DNA, 122 bp, Homo sapiens
ctggtgcacagcctggctgggggtgcttactgcccagggagggagctccgcttgctccttcgtagaccctgccgtcaggcttctagccccgcacctatgcccgcctgcagccctggttcccc

SEQ ID NO: 112978 - DNA, 122 bp, Homo sapiens
ttcttttttttttagacaagtctcactctgttacccaacctgcagtgcagtgtgcagtggcgcgatcttggctcactgccacctctgcctcctgggttgaagggattctcccgcctcagcct

SEQ ID NO: 112979 - DNA, 122 bp, Homo sapiens
tttgatgataacaaagagaagctagtagtgattccacctatttctgctgccaaaaagcctcgcaagcctataacaacaccctttagtacaaggaaaaggccagaaaataaaaactttatagt

SEQ ID NO: 112980 - DNA, 122 bp, Homo sapiens
aagatggtgggatgggaagcgttcagtttggggcgaggagactcatccagctgcggggggcggcgccgagggagtggcgctgaccaccctggttgcattcccacgcccctggccgaccgccc

SEQ ID NO: 112981 - DNA, 122 bp, Homo sapiens
tctattaaaagggaaaaataagacctcccaacagaagtgaaactaggcattggcttaacacgtgatggatgggagccacgactatcttcatcatcttatttttaattatctatctgtgcaca

SEQ ID NO: 112982 - DNA, 122 bp, Homo sapiens
gccaggcccaaccaatccagttctaccgcgcgccgaggtgaggccgcggaaatgggggagcgatttgtcaggtctgttaaaggggccaccgcccttggagctagggagaggagtggtgggga

SEQ ID NO: 112983 - DNA, 122 bp, Homo sapiens
ctggctcagctttctagaggggtggggggatgtgagctagaatggcggggtcggctggcgcgtctcagatgctatcctggagatgatggggtagttttcggggtatctcatgccaaggatga

SEQ ID NO: 112984 - DNA, 122 bp, Homo sapiens
cagcttgggcagagtgatcagaggtcctcgctcagtggcctgtgagcggaggcctgagtgcgacaggtgtggtggccatcttggccggggggggggggggggggcgcggggcgttccagggc

SEQ ID NO: 112985 - DNA, 122 bp, Homo sapiens
ccctgcctgtcttgcgtgtgcgtgtgcgtgtgctcagcctcagcgtgaggggcacctgctcgtctgggctcacagcgaaggcagcctcgccgcgagctgccgctgccgctgctgccgccact

SEQ ID NO: 112986 - DNA, 122 bp, Homo sapiens
tggggtggttcagagcccgtccccactccgggagcaacgtcagggcggggcggggctggacggacaatgtgacctttgcaatgtccccgaacaagaactgcagatggtaatcacggccacca

SEQ ID NO: 112987 - DNA, 122 bp, Homo sapiens
agctactcaggaggctgtggcaggagaatcgcttgaattcaggaggcagttgcagtgagccgagatcgtgcggttgcactccagtctgcgaaacgagaaaaactttgtctcaaaaaagtaaa

SEQ ID NO: 112988 - DNA, 122 bp, Homo sapiens
aagctgcctccccagcccgatgcttgcctggaatgtcacagggatgtccccgcgggaagccgcgttccccagtcccttcctgtgcggttgactcatgattaaagccagcacgggccgaccac

SEQ ID NO: 112989 - DNA, 122 bp, Homo sapiens
ggaatttgaacctggcagtctggcttccctctggggaagagcagtggatgagggcgaagccgacaagagcccaaactcatctgcgctgcgctgcttttgagccacacaaatccaaataaggg

SEQ ID NO: 112990 - DNA, 122 bp, Homo sapiens
gaaagcctgcccactcggggtggggcggcaacccggagagccaatcaggaataaggagtccggttcatgaaaaggtagccggattctgactgggatactcactgtgagaaggctgggcggag

SEQ ID NO: 112991 - DNA, 122 bp, Homo sapiens
aaaaattggccaatatcccatcagccttatagcttgacttatttcccctgctgtgggactcgacactgtcggaatgagccttcctagtgacgcaggactaaactcctgaatataaaaggagc

SEQ ID NO: 112992 - DNA, 122 bp, Homo sapiens
caggatagactaggctgcatgggcccctagaccctgaggagggcgtccatgatggctagccgacccgcgttaatttagtcagccacgctcagggctcaccgtcatcagttcctaaattcacc

SEQ ID NO: 112993 - DNA, 122 bp, Homo sapiens
ctgagtccctcacattacgcttggtcaatttcatcttgtcctgccttcatctgcacagagcgtgtagggcagatcttcatcacacacaacccttcgcaggcttgctaacacccctctggcaa

SEQ ID NO: 112994 - DNA, 122 bp, Homo sapiens
ttcgacaggtcacaaccagcgaggcctcccgggcctgcctgggtcctgaggccggtctggcggggccccccactgagccagacggaactggctgatctgtgtggccagcatctactctcctg

SEQ ID NO: 112995 - DNA, 122 bp, Homo sapiens
gtagactttaagaacctaaactaacgcttctcgcgagaggaaagattgaccgctcgcaagcgtacatcagctggtgccccgccttccctgggccccacccactgcctgtcctcattcccacc

SEQ ID NO: 112996 - DNA, 122 bp, Homo sapiens
gctgatcgggcctcacctgtgttcagggggctccaaggggtccaggaggaagggcactcgcggccttcgcctctctagtcggccgccgcactggctctttatgtccgtaaaaacgcgacttt

SEQ ID NO: 112997 - DNA, 122 bp, Homo sapiens
actgctgggctgagggcacgtcctgggcacaaaagtcgtaaacgcgaggagttgtcttcacgtcaaagaaggccttctcatccacgctcttaggggcacccatggtggccatgccaggtgcc

SEQ ID NO: 112998 - DNA, 122 bp, Homo sapiens
aaggaagggacaaagggatttattgaaagtgaaagtacactccacagtgtgggagggggccgagcataggaactcaaagacaccgttacagaatttttgggagtttaaataccccctagagg

SEQ ID NO: 112999 - DNA, 122 bp, Homo sapiens
cagttccttgaccccacaatcgcatttgttccccatatgttctggatgacagcatcatcacggagcacaatgttcaccatgcagcaactttcctcgaataaggcctgtatctcgtaaaattc

SEQ ID NO: 113000 - DNA, 122 bp, Homo sapiens
aggcgattgtctcactgctcggcaataggcgatggtctcactgctcggcgattgtctcaccgcttggcaataggtgaaagtcccttcgtggtcgccaaaatgtgtccagaattggtgggttc

SEQ ID NO: 113001 - DNA, 122 bp, Homo sapiens
tctgggattacagatataagccatcaagtctggcctagaatatttaacttaggacaactacgtgatggtttttaaacaaaaagagaactgcccccaaatgtatcactatcaaagatgatata

SEQ ID NO: 113002 - DNA, 122 bp, Homo sapiens
ggcgcgaggttagtggtagctgggtgcagacgccgtggcgctggtgagtaaaggcagaggcgaaaaaggaggaaacctcatggctgtcaggtctgtcccaggcctggttccctgccaggcac

SEQ ID NO: 113003 - DNA, 122 bp, Homo sapiens
ggggggcccggccatatggatgtgatttcttcgctccgaggcagacgggccgctccgcagcgctcggcgcccgcccgccgcccgcccggcctccggctctccctccctccctcctgtccctc

SEQ ID NO: 113004 - DNA, 122 bp, Homo sapiens
tatccagcatgcctagagtcttatgtgtgacaagtgacggtatgctgtttcacaaaatttcgctgaaagagccgttgatgaactttagaataacccaacattaggcgctgttacaaatgggt

SEQ ID NO: 113005 - DNA, 122 bp, Homo sapiens
gggaaacatggcaagaccctgtctctacagaaaacacaaaaattagctgggtgtgatgcacgcctgtggccccagcgccttgcgggggccgcatctccagctcctgtttctcagcgttgtca

SEQ ID NO: 113006 - DNA, 122 bp, Homo sapiens
cgttggcgccccgggtcaggctgcgaggccgcaattatagtgggatggggcggccgcccacgcgccgcttggcggttcttacgagaactttgtttgtgacggcagtggtgatgtaaaatggg

SEQ ID NO: 113007 - DNA, 122 bp, Homo sapiens
gaaatcgaccagtgcttgctagagtcccttccccttggccaacggcagcgtctagtgaagcgcatgcgctgtgagcaaatcaaagcctactatgagcgcgagaaggcttttcagaagcagga

SEQ ID NO: 113008 - DNA, 122 bp, Homo sapiens
gagcccacattcttggggtgggtagggtgggagacaggtgtagagagaatctcagtacagcgtgatgccttcagtatccaagggagcaaccaggttggggaacactctctttctgccaggta

SEQ ID NO: 113009 - DNA, 122 bp, Homo sapiens
acaatcccccagggcaacggccttggacctgagactcctgctgcaggtgtccctgctccccgcgccttctttggctctccccggggtgggttgcggcgctcagaagcttcggcccgcgccca

SEQ ID NO: 113010 - DNA, 122 bp, Homo sapiens
cctgagacttggagcagggcacagcacaggaatacaacacttttcaccagaacgacattccgacctctgaatcaaccctggaaaggcccttccattgaacttcttgtgatggaggaaaagaa

SEQ ID NO: 113011 - DNA, 122 bp, Homo sapiens
aatcggcgggaaggattagaggggctgcctgctcctttgcccttggagagagtcactccacgtggagtcctacgctgggcactgggcacggtcttcatatttttaattataatttatcttca

SEQ ID NO: 113012 - DNA, 122 bp, Homo sapiens
tgttgcgaaggccctgtgtgaaagtcgcctgggttttcgggtgtgatgtggtgttggcgtcgtgttgttgcaaaggcctgtcttcaggtgtacgaggaggcatttccaaatgcaggaatgtg

SEQ ID NO: 113013 - DNA, 122 bp, Homo sapiens
ctctatacaccaggaaatctacacttgggcatgaacagggccacattcagtcccatttgccgtcaacaccttccatcttctaatcatgtggaatcctgctgagaggagaacgagagctggga

SEQ ID NO: 113014 - DNA, 122 bp, Homo sapiens
tacacggacaggcacaggctccaccgagcagccgcgctaaggagctgtggggtggggagccgtgggcccgggtgtgggggctgcagaagacggagggttgcagggcgttcgtttactgccgt

SEQ ID NO: 113015 - DNA, 122 bp, Homo sapiens
cactgccggccgccagcatcctggggaggtgggtcgcgtgtcccagagccctgtgcccctcgccaccaccatcctaggtcaggacttccccaggaagaatccaagtggctggagagatgcgg

SEQ ID NO: 113016 - DNA, 122 bp, Homo sapiens
tccgcaaagctgtgccaggtgaccgcacggcaggtggtggcccggactccgagctgcagccgcaagacaaggtctctgaacacatgctgcggctctatgacaggtacagcacggtccaggcg

SEQ ID NO: 113017 - DNA, 122 bp, Homo sapiens
gggcctcttttggaaaggtatatctaacattccacactgccatctaggctgagttatggtcgggactcttaaagaggtggtaaatctgtaacaaaggtctgtgattagaaggcggagatctg

SEQ ID NO: 113018 - DNA, 122 bp, Homo sapiens
aggcagctggacgctgttcaagcggaaacgcagagagaaacttcagcccccggggcagagcgttggcagcgaggggagggggcccaagagctccttgcaggcgcacaaaccaatctgggcta

SEQ ID NO: 113019 - DNA, 122 bp, Homo sapiens
ggggtccccacctagcggaaatgcacggaggccaacccctccccctgcccccgcgaggagcggggcggactcggcagccgccactccccaggctcacaggaagaaactgggacgctgcggac

SEQ ID NO: 113020 - DNA, 122 bp, Homo sapiens
agaccacccctgcctgaatcagcagcttcccttaaagctgggtccagctgaccaaagtcacgtccaaggcctgaggccagacctccccggccatcggcaactgttactcaatcgtagggcag

SEQ ID NO: 113021 - DNA, 122 bp, Homo sapiens
ttttatagcagggttggggtggtttttgagccatgcgtgggtggggagggaggtgtttaacggcactgtggccttggtctaacttttgtgtgaaataataaacaacattgtctgatagtagc

SEQ ID NO: 113022 - DNA, 122 bp, Homo sapiens
ccttctctaagctctagtgctccattgagccaggtgactcctgaaactattttaaagccccgtaaaaagactccctagaattgggttaactttggttaaggttattacaagccttcctagtc

SEQ ID NO: 113023 - DNA, 122 bp, Homo sapiens
caatcaaaaccccctcccctgccgccggaccaatgaggagcagcagatgtggccgtcaggcgccgcctcaatgcctcctgggagttgtagtttagaagggagagcggaacttagaacccggg

SEQ ID NO: 113024 - DNA, 122 bp, Homo sapiens
agtgttgaagaccttgcagacgaattctgaaaagattatagcaggggccgggcgcggtggcgcacgccttaatcccagcactttgggaggctgaggcgggtcgatcaccggaggtcaggagt

SEQ ID NO: 113025 - DNA, 122 bp, Homo sapiens
tctccaagaccatcagccacgatctagacacctccaggtggacaggcagccacatggggacggcgcccatcggccacgatctagacaccaggtggacaggcagccacgtggggacagtgccc

SEQ ID NO: 113026 - DNA, 122 bp, Homo sapiens
aacctccctcttccctttccagacttcctgagccctcatgggtcagcctgggaccccagccgggaagcaacctccctgggtgagagatgctttcaatcagactgccttgcccagcttgggtg

SEQ ID NO: 113027 - DNA, 122 bp, Homo sapiens
agcgggatggcctatctgtcagcggttgtcatcgtgggtgagcaggtatttccgaagagacgcgccctcgcccagggcctcagcactaaggggaccggattcggtactttcctaataactgt

SEQ ID NO: 113028 - DNA, 122 bp, Homo sapiens
tgcaggtaagtggctgggtacccaggacacagcgcctcctccattggccaccggtctgctcggtgcaaatccagctctgggtgtctgctctccaggtgggtggccccagtcctaaatcttat

SEQ ID NO: 113029 - DNA, 122 bp, Homo sapiens
tctggggaggggaaatgccggcagccccaaggaagcctctcttccagaccacacccaccccgaagtgggactcggaatgtcagtgcagccaccagtaacaccaaggccacaggcaggagtgg

SEQ ID NO: 113030 - DNA, 122 bp, Homo sapiens
cgcccgcgccctgggacgtccgggggcctgtgacccggaggcgctggggctgtcctgggtcgtcacatgcgagaaatcgtctcaccccagccagtgtgacggagtgagagcaaaagaaagtt

SEQ ID NO: 113031 - DNA, 122 bp, Homo sapiens
ttgtggagtacgctttggactgagaagcatcgaggctataggacgcagctgttgccatgacggcccaggggggcctggtggctaaccgaggccggcgcttcaagtgggccattgagctaagc

SEQ ID NO: 113032 - DNA, 122 bp, Homo sapiens
agccaccgcggttccccatctcagggccaccagggcctccgggcccccccgctgcaccggcgtcatccgccatttggtgttttgtcggaaaagaagccactgtgtttctttaagacaattat

SEQ ID NO: 113033 - DNA, 122 bp, Homo sapiens
catcgttccatcagtggaactgggtcacgtattgtcacagtaaggagaaggagaaagagccgcatggagactccaaatgcagttacagaatgagaccacaggctaaactcaaaggagaacat

SEQ ID NO: 113034 - DNA, 122 bp, Homo sapiens
tctgcgggctttgggcagggctgaaatggcaaatccaggatttaaaccattaaatttccccgagatttcttcaccagattagccacagccgtggccttttaaaaaattatggtcagggccga

SEQ ID NO: 113035 - DNA, 122 bp, Homo sapiens
cacctgtaacgaagaccatctcgggaaagctctgggttaggcaactcgatttcacgaaagcggacaccaacgctctacccagaggcccgagcgtcgtctaacgtttccattggccctttcgg

SEQ ID NO: 113036 - DNA, 122 bp, Homo sapiens
ctcgcagtcacgctggtcaagtattttccacaggtacctccagggccctgttcacatggccggtggcaggagaggtgagagctacatggcccaggccctgctccggtggggcagctcctgcc

SEQ ID NO: 113037 - DNA, 122 bp, Homo sapiens
atagcgagaggcgcggctggcgcccgggagagccggctggcctctgccccctgtgcctggcgcctctccgagccacttagccaatttgaaagcgggtggccattgggatgctcgagcgggga

SEQ ID NO: 113038 - DNA, 122 bp, Homo sapiens
tcccttgaggaactacccctgaggcaaggcgggcaggcccaagctgcgatgtggagaattcgatgtccgagcgacctcctcggaggagtgggtcgagttaaatataaccgcgcgaatggaat

SEQ ID NO: 113039 - DNA, 122 bp, Homo sapiens
ctctgggttttgggggactcgccggtggaggtagatgtggacagggcggccggcccttcgcgggtagccggctttgcgcttactgcgtcccgcagcggtgggtaaaggtcgtagcccagaag

SEQ ID NO: 113040 - DNA, 122 bp, Homo sapiens
tgcacgccacggcgccccctctagtcacctggaccacggcgccccctctagtcacctgcacgccacagcgccccctctagtcacctgcaccacggcgccctctagtcacctgcaccacagcg

SEQ ID NO: 113041 - DNA, 122 bp, Homo sapiens
tccagccgcgaggactggagtcgcgggaggtggagccccagtccggaagccggggatccgcggccatgacggtgccggtccgcggcttctcgctgctccgcggccgccttggccgagcgccg

SEQ ID NO: 113042 - DNA, 122 bp, Homo sapiens
agcacctgattttcatagggtagtcaaggatctctccccaaggaggtaaggttgaagccacgagctgaagaatgatgatgagctaggcaagcacaaagctacaggaagatgattttggacag

SEQ ID NO: 113043 - DNA, 122 bp, Homo sapiens
ccactgctggggtcagagacagtcctcctgccccagcttggagcaagcctgtgagttctgcgtccagcctgttgacccgtctgtctagggacacagggtgatgaggggctgagggtacaggg

SEQ ID NO: 113044 - DNA, 122 bp, Homo sapiens
ggagggacctgtcgcatctgatactaatgaagtgttactgtactttgacaagtttgcaggcgtctgtcttccaagccagctgacgtaattcagaggagaataagaccctcccacttgcgttt

SEQ ID NO: 113045 - DNA, 122 bp, Homo sapiens
gctcccgagcagaatcagatcgcgctaagtagggcacaacgcagaggcgacaaagctcctcggccccagggcccgcggagcagactccggagcgcggtcccgcccacgctcggctccgcagt

SEQ ID NO: 113046 - DNA, 122 bp, Homo sapiens
cccgcgccggccgaggatgcgagacgctgggccaaggccccggggaccggagcaggctgacgggaagcgaggaaaaggcgaagaggagaaacgccccgtcccggggcaaggggaggccgcct

SEQ ID NO: 113047 - DNA, 122 bp, Homo sapiens
catgcagtctctgcaaagctgcccacatgtccgtactcataacccacatgtgtgcacacacgcatacacatcccatctctctcacgcatatgcacatggatacatgacaaatgttaatgcta

SEQ ID NO: 113048 - DNA, 122 bp, Homo sapiens
tggatccaggtgattcttggggcatcaagtgcccccggtgatgtccctgatagtcacccacgtccttggacagagtctcagcatctctgaaggtcggggctggggtctgccttagcccaagg

SEQ ID NO: 113049 - DNA, 122 bp, Homo sapiens
taacacaggaaagatgctgagctctgccggtgtggtggggagcgatgagtgctccagaaacggtccccacgctccactgtgtgccggagcctctgcacttgggccaccgtttcctgcgcctt

SEQ ID NO: 113050 - DNA, 122 bp, Homo sapiens
tcgtagccgtcaggggacccgacgggtggctgtttgggggtgaaaggcgggtctgggttgcgaaacgctcgctgggtgtcgctttcctggaagatcttggttcgtttaggccgaaagtgacg

SEQ ID NO: 113051 - DNA, 122 bp, Homo sapiens
aaccatgaaaaattcatcatatatattcttgcacgacaaaagccacgactgggtcctgcacgctacactttctaggacagaaacgttccgtaaccctgtttgacagactgcagagacagaaa

SEQ ID NO: 113052 - DNA, 122 bp, Homo sapiens
cagcgtgaaccatgcggggccccaccgtgtgggcactttctctgcatacgtccatccggtcgatgtatcacatcaattaggtaaaagtggtgcccggtgtgtgtgatgcgcgtgcacagatg

SEQ ID NO: 113053 - DNA, 122 bp, Homo sapiens
ggctggatggcctcatggtctcccgcttgaggatggcggcattgcagcctgacagctgtgcgcagtgaggatgggtgagaagagagcgtgaggctggggccggggactggacgccctggcac

SEQ ID NO: 113054 - DNA, 122 bp, Homo sapiens
tgtctttggctgttcaaatgcagccagactttgctgctgcgtggatgagtctaggcatagcgcggagcagcctgaaacgctttgaaaccgccaagcaaagttacccgacggcgagtaaacag

SEQ ID NO: 113055 - DNA, 122 bp, Homo sapiens
aacagaggagtgacatgaccagtcttaatttttacaggctgctgtgtagcagcagagaagcggaggagtcggtcagcaggctcttgtattaatcttggcaagccacaatggcagctcaggcc

SEQ ID NO: 113056 - DNA, 122 bp, Homo sapiens
gatgggtccgtcggactccccgtcggagccgctcggctccttgggtcgcttcatggcgaacgcaggctgcctggtctcagccccgcggctaaggctcccagtcgggaagtcaggccccgccc

SEQ ID NO: 113057 - DNA, 122 bp, Homo sapiens
ggccagaggcgaaggggcggggaggagggacgcggcagggagaaggggaggagccagaggcggaggctgttaccaactggctacctagatccaagtgaatcaggacactaacttctctccaa

SEQ ID NO: 113058 - DNA, 122 bp, Homo sapiens
ccaagcctgatgcgattactatattcattgacagatggacaagtaagggcatccagtccacgttaaaatgttcactttgcttagtttggaacgcagggcgatactggttaagtgggactact

SEQ ID NO: 113059 - DNA, 122 bp, Homo sapiens
aggcccctcccaggcactattccactggaagggaagcaaccaaggcagcagcagctgtctcggatcccccgtctaatttaggggggatgaataagtgtaggaatgaattagagaaccaggcg

SEQ ID NO: 113060 - DNA, 122 bp, Homo sapiens
tcgtttccccgcgcgcaggtccgcggggaggggcggcctgccgaccggcccaccccagggcgttcctgaagggcgtcctcggccgcccccaccgcctcccagatgtactatgcggtttccca

SEQ ID NO: 113061 - DNA, 122 bp, Homo sapiens
gctgctgtgagctatatatgacatcactgcactccatgcacgctagcctgggtgacagagcgagaccatgtctcaaaaacaaaacaaaacaaaacaaaacaaaaaaaaccaactttttttaa

SEQ ID NO: 113062 - DNA, 122 bp, Homo sapiens
tctgttttgtaacaaaactccttgacagagttatctgcttctgtggctccaaatcttctgcgtaccattctttctctcaccctaataagattttcacctcaccacatcaccccactgctatt

SEQ ID NO: 113063 - DNA, 122 bp, Homo sapiens
tcaagaaaaactgatgttctaaaatgcatccagtgacttctagcaccacctagccactgccgagtatgtatttcccagttgaaaaagcatgattcttttaatttgatataatattaaagtaa

SEQ ID NO: 113064 - DNA, 122 bp, Homo sapiens
atccagtggcaaagcaaatgctccctatttaggctggagggcctgtctttagccagaacacgaaacataaatgggaaggcaaggactacactgatgtagtaagcatttacttgggagacttg

SEQ ID NO: 113065 - DNA, 122 bp, Homo sapiens
gtgtggcggcctgccgcccggctctgtggtgctggtcccctgcggtcattctcagcgtagcgcctggactgcccctcagccgcggcttggctctgcagccagcgggacaggcccggtgctca

SEQ ID NO: 113066 - DNA, 122 bp, Homo sapiens
ctggcaccatccaggacatccagggccgcttacacggctcaggacgcgggtcagagaccacggcagttatttattcagtccatgtgctaggctttgcatcaaaaagaaaggaccgagataat

SEQ ID NO: 113067 - DNA, 122 bp, Homo sapiens
gggttaaggcattggttctgctttctttccttccagtttgtaaatggtaatccaaccccacgtctttagtgcacaggtgttgtgcagcccctccctgtgacaggtcatggtggctgggcctt

SEQ ID NO: 113068 - DNA, 122 bp, Homo sapiens
attttggtagcgctccctcacggtgacagatccagccagtgcgccagcagacgcccttcacggaaacctcacgtaaaggctgagttagtgctgtctcagacgactgcagcggcgtggtggga

SEQ ID NO: 113069 - DNA, 122 bp, Homo sapiens
gaacgtgcctctgttgtgtgtggctcaggcggtggaatccatccaggccgaggacgagagcgccaagctgtgcaagcgccggatcgagcacctcaaagagcatagcagcgaccagcccgcgg

SEQ ID NO: 113070 - DNA, 122 bp, Homo sapiens
ggagaaaagaccggtctaggtcactgccactggcccgcaagctccttttcacaaatgtcccgatgatgacatgtcatgagcagaagaccaggcaatttcaggccataggagagaaaggatgc

SEQ ID NO: 113071 - DNA, 122 bp, Homo sapiens
ggccccgatgttatacacaggatccgttccccctctctgagtactgaatgcccacagaaccgtggggaccacgggggcagccacagccaggagatccaccaggaagctgctgctccagtact

SEQ ID NO: 113072 - DNA, 122 bp, Homo sapiens
ccatctgcgcggcgcccagcagcatggagacgtctgggtcctccctgacggcatgcgaagcggcacccgcaggtacagctctgctgtctcctgtctgcagggacctgcgggaacacactgag

SEQ ID NO: 113073 - DNA, 122 bp, Homo sapiens
tcacgttgtcgatgaccacaggctggttggcgatgatgtcgtaggactccatggccgggccgcgccggccctgcccagcaggcgggctgcaggaggcaccggatgggcgggcgggcgggagg

SEQ ID NO: 113074 - DNA, 122 bp, Homo sapiens
aaaaaatccccgaagtttcaagaagcaaaaaactatgttgaatcgacacaaattgagtggcgtgtaggctgtgtcaggaattataagtaatcaagggatgatttcatgtatacaggaggatg

SEQ ID NO: 113075 - DNA, 122 bp, Homo sapiens
tcaggtttgtttaaactagtaggtttgttaaaggacataatcctgtcaggcttatcttcccgtggtattgactggcctggcagatcaaaaatgagtggtaagtggcataaaaatggtgaata

SEQ ID NO: 113076 - DNA, 122 bp, Homo sapiens
ccgtggcgagtgtgtgtgcatgtgtgtgtgcgcatgcactctcccagggaatctcccacccgcctccaggctggcccgcagcctctctgccttctgtacatcttccagagtggccatgtggg

SEQ ID NO: 113077 - DNA, 122 bp, Homo sapiens
actgccatctttcatcaaatgtttcagctctgtggaaaataacttaggttttttcctactcgcaaaagaaatgtttccacttgaaacctgttggaaatatggaataggctatatagttccat

SEQ ID NO: 113078 - DNA, 122 bp, Homo sapiens
gtggggatggcggcgctggatttctgagcagttcttagacttcttaggagcccacgcagccgctctttggtggatgtctgaagctgtaaattcactgtcccagtggctgggaacctggctct

SEQ ID NO: 113079 - DNA, 122 bp, Homo sapiens
tcggggggaggggaggaatcccgggagcggccgagaccgaggcagcggcggcgcgcggcgcggcccctttaaggctctccccgcccaccgatggagccggcctcagcccgccgctctccccg

SEQ ID NO: 113080 - DNA, 122 bp, Homo sapiens
ctcggggccacctccggccgcggccccggagcgtctgtcagaaaggaagcagcgctcggccgcctgtgggatgtggttgtgtattgagcgctgcctagaaaagcacagtctccctctccagg

SEQ ID NO: 113081 - DNA, 122 bp, Homo sapiens
accgcgcggctccggcgctgccaggtttcctgtatagcactataaccagtgaggcaccggcggagagcgcccggcagaacttcctcccggactggggctgggctgcggttgcgagagacaat

SEQ ID NO: 113082 - DNA, 122 bp, Homo sapiens
ggccttatttttgtttttttgagacacaacctcactgtcccccgggatggagtgaagtggcgcaatcagggttcactgcagcctagacctgctgggctcaagccatcctcccacctcagcct

SEQ ID NO: 113083 - DNA, 122 bp, Homo sapiens
acaagtaaataaaatagtgagacaattggcttgttgcagccatgagtattgagaagccagcggctatttccctacctccctggatgtcagtgaaactttagatggcccatggctggtcagtt

SEQ ID NO: 113084 - DNA, 122 bp, Homo sapiens
agtggacttttgggagtcacagacctccatgggaatgatgaaagctgcgtaccttctttccgcacaaatgcaggcccacctttaattctgcaaaccactttaggccccgcgggcccgcagcc

SEQ ID NO: 113085 - DNA, 122 bp, Homo sapiens
acagtaaaattaggcacaagtttgtagcctacactggctacaatataaggagcaacataccgtacctcatagcccagggatgtagtaggctatccacctaggtttgtgcaagtacactgcat

SEQ ID NO: 113086 - DNA, 122 bp, Homo sapiens
tctgtggcaggggcagtgcctagactgaactctgcttaccacatccaaccctggcaatgccgcccggcctttggtctcaatcatttcttccatctcatgcatcgcatctcggagaacaaatt

SEQ ID NO: 113087 - DNA, 122 bp, Homo sapiens
ttaatttacagaagctcacctaggtagcccatgtaatggtatatttttcctttaacataccgttttttaaattttttatttattttttttttgaggcagagtctcactctgtcgcctgggct

SEQ ID NO: 113088 - DNA, 122 bp, Homo sapiens
gagaaaccagacaagagtaggaagaccttaaccatggcagaggaccagctgagcggtattcgtaagtctgtggttctcaacaggggcagtttatcaccccaggggattttgccagtgtcttg

SEQ ID NO: 113089 - DNA, 122 bp, Homo sapiens
cgacgtggttttaacagttatacttgcaattaaaagacgttcatccctggtctgctccgccgatagtaaaaaatatttatagctgaggaggaaaaagactccacgagcaagagaggatgcga

SEQ ID NO: 113090 - DNA, 122 bp, Homo sapiens
cacactttgtaacaacctgaaacaacgtgatgcatttccctttgggtcttacctgctcttcggtggctgcctgcaggtggagagaccctcccccttgggcccctcgaccttgtttcagaatg

SEQ ID NO: 113091 - DNA, 122 bp, Homo sapiens
tgtctccaattcaaataaaaccccaaattaagctctcagccccatcggtgggatagcctgcgggggaacccactccctctcctggcagcattgccctgggggcgagcagagagtggatttgg

SEQ ID NO: 113092 - DNA, 122 bp, Homo sapiens
ggaacattttctggcgtccgggccaggtcaagcggaagtaaacactagagcctgcgcatgcgaacagcggagccttcctgcttttctccctcacttccgcttccgcctcggctcagccgccc

SEQ ID NO: 113093 - DNA, 122 bp, Homo sapiens
caggggatctcacctccatactcaatttggctccttcttcccgcttcccattgatccgggcgactctctgcagggccctcagggtgaggtccagcctcccggaggaggagtgccagcgggcc

SEQ ID NO: 113094 - DNA, 122 bp, Homo sapiens
cgttgtgcgcagacactgagcgtggctgggggagacgccacagaaacagaggacgcaccccgacgtggggaactcgcatccacccagggaacggcacacatctgcctccactgccaatgcag

SEQ ID NO: 113095 - DNA, 122 bp, Homo sapiens
caaacgaaaggctgcctcctccctcgggcttggcagtgtctgacctggagatgctccaagcgtggggaatgtacgaggcacggccttgccctgccctgaagaccaaagggcccaggccgctc

SEQ ID NO: 113096 - DNA, 122 bp, Homo sapiens
ttagatgctttgaatatatcagtcaagaagacctgccttcacgcagctcctgttctactgcgcacactgcctctgctcagagacagctgaggatatggatgacagttctggctggaggggca

SEQ ID NO: 113097 - DNA, 122 bp, Homo sapiens
gtgccgagcttcgctaaggccggggctctcgaaggtccttctcggagagctctagagatgcggcttctgctttctgccgtttcctgcccctcggctggccgccggctttacagacgccacaa

SEQ ID NO: 113098 - DNA, 122 bp, Homo sapiens
cgtccccagcctgcacagagagtgccgcagacacagagaggctcggacccgtttcctttccgccgcccggcacagtgaccgaagcattggtgacagcctgtgcggtgacccctcagggctga

SEQ ID NO: 113099 - DNA, 122 bp, Homo sapiens
gtataccaaagaaaggtaggctcagtttggagtgggggtacatgccccttctgaaaagtgcgaaaccttcaccaggacccttcacaccaggcattccaccaagctccacagggctgggaggg

SEQ ID NO: 113100 - DNA, 122 bp, Homo sapiens
tcatagtcagaggccccacccgactacagctatgtgcagaccttcccgtccttgaacacccgcatgaattctctttgggaacattgagtctacgtctgtcttccaaactcagtttttaaagt

SEQ ID NO: 113101 - DNA, 122 bp, Homo sapiens
aatccctgctcttgttccaatggctaaacaaaaagcttttatcaggattatttcactgggcgacatggcacaaagaaagcagtccatttgcagtctgaaggtcaacagggctgctcttgttt

SEQ ID NO: 113102 - DNA, 122 bp, Homo sapiens
gcgcaatgggaccactcgctcaaagaacccacccgacccgagacggcgcgaatgtgcagtcgagcgctgatcccggccttcccatgagcctctggggcaggctccaaggcgagcgacggaag

SEQ ID NO: 113103 - DNA, 122 bp, Homo sapiens
tcaatggacttaacctacagaacagtctggccagtttgggtgctgtcaaacttgccgggtcggcagcacacagtgtgaactccatacctgtcatgggcaataggaatgcatattgataagtg

SEQ ID NO: 113104 - DNA, 122 bp, Homo sapiens
ccttaccccgtaaatgtctttggtatccgaggagagcaagctaaagccctctcatatatacgactccctgaaggaagattgagaccagggatgatgccatggggaagctgaaggacccgccc

SEQ ID NO: 113105 - DNA, 122 bp, Homo sapiens
gcccccttcttgagcttgggggcaagggagggcccagcgctggagaagatgcgacacccacggctttaattgcacttaataccaagaaggggaagcagtggggttgctgggggtagggtgtc

SEQ ID NO: 113106 - DNA, 122 bp, Homo sapiens
ttttcaacaattcaggtgtagattcaagggcctaccctaggtccactaagttggtacctccgggggtgtggcctagcattacattagtttctgaggccaccccgcattattctagggtgcag

SEQ ID NO: 113107 - DNA, 122 bp, Homo sapiens
gcccctcaccccacacctccccggaccagtgcggcggagcggggtcggtttccaggcgcgcgtacctggactcgcgcctctgtgaggtcgatcttcagggccagctcctcccgagtgtagat

SEQ ID NO: 113108 - DNA, 122 bp, Homo sapiens
tggggttggttccgccggttagtttgacagggataagaaagttgctcttcttccccacaacgtttcctgagaggtggttttcagatctgtgtgtttccagtcaagatgtcactccctagatc

SEQ ID NO: 113109 - DNA, 122 bp, Homo sapiens
cggcctcgctcacctccagcttggcccgcgctccggtcctgctctggcgcccccagcggccgcttgaggaacaaggccgctcctcgagagggatgccccgccctttccgttagcgaaccctc

SEQ ID NO: 113110 - DNA, 122 bp, Homo sapiens
tatgggaactgaatagtgcccatcaaaggctcacctatgttggaaactgatctgagagcacggaagcagaattatttctttgttcctgggcagcggtggttgagggatcattttgtggcagc

SEQ ID NO: 113111 - DNA, 122 bp, Homo sapiens
tctgggctatcgcatagtgtaaacaaaggctgtcgaaaattcaaagaatctgttttaatgcgtgacccaaggtgagaggggaacaggagcctgaccggagcccccaccgcctctcctccagg

SEQ ID NO: 113112 - DNA, 122 bp, Homo sapiens
gcggtccccagcctgtccgcggccctgccggtactgagaccccccaccccttctccctcacgcgcagcagtgccctggaccagagaactatcgaacccggcgtcttgttctgccagccctgg

SEQ ID NO: 113113 - DNA, 122 bp, Homo sapiens
ggggcaccctgagctgcacccagtgggcccaaccccaggttttggctggctgcccaggcacggaagacacacccaggctgtggggattggctgcctcagcccagcccagcccagccccgcct

SEQ ID NO: 113114 - DNA, 122 bp, Homo sapiens
tcgacccgctgccctgagtgctcaccacgtgaggaactggagtggccgagttcgccaaggcgccggggacacctgagcagatgagaactggagcctccagctgcttccagcgaatctacaca

SEQ ID NO: 113115 - DNA, 122 bp, Homo sapiens
cccatcctatgcttggtgaatccactactgtgtgaggaggccaagtcccatctctccttacgtaaatggaaaataacagatacaaggttgctgttttttgctttttcctgacctttggtatt

SEQ ID NO: 113116 - DNA, 122 bp, Homo sapiens
tctcgtgttcggagaaacagataaacaagacaccgcctcatcagataagaacgtctccttcgatgtcacggatttcaagaggtagctggagaaactgacgtcaggagtgtcctgtgaatgaa

SEQ ID NO: 113117 - DNA, 122 bp, Homo sapiens
agaccaggtctaaccccttcttccaggaaagcctcgtagggccttctggccaagaggccacgagtggtgaagactgcagactctgaaatcagaaatacctgggctccactgtcagcatggca

SEQ ID NO: 113118 - DNA, 122 bp, Homo sapiens
ttaggcttccgttttctaaacgagaggtgccggtggctagtgggtctgggtttattgtgtcggaagatggactgatcgtgacaaatgcccacgtggtgaccaacaagcaccgggtcaaagtt

SEQ ID NO: 113119 - DNA, 122 bp, Homo sapiens
tgttcgcctggagctggtttgggccttggcctcctcagcccactgccccagctctcccagcggctccaacatgggtcttgggctgcaggagagcctggagagaaagcttgcaaacccagagt

SEQ ID NO: 113120 - DNA, 122 bp, Homo sapiens
agaagatgcagagctggggacacagacacagagcctccaagtccagagtgggccatggagcgcagctgcaagtgccggcccacagggctgagttcaagtcctgcttctgccattggtgtgtg

SEQ ID NO: 113121 - DNA, 122 bp, Homo sapiens
gtttttcagctgtttttcaatagctacaaaacagtaagattgctacttcattaaatccaccgagccaacacacaggcattacataattcacttatccaaataattgaataagtaaattaaca

SEQ ID NO: 113122 - DNA, 122 bp, Homo sapiens
ggcagctctggaggcattgacactgttccccatccgccaccccatcagagagttaacccccgaccataggaacccactgggcaggagtcttctggggcatgtcagtccagggcaggactggt

SEQ ID NO: 113123 - DNA, 122 bp, Homo sapiens
ggaggaagagagtgcggcgatgcatctaggagccacaggacacctagaatggccagcagccggtgggaaccaggagaggcaaggacggatcctctcctccagccttcagagggagcccggcc

SEQ ID NO: 113124 - DNA, 122 bp, Homo sapiens
accgccagcttccgcacctccaagtacctgctggaggagtggttccagaactgctatgctcgctaccaccaggccttcgccgaccgcgaccagtcggagcggcagcggcacgagagccagca

SEQ ID NO: 113125 - DNA, 122 bp, Homo sapiens
ttccctccaattgaaagactagtggaatatctgcaattactttgaccaaaagccagaagccggccagtttgagtgtagctgttacagctttgtgttctaaacctaagaaatggggacccctc

SEQ ID NO: 113126 - DNA, 122 bp, Homo sapiens
cggaccccacccccgcaaccgccacacacacacacaccttgggcaccagggctcgggcatcggagcaccccttcgtgctctttaggcccagcacctgcagccccaaccacaggacccagctt

SEQ ID NO: 113127 - DNA, 122 bp, Homo sapiens
cagtcctccccgctccctgcctatcacctggcttttgtccatcactgggctagctactcacggttaagtgcttgcaggctcttgaaggagcttgacaagaatcccaaagccccccggggaga

SEQ ID NO: 113128 - DNA, 122 bp, Homo sapiens
agacttctgtggcagagcagcaggtacaggactgggggtctctggcacccgcaccagccacgttcccagaccctgcaccaggaccctaggtgagggcccagggcaagcccctctgggatggc

SEQ ID NO: 113129 - DNA, 122 bp, Homo sapiens
ctcttctgtcctccccacactcaccgctgcatctccctcaccaaaagcgagaagtcggagcgacaacagctctttctgcccaagccccagtcagctggtgagctccccgtggtctccagatg

SEQ ID NO: 113130 - DNA, 122 bp, Homo sapiens
cattctctggatcaaagaagagcttgtcagacccaggatggaggggccctgagtctctcccggccccttggcgccccgctctctattccacggcctgctggccttttgtgtgttgcccactt

SEQ ID NO: 113131 - DNA, 122 bp, Homo sapiens
ctgtgagagagggtctcagaggagcctactgctgcagagcccgatctggtgagggggtggcggctcacatcacagagccacaggctgagtgtcaggccgggccccgcaattctggaagatcc

SEQ ID NO: 113132 - DNA, 122 bp, Homo sapiens
ttgctgggggatccatgccctgacagctaggggactcattcattcactcgctcattcactcgttcattggttgctgcatagccactcagctcatattacgtgcaaggcgccagagatacgtc

SEQ ID NO: 113133 - DNA, 122 bp, Homo sapiens
ggcagggtccaggtttcgtcacagtctcctctgtccaatccctgtgcctggcgccgggcgcggctaccaatcagacggctgaaaccgcgttgggttgcatcatgtgcccctggcttggtgac

SEQ ID NO: 113134 - DNA, 122 bp, Homo sapiens
gggtggctgaggagggtccgggaggtgcgtcctggaagaagccctttggccccgcaggcacgcaggccacttaaaaagagaatcaggcagcagctgctgctgtttaaactgaaaaggtggtc

SEQ ID NO: 113135 - DNA, 122 bp, Homo sapiens
aggtgcactcgctgcagggcggcaggaagcggccacattcggggctgcggaattcattaccgtcaggctccttctttgaagtgaatgttaccaaactcagcagccctcaaagctcagctcta

SEQ ID NO: 113136 - DNA, 122 bp, Homo sapiens
ggtgactaaagttagcatttaacaatcaactggtgttaatttctgcttacacttagagtgcgcagaaatatttgtgtgatcattgttagtttagcagcattttgtcttagctgaaatatggt

SEQ ID NO: 113137 - DNA, 122 bp, Homo sapiens
ctcaaacggaggccccaggccaggccaagcctcgtctccggaggtatctgcagcctctagcgtccatgtgatttttcagtggttaatgaaactgccaaggcccggctatgttgcacgacttc

SEQ ID NO: 113138 - DNA, 122 bp, Homo sapiens
atgtctctggagtctcttagttcccttcggtccctagtatctctggcatctctccgatcccgaccatctcgaggttctctgtcatctctgtggtctctagaagagctctgatcctgttcata

SEQ ID NO: 113139 - DNA, 122 bp, Homo sapiens
agggagctcagcatcgccagcatcaaggtgacagttgctacccgaaggtctccggggatccgcaaagccttcttccaagacataactgagacgaagggaaaagcagtggtagtcaacacagc

SEQ ID NO: 113140 - DNA, 122 bp, Homo sapiens
gaggactgcctgggggccctcaggagtcccgtcccgtcccgctcccccggtcccaggctgcgctggctccagggcgcccaggtagccgcgcctggcaccccgaccctgccctcgcggctgac

SEQ ID NO: 113141 - DNA, 122 bp, Homo sapiens
tgctctggtgctgaagagagttgcagtttttatagtaaccatccctgctggggctggagtcgggagtcctggctggggatcctggagtttttttttctcttcactctggcttctctctccag

SEQ ID NO: 113142 - DNA, 122 bp, Homo sapiens
cgcggccgcggaggagcgccgggcaggtgacgggcggtggcctcccggatctggggtgggcggcgcgcccggggagggaaacgggaagggcttactggggatggggacggcaggaaaccacc

SEQ ID NO: 113143 - DNA, 122 bp, Homo sapiens
tgtatgtgggagtgtgtgtgtcgcctggaccctttctagccgtgtatgagagtgtgtacacgcgcctacacacacacacgttgtgttaccggcgctcggccgccgggggaagacccaggcca

SEQ ID NO: 113144 - DNA, 122 bp, Homo sapiens
ccttggggctgtgggaaaagagggaagttcacgctctcagatgttggaggaattggaagccggaggtgtgatttcttggcctccagcagaaacttggttacagtggccacgttctttctctc

SEQ ID NO: 113145 - DNA, 122 bp, Homo sapiens
aaggagccagaggccggccccgcccccgccccgccgggccgccaccctccagccagtccccgccccgctctccgccacagcccgctcaagggggtaccatgactgccccgcgcaggccggcc

SEQ ID NO: 113146 - DNA, 122 bp, Homo sapiens
cccgccgaaagcgcgggcgcttcccacaatgccccgcttcttccctgcgccgcggccgcgcgtgcggctgcctaagcgttcccggccctgtctggtgcattccccctgctgctgcccggtcg

SEQ ID NO: 113147 - DNA, 122 bp, Homo sapiens
aatcccagtcgtggtggctctgccctggttgaagatgatgtgctgtggccgtgatgtttccgatcccagtcatggttttccagcctcaggagcacatctcctcctccagcaattcttcgttc

SEQ ID NO: 113148 - DNA, 122 bp, Homo sapiens
cgaggctcagctgtccgggctctgggcccccaggagcgccggctgctccaagtggcactgcggcgacgaacagcagtgaacagtgccagcagggctcctcatcgccctggcaaccctctatt

SEQ ID NO: 113149 - DNA, 122 bp, Homo sapiens
tgactcaggcctttgtttgtccttcctggtagaggcgggttccctccctcggcaagatgccggagtgctgggatggggtgagtgagggcgctgcgggcatcaaggtgggccgggaggatggt

SEQ ID NO: 113150 - DNA, 122 bp, Homo sapiens
ggctgcctggccggtgctgttggggctgctgctggcgctgttagtgccgggcggtggtgccgccaagaccggtgcggagctcgtgacctgcgggtcggtgctgaagctgctcaatacgcacc

SEQ ID NO: 113151 - DNA, 122 bp, Homo sapiens
atttcctgcctgtgtgcttctggacttaggcagaagcagaatcctatacatacacacacacgtgtgaacacacacacatacacacagatgcatatttgtgcacgcaaacacctgcgcacaca

SEQ ID NO: 113152 - DNA, 122 bp, Homo sapiens
tgctttctccgcggccacctaagctgccaggtgcacattaactaagtggcagaaggccatcggcttggcaattgcctgaggcctttccgggactcgctggtttttaggttccatgaagggca

SEQ ID NO: 113153 - DNA, 122 bp, Homo sapiens
aagcggcagcaatatgggaaacccaagaagcagggcagcaccacggccacacgcccgccccgagccctgctctgcctgaccctgaagaaccccatccggagggcctgcatcagcattgtcga

SEQ ID NO: 113154 - DNA, 122 bp, Homo sapiens
ggaagtcacttaacctttattgaaaagactctggatttaataagctgtgtaactggtactcgatagttacccaaagttcagtctagatggcacaaaccacctctcagggaataaaccctaag

SEQ ID NO: 113155 - DNA, 122 bp, Homo sapiens
ctggccctcttccagaaagctctctccaatgctattccactgccacatgttgccctctgccgacccttttggcaggggctctgagagggtctgcctctctgaggaaccccaagctgccaagc

SEQ ID NO: 113156 - DNA, 122 bp, Homo sapiens
gactgtaagccccacttcaaatgtcaacagaaaaggatatggggattctctgggccatgacggccctccgcctaagtcccactgtgttctccatcgcataattgccttatgtccactgccct

SEQ ID NO: 113157 - DNA, 122 bp, Homo sapiens
atttttgtttgagatcctttttccctggtcgtctttccaaactgcgtgagtgcatggcctcgaggcggccctggagggattttcttgttaaacttcatacagaactaattaggaaagaggaa

SEQ ID NO: 113158 - DNA, 122 bp, Homo sapiens
gtggagcggccatttcctgtttctctgcagttttcctcagctttgggtggtggccgctgccgggcatcggcttccagtccgcggagggcgaggcggcgtggacagcggccccggcacccagc

SEQ ID NO: 113159 - DNA, 122 bp, Homo sapiens
gctagacattccccggcctttatcgcatgccggcaggttggccgtccccggctctcggcgcgaagatctggaaaaaagccccatctcactgtctggaggtgcgagggcagacagaaacgaat

SEQ ID NO: 113160 - DNA, 122 bp, Homo sapiens
gcagctctgacgtcagtagctgccatcggaagtcaggtcatgttctacaaaaagcagtgacgcacgcccgacagcacccgcggggccggacagcggcttcaccagccccgcgggtccgaatc

SEQ ID NO: 113161 - DNA, 122 bp, Homo sapiens
ttatggaccttagaaatggcccaccgatttcccgctgcgatcgatgaggactcagctcgtcggcactgccactcccagccccagttcagtttccgagtctacctctagttcgtctgctgctt

SEQ ID NO: 113162 - DNA, 122 bp, Homo sapiens
ctgggacttgtagttctttttttaacaggcataggttcccgaggccactttcggctctgtcggcctgaggccgagcccaggatttaatgttccccaccctcccgcactccccaagataggtt

SEQ ID NO: 113163 - DNA, 122 bp, Homo sapiens
tgaatctcaggaagctaaaataatgaaactgaaagttgtccaggtgtggaacttcctggacgggtgggtagggctgggtgccccacctcccaagcctttagataagccaccttataactgag

SEQ ID NO: 113164 - DNA, 122 bp, Homo sapiens
gcctggacttcgcctttctgcttttaccctgccctaggacggcagggagatttactggaccggtccacaaaggcagcagagagggggaatcttatagaaattcaatgtcattcagtaaagca

SEQ ID NO: 113165 - DNA, 122 bp, Homo sapiens
tcgccagcccacgctgagcctcccggtggcgccgccccgcccatcctcccccccgccccgcgcagcaaactgacccaggacagccgcatggagagccccatcccgatcctgccgctgcccac

SEQ ID NO: 113166 - DNA, 122 bp, Homo sapiens
actgaagttcagcagtgatggagctgtggttgaggtgtctggaggagaccatgaggtctgcgtttcactaacctggtaaaagaggatatgggttttttttgtgggtgtaatagtgacattta

SEQ ID NO: 113167 - DNA, 122 bp, Homo sapiens
atactaaatgctatacaaccataaaaaagcataaagtccagttctttgcagtaacatcgacggtcattatcttattatcttcagtgaagtaactcagacacaggaagtcaaataccatgtgt

SEQ ID NO: 113168 - DNA, 122 bp, Homo sapiens
ccaatagcctgtgtccgtgtggcccctcccccgagcttcccagtgacggaggaaggcagacgccgcgtgctttccaggcgctgtcctaagccctttgcagatatggagccacttgaccctcc

SEQ ID NO: 113169 - DNA, 122 bp, Homo sapiens
gtgatgtacggtagagcgtcattctctaaacttacttatacaactcgcagattccagagacgaggaaatggaaaggaaccactccacttcctctcgaatctgaaataaacatttgaactaga

SEQ ID NO: 113170 - DNA, 122 bp, Homo sapiens
tggtggccgtggctgtggaaggtgacggctgtgttgtggagcgagacctgtgggagatgccggcagcccaccatgggccgctctggaggcttctgttatcccagcaacaatgggagaaactg

SEQ ID NO: 113171 - DNA, 122 bp, Homo sapiens
agactctttggccttttgcagccctgagaagagccagtccccactcagggcagctggagtcgagttggtcttaaattacctaaagattctgagtgctgggcctgggctccatttgtttacaa

SEQ ID NO: 113172 - DNA, 122 bp, Homo sapiens
aggggggagcaggaggggcgaggagacttgcgcagtcagggagccgcgaaccccgagtctcggtcctcgaaggcggcaggagaaaccgcgcgctgtgccccgacctctctcgccctggccaa

SEQ ID NO: 113173 - DNA, 122 bp, Homo sapiens
ggtggggtctgcgtttgcccctgcccctccgtcagcttcaccttctcgtgccttcttctgcgctgggtgcagaacaaaagaccccctcaagtcaagcctccttgtgaagcgtagtctgcccg

SEQ ID NO: 113174 - DNA, 122 bp, Homo sapiens
gccaccactggcccctgacctccccaactccaatgaaatctgcgaaaatcttctgacagccgttcctctctggtgctcccttcctcatagactgtgtccctgacaatgggaacagccgacag

SEQ ID NO: 113175 - DNA, 122 bp, Homo sapiens
tcgtcacttcccctgtgctggcggtcccagcggctctctgagcgaagtcactgagcgagccgccaggctatgaccccaggggctctgctgatgctgctgggggcgctgggggcgccgctcgc

SEQ ID NO: 113176 - DNA, 122 bp, Homo sapiens
gcaagaggcaggacccgccgctcctaactacctgttctctgttgccgcagaacctgaaggcggctaacacagaccccacagccccgccctacgacaccctcttggtgttcgactatgagggc

SEQ ID NO: 113177 - DNA, 122 bp, Homo sapiens
aggagagatgctggaggaacatgtacataggggagtgcagtcgcaggccctggctcaccacggtgatgatgacaacattccctataatggtcaggcagtagatgagcaggaaaatgacaaag

SEQ ID NO: 113178 - DNA, 122 bp, Homo sapiens
tgggtactctaagaaggagttcatcctattatagtccatgcgtcaaggccgcaggagggtcggcccgtttgggggagacaccctcttgccctacaacctttcggcagtatgtcacagcgctg

SEQ ID NO: 113179 - DNA, 122 bp, Homo sapiens
cttgacctgctcccgggggacctttgtctgaaggactaattctgaaagcattcctttctgcgaagtccccccactgccaccctatttcttagaagtccaccaagttcatgacttgggatcct

SEQ ID NO: 113180 - DNA, 122 bp, Homo sapiens
aaacaaggtagggtatcacagcaggagcctcggtggccctttgccaggcctcgtcttcagcgtttgccttccttccctttccctctttctacatctgactactgggctaggtgtcgtcggct

SEQ ID NO: 113181 - DNA, 122 bp, Homo sapiens
gacccgccccctcgggctgtcggggggtcgagacagtggagtgttcctgatgccagctcacggagggaatccagggaattaggtaatgaacggtctacccatgaaggggaccgattagtgcc

SEQ ID NO: 113182 - DNA, 122 bp, Homo sapiens
acctgcaccatgagccacctggggctccctctgggactgtcccacctgcccactgctccccgaggaagagttcctggtatctgtccaccatcctgggctctgccatgcaaggatggaggaag

SEQ ID NO: 113183 - DNA, 122 bp, Homo sapiens
gcccaagacctagctccaagggaggactgcgggaaatctcacacaggaaaccagctcctgcgtcatgaagggtcgtcagaggaaaacccccacataatgggtggaaaaccgagaaaaactcc

SEQ ID NO: 113184 - DNA, 122 bp, Homo sapiens
ctcagacctcctcaccctcgcagcccattgccctggactggctcatggtgtcacccctcccgcagtgagatgaagaccaaacctcaggggctggcatccaggatctccaagtgaccctactt

SEQ ID NO: 113185 - DNA, 122 bp, Homo sapiens
actttgtcttgctaaccactctatgctcagcttatagcatgcactttgcaaaagaggctacgcaataaaaaaataattaaaatggagttgtgtaataaaaaaaggagttgcaaaaaataata

SEQ ID NO: 113186 - DNA, 122 bp, Homo sapiens
ggcagtgtggttccatggaaaagtaactctagctggagcaatcaaaagacctaggtctttcgactctgttctggtcctttgcctctcttaacttccctttcctgcaaaagaagcaggtccct

SEQ ID NO: 113187 - DNA, 122 bp, Homo sapiens
cggacacccgcgcttggggccttcccctcgcaggaggggccgcggtaaagatggagcctccgcccgagccccacaacatcgccgccgctcgcagcgaacaaagaataatggcggcggactgg

SEQ ID NO: 113188 - DNA, 122 bp, Homo sapiens
gagacctgcatcagagcccgaacagctggaggcgccagctcagtctgtatccccgccccgcgacccaaggctcccccagaagccggggcccaccactggcacactgcggaagcactcccgca

SEQ ID NO: 113189 - DNA, 122 bp, Homo sapiens
tctccctatggccttccggcctggagttttcatcacgtcgcttcctggatgaaagaatctcgaggggtgaggggcaggggttgggggtgatggagaagagaacctaaaggggacttaggtag

SEQ ID NO: 113190 - DNA, 122 bp, Homo sapiens
gttaaatccagcagcctcatcacacaacccaccagctgcttgctgcctcttgtttctcagcgacagtgacctccaacaccttttatttagtgctgcaatacaccgtgtggtttgacggcacg

SEQ ID NO: 113191 - DNA, 122 bp, Homo sapiens
ggtgttggggccaaagctctgcttgatggggtctcaagttgcctttcttccccctccccccgcccgcagcagtccggatgccgcccgcatccgagtcaagcgctaccgccagagcatgaaca

SEQ ID NO: 113192 - DNA, 122 bp, Homo sapiens
acaagagtgaaactacttttcaaaaaaagaaagtcacatgcttgctccacaaagaatttgcgtgagggaagtgaacaatttgatgagaaaaaaatagtttgcgtgtgctgtggctgttagtg

SEQ ID NO: 113193 - DNA, 122 bp, Homo sapiens
tgatgagaaaactgaggttcagagggttgagtacctcgatattctgcagtggagaagggacgctgtcacccctgggacccgggtcggcctgatcccaccgcctcctgccgggaccgtgctaa

SEQ ID NO: 113194 - DNA, 122 bp, Homo sapiens
ggcagaagctcggaaacccgagctgcacaggccaggatcttacttcctgtcgtcgcgcagcgatgacatcacccctaccgctctcctgaggggtcattttgaggcgcgcgtagaggactaga

SEQ ID NO: 113195 - DNA, 122 bp, Homo sapiens
ttttgtgttactttcagcttgcttcgttgtcctaattgaccaactccacacctggcagctcgaactaacaactccctttcaaacacttatgaagccacctgcgggcctatcattttctaggc

SEQ ID NO: 113196 - DNA, 122 bp, Homo sapiens
ggatccttccgcacactgaagagtacgtcttcgggtctacccctaatcacgtaagtctcgcgtctgccctacctgccctgtcgcatttttaagtggtgattcaggctgtggcttttgagggt

SEQ ID NO: 113197 - DNA, 122 bp, Homo sapiens
ttttctcccctctttgtgggatcagtgggtttggggtttttcttggtggcagagcagcgccgtcaccgagcagccgtcgctggcctgatatgcagcggtgaagtcttcactggtttctcttc

SEQ ID NO: 113198 - DNA, 122 bp, Homo sapiens
ctgtcatcccgggtccggaattgtggctggctaggtggggacttgaggccgcagtgagaccgtggctgctgagatctcagggggcagtcccacctcccacccactaagggcggagaaccgga

SEQ ID NO: 113199 - DNA, 122 bp, Homo sapiens
agcctccacgcagagaccactgatggctccgcgccgctcagttgatcccttcccactgcacggagcgggagactaaaggcccactgcccatggctgcgaaaaccttccttcgggaacgcgga

SEQ ID NO: 113200 - DNA, 122 bp, Homo sapiens
ggaggtctctttgcctggggtcagggtgggggtgccctgttctccctctagtgggcgagacggggtctgctgggctgagtgagaggccgccctgaattcctcggtgtggatttcaggaagtg

SEQ ID NO: 113201 - DNA, 122 bp, Homo sapiens
ctcgttagggctcagactcgggctaggtatgggggagggaagggaaacagatggcgacggcgggcggcgctaaaatggagcctgcttcctgcgcgaaacaatcccgctcccgaaatgccctg

SEQ ID NO: 113202 - DNA, 122 bp, Homo sapiens
cggagtccccagccggtgcctgatcgcccggcgccccatcgcccggggccgctgcctcgccggcggcctggaacacaaaacctgggccctagccctgcaccctgcgctcagcgcttccaccg

SEQ ID NO: 113203 - DNA, 122 bp, Homo sapiens
actccttttcccatttggcgaccctcctggactcaaagggaccgaactgtgtccgcttgacgagctgagtgatggcgaacaccccctcggctccatcttccagtcgtctgatctccaagttg

SEQ ID NO: 113204 - DNA, 122 bp, Homo sapiens
ccctctgtttaccggactagaagaccaactaagatgggcgcctgcgcactgatgagtgttcgtcagcggggcgcgcctgcgcagacttgtgcagcagctttcgccctccagaggcctagtta

SEQ ID NO: 113205 - DNA, 122 bp, Homo sapiens
gcagtgtcgacctggacttgaactaaaggaagggcctctgctgactcctaccagagcatccgtccagctcagccatccagcctgtctctaccgggccccacttctctggatcagagaccctg

SEQ ID NO: 113206 - DNA, 122 bp, Homo sapiens
cgcggcctccacaaggtcagaactaagatgtcctcagagatccccagttacgaagcaaagcgcgggcctacttcgggacctacgcgtccgggcgctgtgcgcggggaccgctcccgggccca

SEQ ID NO: 113207 - DNA, 122 bp, Homo sapiens
gctgctctcctggaagccatggtacaggcagagctcagggcgatccccaggtgagggcagcggctctgcctgggattccaccgcagtacaaccgggtagatgcggggtggagaagaaaggat

SEQ ID NO: 113208 - DNA, 122 bp, Homo sapiens
cctgcccttcactccagcgcgcagcaggccgggcaatccgaccgcgcggtaagccgccctcggaaccgctggcgcagttttcagactcgcccaccgcccagagaccaggggcccacatccag

SEQ ID NO: 113209 - DNA, 122 bp, Homo sapiens
ggtcacgaatgtacgaaccttcccatggaaacattgcaaggggccgagcaaaattccgaccgtcgccagaagcgcagtcggagcgccgtcgccagtgcggattctgtccctaacacaggctc

SEQ ID NO: 113210 - DNA, 122 bp, Homo sapiens
ccccctgcaggggcctgatgggcagcacagctggccaatcctgggactcagagggtaggtcggctggctgaccactaggtttggaagacccaggcagctggctctaaagaggccccaggtca

SEQ ID NO: 113211 - DNA, 122 bp, Homo sapiens
ctggggacaacagaccacactcagcttggcaccctctttccaatggccctgccaacactccgctgcctctgggctggcccaggttgctggtccatctctcctgacccttcacgtcctactgc

SEQ ID NO: 113212 - DNA, 122 bp, Homo sapiens
cactctctctgaccttgtattgggcgggcttgattaattgtgaacaaatgttcacagagacgtcaaagcaaaatgaaagggaagagaaagctaatgagccataacagatcctgaaataacct

SEQ ID NO: 113213 - DNA, 122 bp, Homo sapiens
gccccggcgcaaaagaggccgcggaggccaggcaggagcaggtcctggaggcctggtcggcgtgggcgttttattccgagaccaaggggatccactgcagagttctccgctgggcgtgacct

SEQ ID NO: 113214 - DNA, 122 bp, Homo sapiens
gccgcgcccccatggccgccgcgcgatggtcgccgaacccacaggaggccgggctgtctgcgccccgctcccggggccgcccctagtcgccccgcctccaatcaccgcggccctgccccgtc

SEQ ID NO: 113215 - DNA, 122 bp, Homo sapiens
gcgagggccgcctgggccaaccggctttttcagggtcccgggtgatgctaatgtgcccgccgttgctgaaaaccactgtctctaggagttttgaaaaatctcggagctctctggcaggcggg

SEQ ID NO: 113216 - DNA, 122 bp, Homo sapiens
cctaggggcaggcccaggcctatagcccgggacccgcatcccgggcgagctgcaccctcccgagaccttccccatctgtacaatggggacaggacaaggcccagcaggcaggctggcggggg

SEQ ID NO: 113217 - DNA, 122 bp, Homo sapiens
gagcctcaccccggctgacttgttgctggtggcagacttctccctggccaggtgaaccagcgacagcaggcacagctccggggagccctgcttgtcaggggcgggctcctcatcactgtcga

SEQ ID NO: 113218 - DNA, 122 bp, Homo sapiens
tctgcttccccataccacaagattctcatatgccaagattagaagataggcggagattggcgtaaatgcacatatactcactgaaatccaactctcccaccctctaccatggagagctattt

SEQ ID NO: 113219 - DNA, 122 bp, Homo sapiens
tctccttgcaaagaatggcggatgcagtgagagttgccgtaaaagcgatgaaaaagtcatcggcaatccttaccacatccgtacatcggcagctcggaggcttgactgctggagcgagatgt

SEQ ID NO: 113220 - DNA, 122 bp, Homo sapiens
aatgctgcgcccctacccagaactagcgagcgcttcccaactggcctcccgccttcctctcgtcctctacggcctccattggcagctgtgcaagggcccggccctgcctctgtctctccaca

SEQ ID NO: 113221 - DNA, 122 bp, Homo sapiens
ggcacaatggctgtgccttacgctcaggaaagccagggtttgccagaagcactcactccccgagtccctaacttcatcctctcctagaccccatttctgaagtgaaagtacacagaggagtt

SEQ ID NO: 113222 - DNA, 122 bp, Homo sapiens
tcttatgcaaatgaggtgattaataaaatagtgtgtaggactggtggcgattctagatgacgtcatatacacgtttgtccaatccaaagaagcatgtttcataacagcgattccattggttg

SEQ ID NO: 113223 - DNA, 122 bp, Homo sapiens
tgggttactttagcattctggattgggggtagctacatctaaggggagaatttgggactgcgggatatgaattcataattaaacttgtctctgagggatctagcccagatacaatatgtata

SEQ ID NO: 113224 - DNA, 122 bp, Homo sapiens
ctccggagcatcgcgcggccaagcgttcagtggccgtgctgggagtagtcagcccagccgcggggagacaagcactaaagactgagcgtcctgtaataggtgtttaagtcatgattgcgcta

SEQ ID NO: 113225 - DNA, 122 bp, Homo sapiens
ccctacccccacccacagaaatgtatagcagtctctgactgttgctttcacacaccatcacggttgctgttctgtaggtgctgctcagggaaggtgggaaggacagcaggctatttcttgat

SEQ ID NO: 113226 - DNA, 122 bp, Homo sapiens
ctggcagcccttgaggaagcaaagtccccagagggccctgaagcagccacagtaaagccgcgtccaccagcagcagggaggtccagggtctcaggtcagggagccgcatggctctgtcaacg

SEQ ID NO: 113227 - DNA, 122 bp, Homo sapiens
tctgaatccctagagtggagctcctgccatatctcaccagtcagagctaggtcacatgcccgtttctccccattggcaaggggaactagagtcacttggatcattgcaccccatcgctgcac

SEQ ID NO: 113228 - DNA, 122 bp, Homo sapiens
ctcctgtagcgtgcagcccgaccagtccgtgccctcgtagcagggcggcagctcctcaggcgtgggcgtgcgcccatcacacatatgcaacgacgtcttccacgtggcacccctctgcacat

SEQ ID NO: 113229 - DNA, 122 bp, Homo sapiens
agggccgggcagcattgtaaggctcagtggcaaagtccagggaggccacagcaggcgggacgccctgtgcccacagctccagagtgagactgtcacctgcggggccgggggccctcccctct

SEQ ID NO: 113230 - DNA, 122 bp, Homo sapiens
ctcaagtgatcctcccactttggcttcctcagtcactgggattacaggtgtcagccacagcgcctggctaacaacagggttttctactgcttggatcccaggttcttctgggctcccagtac

SEQ ID NO: 113231 - DNA, 122 bp, Homo sapiens
acgggcccgcctggggtgcggtcagtcttgtttgtgctgctctccggtcaaagttcatggcgcttctccccacgcctttacttttcttgggagattcccagggaccaccatgttagagcctt

SEQ ID NO: 113232 - DNA, 122 bp, Homo sapiens
cgactctggcgagtcgctgccctctcggagcgccgtagttctgagatgcagttcacaccgcggcccttcttggggcccactccaaggctactggatcaggacccccagtctggggccgggca

SEQ ID NO: 113233 - DNA, 122 bp, Homo sapiens
gcgccacgccccagcctcgggccccgccctagccccgtcactcccccttactcccctcagcgtttaggcgggaaagctggagagctcccagaagctctcgggcatttcttctggtttttttc

SEQ ID NO: 113234 - DNA, 122 bp, Homo sapiens
tcctcagggcaagtactcctccctggcctccaaggctcaggatgttcaacagagcacagacgcggacacggagggtcattctcccaaagcacagccagggtccacagaccgccacgcgtccc

SEQ ID NO: 113235 - DNA, 122 bp, Homo sapiens
cgaaaggggccccgcccggagggagaggcggggcgggggcgaaggtgggggcggggccagcgcacctgcgagccgcacctgccacgtcccaccgcctccgcgggccacctgcccggacgtgc

SEQ ID NO: 113236 - DNA, 122 bp, Homo sapiens
cactgctcaggagcctttcccacccaaaggctgtctctggttgccaacctcaatcactcacggcgaatgacctgccagggagtttgtctaaaattaataagaatgtattaaaatttaatttt

SEQ ID NO: 113237 - DNA, 122 bp, Homo sapiens
gagaacaggggctgtatatcacttccggcgaaggaaatggaagaatctatgggctgggaccggaagctggggtctggttttgagtctcggctttgtcttaacctgtgttgggcgttgcaccg

SEQ ID NO: 113238 - DNA, 122 bp, Homo sapiens
aggaaaggagacccccgaagcggaggagcagggaagaacccgtgataggctcatgggaaacgaggcctcatcagatctcacctgtgggcgtgtgtctgaaacgaagccagtcgatgtgtggc

SEQ ID NO: 113239 - DNA, 122 bp, Homo sapiens
gcgggggttgtgggggcgccatctcctcttccggcccctgggactggtgtcctgaagtgtcgggagtccttacgcaaccttgacatgtgcgggctactggggtccatcggcagcgggaagag

SEQ ID NO: 113240 - DNA, 122 bp, Homo sapiens
cggggccgggtcgcgcgagcagcggagcaccaagggaacggaaaatggcgcctcacgacccgggtagtcttacgaccctggtgccctgggctgccgccctgctcctcgctctgggcgtggaa

SEQ ID NO: 113241 - DNA, 122 bp, Homo sapiens
cggcctctcccctccccctccttgtctgctgcttggccccggtcagcttcagtctccagccgtggggggtcccctgctaaggccagccctgtcaatgagtgaccagagattcctgtagttca

SEQ ID NO: 113242 - DNA, 122 bp, Homo sapiens
atgcttgtaaacccagctactggggaggctgagacgggagaattgcttgaatcgggaaagcggaggtggtaatgagctgagatcagaccactgcactccatcctgggcgacagggcaaatga

SEQ ID NO: 113243 - DNA, 122 bp, Homo sapiens
cccgcctccccggcggggccattcctcacccgccccagcactggagggggcggccggggtcggtctagttccggttacaaactggacagaaaaggccactggagtctcgctaggcgatgcgc

SEQ ID NO: 113244 - DNA, 122 bp, Homo sapiens
caattcaacataatgaattgaactgaaattgaacacctgcttgcgtaaacctagtcggctcgagttgttctggttctggattggtcagtctagagttccaggggtgtggccaaaagtctgtg

SEQ ID NO: 113245 - DNA, 122 bp, Homo sapiens
tggaagaaacatctcttccttgaaatacctaagcatatattccaaacactgagcaagagtcgagcgcgttctaacatctccgcagcaggggccggaagagttgcctttgtccccgcctatga

SEQ ID NO: 113246 - DNA, 122 bp, Homo sapiens
tcacggcggccgcgcccctcgcccaggacggctacattgatttcatggagtacgtggcagcgctcagcttggtcctcaaggggaaggtggaacagaagctccgctggtacttcaagctctat

SEQ ID NO: 113247 - DNA, 122 bp, Homo sapiens
actcgcgaaactctccttttagctgggagcatctgccagtaaaggggccgggacagatctcgtagcgcctggtaggtgattggaggaattttggcttttactttgagtgagatgggaggcca

SEQ ID NO: 113248 - DNA, 122 bp, Homo sapiens
cagcgacatggtgggggcagaaaccagccccagcaccgcacgctgttcacagagcaacatcggtgaggaagcgtgagttcacgtgagttcactgcttcttccaggaagtctccgttgccggc

SEQ ID NO: 113249 - DNA, 122 bp, Homo sapiens
agagcatgggggatgcgccgccgccccaggacgagcacaccaccatcatagaccgcggaccgggggcctgcgaggagagcaaccatctcctgctcaatggtggctcccacaagcacgtgcag

SEQ ID NO: 113250 - DNA, 122 bp, Homo sapiens
tgtcttacccttttccctactgcatcagtcctgtcctcttcctcaccacacaccctcacccggcactaggccattctggcagggaaagcttgtctgggtgatacttaatgaatgactaatca

SEQ ID NO: 113251 - DNA, 122 bp, Homo sapiens
gactaggaaccgtcactcagcgctggcggggacgcaagcgggaactcaaggtggggcagccgctggggagggtctgacagagcctcagttaaacacgtggcccagcaaccccactcctagcc

SEQ ID NO: 113252 - DNA, 122 bp, Homo sapiens
tgggcacttggttactggcctcacactgggacacactgccctctacagacagctctcagacggcttctctcctggaagccctggtgcccagtcccttcccgcctccctggccccacgatacc

SEQ ID NO: 113253 - DNA, 122 bp, Homo sapiens
ccatgtcgcgaacacgtcgcgagtctttaagggaaacagctttacttcggtaagggcgggcgcgagccgaggccaaggcgccgcccgggagccccgcgggcgccgaggcgcccggtgccggg

SEQ ID NO: 113254 - DNA, 122 bp, Homo sapiens
cctggtaattttaggggatttttttttccctttaagtactggttggcaaactagtccttccgtctaactcctcgcatcttttgcaagtaaaccccttttctaagtgaatctatctctgagtc

SEQ ID NO: 113255 - DNA, 122 bp, Homo sapiens
atctgtaaaatggatcaggacccatcgttatgcggatcaaatgagaccaggtatgtaagacgctgaacagcgctggcgcatggtaagcaccccacgcatgacgcgacagcggtagcttgggt

SEQ ID NO: 113256 - DNA, 122 bp, Homo sapiens
tcagacgcgggctcttactcaaacgctgatccccgaaactaccgagcagtgtctgcgcgacgcgaaagcatttttggagcgaggggccatggtgcccatgggattcccacgggtgttggact

SEQ ID NO: 113257 - DNA, 122 bp, Homo sapiens
ctccagcacgctgggtctggcctggcttccacctttctgcctccgacactccgactaaagcgttcagagcaaggaaccaaggtggcttttcttggttttcttgtcctggagcctggtagagt

SEQ ID NO: 113258 - DNA, 122 bp, Homo sapiens
cgaggcaagaggtgggcgtggagggcccactcttgaggtagaggctgggcctctagagggcgccaacaggcaggggctgggcctggagaagccaacagaggcatgaactgggcctcaacagg

SEQ ID NO: 113259 - DNA, 122 bp, Homo sapiens
ttggccgctgctggtcgtgccgccgtgagctcgggtgtgcaatgtctgttggggccctcccgtcgcttcttttggggtactggggtagttttgcctgctgtggaacctcatggagatgcagt

SEQ ID NO: 113260 - DNA, 122 bp, Homo sapiens
cggaagccagtgccctccctagttggcaacgttgttcagctgagctacagagaaagagctcggaggtctatggactccttcatggaaatcgctcccttgcgtctcctcatgtggacacagct

SEQ ID NO: 113261 - DNA, 122 bp, Homo sapiens
cctccttccagagatattgattgcgagaacacttattcttcactccacgtttccgtgtggcggtagccgtaccagagtaacactctctgcctcgtcccgcccctcactcatctcttcacacc

SEQ ID NO: 113262 - DNA, 122 bp, Homo sapiens
ggactagatcagctgagaaaacaagtctgagtgatgtgcccagcccccaaagtactcggccgcacccgagacccgctcggctcctgcgttgggcgggcacagccaaggggttaaagcaaaat

SEQ ID NO: 113263 - DNA, 122 bp, Homo sapiens
ccagcccaggctcgtaatcaaaaggcagatttccgcgccgggcacctgtttgcagggctgcgcctccttccgctgcggtgttttatctcggcgcggcggtgaataattcatggccccgggtc

SEQ ID NO: 113264 - DNA, 122 bp, Homo sapiens
tttttgcttgtcccagaattaactgtcttccttctcttccctttgactcctgtaggggtgcgggtggttgtcccggggctcttttcccactgaccctggaaaaggagacaaaagttcgcgca

SEQ ID NO: 113265 - DNA, 122 bp, Homo sapiens
aaataaatactccttcgaaccaacggtatactgagagccctgagcttgtgggcggggccccggagcctcccgggacctaaaggcagagggggcgtggctgagggtggtccagacctccaggg

SEQ ID NO: 113266 - DNA, 122 bp, Homo sapiens
gcccggccgccaggtctgggaagcgaggagtgcctctgcctggccaccccgtctgggaagcgaggagtgcctctgcccggctgccaccccgtctgggaagtgaggagtgtctctgcctggcc

SEQ ID NO: 113267 - DNA, 122 bp, Homo sapiens
gaacacaatccagtacaaatgggtccaggagcttcaacgagcgttccagcttcttcgtaacgttcccacaccgtgcagcaagcggagggaagagaacttccggcgcccccacctaccgctcc

SEQ ID NO: 113268 - DNA, 122 bp, Homo sapiens
ggggcacccgggctgaggcctggccctccaaggagccctggagggactgtgctgctagggcgcggggctcgatggggtgatctggagacctggggggatccggggctgccgcccctgcgctg

SEQ ID NO: 113269 - DNA, 122 bp, Homo sapiens
gcgcacgatccgcagtgcctgcagccttcctgggggaggcctggcctggaaagcctcctccgattacagctgataggcaagtggagccctagataccatgctggggacagacactgcagcac

SEQ ID NO: 113270 - DNA, 122 bp, Homo sapiens
ccggaaagcggtcgggcaacgatgacgacaatgacgcgccggctctgcccccgccacgagcggcgcttcccgatgatctcacgctgctcgccacgccccctgctccttaactcttctccaaa

SEQ ID NO: 113271 - DNA, 122 bp, Homo sapiens
agtccagcagcagcgtgcgttccgcctcccgcggatcccgcagcagcgtgcccagcgccgcgcactccagctcgcgcgccgcctccagccccatggccaccggtgcctcttcctcttccttt

SEQ ID NO: 113272 - DNA, 122 bp, Homo sapiens
caggacccgctggcttggagccgcagaagccgctactgcagcgtgggcgacaatgctaggcgcccaggagaactaccgctcccaggttgcctttcgcgccccgagggctgctgggactctcg

SEQ ID NO: 113273 - DNA, 122 bp, Homo sapiens
tcttaaaaatagggcgcataccaggaaagcttagcatcagccaaagctactagcacaccacgggcaaaaggccaactctgcagggatatgtaaaggtcattttatggataatccatataaaa

SEQ ID NO: 113274 - DNA, 122 bp, Homo sapiens
aagagggcaaggatcgtgccaggctcaccgtgggcgctcagtaagcggccgtgcagaggacggttgagggctttgtgcagaggaaatgagagactgctctgaagcaaggcccgcctagtgag

SEQ ID NO: 113275 - DNA, 122 bp, Homo sapiens
gtgggccgcctggctgccgcctggggcctccggccgctgcgtcccgcggcttctgggaaccgtgcgcgctcacaggcggacttgggcctcgaacaaggttcctgctaaattgagttgtgcct

SEQ ID NO: 113276 - DNA, 122 bp, Homo sapiens
gaaattgttcagtggggcaatgggcgataataataaccttgcttccacaacgcggcacaacgagcctggtcgcccgtttggttcattgacttgcaaataaaacccctaacacaggtctgggc

SEQ ID NO: 113277 - DNA, 122 bp, Homo sapiens
ccgtggcgtggaagcggggcagaaatgaggttacctggcggcaagggacctggggcgcctcgagctttgagcataggtccgcagggccggggcggttggggaccgggaggctggggtggggc

SEQ ID NO: 113278 - DNA, 122 bp, Homo sapiens
cacttgcacgccgcggaccgcagggatccccaagccctgcacccagattcttccccgccacggagagacaatcatgacaattatcattacaatgattatgaaaactggcatgaaaacattta

SEQ ID NO: 113279 - DNA, 122 bp, Homo sapiens
tcagatgtccaaggccccaaggaagctgccttctttctttgctcaggaagatccctcagtcgctccctccggaaatcctcttcatccttcaaagctcagccaaaaccacctcccctgtgaag

SEQ ID NO: 113280 - DNA, 122 bp, Homo sapiens
ctaccccaaatcctcccagcagttgcagcacaactgctctcccggctgctttgagaatcccgccctcctctctctccctctgcccactcctcactagcgcagcgtgtggtccgccatggggt

SEQ ID NO: 113281 - DNA, 122 bp, Homo sapiens
gcaggctctgctcagcccctggcttcttgctgccttcctagtcgcgtttgctgagtaacacgccaccttttatttcttcacactcaaccccctgcagagatgtataggcacgttgtgatgac

SEQ ID NO: 113282 - DNA, 122 bp, Homo sapiens
ctccggggcgccaggactcgaggacgcggtttgcccccgcagtcctaagatccccggggccgtgacagcttggggaaggggcaaactctgtttggtctccacgaagtgcttcgatgttcgca

SEQ ID NO: 113283 - DNA, 122 bp, Homo sapiens
cgtcaccttccgcgaccactgagatgggctgggccagagcggcccgagcgtgtgcgggcacgccccctggtgcccagggtgatgcactgcacgtcgccgccgccggaggggtggggttggag

SEQ ID NO: 113284 - DNA, 122 bp, Homo sapiens
ctctcgatcctcccccgggtgagggggattttgtgggggctgctggggcaggcagcagcccggggtggtgtgtctatgctggggcccaggccccggggcgggctgtgtgtgtcgcccccgct

SEQ ID NO: 113285 - DNA, 122 bp, Homo sapiens
ctagccggccgccctccaccggcgcctccggacgcaacctcgccctggcagggcggtctgcgcgtccagctgattggtggctctgtccagccgccgcacggagctaaaagtgttcttctcca

SEQ ID NO: 113286 - DNA, 122 bp, Homo sapiens
acagcctgcgggccgagggtgcggcccgccccttagcccccaccccagggagcccctgtccgaggctgccttggaccacccagcagggtccctcctgacagacatcccatctgggagccccc

SEQ ID NO: 113287 - DNA, 122 bp, Homo sapiens
attaaaatgagtgtcggtttcaggactccctcttttcaagctgccagaaacttgtctagtcgagccgcccctggagtccgcattccaaggctcacggctcgggtttctgggcgaggagacca

SEQ ID NO: 113288 - DNA, 122 bp, Homo sapiens
agcgatccacccgcttccgcctccgcctcccaaaatgctgggattaggggcgtgagccaccgggcctggcccaattactttcttcagtctgagcatgagggctggaagaaaagctctcactt

SEQ ID NO: 113289 - DNA, 122 bp, Homo sapiens
tgccccggtgtggcccagcaccttaagagacagccctggagacaagccagccagactccccgatcaggaacaccagatccctgaggccatcagtgggactacctggtacctacactggggga

SEQ ID NO: 113290 - DNA, 122 bp, Homo sapiens
cgggacggaggtggctgtgtgtccctgggcaagtctctttccttctctgggtagcccagtcgggcgccccgcctgtcgtcgccgcgcatgctcagttgcgggcggcgtccggaggaggtggc

SEQ ID NO: 113291 - DNA, 122 bp, Homo sapiens
cagtagcgtctccccgcccgggccccagcctccccgcccaccccgggcctcgcctccccgcgcactgcactctcccgcgagccgcgcgccccggacctcaccatgggctccgcgccacggag

SEQ ID NO: 113292 - DNA, 122 bp, Homo sapiens
ttgctcacgagccgggcacagtgcactctccctttagttgtgtttgggggacgagtatcgcgggggaggggagggagtcaccatgcccgccggaaaccccccgctgagtcgtccgccctgca

SEQ ID NO: 113293 - DNA, 122 bp, Homo sapiens
taagtttaggaacgtctctgtcatttgggaactgcttttctggctgcagctcaacagtggcgaacatggacactgggaacaggcccagagtcctgaaatgattaatatcctgtgttgtggga

SEQ ID NO: 113294 - DNA, 122 bp, Homo sapiens
gtgcccacccccgatgatggtgtcagcaaccatcatcaacaagcctcacagctcacgtcccggccacctctgtcccccacgtgcccagcaccggggccagggcacctcgagaacgctgggaa

SEQ ID NO: 113295 - DNA, 122 bp, Homo sapiens
tcgacatctctgcgctaaacactcaactgtttgttttctgcaaagtggcaggacatatttcggtggtgaccgcagcaacgattcgctcctcgattgttaggctctgagtggcattggggaca

SEQ ID NO: 113296 - DNA, 122 bp, Homo sapiens
gggcggggccgggctgggggtgcacacgggtgaggaccggcgcggggcctggcttgctcgcgggaggatgcaggaagtcttccctgccctgattttatgaacccaaagctctgtggttgaac

SEQ ID NO: 113297 - DNA, 122 bp, Homo sapiens
gttgttaaatcatttcctagtcactattaccaatgccatagccctacctgaagatttcaacgtctttcacctagactactgtttacagtttcctagccggactcactgcctctggtcttccc

SEQ ID NO: 113298 - DNA, 122 bp, Homo sapiens
ccacctcactctggcatagccctacttctccaaaccaccaggcctgccctcccttgtccacgcagatctgacaatctccacagtgctgtgcagacttcagctccaagaagttgcaagtgatg

SEQ ID NO: 113299 - DNA, 122 bp, Homo sapiens
gtctgagcacctaggcggaggcggcgcaggctttttgtagtgaggtttgcgcctgcgcagcgcgcctgcctccgccatgcacgggggtggccccccctcgggggacagcgcatgcccgctgc

SEQ ID NO: 113300 - DNA, 122 bp, Homo sapiens
caaggtgtacgagaagatggccagcaagctcttcgagatgaccggcgagcgcaggctgggcgaggagatcaagatcaagatcaccaacatgaccttccagtacaggtgggcgagcgggcagt

SEQ ID NO: 113301 - DNA, 122 bp, Homo sapiens
gagcctaggggctttcccatgtcttaaccccacatcacaaaattaaatttgggccaggtgcgcggtggctcacgccggtaatcccagcgctttgggaggccgaggctggcggatcgcttgag

SEQ ID NO: 113302 - DNA, 122 bp, Homo sapiens
accgcccccgtcccgcccctgctggacctcgccgtttcgcaagcatccgagttctccagccgaggctcgggactgctgcagggtggaaaatgaaagttctgagagcaccttccgcccctccg

SEQ ID NO: 113303 - DNA, 122 bp, Homo sapiens
gttgcctgcggggcctcggacctgcccggccgaggtgggggtcgagggcggcccggcaggcgcagctctgatggcctcggcgggttgtgggctatttaaaacggcttgtcccagctcgaagc

SEQ ID NO: 113304 - DNA, 122 bp, Homo sapiens
gccctccgcgtgattttccattttcctgtcggggagcagcacccgctatggctcttcctccgccttctggacctgaacctcacatggtcccagtcaacagactgaagggcccgaggcggtgg

SEQ ID NO: 113305 - DNA, 122 bp, Homo sapiens
atcccttccagcccaagcactccgcccaggcgcgccaggcagagccccaccccatcccgccgttcccttcagccccggggcgcggatcttgcatctgaaactgagcagagcagggcgccggg

SEQ ID NO: 113306 - DNA, 122 bp, Homo sapiens
ggagtccggagaaccaaacccgagcctgaagttgccattcgggtgactcccgagaaagcccgggagcattttggccaatgcgggtttttacctgaacttcagcatcttcaccccggtttcgg

SEQ ID NO: 113307 - DNA, 122 bp, Homo sapiens
tggcaaacgcagggttaagatgacagaacagacagacacccggcccttgtggcttcctctcggcctcaggcacgcaccagccaatctggcccaactggaaccagtgcagagccagtgctgtg

SEQ ID NO: 113308 - DNA, 122 bp, Homo sapiens
cctgtgtgttgaaaccagccagccttgcaaacttagcctcaggaagtttctatgttttcccgtggggcagtattatcttagcagctggcaccaaaactctactgaggaaaggaattgtcttt

SEQ ID NO: 113309 - DNA, 122 bp, Homo sapiens
taaaggcagcacttactgctaaggcccaagcaactgactcttcctggtctgacgtggcatcgacctcaccgctttttgaatctaaaagtcaaacaagtaaatctcaatcaggattttcagga

SEQ ID NO: 113310 - DNA, 122 bp, Homo sapiens
aggccacaggaggggtgccacgccgggtgctaggcgggcctcttacctctcccacagcatcgcttccctgacggagccgcaggccagctgccccttcatgtaggcacgtgcgtcctccagga

SEQ ID NO: 113311 - DNA, 122 bp, Homo sapiens
gggtttagcacagtacctggcacacacaatgaagcagcacaataaagctccatgaatgaacgaagaaatgaatgaactccaaaatcatataactaagcatacaccataaagaaatctaacac

SEQ ID NO: 113312 - DNA, 122 bp, Homo sapiens
ctcggtgatgtcgtgggttcaagcagcctccttgatccagggccctggagacaaaggggacgtgtttgacgaagaagcagacgagtcgctcctggcgcagcgggaatggcagagtaacatgc

SEQ ID NO: 113313 - DNA, 122 bp, Homo sapiens
tagttcttagatttcctagaaactgggctggacagccccctttctgttgtatttagtcatcggatcaggaggtaaagagattatcaccagcttttaagaggaaagacaccatctaactacca

SEQ ID NO: 113314 - DNA, 122 bp, Homo sapiens
ggagtgccccgggggccgccttcttccccgcaagcccggagcgggcgtcgctcccgcccccgcctcgtcttcagttcccccgtcgcttccgccgccgtgggtagaacagacccgagctggga

SEQ ID NO: 113315 - DNA, 122 bp, Homo sapiens
acatgctcgcgcgaccctggggagcccctggcgcagagtggggtgtgccggaggcaccggcggtgcgcaggactggctgcctttctgagcgcccctgccttgccgcagccgtccaaggttga

SEQ ID NO: 113316 - DNA, 122 bp, Homo sapiens
ggcctgcctctcgctgggcttcttctccctactctggctgcagctcagctgctctggggacgtggcccgggcagtcaggggacaagggcaggagacctcgggccctccccgtgcctgccccc

SEQ ID NO: 113317 - DNA, 122 bp, Homo sapiens
tcttcatctgaagatgctaactcagctagcatccagcactattaagacaccttggggaggcgagactttgagagaagtgcaggaggctggcccacttttgaagatcctacatttctacccag

SEQ ID NO: 113318 - DNA, 122 bp, Homo sapiens
aacacaaacaattcccctgcatgtttcatttgcatgcagatgcatttgtgccatgttttacgcatgctccgtgtgcggccagcaagatgtgacggggtgtgcagtggtgtgtgggctttgtt

SEQ ID NO: 113319 - DNA, 122 bp, Homo sapiens
ccccgcagagggcagggaagccctggacctggtctgaccttgcgcgctagccccagaggtcgccgtgctctgctgtcggcgttcaggtgcccgcggtcgggccggggagggcagtaatcaag

SEQ ID NO: 113320 - DNA, 122 bp, Homo sapiens
cgagccagcaatcaaaaacttccagcgctgggggtatcactttcacacccgctgtcccggcgaacaccgcacacccacgccgcaagggggcgggccccacctcggtctttgcgggagggcgg

SEQ ID NO: 113321 - DNA, 122 bp, Homo sapiens
aggggttatggcggccgccagagtgagccagcttggtgtccggggacacttggggcactgcggatggacagcgctggttttcaataccagggacctaagtccgggtggggagcggcccctca

SEQ ID NO: 113322 - DNA, 122 bp, Homo sapiens
gcagatgcaccccagttggtgtgcaagcccccgtttgcaggtaattaattcacagtgtggcggcgccttttcaagccccctctgcaagccgcgccggcctcctccctctcgagcggggtcaa

SEQ ID NO: 113323 - DNA, 122 bp, Homo sapiens
tccccgcgccccagcgcagctcgtttactatgggtcaggagaggaatcccgccttttttccgcagcgaggatggcctgggctcctgcgcgaagcgaggctccgtcctggagaggctcagtga

SEQ ID NO: 113324 - DNA, 122 bp, Homo sapiens
ttgctgtcaatcggttcacacctgtacactgctgccttcaaagacacagacgacgctgtgcggttctagaaaaacaactgagtaagggatggccaaattttattttctggtaaataaacagt

SEQ ID NO: 113325 - DNA, 122 bp, Homo sapiens
agccccacctttgctgttttttccactcattttcatcattgttcaaggacattgcagttccggttttatccataaccagggaagccagagacaggcagatagcagatatgccatagggggcc

SEQ ID NO: 113326 - DNA, 122 bp, Homo sapiens
cgcgcaccgcccaacccccacctcccggtgtatgcagtggtgatgcctaaaggaatgtcacgcagttttcggtctgtgtcgcttgttgacgccggcagacagtgtaaagggagggcaaaggc

SEQ ID NO: 113327 - DNA, 122 bp, Homo sapiens
cgagaacgcggtcggccgggagccggggaggagcgtggacgccggcctggcaggtacccccgcgagaacgtgggagccggtgtatttcagctgcatttattactgatctcgggctgcaccag

SEQ ID NO: 113328 - DNA, 122 bp, Homo sapiens
ttagccttattctcaagaaggttctccccaggtggtgacagagatagccatcagtagctccggaatgatatcctgccagccaggcaacttctgcagtcaaagaggtgctttctcaaaggttc

SEQ ID NO: 113329 - DNA, 122 bp, Homo sapiens
gggatccacgattcctctcaggggaatgaataaccctagggaccgaggggcggcgacggccgagatggcaccagaaccaccagaagccacgtcggaaggagatgggagatccagagggcgag

SEQ ID NO: 113330 - DNA, 122 bp, Homo sapiens
ggcctgtctctgcctccagcccggttcccaagggcgccccggggccctcccgcaccctcgcggaagaaactactacctccccgcaccataggccaaagcttcggcccggaggctggaggcgg

SEQ ID NO: 113331 - DNA, 122 bp, Homo sapiens
tggagaggttgggcctcgccaaaagagatcctgggaaacttccaggacttccaggagccccgagggctcgagcgttcacatacgcgccccgccccggggcggcccgggcagagagactggcg

SEQ ID NO: 113332 - DNA, 122 bp, Homo sapiens
gggctgtgctgagactctccctgaatctctgtgagcgtggaacccacactgctgcagatgcgggtctccaggtgtcagaaagccaatccttacaaagttgagtgatccaagtctacctgtca

SEQ ID NO: 113333 - DNA, 122 bp, Homo sapiens
tccataacccagcacatagaattattgtgacaaatcctgtcataataaattttcctagtacgcactaaccttgtccaggagtgtcagggaagacctcctcagagagggcatacttgggatga

SEQ ID NO: 113334 - DNA, 122 bp, Homo sapiens
accgcagtcgggggcattgggcagctcaccgctgctaaggaggagtctggtggccgaagccgtagtgggagtattgtggaacttataggcaagttattagcaaggtctactcttacaattaa

SEQ ID NO: 113335 - DNA, 122 bp, Homo sapiens
cgcaggggctgggttgggcgggccgggcgggcttggggtgccctcctgcaaggtccccaccgacagcccccgagctctgcctcaggctgcaaatccggagcccggcggcctgacgggtttat

SEQ ID NO: 113336 - DNA, 122 bp, Homo sapiens
attcattcccatctttcagatgaaaaaatcagagcctcagagaagttgtgcagcttgtcacggcttctgtcgctaggaagtagcagagctcaggttcaagccccccctttttgttgttgttg

SEQ ID NO: 113337 - DNA, 122 bp, Homo sapiens
tcttgtgcccctcagacagcccctcttgacaggcttggttttcccaggtgagctggtccacgtgcgcacacatgtacattgcacacacacacacacttatgcacatccacatctgtgcgcag

SEQ ID NO: 113338 - DNA, 122 bp, Homo sapiens
caattgtctttcatgtggatccaaagtcctccttttctctcagcattttgacacagagcacgcccctgctgtcggtagccaccataccgtacagtgtttcctacctttagaggaaaattaat

SEQ ID NO: 113339 - DNA, 122 bp, Homo sapiens
cagaagccacaggatggcttccatgtggggccgttcccaatacagagaaagccagtgccacgaactcagcaggacttggggtggccctgttcacgtgccccatcttgctgttgcaggtgcgt

SEQ ID NO: 113340 - DNA, 122 bp, Homo sapiens
taggtgtgctaactgctgctgggcgacagagcacgcagggccctctcagcaggcagcgcgcgtagggactcactcacacctcagtatctctgtatgagtttacacttgaataatcatgagtc

SEQ ID NO: 113341 - DNA, 122 bp, Homo sapiens
gcccccgtccggcttccttggtggaggccgtctaggaaaccaaaaactcccaggatgccccggtgtgaccgccgggggcggcccggggccgctcggcggcacctccacacccgccccaacgc

SEQ ID NO: 113342 - DNA, 122 bp, Homo sapiens
gggttagttctggaaggagatgtggactcaaaggaaagtttttaaagatgagagagataacggctaatctaattaaattctaatttgattagctaattcaagtagtgaattctgattaaatg

SEQ ID NO: 113343 - DNA, 122 bp, Homo sapiens
gtactcaagcactgcgacccctggaccgtggatctgataaccaagaggccataagaggggcggggagcgtccgcagcctggagacgctggacgaagggagggttcagtcccgggagggacca

SEQ ID NO: 113344 - DNA, 122 bp, Homo sapiens
ggtgtccgggcccagctccaccacattgtcggcgccccgccacgcgctccatggggcgtacggcagctgactcacccagcaacctgtggatatggctgttgcttttacgatttggacattat

SEQ ID NO: 113345 - DNA, 122 bp, Homo sapiens
taagaggcagcattttcctaccttagctgctttgcaagtgcctaattccttcgctatggccgtggagaacagtctcaatgccgttctcgaagactcacgtttatctttgcaccaattactta

SEQ ID NO: 113346 - DNA, 122 bp, Homo sapiens
tttttaagtcattttttgctatgtaattaatcaatttgcataaatacaaaattgaggtaacggtatatgcacaattttgaaacatgttttaatcactttcttgtggcattaaatattcttca

SEQ ID NO: 113347 - DNA, 122 bp, Homo sapiens
gttaagagttccagaggtctggcattcatttatttaaatgaactgagaacagagtaaagtcgcgctgcagtttggtgttgcttaactgaaacctgcttttgtgtgtcactaacctattctga

SEQ ID NO: 113348 - DNA, 122 bp, Homo sapiens
ggcccacccaggagtgtgtgtgcacaagtgcacacagacacactcacgcacacggccctccgtgaggtctctggaaatcctcggctgattagatagcatctccaatggaatgcttttagccg

SEQ ID NO: 113349 - DNA, 122 bp, Homo sapiens
cctgcagccccaactacctggaggctgagactggaaggtcgttcatggacatgctgggtacggtggctcacacttgtgatttcagcactttgggaggctgatgtgggtggatcccttgagtc

SEQ ID NO: 113350 - DNA, 122 bp, Homo sapiens
gcccttccagggctccctccacgggacccagcctgcagaagggtcctgcaggaagtggcacgctcgctccccgggaggggtacccagggctcctcttgggggaccagagcctgagcaggggc

SEQ ID NO: 113351 - DNA, 122 bp, Homo sapiens
ctacctgcgcatggacgcactggcgctgcttgggggactggtaaatgtagcccgtctgcccgagcgctggggacctggccgctttgactactggggcaactcccaccagatcatgcacctgc

SEQ ID NO: 113352 - DNA, 122 bp, Homo sapiens
gctgggcatggtagctcacacctgtaatcttagcactttgggaggacaaggtgggaggatcgctttagcttggaaattcaagaccagcttgggaaacatcgtgaggccctgtctctacaaaa

SEQ ID NO: 113353 - DNA, 122 bp, Homo sapiens
tttaatttttataatatattttctatttctactaggtgtgggctttattggttgatttctcggtgagtgcgtttccaagtgtgaagggacccttcctgtagtgtcttatatacaatacagta

SEQ ID NO: 113354 - DNA, 122 bp, Homo sapiens
gctttgctggaaatgcttccatttccaaagtgacggttgacagtttagtgtggaaaccaccgacccgcgccgcagctcacgcgcgccagaaggagaccaggcgcttctccgccaggcctcat

SEQ ID NO: 113355 - DNA, 122 bp, Homo sapiens
actgatcgtcaaatgcagtttttattcccacttcccctctccatccccgacccgagctgacgttcgaccagcaaaccacagccaacgcccgcaacacagttcagttaagaaggcgcgtggga

SEQ ID NO: 113356 - DNA, 122 bp, Homo sapiens
ccactgtctgagcttttgtcgcccactctggaaccagtctaggcgtgcagtgagggaaaacgccagctgcagcggaagcccgagcctgcgaaatctcaaaggaaggacgaaaacaacggcaa

SEQ ID NO: 113357 - DNA, 122 bp, Homo sapiens
cagtgcgcgtcctctcctgcctctggatgtttccttggagcctctggccttcgggaagaccggtaaacgtccctgtggagccagccagccagccacctctgacccccgggctcaagcagcca

SEQ ID NO: 113358 - DNA, 122 bp, Homo sapiens
gctcaagcgggaactggggctgcgtgcggcgcttgcgggccagctggagttccgggcgggcgtgggcttggcgggccctgcactcagagcagccagccggccctgccggccccgggcagtga

SEQ ID NO: 113359 - DNA, 122 bp, Homo sapiens
tcactggccatgtaatcaacaagcatccctgtgcctctgtaaaacctcagcaaaacagtacgtcacatgcctacctcataggatagataggacgcatcagcacagcacctggcacagggcaa

SEQ ID NO: 113360 - DNA, 122 bp, Homo sapiens
cccctccctgaaccccacagtccgcctggccaggcctcctggccgccacgcagaatacctcgaaccaggcgggctgtgaaccagccccgctcacctgccagccccaacacccgacgggggcc

SEQ ID NO: 113361 - DNA, 122 bp, Homo sapiens
cgaaatcctcagggttgcagaattccttgattgtgaccgtcaggaggttgctggtgacatcggtgacgaccacattggagcagggtgacatctcggggcgccagtccccagcctcgggctcg

SEQ ID NO: 113362 - DNA, 122 bp, Homo sapiens
ggaatgtttgtttttaatcagtgggtcctaaaaatcactgcttccacctgcaaacgaacacgaatccactgtggatggcgtcctctgacccaccctgaagggttctgtttctctccacacac

SEQ ID NO: 113363 - DNA, 122 bp, Homo sapiens
tccaagaatggggatgagccaggggcagggccagtccagggggcacggttgatcaaggggcgtggccaaaccggggtggagcagagccagagagcagtgaggaggaaaatacaaaaaaaggc

SEQ ID NO: 113364 - DNA, 122 bp, Homo sapiens
ttctaggcttttatctatccagacctctccaatgtcttgtcatgcatcaattctctcatccgatctttttgggaatgccctcatcctgggttaccaaggagcacctgaagcagaggataagt

SEQ ID NO: 113365 - DNA, 122 bp, Homo sapiens
ctttacccggtttcattttcagtttaggccaaaaatccccccgggttggtcggggctgggcggggctcgggggactgggctgaccgcggggtcggggccaggttctcacaccatccagataa

SEQ ID NO: 113366 - DNA, 122 bp, Homo sapiens
aaagaaaacattaggagggtgaaatgatgccatacacgtcacacagatctgatagtctctcgacaacttgagagagaaaatatgaaggggtatagtgattgagtcaaaggtcgaagtccccc

SEQ ID NO: 113367 - DNA, 122 bp, Homo sapiens
attacagcttcttccttactctcttggatcttcctgggggaagccagctgccagctgccacgttgtgaggacactcaagccatcctagggaaaggtacacaaggcatcttgccaaatagcca

SEQ ID NO: 113368 - DNA, 122 bp, Homo sapiens
gggcggacgtggacccaatctgtccgtccttacaagtttcccccaggggcaggacctagacgcgcggcgcattcaggttctcctggaccgtagtggtagtcgctggcccgagttagaggcca

SEQ ID NO: 113369 - DNA, 122 bp, Homo sapiens
gatatgatgtacattaagtatcctataatttccagaggaagggaccactttggcttggttcgtaaaaagaggcagcatgaatgctgatgtcaaaaggtggactggatcttggtaagcagagg

SEQ ID NO: 113370 - DNA, 122 bp, Homo sapiens
atcttgggtcgtgggggtcaggcaaagtggctggccgggagatctgctgagtgggtcagccggtcagtcctgagcagccgggcctctggtgcccaggtccacgtgactggcaccctttctag

SEQ ID NO: 113371 - DNA, 122 bp, Homo sapiens
cctgccggtcctttaacaatgggcggcgcgagcgtccaggcgctgggctctagctgaggccggcgcttagcggcccactgtccgcagcatgagcggggccggcgtccgccgcacgacggcgg

SEQ ID NO: 113372 - DNA, 122 bp, Homo sapiens
gtgtctggtgggctgaagtaaacaaatgacaggaaagctaatgctgcttttcaagattaacgtgcattcccagagacaagactgccacctggacacacggctggaaacgggagagctcgtgc

SEQ ID NO: 113373 - DNA, 122 bp, Homo sapiens
agaaatcgccctatccgtgatgtcaccgacagcgcctttcccagacaccgtctgctcttccgccccaccctccgccgactcagccgatcaaaccgctgccggagctggcggaggaagtgacg

SEQ ID NO: 113374 - DNA, 122 bp, Homo sapiens
ctcaggtgatccacccgcctcagcctcccaaagtgctgggattacagacgtgagccactgcgcctgctagttggtgttctgaaaatacactatcatctttaaagaaattttcttctatcctg

SEQ ID NO: 113375 - DNA, 122 bp, Homo sapiens
agcgggcctcgtcttggcagcacggttagaggtgcgcctttgtggaaggcgatccatagtcgtgctctggagaatgagctggggtcacggcttctaagatgcctctgcgctagcagtctgcg

SEQ ID NO: 113376 - DNA, 122 bp, Homo sapiens
aggctgaagtgggaggatcacttgagctcacgagttggaaaccagcctaaggcaacaaagcgtggagacccatctatttatttatttatttatttatttattttttgagacagagtttcgct

SEQ ID NO: 113377 - DNA, 122 bp, Homo sapiens
ttgcagcctaggcaaaggacatttagtactatcgattctttccaccctcacgatgacttgcggttctctctgtagaaaagggatggcctaagaaatacaactaaaaaaacaaacaaaaacac

SEQ ID NO: 113378 - DNA, 122 bp, Homo sapiens
aagtctctctctccctggccctgctcccatacatctgtaggcctaggtcttggttttatccgaagacttagagaagggacgcaagttccttcgcggagccagaaggaatccgtcgagaagcg

SEQ ID NO: 113379 - DNA, 122 bp, Homo sapiens
gaaagccacgtgaggggactgcataatgagctgtgggattccagaggatgtagatctccacgaaccctctgactccacacttgaactgtgaggccaactggcaccctccctccgtctccaca

SEQ ID NO: 113380 - DNA, 122 bp, Homo sapiens
agcccgtggagccccgtgggaagtgaggatgtttaccttccctgtacctggagtgggctacgacagcttcctgtttgccgagacttgggtttagtgacttagaaataaaagtgtgtctcagc

SEQ ID NO: 113381 - DNA, 122 bp, Homo sapiens
ccaggcgctgcccagcatgttggtggcccgcagctgcacatggtaggagccggcctcgagcgcggtgagcgagaagcctttgccgctgccggccagggccgggcccctgtccctccaggcag

SEQ ID NO: 113382 - DNA, 122 bp, Homo sapiens
caggacttcccctgggaccgacgtttccagtcacccctgcgggcgcaattgtccttcaaccgccaagctccttgggacaaaaagagaacttcaggggctctgcctcaaactgtccttcgagg

SEQ ID NO: 113383 - DNA, 122 bp, Homo sapiens
agaaatgtcataatgacatgagcttgaaatatctctaggcattttctttgacgctcatgacgtggcactggtgatgttgtaaacagcagaaaacaggggctgccaaatgaccaaattatgga

SEQ ID NO: 113384 - DNA, 122 bp, Homo sapiens
ggaagttgagtttcttaccaaccttgtgctgagcgggaaggacctccgtgtccagcgccccgtaggtccgacgcctgtgcgtggctgatcgcttcacgcccccatcctttggttcttgtagc

SEQ ID NO: 113385 - DNA, 122 bp, Homo sapiens
tccatctcaaagaaaacaaaagaaaagaaataggttttcagcaggagacagcaggcacatcgatggcaccagaggaagatgccgtgaccttgaaggatcattgttggagtggttatcccaag

SEQ ID NO: 113386 - DNA, 122 bp, Homo sapiens
agtgggctgggcggctgcagagccagtcacctgagctacccagggtgggatccctggccccgacctctgtcctgacacgccccaagcggcagcaacaaagccccaattggcctgggcctggg

SEQ ID NO: 113387 - DNA, 122 bp, Homo sapiens
ggtggtgctttgtccctgtgggtcatctgtactgattgcgccaagcaaagcatttgtgagcgtgtggtgctggggtgaaagtggtggctgggggcagggagaaatccaaaagcccgctggtg

SEQ ID NO: 113388 - DNA, 122 bp, Homo sapiens
ctattcctattcttgctgacatcactccctgaaatagttaatatacttaacagctgaacacggataggatgttcatggaatatgttgacaggacaaaaagttgaaactgttggcagaaaccc

SEQ ID NO: 113389 - DNA, 122 bp, Homo sapiens
caatggcagcaacaaactgccgaatatgagggcctaacatacacgaagcaacacgcacgtcgcagaacccacagctgaggagaccagagctcaaaggggcgagtcacctgctggctcacaca

SEQ ID NO: 113390 - DNA, 122 bp, Homo sapiens
cctaggagggagacaagaggccacaggggctcagccagtccagggcaggctgctgtaacccggacccaatggtttctcatgctgaagatgtgccttgtgccctgagaaccctaaaatccttg

SEQ ID NO: 113391 - DNA, 122 bp, Homo sapiens
tagagcttcccggcccgggccctggcgtctgcggcccagcacgcacacagccgggagggacgcacacagccgggagggggctcgcacagccaggaggtgacctcacagacctggcacttggg

SEQ ID NO: 113392 - DNA, 122 bp, Homo sapiens
tgcgccgcgaccgtctggctccgaatcctccttgattagggctccgggttttaggaagcccgagaggagggaggaggcgggagcggaggactcgtacacatctggctcccgtttttgccccc

SEQ ID NO: 113393 - DNA, 122 bp, Homo sapiens
gggaggcgcctggcagcgtgtggggaggcgcctggcagcgtgtggggaggcgcctggcagcgtgtggggaggcgcccggagtgcctggggaagtgtttaggagtatgtcgggaggtgcctgg

SEQ ID NO: 113394 - DNA, 122 bp, Homo sapiens
aaaggggcgggcgagttggaccaaaaaaaaaaaaaaaaaagagcaaagacagcgcgctcccgggctcaagagaactggcgcctagagctcaaaagcccacccccgactcccagtcccgatac

SEQ ID NO: 113395 - DNA, 122 bp, Homo sapiens
caacagcttccttaatagcaaaggtagcaacagcccaggatgatataactggtgatggtacgacttccaatgtcctaatcattggagagctgctgaaacaggcagatctctacatttctgaa

SEQ ID NO: 113396 - DNA, 122 bp, Homo sapiens
aatcacaatattttagaaataatttgaaaatgaattctctgtaataactcatctagaacacgggcatgtggtatgaagggattcttgactccaagggctcaaaataaatgcatttctaatca

SEQ ID NO: 113397 - DNA, 122 bp, Homo sapiens
atggaagcatggattatggaaagagtatcaattgaggacatcaactcaagtcctagagtgcgaggctttgcttctggaatgacagtgaaggggctggcagttctttcaccagtggtgtacaa

SEQ ID NO: 113398 - DNA, 122 bp, Homo sapiens
ggagatattatgaggctgttgtcattagggcgattgcggtggaatcgctgaatcttgactcggcggtggttggctctccctctcctctctccctctccctctccctctctgtctcgggttct

SEQ ID NO: 113399 - DNA, 122 bp, Homo sapiens
ttaattaaatgttgacaaccacagaaataagtaatgtttgttaatgttacttctcttaagcgcactgcacagttgctgctaaagtaatggtagtaagttgtacattgctaatgaatctaata

SEQ ID NO: 113400 - DNA, 122 bp, Homo sapiens
cgccccggggcgcaggcgtggatcccccagacctggcgctgaaggggcacgtgaggcggacgcaggcagagtggcctcagggtcccattcggcctcttggtgctgcggtgccccgtggctcc

SEQ ID NO: 113401 - DNA, 122 bp, Homo sapiens
aaaggcagagaagaccccttcagaaggaaatacagggatatagggcataggttggttgaacgaacctaaagcaaatatttaaattaataagcaaaagacttggaagccaccgtattgttcat

SEQ ID NO: 113402 - DNA, 122 bp, Homo sapiens
agagtttaactggtatatgaccttctagggacattcgactgataagggaagaacgcctcacgtgagcatgtgtacaactcctgcatgcgtacaaacacactgcgcatgctcccctcccaggc

SEQ ID NO: 113403 - DNA, 122 bp, Homo sapiens
ttcacagttctggagacttctagtggcacttgagaatccggggaagggggtgcaaatctccgtggcccatataccagcaggtctcccaggtgaacagcctctggacaaagtaggtaagggaa

SEQ ID NO: 113404 - DNA, 122 bp, Homo sapiens
gtagaaaatgtagcccatttcttgccacctcatgggctacaccttgacctaacgtctttacgtgggtacttgcgcttactttgcggccttcgtcagggtttgctgaaggtggcggtatatag

SEQ ID NO: 113405 - DNA, 122 bp, Homo sapiens
tgcattttctccttgtggcctcggggcacaggtccacgatggacatgggccctcagccaacgttcgccgtgttgtcagcctccatgaaccaagccacgtgagcagcctcctcctgaggagtg

SEQ ID NO: 113406 - DNA, 122 bp, Homo sapiens
atgcaggggatcgggatgttctgaagcccccactgctgtgcctggaacacccgtgtctgccgctcacccctgaggacttgggacctcagggggtgagtggcaggggtggccgggacatgcca

SEQ ID NO: 113407 - DNA, 122 bp, Homo sapiens
ccttttcttctgtagggtctcggagcagatcgagctgactcccgttctgccaggtctggtcgctggggttttgtctatgggaacttccttggagtgggctttaatgacggactttcatagag

SEQ ID NO: 113408 - DNA, 122 bp, Homo sapiens
gaaatgggttttaataatattcctgattctggctgccgaatgggggcggtctgaaagagtcgctttcctgagcccagaattcagcgggcctgacggtaggaaggcgactagggtggggtgcc

SEQ ID NO: 113409 - DNA, 122 bp, Homo sapiens
ggaaactgccatggtggaaaggtggcgcgcttctcacggctgagttgctgcgcctgcagacggaagctccccacaggcagagctgcttggatgtgtgagtcatgaagccagagaagccccgc

SEQ ID NO: 113410 - DNA, 122 bp, Homo sapiens
tcagtgtgtccctgagttctgtgagccgctccagcaagtcatcagacccaaggagagggtcgtgggaaccctgattcccacggtgctagtcagaagcactagcattggaagtggggtcgttg

SEQ ID NO: 113411 - DNA, 122 bp, Homo sapiens
gcgcagttgtctcgagtgtgggtacccacctccacccccaccctcacccgggtgaactagcgggggttctagagagtgccggctcccagtgagccctctccaacagctgcgggccacgagat

SEQ ID NO: 113412 - DNA, 122 bp, Homo sapiens
ttaagggacaataatggccgctttcaaggtgtggattttggctccttgagcctgtctgagcgaggggtggcagcgccggcgccccagaatccgggacagaagggtcccaagagtcgcgcttg

SEQ ID NO: 113413 - DNA, 122 bp, Homo sapiens
ggcctattctactattttctatattattcatttagtatacatcgggtgcttaccatgtatcgcacaagtgctatcaacacaaaaacaaaaataatatatggtacgagccctggaggaactca

SEQ ID NO: 113414 - DNA, 122 bp, Homo sapiens
gctgggccatacagcaggaggcaagcagtgggcgagggagggaagcttcctgtgtatttacggccactccccttgagggacacagagccagaccctatctccaaaaaaagaaagaaaatcca

SEQ ID NO: 113415 - DNA, 122 bp, Homo sapiens
gaactggtccgcgcacgcgcacgacgccgcaggccccggccccggcccgcggcagctgaacggcagagcctgtagctgcacagctgtgcttccacctggcgttcagtacctcgtgcccgaga

SEQ ID NO: 113416 - DNA, 122 bp, Homo sapiens
agacagtcactactggcctgggtgaaagtggaggggaccttcctggaggaaagtgcttaacggtctgaaactgccggcaacaggagccaggccaagctgtatttggatgccctcggttgacg

SEQ ID NO: 113417 - DNA, 122 bp, Homo sapiens
tcgttgatgaggtccttgagtgcctccaacaccttcttgaggatggagccctggaccaggcgcgcctcgaacatggtggcggagtggcaacaacgccgctacaggcaggcgggaaggaggaa

SEQ ID NO: 113418 - DNA, 122 bp, Homo sapiens
ctgttttttgtgaaagtcttttagagatctcagctcatcacaaagtttccggttcagtctcgtgggtttcatgtactcagccagcatttacttgccagtcaaggtctaggatggctacctgt

SEQ ID NO: 113419 - DNA, 122 bp, Homo sapiens
gcgccgagccaggacgttgagccaagtccccatctcctaggactcgcagtgcggaggctgcgggccccgaccagcgccgagactacaagtcccagaagggcgcgcggcgacatcgccgggcc

SEQ ID NO: 113420 - DNA, 122 bp, Homo sapiens
ttggaattcagggcgcccggggtaggggaacgatgcgcactgctggagacgggcgaccttcgctggccggtcggtgggttcctggttttctgctgccgagtaaacaaacgttccctttccta

SEQ ID NO: 113421 - DNA, 122 bp, Homo sapiens
ggggcatttgtccctataccttggactgcagatacacagggtgggtggacctgctcctcccggggacagcccttcgggctccagaggatgccactgtgtgcggctgggggactgagaggttc

SEQ ID NO: 113422 - DNA, 122 bp, Homo sapiens
ggaactggttttgaggaatttatcaatttcacgtaagtcgtcaagcatactgcacagaggcgcctgcacccgtgaccctcgtagagcctgcggggtctgcagtggtgcctcctgcaccatcc

SEQ ID NO: 113423 - DNA, 122 bp, Homo sapiens
caccagggtgggcggggcaagggctggtgctccaccaatcaccgagccagcccctggaagcgctgagccgtggccaatcggaacgcagcggcttcctcctagcctggcgcgcgattatttga

SEQ ID NO: 113424 - DNA, 122 bp, Homo sapiens
tggggataaagtgccccggagccctggccttgaagcccctcactggagtcagtgactgaccgcgcgccacgctggagaccccagaaacgctcccccaggtcaccccgggagacggaggccgg

SEQ ID NO: 113425 - DNA, 122 bp, Homo sapiens
gcgacgctcaccacacccaggggtgacatgcggctgaaaggcacccatatggtcacggcgcgtgtaatattatggaatatttctctactaattgacaagtaggcacagccctccatctcccc

SEQ ID NO: 113426 - DNA, 122 bp, Homo sapiens
cctgaagcccaccacgcacctttggcagagagggacccacctcgcttactgcgtctccatcggttgccttggcagtggctgtaatccatgcagttcagaatgatgagggcaaaggagaaaag

SEQ ID NO: 113427 - DNA, 122 bp, Homo sapiens
tagtgggatgcccttccggagtgtgggatgaggcgtgctcccccacaacctccagaacagcggctgcgcctccaggcctcgggccccttcacgctggtgcggacggacgaagcccaaagcct

SEQ ID NO: 113428 - DNA, 122 bp, Homo sapiens
ccccctggggcagctgagcggggtaatgccctccgtgatggagagcgcgtgtcccacagccgggccaagacggtgcccaaccgcagatagccccactctgaggatgacagcagcgaggagga

SEQ ID NO: 113429 - DNA, 122 bp, Homo sapiens
gccgggagtgagcgacttgaccccggcttagccctcggccccggggagcgggaacgccttcgggaaacacaggccattaacagcagcctgtccacgctggggctggttatcatggccctgag

SEQ ID NO: 113430 - DNA, 122 bp, Homo sapiens
cgcagtgcgagggtggtcttggcgggggtacttatcaggttcacctggtcccaggacactcgtcgcagatatgtcttttccccttgttgtcacccccggactttgacaagcaaacaacgctt

SEQ ID NO: 113431 - DNA, 122 bp, Homo sapiens
gagagagagagagagaaagagagagagagagagagagagagagagaaaccgtgagcagcgcggacttttcctgtacgcatgtagagggagatgacacaagatcccacagacaggtttcccca

SEQ ID NO: 113432 - DNA, 122 bp, Homo sapiens
aggcgccccgggaggcccgcggagctgggggacgtgggggggccgcggcggagggagcgccgagtctcttacctgcacttggggcggctttgggtgactttccaagtccgggggaaaaatgt

SEQ ID NO: 113433 - DNA, 122 bp, Homo sapiens
ctcaggagcgccgccatgtgggatggaatagcacacgtgggcttctccctgcgtcacttccggggactgcttccagccaatcggcctccgccacagccagcgcagccttgccccttaaagtc

SEQ ID NO: 113434 - DNA, 122 bp, Homo sapiens
tccctcttaaatactacagcacagtgctcccaaatggaaatgctgaacttgaagaaaaaacggagaacatcagaaagcagcaactttgacccaattctgctccaataaattctcattgcagt

SEQ ID NO: 113435 - DNA, 122 bp, Homo sapiens
aaaatctagtagcattagtatactagtttttgcctatgatttttttctgattcatccatgcgttctgctagtagggaatgaaattgtcaaattaagactaggttaaaatgtataaggctttt

SEQ ID NO: 113436 - DNA, 122 bp, Homo sapiens
agcaaggcccacgcgggccgtccccaggaggcccctttctccatcccagccctggacttccgctcgcccgcgtctcagtcacacgtgcggttgtgtagctgtctgtttacctgtcaccgcaa

SEQ ID NO: 113437 - DNA, 122 bp, Homo sapiens
ataatggtggtatgttttctaaaggaataccaaaatgaattttatttctgacagtgggcccgctggaaaagaaaaaatgaattttagaactggaaaagaatttaagaccgtggaatattttc

SEQ ID NO: 113438 - DNA, 122 bp, Homo sapiens
cccacaccccacaggccacgtgtggcctggacgcctgggacggcggaggcgctccggtggcgccctgagctgctcagttaccagagccgttggggccgatgatgcaggtgaacctccggaag

SEQ ID NO: 113439 - DNA, 122 bp, Homo sapiens
tcttggccttcgggcccaatcagggaggccctacctatccgaaacccggtccgttccccgcggaagaggggtggagtttcaaccttttaactccaccttggtctgtgcagcgcggaccaacc

SEQ ID NO: 113440 - DNA, 122 bp, Homo sapiens
tgcccgtgtaagatgcatgatcgtgtgtgcacacatcgcatgcagatatccttgtgaactcgtgcccgtgtaagacgcatgatcgtgtgtgcacacatcgcatgcagatatccttgtgaact

SEQ ID NO: 113441 - DNA, 122 bp, Homo sapiens
cactgtgttgattgcggttgccagggcagcggcgcattgctccccgcctcgtcctggtgacgtcacagagcaatgtccaatgggaaagcagctcggtgtcacgcacctcctatcccggcggg

SEQ ID NO: 113442 - DNA, 122 bp, Homo sapiens
ttagattttttttggattttttaataataaatgtgtgttccgagcccggagcacacactccgcactctcagcactaaccgccggggagaaggggaagcaccgcctcctgcaccctctactta

SEQ ID NO: 113443 - DNA, 122 bp, Homo sapiens
caggtgagagtgaacattttcccatatttgttaaccaggtttaaaactgtttgattgggacgtggcttatacagggacaaatgcagctaagccgactgaaagacaaatgaaacccaggaata

SEQ ID NO: 113444 - DNA, 122 bp, Homo sapiens
cgcgctgcgctagtccggagaaactaggaacccgagtaaacccagactgtccggggaagacggatcccacccccacctgggcgccagacccatccagctgcttggagctcagagactaggtc

SEQ ID NO: 113445 - DNA, 122 bp, Homo sapiens
agtgccaaccccgatgtgtaacgccccagccaccgtcctttgtgggatttagaatttaaacgggccccagagcaagagattggctggggaaatgcccggatcgcggctgggctgctcgcatg

SEQ ID NO: 113446 - DNA, 122 bp, Homo sapiens
tgcggactcagcgggccgggtgcaggcgcggagctgggcctctgcgcccggcccgacctccgtctataaatagagcagccagttgcagggctccattctgctttccaactgcctgactgctt

SEQ ID NO: 113447 - DNA, 122 bp, Homo sapiens
cccgtggggcctgcgtggctacacagtgcaatagtccaggctcctgcactggagtggagacgctgagggatggaggcaggctcaccagcgagcgtacggctgtgcacatgcgtgcctgcaga

SEQ ID NO: 113448 - DNA, 122 bp, Homo sapiens
ccacatgaccgcctccgccaatctcagcagtcctcacaggtggtctcgctccgcagggcccgcagccgcctagaatggaagggcaagaggctcaaatatgcggccaaagaatccgcccgcgc

SEQ ID NO: 113449 - DNA, 122 bp, Homo sapiens
gggctcacgtcttgacgtaggggtccgagtaaccgttgacgtccatggcagccagatgggcgcagcgcaagatgcctaccagcagtccccggcgccgcgagctgtagctgagactcagcagg

SEQ ID NO: 113450 - DNA, 122 bp, Homo sapiens
aattactcgtaactgtgcctgagcatgtttcctatagaaatgggtcaggacaggtggaatcgttggtagccgtgtctgacctaacactatactaagaccagcctccagccccagcccctcac

SEQ ID NO: 113451 - DNA, 122 bp, Homo sapiens
gggcgtgctgcggggcgaccatggctgtagactgttacctccagttcccacagtaacaatcgaaagccacggttgccctggagacgcgggggcggggcgcgcggacggcgccggcgcggggc

SEQ ID NO: 113452 - DNA, 122 bp, Homo sapiens
gtgttctggtgaggccttgctcccaaccccacacgctcctccctctgaggctgtaggactcgcagtcaggggcagctgaccatggaagattgagagcccaaggtttaaacttctctgaaggg

SEQ ID NO: 113453 - DNA, 122 bp, Homo sapiens
catattggtcccatatgctcagatgcagatatcttcccctaggaactcctgtggcacatacgcccatgtttagacctgcacatgtgtgcccagtgactggacctggtactctgcatgaagtc

SEQ ID NO: 113454 - DNA, 122 bp, Homo sapiens
cagaactgacttgggtgtcataattagttaagttataaatggtagattatgaaatggcttcgttttacttggtggaggagggacacagataaagaaattctacttacaccttctcaagctta

SEQ ID NO: 113455 - DNA, 122 bp, Homo sapiens
aataataaaataaaggagcagtgagtgatgagaaccaaatctctccccctctcctcactgcgccttcctagagattcaggctcagatccaaacaggtctgggaagagctggtcctgctgttc

SEQ ID NO: 113456 - DNA, 122 bp, Homo sapiens
tagtatagaatgaatcctagcaacagcaggcaactttgctaaacatatccactccctgatcggaggacaaatgcatcccccacccccaacactgtgagcccttcggccaaatttttaaacct

SEQ ID NO: 113457 - DNA, 122 bp, Homo sapiens
cttctgacccctgggagatgcctcctttctccgagcagcagccgggggcctggccggcgccgccagccgggccccgcccccccggctcccgcccgctcattggccctggcagcggtgacgtc

SEQ ID NO: 113458 - DNA, 122 bp, Homo sapiens
tccctccccctcccagctctcctagagtcaagaggacgccctcctgccgcagacttcctgcgcaagcgccatcccatgtccccgcctccaaaccaattggaagcggcgccgcctgggcgctt

SEQ ID NO: 113459 - DNA, 122 bp, Homo sapiens
tccccagggcttcccaaacttcagctctcaaacactgacaagtgcccctgcccaatgctccggacccaaccgagggtcccgtgtcaaccaggcgtctattaatagcaggacaaggtgtgaag

SEQ ID NO: 113460 - DNA, 122 bp, Homo sapiens
agaaggaggctgttcggtcatgccagtgaggcagtgccctgaggggctacaatgcacacccgtggagtcggctggcagacaatcctggccaccactcaggcctccgccgcccagagagagca

SEQ ID NO: 113461 - DNA, 122 bp, Homo sapiens
ggcttgtgcactcgtgaggcccgcggacacctcccgcccctgcgcggcggagcgctccgccggctacctgctcctcagaagtggcctggaggctggatttccttggccatatctggtccctg

SEQ ID NO: 113462 - DNA, 122 bp, Homo sapiens
cccgagctgtggctgcacccctcagggagcagagcccctccctggcctggcgggaccacccgcctcgcctctgcacgccagggacatagggcgcagccgcaccacactgaaaggcgcctctt

SEQ ID NO: 113463 - DNA, 122 bp, Homo sapiens
caacggaacatgagcccacgccacgctccggactcctggggacaggaccccctcccgccacgcccatgcctggagtcagcccggattctccagggtctccagcaccacccgcagtgtgcgtg

SEQ ID NO: 113464 - DNA, 122 bp, Homo sapiens
gacaggaatcaacaaaaagaagaaaaaaatgtaagtttaccaacgcgccttccctttttccgagcctgatttatacaggatatatgggaagaaatgtggactccttgacctgttacaagaat

SEQ ID NO: 113465 - DNA, 122 bp, Homo sapiens
tcagggtctccggcctcggcacattaatcttcagacccggctttttcgacgccgagctgccgcccagccccaatggcagggccttccagggagtcccagtcagactgctccccagctcccgc

SEQ ID NO: 113466 - DNA, 122 bp, Homo sapiens
gcgaaggtgttcctgaacttcatttcccagaggctttagctaacgtgtactttcgccctgcgatgggccgcacattttcgccgccagtcttttgctcctgtttcaggtatgcgtgtgcattg

SEQ ID NO: 113467 - DNA, 122 bp, Homo sapiens
cggatgctcagggtgggtcaatgatttgcacaagatcactgggctggtagaagggaaggtcgggattccaacccagtccctgaggttcccaggacagagctatgaatcaaacgaccaagaca

SEQ ID NO: 113468 - DNA, 122 bp, Homo sapiens
ctgcagcacgacgtgagctggccagaaccagaggcacacgtggccctgatggaatggatccgcaggcggttggctgtgtcccgcagcacctgcacggtcttcacgtcgggcttggcgtcgtt

SEQ ID NO: 113469 - DNA, 122 bp, Homo sapiens
atttttgtatctgactcttttcacttaatataatgttttcaaggttcatccccattgtagcgtgtatgagtactttatttctttttgttgttagacaatatttttactcaacttgcactgtt

SEQ ID NO: 113470 - DNA, 122 bp, Homo sapiens
cattcgccggccccgccccctgcccggcctcacgtgacaaaggtgtgtcttgcgcacgcgcgttcgcaatctggttaccatgacgacgaggccctcgccggttcctgaggacgcgcgcggag

SEQ ID NO: 113471 - DNA, 122 bp, Homo sapiens
agaggccgaggtccttatcctcttcccctcagctgcgactatcaagcagggctggcgtctcgccacttcagtgtggccttcctggagagggctgctgcttctaaccctcgtcaggctcacca

SEQ ID NO: 113472 - DNA, 122 bp, Homo sapiens
atcctcagcctttgtcttctgtgacattgatatttttgaagagcacagcattagtgatttcgtcgaacgtccctcagttaggatttgttggatgtttcctcttgattagatctaggttagtt

SEQ ID NO: 113473 - DNA, 122 bp, Homo sapiens
aggtgctgtgatgggtttcgtgcgcagagaggcctgacagcctctgcatcagtgaccgggcgaagagtggggcagctcggacggtggttggggaacgttagggagattggcgcgcggaccac

SEQ ID NO: 113474 - DNA, 122 bp, Homo sapiens
ctttcccgtcccatcgcgataagaaagataatctcctatcctcttgccgctcacactggccgaggtccgatgcagcaggctccgaagatcatacagacgccattaccactcttggctcccag

SEQ ID NO: 113475 - DNA, 122 bp, Homo sapiens
ttgcccttctgcgtgaacttgttggacatggtggccgccgtaacgacggctttgaggctgcgcttgcgcttgggcacgttctgctccgggtggaagaggatgatgtagactttgggcatgta

SEQ ID NO: 113476 - DNA, 122 bp, Homo sapiens
gcgcacgccgcgtgggcaccaggcaggcggttggagtacggggcgggggtcggccgagggcgcggggccccggggctccgggctcgcccccgccgctcggggcaggcgcgccgatggcgttt

SEQ ID NO: 113477 - DNA, 122 bp, Homo sapiens
acagcctcgcttagctttctatccacaagtcccctgcttaaaattctggataaatgtttccgttcctatgggaaacctccattatctccataagtagagaatgcagataggtatcttttttc

SEQ ID NO: 113478 - DNA, 122 bp, Homo sapiens
attgtgttctggtgactgcttctgcagagtgatgaatgtgcgtgtttggagttcatagtccgactgtctgtttgggcagtgggcagttcagtgaaacaaatgatcaggaagggatctattta

SEQ ID NO: 113479 - DNA, 122 bp, Homo sapiens
gccctgacctacttgtcttactcttgctgcttcttcccgccgggcctcttgccccttctccgaccatgctgcaggtcctgccccaactttaggacttcagaactcctccaccgtgccgtgga

SEQ ID NO: 113480 - DNA, 122 bp, Homo sapiens
ggccggaattggaccggggacgctcggcggggaaggggacgactgtaggctgcccgggcgcggtcactacccatccggggttggtgacctccaccccgcgggatccctggcggggtgcggcg

SEQ ID NO: 113481 - DNA, 122 bp, Homo sapiens
gatgctgggcggggatgcactgaactgttcagttccgacgtgctgcagttcccacacgcccgcgccccacttacatccagcaccgaggccaggtgccgggttcggctggcgagttccttcag

SEQ ID NO: 113482 - DNA, 122 bp, Homo sapiens
accccgcaaaagctatcactcagccctcggccccgccccggccccaccccggccccaccccgcactctcacaaggtgtcactcagccctcggccccgccccgcccgccccatcctcctctgg

SEQ ID NO: 113483 - DNA, 122 bp, Homo sapiens
gcggcggagctccacctcctcctccgcactgcacttctcacatcctcagcatcgcgtccacgaggccgcccgccccgcctcagaaccgtaacctccaggagctgggttgaggaaggcgcgga

SEQ ID NO: 113484 - DNA, 122 bp, Homo sapiens
accacgatgctttcctcctgggggctgacgagcagagcacacaggctcagggccgccctgcgggaaacagtccagcatccaggttcaagttcactggggtgtaggctggaaagtgactgaaa

SEQ ID NO: 113485 - DNA, 122 bp, Homo sapiens
attatctccctaaaatgagaaacaaagcctagaaaaccagtcaaaactccctgcgtggagcgacatgtttatttattagcaaccatgatgaggtcaagacagtgcttccaagagagggcatt

SEQ ID NO: 113486 - DNA, 122 bp, Homo sapiens
agtgggcggcgttgcgtttgggtgtgtcctcggcggcgacagcagcaggtgtttcttggccggggccccggaagctccacctccccagcgggcccgagctgccgccgccgagcagccccggg

SEQ ID NO: 113487 - DNA, 122 bp, Homo sapiens
aggagtctgggcttcccacagcccttccgcagcacctcctgtgggcctgctcgccatgcacgctgttcaggcttctgtattaattatgagacgtggaaaagagcaggaaatccatctcccta

SEQ ID NO: 113488 - DNA, 122 bp, Homo sapiens
ttggggggcaatggagtcaggggctggctgggaggagtcccaaggctaattcttcttgttcgcctatttgcatccgctgttaggctgaggatcattttaataaataacaatgaacaggaatg

SEQ ID NO: 113489 - DNA, 122 bp, Homo sapiens
ggcggcggctgctcgtctcctcatcgcctcctccccgccctcccagccgacagcgccgcccggccctgcccactcgagtcacctccacagagctctggggaccgacccggagtgcgcgtcgg

SEQ ID NO: 113490 - DNA, 122 bp, Homo sapiens
tccatccacaccccagggtgagctggagctccaggctggccaggctgaacctcgcacacacgcagagttctgctccctgaggggggcccgggaggggctccagcaggaggccgtgggtgcca

SEQ ID NO: 113491 - DNA, 122 bp, Homo sapiens
gggagccgccactgcctggagcagtcaccggcgggagcctccatttccaggagccgccaccgctgggagctgccacagccgggagccgccaccgccagaagcctccatctcccgggagccgc

SEQ ID NO: 113492 - DNA, 122 bp, Homo sapiens
tgtcccttgggtaacttctccaatgcccacagagctgacgggagagtttctggaccatcacggttcacacaggaaagctggattgtgtgtctttaggggaacctcaccaccccttggggtga

SEQ ID NO: 113493 - DNA, 122 bp, Homo sapiens
tcgcgaggagcacgctcgcgccctccccgccttgagctcgctcccgggccgggtaattcccgggcaatgaccagacctcgtccccgcgctgacccttcctggggacatcgggtgggggtgga

SEQ ID NO: 113494 - DNA, 122 bp, Homo sapiens
ggatttgcagtagattctttaggcttatgagatttagtatgtaagaccgtagtgctcacacgtactttgttgcttatgttgctgtttggcaacatgaatatatttgccatttatgaatacat

SEQ ID NO: 113495 - DNA, 122 bp, Homo sapiens
tgggggagcagtatggccgcccacggagccggctgctggtctccctttcccataacctcccggaagatccacaccacgaatgatctgatggggacaaaaaccccgggactcgagggaccgtt

SEQ ID NO: 113496 - DNA, 122 bp, Homo sapiens
gcctggcccagcaaaatgtaccttagtagcctcaacctgtaccggagaaaacgcaggctgcgcggcggcttagagcggtcaagtggaaccccgcctcgacctctctgattgggtaatgcgca

SEQ ID NO: 113497 - DNA, 122 bp, Homo sapiens
ggatcccggggtgatgccgggacgcacgtccggagcgggtaggaggcaccgaggcctctccgcccactcacgcggctggcacctggaggccgcagggacctgccctttcctccccttaacgg

SEQ ID NO: 113498 - DNA, 122 bp, Homo sapiens
cccggtctccttttgtctccagctagaggggcgcggagcggccagagagctagagggcagcgggcgccaccccgttggaggcaggaagtcgggaggcagaataccggcgcatcttgcgtact

SEQ ID NO: 113499 - DNA, 122 bp, Homo sapiens
cctgccaggggctccacagtcccacgctgcttgacctgtgctgtctgggactagactggtcgctgtggctgcccatagatgctcaagccagaccccaaaagagagtggcacgaggtgaaaat

SEQ ID NO: 113500 - DNA, 122 bp, Homo sapiens
aatgcccaggccagatggacatgtggggctctcggggactgcaggtggccgtgatggtgtcgtgcagctgctgcactcctgagaccacagctaagacaccgccccgtggtggcagcgcctgg

SEQ ID NO: 113501 - DNA, 122 bp, Homo sapiens
aggaaaactgctcatgtgagcaagagagggaccgctgcaggtccagccggcctcctcccacggggtgcaggtcagggctccaggtgtcacctgcctgtccacacggggctgagcctggcacc

SEQ ID NO: 113502 - DNA, 122 bp, Homo sapiens
gctctgcgtgttcgggattgtggtctgtgtgtgttctcgtgttaggctggcctgctctggcgtcttgctcatcttgtttgttcccctcatttctgcttagctttccacgggagctttcacgc

SEQ ID NO: 113503 - DNA, 122 bp, Homo sapiens
gctgccgccaacttcttggagccaagtcaggccagacccgccccgccctgacccgctgagcgcatcccgtccctccacatcccagctgccctcctaaggggacgacgcaggctcagacccca

SEQ ID NO: 113504 - DNA, 122 bp, Homo sapiens
ctcccctgcctagggggtacattggcaggtctcccctggcaactggttcttatgacatcacggggaagactcccagccttcctggacccctagtttgggagaggacagtgcccaaggcaagg

SEQ ID NO: 113505 - DNA, 122 bp, Homo sapiens
ttcaggaaaggttatgggcggaagcgccgacctatcaagctgtttgacaccggaagaggacggacctaagatggcggcctccagggggctgggaatagccgctcatgtcggctaacggagcg

SEQ ID NO: 113506 - DNA, 122 bp, Homo sapiens
cgctttccctcccactacctgccaccgcattaggaattcccgcccgcagcacattctgcgcggttgccgagtttggactcgactgaaatcatagagaagtttgccccagtgagaacatcatt

SEQ ID NO: 113507 - DNA, 122 bp, Homo sapiens
agagctgccctggattgggagcaagctatggctgggagcgggccccacggcaggagggtccgagggagaggcaggccctgtggcctcaggttggcaccgtagaggcctcctctgtcctggct

SEQ ID NO: 113508 - DNA, 122 bp, Homo sapiens
ggcctgctctcctgtgtcctggccgctccgtcagtgcctgccagtggggtccagagggaccgtttttttaacgcctcttttgcaggtaatgagaaacatcccccctcttaatgtcttgcctc

SEQ ID NO: 113509 - DNA, 122 bp, Homo sapiens
ccgagggatgcccatgggcttgcgggagtcaaggcccacacacctcggccctgaaaaacccgtggggcccggcatccttcggaagccctgccgctgcgacccccggccagtccccgggcagg

SEQ ID NO: 113510 - DNA, 122 bp, Homo sapiens
ttacccacaagcattaagcttccgtcctgcctgctgttatttaacagaggtgctgggatccggcaggggagcaacaaatgtggttcggcaaattgctaaacgaaaagcggacacccgcccac

SEQ ID NO: 113511 - DNA, 122 bp, Homo sapiens
ttatccgttgccggacgccctgggggcccggcgtgggtctctcggctggactcaccagggcggctgccggagctccacctgcaggacctcgactcgtgaggctctcagcgacagcgacggag

SEQ ID NO: 113512 - DNA, 122 bp, Homo sapiens
cgttattctttaatcctagagaaccttacctctcctgtcactttatggccaaatcaaaaccggtacttttggttaatattttcctagaaagctgttaaagatacacggaaaatgttataatt

SEQ ID NO: 113513 - DNA, 122 bp, Homo sapiens
cccgcccaggccccgcctctcctctgtcccgccccctcggttccctcctcccccccgccccgccccgcgcctcctccgccgaaggctggaatgtttcccccacgggcctccacgttcccagc

SEQ ID NO: 113514 - DNA, 122 bp, Homo sapiens
ccattcacgagtcctacggtcggccagaggagcaagtgctcatcaaccgccaggaaatcacgaacaaagcggtaaggatagctctcgccccacagtggccccttctgcagctgtgctcatgg

SEQ ID NO: 113515 - DNA, 122 bp, Homo sapiens
gtttagggtcagtggtgtcctcagctgtcctaatccatttagtaccagttctacttcaaccggacacttcagagcatctcagccagagacacggggccactagctgcaagaaagttccttct

SEQ ID NO: 113516 - DNA, 122 bp, Homo sapiens
taaaatttatcttatagagccaaagtcatcgttactcaaacacatcactctgcagttacacggctgcacgctaccgtcatgtaaactctggaatactgacgtggacctgaccacccgctgag

SEQ ID NO: 113517 - DNA, 122 bp, Homo sapiens
taagactcatttctcataaaatagcctacattggctggttgtgcggcccttctcaggaaacggtaatagtaataattcatacatggtcagtgtcatacagtttcgactgcactttcatagag

SEQ ID NO: 113518 - DNA, 122 bp, Homo sapiens
caggcctcgggttacctgtgctcagggaggccgtgcttcctcgttcctttgtctcaagttcgcacctgggaacacctgccccagagatctgcataatgcagccgggcaggagcaccaggcag

SEQ ID NO: 113519 - DNA, 122 bp, Homo sapiens
cctcgcggggagagattggctgcggccgcgggacggggtagtgagcgcgtcacttcctgccgctgccaggcgcgtcctcccgcgcgctatgacggccagcgcacagccgcgcgggcggcggc

SEQ ID NO: 113520 - DNA, 122 bp, Homo sapiens
gtttatgatgaggatccctttgcatattcagagccactatagacctgcccatattcttcacgtgctcttaacttgctgcttacaaatcatctcctgagatgctaactttgaacaaagaaaat

SEQ ID NO: 113521 - DNA, 122 bp, Homo sapiens
gggagctcacctgggctcttagcgtcgccgccggcttcgcagagcaccgcgccttagccgcgaagttctagttcttgctgccggtcctaacgtcccgcagtcttcgccagccagccgtcccg

SEQ ID NO: 113522 - DNA, 122 bp, Homo sapiens
gggggcaaaggtcatgggaggcaaaaggctgggctgaggccgaggctctgtggctgtggccggataccaggtcctgtggtggtgtgggcagggcgcgctctctcctctgagcagcctggggc

SEQ ID NO: 113523 - DNA, 122 bp, Homo sapiens
tgctgctgctcgcgctccgccgcccgggagatgcttcctcgcgcggcgcagcgctgaggccgtgcgtgcgccccggctgcgctgcgcgctccccacatacacaagctctccatgtgagctga

SEQ ID NO: 113524 - DNA, 122 bp, Homo sapiens
gactgaaccaagggagccaacggagtcacgctgggtgattcgagactatcccaagcaacacggacctcatgcggcaggtcctgtccccaccacgctgacacttgaaaggcaactgtttgaaa

SEQ ID NO: 113525 - DNA, 122 bp, Homo sapiens
cacaaaggccaggagtgaggctgcagctgttctggtttaaagattactccaggccaggcacggtggctcaggcctataatcccagcactttgggaggccgaggcaggtggatcacctgaggt

SEQ ID NO: 113526 - DNA, 122 bp, Homo sapiens
cagaagcacagaccctcactgccaggtcacggcgggcacgggaaacccacacctgggcctcggccacactcctgagggcgacaaaacaccagccggcgcgctctgagacttgcggtcagtcc

SEQ ID NO: 113527 - DNA, 122 bp, Homo sapiens
gcagttggaaaattgaaagtatttctgcaaccaatcagacgtttacataggagcgtaattcgtagcttcacttcagcctctgattggttgcttacaaagcaaccaatcagactaattttggg

SEQ ID NO: 113528 - DNA, 122 bp, Homo sapiens
ttgtcacctacctcctgagctgtcaccacagggcgcacgggactccgctgccccaggttccgggacagtgactacatttcccaacagcccctgcgccacatggtggtcagtcagcctgcaag

SEQ ID NO: 113529 - DNA, 122 bp, Homo sapiens
gtgcgccgtccccggctccggtcccgggcggggggtcttgctgacagatccgctgggcggcggctgctccgccgcagccggtccgcgtcccgctcaaactgcagctcccctccccccacagc

SEQ ID NO: 113530 - DNA, 122 bp, Homo sapiens
gaacctagcggctcctaacggatcaacagtcagtctgtctgggctttattgatcccatggcgggcagctcgaggcggacacgctgagggggtggggggcgaaggctgaatgcagaccccagc

SEQ ID NO: 113531 - DNA, 122 bp, Homo sapiens
catttttttccacctttgctcatgctgacacttcgctggaggacaggaagtcacgctgtgcgtgcatggatttgccgtcatgctgtatgtgctcagggggcgtcctcagagctgtacccaga

SEQ ID NO: 113532 - DNA, 122 bp, Homo sapiens
gagagtgatagggcattattacctgggaggcatctggaggccaggcaactgctaggctgacgactcctgggctccggcatcctattttcctggacagactttggtccagagggttgaggggg

SEQ ID NO: 113533 - DNA, 122 bp, Homo sapiens
cagccgtgcagttctgtgggtatctagggggccttttcagttcaaagtacatcagcagcccgacgctggtggtccacgttttcctgtcggctctgtgggttgcatctgtgtcctgttacctc

SEQ ID NO: 113534 - DNA, 122 bp, Homo sapiens
cggaggcccgggctgggcgcgcccctgaggggctggggctgagggatctacagggctggacgggccgagggcgctgagagggtcgagggggcctaaagggagaagagcagtcgcctgcaccg

SEQ ID NO: 113535 - DNA, 122 bp, Homo sapiens
ggaatccgggagcggtggaacccggagcctgtagaacttgaatctagaggaacctgacagcggcgccgagggggccacccggactctgtttggaacggaagcacagtgtccgccgcttcctg

SEQ ID NO: 113536 - DNA, 122 bp, Homo sapiens
aactggggtttagaactgataacattttgcccaagttctcacagctagcgagaggcgtgccgcagtttatcgtggggtgggtctaaacaaggacctaaaaactgtattcgaatcccagccct

SEQ ID NO: 113537 - DNA, 122 bp, Homo sapiens
cacagactttgatctaagaaagacctggagctgaatcttaattctatctcttactgtgcacgcaggcttaagaaaaatgagcttttctgagcccttctttcatcatctgtaaaatgaggtat

SEQ ID NO: 113538 - DNA, 122 bp, Homo sapiens
agacccaatcctagcccgctggctagaccatggagggccgctgggtgcagccacagagcgcggggccccggcgaccccgccccgctccgcgtcactcggcgccctgcggcgcgcgatgagca

SEQ ID NO: 113539 - DNA, 122 bp, Homo sapiens
gggtggctgggccagccctggcctgcctccactcactagctgtgcgttcttggcaagtcacgggagcaattgcaaccttgctggtgtcacacttatggtagagaggagaacggcgccacctc

SEQ ID NO: 113540 - DNA, 122 bp, Homo sapiens
ggtgtgcaacccccacacccggctcagcatttgttttcctagcttcgtagtgctgtcccgcgtggacttagcagagtttatttaatcagtgccccttattgaggaatatttttcccctgttg

SEQ ID NO: 113541 - DNA, 122 bp, Homo sapiens
atcccttcacggctctagaacagctattccgccccagactcccatcacaaaaaccgcattcggggtctgttgcccgcagcacccacagttatcccgccccagactcccatcacaaaaaccgc

SEQ ID NO: 113542 - DNA, 122 bp, Homo sapiens
cggccgtctgtggaggttgcagctgccgccaagccccggggatgctgccggcctcaggtgcgcccggccgagcctccgcggagaggaggattggtagatcacaggaaacgggaggacggcgc

SEQ ID NO: 113543 - DNA, 122 bp, Homo sapiens
gctgaaggtgagccgggaggatgcaaccgggggccaggccaccgtaaccctcctgggtctcggtttacccagttacagaatggggtcacaggtgcagagcctggccgcctgtcaccccgcag

SEQ ID NO: 113544 - DNA, 122 bp, Homo sapiens
gtgtgacttctgacattgccacatccatcttgctatttcctggattactcaatctgggcgcgggggggtggggggatgcaagttaccatgccatgaggatgctcagtggagagatccacgtg

SEQ ID NO: 113545 - DNA, 122 bp, Homo sapiens
taagtcttcaataaatgttcagcatatccagttaagagaatacttgcttttcactttttccgtgtgtgtgcttcaggtacacaggtactctggcaggacaaacgcctagttcatttagtatt

SEQ ID NO: 113546 - DNA, 122 bp, Homo sapiens
gccatcgccatcccttgggcggctctagggctgcgggggctcgggggtggggccgggtctcgggggcggggcctagctcggtctgcgggggctcgggggtggggccgggtctcgggggtgga

SEQ ID NO: 113547 - DNA, 122 bp, Homo sapiens
tgggagtgcagcaagcaagcaaatacagtctctcccgaggtgtggtgtggcaaggctaagcgtggtgtggggatgaggctgacagccatggctatgaagaattggcattgggcctcgcccct

SEQ ID NO: 113548 - DNA, 122 bp, Homo sapiens
aatgactgtgtgtaagcactcgtccgttctttaccacacctcatttttaaagttaatggacgttatttttttcaagcaattttagattcacaataaaattgagccaaaagtacaaaaagttt

SEQ ID NO: 113549 - DNA, 122 bp, Homo sapiens
cccgggggtcatggccagaacgcagagactttatgatgaggacggtgcccacgatgatgccgactaggcccagcaccaggcccagggcacagagcacagtctccgttgtctcaggcatctgg

SEQ ID NO: 113550 - DNA, 122 bp, Homo sapiens
tcttctctcaaaactctccaatggcttccaccctgggtcatcaacatggcctggaagagccgtactctggatacccgagggcgcggccccagcgccgcgacgccccgcccctctggctgctc

SEQ ID NO: 113551 - DNA, 122 bp, Homo sapiens
gggggtgtcgggggaggggtgctgaggtgcagccagcctcccccaccaccccaggctgtccgcccaggctccaggaatgcaagttcccgctcacaggaagaccaggtaagggccttcccagg

SEQ ID NO: 113552 - DNA, 122 bp, Homo sapiens
tactctctcatctcagggtcgcagaagggcaagacgccgctcaatggttgccaagggcaacgcgggacgccggctagcgaggccttttgttctctgggctggggctcgccggctccagcctt

SEQ ID NO: 113553 - DNA, 122 bp, Homo sapiens
cagggcacgagttcgaggccagcctggtccacatgggtcggaaaaaaggattttttttatcgttcccaatataacgacaaaacgtaaagggaggacgccttgataggaagaaatgacatctt

SEQ ID NO: 113554 - DNA, 122 bp, Homo sapiens
ttcattacaaaagtcaaatcaaagcaaataattaagtgtagttccagagctacctgaagccgtggtcattcaaaacaaatgagaggacagggggaggagagaaggaacaagcgcagatcagg

SEQ ID NO: 113555 - DNA, 122 bp, Homo sapiens
aggacagccctgtgcaacagaaacaacgcacagttgttctgctgccctcgttcttagagccgggagtgccacgacagccacacctgggccatgctgccaggctggctggtagtgatggaccg

SEQ ID NO: 113556 - DNA, 122 bp, Homo sapiens
tgccggactcgctccctcctcccctggagagaaacgggaggcgcctcactcactctcagccgcatgctgagtgccagctatgtgctaggtgccagcaccaggccttgcccgggggcccacat

SEQ ID NO: 113557 - DNA, 122 bp, Homo sapiens
catcgtaaagccctggagcacgagcctcgttagcacgctccttccagcacagccggggctcggtccgtctggccatgtatttggcaaccagtgtgtgctccggcccaccctcaactaatggg

SEQ ID NO: 113558 - DNA, 122 bp, Homo sapiens
atttacagctgctccccatcactggcattacagcctgagctccacctcctgtcagatccgcggcggcattagattctcacaggatcctgaaccctaccttacgtgaactgtgcatgcgaggg

SEQ ID NO: 113559 - DNA, 122 bp, Homo sapiens
gacggccgggtgagtgggggttggggggaatgtatgaggggactcatccggaacaggcggcgggcagaggggctgttttttccaggcacactaacacacgccatgcaagacaaagaaaaccc

SEQ ID NO: 113560 - DNA, 122 bp, Homo sapiens
ccatagcgaggccgtggggctctgccgcccaggccaatgcctgtgatcctggccagggctcgcggtccctcgtggatgctgacacccttcttccggcaaggcctctgtctctgaggagcagg

SEQ ID NO: 113561 - DNA, 122 bp, Homo sapiens
cgagagacctctccctgggctagggactgacttcaagaaaagaactaatctgagcggacacgaggaacaagcagaaaggaaaagcgacagggctaccatgctcctaactccaccctcccgcg

SEQ ID NO: 113562 - DNA, 122 bp, Homo sapiens
ccaggcaacaaacgcgccgccggcgacgggggctcagggcccccggaaaagaagctgagtcgtgaggagaagaccaccacgactcttatcgagcccattcgtcttggaggcatctcttccac

SEQ ID NO: 113563 - DNA, 122 bp, Homo sapiens
cccagccccttccagtggctcagcttcctgaacactccaagcctgggctcacctctaagccgttatctatgctattctctcagccaggatgcccttcccatacccaaacaatccgtgctcac

SEQ ID NO: 113564 - DNA, 122 bp, Homo sapiens
gcatgctgtgtgcctggcagtgtgctgagtgctgggacatcaaagatgaacaaaaccagacgtgttcatacggactttatgatctgattggggagggacacattagtcacactataaaattg

SEQ ID NO: 113565 - DNA, 122 bp, Homo sapiens
acactgttgtatcaggatttaagtttctaccacatgaatttagaggggatgcatttaaaccgtaacagtgcagctgcaatgtaggacccagaatcaacagggtatagcatcagttcaggccc

SEQ ID NO: 113566 - DNA, 122 bp, Homo sapiens
gtgctgagcctaggacgctacttgagatgaacgtgtaactgttccccggagggtaagaagcgccgcgttcttgggtttctcctaatggaataaagtcgggcatggctcccgtgtccctgcgt

SEQ ID NO: 113567 - DNA, 122 bp, Homo sapiens
gaggacgccgcagtgcgcactagccctccatggaagacaggcgcagaggacgccggagtgcgcactagcccttcatggaagacgggagcagaggatgcgtggagtgcgcaccagccctccat

SEQ ID NO: 113568 - DNA, 122 bp, Homo sapiens
atgttcaccctctgctaaatcacatctacgagtgggacactgtggcgcctgccagagcaccgggcagcccccagggacccttgaaggtgggcgcaggtcacagccacctgtccaagcctctg

SEQ ID NO: 113569 - DNA, 122 bp, Homo sapiens
cccgccctcgcctggtccggcccggccctgggcaacagcttggcagccgtgcggagcccgcgtgagggtcacggccacctagtgaccgccgaactgcccgcactgacccatgacggccgcta

SEQ ID NO: 113570 - DNA, 122 bp, Homo sapiens
cctaaaaaatgggactttttgtctcagtcccagtgaagtgccaggtttgattgtgaagtccgcatgaaacactgcaccaggcagggctttgcaaagtgcaaggtatccccagtccaagtata

SEQ ID NO: 113571 - DNA, 122 bp, Homo sapiens
gcagcacctgcacggtcttcacgtcgggcttggcgtcgttggccatcatctctcttttgtcggtttggcaaagcaaacggcgccgcagcacccccacaacccaccgcggcagtgctctcacg

SEQ ID NO: 113572 - DNA, 122 bp, Homo sapiens
ccgctgcgacaagaagcgccacctgggcaacgactttgtgtccattgtctacaatgactccggtgaggacttcaagcttggcaccatcaaggtgagtgaggggccgtcagtgaggctgggcc

SEQ ID NO: 113573 - DNA, 122 bp, Homo sapiens
ccccgacgagctgcgcgcgctggagcgcgatggcggcctccccgggccgcgcctgctgctcgccgacaaccccctgcgctgcggctgtgccgcacgccccctgctggcctggctgcgcaacg

SEQ ID NO: 113574 - DNA, 122 bp, Homo sapiens
ggaggaggcggagggcgggcctgccccccgggacgggttctttctgcgcagccccccaggcgctcggcgcccccgcctcctgctcaaggtcaaggaggctgcttccccagcaggaaggcgga

SEQ ID NO: 113575 - DNA, 122 bp, Homo sapiens
gggcggggccagccagagacgcggggcgcggtcctggcccgggagagggtactggggttccggccatcctttgctgaggctggaagaaatgcgcctttcagccgccgcctgggagccgcact

SEQ ID NO: 113576 - DNA, 122 bp, Homo sapiens
ttagtgggtctcgtgcttacccgtgggggccaggcctgccagcacgggaacaatatgactcggtcagagctctggtcagacccctgtgtgtgcctggcaggagccccggcagccgccgccgc

SEQ ID NO: 113577 - DNA, 122 bp, Homo sapiens
ttaacatgcagattaaatcccaacggtcctgtctaccacaattacaaacagccccactttcgggtgtagcagtcccaggactggcaagctacccaacatattaactcaccacttccacagtt

SEQ ID NO: 113578 - DNA, 122 bp, Homo sapiens
gctgggattacaggtgtgagccaccgcacccggccaacaaaagtaccttcttaatgacttcgaagactaggtttaaatggtaaattattaaattcttggaaatctgccacagaatatggcat

SEQ ID NO: 113579 - DNA, 122 bp, Homo sapiens
gtaaacacagcctacctcgacccggcgtccagttcctacctggcctgggaagtacctacccgtttcctgccatccagcttgtctagccggatccgggtgccgatattctcctccttgtttcc

SEQ ID NO: 113580 - DNA, 122 bp, Homo sapiens
ctccgccccacagctgtgtgaccgccctgcggctccgcccgcagctgcacgttcgtccctcggctccgcccccagttgctcgtcggttccctcggctccgccccctcggctgtgcgtctggc

SEQ ID NO: 113581 - DNA, 122 bp, Homo sapiens
aggaacaggatggggattgtcccgtgaattctatggaattaaaaaatggcaccttctcagcgggaagggagctcggctggttcccgggactgtctggcttctgtcctgactcctacaactgc

SEQ ID NO: 113582 - DNA, 122 bp, Homo sapiens
tcctcagaagccgcagctgcgagctccgtggcagccgctgcactccttccggccctgccgcggcgtcacctcgcgcctgcgcacagcgccccctcccgactaaggacaggaagaaccataga

SEQ ID NO: 113583 - DNA, 122 bp, Homo sapiens
gattccatttaccttggccatgccccgtggctccaaagccgcgaggacagcactccattgcgacgtctactcccgagcctgaatgtttcgaaaattatcttcgtcttgctgggttcgctgct

SEQ ID NO: 113584 - DNA, 122 bp, Homo sapiens
caccacgtgagtgtctaggtccagcacggtggtctggctgctgcagtgcaagccgaagtccgaaggggtagggtatgcgccccggtagaagccgggggaggaggcgggggccggggaggcgg

SEQ ID NO: 113585 - DNA, 122 bp, Homo sapiens
taaggtacatgtcacacagtagctattcgctcacctccacccaaacctggtctcaggagtcgggtctttggtgtgttactgtgtggatggcattgaatcccaggcctgtggatatctggatt

SEQ ID NO: 113586 - DNA, 122 bp, Homo sapiens
gaggcacttcaggccaatcctggaggagccaggagtgacccttagagtgggccccagggacgtcagccttcttggaaaacagctcaaggggtgagggggcctccctcctcctgcctccccct

SEQ ID NO: 113587 - DNA, 122 bp, Homo sapiens
tctcccaccttgttcttcttcaagaatattgccaattcttggctttttgcacttccaagtcgcagttagaatcagcttgccaaagttctcacacagaagccttgagatttttattaagattt

SEQ ID NO: 113588 - DNA, 122 bp, Homo sapiens
acgcacggggaggacgccgtggggtggaaactaaagtgcaggtctgaccacaaaaccacacgccacggcaccgctgctgccaaatgccggaggcctgcaggaggcacggattaattttttat

SEQ ID NO: 113589 - DNA, 122 bp, Homo sapiens
ccaggactcagggtagccccttggcacactggaagggagtggcctggcaccattgtgacccgttcactcccaagaccctcagggacaggcaggcagtcagtggacactgtcggcacggtggg

SEQ ID NO: 113590 - DNA, 122 bp, Homo sapiens
gtgttcagggcctgcagtcaacacttcataccgattagctctttcagtcctctccacaaccgtatagcctcattttatccttgaggaagctgaggcacagacaggtcatggaacttcctcaa

SEQ ID NO: 113591 - DNA, 122 bp, Homo sapiens
ggtctggctcaagaaccccacctttgcttcccactggcttccctatggtcagaggacagacggaggtctcagtacctaaacacccacctccctagaggctgcacccacagacagaactgaag

SEQ ID NO: 113592 - DNA, 122 bp, Homo sapiens
agggcagcttaagttgcctgttttactcagggacagccctaaactgcctttcgccagaatcggacggctgagaatccagtgtcgtcgcggggtggtgctgccagctggctccgggtggtcgg

SEQ ID NO: 113593 - DNA, 122 bp, Homo sapiens
cccaagcgccgtggaaggtgtgggcagaatacagaggcacaaaatctgccccaaagacttcggggtatggtgtttcatggtcccagggtagggacatagtgccggcagccactttttttctg

SEQ ID NO: 113594 - DNA, 122 bp, Homo sapiens
gcaagttcagtcattcatccaagatcatggagttcagattagatagtaacacttctgactcgctatcagccacagcccaataagtaattaagtaaggaaagatatgtaattaactgtgctct

SEQ ID NO: 113595 - DNA, 122 bp, Homo sapiens
tctctgtacatacagtgttgtctgcggtgagggtgacacagctgaataggcacaatgggccggaccagtgccgggcacgcggtgcatgcgaagtcagtagttataactgctcgtctgtgctg

SEQ ID NO: 113596 - DNA, 122 bp, Homo sapiens
acattacatctgttattattccaccaaactagtgctgagaggaggacactctgggaaacacggtgaagctgatttatctcctgtgctagaacctagatgtgcagattccctcatctgtctgc

SEQ ID NO: 113597 - DNA, 122 bp, Homo sapiens
agccttctccgaggattgtgggagatgtagtttttccggcgccttcgcgtcctggcgcatcgacgcaggacgcacttccgcatgcgccgcactcccggccttagtcgggtgcgcgcgtgcag

SEQ ID NO: 113598 - DNA, 122 bp, Homo sapiens
gcgaagagcagcgctccctcaccaggcgcgtcaaagtgcaggaccctcttcgccatcgcgcgcgtctgaagtggccgagaatctgcagcagtttggagccacaagggagaagcggatactca

SEQ ID NO: 113599 - DNA, 122 bp, Homo sapiens
cgccgccccgtccgtcgcccggagccggggagggagggagcgaggttcggacaccggcggcggctgcctggcctttccatgagcccgcggcggaccctcccgcgccccctctcgctctgcct

SEQ ID NO: 113600 - DNA, 122 bp, Homo sapiens
acgaccgaaggaatgacgttacacagcaatgtggcaccacaggccaatagcagggggaagcgatttcaagtatccaatcagagctgttccagggcggagtctaccaatgccgaaagcgagga

SEQ ID NO: 113601 - DNA, 122 bp, Homo sapiens
gagccttcttcctgctttattcctgcatctgattattgggctgatgtgtgctaaagctcccgcaccgggaaaactgccgaggttttagggctcactagccctttctttggtgggcgctccct

SEQ ID NO: 113602 - DNA, 122 bp, Homo sapiens
ctctgtcacccagggtggagtgcagtggtgcgatcttggctcactgcagcttccgcctcccgggtttgagcaattcttgtgcttccacctcctgaggagctgggattacaagcatgcaccac

SEQ ID NO: 113603 - DNA, 122 bp, Homo sapiens
gaccaagaacataaaagcacttgtagggggagtagacatatgaagccactcaaacacaaccgattgttattgttgtaatatttaaaggataaggcattacatggtgatcattagttcccatc

SEQ ID NO: 113604 - DNA, 122 bp, Homo sapiens
gccattggccgaggcttccgcccgcttccattcgcttcctcccacaactcagtcgggctgcgcggtccgtaggagtcacttccgcctcgtcccaccccgccccccggtccctttctagcagc

SEQ ID NO: 113605 - DNA, 122 bp, Homo sapiens
ttccccacgtcaagctcaacgtgcgtgctggtaacggggcccatcctggactcgtcttcgcgggctactgctatgttcttagagctctctgtttttaaaattagcttttatttttattagaa

SEQ ID NO: 113606 - DNA, 122 bp, Homo sapiens
gcagcgtcgggcctcggagcatcctccgaccagcagggtgctccctctgcccgcccaggccgggaggtggtcccaccagaaatgggaagctcctaatgagccagctaggagagggtgggctt

SEQ ID NO: 113607 - DNA, 122 bp, Homo sapiens
agccgctctccgcttattaggtggtaactcgttaataatggataatcggccccctccgcccgggcgcccctgcgccagccctcctcccccggctgcgctcggctccggctcgccgcgccagt

SEQ ID NO: 113608 - DNA, 122 bp, Homo sapiens
cagagggagtgggaagaagcgggcaggaggcggcctccacgcagctggcagggcaggcagcgctggagagggaggaggagagggaggctgcaggcaccgcgcagcagccgaggatgagagag

SEQ ID NO: 113609 - DNA, 122 bp, Homo sapiens
ttgcggcagacactttaccaaatcctacaatttgctcatccatgagaggacccacacggacgagaggccgtacacgtgtgacatctgccacaaggccttccggaggcaagatcacctgcggg

SEQ ID NO: 113610 - DNA, 122 bp, Homo sapiens
gcaattgatgggaagagcaaaagtgagctgagtccatgactagtgtccgtatacagcccacgcgatatggcacctatccagtttgttccagacagctgcataagagaattctaaacttgcta

SEQ ID NO: 113611 - DNA, 122 bp, Homo sapiens
aagttctgcttctggttccattcaatttaaaccacctactgggtgcttaatagtcttggccgggtgcgtggcacacgcctataatcccagcactttgggaggccgaggtgggtggatcacct

SEQ ID NO: 113612 - DNA, 122 bp, Homo sapiens
cacccccgccgctgtccgccgcttgctgagcgcttgctgtgagcccggggccgctggactcgctcattggaccttcccgacaactgagggtggcaggttctattgtgactcccattttgttg

SEQ ID NO: 113613 - DNA, 122 bp, Homo sapiens
ggacatcctggtgttccactcctcccgccaggatggcctcaatgactgtatgcacaacaacgggcagtgtgggcagctgtgccttgccatccccggcggccaccgctgcggctgcgcctcac

SEQ ID NO: 113614 - DNA, 122 bp, Homo sapiens
ttcttatttctgtagagatggggcctcactatgttttgcccaggctggtctgcaactcctcgccccatgtgaatctccagcctccgtctcccaaactgctaggattacaggcgtgagacacc

SEQ ID NO: 113615 - DNA, 122 bp, Homo sapiens
gcagtggagtggtagtgaatctgtcgggccatggagtttgccaggcaggaggatcgcgagcgcaggagtagaactgggtggtggaggggagtagtttgagtctagttttgaatgtagaagac

SEQ ID NO: 113616 - DNA, 122 bp, Homo sapiens
gcaggaggtatgcctgtgagttcaaacttgccaagcaggttgttatcctttgtcatggcacgctcgccttcataaaccttggtaggaaataaaacaaattactacaatggactccaggtctg

SEQ ID NO: 113617 - DNA, 122 bp, Homo sapiens
gcccggcgtcagaggctcgttgcggacgctccgccctcgccgtccgcgaattggtggacgcggccgccactctgggtcgaccctgttattcattgggcaacgcgtcttttgaaaccgaactg

SEQ ID NO: 113618 - DNA, 122 bp, Homo sapiens
ataccgagcattattacgccgtgcgttcggccgccctttttctgcacggagaaccccctccgctcccattttccagcgcccccgtcccggcgatccagagacccgctgtgggcggccgccgc

SEQ ID NO: 113619 - DNA, 122 bp, Homo sapiens
ccctctctctgcatctctcagcaattctgctgcataaacatgctgaatgtcacaacataccgctcgcaatctggtcagtgtcttctttgctgcagataggtgtgtccctttttgcaaaatca

SEQ ID NO: 113620 - DNA, 122 bp, Homo sapiens
gtgacttgtttctaaccaaaagaatgtggcaagtgatactaagtcacctctgaggttaggcgacaaaggctgtgtacaccctgccttcctctctctagcttgctcactgggatggtagccag

SEQ ID NO: 113621 - DNA, 122 bp, Homo sapiens
ccagcagcaaaggaagctgggggtgatgggccttcatccacctgccatgttgcctccctgcgctgcttctgccaagagtgggctgctgggggtgtcctgctggggccaggcaccagggttcc

SEQ ID NO: 113622 - DNA, 122 bp, Homo sapiens
gctgaaaaagaaggttttaaagacattactgctaacataaaagaaatacagacaggttaccgcctatgtaggcaccttaggagtttctttcatgttcagatatttccttggtcctttaaggg

SEQ ID NO: 113623 - DNA, 122 bp, Homo sapiens
tgtgactgacagagacactctgggaagttgttagtcattgtccctgcagtcttaacagatcgatcctgctgaaaatacacctacctgttcaccaggtgtctggagagagacaaacttgctcc

SEQ ID NO: 113624 - DNA, 122 bp, Homo sapiens
cctggtactatttcttttgcaaattcagagtctgggtctggatattgatagccgtcctaccgctgaagtctgtgccacacacacaatttcaccaggacccaaaggtgaggaaagaaaaccac

SEQ ID NO: 113625 - DNA, 122 bp, Homo sapiens
gttttcaatcaattccatccaccagtgagatatattgcatcaggttacctttcattccaccgcatttgtgccttgcacttagtaggcgatcgataaaataactgatgataaaggggcttctg

SEQ ID NO: 113626 - DNA, 122 bp, Homo sapiens
ctaagagcacgccgtagattcagacggcacacgcatgttcacacgtgcttcccacagtggcgtgtgcttcactgtagctaaaatgtggacacaccacagtgtccatccacagatgaagagac

SEQ ID NO: 113627 - DNA, 122 bp, Homo sapiens
gccgggtgcctggttccagccaaacgctgggccagccagctcagtcagtggggcctgtgccggcatgcctcgccgcgctccctggttctgaaggcgtgagaacctctgcaagtcaggttccc

SEQ ID NO: 113628 - DNA, 122 bp, Homo sapiens
tttctccctttctgcttgtctcccttgtctctccttagtaagcgatacgaatcccagcttcgggatcttgagcggcagtcagagcaacagagggagacccttgctcagctgcagcaggagtt

SEQ ID NO: 113629 - DNA, 122 bp, Homo sapiens
cctgagtgagtggcaccagaggaccctctccatgtttagggacctcctgggcctcaggagcgtggcgcccgcccctgggcggactccccccatccgcgggcgcgaatggtccgggccgcgtc

SEQ ID NO: 113630 - DNA, 122 bp, Homo sapiens
gcgcggaatcagttgagtctcttcggttcccggctctttctcctgcggtgggtatttgtccggctgctgggcgacctttcccgcgaaggaggttgtgccttcattcggtcgcgccccgggct

SEQ ID NO: 113631 - DNA, 122 bp, Homo sapiens
ttccaactttctatactttagattgactcaactttaggccagaaaagaaggcaaaagagccgcacaagataatctgagatatgcaggcattaaatgatttggtgagcacctggtgttaatga

SEQ ID NO: 113632 - DNA, 122 bp, Homo sapiens
aggaggaggactttcgggggtgagtgggaacgccctgcacctgtcctggtctcagcctctcgacatgggggtgctcagcgccgcagctgcggggagatggggcacggccgcagcaggtgtgg

SEQ ID NO: 113633 - DNA, 122 bp, Homo sapiens
taataccatcaacatttaaacagaacatgtcagatcttaactcctctgactttatgactacgctcatcttgtcagatttcaacagttttctgtcaggcaacacctggcaaaataaaccgttt

SEQ ID NO: 113634 - DNA, 122 bp, Homo sapiens
agaacacgcctctcaatggtgccgacaaggtcttcccttctttggacgaggaggtccccccggccgaggtaaggtccccttggcgctggccctaacttgccggcggcgggacagtagtagga

SEQ ID NO: 113635 - DNA, 122 bp, Homo sapiens
atcagtcctgagatgcgctttgatgatgacgtagaatagagtcgtccaagcctagctacccgagcgctcccatggtaacaggcggtggtgaaagtggttgggagcagcagtcgtttgttacc

SEQ ID NO: 113636 - DNA, 122 bp, Homo sapiens
ggtcgccaggggcgcctcccggcgcggcggggcgggtgcagtcacgacgccgcgactccccgcaccccggctgggccccccgactcccaggatctgggatcgattccaggagtctttggctg

SEQ ID NO: 113637 - DNA, 122 bp, Homo sapiens
cctgacgcgggtgggcaaagagcgggcagagaactcaccagcagctgcagaaaacacagccgagttgctagctaaggggaaacagacgccgctgtgggaaagcacttgtaaacagcagtaac

SEQ ID NO: 113638 - DNA, 122 bp, Homo sapiens
tccagcaggatggaggacttggccaccagcgagggattcttggccttcttggcgtacagccgcagccgctcctcccgcagccgccttgcctccttgtcttcctccttattgtcgctgccaac

SEQ ID NO: 113639 - DNA, 122 bp, Homo sapiens
agaccgcgaaggcgtacattcccgggtgttgcttccaggagaaaccctgaacggagagctcgtcctcttaccaggtcaaggtcccggatcctcgggtcccttgacgctctacccatggagga

SEQ ID NO: 113640 - DNA, 122 bp, Homo sapiens
aaaagacccgatctttcaataactcactcaccatcacaaagacagcatcaagccataagacgtccaccccgctgacccaaacaccaccaccccaggccccacttccaacactggggttacag

SEQ ID NO: 113641 - DNA, 122 bp, Homo sapiens
catctcggcggcccctgaaagtcgaccccgaagccgggcctggggtcgtgggaaccccttcggcctcagccatctccccgcggcagccacaacatccggggccgtggcccgacaagtcacaa

SEQ ID NO: 113642 - DNA, 122 bp, Homo sapiens
attttatgttattcagaacactgggctttggaatcaatcagaacagatcccatttcctcacgtgtaaagtgaggaaaacaaaacctacgtaattgaatgatcatgaagagtaaataaatatg

SEQ ID NO: 113643 - DNA, 122 bp, Homo sapiens
tgcccttcttgctgcttgggtgacaatcctggggtcatccataggccccaacactgttcccgcttctaaatggagggtattttggcacatcttcctggcggggtccggggcctcatccctgt

SEQ ID NO: 113644 - DNA, 122 bp, Homo sapiens
cccaggaaaggcgagcgcgcggggctgagctgccagccggtccccagccggagcctgggacggggcggtccggcccttacctgtcaatgctgatcacgcacagggtcatgatcgaggccgtg

SEQ ID NO: 113645 - DNA, 122 bp, Homo sapiens
ttctcatctgtacacagtctctgtctcaaggctattggaatgagtcaatgatagagtgcacgtaaatcacttgcacagagagttgttcaaacaatggtagctagaactgctattgatctatt

SEQ ID NO: 113646 - DNA, 122 bp, Homo sapiens
cagccgcggcccagctgacaggctattttttcccctgcttgactaaatatggtcagggagcgcagcccgagggggccacttggccagggccgcgtgtttgggatgcttggccgggtatataa

SEQ ID NO: 113647 - DNA, 122 bp, Homo sapiens
tgcctaagactttgttaagatcatttctactgcttttctttctgcttcaaacacacagttcgtctctgaggaaagtaaaataaatggaataagagtaaattgggtaaggagatatccaaagc

SEQ ID NO: 113648 - DNA, 122 bp, Homo sapiens
tctgggaagctctggcctcttcaccagccctgcgcggctgctggatctggaggccggagccggcacatgcgtctgacagcagcgctgctgtctcttgtttttcgtggtccatgtttgggggt

SEQ ID NO: 113649 - DNA, 122 bp, Homo sapiens
tcattagatagacaagccccagggtggggccaggagggttccccagctgaaacttgtccacgggtaccatgaagaggaaattgtgtttaaatgttattacaagtcctccaagcttctatgca

SEQ ID NO: 113650 - DNA, 122 bp, Homo sapiens
gggcatgtccttttaaacaaactgccccttgtgattcttaggcactgtcaggtttgaggacggctgcctaaatggtgtcattgaggaactgaatgaaggccctcccgcttcgggctctctgt

SEQ ID NO: 113651 - DNA, 122 bp, Homo sapiens
accgggcggggcgggttcctggctgcgctcgcgcgctctgcccgcgccgcggtgtgcctccgcttacccgcagctccgaccactggctcgcgctacccaggtctccgcacgccgcggtggct

SEQ ID NO: 113652 - DNA, 122 bp, Homo sapiens
ccgggtgacagcctggggagccactggttccgcgaccctgggcatgaaactcctcaagggcggccctcgagacgcaggggagaggatgctgccggcgcctgcccgagggcttctctgcggga

SEQ ID NO: 113653 - DNA, 122 bp, Homo sapiens
atccttgtgcatgtgagtgcatgttgtcctggtgtatatctgcaaaaactcagaagtccgcgtgggcatttcactcactcactcaacaggtatttattttgggttcgcacttaacccatgat

SEQ ID NO: 113654 - DNA, 122 bp, Homo sapiens
cttttccactctcaaaatggcctcttggttttgaacttgaagctgttgtagtgctgcagtcggacagtagagggcaatctcggtattgccatcgcggagagcgcgacaccaggctgtgtggg

SEQ ID NO: 113655 - DNA, 122 bp, Homo sapiens
aaaggtcagcagtcctagattgaggaattagtgaaatatgtctaaggaagcctccagaaccgtccgggggaaccctcctgctgcgctctcaccagcgtcctttcccgcaggtgagcatctgc

SEQ ID NO: 113656 - DNA, 122 bp, Homo sapiens
tttatgtcatgaactagaattacagctttgccttggtcatcgaactgcggcctcccagcacgccccatcatctggaggacatctttaaaagagagaacaaagagatattctacaatgtggca

SEQ ID NO: 113657 - DNA, 122 bp, Homo sapiens
gcacgccgggaagctcgcgggtcggcaccgggacagctcccgggcgccgtggaatgcacacgtcccgcacccggaccttccggtcagcttcccggctcgctgtctgatgcccgcggtagcca

SEQ ID NO: 113658 - DNA, 122 bp, Homo sapiens
acggccccgcccgtacaacgttgcccagatgctcgggggccatgtacctacggtggtgggcgcactctggtttaatacagcagcacacgtacccgcagtggcggatgcgctcgggtttaata

SEQ ID NO: 113659 - DNA, 122 bp, Homo sapiens
agccctggtgggggatgtagtttgtgagacccccttccgcttacacggaagggacttggacgaggtatccaagcaggaactttgcccaaggagacttatttctgactacgagatgaggccgc

SEQ ID NO: 113660 - DNA, 122 bp, Homo sapiens
tgacccatatcacataacatctcatactaagcctgcagtcaagtaaaagtaaatttcacacgtgctgctgtgaaaacgacattgctcctaagtaagcttgcaaggctggcttttttctttct

SEQ ID NO: 113661 - DNA, 122 bp, Homo sapiens
aatttaatccatgatgaataaaagcaagattattgagcaatttctgcttaaaaaaatcttcgggagctaagtttctatcctgagtctggttctttagcttccgtttgatcttatatccttca

SEQ ID NO: 113662 - DNA, 122 bp, Homo sapiens
agagagtgggggtgggtctcgacccaacttccccccctttgcttttttgttcttttccctcgtttgcgctttagattcttctgtaattttgcgggggttcagccttgctcggcgattcacgg

SEQ ID NO: 113663 - DNA, 122 bp, Homo sapiens
gtccctgcaccgcgtccctccctgtctgagccgtcctcttactcaacgtggatgaagtcccggaggtgctcctccacgcccaccagcttgcagtagttgatcgtgtaggtggtgtttaccaa

SEQ ID NO: 113664 - DNA, 122 bp, Homo sapiens
tggctgacccggcccggcttctcagggcccagaccagcctggcctcgtgcccacctgcttcgctcccaacctcaccaccaggcaagggtttccagaaaaccgagacacgcaaacacccacca

SEQ ID NO: 113665 - DNA, 122 bp, Homo sapiens
tttagatgagattatgagggtgaacccccatgatgagattagtgtccttgtaagaaggcacggagacaccagagctctcttcaccatgtgaggtcacagccaggaggcagctggccatctac

SEQ ID NO: 113666 - DNA, 122 bp, Homo sapiens
actggggtggcatgatcccaggactgcaactccacgtgtctggattccccttactgactgcgtgaccctggccattttccctccacctttctctcagcgcccccatttgattactcggcctc

SEQ ID NO: 113667 - DNA, 122 bp, Homo sapiens
ccctgcctgcctgcgggtcctcgggggcgccctggccgctgtccgtggtgctgatcaccccgagggaacttggagcaaactctcaagagctgctctcttcaacgggattttcaggccagaaa

SEQ ID NO: 113668 - DNA, 122 bp, Homo sapiens
ctgtgttaggaaaacagtagggaactatcaaaatatgacagaggaagatgttgttcaggccgccctgggctgtggtcatcctcgctgtgacagcaagccaaatgtggcccgacttacagcgg

SEQ ID NO: 113669 - DNA, 122 bp, Homo sapiens
acggccttgccccattcagatgcatcgaactcacagaacatcgctccccagctgctggctcgcggttctgagagtgcctgaatagaaaaccactcatttcccttcgcaaaagaggcgcccaa

SEQ ID NO: 113670 - DNA, 122 bp, Homo sapiens
tcctacctggcctccgtttctcattatggctttgctaaagggtctgaaccgtggcatggacgtacattttttctcagtaacgccacatgtgtagagtattgatgcttacccaagcaaagcaa

SEQ ID NO: 113671 - DNA, 122 bp, Homo sapiens
gactacagtgggcgatacaccgccgccagccagggaagaagagtacctcttcatggtgggcgacttcctgctggccgtcatgggtttcgccaccatcatgggtagcatgagctctgtcatct

SEQ ID NO: 113672 - DNA, 122 bp, Homo sapiens
aagaagagtgtttcctttagactgttgatataatgtgaaatactgacagtttaatggacccgtaggttgatatgtaccctggaggaaatttgggtatgtattcacacagctgcagatgaatg

SEQ ID NO: 113673 - DNA, 122 bp, Homo sapiens
aggggcgggggaatcggcccctgagggaagcgcccggtggcgagggggttagccaagttccggctgcggcgccactccctcggttccacgagaggaaagttttttttttccagacgcttccg

SEQ ID NO: 113674 - DNA, 122 bp, Homo sapiens
gacactctttttgcattttaaattatcaataacaagaattaacgtgtattgatggtttgccgcacaccagctactgaattcagcgtttcacagctgttaaggctccctaaaatcctgaggta

SEQ ID NO: 113675 - DNA, 122 bp, Homo sapiens
cagccccgctccagtggcgaccgttcgcggaccccggcctcgcttggggcgccctggccgcgggacttgtggagctccctagtcctcctaggctgcttaccccgccgctccctcccgtccaa

SEQ ID NO: 113676 - DNA, 122 bp, Homo sapiens
cctaatccatctacctgaccctgtctggtccaagctcctcgaggctggcacagctttggccgtcaggagagccttctgggcagtggctctaacagaaccatgtccaggacttcatccgtggg

SEQ ID NO: 113677 - DNA, 122 bp, Homo sapiens
ccccgccgggccttcccgccctccccgccgacggagccccccgccgggccttcctttctgcgttacccttcccgtgctgggcctggcgcctgggtgtcagggcctcctcctgggacagagga

SEQ ID NO: 113678 - DNA, 122 bp, Homo sapiens
atagcggttctgttaggcaatatcaaactagattgcagtcctaagttacaggctgtaagacggctgaggcaaacttgctaaaatcgctctgctataaattagttgtgtggccttgggcaaga

SEQ ID NO: 113679 - DNA, 122 bp, Homo sapiens
ggttgtccttgttaatagggatggcggagacggcattgctgttggacttggacagggacacggggcctgcggagacagaggggaggccgcgtgttgggcgtcgtggatcacccccaaatcct

SEQ ID NO: 113680 - DNA, 122 bp, Homo sapiens
cacgttgccttggatgcctgcgtgagtggagtcgcgactcggggcccgcgtcctgagagacgcgctcccgcgccgcttctcgcctccggaccgcaggggccgaagtcgcctatttctggctc

SEQ ID NO: 113681 - DNA, 122 bp, Homo sapiens
agtttactgcagggcgtcctgctcctggcttccaaggtgctgctgggggtggagatgcagcgtctggccacacagctggcagtcaggaagctggggaggtgctcaacggcacggccggcatg

SEQ ID NO: 113682 - DNA, 122 bp, Homo sapiens
ggccaccgagtcagcgggaggtggggctgctgccgtcgccatcttgttgaggggcgcggccggcttggtgcggacatgtttatgaggggcaacctctagcttgagacctcagcctagatggg

SEQ ID NO: 113683 - DNA, 122 bp, Homo sapiens
ctatatcagcgattgtctgatggagcaggcatggggggagttctgctggtaccaccccagcgggcagttgggcaattgcctggtgacctgtggggcaatctgtactttttatatcatcttcc

SEQ ID NO: 113684 - DNA, 122 bp, Homo sapiens
aggcagccgctcaaaagagcgccacccttgggggccggagacttggggtacggccacccgcgtgctgggattcggggccagttctgggagtgggcttcctagaggaagggagggagcatgca

SEQ ID NO: 113685 - DNA, 122 bp, Homo sapiens
cgatctcaggctcaagtggtcctcccacctcagtctcctggaaagctaagactacaggcacgcaccaccacgtccagttagcgtgtatgtatgtatgtacgtacgtgtgtgtgtgtgtgtat

SEQ ID NO: 113686 - DNA, 122 bp, Homo sapiens
taatttaagcagcacattatgggggggctctggccttactgaacttgaactcaatgctgccgatttttcataagccttgattcatgataccccactccctcttgctcagctaatgagctcct

SEQ ID NO: 113687 - DNA, 122 bp, Homo sapiens
actgagcaccacggtgtgccaggctcggtgctgggtagtttgacctcacaacagcctctgcgagggaggcactgcttcctccaattttaggaataaagaaaccgagcctcagaatttccaaa

SEQ ID NO: 113688 - DNA, 122 bp, Homo sapiens
taggagcttctcaatccacgtctccttcaaggaattaatgaaggagcgaggcctgggacccgcaaagaacttcacagaatcgtcgaataagtcacctgctgtgccgctgaggaggttcaggt

SEQ ID NO: 113689 - DNA, 122 bp, Homo sapiens
cctggctcaggaacagggacagcacctcatcccctggatgggggaccacaagatcctcatcgacaggtcggttcctctccccacccgtcgatccttcccttccctcacccgcttgatctcgt

SEQ ID NO: 113690 - DNA, 122 bp, Homo sapiens
ctcagaaactcttcattctcctcatatccctcaactggccctttaggcatctggatcaggcgcaagctatcggccgcctccaggaacgccgaccactccaccttaggtatcatatgtaccac

SEQ ID NO: 113691 - DNA, 122 bp, Homo sapiens
ccaagtaaaaaaagccagatttgtggctcacttcgtggggaaatgtgtccagcgcaccaacgcaggcgagggactgggggaggagggaagtgccctcctgcagcacgcgaggttccgggacc

SEQ ID NO: 113692 - DNA, 122 bp, Homo sapiens
gtgtgtttacttcagcactatttacagtaggaaagacttggaaccaacccaaatgcccaacggtgatagactggataaagaaaatgtggcatgtatacacgatggaatagtatgcagccata

SEQ ID NO: 113693 - DNA, 122 bp, Homo sapiens
gggggacacaggaaagatcactctgcagaatggaccttgagtttcgtttggctctgccttcgattaactgtctggcttgggcagacaagtcagttaactttctgagttttagtgtcttcctc

SEQ ID NO: 113694 - DNA, 122 bp, Homo sapiens
tgcacccacgccccctgacaaagtggccccatctaagacgacagcagaggttcctgggcccgaacatctgagccaggctgcgccgggggcgtcagactcggatcatcccctgagccctggag

SEQ ID NO: 113695 - DNA, 122 bp, Homo sapiens
gccctccgcttcccgcccgcgcccgcacctccccggcttgctcgggctgggattcccgggcgccccgccctggacctcgggctccccgcctcgtgacgccgtcctccccctccgctccggcc

SEQ ID NO: 113696 - DNA, 122 bp, Homo sapiens
cagtgggctgacaggagctacctcaggaagacgcggcacgacggttgcctgggcaacgggcggcaggcgcgcgggtggccggcgcgcggctgagggcgggagggacgcctgggaggagcgtg

SEQ ID NO: 113697 - DNA, 122 bp, Homo sapiens
atttattcaccagaaatgacttactggtgtttctgcagagcagggactcagtgacaaggacgctggccctctagcctggggctctggcagatgcctcagagtgagggaggaggctgggctca

SEQ ID NO: 113698 - DNA, 122 bp, Homo sapiens
aaaggggtactccaccacgggtaccctccgcctcccgcctcccgcctaccccctccgccacgattgctttggtggaaagtgcttgggcctagagcaccagtgggccagtcacgctgcctctt

SEQ ID NO: 113699 - DNA, 122 bp, Homo sapiens
ttgggcactgattcaagcagcatccgagagcttgttgccacagtgtggtcctcgggccggcggcagcagcagcagcagctaggattttgttagcaaagcacatttccaggctgcagctcaga

SEQ ID NO: 113700 - DNA, 122 bp, Homo sapiens
ggacgccctgtgcgcgccggaccggcgggggcggggcgtgcaggcgggggcggggcacgccgtcccatgggaccggccctcggccactgccccctccggccccgccccgagcgcccgggctg

SEQ ID NO: 113701 - DNA, 122 bp, Homo sapiens
gcgggcggccgggggctggcggcgaacacttagtggctaattcatgactcatgactcatgcgcaggctcctcttcagtgacagccgggacagttcctggttatttgtagccccccggctttc

SEQ ID NO: 113702 - DNA, 122 bp, Homo sapiens
cgccgctcctccggtccgagattatgtaacgaagcccggcgcccgcgagcctgccgtacccgccaccgccaccgctcgccccctcgagccccatccgttggccccgcgcacgcccggcctag

SEQ ID NO: 113703 - DNA, 122 bp, Homo sapiens
gagtgggggtgtcccatgaactgagcggggttgtcccgtgaactgagcgggggtgtcccgcgagctgagcgatagtgtcccgtgaactgaggctctgcagatagaagagcctctggagagca

SEQ ID NO: 113704 - DNA, 122 bp, Homo sapiens
cacgcgcacaaaggctggggagtgcgcggaggatcatcggctgcgcctgcgcagttgctgcgtgaggcgggatctgcgccgagtgggcggggggtttcctttccccgcagggctgggggtcc

SEQ ID NO: 113705 - DNA, 122 bp, Homo sapiens
catgcagaagtgctttctggaaacacttgtgttctgatcacaggagtgcgagggtggggccggctgggaacctaaccactttgctcagtataaaggtccacactcccgtctcatttccccgt

SEQ ID NO: 113706 - DNA, 122 bp, Homo sapiens
ccctacccaatcagcggggccgccagctgcagaagatgccctgcccaaccggagccatgacgcccctggggccaccttcaacgcatcagtggaaaacaaatttgctgatcccagccctggcc

SEQ ID NO: 113707 - DNA, 122 bp, Homo sapiens
gcaccccccacctacgcctccactcccgacggcgaggaccccctcctcgcctccatcgcccgggagctcagcaagatggcgcagctcactgagctcagtgtggccttctccacgctgaccgg

SEQ ID NO: 113708 - DNA, 122 bp, Homo sapiens
gaaagtctgttgagctctagctggcgtgagagcaagtgggcgccactcccattccatgcgcgctgtgtccgagcctgccaggctgctggagtccgggagcaaccttgggagaggacatgaaa

SEQ ID NO: 113709 - DNA, 122 bp, Homo sapiens
aagacctgtcaaatataatcacacaatctaatatttttaaacatgcaaaatgaagaccaccgaagtcaatgtcattcagaaataacaacaacaaaaccagagcaccctatacaattaggcct

SEQ ID NO: 113710 - DNA, 122 bp, Homo sapiens
acaaacatggctccctgaagccgctcaggctcaagagcaacaaggaggtctgcacttaatcgctcctctccgggggcggccataccgaggaggcgtctcttccgtgcaggcaggctctcctg

SEQ ID NO: 113711 - DNA, 122 bp, Homo sapiens
tcatttctcactcctattcagaattctcatagtataacattgtgaacaaaattgtcttatcgcttagcaaacacaggaaagggtgttcagagttccaggaagaaaaagagaaaatagccttt

SEQ ID NO: 113712 - DNA, 122 bp, Homo sapiens
ggcggccgcagatccccacaacatccgggagccggcgaccacttccagttgctatggttacgagttgcaacctccagaaagaattcgtggtttcacccgggaaaacagctccccggattaaa

SEQ ID NO: 113713 - DNA, 122 bp, Homo sapiens
acactcagatctgtccaactcctggccagtgctctgtctacgccgtgagtgagttatcgtcggtcgtgataatagtgtgagtaataaactgctcagttagtgaagtttttggtctcacgcag

SEQ ID NO: 113714 - DNA, 122 bp, Homo sapiens
ggccagccgaaagggaagtggggctaccccacagccaggcagcggggctggggtcagacccgggagccggaggttggagacgtgcgacagtcacctgcgggcagattccagaggggagaccc

SEQ ID NO: 113715 - DNA, 122 bp, Homo sapiens
ctcttcagtgaaaaaccatttctagatctgctttaagaggactaaaccgaatgcgtgggtcggcagagttgggctcaaggaccattaccatcgggcgctgtttgtgtctaacccgaatgcca

SEQ ID NO: 113716 - DNA, 122 bp, Homo sapiens
ctcccgggctttaccaattctcctgcctcagcctcccgagtagctgggactacaggcgcacgctgccatgcccggctaattttgttgttgttgttgttacccaggctggtctcaaactccgg

SEQ ID NO: 113717 - DNA, 122 bp, Homo sapiens
tcccgaggcatgctgggagcctggaggactagcgaggaggagttgagagaacggagcggacgccatggcgaccaacatcgagcagatttttaggtctttcgtggtcagtaaattccgggaaa

SEQ ID NO: 113718 - DNA, 122 bp, Homo sapiens
tcccacatgttgagggacacaagactgccccctccttcccacgagtcatattaataagtccgtgcctccggaacttctgatggactggcttcaagttggggttcccatggtcccctctttga

SEQ ID NO: 113719 - DNA, 122 bp, Homo sapiens
ttacggcgcttcccagagcccaccccgcccaacgtgtcacaaataaagctggcctttctccgattccctgattgcagccattcagggagcagccccttgcccacgcatccattagtcgaggc

SEQ ID NO: 113720 - DNA, 122 bp, Homo sapiens
acccagcctatcacctcagttaagtacttattgatgatttatccgtggaaagttcttgaacgctagcaacatgctcatttctgtaaagagcttgaagtacaaggaagagttttaagtttaaa

SEQ ID NO: 113721 - DNA, 122 bp, Homo sapiens
ctcataacattgacactggtaattaacccaggacacggaggtgtctcatggtttccctggcgggaatcacccgggaaacctccgggagccctccagacccccttatcccgtcccccagggtc

SEQ ID NO: 113722 - DNA, 122 bp, Homo sapiens
gcaggctgcatgggcagaagatccaggagcttggctaggaccccaagctaaagaaagccccgaggtccagggagggaggcatcgggtgaaaaaaaaaggaggggggcgctggaagagggagt

SEQ ID NO: 113723 - DNA, 122 bp, Homo sapiens
tgagcattcagtcttctgacctgttccacctctacagggcattttatggcttaaggatgacggcctagaagggaagggagagacttactttggattaaatttacaatgggaaagtgcttaag

SEQ ID NO: 113724 - DNA, 122 bp, Homo sapiens
ggcgcttcagacccggcccgcgcggacggctgacagaggcggctggcctcggacgggaggcgctctcctcaaggacccggcaccagcggcggccttgtcccggcacagacgtccggaggcgc

SEQ ID NO: 113725 - DNA, 122 bp, Homo sapiens
atgtcgctcacctgccatcgggagagtatgcagccttcccgcctgtgcctccttcatctccggctgctcgcatcccccaggcaccgcctcaaccccgtgagcacctccctaagtgagaggcc

SEQ ID NO: 113726 - DNA, 122 bp, Homo sapiens
agcccaaagaagggaatgaccttcctagtgaaggaggcagtgaaggtgtagatgggctctcgggtgacagcgttggtgaaggtcacccagcccacctcatagtcaagagacaccctcacctg

SEQ ID NO: 113727 - DNA, 122 bp, Homo sapiens
cagaccttggcggtgagtgttacagctcaagccggcacatctggagttgtttgttcctcccggtgggttcgtggtctcggtgacttcaggagtgaagctgcaaatcttcgctgtgagtgtta

SEQ ID NO: 113728 - DNA, 122 bp, Homo sapiens
ggaaatgtgttttttggtttattttattttattttttggatttagtagtggaaccgggctcgggaaaaaatatctaggagttatgacactttgaaaaatgtactgccatctactttattcct

SEQ ID NO: 113729 - DNA, 122 bp, Homo sapiens
tgtgcagtctctgactcatcaaggctcccacactgacttccctgagaccctggaagctatcgagctggaccttgacctctcaagccgtggacgccaagtcccagggccaggtttttaaagga

SEQ ID NO: 113730 - DNA, 122 bp, Homo sapiens
tcccactactgcggcaggtgcagggcgagctgtgcccatgcgaggcggcctcagggcagacggggcttctcccagacacgttccttagagcaccgagggctccaaagagcctttcctcatga

SEQ ID NO: 113731 - DNA, 122 bp, Homo sapiens
gcggtgacgccagcgtctgggaagatgcccgtcgccaagcggaccgtagtctagtggtaacgtcagtgcaaaggaaaagcacctgctacttagcagactgggagagggagtctccctttccc

SEQ ID NO: 113732 - DNA, 122 bp, Homo sapiens
cttttcctgcaccccagggacaactgggcagggaagaaggatcccaaccttgcacaaaaccgcagaggctcagagaggagcccctggccagggtctggactcaaactcaggtctcccagccc

SEQ ID NO: 113733 - DNA, 122 bp, Homo sapiens
cccacagactaagtcccaggtcactgcatccccaaagagggcgaggctcctatataaggacggactgcagcaggagccagtccagaacgcggcccgaggcgaacagcagcccactgtcctag

SEQ ID NO: 113734 - DNA, 122 bp, Homo sapiens
tttgttgggatatgagccagcacaagcagatgagccagcctgtgaggagccctgatgccacgtcaaggggtttgcatttgagtcatccacttacccacaccacagacaagctacacagttgg

SEQ ID NO: 113735 - DNA, 122 bp, Homo sapiens
agaagaaaaacaataatctatatgatgggcttttggcctaaacccatatcctttagatgacggaatttggcacagctcatattctggtttaaagaaaaatgttttgttatgatgtcatttgc

SEQ ID NO: 113736 - DNA, 122 bp, Homo sapiens
ccccgacggggcttccagccggggccctgcggtcaataaacgagatgaggtggctagagacggggtgggagggaaggagcgcacggagtccggggtcggagaacagaaggcgcgggcggctg

SEQ ID NO: 113737 - DNA, 122 bp, Homo sapiens
aaccggcgtgctagtggagcggactagcaacgcctactttctgccttcactacgggactccgacagtccggagacttcacttcccaggctccatttcgccaggatcccgaagctgaacttgg

SEQ ID NO: 113738 - DNA, 122 bp, Homo sapiens
cgcgcgggcttggtcctttcggctgtctcggcctttttgtttccccctcaggtctctccacgctgcacttgacaccctcagggcggaatggcgagttctagacccagctctctagacccggg

SEQ ID NO: 113739 - DNA, 122 bp, Homo sapiens
ggggtggccctggaaacgtcggggatttgagccctacgtccgcctttgctaaggaggaaacgcttgagtttggtagccaggagatggccaaggagttgaggcacaaattggccaccttccgg

SEQ ID NO: 113740 - DNA, 122 bp, Homo sapiens
gaactccagagactgaggccagggtgtctacatttcggtgacctttcttggttcccatcccgggcttcgctgttccatgctcacaaagcctcttccgaaaagaaatccctcgcttaaaagag

SEQ ID NO: 113741 - DNA, 122 bp, Homo sapiens
tgcttatggctgcttcagtgctataatggcaggctagactagttgggacagagatatagccgccaaagcccaagatgacacttacaatctggccctttatgaaaaaatttgcaaactcccaa

SEQ ID NO: 113742 - DNA, 122 bp, Homo sapiens
tatctgattagtgaggataagagccgctcctggcctccccaggcagcaggaaattagggccgggaaagcggtttggaaactggtcagcgggtgcaggcgggcagagggtgggaggcgtcagg

SEQ ID NO: 113743 - DNA, 122 bp, Homo sapiens
gctcccgccccaggttttctaggggtcacccatacacagttccagaatttgaaaagtttccgcggggaggttcccatgggagcagggcctgtgctggttccaccaggtgcctttgggcgcat

SEQ ID NO: 113744 - DNA, 122 bp, Homo sapiens
ccgcacccggggcaggtcacctcgccttggagacagccctgagtcaggtcaggtggcaatcgggatgacgttacacctcccacggagacgtctaaaccctcgtgaagtctgcctacacattt

SEQ ID NO: 113745 - DNA, 122 bp, Homo sapiens
gggactctacctccctaaataggccacttaaaagccagtagtgcaaccgggatcccgcggcgataaagaatcactgtgcagaaccctggagctgggagtcggcccgcccccctcccaaagaa

SEQ ID NO: 113746 - DNA, 122 bp, Homo sapiens
acggcggcgccggggagcccccgggccagctcctgctgcagcagcagcgcctgggccgcgcgctatggcaccttcgcctggcccaccactcccagaggtgcgcagtgggccggcttgggcgg

SEQ ID NO: 113747 - DNA, 122 bp, Homo sapiens
ctgcatttcccatgaagggccttctcctgggaaacacagcactgcatgcagattgtccaccgatggtgtccatcacttcctctgcaggccgcagccacgttgctccaagtggccccacgtgt

SEQ ID NO: 113748 - DNA, 122 bp, Homo sapiens
attcagagattccagtggtggctcacgctcccacaagcacacctggcagagctgggtccccggtgggggctcatgctcttaaccaccaggcaggacagtgtttctcattctcaagctgtcag

SEQ ID NO: 113749 - DNA, 122 bp, Homo sapiens
agcagttgctacccatgttaaataatttgattcttagaaaacatgatgactgttacttcccgtcataggcatttctttaggactttattgggacagcctgccagggttcaggttccttggct

SEQ ID NO: 113750 - DNA, 122 bp, Homo sapiens
cagcaacaggctgctctacccccggcaggtgggctgcggctggtgggggccgggctcacacggcctcatggggaccccgcggtcacagggccactgggagctgcaagatcctcgtccgagaa

SEQ ID NO: 113751 - DNA, 122 bp, Homo sapiens
aacatgggcaactcagaaaatttctaattaattcatcaaataccttttaaggacctattgcgtctaaggttctgtgctaggctgtaaggctcaatgtcttacattgtaatgcagggacaata

SEQ ID NO: 113752 - DNA, 122 bp, Homo sapiens
ggaggcccccgagggaggtggtggcgtggtgagactgtaaaaacaaagacacatgcttctcgttcactgtgcccagggcctaagagagtgtccagcagctagtgggcgctccaccgagtagt

SEQ ID NO: 113753 - DNA, 122 bp, Homo sapiens
catcactggcagcttgggcagaagctggagggccttctgagacaggtgggcgaggtctgccgccaggacatccaggtgagagggtactcctgccccaaccccacctccgtttgcaggtttga

SEQ ID NO: 113754 - DNA, 122 bp, Homo sapiens
gggcggctgccgggtggaagggctcctcacttctcagacagggtcgcggcccggcggaggcgctcctcacatcccagacggggcagcggggtaggggcgctccccacatctcagacgatggg

SEQ ID NO: 113755 - DNA, 122 bp, Homo sapiens
cacacagcacccgcgggctctggtgaccaggttgcgcctttcggtacagaggggcaaatgcgcaatgatcagacctgctgaaatttagggagtcacacccttcacagctcgagtttgcaccc

SEQ ID NO: 113756 - DNA, 122 bp, Homo sapiens
gcacggggagggggagcggtgattgacaagactcccagcaaaccgggggccgtgagagggcgcgcggcatcccagtgggtggcagctggaggcggggcaccctgaggggcggggaaggacta

SEQ ID NO: 113757 - DNA, 122 bp, Homo sapiens
aactcctatcatgaaaacagacaaacacgtagtcatcctcacctagagcaggcgtcatggcggccatgggcccggcgggatccagctggaatccgctcatcatgaactgggcgtccgaggca

SEQ ID NO: 113758 - DNA, 122 bp, Homo sapiens
ctttcccctccctcccctcctgacctcgacttccttcccttctctgtctaaggggcagggcggaagatcgagcctcaacgctgccccacacccacgctggatttaaagcccacgctgtaggc

SEQ ID NO: 113759 - DNA, 122 bp, Homo sapiens
aggggcagaaatgcaggcagcctgggcaccccgtttgcaagtggcttctgaagtgggggccgtcttgtgggactgagcctctaagctgtggagacagacactagctccaggtagataatgtc

SEQ ID NO: 113760 - DNA, 122 bp, Homo sapiens
agagagacccagagaaacagagaccacttagccagtaactgagaaaccaagaccccaagacgttcaaaaacagaaaaaccacagatgctgagacattcagggacccagagatggagacagag

SEQ ID NO: 113761 - DNA, 122 bp, Homo sapiens
ctcgccgccccccactccctccatggccccacgagccacctccacagcctcgcgccttcccggggtcgcaacgcctatcacaagcttctacccgggtttcagggggcccctgtagtggcgtg

SEQ ID NO: 113762 - DNA, 122 bp, Homo sapiens
caggacccggagctgggctgggggccgtgggagcctcacatacacaggtttcaactgggacggccactggcccctgtgcggcgctggcaagttgctcagcttcgcggagtcgcggtcactct

SEQ ID NO: 113763 - DNA, 122 bp, Homo sapiens
cccggtccttgggaaagcggaacagcgacttcccagacttggtggtgttgccgcagtgggcggccacacaacgggccggcatggcggccgtcttcggtgcgcgggagccgggttccctggac

SEQ ID NO: 113764 - DNA, 122 bp, Homo sapiens
agcggcggcggtggcggcggaggggccgtgcggtgggtccgtactatcttttcccagtctcggttcgacgactccattttcctcggtgggggcttagcgcactggaggagcggcgggcttca

SEQ ID NO: 113765 - DNA, 122 bp, Homo sapiens
ttttcacacagattgagaccaggcgtcgcccacagagcataatgtgaggcgagagggactcgggctgctgtgggctggggaggacggtcccatagctgggggcagagcagggcaggctgggt

SEQ ID NO: 113766 - DNA, 122 bp, Homo sapiens
tccacggtgatggggctctggaggctggggtgctccacttggcaggtgtagatgtctccacgctggggagttatttccagcatcaccagaatctggaaggtccagtcaccattcctaatgag

SEQ ID NO: 113767 - DNA, 122 bp, Homo sapiens
tctgcgggcagcagctcccagaggcagccttggaattccagctcggactgggcgggaaggcgcaggcggcccaggtcgccgacacgctcacgcaccctccctgcctggccgcgcctctgcga

SEQ ID NO: 113768 - DNA, 122 bp, Homo sapiens
aggctgcgggcggcggcggtgcggcgggcgcagcgggcgcagcgggaacagcgggcggcgcgcatgacctgtccagcacagcgcgcctcctggcccagcacaagatcctgcagggcgagctg

SEQ ID NO: 113769 - DNA, 122 bp, Homo sapiens
tctccctgctccctgtggacaaaagcacataattctgctgttacgggtactttgctcatacgagctttcatgttcagcatgcaatggaatcatgcttgtccatgtgaaataaatatggctct

SEQ ID NO: 113770 - DNA, 122 bp, Homo sapiens
catgccggggaggagcgcggaggcagttgggggcggggacaacaggcgcggccccagcggcgcctccaggcccggtcagcccagcgcgcggcgtgggggcggggcctgcggttcccgcgggg

SEQ ID NO: 113771 - DNA, 122 bp, Homo sapiens
cacagtccccgcgtgcgtgggcaccacgaagccaggggcctgggcagtctgggctggcgccggcgggggcggggcggcggcagcgggcggcggcgggggaagtgggccctcgaagcgagtct

SEQ ID NO: 113772 - DNA, 122 bp, Homo sapiens
aggcagggttgtctggggagtggaacgtctgctagaaatgcagatcgctggggccaccgccgtttggccgtgtcagtcatctgggggtcccttagcctccgcagagtaaagctgtgggagtc

SEQ ID NO: 113773 - DNA, 122 bp, Homo sapiens
gtcacacacactgtctggtttttttcaggataaatgaatgattctgccttttgttatgtgcgtgaacagaatggaacaactcaagtagcttcatcttcagagactgaatttattctgataga

SEQ ID NO: 113774 - DNA, 122 bp, Homo sapiens
cacgcatcacacgcacatacaccagcgcggttatccataactctaccatttcaagtgagccgcaagagactgtaaatcgcagtgaagtgggccgtcaggcaatgattactaaataagcatgg

SEQ ID NO: 113775 - DNA, 122 bp, Homo sapiens
aagcaggatcctttcccacttctgaaagtcttcaaacccagtcaccccaaatgcaaacatcgtgtgaaaccccattaatcaggtaagaaagtagggagagctctgactcagctgcctctaat

SEQ ID NO: 113776 - DNA, 122 bp, Homo sapiens
tgctaagtgctgagtattagaaacctaggcgcatgtggagtcctcatggctgggcctggacgtcccttaggaggtgagcttcatgttgttcctgaaaggattcaggtgggcagagaagaaag

SEQ ID NO: 113777 - DNA, 122 bp, Homo sapiens
gacccctgcgagaagccgtgggggagggaagggcgctctgcggcggaatgaagtggtcctcggcgttcctgcgtagagcccaatatgggtgtcccttgtttagggccgttaccgagtgtccg

SEQ ID NO: 113778 - DNA, 122 bp, Homo sapiens
tggtagagacaaaacagagaacaaaatttagtccctctctgggccagatgcagtagctcacgcctgtaataccagcactctgggaggctaagtgggtggatcacttgaggtcaggggttcga

SEQ ID NO: 113779 - DNA, 122 bp, Homo sapiens
gtgggcacaatgggcgtccagaaaagccaatcaacagccgtaggtgccaactccggaggacgaagggaaccaataggaaggaagtcgaggtaaaaacagaagaagcagtgtgtgggaaaggc

SEQ ID NO: 113780 - DNA, 122 bp, Homo sapiens
cgaagaggaggagccaagggtaccgagcgggtggagtcgggagccggagagcggtggaggcggatttcctgggcccggccctctggcgctaccatggcgtttggcaagagtcaccgggatcc

SEQ ID NO: 113781 - DNA, 122 bp, Homo sapiens
tgtagcaactttcaaccccagtgctgaaaaatttcaaaagctcccaagtgctgaaacattcgcagcgcaactgaacccgcatagacgcctctcatagtgcatggggggtttctctgggccgc

SEQ ID NO: 113782 - DNA, 122 bp, Homo sapiens
gaaggtggaaaggactaaacactgaacatgaggaaaaaaccctgtagaggacagtgacttcggcagacatggcctcaaagcagctagcagaggattgagtccctgagcttttccaaaatatg

SEQ ID NO: 113783 - DNA, 122 bp, Homo sapiens
tggcttgggggtgcttgtgtaagttcttggttatgtgccctcagccaccaggatatgaaccgtgtctgcagagcttcactttagtgagcttacaagtttttaaatttttacttctagttaca

SEQ ID NO: 113784 - DNA, 122 bp, Homo sapiens
cgagagccttccctccccagggggtcccgctaggggctgtgttttagagagtctcctgcacgagctaagaaccgtataccacgtttgacctggaaataccacgtatgaaatcacattttatt

SEQ ID NO: 113785 - DNA, 122 bp, Homo sapiens
cccatgcctgcgcgctgactctcacctctccgacctgctccagcggaaggttctctgccccgggcaaagctatttgagcaggccaagagttgaagaaaaataccagaccaaaccagctcctc

SEQ ID NO: 113786 - DNA, 122 bp, Homo sapiens
gatcgcttctaatgtcctttagccaggtaaatgagcatagacattctcagttacttacatcgttaacccaaacatttggtttcaggatcccataagcgacccatgacaggaagacttgggct

SEQ ID NO: 113787 - DNA, 122 bp, Homo sapiens
tcctgctccggagggtgactgttagcatgagcctgcggtgacagggaggcaggaagacagcgctcccctgctaagctttggcacattctccccaccagccaggctggagttcgtatagaagg

SEQ ID NO: 113788 - DNA, 122 bp, Homo sapiens
tccgtccacgttcacgtaaacctccctacgaggggaaactacaggcgcgctgccggagggcgccgccagtgggcactcacgcacagctgctttggccaccacaggcgccccgggccactctc

SEQ ID NO: 113789 - DNA, 122 bp, Homo sapiens
gaagaaggagggttttacgagagtcagcttttcataggggagaatgcttgccagcccgcccgccaggccccaccgaggctgccagaggtgaccttcaggcttcagcaactctgcccttcatc

SEQ ID NO: 113790 - DNA, 122 bp, Homo sapiens
ccagctcgtggtctggctggatcccagtgcagtgccctctgttgggggaaatcctccccacgcctcgtgaggctgaggactctcggccccgtgctcacctcctcgatggcgggcttcagggt

SEQ ID NO: 113791 - DNA, 122 bp, Homo sapiens
aagattagggctgtgtctcattaatatgtatatcttcaccctattggcttgcacagtgcccgatttaacaggcacataccacggctctgctgaatgaacagatctttgtccctcacttcata

SEQ ID NO: 113792 - DNA, 122 bp, Homo sapiens
cacacaatagggctgtcaggccaaagattcactcattccagtctaactgcattccctccacggcctcatccagtctcacagcttttttttttctttttgtggtagagacagggtctcgctat

SEQ ID NO: 113793 - DNA, 122 bp, Homo sapiens
gctgacttccagagcctggtgcccaagatcaccagtctcctggacaagctgcactccacccggcagcacctgcaccagatgtggcatgtgcgcaagctcaagctggaccagtgctttcagct

SEQ ID NO: 113794 - DNA, 122 bp, Homo sapiens
tcagccagagctgggacgtcatctggtgtcagcccttccgtgggcactgggggcagcacccgcacctgacattgtcctggggcaaggggagcaccatcatggcctgtccacccaggtctttg

SEQ ID NO: 113795 - DNA, 122 bp, Homo sapiens
cgccccgccccgccccaggccccgccccagagagttctataaagttcctctttcccacctcgcactctcagtttcaccgctcgatcttgggacccaccgctgccctcagctccgagtccagg

SEQ ID NO: 113796 - DNA, 122 bp, Homo sapiens
ttctcctttatttttcctttttttgggcaaaacctagtcgagggggacgcccttgtctcccgtcacacttaccattttcctccggcccaacagtgaccctgtcaggcacgcagccagcagat

SEQ ID NO: 113797 - DNA, 122 bp, Homo sapiens
gacactttctccattttgaagcggtgtccaggcttcaagacctaggctccaatttctcaccgtgaagaagctcgggaaaaccgggcgcttggggaggcgcgcgggcagaggctacccgtccc

SEQ ID NO: 113798 - DNA, 122 bp, Homo sapiens
ctgagtgcgtgccgctccgccgaccgaagaggctggtaagtcctcaagctggcaggtggtcgggggagcggccggagaggagctgccgggagttcgtgccctgcaggtctgcgacgctggcg

SEQ ID NO: 113799 - DNA, 122 bp, Homo sapiens
atatgtaaatctctcgctgcagccttccggtgccgcagtcgcagccgtgggggccgcctccgctgtagcaattccgagggtaaaattgattaatatttgttttcaaaatgacacgcggtgat

SEQ ID NO: 113800 - DNA, 122 bp, Homo sapiens
aagcttggcgcagaatgctggagacccgtggcggcagctcttcgcctgtgcagagggagacgctgccgtgggagaagggtgtgcccacagcaaggcaacgcgcggccggggacgctgctctt

SEQ ID NO: 113801 - DNA, 122 bp, Homo sapiens
atgggatttttccattttaatttttagtctttgttgaacggcattgcgtgctttaacgaacgcttttggaaaccaccatggaaaagggcatttttggattcacaaaacaaaaccctgttttt

SEQ ID NO: 113802 - DNA, 122 bp, Homo sapiens
ccaaagcgcatccagttggaaaccacagttcagtggttaaagacatcaggctgccccttccgaggagacgccacttcgtgattccttgcctccatcccaggtgcccacctcaaaaaagtagc

SEQ ID NO: 113803 - DNA, 122 bp, Homo sapiens
aggggttttggattgagatgtcttggtggagacagtcgggcgggcggagggtacccaccccggaggtggcagagcaggcagctcagcccggcaggcttcacacctgcccactgccttgggaa

SEQ ID NO: 113804 - DNA, 122 bp, Homo sapiens
tgcctttgaaatattattttagatctgccaaaataaattgcaaactcattaacaagaatgcggggtggggggtgcattcatccctgccttcctgagtagtctattcacccaaagacaaaagg

SEQ ID NO: 113805 - DNA, 122 bp, Homo sapiens
tcagaggaacccctggcggcgcgggcgcctccaccccggcccagttcctcggaaactgggcggggccgggcaaggtccctggtggcctcgactgccctccctgcgctcccactacccggctg

SEQ ID NO: 113806 - DNA, 122 bp, Homo sapiens
cggcggtgaccacagaggtggtgcccaggaggatgaactggcacagcgagggccgccctccgctctccatgacggcggcgagccccggtggccgactgtggcgccaaggataggcctggtga

SEQ ID NO: 113807 - DNA, 122 bp, Homo sapiens
agtgccttcgccgctgcgataggttggttttactttgcaataaacagcccctaatgggaccgggcgccgggcggagagctcggcccggggcgcggcctttgccgcctggctctgcgggccgc

SEQ ID NO: 113808 - DNA, 122 bp, Homo sapiens
aaagaatgcacctcagagtcgagcagcagcagctcatcagaggtttgaggaagttgatatcggaagttacccttcagcagaagtagaaggaagaagaaccctctagtgaccagtctccattt

SEQ ID NO: 113809 - DNA, 122 bp, Homo sapiens
tcactgaatcaccagaacaagaataaccttcagctacaaggcatcaactttaagcaaccacggcagaagtaatgtgcccttcacatacactttgaaagtgacagaggcttctgttgctgcaa

SEQ ID NO: 113810 - DNA, 122 bp, Homo sapiens
gggaggccaagatgggtggatctcctgagctcagaagttccgccagcctggggaacatggcgaaacactgtctctactaaaaaaatacaaaaaaaattagcctggcacagtagtgtgcacct

SEQ ID NO: 113811 - DNA, 122 bp, Homo sapiens
cgcccgatcgcgcctgcagagcgcactgaaagccgccgcagccgggttgaaaggcatagccgcgtggttcacaggccggtcccggggaacaggaaacaaaggacagggagctgaggcaggga

SEQ ID NO: 113812 - DNA, 122 bp, Homo sapiens
aaccctcgccgtggccctccccgctgtgtacttcattccctctacagcccttgatcaagtcggtaaaaccggcggcccttctctggagaggtgggaaccacttgacctttccagaccttcta

SEQ ID NO: 113813 - DNA, 122 bp, Homo sapiens
ggtcagaagcctggaaacaaggagttggcagggccatgcttcctccgaaggctccaggggcgaatacttcccagcagcttccagcttcggatggcctgtggcattcctgggcatgcaacggc

SEQ ID NO: 113814 - DNA, 122 bp, Homo sapiens
tggggttcttctataaggaatcaaggtcagaacaaccctattgtgctttgttaataggctcgaagcacagcacatactttatatactaagagaaaaaaggcaggtagaatcttataaagaag

SEQ ID NO: 113815 - DNA, 122 bp, Homo sapiens
ctctctctctgacattctcctgccctccttgagctggctgtgaagaaattctctgatctccgttgtctgatttaggtcatgagaccctcatttcagaaggagtcctgccccatacccaggag

SEQ ID NO: 113816 - DNA, 122 bp, Homo sapiens
gcatgtcctctttggttcacctggagagataggctcagcggcagatcacgcttaagctaacgtttaccgcagggcctgatgctctgatctgctggaggcaggctataggcagggggtaaggg

SEQ ID NO: 113817 - DNA, 122 bp, Homo sapiens
cttgtgtctcccacactgatgcccactggggccggcagacccagcacccaggggttctgacgtgagcactgcacccctttgtctttctgcctctcctgcgttgcagccagccagaccccaaa

SEQ ID NO: 113818 - DNA, 122 bp, Homo sapiens
aggttgagaatgtgcctctggtcttctcttcccttcccgccagtcgtctagcatatgccgcgccgccatccactacgggatcctggatgacaagggaggcctggtggatatcaccaggaacg

SEQ ID NO: 113819 - DNA, 122 bp, Homo sapiens
gggcagcaagtgtgggacccggtgggcagggctgcccagctgggaccgtggtgccagctccgggggtgagaaaggagaggttgtgagagtccagctggtgacaacagtgacccctggtggcc

SEQ ID NO: 113820 - DNA, 122 bp, Homo sapiens
ctgccatccacagtgcagtccagcccacccaaagtgactaaccagtcttttggttctacacgtggcaaaggaccaccttctgatttcctgacctcccccagtcactctgtgtggggggactg

SEQ ID NO: 113821 - DNA, 122 bp, Homo sapiens
tgactcttggtgccgcctttcttgggagaaagagaacagagataaggaggctggacataacgcatttgtaatggtgaggtacattgtgcttctagaaggttaagcctgaagacagcatcctc

SEQ ID NO: 113822 - DNA, 122 bp, Homo sapiens
cccaccaagtgggctgcttcctgcctggggctcagcctgcgcggtggttggcagttgccccggaagtgggcgggaaggacctgcgcatgctctgtgaccctgggtgcagggattgtgtgaag

SEQ ID NO: 113823 - DNA, 122 bp, Homo sapiens
aggaaagaaaggtgttggggctcagaggcgcctttagaaacccagggcatggccaggggccgcgcttggccggagcgagctcctggctctcggcctcgcctgttgctaacctgccattttgt

SEQ ID NO: 113824 - DNA, 122 bp, Homo sapiens
tggtatgtgcgtcgccaccgcccctcccagcactgacgggcctgagggacgacaagttgacgctcctttcgtcatcacctggtctaggagggacgcccggggagaccgtacgtcactgctct

SEQ ID NO: 113825 - DNA, 122 bp, Homo sapiens
tggggccgctgtcctccttggaggctgccccgtccgaatccttctcctccagggcaccgccgtccttggagggctcctccgcgtggtcttcctcatcgctgcacccctggggctgcaccatg

SEQ ID NO: 113826 - DNA, 122 bp, Homo sapiens
gtggcacacgcctgtggtcccagctactcaggaggctgaggcagaagcatcacttgaacccgggaggcagagactacagcaagagcagatcattccactgcactcctttgcagggctgctgt

SEQ ID NO: 113827 - DNA, 122 bp, Homo sapiens
agtctcccagctgccagccgaccccgaacccgcactcccgccaaccgcgctttttgtgggcggtcggaaaccacagcctccgttggatatgttcggtgcatgttataaacaaccacttaaac

SEQ ID NO: 113828 - DNA, 122 bp, Homo sapiens
cctcccacccccactggcaccccacgcctgtcctagaaggttctttctgcctgttttctccgtgagtgactggacaggcagaggccggccttgctggagggggcatttgtaattatgagtga

SEQ ID NO: 113829 - DNA, 122 bp, Homo sapiens
acatcaggaggcactctccacaaggtctacaccgccgctcccgggaaggcacctccagggcggccagcaagccccccgagtggggacaggcagtgccttcctcgcctcgtccccgcgcggcg

SEQ ID NO: 113830 - DNA, 122 bp, Homo sapiens
ccatcctggagacaaactacaccatatccgggcagcctccggcctgtgcaccggcctcgacgtcggacaaaaagggcactgggactcccctcgtggcacagcttcccttcagagtcacacag

SEQ ID NO: 113831 - DNA, 122 bp, Homo sapiens
gttcgaacgcctcagcctttctctaagatggtccccagaacgcccagaactccctgtccccgcccccaaaccgagtatgcccctgccccctacctgcacggccttgaagatggcaatgatgc

SEQ ID NO: 113832 - DNA, 122 bp, Homo sapiens
cttccagtaagacataatcgttaagcccacggtgttaaagaaacccagtgagctgttccccgcaggtcaccgcctgcctccaccctcctcccgcgcactgaaggcaaaacacttagaccgga

SEQ ID NO: 113833 - DNA, 122 bp, Homo sapiens
cgtgcgctcggcgagacaggtcgtcggcggcgagtgagggacagagtgcagggcgcacaccgcaatgagcccgtgtcccctccctccgcctctactcccgccccgcggcaccgcgtgtgcag

SEQ ID NO: 113834 - DNA, 122 bp, Homo sapiens
aaatcagcaagataaggggaaggatttcgagccaaggagctgaacaggcagcaggggccacgtcatgcagggggccttgtagttcctgttagggaatggagatttcctctaaatgcaatggt

SEQ ID NO: 113835 - DNA, 122 bp, Homo sapiens
cgcgttcctcccgcccgggggctgcggctgggctgagtgtgtctttaaatctgagccccccgcccctcgcggtggggccgggactcgcggtccgggcgggggcgggcgcggtgattggcggc

SEQ ID NO: 113836 - DNA, 122 bp, Homo sapiens
ttctttctggggtgatgaaaatgtactagtactgattgtggccgcgctagcacaaaaatccgtttcattggccagacgctatggcccagggaaaaaaagaaggactagggggaatggggagt

SEQ ID NO: 113837 - DNA, 122 bp, Homo sapiens
cgtgcctggaccccccgcccctgcctacttacaacatggccccagggctatgcagcaccgcgcccccagctgggcggaagttctagggagaacagcaccagacccgtcaggccttgcagggc

SEQ ID NO: 113838 - DNA, 122 bp, Homo sapiens
gaaagcaagcaagaaaaggctaatcgtataatatcagaggccatagcaaaagcaaaggagcgtggggaacgcaatattccacgagtaatgagccctgaaaactttcctactgcttcagttga

SEQ ID NO: 113839 - DNA, 122 bp, Homo sapiens
ctgctgcttgcagagtgtgggaggcgccagtggggactggagcgcggtgcgcaccccagccgagcttgtgtgtgcttctggcagagcttttagactgaagattttcccttcgtaatgccaga

SEQ ID NO: 113840 - DNA, 122 bp, Homo sapiens
tccttcatcagggccagggtcttaccttgggtccgaggtggagtggccccttggatgggccgcggggcagcgggacagatggacggacggggcgggcaggagttaggagcagagctgtgcga

SEQ ID NO: 113841 - DNA, 122 bp, Homo sapiens
aattgatatcttaactacaaagagagaccttagaattctttaactttgtcatccacctctcgtcttacatacttttgttgtctggtgttatttcatgtaatgtttgctcagattcaactatg

SEQ ID NO: 113842 - DNA, 122 bp, Homo sapiens
tgaattactgaatgccgactccacggcttccctaagacggatcagcgctcgcccatttcccgagttggaagacctctcgattttagttgattaaacttatgcagagatggagatgagggttt

SEQ ID NO: 113843 - DNA, 122 bp, Homo sapiens
ctaagctattctatttcctgcaattgcatgcttaagcatggcttgctcccctttcccaatcgttaaactttaagcattctttttacccttcttcattaaattgccaatttactgagtataca

SEQ ID NO: 113844 - DNA, 122 bp, Homo sapiens
tgcttcacttacttccacattttcaaaatttgccgtcagcacaccaaagagataaatgaccgaagagcccgattccctagtcatgaggtagattcttccagagagactggacacagccctga

SEQ ID NO: 113845 - DNA, 122 bp, Homo sapiens
agtcgccgtctggaaccagcgcgggaataggtgcgcaggcgcacagtggctggagggcagcggcggcgtggtctcgggccacttccaagcagagggcagcacctgtcccctcggaggcgctg

SEQ ID NO: 113846 - DNA, 122 bp, Homo sapiens
cccccacctgtatctgctttggggacccctactgagtccaaagtgcaggatctcaaattccggggtactcaagtcttctagggcagacagacccatctccagttgtgcgtgtggggaggggg

SEQ ID NO: 113847 - DNA, 122 bp, Homo sapiens
gctgggtcttctctgctgtcagggccacaaggtgaggcatgtatccacaacaccctcacccggagccttccctggctctccattcagcatcgaactccaggcagcacgcgagccaagctctt

SEQ ID NO: 113848 - DNA, 122 bp, Homo sapiens
gtcctgtttgtagttcccgctgtccccagcgtcctattgttcccccgtagcatcagtggccgcaggactacaactcccgtcgagccctgcgtgcgttcgtcctggaaagtggaggtggtgga

SEQ ID NO: 113849 - DNA, 122 bp, Homo sapiens
tccccctccgccacccaaacaagaagcccaggcagattctggccctggagtacaggcctgcgctgtcctgtgctgcgtgctattgtcggctgtggaatggccgccaaaatcccagctgtgct

SEQ ID NO: 113850 - DNA, 122 bp, Homo sapiens
ccagtccactaggggccactggtttcctttctgcccccacgctccctctctatcgcaattcgtcgcttgctagcagccgttgtctcgctggtgcctacgctgtcaaaggagccgctctaggc

SEQ ID NO: 113851 - DNA, 122 bp, Homo sapiens
aaaagaaaaacagtcccttggctaagggaccggttcttcagcccgccagggcgtcttaagcgagtcttcagacggattgagcgcgtctctctgggcgaatctgtccaggatccgtgtttagg

SEQ ID NO: 113852 - DNA, 122 bp, Homo sapiens
aggcctttgttaaggagaattcactgtgtgtttcacagtggttactcttccctccctgtgcgagagtcaggagatctttttggttcatcctgagaatcttgtggagttgctggaagtaagac

SEQ ID NO: 113853 - DNA, 122 bp, Homo sapiens
ctagggataagacagaaattgaaacagtaaaatagcatgtgatgcttactgtgatagagccgagcaaagctctgtgggatcgccaatgcatggaggcctaaccacctctaagggtatactgg

SEQ ID NO: 113854 - DNA, 122 bp, Homo sapiens
taaaatcatgcaacttttcacttgggaaataacacagttgaaggtggtgttctaactgcccggagtttctaccttctttttcactttctccctcaccccgacttcctccagcacctcctagt

SEQ ID NO: 113855 - DNA, 122 bp, Homo sapiens
gcggatcgcggccgcgcgcgcgcgcactcacgctgctctcgggcgctgggcggggagagccgcgcgcaccggttaattctgccaatcatgcgtctgggcctcccatcgtgtgggccaagccc

SEQ ID NO: 113856 - DNA, 122 bp, Homo sapiens
ggggagtcctgcaaggacacgcgccgcaggggtcaggggacagtcagcccagcctgggagcgcgcctggtgttagagcttgctggaattccgaggggagggacctagtttccctctgcacgc

SEQ ID NO: 113857 - DNA, 122 bp, Homo sapiens
ggcacttttgaatggtacaaagagcagcgcaggttggtggttgggagacaggctggagcccggcggtgatagcgctcgcccccgagagagacgagttcccggaacattcacagcagcccgac

SEQ ID NO: 113858 - DNA, 122 bp, Homo sapiens
ccttgctcaaaatattgcaaaggctcccaaacagatgagaaatatgacctgaatctcccccgtggtccacaggcctcacaggatcgaggtcaccgtcagcccacagagctcatctctggctc

SEQ ID NO: 113859 - DNA, 122 bp, Homo sapiens
gaagtttgaggctgcactgagctgtgactgcgccactgcactccagactgcgtgacagagcgagactctgtctaaaaaaaaccaaataaagtaaaataaaataaaaataaaataagattaga

SEQ ID NO: 113860 - DNA, 122 bp, Homo sapiens
tgcccctattgtttgtaaaaggtataactgccctgctgatgctgtgcaggggctcttgggcgtggcttggctcggcttggcataacatggctcaacatggcgctggtgcccagagaacgaga

SEQ ID NO: 113861 - DNA, 122 bp, Homo sapiens
tgttgtgcgctatgccgatagggtggctgcactaagttcggcatcaatatggtgaccttccgggagtgaggcactgccatgttacctaaggatgggtgaaacagcccagaaactgagcagat

SEQ ID NO: 113862 - DNA, 122 bp, Homo sapiens
ggttggacccgatcctgctagggagtctcctgcagcttagcagtccgggaactgggatttcggtggggaatccaaaactagcagtgattggatccataaaagttaccaaaaaacaaaaatga

SEQ ID NO: 113863 - DNA, 122 bp, Homo sapiens
caagcagggagtcgggtcgttgctgttggcgacgaaaggctctgaggctaaagccttgggcgtcgcccaaaccagcctctacttcgcttctgcctaaaaccacaccgttaggcgcctgggtg

SEQ ID NO: 113864 - DNA, 122 bp, Homo sapiens
ccgccagctggccgtcccgcagggccccggtgcagtgcagctgcttgacgcgctccaggacgcagtcgcccaccacctcgcccaggaagttgtccaggtagcagaagcccacctcgtgcaga

SEQ ID NO: 113865 - DNA, 122 bp, Homo sapiens
ccgccccccgagacttggctgggcccttttgtctgggctgcgttgctccccctttgtgtccgtgcatggagtctccgccacgggggagcctgttcccccggtccccaacagggactgctccc

SEQ ID NO: 113866 - DNA, 122 bp, Homo sapiens
aatggacgtatgcgccaatggacgtgtgcaccaatggacgtgtacaccaatagacgtgtgcgccaatggatgtgtgcaccaatagacatgtgctaacttttgcagcaactttattctatata

SEQ ID NO: 113867 - DNA, 122 bp, Homo sapiens
gcgggtggggtgggaagggggcgggtgcagccggctgagagcttgatgatttcctgccctcgcccggcgctcaccacagcttcctgccgcaggcgggcgggagggcgggcacggagaggcgg

SEQ ID NO: 113868 - DNA, 122 bp, Homo sapiens
cagggaggcagtcggccggcagagctgcggcgggagccaaggtcaggcccgcggggagagcgggcagcttccagcgccggccacaagctcccaggccagctgggccgcagacccctttgctt

SEQ ID NO: 113869 - DNA, 122 bp, Homo sapiens
ttctgaattaacaaggcatgagggaattctagctgtaaggctttctggtaaattttttcacgtgtctcagactttggaaactggcccagttctaatgaactatattgattagaaaaatatcg

SEQ ID NO: 113870 - DNA, 122 bp, Homo sapiens
taagagtaagtggacgtcttgtagacagtggttggaaaatagtcttacagcaaaagtagtcgaagcccatcactgggggatttataagtaggccaagggaaattgagggtgggcaaggattt

SEQ ID NO: 113871 - DNA, 122 bp, Homo sapiens
cataagttctattcctggtcctgcctggtcctccccaatgagcggagtctagaactgtaccgaagccagagtttgatagtcttgtaaaaagagagggccaacctatggcctgtgtttcgcct

SEQ ID NO: 113872 - DNA, 122 bp, Homo sapiens
ccgtgggcgttttccacctacaggcaggcgtctccgggggcggggcttgctcagggttaacgtcactactgagcgccgggcgcgttccgttggcggcggattcgaacgttcggactgaggtt

SEQ ID NO: 113873 - DNA, 122 bp, Homo sapiens
ggtctcggtcaaggtcagactcgatgtccgaggaagagtcagagctgatccgcaggcccccgagccccagcactggcaacggcggcgagctgctgctacacgagccgtctagattggtctcg

SEQ ID NO: 113874 - DNA, 122 bp, Homo sapiens
caagattattagtacttggatagactggatggtagagtgagtctgatcgccacatctctccgtcccttcctctggataggagggaagagaggttcctttttgtccctaggggggtaggctcg

SEQ ID NO: 113875 - DNA, 122 bp, Homo sapiens
acaggggccacagtgcctctcctcatcctcctatggcttttccagccccaggacccctcacgtatgcttgtaaaaccatggaaacagacttgttcctgccaggcacaccttcaccacttacc

SEQ ID NO: 113876 - DNA, 122 bp, Homo sapiens
gaaattatctttctgatccaggtaaagaagcaaattgaaaatcaataaagtaaaaagtgacggagattttaaattttctgtaataaaaacacttattgggttgggcatggtggctcacgcct

SEQ ID NO: 113877 - DNA, 122 bp, Homo sapiens
tgggccgcctgcggagctggagagctgaggaggcgggtcctggggcagcggcagcgttaccgcttgcaaaggcgccccttttttctgtgctgattttcgcctgtgagacttcctcccacggg

SEQ ID NO: 113878 - DNA, 122 bp, Homo sapiens
ctgtacaacacagccccaaagtggtggacagggtggcagtctggggtcccagacctgaaccgacccctggcaccacccctcaccccttgcttggccggccgcttctgacaccttcaagccct

SEQ ID NO: 113879 - DNA, 122 bp, Homo sapiens
aattaccacgattacaagtagaggggagagctcaaaagtaagaatctagttcaccgagcccgaccttaaagtagcaaggcccaacccacactgctggctattgtattggttccccaacacct

SEQ ID NO: 113880 - DNA, 122 bp, Homo sapiens
ggaagtaagtaaatgaaaaaaatacatacctagcaagagaacctgcccccaaaatttcagcgtaggttctattttccctaagtgtcggctggtctgagaaataaagagaaagagtacaaaga

SEQ ID NO: 113881 - DNA, 122 bp, Homo sapiens
aactaattcattcacttaagacatgtagcttttctacttaaaatagactacctgattattcggagctaaggaagaactaagtgggaacaatatttaaccaatctaacaattaggaaagatga

SEQ ID NO: 113882 - DNA, 122 bp, Homo sapiens
caccgctcggccatggcgagtgaaagacccggggctccggccgtcggagcacctgaccgccggggctacccgcatccgctgcatttgcggagaaatgcctcctccggcccgcccccctagca

SEQ ID NO: 113883 - DNA, 122 bp, Homo sapiens
taaactaaaattttgggtatatgaaagaaggcagcaattcagaagtaaagaagatactaacgtatttcatcatggaaggtcctgtggtgatggttttccctgggaaaaccttcagctgcttt

SEQ ID NO: 113884 - DNA, 122 bp, Homo sapiens
ttagctgactgtgggcccgaaggaggccggccatggggcgtcggccgcctctgaaggaaccgatggcccacgcccacagtacctacccgagggctcaaacgtgcgctgaaaacacgcccgcg

SEQ ID NO: 113885 - DNA, 122 bp, Homo sapiens
tttatgcttaggcataaatgtacacgggacatataaattaaatttcaacgccatggttcccgttgcttctctgttacctgttctttctcgccatgatccggagagcacgccacatcctcctc

SEQ ID NO: 113886 - DNA, 122 bp, Homo sapiens
tctcttttatagatacggagtctgaatacagtttgcaggcaaatcaattttatacacactcgtaaaaatggctgtctaattacagggtaccaactccagtgcacagcatctaagaactagca

SEQ ID NO: 113887 - DNA, 122 bp, Homo sapiens
cagggttggattggagtccttgctgattctgtggctgctgctagtgtcaggattttgtaccgatactgtcaatttcctcacctgtgaggaagacacccctggcaccagcgtcggtgttttgt

SEQ ID NO: 113888 - DNA, 122 bp, Homo sapiens
catgcagatgaagacgatgaggaggaagatgattctgtaagttgtttgtttttcctttggcgagagaagaccaatacagtataggctttttactaatcactgttagtctttttttgttggaa

SEQ ID NO: 113889 - DNA, 122 bp, Homo sapiens
ctaagggtgccagtggacactgctggctccccctggctagctgccagccctgcaggtgcccggtcagtcaggaggccctctgcatgtcctgccggtgccttcccacccggcctctcccagcc

SEQ ID NO: 113890 - DNA, 122 bp, Homo sapiens
tgtattatgaatgctggtggtttgtgtataaagcatttctcccagggtcttaagtgcgtgcgtgcgtgcgtgcatgcgtgtgtgtgtgtgtgcgcgtgcgtgcatgtggggctctcgggaag

SEQ ID NO: 113891 - DNA, 122 bp, Homo sapiens
agaggccctttctgcaaaccttgcaaacgtgagggcttcacgtgattgcaggactgacctcgtcctgaggttactggtgaccgggagagagagaagccggggagggagatttccctggagtc

SEQ ID NO: 113892 - DNA, 122 bp, Homo sapiens
cctggagaggtgctgggagctgggtggagcttagaggaattaaactttggccctgcgcctcgtccagcctaggttccacccttttctgggaacgtgagtatcaaccaaggtaggagaacgtc

SEQ ID NO: 113893 - DNA, 122 bp, Homo sapiens
tgttccagttccctcagcccaatggagacaaatggtgccccctcccttggttaggggcctcgttgggctacattccaaacccaacttctcacttgtcaccttgcctccctctcagcctcttg

SEQ ID NO: 113894 - DNA, 122 bp, Homo sapiens
aaagagaggtctgacacacaaatgtattattaaatagtaaattaggctgctggcttgatgcgggcatattgacagcgctgtgccctttgatgttcaaagggagaggcctataattacacttg

SEQ ID NO: 113895 - DNA, 122 bp, Homo sapiens
ggcccccgagcgccaatccgagcctcccgaccgtagccgccggcgaatcggtgcaggcaccgccctccactcccgcctctacggcagagttgggggaaaagttcagcaacttttttttcctt

SEQ ID NO: 113896 - DNA, 122 bp, Homo sapiens
cggccagcaagcccaggaaaggcgtttggagccacagccaccaggtgggcgtgggggacgcgagacaccgcctcacgtccctgaaatggccagaatgaaaaaggctggtaactccaaatgtt

SEQ ID NO: 113897 - DNA, 122 bp, Homo sapiens
cgcagctttacccgcgttgccccttccgtgcttcccattggccagtggactcccatgtaccgcccctccaatagccaatggtcttgagacaaagggcgcccgcctttccagcgattctaaca

SEQ ID NO: 113898 - DNA, 122 bp, Homo sapiens
aggtcggccgttagaaagatgccggaccatctactcatgtctgcttgacgccaatgcctgcgtcttcacgtgctgttggtgcgtcctcctgaattacttttgtgtcctttgacacgtcagat

SEQ ID NO: 113899 - DNA, 122 bp, Homo sapiens
aaagcggtcctcagccactcggccgccgtccgcacctcggctgctggcccggctgggcaccgggcatctgcgaagctagccctgcctggcactgggcatctccaggcaacgactgtccccgg

SEQ ID NO: 113900 - DNA, 122 bp, Homo sapiens
cttcccgtgggcttggtgtgtccggctgctctgttgcagtaccgcagaccaggggcttatcggagcaggcgtttgtttcccatggctccgggggctggaaggccaagatcaaggcctccaca

SEQ ID NO: 113901 - DNA, 122 bp, Homo sapiens
gggaggttgcctccaggcgggcctgggataggggacccgaaggggtcaaggtctgcgctccggtgccttcgggggtacccctgccccatcctcttccgcttcacccctgcaggacccagaca

SEQ ID NO: 113902 - DNA, 122 bp, Homo sapiens
ggtgttcgctactgtcagcgtggattcagcaaggttttgttccctcgtggcatcagtcagcgtggattcagcaaggttttgttacctcgtggcattaatcagcgtggattcagcaaggtttt

SEQ ID NO: 113903 - DNA, 122 bp, Homo sapiens
cacacagcttaggctcgaaccagccaatcggaatgcggagtcaccgggaaatttaaatcgcgccggccggctgcacgagccacacggtctttgagctgagtcgaggtggaccctttgaacgc

SEQ ID NO: 113904 - DNA, 122 bp, Homo sapiens
ggaatccctagggtgaggcatggaatctacattttaaaccagctcccaaggtgattgttccgcacagttccacgtcagtgtttgagagaggctctgatttattccagtcctctttctttaca

SEQ ID NO: 113905 - DNA, 122 bp, Homo sapiens
agcaggagtcgctattgcccttagcagccagctccgttaccccgggtcaccaccgcgccgcggaggggccctagaagtggaagccagagccctagtgcagtggcctcccggagcgcccagct

SEQ ID NO: 113906 - DNA, 122 bp, Homo sapiens
cagcctccacccccatccagatgggactcacgtggcttcaacagctttggaaatgggtcccgagtgggccgtgcgaggaaggctgtcgacctctactcctccttgcgctcaccttgccagaa

SEQ ID NO: 113907 - DNA, 122 bp, Homo sapiens
ggcgcggcggggcgccgcgggaacggtgcacattggtcgaaatctattgcttctcaagaacggtgtctacttaaaatgtgaaacaggccgggcgcggtggctcacgcctgtaatcccagcgc

SEQ ID NO: 113908 - DNA, 122 bp, Homo sapiens
acaaaacataagtcgagtgtgatggtgtgcacctgtagtcccagctacccgggaggctgacgtgggaaaacgggaggactgcttgagcccagggatactgaggctacaatgagctgtgattg

SEQ ID NO: 113909 - DNA, 122 bp, Homo sapiens
acctcaagtgatccgccctccttggcctcccaaagtgctgggattacaggcatgagccaccgctcccggcccaggtcctgttctaaacatgcacatagattcactcccaagaactctagaga

SEQ ID NO: 113910 - DNA, 122 bp, Homo sapiens
gctcagtctgcggcactgatgccctccacttggcgtctctcgcgccgtctttgggcccaacgcaccaggttcaggaaggccctgacgtgcctccgaccctctgtgaacccgcaggtttcggg

SEQ ID NO: 113911 - DNA, 122 bp, Homo sapiens
tctcccttcttctcctccctagaatgacctatcaccctccttcaggacctagatgcagggcgtttctatcttaggctgacacttgactccttgcctacatctatagcttggcacagagagat

SEQ ID NO: 113912 - DNA, 122 bp, Homo sapiens
gcagacgctgcctctctttgtgcccggcggcctggggttgggggagggatgggacggcagcgccgtggccaccacagctgaccgacgctgggccacacccggagtccgcagcttccgagacc

SEQ ID NO: 113913 - DNA, 122 bp, Homo sapiens
accccctcctccctcccctctcccctcccccttctccccgggcggctccggctcccgcagcgggacagacccacccgcccaggcttttatccggcaccggcagcgtcttcctttcctccccc

SEQ ID NO: 113914 - DNA, 122 bp, Homo sapiens
tctccgggccagcgcggctaacctggctgggagcaggggggcgttcggtggtctagtgcccgcctggccagagatgcaggcgggaaggtgagatggccaacactgggctcctgcctcgtgcc

SEQ ID NO: 113915 - DNA, 122 bp, Homo sapiens
tcccagacccccatgtggaaactgacactcaaaggaactcgggaagagtcccgacctagccgtcagctgtctcttctctgctcaccacctccaaatggcctgtccaccgggcctccccacag

SEQ ID NO: 113916 - DNA, 122 bp, Homo sapiens
gggcctcgggctccagccagtgcagcctggtgacgggaaggccccttggccactctgggccgtggggagggccgtccaatcccatcctggctccctatgagggtgaaggaggggcagggcac

SEQ ID NO: 113917 - DNA, 122 bp, Homo sapiens
ctaggccttgtgaatcagattaatcatcacccccacccccatctccaccatggggtctcgcgccccctgccagcaggctccagatgcactaagagaccggtccaaacaggcccgggggccac

SEQ ID NO: 113918 - DNA, 122 bp, Homo sapiens
gaggtttcggcctgagatcccgtgaaggcgagaaatctcgcgatttctcgggagaggaatcggttaggagaagggggattcctcactcagctgtgcgctctgatttcgtgcgcttcctcgtc

SEQ ID NO: 113919 - DNA, 122 bp, Homo sapiens
ttgcacatggagaccaagcctcccaacagcagtgcctcattttcagagcagcaggcacaacgctgcatccctgagtttcctcttcaagtcacgtgaacacaaccgttgctcttatttatgaa

SEQ ID NO: 113920 - DNA, 122 bp, Homo sapiens
gtcgggccgtgggaggtccggacaggatcttgaatggccctgtctgcggtcctggctggccggaggttgaccgcactggacaggtcaagggccttaaaccagggtagtgaggagcctgctga

SEQ ID NO: 113921 - DNA, 122 bp, Homo sapiens
tggcaggtggaggaaggcggattggtcatcacctccttgcagcaagaaacagccccagatcgtgggaaacctacagacctgctagacagactaggagcaaaagctggggctttaagaatccc

SEQ ID NO: 113922 - DNA, 122 bp, Homo sapiens
tgagcctccgtgtgagcgtgcaaccgtctgtgtgaccgtccgtgtaagcgtgtgaccgtccgtgtgagcgtgtgcacacgctgctgcccacaccctctaacacctgtctccttatcgtcaca

SEQ ID NO: 113923 - DNA, 122 bp, Homo sapiens
gtaatttcacatcatctgcaatatattttctggacactctgcccgactagtcctatgggacgttgtcattcatgtgcaaatcaggccctatatactaagggaggaaaacagttgaggacctc

SEQ ID NO: 113924 - DNA, 122 bp, Homo sapiens
gtgcacacgagcccgggaagccttccaagggcagcagggaccctcccctgttctccccggcgttgcccagggccgccgttacctggcagcacagctcccaccccttggcatggcaggcatca

SEQ ID NO: 113925 - DNA, 122 bp, Homo sapiens
tggagattttctttcccacttgggaaggaaagaggacacacaagttgaccggttgggatccggttcctgaaacctgagacaaggacaagagtttcactgaaccgttggctacagcttgccca

SEQ ID NO: 113926 - DNA, 122 bp, Homo sapiens
cagtttgatctcagactgctgtgctagcaatcagcgagactacgtgggcgtaggacccgccgagccaggtgcgggatataatctcgtggtgcgccattttttaagccggtcggaaaagcgca

SEQ ID NO: 113927 - DNA, 122 bp, Homo sapiens
cattctgggcaggtgcgggctccacttcatttccttatcagggccctgacattcctctcccggaagccacagctgtgctgggacaacttcagagaagcaaggaggacttcaggaaggcagct

SEQ ID NO: 113928 - DNA, 122 bp, Homo sapiens
ctcctgaggaataattaaggctaattttaaatatcacctcctgggtatcatcatcaccatcgttcccaggtacctgtctgagatagtccattttgaaatagatataccttaaattatgttaa

SEQ ID NO: 113929 - DNA, 122 bp, Homo sapiens
gtcttgccagtatatgtgtaaagctacctcctcgagtgggcttgaatggacactaactaccgtggggaggggggattagcagggaggagccagtaaacacaagcacccacaggtgtctgcag

SEQ ID NO: 113930 - DNA, 122 bp, Homo sapiens
cctggagctgggccccgtcctgcctccctgacctgtgtgctcccacagccctgagacggacggctcacagccttgcgaggcccacactgcactgggggtcaggcttgtgctcccgggagtcc

SEQ ID NO: 113931 - DNA, 122 bp, Homo sapiens
gtctgcgcactcaggccccttccacccagcgcgcctagctctcaggcttgctcgccccagcgcacgcgctccacctcccactcgcggtccccccgacacgcgcccccgtccacactcgccct

SEQ ID NO: 113932 - DNA, 122 bp, Homo sapiens
agggcactgttactcagcactggtcttgctgtgtctaaaacacacgcacacacacacacacgcacacactgaaagagactccgagaaaaaggaaaaaaaaggaaatgttctccaaagacatt

SEQ ID NO: 113933 - DNA, 122 bp, Homo sapiens
agcacacgtctcatcagtggccacaggagcaaggtgagggacttccagcctgggcagaggcggggcagccgaacctggtgccctccctgcctgccggctccatctccaccagcccagatgat

SEQ ID NO: 113934 - DNA, 122 bp, Homo sapiens
aagtccttgagataatcacaatctagactttgtcggcgaggagcacccatccggaggagacgcagtaggtcctggcatgtggaaggcaaaaaataaatgtttgttcaatgcctaaaggaacc

SEQ ID NO: 113935 - DNA, 122 bp, Homo sapiens
cagcaggaaagggtagggcctcccgtagtgcggtggcagggcttggaacgggtacctgggcgggatatctgccaaggacacaggggtcagcatgggagccctaggatctgatatcccatgtc

SEQ ID NO: 113936 - DNA, 122 bp, Homo sapiens
gggaccagtaacccatagcaaaaaatggactcagttgatcctgtgacccccttcaagaaccgattcaacacaagaagacagtttcaacagccctatgatttcatccctgacccagccaatca

SEQ ID NO: 113937 - DNA, 122 bp, Homo sapiens
gaataacgaattcaacttgctcaactctaagtgtccctgtggctggatgaagcccactgacgtggcctttcctttcccagtgcttctatctacaatatagctgagtgtacaacctggtatct

SEQ ID NO: 113938 - DNA, 122 bp, Homo sapiens
taaagaaaaaacaatcatatgcaaacctactacacaaaataattgctgttaacatttggtcggatgtcttttcggtgctttttcgatgaatatgtatgctgatctagcattatgaaaatgtt

SEQ ID NO: 113939 - DNA, 122 bp, Homo sapiens
gcatctccaaaacttcacgacagaggccaacccacctgggaacacagtgacactgggacccgaagccccaggaaggtgggctcactttcgttgttagtggtgtctccgctgcgaggtccatt

SEQ ID NO: 113940 - DNA, 122 bp, Homo sapiens
tatcaaggctcagaacccccgcgtctcccgcagtgcagtgaggtcacccagcgaacgtgacgcttgagcctcatgctgcgcccgcctccatggtccagccctgaaggcctcctgcgttctgc

SEQ ID NO: 113941 - DNA, 122 bp, Homo sapiens
caaaaattgacaaagtcggagcctaaacgtatcagaccgcggagatctgagaaaggatcccggacctgcagttgctacaggggtcaggagagagcaaagaccatgcggcatagcacggtgcc

SEQ ID NO: 113942 - DNA, 122 bp, Homo sapiens
aagacgcgctggaaaggcgttttctgccccctccgggcctcgggaatatttgtgggctgccggcggggcaggcggggtgggggaggctgcccggcgggcgggaagccccgcgcactcgggtc

SEQ ID NO: 113943 - DNA, 122 bp, Homo sapiens
tttttaaaaagatgatgtttattgggttaagtattagcagaatacataaatcatttagtacgtttcctgtttgcgtgaattctatttatgttggtcacattttgcaaattaatgttaaaacc

SEQ ID NO: 113944 - DNA, 122 bp, Homo sapiens
actgctagcaggagaatcggagagtgtgtggtaatgaaaagttatagttgagaaaacaagcgtttacatcagcaactaattaagaaaaaagcagctcataagtggatgaatgcagttcataa

SEQ ID NO: 113945 - DNA, 122 bp, Homo sapiens
cttgaaggtcaccaacatctggaaagtcaaacagaagtaatgctattggccttgtgttgtcgcataggatcagaacctgtcactcagtctctagtcaatgtgcagagagatccaggtctgaa

SEQ ID NO: 113946 - DNA, 122 bp, Homo sapiens
ggctttgtcatggaataatgtgagaaacacatttatccttccaaacccaaaggatggactcggagacacgcagtacagcagaagcaagacttttaatggcagtcttgcaagatcgggtgttt

SEQ ID NO: 113947 - DNA, 122 bp, Homo sapiens
gatagctggatccttttggtgccaggtgatggcaccagagagcacaggatctggtccccgcggcctctccagccgcccctgcaccctcactccccaccttcatgcggctgtagacggtggag

SEQ ID NO: 113948 - DNA, 122 bp, Homo sapiens
ggggtgcaggtgaagagccggcagctggacagccagcctggacctaggagagtgaggggccggcatcagggaaaccacaaagcatgataggaggaagcccggggcatgtaaggctggggtgg

SEQ ID NO: 113949 - DNA, 122 bp, Homo sapiens
gcggctggtgaaacgccgccacgactccaccgtcttgcccgaccagatccagacgcccgacgtgatgcccaccaccaggcacatgaagtacttgagcatgagcacccagtactcgggcttgg

SEQ ID NO: 113950 - DNA, 122 bp, Homo sapiens
gaattttccccactgtgtattgggggaggagtggcaactgtgcacaagaagctaagtcttcgctattattcactaatctgggaggagcaccgacccagaacccaccttctttccttcttcac

SEQ ID NO: 113951 - DNA, 122 bp, Homo sapiens
tggggatccgtggggcgggttactggggtcttgcttagacctccaggagtaaaatgagggcgataatggaagcattccttggcagtgcctagtatctctgtagttattttccacggctccga

SEQ ID NO: 113952 - DNA, 122 bp, Homo sapiens
ggaggggcacggcctccacgctgggagggatgaatggacgctgggccccggcaaatgaggcgctgtgggtccccaggaagtggggtaccaggctctactcccaccccggcctctgaaacgct

SEQ ID NO: 113953 - DNA, 122 bp, Homo sapiens
ctccggggcggaagcagctccgtaagatatacctcgctgcagaggggagcaacagcggaacggagacacggtggccgggccgaaaacgtcacaaagccgcagagagcgggctctgtcccgcc

SEQ ID NO: 113954 - DNA, 122 bp, Homo sapiens
gcgagcacaggaacttcttggtgtccgggtggcactgcttcatgaccagcgggatccaagcgccggcctgctccagcacctccttcatggtctcgtggcccagcaggttgggcagccgcatg

SEQ ID NO: 113955 - DNA, 122 bp, Homo sapiens
tctcaaaacacactctgtttcttcacactctacacaaaaaacaacacttttgacaccagacgtgtgaggattttcccccacacgccaagcagttctccacatatcaactcagtgtcctatag

SEQ ID NO: 113956 - DNA, 122 bp, Homo sapiens
cagaaaagaattctagaggctacatgtgggctgctttccccccttcttccttttttccctcgcaaaccaacaaccaaaaagtgtttggtgatggaaagaacaccagtggaaaacggcaaata

SEQ ID NO: 113957 - DNA, 122 bp, Homo sapiens
cagggacgacaacttggagagtcgcatctccgacacgggctctgcgggcctcatgctcgtcgagttcttcgccccctggtgtggacactgcaagagacttgctcctgagtatgaagctgcag

SEQ ID NO: 113958 - DNA, 122 bp, Homo sapiens
actatttcaccgacgggtgtacaacctctgccgtattgggagcaatatcatcctcaaccccgctggatgttaacaacacatcacaggggtgtttatgctctctacgatattgggtgtcatat

SEQ ID NO: 113959 - DNA, 122 bp, Homo sapiens
aagttacagggaggcagatgtttgtctaagacaaagaatcttctcggggtcagagctgtccgtgtggaccggaagcctggggagggagtgaacagcacaacctgagagaagtttgagaggag

SEQ ID NO: 113960 - DNA, 122 bp, Homo sapiens
tcagctgaggcagcacccggtacacagaagacagaagacatactcagctaaggcagcacccgatacacagaagacagaagacatactcagctaaggcagcacctgctacacagaagacagaa

SEQ ID NO: 113961 - DNA, 122 bp, Homo sapiens
agcggcctgggcctgcttccggctggacgggcgcaccctgctgcgcgtgcgtggccccgacgcggcgcccttcctgctagggctgctgaccaatgaactgccgcttccgagtcctgcggccg

SEQ ID NO: 113962 - DNA, 122 bp, Homo sapiens
gtaatggtggtaaggataaagggcaggggaggggaatgcagacctgatgctagggccaatcgcatttgaaggtggctcagcctctggtctgaccaagggtcactccctttcatcctctctga

SEQ ID NO: 113963 - DNA, 122 bp, Homo sapiens
gctgtggttacaatgcaagcaacatctggacctgcaaactcatgatgctgccacaagaagcgtgtgcaaggaaggtgggtggctggggaggcagtccagcatcatccccaaagtctttacta

SEQ ID NO: 113964 - DNA, 122 bp, Homo sapiens
ggaggcggaagttgcagtgagccgagataataccactgcactccagcctgggtgacagagcgagaccctatctcaagaaaaaaaaagaagctatgactttgtggcagttcccatggctgtca

SEQ ID NO: 113965 - DNA, 122 bp, Homo sapiens
aattgccacacacacagtgaatttggagtttggttcttaagttgaaaggggataaacaatcgacattgaatttgtacctcttatagctttgttgacttaatggattgtccccaacaatccat

SEQ ID NO: 113966 - DNA, 122 bp, Homo sapiens
ctccactgccacccctcgaaggacgtggacgatgccactctgtcccgcctggaactagagcgcaagattgagtctctgatggatgagattgagttcctcaagaagctgcacgaggaggtaag

SEQ ID NO: 113967 - DNA, 122 bp, Homo sapiens
caaggagcaggggtctcttgcaagtctgtccgcggagctccctgccaccagcactgttgccgctgtctttgtttactgcttgtcactaagcacttgctgcccagcgagtgagtcaacaaggc

SEQ ID NO: 113968 - DNA, 122 bp, Homo sapiens
cccctcgcccggtgactcagccggtacctctggcggggccatgggggccagaggacagcgcggggggcggcgagcgcggttgctaagctctccaaggcctcggagggacaggatctgggcgc

SEQ ID NO: 113969 - DNA, 122 bp, Homo sapiens
caggagggtgcagacgccggcggtggccgggcgggcgggctccccgcggtaattagcgcgcgccggctcgggctgcgccagccgctaattataagtctcctaatgaggccggcggctgtttg

SEQ ID NO: 113970 - DNA, 122 bp, Homo sapiens
cagtggggagaaattgctgttttaaaaacgaggccttggagttggaggcccaggagaggacgaagatgagattctgtgtgaaaagatgacaacccgctgtcaagcaatggtccagcacagcc

SEQ ID NO: 113971 - DNA, 122 bp, Homo sapiens
tccagcgagggagccgcggcatggagccacccgccctgcactgccagcacatgggcctcccgctcggctgcccacctagcatgcagaccacccagccctgcacacgtgcgctgtgctcacag

SEQ ID NO: 113972 - DNA, 122 bp, Homo sapiens
gtagttggggaaaatgaggaagcagcttttcaggtaactgttgacaaccttcaggtcctgcggggtggccggggtcaggggcacaggggtggccggggtgaggggcacagcctccgcagggt

SEQ ID NO: 113973 - DNA, 122 bp, Homo sapiens
ggtgcgtccatcagggatttcagggactccaatgagttattacccttgaatgcttggttccgcctgacaaccctgaaatctctgctgaggtgcctggtcttgaggaaggctcagcaagtggt

SEQ ID NO: 113974 - DNA, 122 bp, Homo sapiens
cgccgcgcggcgggcgggcggcgaggggctgggagcgctcggggaacggcatgcatgtgacgcagcttttaaaaaaggagacggaggcagagaccccagagagggagggcgaaggggagggc

SEQ ID NO: 113975 - DNA, 122 bp, Homo sapiens
tccatacatggaaatgtgcctcagaaataaaggtttctagaaggagatcacataacaacacgtgcacacgatttcccaagatgtggaaatacatgtaaagcctcccagagaggtcaaaaaag

SEQ ID NO: 113976 - DNA, 122 bp, Homo sapiens
ggcgcgcagccaccatgagcaccgccgccttccacatctccagcctcctggagaagatgacgtccagcgacaaggacttcaggtgcagcccgccgccggcccccttctctccttcccgctct

SEQ ID NO: 113977 - DNA, 122 bp, Homo sapiens
ccaaaccaaagcacccacacagtgagaagtcatgcacctagaaggtagggggagggggggcggaaacttctggcatcaccctcagccaacacccagttgggtggaagtcattcaggcgggaa

SEQ ID NO: 113978 - DNA, 122 bp, Homo sapiens
gactgacttcaaagcttttttctcctccaggtttctgaaagttgttttttgctgaaagcccggttcagagttctcatgtgtgttttggggacccagggcatttaccgaacccggtgagggct

SEQ ID NO: 113979 - DNA, 122 bp, Homo sapiens
tgactgcagcctccggcgcctctctccctgcaggttgttcctggtcattgagtacgtcaacggcggggacctgatgttccacatgcagaggcagaggaagctccctgaggagcacgccaggt

SEQ ID NO: 113980 - DNA, 122 bp, Homo sapiens
tacactgacttgcccagtcagccggcacctcagggaactttgggttttccactggaaaaccgcacactgtttttaaaacgacactgagctcagaagacctctcatgtgaacctagcactttc

SEQ ID NO: 113981 - DNA, 122 bp, Homo sapiens
caaccgtccaacctggccctagcagaggaaaggcgtcctcgtagctccgccattggaaatcggcttcatcctgccctttgtggcctcctgagagatttgtaaaccccacctcccttagcact

SEQ ID NO: 113982 - DNA, 122 bp, Homo sapiens
cgggcggcgccaccctccgggggcactaggtctggggccgcagtgcccagcacagagcagcgtttatcgggtgacgtctaggctgagtaattccgtgtgctgacctcagcccagtagtttga

SEQ ID NO: 113983 - DNA, 122 bp, Homo sapiens
ccgggacgggacctgcatcgggaactccagccgctgcaaccagtttgtggattgtgaggacgcctcagatgagatgaactgcagtgagtgacgccctttgctggcacctcctgggctcctcc

SEQ ID NO: 113984 - DNA, 122 bp, Homo sapiens
atagctacctggagaagcaggtagtaacattcctggattactcaacagatttggacacaacggaaaggtagaattttatttgaaattttcatagaggaacagagcaaatacatttaatagca

SEQ ID NO: 113985 - DNA, 122 bp, Homo sapiens
gacttacgtgtcaacagaaataagtttcttttccccatggtcagaggcataatcccaagtcgtttcaataattccaatgtaataatgcttttctttcgcccaggctggggtactacataaaa

SEQ ID NO: 113986 - DNA, 122 bp, Homo sapiens
ctcaggcgatctgcccgccttggcctcccaaggtgctggaattacaggagtcaggcatcgcgcccgactggtgagcagcctgttctaggaagtgagtagccagctgtgaaagagaaacaata

SEQ ID NO: 113987 - DNA, 122 bp, Homo sapiens
tccccttcaccctctgcctcttctcttttctgcgctgcgccttgctggccggctcgtcttcgctcacctccacctgggaggaaggtatgacatcagctcatgccagccctgcactaggcccc

SEQ ID NO: 113988 - DNA, 122 bp, Homo sapiens
atacgagacattaacccgggaggtcaggaagcctgatttccaggcctaagatgtgccaggcgtctccctccgggggcgggctccgcaagccgccgggctggttgctcgtccgcccgcccctc

SEQ ID NO: 113989 - DNA, 122 bp, Homo sapiens
aactcctgcgaaggtgtctttccttatttacctgtggttttcccgaaagaggctggatttcgacattttgagtctttttggaaaacccccagttgtttagagataaatgagaataaatacta

SEQ ID NO: 113990 - DNA, 122 bp, Homo sapiens
cacttcttggacctcaatttcctcatgtataaaatgaggctaataaagagacctataccacgtgggctggctgtgtggctttgataatacatgtaacaggcttattggcacagggttagagg

SEQ ID NO: 113991 - DNA, 122 bp, Homo sapiens
attgcacccccctcccccgcaacatccgtgagggttgtgggaggattggaatgtccctgccgccctccggggagcctggagccgggatggaacccgagcaggtggctggaagtagagagggt

SEQ ID NO: 113992 - DNA, 122 bp, Homo sapiens
aaccttttttctatcttcagggctgtagaatatattagcgtaacacttcactgaatgtgacgtaaaagcattctgatgaaaactggttctgttataattaagactcagtgtttaaaatatct

SEQ ID NO: 113993 - DNA, 122 bp, Homo sapiens
gctcagagccagttctgtggaagggtaggggaaggcctgaccccgggggcaatgtggtggcgggacagtcgtatacaccttcaggagaaccacctcaggctgacaggcagtgcggagggccc

SEQ ID NO: 113994 - DNA, 122 bp, Homo sapiens
tactagtagctcttacccggtgtgtgctgtagaacggatctagatcctccaggggctccccgatcagttctgctgggagctcaccatagaacttgggcagctggttgcaggctttcaagtcc

SEQ ID NO: 113995 - DNA, 122 bp, Homo sapiens
gaggcgagctgactggtggcaacgcagaccactaaagcttcagtgagcccagaaagtgtgcgctcagtcccacattgcagaggcctctccgtcagtattgagatggtggaaagtgaggagaa

SEQ ID NO: 113996 - DNA, 122 bp, Homo sapiens
gcctgagggctggggagggggaatccaccttcctggctgtagcctacggaaccagtcaatcgacacctctagacctaggcagggaataccgaggagcacaaaaaagaagatggaggtccctt

SEQ ID NO: 113997 - DNA, 122 bp, Homo sapiens
tggggagcttctgggaactggaacactgggtgtgagtgagaaggggcggaggggattgaacgtgaaatcttgagggaggaggggctggaatctcagactcctgaggctagggagaggaggga

SEQ ID NO: 113998 - DNA, 122 bp, Homo sapiens
gagccacagacgcctggcttctccggcctcccctcaccgcacagttctggccacagctcccgctcctgtgctggcacttctgtgctcgcagagcaggggaacaggactcagcccccatcacc

SEQ ID NO: 113999 - DNA, 122 bp, Homo sapiens
cctctgtccccgtcagttttagaattcctctttggtctttcccatgtttttcactccacgcgtgtagttgttgctaatgtatgagaagtagaaaagaaggtgagttatagaggccctagaaa

SEQ ID NO: 114000 - DNA, 122 bp, Homo sapiens
tgacagccaggttgaggatgaacatgttggtgacagtatgcatgtgccggttcttgagcacgatgaaacagaccagggtgttgcccaccatgcagagcaggaagatgagcgcataggccaca

SEQ ID NO: 114001 - DNA, 122 bp, Homo sapiens
tctccttctccccagttttaggattagggtctatgtatattctctctgtctctgtctctacgtctgtgtctctctctctttccctgtctctgtgtttcttccaaattataaaagtcagtagg

SEQ ID NO: 114002 - DNA, 122 bp, Homo sapiens
tccaccccgtccctgatgtacgtggggcacgcggtgcactacgtccgcatggaggagaagcgcaaaagccgcgaggcggaggagctgggccagcaggcggggactaacggcggcccggacca

SEQ ID NO: 114003 - DNA, 122 bp, Homo sapiens
caactcactgggtccagaatgaatccagtcctggcaccatcatttgcaaaagcgtgttaacgtctgcagattccttaacctttgggtaaatggtagtgataatcatgcctacttttagaact

SEQ ID NO: 114004 - DNA, 122 bp, Homo sapiens
tggcttctcagccaagggtattaggaaaccaaatgccaccaaggcctggtccaagcttctcgggcgtggaacccagcaccctgcgactcgggcagaaggttgcgacaatgtctccagagcgg

SEQ ID NO: 114005 - DNA, 122 bp, Homo sapiens
caaaagtaaagaaagcgaaggcgaagggcagctcaatgggaacgattcagggggtcttcccggctcccagcacccccaagaagatggctgccggtaaatctcgcgagaattgatgaagtctc

SEQ ID NO: 114006 - DNA, 122 bp, Homo sapiens
gaagatattggagaagaaacatcatcaggacaaaaatgacaggaggtgcctcctgaggcacgttctggctgtggcaggtgataagcctcaagcattttcataaggttttatagcaagtctta

SEQ ID NO: 114007 - DNA, 122 bp, Homo sapiens
tgatttccttctccacttcatgtaatccaggggattgagggcccggaccaggatctgagccgtggtctcctggtagaagaacagcggccggtactcatcacctgtgtgcaggggtcgggtgg

SEQ ID NO: 114008 - DNA, 122 bp, Homo sapiens
caacggtgttcccattgtttttaatccagtccaaactgactatatgtgggtcaccttccacgtaaagcagtgaatggtgtttcttgtagcttctttcacattttgacatttcacaggatttt

SEQ ID NO: 114009 - DNA, 122 bp, Homo sapiens
caaagggcggcttaacctcgcagctgcgcagacgcatgcagtccccgggctctcctgccgcgggacctcggcagacctaaccctgaacgccaccagcccgacctcgccccgcccctcccctc

SEQ ID NO: 114010 - DNA, 122 bp, Homo sapiens
ggcacttgcgcgccctatatagcggtacggtgccttccgcaggttcaaagcgtatgcacacgcgtcggttaaacgccccctattagcattcacagtacatctagttgtgagtgcgacccccg

SEQ ID NO: 114011 - DNA, 122 bp, Homo sapiens
ctgaggtcagcctgggcaacagggcggaactccgtctttactaaaaattcaaaaattaaccgggcgtggtggcaggtgcctgtaatcccagcacttggggaggctgaagtgggcggatcact

SEQ ID NO: 114012 - DNA, 122 bp, Homo sapiens
tgttttgtaattgtctatttacttgtctttgggcttcttaagctcaaagatatgctcaatcgtatctgaatcctcaacacctagtacaatgtctggtacacagtagctgtttcagtaaatgt

SEQ ID NO: 114013 - DNA, 122 bp, Homo sapiens
tcaccagatggccatcctgctcttggggtagtccagccgctccaggcagccgaggaagtgcggcagcgtgtgcgccgcgttgcgggcgaggaccgccacgagcaccgtggggctctgcaggg

SEQ ID NO: 114014 - DNA, 122 bp, Homo sapiens
aatgcaacttggaagaacataaagacggtgcatttttaaaaaggttgatatgattaataacgctaatgttatgataacagcaaacacttctatgcattcactatgtgtctagcaatgtatat

SEQ ID NO: 114015 - DNA, 122 bp, Homo sapiens
cattctgttaagtttctgctgctgccatgataacagagctcgctgtcacattctggctcccgcaggctgtgccccggacacaaagcaactctgtctttaccctcgtgagcgcggcttgggcc

SEQ ID NO: 114016 - DNA, 122 bp, Homo sapiens
acgaaggagttgccgaagccactgagccaggccagagccacgagctgctgacagagagcacggtgcatgagaacggcatagtgcaggggcttgcagatggccacgtagcggtccagggccat

SEQ ID NO: 114017 - DNA, 122 bp, Homo sapiens
atctcaatttgctttggaaggctgggagacaataccgcaatttgggggctccaggaaaatcgtttttgaatctaaagatctagggaagttgctcagagtccttggaggacttgggggtccat

SEQ ID NO: 114018 - DNA, 122 bp, Homo sapiens
ttctctaggttaaaagtttacatcactgacttccaaagaggaggtagcaaaagagccttgcgttgagagttctcctagtccagcttctgccatcagccagctgtgagcccttggtgatggga

SEQ ID NO: 114019 - DNA, 122 bp, Homo sapiens
tctcttcaaaaaaggagagatttgcttgtgtgcccatgggctgctctctcaccggtgggtcgtggttgcggagagtagaacccggaaaattcaggggttgcctgggggtaggtgttaccgtg

SEQ ID NO: 114020 - DNA, 122 bp, Homo sapiens
gagctcctttgcctggtctatgtttctctttgtcctaacattttttaactgctagcacaccggatcattgatctttcatggtttattgtatatcgtcttattcccctgctggaatgtcagct

SEQ ID NO: 114021 - DNA, 122 bp, Homo sapiens
gagccagccctgcctcagtagctcagcacccaaggccttctggaatctgtcagctgaattcgtcctgctgttccacgctatgcacttagtctctctctctctcaatctctccctctctctca

SEQ ID NO: 114022 - DNA, 122 bp, Homo sapiens
cgaactcctgagctcaggcaatccacctgcctgggcctcccaaagtgctgagattacaggcgtgaggcaccgcaccaggcccaaaatgtatttactaagtggcatctacatgctggttgcta

SEQ ID NO: 114023 - DNA, 122 bp, Homo sapiens
tggggctcgtctctcgaggttgcctctggcgcgagtgaaggccttggtgaaggcagatcccgacgtgacgctagcgggacaggaagccatcttcattctggcacgagccgcggtgcgcctgc

SEQ ID NO: 114024 - DNA, 122 bp, Homo sapiens
tctgattcctctggcttaaaccaaaatgcaaacatgaaaggaggcatggccatagacccccggtgagaattctttactgtgatgacacagaagctgaagagggatgaaaaagcagtttgacc

SEQ ID NO: 114025 - DNA, 122 bp, Homo sapiens
ctacagcaggtgtgtgccccatagtctctttccaagtcccagctgttctgtattccgaagcgcatctgggcacggaacgggggattgcgggcttgccgccggctcaacagccttgccagtct

SEQ ID NO: 114026 - DNA, 122 bp, Homo sapiens
ccgcagcccagaactcagtgaggaagggggccgcacaaagggcttcagaggaatggagaccgcgcctccaggtgggagtgatggctcagacccctaccggaatctagccagtgtttcagctc

SEQ ID NO: 114027 - DNA, 122 bp, Homo sapiens
ttccaccctcccaggctttctcttctactcgccgattccttccacttccccaccctatcccggaaaatccctaaaataagcagttgcactggcttagaaaacaaccaaaactttatggcaat

SEQ ID NO: 114028 - DNA, 122 bp, Homo sapiens
aatttctttcccaggaaagtctgtgacctgagattgttaatcttagacatcagaaaggatcgcacaagcaaatgtaaaattgaaactgttagaaaagctggaaggtgaggtttaggatgcta

SEQ ID NO: 114029 - DNA, 122 bp, Homo sapiens
gcgtgagtgggggagcgcgtgggagtgggggcggggtggggcagtcgggggtggggaacccgcaccccaaacctctgccagtagagaacccgaaccgggaaatgggtgcctcaagaaggccg

SEQ ID NO: 114030 - DNA, 122 bp, Homo sapiens
gggaagccccagggattagtaaaatcccagtgaatctgcttcctgtccaagagggtgcctcgttaggtaccaaaaacatggagggagcaccctctagtggtaaaacaaggtaacagaatttc

SEQ ID NO: 114031 - DNA, 122 bp, Homo sapiens
gcagttaccatatgccctggagaggtgaactttcacccacttaaacagaaaagaaaagcccggagttcctctcagagtcatgggctaacctccatccattgttagacggtggagccccagag

SEQ ID NO: 114032 - DNA, 122 bp, Homo sapiens
cgccccgcactgggcccgcccctccgggattggtgccctgctaggggtggttgcctgtgacgtcaccggacgcgcccgcttctcgctggagtgcgcaccgagcggcagtgacttcgccgctg

SEQ ID NO: 114033 - DNA, 122 bp, Homo sapiens
taaacaccccagtcctcagggactgcttgctccctctgtactttgcctctgccaggagtccgcccagccctggcaggctggaagctcctaaagagcagggcctgggtttactcttcttttgt

SEQ ID NO: 114034 - DNA, 122 bp, Homo sapiens
gcggtttcagctcaacttagcctcctccctcctcatgctaaacccctggccctccacaggcgtttggacacatctctggagacccaagtctttgtgtgttgctctcggtgtgtccacaagca

SEQ ID NO: 114035 - DNA, 122 bp, Homo sapiens
cacacccacacttacccgtaccagtagcgagggtcgctggaaatgcagtggttcagattccggtgggccagcgccttctttttattgaggacaaattcttgtaacttcatcttcacttctgt

SEQ ID NO: 114036 - DNA, 122 bp, Homo sapiens
gctagtcacccgggggtgggcaggaatagaccacttaccagcagagccaatgagagcggacgaaggggggaaggagggcaaatggccagaatagcttccgagtcagccggaagtgaccctct

SEQ ID NO: 114037 - DNA, 122 bp, Homo sapiens
tatgtagctgagataaactataacaacaaatgaggtaacaaagttgtcttcagagtttgccgggaggcaaactgaggtagatagtcagcaaaggggctttcaaaagtcttccctttgctcca

SEQ ID NO: 114038 - DNA, 122 bp, Homo sapiens
agtttgttatgtaggacatctggtgtttacccttggacgccttgtctctctcattcttaacgccttatcaccaaaactggtaaatttggatgcaaatatatatgctaattatcctatcactt

SEQ ID NO: 114039 - DNA, 122 bp, Homo sapiens
gttgtgcgtgccgacgcccgcgtcagcaaagagcggagctgagggtacccggtttgaagtcgtgcgggtcggaggactgccgcctccgctaccgtcttggacccctgcttaccggccgccgc

SEQ ID NO: 114040 - DNA, 122 bp, Homo sapiens
tatcttcccactgggaccggccttatattccagagaggtggcagcattcccactccccttcgtgaaaccagagaacaaattctggccagtgattgcccggattgatgacatatatggagatc

SEQ ID NO: 114041 - DNA, 122 bp, Homo sapiens
ggcagttttccaagcccggtagcgcccccacgcggcaggacgcccaggcgcgcggagacgcgacgggcgctgatcgcggtccctcttgtgttcgctctctccacactcaggagcaccagcat

SEQ ID NO: 114042 - DNA, 122 bp, Homo sapiens
cttgtccggcgggagcagtcaagctgtggctgcctaggctgaatcagggggtcgtgactccggtgcacagcctgcctacgcgggacgcaaaagcagggctgcctgcggtgccgccatggggg

SEQ ID NO: 114043 - DNA, 122 bp, Homo sapiens
cttggttgctgaggcaaccatggacctgttgctaggagatagctggggaaggcccaaggccgcccagggcagagagaggagacgaagagtttgggacagtgggggaggagatgggaagggat

SEQ ID NO: 114044 - DNA, 122 bp, Homo sapiens
atcaggtagcctgggctataaggggctctcagaccagcttggttccagatgtgtgtgtggcgggagtcctgtatactttgaagaggagagcagcaagaagcctctaactcccaggccagcgt

SEQ ID NO: 114045 - DNA, 122 bp, Homo sapiens
cgctccccgcatccctccgccgcccccggggccgctcccgcacgccgccgccgcccgtcccgcgctccgcggccccaggtctccagccggcgggcactcacatcatctctgccatcaccgcc

SEQ ID NO: 114046 - DNA, 122 bp, Homo sapiens
atgctgaacatcagcgccaccgcaaaaatggtgttcccaaatgctcccacaacatctgcccgaagaaagccgtaagtgctcttcttgtgctgttttatgttactggcccttacaccaaaaaa

SEQ ID NO: 114047 - DNA, 122 bp, Homo sapiens
cctccttcgcccacagcttccaactacagatccgctgctttactattagctcccggtgcccgacacacagcaggcgttccgaaattgttttgttcaaggaattcacaagagtttgatgtgaa

SEQ ID NO: 114048 - DNA, 122 bp, Homo sapiens
tgtgtggggatataaactctagcatagaggcattcatgtgaggggcaagaatgagagccacgggcattttttgtttagacagatgggactgggtcacatgatcccctttctgtgggtcagtt

SEQ ID NO: 114049 - DNA, 122 bp, Homo sapiens
atttccacgtgggagaggctgagtttactcccaatatcgcaggggttatatacactccttcgatattgttcctaatatcgggggggaggagaggatgatattcctccctgtattgtagaggg

SEQ ID NO: 114050 - DNA, 122 bp, Homo sapiens
tgtgtgtcctgtctgggagctagtgtgaagtgttgtctcagtgtgcgctgtcctcagcgccggggctccaggaggctccactctgacttaggcttgcaacaaggcccagcacataagggttc

SEQ ID NO: 114051 - DNA, 122 bp, Homo sapiens
ctcttccctccaggatcatgggaacaatatccctggggggtgtacactttctgcgatatacgttgtaatatcaccccctccgccttggaatattattaaggaccatctcacacgggggtgta

SEQ ID NO: 114052 - DNA, 122 bp, Homo sapiens
ctctggccccggagagtgctgagaggcagcgtaccctgcagaagagtggcagtcgctgagcgtgggggacggctcagtaggtacctcggccacagtcctgcccgtccacatgtcctgcagaa

SEQ ID NO: 114053 - DNA, 122 bp, Homo sapiens
cagccaggagaggcctggagaccagaggcttccagcagggagggagggggcaggtggcagcgtctgcagtggaggaagtgctgccccatgagaagcacagtccgtcctgtccagactgccca

SEQ ID NO: 114054 - DNA, 122 bp, Homo sapiens
tcatgaggagacagtggctctgtggtcccctgtgattatcttttcaattaaatcctcagacgcggccaggtctccatttataaattcataagaaaagcctacagacctgcggtggctgtcca

SEQ ID NO: 114055 - DNA, 122 bp, Homo sapiens
ttctcattgactgctctttgacatcaaaatcctcattttacagaaggggaaaatggaggccggagaaattaagtaatgtgtctgctgccactcggctgctgagggtgggactgggcccggag

SEQ ID NO: 114056 - DNA, 122 bp, Homo sapiens
gtctgccgtgagtgcagcttatgtgccactggcaagcacagcggctgccagagtggaggacgtgggccacctgtgctggaaacaccttttgggatgtgtcggggtagcgggcggcctccacg

SEQ ID NO: 114057 - DNA, 122 bp, Homo sapiens
gttctcgggcctgatcgtgactgcacctgtctggtggctctttgcagggaagagaaggaacggtggatccgtgccaagtacgagcagaagctcttcctggccccgctgccctgcacggagct

SEQ ID NO: 114058 - DNA, 122 bp, Homo sapiens
tacctcaaaagaatgtcttctttgctgactcaaagttggaatcctccccgaccccttctgcgattctctggttacgtgtatgatgggaagaattgagtcctgtctagaggtttccttgacat

SEQ ID NO: 114059 - DNA, 122 bp, Homo sapiens
cactgcagcggaccactatctgatggagcgcttccttcatcagtgctaatatccatgtagcgaaacaatgaaagggtttcctatcagttccaaataggacgtgaaaaactctcagtgctaag

SEQ ID NO: 114060 - DNA, 122 bp, Homo sapiens
tgtttggctgagaaataaattagctgagtgataaaatcacaagcagcgtcttaacaggctcgctcacatgttcactaggtccatctcagcatccttcatactgacttgttttgaagaggaaa

SEQ ID NO: 114061 - DNA, 122 bp, Homo sapiens
ggtttctgggtcccagccacctgtttcacattcctctttcaccttctttcttcctgggtacggtgaggctcctctgatggaaggtaagatggctgccatccttcagttatcacagtactgta

SEQ ID NO: 114062 - DNA, 122 bp, Homo sapiens
atggtccacaacgccaagttcctacccgggcactgagctcaacgctcgcacaactccaaacgagggcgcaaccatattcccactgacatcctccttggggcagcaagacaagctccgaacag

SEQ ID NO: 114063 - DNA, 122 bp, Homo sapiens
caacttaaacagcaatatcaaaaacgggacaactaacatgggtacaatccagagactgctcgcctgccgccagctcacagacacttccctccatgtctactcccacgtgatctgtcatatgt

SEQ ID NO: 114064 - DNA, 122 bp, Homo sapiens
ttactcgctcgctctggccctgagtgcatgttcgtagtacccagttgggccgcaggggggcgctggcaaactgctgtttgagaccgagaagcgtggtgggtggagtcacgtcacgcggcctg

SEQ ID NO: 114065 - DNA, 122 bp, Homo sapiens
tcgccgccgcccctcctccccggccagggccacctccacgttccgttccaacgtggcagccgcagccgcagccacgccctgcgcccaacacttccgggagcgacatctttccccgcccaccc

SEQ ID NO: 114066 - DNA, 122 bp, Homo sapiens
caacaagtgagactccatctcaaaaacaaataataaaataagcaacgggcagcttgttttcgttttgtaatatatttttttttgagagcccaggaggcggaggttgcagtgagccaagatcg

SEQ ID NO: 114067 - DNA, 122 bp, Homo sapiens
actgtggaggaggcgggggccaggtccccgcgcccgggcggccagagggtgcagggggagcgctagtgcctgctgggatggcccacgtaccgctttgccacctagccagaaaggcaaggtgc

SEQ ID NO: 114068 - DNA, 122 bp, Homo sapiens
cctgctgctgcctgcacggtgagaacagagatgagatggcccctgcccgggagcagtcagcggcaccacaaccctcccaggccaacccagctcctgacagagagggagggaggcagcctggg

SEQ ID NO: 114069 - DNA, 122 bp, Homo sapiens
cagctatgtccactgctggggagtacggcatgcgcatgagggctgaggggtggggcaggacgggccaaagctgcctgagccagggatgccttcacaacctcgctgccccagccagaaaagtc

SEQ ID NO: 114070 - DNA, 122 bp, Homo sapiens
catggagaacctcctggcgggcacctccaagggggatgaaagctatctgctcaggctggccggcagccaagttcactcccaggctcagcaaatgctggggagggggctgcgccctgaaagcc

SEQ ID NO: 114071 - DNA, 122 bp, Homo sapiens
caccaaagctagagaaaaccagaaggtctgggtcccaagttcacctccatttgtgcctaccgtatgatagagctacctgcaggtcatctgttctagggaaattgatttatgctttacaaatg

SEQ ID NO: 114072 - DNA, 122 bp, Homo sapiens
gcaccgcaagcacatgctgctttgtttgggttgggtcgaccaccactagcagggctagggcgcactgtcgtggtcgttttggttggccccctccgcggcccgcccacctctctccctgggag

SEQ ID NO: 114073 - DNA, 122 bp, Homo sapiens
cagtgtcccacttccgtggagagagccgctggaatggtgtggacccatcccgcgggtgaccggtgcctgttctcccctgaccgagcctgtgagcacatcgccccctgctggcgacagcgggg

SEQ ID NO: 114074 - DNA, 122 bp, Homo sapiens
tgcgttcggccggtcctggcgcccgcgtcccgcacggcctctcggcgccgctcccgccgccgctagtcgcctccgccaccgctgtcctccagtcccagccgccgagctctgccgccccgccc

SEQ ID NO: 114075 - DNA, 122 bp, Homo sapiens
gtggtgggaggtgaaaggtcatagtcctgtttggcggccatttctcttgaaactgcggctcgggacctgcggtacctgctgtagtcacgagggacgggcggcggcctggtcggcagagagta

SEQ ID NO: 114076 - DNA, 122 bp, Homo sapiens
gtaatcaccaccctcagccaggccaggccggtgctgattagagagcccggaaccacgcgccgctaattagtggccccgatcatgggctggcgaggccgtaacttcccaaagcctcggttcat

SEQ ID NO: 114077 - DNA, 122 bp, Homo sapiens
cagtcaccatagaaaagcatgaatttgatattcagaaagctattttttccattcattattcgtgattttttaaaacttgcttgatgactttcctagtctgaggaggtctctaggactccaag

SEQ ID NO: 114078 - DNA, 122 bp, Homo sapiens
acccccagcccgcactttgctattcaccctgtgctgatccccaggcagagccacacttcacgagagggtcacactgtatgtatacccagggaataagaggtcacttcaagtcgcttagttat

SEQ ID NO: 114079 - DNA, 122 bp, Homo sapiens
tagggacctaccagaccccaggatcctctgccgctccttcctgcatgaagctgcctctgacggctctagctcacacttctccatcagggcttcattgcctgtggctcagtctgtctgtctcc

SEQ ID NO: 114080 - DNA, 122 bp, Homo sapiens
catggatacagacaccctcctaccatgatatccgcgccgtgggtacagacgccctcccaccgtgatatctgcgccgtgggtacagacgccctcccactctgatatctgcgccgtgggtacag

SEQ ID NO: 114081 - DNA, 122 bp, Homo sapiens
ccttacaccatgggtgcttttgttatttaccctctttggtcttttgaaaaacatctttatcggagctgagagtctcccatcatttatgcttatagagtccttttttctgaagtcgtgaacgt

SEQ ID NO: 114082 - DNA, 122 bp, Homo sapiens
aaaataaagtgtttaatgtgtttgaggttgaggctcttatttcgagccagggctaggatacggcctggagtccccacgacgatatgcgggcagttcttcttcagcacctcttcatccttctt

SEQ ID NO: 114083 - DNA, 122 bp, Homo sapiens
cagctcggccctcagtccccttcagccataagatggcggctgagctgacagccaggaccccgggcgtcctgtctcctccctgcgcggtgactgtgccatggcctggagctctcgctgggcag

SEQ ID NO: 114084 - DNA, 122 bp, Homo sapiens
ctgaggaggcaagaacctgtttggagtcctactgcctgagtcccagggctgtgtccatggcggggcatctagggggaaggggagggctcctggcacgtgccgagccctcacggacgctcggc

SEQ ID NO: 114085 - DNA, 122 bp, Homo sapiens
atgtggacccagacagagacacataaggaagaagccgggatgacagcggcggggagcgggcgacacagcaatgccgaggatttctagccaccgccagaagtgaggaagattgaggaagaacg

SEQ ID NO: 114086 - DNA, 122 bp, Homo sapiens
gcacagcagcaggtatcggaatgtttgtgtcttaggcgggcgcaagacacttgtctaacccggagctggctgtctctaggaagctagttttcattcctagggcacatgctattgcctcctgg

SEQ ID NO: 114087 - DNA, 122 bp, Homo sapiens
attacttgcattcttactttagttttcagaatctgaaggtaagaagttacttgtctttgacgacaatgaaagagagagagagaagctatttccccaggcctagaaagaaaacacagatctag

SEQ ID NO: 114088 - DNA, 122 bp, Homo sapiens
gatttatcagcccctctgaggaccgccaagcctggctaagccgagctccaagcaatggatcgcccaagcccccaacctctcccttcctacctttttttctccgaaagtttataactggtttt

SEQ ID NO: 114089 - DNA, 122 bp, Homo sapiens
aatgacacagcaataatgcttcatcatgtagaagttggtttcaagtttttttttttttttcggtctggatagtgtgattgcaagaagggaggctatgctagcttggttataagcagggaagt

SEQ ID NO: 114090 - DNA, 122 bp, Homo sapiens
cattgtctctggcctgtgggatatttaccgagctttaaatcctaggcaccctttgggagccggcctgtgtgcagagctccccttagcacggtggcacaaagcttggacaccacctcttgtct

SEQ ID NO: 114091 - DNA, 122 bp, Homo sapiens
ccatatgtgtgtccattttgtttttcagtctgttttctctacgagcctaaactatgaggacgagggatgtgcctgttttatttaccactacagtgcttggcatattaaggatcttcagttgc

SEQ ID NO: 114092 - DNA, 122 bp, Homo sapiens
gttgcacatggttccgctggctgtggcattaatttcagagagtgcaaatggtgttcaccacgcatggatggtgacataaaccatgcaaaggagcttgggttttattctgaggccagtgactt

SEQ ID NO: 114093 - DNA, 122 bp, Homo sapiens
gcactcctggctagaaaggatcagttttaacactgtgtgtaaaaatgtaccttgctctctcgcataggctggagtgcagtggcgcgatcttggctccctgtaacctctacctcccaggttca

SEQ ID NO: 114094 - DNA, 122 bp, Homo sapiens
gttgttttgttttgttttgtttttttctgttgagacggagtctcactctgttgctcaggccggagtgcaatggcacagtctcagctaactaaactctgcctcccgggttcaagctactctcc

SEQ ID NO: 114095 - DNA, 122 bp, Homo sapiens
agaaattgcagtgagctgagatcttgccaccgcactccagcctgggcgacagcgagactccgtctcagggggaaaaaaaaaaagcaagcaagaaaatacggaaaaaggccgggtgcagtggc

SEQ ID NO: 114096 - DNA, 122 bp, Homo sapiens
acagcagaattgtttgatagcaaaatgtgcataattttattctgacagcctgtcctataacgtatcaaactgctttgctaggctgagcagtcatgattatgtgttgggtacaacaggaaaga

SEQ ID NO: 114097 - DNA, 122 bp, Homo sapiens
cagcggctctccccgtcccacagcactgtgtgcagcgtggacagcagggcccggatgttccgctccttgccctcaatccagtccaggagctgcgggagacacggagcttgccgagccctggg

SEQ ID NO: 114098 - DNA, 122 bp, Homo sapiens
agagtgcccagctgggaaatgcagctccgaattaacatcgtatgtttcataatcagtttacgagccgatgtggggaaagccacttccagatggggaagagcagcccggatttccttaaggac

SEQ ID NO: 114099 - DNA, 122 bp, Homo sapiens
cgccacgcgcccctcgctgctggcaaccacagactcatgccctcggtgctccgcatctcgcggtcccagctgcagcaggtgtgggcccggttcacccacaagacctaggctgggcccccccc

SEQ ID NO: 114100 - DNA, 122 bp, Homo sapiens
ttcttcctcagggagtcactgcccaaccttggtattgtagggtgaccaagaggactacagcgaggcgctcatcattttcctgggcctgcccttgggggctggaggtaaccttagatagcatg

SEQ ID NO: 114101 - DNA, 122 bp, Homo sapiens
ccctcccctgcccacccccctctcccagtatcattgctctttgaaatgtcatgaacttggcgctttcagaccaaaccgccgggctcaggcccgagacaatgggattgtcagagggccagcgc

SEQ ID NO: 114102 - DNA, 122 bp, Homo sapiens
gctgttgttccgggagttgcagcctccgccattactgtttatcccacacagcaaaggccccggaacttccgggatcacatagttccggtccggctgcggggagaggacggcgaggccaggcg

SEQ ID NO: 114103 - DNA, 122 bp, Homo sapiens
gtctgctggggtcacctgccgggcctgggcgccgggaccggcgtgggcgtgtgatcctggcggttccccgcgcctcgcagagtttaaatggctcctgcccggagtccctttcccctccccct

SEQ ID NO: 114104 - DNA, 122 bp, Homo sapiens
gcgttgtatgctgggacttgtagtctcgcccttagccagacccctcggaccacttaagttcggctacattcaaccacgtccttacaccgataacgtacacccattggttgtctagcacagaa

SEQ ID NO: 114105 - DNA, 122 bp, Homo sapiens
gaatctggctgccctgaggtgccgccgcggccgccgccgccaccgccgccgccggtgtagcgctggagcttcctactagcgaactgaacctgctcgctactgagcatgcgctgccgtgctgg

SEQ ID NO: 114106 - DNA, 122 bp, Homo sapiens
ggcctgtgtgggaatctccttcccttttgtggggaactgtgtcccgctgtgtgcagggaccgcatcgaccgcgtccgctcatctgtgggcatcttgatggacacctgggctgcctccccttt

SEQ ID NO: 114107 - DNA, 122 bp, Homo sapiens
cgcgagccagcgaccccgcccgggcctgcgggaggacggaaccccagccccgaggacccgcgagcacccacgacctcgccggggagtgggcagctgccactcccacctcccctggcacttcg

SEQ ID NO: 114108 - DNA, 122 bp, Homo sapiens
taatccttccgcaccatctgagcagcactgatatccctgacccaggattcccatgggacccgccttggccagccatgacttgctccccccaacccactatgcaacaggaaggccgatcagcg

SEQ ID NO: 114109 - DNA, 122 bp, Homo sapiens
agaacttccgtctgtcccaggatgacatcaagggcattcaggagctctatggtaaacctccgggcgggggttgggggtggagggtgaggaggggggaggtcatgtagcctgggatggaggcc

SEQ ID NO: 114110 - DNA, 122 bp, Homo sapiens
cctctctgtctcagtctgttgctctctctgtttccatcttttgctctgtatttttctgcccgcctctcttctttttctgtctgagtgcacctctgattttatctcctcctctgtcacacagc

SEQ ID NO: 114111 - DNA, 122 bp, Homo sapiens
ccatcaccatctactgccaggcatcggaggagttcctgaacggcagggcagtgtgagtcccgcgggcggctggcaccggcctggctgggggccccagactcctgggggaggcttctgtccac

SEQ ID NO: 114112 - DNA, 122 bp, Homo sapiens
cagacggtggcgcaggggacacacccacaggggttcctgttccttggtgtgtggtcctggcgggggagctgcgggtaggggcctaacgagagaaccccgggccagggggcagcaggggtgag

SEQ ID NO: 114113 - DNA, 122 bp, Homo sapiens
ccgggaaggaaggagggaaagggaaactagtgggggtaggggggaagaaaggagaaagtccgaagtaagcatccaggtcccaaagcacagctcagtaaccccccgccgcaagcagtattaat

SEQ ID NO: 114114 - DNA, 122 bp, Homo sapiens
gcagtactccagcatgcaacaacatttggagctcaaattggcgccaccctggaaaactcccgatttgacctctttcatacccagagccaagtgggagtggaatagattgatgctgggtggga

SEQ ID NO: 114115 - DNA, 122 bp, Homo sapiens
ccattcggttgcctcagacaggacagaaaccattccctctaaaaaaatcgtttactttgacgataggtagcaacgaagcacggaagaatcttgaccctttgaggaacccgtaactgacgcaa

SEQ ID NO: 114116 - DNA, 122 bp, Homo sapiens
atcttggttggaaaccggctgcacctggccttcaagcggcaggtcccgacggagcaggcccgcgcgtacgcagagaagaactgcatgaccttctttgaggtcagccccctgtgcaacttcaa

SEQ ID NO: 114117 - DNA, 122 bp, Homo sapiens
aagagattcaaagaggccccaggccattggtcaaatggtgccctaggcaccaaaaagaaacgaagattttgagtatagcagggtttctctcttgtccctcccccaacccctaaaggatttgt

SEQ ID NO: 114118 - DNA, 122 bp, Homo sapiens
tcccccgtcctgctctttgctccgtgagaaagatccacctacgacctctggtcctcagaccgaccaggccagggaacatctcaccaattttaaatcaggtaagcgacctctttttactctct

SEQ ID NO: 114119 - DNA, 122 bp, Homo sapiens
ggggaagggggagatcctgctgcactggccgcccaagttggggggcgagctcggtggtgacgcgcggccctcacgtgacccagagctgcagagcgacgcagccttcggtgcagtcgtcactc

SEQ ID NO: 114120 - DNA, 122 bp, Homo sapiens
cggaatcactccccctctccagggtgtgtgcttacacgcctctcagtcagcgcaaaaatccgccaaactcaggtcagcctaacaggtttccttatataggtaaacatgaattgcattcctgg

SEQ ID NO: 114121 - DNA, 122 bp, Homo sapiens
ctgcacctggggaacaccgccacgcccccaccgcatccccctgagcctgctgcccctcaccgcacacacctggggaacactcacacgcctccacgcatcgctcccgagtctgctgcccctca

SEQ ID NO: 114122 - DNA, 122 bp, Homo sapiens
accagaggtggctgtatcacatatgtgaggtcaggccattaaaacctacacacttaacttcgcagttccttgctgcttaaagaataagagctctaactccttagcatatgagaatcttcata

SEQ ID NO: 114123 - DNA, 122 bp, Homo sapiens
gactgcgtcgcctcgggtggcaggtggcggtgcgggcgggcgctgcaagccggagaggggcgcgggagggcgagtttcggctgtggccctgggactccgagccggggcgtctcaggggcaga

SEQ ID NO: 114124 - DNA, 122 bp, Homo sapiens
ggaaatgcactgtaggaactcactaactctttcacagccagatgtaagtgagagtctgggcggcaaccccacctactaggaaactggtccaccaagctcaggataaagcagatttgtggaat

SEQ ID NO: 114125 - DNA, 122 bp, Homo sapiens
ctaaactcttatcagtcccctccattttacccactagacctttttgggggtccctttggtcggcttcccccgtgctcccctccgccctctcctccaggtttatcagccttgcttttcaggtc

SEQ ID NO: 114126 - DNA, 122 bp, Homo sapiens
tgatgtctggagaacaaggtcagagtgtgttgaggttaacagtggggagttcttgtgtctcgttctgtgcttacattatcccatggctctgtgaggcggacccatcacctgggcaggaagag

SEQ ID NO: 114127 - DNA, 122 bp, Homo sapiens
gagaaaaattcaagccattaatggatcaagtgaagtgtatttccagcttaaaggactgcacggtttcccagagtcataatcttcattcactgagtctctcagcaaagactcaacatgaggga

SEQ ID NO: 114128 - DNA, 122 bp, Homo sapiens
tccagcgtctgccagctccactgcacaagctgcggcagccgctgtccccgttcgcttccacgggagtcccagcaagactatgcgacccagttcaaataccatcttccatgtaccgttcgtga

SEQ ID NO: 114129 - DNA, 122 bp, Homo sapiens
ggtgggggtgcggtgcgggtcgcaggagtcgaggggtggggagcccgctctggacggccgcgtgcgcgcgcgcccccggctcggccaagggaagcagggagggggagcttctccgctacacg

SEQ ID NO: 114130 - DNA, 122 bp, Homo sapiens
cagatagggaggctgagagacttgtcccaggtgaaggatgggacttgcactcatgtcccacggacttcaagactcgctgggctccttgccccatattagagcattaaggacccgccctgcaa

SEQ ID NO: 114131 - DNA, 122 bp, Homo sapiens
aggggacggaggggagcggctgccgggcctgcggggcgggagtgcccgggactgaggacccgcggccggggaggcagggggctcccagagccagagcccctccgggtgcgggaaggtggggg

SEQ ID NO: 114132 - DNA, 122 bp, Homo sapiens
gtaccctcagcataaggtagtctccaacacaagatgctccatagatggtcactgaatacacgaacagtaagtggaaataatgaggaaagacaccaaggggcagccagggcagcactgtaaaa

SEQ ID NO: 114133 - DNA, 122 bp, Homo sapiens
cgccgccgcggctttttgctgccgcgactttttgccccggtcgccgccgctttttgtcaccgcgactttttgcccccgccaccgaggatttttgtccccgccgccacggctctgagggcagg

SEQ ID NO: 114134 - DNA, 122 bp, Homo sapiens
gaggatgtgataaagtgtagaggtaaacgaagtacttaagtacgtatttaactatttaaacgaaagacctccccaggctaagaggtagccctatttcctagactgacttgatcttgagcttc

SEQ ID NO: 114135 - DNA, 122 bp, Homo sapiens
cagttccctctcaggcagagcaattccgacttttatgttttatagattttgtttccaaaacggattttgtttgcagagaagttctattttaacaagtttgaaaggcaaggaactagccaact

SEQ ID NO: 114136 - DNA, 122 bp, Homo sapiens
gcggggggggcgggccctccttagcgtcccagagggcttgtctgctacaggggctcccagcggcctcccgcaccgaagggaccctgggcgtctgaggccctgatccgggcgggccttcagga

SEQ ID NO: 114137 - DNA, 122 bp, Homo sapiens
agtcaactgatttggtctccagtggaggtcggaactcggttcaccagcgacgtgaggacccggcccagaggaggcggactttctcttcctggtgccttcagataggaaatctagaatttctt

SEQ ID NO: 114138 - DNA, 122 bp, Homo sapiens
gctcgggacctgcagcccgccattccttagcctccccactccgtggtctcctgtgcggcccgagcctccccgacgaacaccgctccctgctccacggcacccagtcccatcgaccacccaag

SEQ ID NO: 114139 - DNA, 122 bp, Homo sapiens
ccagtggctatggagcaggcgggcaccagacctgcggcgacagagcatccacggctccggcggcccatgccctggctgctgctactgcctctcctgctgctgttgctgctgctgctacctgg

SEQ ID NO: 114140 - DNA, 122 bp, Homo sapiens
ggagaagcccggccgcccggtgggcggcagaaggctcagccgaggcggcggcgccgactccgttccactctcggcccggatccaggcctccgggttcccaggcgctcacctccctctgacgc

SEQ ID NO: 114141 - DNA, 122 bp, Homo sapiens
catcagtctttttctgtttgggggaatttctctctctctcttttcttttttgtgagacagcgtctggctctgtcacccaggctggagggcagtggtatgatcttggctcactgaagccttga

SEQ ID NO: 114142 - DNA, 122 bp, Homo sapiens
gtctgagccccgaggagtcagactaggaccccatctcccccaagggcccttgtcagggcccgtctcctccaggagcagaccttgtgggcaccctggtgggcagcagcactctcgtgtcccag

SEQ ID NO: 114143 - DNA, 122 bp, Homo sapiens
ccagccactgagcagagcaggatcagtttttgtccttcagtcacctgtcccccgggggcccggatctccaagcttacattagagatggggattcctagatggatataagacaacaggtgaga

SEQ ID NO: 114144 - DNA, 122 bp, Homo sapiens
tgtggtggtaaagcagaagtgtgagaagctacagtcattttccttagggttggtaaatttcgtgccggccaccatggccataggcttaacccaaattaataaagcccagtgtaaagcgtgct

SEQ ID NO: 114145 - DNA, 122 bp, Homo sapiens
agagcgccagctccgactccacggggggcggcagcgagtccagcagggcgcgcatctcctcgaagttgagcagcagcacatcctccaccaggtacttgttggccagcttcttggtctcctcc

SEQ ID NO: 114146 - DNA, 122 bp, Homo sapiens
gtacatatgtatgtataatctcaaacacactctatttttcttcagttccaatgtacctgccgtcatttacacataatgaatagtggtctctctacattaaaaaatactgcccctaaaaattt

SEQ ID NO: 114147 - DNA, 122 bp, Homo sapiens
ttttcccagtccttgagagagcccagttgctctccagctgtgatgtcccagaacagcccacggaactaaaccagacagcccaagaggaaacttgccaagagcttctgccaagtttggaaaag

SEQ ID NO: 114148 - DNA, 122 bp, Homo sapiens
ggacgcacactcgttgatgttggtctggcagttgggacctggagggaaggggacagcactcggcatgtccagcactcccaggcaccttggcagggccccacaacagcagccctgggcctgct

SEQ ID NO: 114149 - DNA, 122 bp, Homo sapiens
taactcacctgtgcttttcacaacctgcagtaggtgaccactgccgaaatgaagaggcagcggtgtgccccctcccaccttctgagtggctcaggcacaatcagtgttgagttggcatgaaa

SEQ ID NO: 114150 - DNA, 122 bp, Homo sapiens
ccaggacctggtagggtgcgagccgcgagcagtccgggagggagcgcgcctagggcggagcgtaggctgtggggggagggctgggagtccggggccgccccacacccgcactcctcccgggt

SEQ ID NO: 114151 - DNA, 122 bp, Homo sapiens
aggcaatcgtgaaggaacatcctccatcagaaacagaagagaagaacaaaatcactgctgcgatcttttattccatcagcttgacccagcagggactccaaggggtggagctgggaacattc

SEQ ID NO: 114152 - DNA, 122 bp, Homo sapiens
atctgcaagtcacaggtaacctgggtgcatccaacaggtcccacagccctggaaagccctcgtttaacacaagtgctctctgtccttgctgcagaggcggctccacgccttgcttctagcgg

SEQ ID NO: 114153 - DNA, 122 bp, Homo sapiens
tatataaggatgttcagactatctttggcaatagcagtagaaacgtagaggttcccaaaacgctgtagagaagactgcaaaatttccctctgtttctgtttaccaacaccaatcatgaatct

SEQ ID NO: 114154 - DNA, 122 bp, Homo sapiens
tgggaacggcagccttccccaacccgcagctgtacatgctccttggctcccgcctcagtgcgcatgtccactgggcgtcttctgctcagccgctttacccacgtggagaacgccagggagct

SEQ ID NO: 114155 - DNA, 122 bp, Homo sapiens
gagacaggcctgagcggcaccgtttgctctgtaactcgaggaggcccagggtcactggctcgggagagtttgtaattgatgagacgggtccaggcccagctaccctgggacggttcacccta

SEQ ID NO: 114156 - DNA, 122 bp, Homo sapiens
tcgtgacagtgagttatcgcgagatctgatggtttcgtaagtgttcggtagttcctcctgcgttcattttccttcctcccatcttgtgaagaaggtgctttgctttctcctcaccttgtgtc

SEQ ID NO: 114157 - DNA, 122 bp, Homo sapiens
gctgtcagccttcaccgtggtaactgaaactcagttctctgatgtaaagcctggcagtcccggcctgcttgggggcacctggacccctgccagggaaggggtcctcagacttgaggttgcca

SEQ ID NO: 114158 - DNA, 122 bp, Homo sapiens
ggtccagagtcaccagcaccgggggcttcggccgccactcctgagcagcgatgttgaaggcgaaggtgaaggaggagcacccaggcctgacagcccgaactacagcccagcagagcccggag

SEQ ID NO: 114159 - DNA, 122 bp, Homo sapiens
agcctgaacttgaagagtttacatggccgtggccataatcatagccattcagtgacctcgcgagatccagagtcagagcatctgttgaccagaaacatatccagctagctgctccttccata

SEQ ID NO: 114160 - DNA, 122 bp, Homo sapiens
cccagacaggctcccaagttaactggcaccagccagtccatgaggggcccttgtagagagcggggcccagagaagtctgtagggactaggcaatccaggaaagcttcctggaggagtagggt

SEQ ID NO: 114161 - DNA, 122 bp, Homo sapiens
ccggagcgggacctgtgcatctctcagcctcctcccaacccgttctccgggttttggcggcgagagcccccaggaaggcagacggataattcaaaagccctggaatagtctggaaggaggat

SEQ ID NO: 114162 - DNA, 122 bp, Homo sapiens
cacagcccgacgtttgcggcagggccaggttaagtactgcccctcacccggcagctgccccgactggcagcacactatgccgcaggcatatgcaactcgtgcctaggctctcatttttccaa

SEQ ID NO: 114163 - DNA, 122 bp, Homo sapiens
agtccttcagaaatgcagagagtgtgggaattccaatgaaaaggccctgaggagggcgtgcggttacggggtcccttgagcttgataaaggtaaggacaagggacaaaagcgcaggcagagg

SEQ ID NO: 114164 - DNA, 122 bp, Homo sapiens
gtctgcacaggccggggaggctcggcgggcgccctccccaacgtggagttatcctgggagcggctccagggcccagccggtgagggcgatggcagaatcccaatccgtccccaccccctctc

SEQ ID NO: 114165 - DNA, 122 bp, Homo sapiens
cttctgggcggggaacggaggccaaagagagtcccgtgccggggcagagggcgcaggcggcgcgcggtggggagggggccgtcctgggggcgggggcaggcgggggggtggagcccccgacg

SEQ ID NO: 114166 - DNA, 122 bp, Homo sapiens
tttaaaaaaatagccacattgctggacgggaattctcaatattgtactagtatccaatctcggcaaatctacaaaaatatggaatcccaaacaaatccctggaaatctttgccatttgggcg

SEQ ID NO: 114167 - DNA, 122 bp, Homo sapiens
attcaaaccgagaccctcagtcccagcccccgcccccgcccgttcctccctacactcaaccgctgggactagaagctcccggcagtccttccagcaagaggcaccgagtctgggcgtgaccg

SEQ ID NO: 114168 - DNA, 122 bp, Homo sapiens
cctaacgtccttaaaaccttggtcagaagtcagaccattgtgctaatgcgtgagggtgtgcgtggggatggagggtggggtggaactcctgcatagttagcaaccctgcaccaaatcctggc

SEQ ID NO: 114169 - DNA, 122 bp, Homo sapiens
ccgtaccggctccgcctccgggcgagttgcgacattttcagtgcttcctgagaagagtttcgcgcagttggagctacgggtacagcagtggtccgaaactagtggaagaccactagaacgcg

SEQ ID NO: 114170 - DNA, 122 bp, Homo sapiens
tagcagtcagtggttcacggtggcgacggcggactgagttctatcccttttctgccctgccgggtgtgggttcatccacttcctcgcgccgctcgcaccccattggcagtattgggtcacat

SEQ ID NO: 114171 - DNA, 122 bp, Homo sapiens
tacatatctcacatatttacatggttcccacctcaccccaaacttggggaatttctctcccggcctcccctggcatcccgcatcccggcgggctggaaagggagcagagggaagctgcaggg

SEQ ID NO: 114172 - DNA, 122 bp, Homo sapiens
tggcaatttgaattatttccgctcctgcacctcagtttccgcctctgtaaaatgggctcgcgctgccttaaccctcctccgcccgcccactctgacaccaccggaaaggattcattcgggaa

SEQ ID NO: 114173 - DNA, 122 bp, Homo sapiens
attggaaatggtgtcttcccattaagcaggcctgtggcctcagccatttccaggaaacttcgagggccctgcgtagtgattttcatcagcaggtctctgctgggggtggtgaatgaatggga

SEQ ID NO: 114174 - DNA, 122 bp, Homo sapiens
gcacccctaagccgagctctggagttccctgggccaggtgggctttggccccatgctgggcgggggctcatgcccctcgtccctcccgcccagcagcggccctgtgggcagtggcggaggca

SEQ ID NO: 114175 - DNA, 122 bp, Homo sapiens
cgagcaaaggaggagggcgcgttaactgaaaggctgggcaacagagctcctgcggcgggccgggcacccagaagcgggcttaggacaaacacaggtgctccagacccgccaggccgccgcaa

SEQ ID NO: 114176 - DNA, 122 bp, Homo sapiens
ccccctcctgagatggttgaggtccaggaaatcaggtgtggaggtccctccaaggagaaccgggtcgcaaaggacaggcgaggcctgggacctgaggtgtcagagtccaggctggtctcgaa

SEQ ID NO: 114177 - DNA, 122 bp, Homo sapiens
tcggccgcttctggcgccatttggctgccccggaggcgtttgcctcttaggtttgagcatcggtgaggttggagttggggctctttgcaatgcagagaacacgttctctgccgatatatgat

SEQ ID NO: 114178 - DNA, 122 bp, Homo sapiens
cccaggtctcgcgatagttacctcccgggactctcgtcgctggaggccgcgcaagcgcaccggcgaatgtaagcggagtacagtgcctcggcctccgcgtactctccattgttgaaatgagc

SEQ ID NO: 114179 - DNA, 122 bp, Homo sapiens
tccctcttccccgctgtatggttactggaggaaatagccatggatccctttagggaaaaacgggaagttattaccatgtgcacctgccgtggtgttgcaaggtccttcttactggaaacctg

SEQ ID NO: 114180 - DNA, 122 bp, Homo sapiens
tccttctccaggaagtcctgacggccacgctggatctggaggacgtccggagctacagggcggagatttcatctcgaaacctggcggtgagtgctccagtagacacctgtgtgggatgctca

SEQ ID NO: 114181 - DNA, 122 bp, Homo sapiens
tccagcctctcgcgcccagttgactcccggcaacacctcccgccgccacaaggagacgcccgaggacttccctccgacaaagccaaaaacggtattgccacgtgacccgctccgcatacacg

SEQ ID NO: 114182 - DNA, 122 bp, Homo sapiens
ggaaagacccttgctggcttccttccacatctctaaagtgagaaaattgacctggatagtcgctaagctttcccccatttctcagattgtgtaaatccgtgcatcagtagacttaggaatct

SEQ ID NO: 114183 - DNA, 122 bp, Homo sapiens
tacagctgcctgtttgaccagatctcagtgcctgcatccctgattcagcctggggtgctgcgctgctactgcccaggtgagaaagccgccccccaggcccccaaggtgagtgtgatggcctg

SEQ ID NO: 114184 - DNA, 122 bp, Homo sapiens
cctcacagagggcagggccagggtccagcaggggtggggggttcctgctctgcccctgcccgtccccacccagtcttgccctcccatcctctcatctattcccccgctggagacggaagatc

SEQ ID NO: 114185 - DNA, 122 bp, Homo sapiens
tggcatctaatgccttcactaccactactgcaggaaatgcacagaactataacaacctcccgggaaatactacaagtgttaccgtggccccaagccaccacccaaggggcaactgggaagaa

SEQ ID NO: 114186 - DNA, 122 bp, Homo sapiens
gggggaagtgagagaaaggggctgtgtgcgcacctaggccactgcgcgcttcagagcagccgggaccctccctgagggaccaggaagagaccccccccaggccgggctcggcccgctctgtc

SEQ ID NO: 114187 - DNA, 122 bp, Homo sapiens
cacctagaccctagcaactccaggctagagggtcaccgcgtctatgcgaggccgggtgggcgggccgtcagctccgccctggggaggggtccgcgctgctgattggctgtggccggcaggtg

SEQ ID NO: 114188 - DNA, 122 bp, Homo sapiens
gggaagagaagggttggcttctctcatactgcctcggaccctcttgcaaaggccaggagacgaatggggaattcagcagctttgtgaggacaggtgcagctcacagtcacagcatgcaccta

SEQ ID NO: 114189 - DNA, 122 bp, Homo sapiens
aattccctgagcagaaggaagttcctacctgccaccacagcctgctgcttgccggccacacggctggcaccatcccctccgcagggtcattcgcagctgcccgtggtcacacactcagcaaa

SEQ ID NO: 114190 - DNA, 122 bp, Homo sapiens
cgcgcgtttgtttctgctttgccagccactttttctttgggaaattctagggagggcaggcggacaggactgcgaggaagggcgaggaggggcagaaagaggtcgtctgccactcccctacc

SEQ ID NO: 114191 - DNA, 122 bp, Homo sapiens
cagctctgcagctgggctttcagttccaattgtttccagagagtgtgcaggacatttctccgcagccatcttttgcagtgggccacgagggtgctgagaacctctctggtccccgcgcttca

SEQ ID NO: 114192 - DNA, 122 bp, Homo sapiens
atttcccacggggaggaaaaggcgtgcgtttccaggtgtttggaggacgcactggccgggcgcactttcctcagcgtaattttgaacgcagtttccctaaagatgactcttttttccactag

SEQ ID NO: 114193 - DNA, 122 bp, Homo sapiens
gtagaggagaacatggatgttattctaagtaaaacgaataatatgaagaatacaaggtcgcgggacgaggaaggaaactagccagcctgacaggaaggtttattcgagaaatacgggggtta

SEQ ID NO: 114194 - DNA, 122 bp, Homo sapiens
tgttttattttagtctttggactgagtgttggcgatgacacaatctgtggttgaaaatagcgtgaataattaggttagaagcaacttaatgtcccaagatgttaataaagccagctacttgg

SEQ ID NO: 114195 - DNA, 122 bp, Homo sapiens
gaaataggtttgggaagctatgagagattaccccaaagtcatggatgaaacaaatctagtcgaaaacatggtacagagtgaattaaggcaaaagtcattaacttaaaattacatccaatatt

SEQ ID NO: 114196 - DNA, 122 bp, Homo sapiens
atctgactccactgactccacccctgggccgtgctgtctcctggtgatgctcagaggtgtcggctccctccctgatgaatgcctgtcccagcagatgtgtggctacggtgctagtgaaaaaa

SEQ ID NO: 114197 - DNA, 122 bp, Homo sapiens
tcagtgcacgtttctcagtgcacgtttgacttccttaatgaacaaaatctcttgaaggcacggtcctactaacttctgtacccttaacatagaaccccatacaatactcaatgcctgctttt

SEQ ID NO: 114198 - DNA, 122 bp, Homo sapiens
agtcgatgggaccagaacagccacagagccaaagtcaaaggggcagggctcccccaaagacgttccccctctggaaaagtcaaaaccgaccttgaggtaaggagaggccctcgaccaggcca

SEQ ID NO: 114199 - DNA, 122 bp, Homo sapiens
tcccaaatatgtgtcctaattttattctctgaagcaacagacatatatatctaatgtcctcgtttgcaagaaagtcctttgcatatggttaccaggggttcactaagtcctggattctttct

SEQ ID NO: 114200 - DNA, 122 bp, Homo sapiens
atgaattatccgtacatttttttcggttagttgagtgtgttgggatggggagaggagaggcgagttagtggtagctatggttattagagaagggaagcaattttcagatcagtatctaattt

SEQ ID NO: 114201 - DNA, 122 bp, Homo sapiens
tgtagctgtgtggccgtgtgccagcttcatttaccaacagaaagccatctgagggaagaacgcaaggaccctggcattcacgagctgcacacgtgctcaggacctgaccatgaggccaggtg

SEQ ID NO: 114202 - DNA, 122 bp, Homo sapiens
tagagccatgaattagcttcctataaccaagaatcacaaagtggtggcttaggacagaaacgcactggccagccgtccttggaggctgggagtccaggaccaagacgccagcagggccatgc

SEQ ID NO: 114203 - DNA, 122 bp, Homo sapiens
tctagggggtctttcatggtttgggcacaaggattcgtcgccagaatagaactgaaagctcggaaatagacccgagaatacaagtatgccagaaaaaaaattgtcattttaattatctgctg

SEQ ID NO: 114204 - DNA, 122 bp, Homo sapiens
gtgtgtaaaaccactcgccttcgccataatttcatcaaagccctcttcatctcactatttcgcaaactgtagataagcagattcagcagtggtgtcagaagtgagtaagacaatgacatcac

SEQ ID NO: 114205 - DNA, 122 bp, Homo sapiens
gcggcggcgtgtcccagcggcagaggcggggccggcggcggcgggggcggggccggggcgcgctccccgaggcctccaggcaggttgggccccacccccgcccctgccccgccccggccccc

SEQ ID NO: 114206 - DNA, 122 bp, Homo sapiens
tccagtaccggagaccggaggcagctccgaggagccgtaaggaggctgccatgctgcgcccgcccctctccccgcggtgacctccgccgcctcccggagggcccacagactgcgagcgtgtg

SEQ ID NO: 114207 - DNA, 122 bp, Homo sapiens
agccgccgcccggagctgccctttcctcttcggtgaagtttttaaaagctgctaaagactcggaggaagcaaggaaagtgcctggtaggactgacggctgcctttgtcctcctcctctccac

SEQ ID NO: 114208 - DNA, 122 bp, Homo sapiens
acatcccccacgcaggccttccctccgtactgaggctcagggctgttgcagacccgggtgcgctcccggatcccaccggcacaggtgacagtgcaggccgaccacggggaccaggggctcca

SEQ ID NO: 114209 - DNA, 122 bp, Homo sapiens
tccccgctaagcgcattggctgccccttgcagcgtccaggtgagcagggctagctgacgccggaaacggctctcctggaagccagtggaggaggtggccccgggggtcccggagctgttgga

SEQ ID NO: 114210 - DNA, 122 bp, Homo sapiens
cgccgtttcattcctgccgcgcgccccggggcggctggaggctgtgtttgccgcctgctccgggaaggcaagggacagcgtgctgggactctgcgttccctgactccaaccgcctagcacgc

SEQ ID NO: 114211 - DNA, 122 bp, Homo sapiens
tctatttttgtgtaatttctgggctgtttttactgcttcttcaattttgaactttattttcgtgcttttctgtaggtctattaatatttaaagaccagacagtgtgaattttaccttcttat

SEQ ID NO: 114212 - DNA, 122 bp, Homo sapiens
cccaccctcgtcaagtgcgcgacttctgccgtcacttcctttgttcggcgtgctcaggttcgcgccaaactatcaccaatcagacgacgccttcatctaaagggctgtagcggagttttggc

SEQ ID NO: 114213 - DNA, 122 bp, Homo sapiens
ctcgcacgcccttgcctctgggcgggaaactgaggcggagagcctccgggcactcgaggacgcttgggttcatccgcatcctcgagcctgcccgcctagtccagccagcccccgcggcggcg

SEQ ID NO: 114214 - DNA, 122 bp, Homo sapiens
ttacacacaaacacacacacacgttttaaaacaaagtcgatgagacaagactgaacagctcggagcagcgtggttacgtaaagaaagctgggacccggcggggagtggcgcagagccggcgg

SEQ ID NO: 114215 - DNA, 122 bp, Homo sapiens
cacctggaagcgctgctatagaagaaagagtgcatgtttgcagccaagcagacatgggttcgaggctaagttccagctctaaccagctatggctatatgtttcttcacctctctcagcttct

SEQ ID NO: 114216 - DNA, 122 bp, Homo sapiens
gaataccaaggaccagagatgctaaatgaagccacctaagtgacatggaccattgagactcgattccagactctctctcccgtccaaccctctagactgtgcagctctctgcatgccggcct

SEQ ID NO: 114217 - DNA, 122 bp, Homo sapiens
attcccttagcactcaaatctcttctgtttggattgccctcattaacaatctgaccagctcgtacaatgcatccctctttgcaatttgccacgtatgcttacgtgttccccttttttctact

SEQ ID NO: 114218 - DNA, 122 bp, Homo sapiens
gcttctagatgaagatctctgcaggcttcataccaagagaacccttttctttgctgttctcgaccttgtcctactgtattgcattaggatttccataggatgtctgattgaccggatacata

SEQ ID NO: 114219 - DNA, 122 bp, Homo sapiens
acgatggattgtgagccctgagaaatcaaagttgaaactcagccaacctcctgccctgctcgccttgcccctgccaaatggccgcgtctgttaacgagggagataaacggagaggccatcaa

SEQ ID NO: 114220 - DNA, 122 bp, Homo sapiens
agcgcgatctgaccagctgggacagctcccaccgaggaaagtggtggccgtgagtcctcccggtcttttgggtgtatttggcggctctgacgtcccccaacacctgagttcaggcctagcag

SEQ ID NO: 114221 - DNA, 122 bp, Homo sapiens
taaattctctttagtctcctgcaatttatcacccagctaggaagctgcccggtgtcctgacgggacctgtgtgtcccatgttttctcagctttggctgtcactgacttcgcgacgatggcaa

SEQ ID NO: 114222 - DNA, 122 bp, Homo sapiens
tcctctcggacctggagctgtggggagaaggcagccttttagtgaggagccgccgcgtggcgggacgcaaggaaaaccacccgagccgctgaacagtattccgcgactgcactccagggcac

SEQ ID NO: 114223 - DNA, 122 bp, Homo sapiens
agccaggtgcttgctgagaaggacacggggcttgtgttgcacagcctgggcctctcccgccgcggtgggtctcggagctctgcttgtctgcctccagggacagggtgctcactacctcccag

SEQ ID NO: 114224 - DNA, 122 bp, Homo sapiens
gcttgggccagaaccgcttttcttcctaaagctggagggatggccgagggcttagcttaacgggataagccatctggggactgcagtgtccacgatcagatcagggagcttgaagttgaggg

SEQ ID NO: 114225 - DNA, 122 bp, Homo sapiens
tgaagatggacccggcaggtctggagggaggcccccgtgatgaatcccgtgatgagccgccgatccgagctcaggctgcgtcatgggaccagccacaaggttgcctgacctataaaggtcgc

SEQ ID NO: 114226 - DNA, 122 bp, Homo sapiens
cttcctgtcctcccacaacaaatatttactgaatgcctgtgaaacactaagacactattccgggtagtggagatggaatcgaatatgtagcagtgaactctgcagaacagttccctaccctt

SEQ ID NO: 114227 - DNA, 122 bp, Homo sapiens
tatggactctgcacatgaatcccacccacatgtgacacatatgcaccttgtgtctgtacacgtgtcctgtagttgcgtggactctgcacatgtcttgtacatgtgtagcctgtgcatgtatg

SEQ ID NO: 114228 - DNA, 122 bp, Homo sapiens
aggtaaaggaggtccaaagttatgagaacagaagtaaatacatggaggtagaatgtggtgcggtaagctagcaaattgtgtaatatgccacacaggcttctatcctaaatgcctgacattct

SEQ ID NO: 114229 - DNA, 122 bp, Homo sapiens
ttcgctggaagaaaatgattccgcttgtctccccaaagctgcagcggaaggtgactacttcgtgtgcggtcctgtccacggtgccctgggccgggtagacagtcactgaggcgcgagcagaa

SEQ ID NO: 114230 - DNA, 122 bp, Homo sapiens
taggtggctggatcttccctgcgcactgcggcactttgtgccccgcaggaatggtactgtcgtgtatgctccaagcggtgggagacagggcccacttctccgcacagctgcctgcagagcac

SEQ ID NO: 114231 - DNA, 122 bp, Homo sapiens
gcgctggaacagggaagtcaagatgccccttgacatgaaatcctccctgtaataaagccccggagcaggggcaggagctgcttggagcaggagctgcttggagcagggcttctgcgtgtgga

SEQ ID NO: 114232 - DNA, 122 bp, Homo sapiens
cgcagcgcagttaacgtggacaagctggggcaacctggacgagctggggcaacctgatctcggctgtcggagtgggtgtcctcaagaaaggtgacttggtcctcgcggacgccaggtgttgc

SEQ ID NO: 114233 - DNA, 122 bp, Homo sapiens
tgcgggcacctctgctggtaaagctgccaagacaggactgctctgggctctctccgtgcccgcccgctcctcgcctccaggagccccccacaaagctgtctgtgtagctgccagagccgctg

SEQ ID NO: 114234 - DNA, 122 bp, Homo sapiens
cgggcacgagcccgattggcagattgtagccgagtggtttcaacggtgacgccccccacccgaatgcctcgctgggattggctcatttcttggttcagacctggacggtggccagaggagga

SEQ ID NO: 114235 - DNA, 122 bp, Homo sapiens
agacctcgtccgcccaccgcctagcgcttcctcctccctgcaggcgagccggggaatccccggcagcaccgatatccgcagagcccaagaagtgggcctctctgccccgcccccccggctcg

SEQ ID NO: 114236 - DNA, 122 bp, Homo sapiens
agtgtggtaagtttcagcacatggaaaacaactgagagcatggctgcttcccatctccctcgccttcgtttccatccgcccacgcggccgcctacacccccactgcgctctggcaggaaggg

SEQ ID NO: 114237 - DNA, 122 bp, Homo sapiens
cacgcagtgccgacagcggctctacttcctttattgaggtctcaagttccagcctccgcccgtctcgggcacaagaccaggcggggttctgcacgcggccgcccgggcaagcccagcagatg

SEQ ID NO: 114238 - DNA, 122 bp, Homo sapiens
agggctgcaggtggctggctgggaccagtggtttattcagacctttactgtgaggctggccggaagccaagaccctgggagaaatccaaggcttccttccttcactggggtccctcactcct

SEQ ID NO: 114239 - DNA, 122 bp, Homo sapiens
cacaggtcccactcacatcccagtggctgccagtcgcttggtgccgcgggctggggtggacggggacgggtggacccgccggaggcaaatgtccccggcaggctcaggtctctctgaggctc

SEQ ID NO: 114240 - DNA, 122 bp, Homo sapiens
ccacacacacggtttggggcatccaaaggctctgggagcagctgcagggctcacggggggcgacacaggcctgtgagtcagctcttttactacgctttgtgctgcctgtataaatgacctaa

SEQ ID NO: 114241 - DNA, 122 bp, Homo sapiens
tgtatgaacgtatcaagggtcaggaagagaaagaatgacaagattctcaccctcactttacgtttgctgtgtgtcaaaggtctaaaaagtatgtgtccctaattttaaaaattccaacgtct

SEQ ID NO: 114242 - DNA, 122 bp, Homo sapiens
attcctggcctctacctgctgcataaccggcagcagctcctcagttgtggcaactgaaaacgtctccttccagactttgcaaatggcccattggttcagaacctctgaggttaaggaatgtg

SEQ ID NO: 114243 - DNA, 122 bp, Homo sapiens
ctcctcgccttcctccaccgccaaggtccaggctccggccccggtcccggccccgcaccgcgtcaggccgcttccccggcccctcgccggccccctaggccacgcccccagcccctcaccgc

SEQ ID NO: 114244 - DNA, 122 bp, Homo sapiens
ggagccgagaatggagagggccggggagctgggggcggggccgaccgagccacaggctcccgcgccccctccccctagtcacgtgagctgggctcctggctcccacctcccgtcacgtgcgg

SEQ ID NO: 114245 - DNA, 122 bp, Homo sapiens
ctctcggcgcgacgtctccagccatgaaccggtttggtacccggttggtgggagccacggcgacttcttcgccgccgccgaaggcccgcagcaatgaaaacctcgacaaaatagatatgtct

SEQ ID NO: 114246 - DNA, 122 bp, Homo sapiens
gaaaggtagaggaatcgataaagaagcagcgagttttaacctccttttcctcagcctccacgccccagggagggaggcagaagtggttcccaagtcccggggaaggaattccggcgtagcct

SEQ ID NO: 114247 - DNA, 122 bp, Homo sapiens
gaccgacggacatacgtgcacacacacatcagcaccgtgggcgcacacacctgcactcaacgcactcgtcaggacccacgggcagatgtacacacatgcaccagcacccgtggacacgtgca

SEQ ID NO: 114248 - DNA, 122 bp, Homo sapiens
agcttgtcctgcagtctgcagtggtagcccagtaattcctgggtgctcctggacatatatcgcctaaggtctttgtaaagtctttgctcatctacccaaccctttggagtctaggccaggag

SEQ ID NO: 114249 - DNA, 122 bp, Homo sapiens
ttggggtctgtccgctcggttaccatgcactcgagacctgtcgagcgtcccctcttcttccgtaggagagaagtgtgtttagaatcttaaggtagaactgcctttccggcaggcccattttg

SEQ ID NO: 114250 - DNA, 122 bp, Homo sapiens
tgcggtagccaatatcactgtgggtgtacccgcgaagagactccatgcttcaagcgctgtcgataaagctgtgcacttctgcagactctgtgcgtggttccgcggcgatcccggggttggaa

SEQ ID NO: 114251 - DNA, 122 bp, Homo sapiens
gcaggcaaggtgacctgggcacagggcatgctgggacttgtagtctctacctgccatagacggcttagtgcagatcatgggcaatcctagggcattttgtttatccctctgcctcttatcat

SEQ ID NO: 114252 - DNA, 122 bp, Homo sapiens
gccatgtcagtaatgaccccagctccttccagcttgttgctctgttgaggtctttgccctcgtgatccaaggtggccacgagagttcaaatcatccttctaaatagcagcatggaggaagga

SEQ ID NO: 114253 - DNA, 122 bp, Homo sapiens
ggtggacagcggggcggccgctgggcaccgcttgcggtctgcagagataaccggaggagtcggggcggcagcacgtgttgtagccgtgggggggacccagagacccgcagcctcggagctgg

SEQ ID NO: 114254 - DNA, 122 bp, Homo sapiens
gggatcggcgggcttgtcgggctgggagagcctcgtggaacccgggcatccgggcagcagcggcctccgagccactgtggaggcgcccggggtcggcacggcgaggccgacggggacctgac

SEQ ID NO: 114255 - DNA, 122 bp, Homo sapiens
ctcaagcagtcctcctgcctcagtctcccaaagtgctggaattacaggggtgagttgctgcgtctggtgttggtgactttctagagattactttttggtttacatcattttccttgtgacta

SEQ ID NO: 114256 - DNA, 122 bp, Homo sapiens
agagacttcctccatcctccttctccctcctcctcctccaaggcacgctgagatttggagcggaggagctgagccccgcgggaaaagcagaaaagggtcattgccactttaaatgactcagg

SEQ ID NO: 114257 - DNA, 122 bp, Homo sapiens
gaagcagaggcgatgccggcggggagcgggcggtgggggggcttctgggagcgacggacccggcagctgcagagcccagtgcggctgagtggggggagggaggagggacccccctcagaggc

SEQ ID NO: 114258 - DNA, 122 bp, Homo sapiens
cggagccaactccccacaaggaagtcttgtgcaactctcaggcgcctgcagccacgtgagcgcgcggctttcattttactcaggtattattactattattacttcttttgagacaaggtctc

SEQ ID NO: 114259 - DNA, 122 bp, Homo sapiens
ccgtgagcttgaaggaaagccatttaacgcacacggtgccgatgggtgtcttctgcttggcgacatcgtgggctttatcctacttcctcaaggaggcataaaagatgattttttccccacaa

SEQ ID NO: 114260 - DNA, 122 bp, Homo sapiens
atggcctccacagagccccctgaaccaggaagaccactctaggtcagcatgtcattgcaacgactcaaaagggaagtaggctgagaatgatgaatgtcacaggactaggggagatcaagtca

SEQ ID NO: 114261 - DNA, 122 bp, Homo sapiens
aagggaggaggaatccgcctcctgacgcccccgcctgcagtcagcctggctcccaacctccgtcactgccgttgcaaacaaaccaaaccgcagtgcgccgctatcggaacctttctctccac

SEQ ID NO: 114262 - DNA, 122 bp, Homo sapiens
ctggatggaggcttgttgtcttctgcagttgccccaaaggttgctcttgctgggggcagccgccctgactgcaactgctttggagacaggtaagtatcagggggcttggttggggcacccag

SEQ ID NO: 114263 - DNA, 122 bp, Homo sapiens
tctaaaatttttatttgaagtgaaaagctaatctgttgacttagaataaggctttccccccgatacgatttgcagattggggtttcacgtattattgctttcataaactatacctctattgc

SEQ ID NO: 114264 - DNA, 122 bp, Homo sapiens
agcttcactcctgaagccagccagaccacaaacccaccggaaggaaggagcaactccagacgcgcggccttaagagctgtaacactcaccgcggaaggtctgcagcttcactcctgagccag

SEQ ID NO: 114265 - DNA, 122 bp, Homo sapiens
aagtgtgtcagttcttaaggtccagcaacacaaagcgaaaagttagtggaggactacgagcgcgatctcgacagagggcgctgggtggtcagtggctccagcaaccacgcggctggggtgcg

SEQ ID NO: 114266 - DNA, 122 bp, Homo sapiens
gccccgcgaccagactttggggacttggcgtcggtccctggctctcacctgtggactcagcgtcccgagcagcagcgccgcgaactggagctggagccccagccggggccacggcctcgacc

SEQ ID NO: 114267 - DNA, 122 bp, Homo sapiens
caggccgcagctcagccttcccagctgggtgggtgccttacctgcctctcagcaaggctccggggcgcccgtttgctcgctggacacggcgccctctgaccgagggtggcccaagcgctgcg

SEQ ID NO: 114268 - DNA, 122 bp, Homo sapiens
acgattggttacagttggcagggaggcatgtcagagggggcctccccagccctctcctgccgccgcctcctccctttgtccagcgccgggcactccggggagcaccagccgcgcctgcgcgc

SEQ ID NO: 114269 - DNA, 122 bp, Homo sapiens
cttccaatatagctgtttcctcttctcttgtctaacaacttttcatccacctccactgtccggtaaaaatgaactcagtttccaaggaactctaaggaccttaaataagcatttggagccat

SEQ ID NO: 114270 - DNA, 122 bp, Homo sapiens
aggagacctacatttccagatccccgtggcactgatattggactgtaaaaccatagattccgagggctgccgccttagtgctaagcggacgcaagggcaagtagtgtaactgttccaactcg

SEQ ID NO: 114271 - DNA, 122 bp, Homo sapiens
ttactccatacttgagacacttgacaaagagagttgtatctggaacaacctctgttccagcgaggaagggcacggcgttggctgagccatgccccactacagcgtcacatttatgtcctgtg

SEQ ID NO: 114272 - DNA, 122 bp, Homo sapiens
gcctggtcgcatggttaagcgtgtgagtgctgcgtgacctggcctggtcgcatggtaaagcgtgttagtgctgcgtggcgcggcctggttgcatggttaagcgtgttagtgctgcgtggtgc

SEQ ID NO: 114273 - DNA, 122 bp, Homo sapiens
tagagtgcaggcaccttggtgcagtgtgtctgcgtgttttaaattttattgttttggttgcggttgtgtcttgacaataaagggagtcccctcagaaatgctgcccttggaggctgaaacac

SEQ ID NO: 114274 - DNA, 122 bp, Homo sapiens
ttcgattgagttgctcccgccctgacataccataagaggcaatatggaacacacaagtgacgtctgcatcctggaaggctttctctacgtcagacaggtggcggatgtctccttgtataaac

SEQ ID NO: 114275 - DNA, 122 bp, Homo sapiens
atgttagttcgcgctgtgtggaggcgggccggcgtggcgctgtgacgcagcgggagaagacgggctgggagggcgctgtgctgaacgcccctgcggtcgcgacaggccagcgcaggtggagg

SEQ ID NO: 114276 - DNA, 122 bp, Homo sapiens
gcagagggatggctggaatgaggcgtcagaggcagaactggctgagccacctgccctcggcgccaggcaggccacgcccaccagccacagctgcagcacccgcccacccacgtggcccgtgt

SEQ ID NO: 114277 - DNA, 122 bp, Homo sapiens
ctcatgaaggaggagtagcttacctctgggggacccccgcggagggggtgcgggcagtcgcggttggactgccgacactgccgcctcagcagcagcgaccgctcccgggttccattggccgc

SEQ ID NO: 114278 - DNA, 122 bp, Homo sapiens
aaggggacagcctgggcagggtggtaggtgctgggggcactctcctgccttgtcgccccccgccctggggctgcgtggccctgatgactccccctgcggatggttctcatgggtgcccgctg

SEQ ID NO: 114279 - DNA, 122 bp, Homo sapiens
cccacacaaccattaaaccacgatcatatcttaaaaagctaacaataattctgtaatgtccgatatgcaatactttcaaatttccgctcttgtctcataaatatgcttttaccattggttta

SEQ ID NO: 114280 - DNA, 122 bp, Homo sapiens
caaaagggaatcaggacccgtgggccccaaatcagcccccaggacctgagatgtagggcccggctccgggacctggtttggtaaaatgcaaagacccaagtccacagctggctgcccaggct

SEQ ID NO: 114281 - DNA, 122 bp, Homo sapiens
cccgggcgtcgcgcctccagctgggtctgtgcgcgcggcagagatgctgggcgtgggaaccggcaagtcctggaaacggcttagggcccgtcagggagggcagttccacgcctgctggaggg

SEQ ID NO: 114282 - DNA, 122 bp, Homo sapiens
gtctttgatttccgagaagccggcgtcccctggggtgtctcccatgacgcaccttatcaccgtcggggtgatctccgcacagaagaacacgctgaggctccccaccgcatgggaggcaaaca

SEQ ID NO: 114283 - DNA, 122 bp, Homo sapiens
ttcaaaattatacattcagaggtgacaagatcctgatagaagtgcacaaagtaggctaggcgcgtgaccaggcacagtggctcacgcctgtaatcccagcactttgggaggccaaggcaggc

SEQ ID NO: 114284 - DNA, 122 bp, Homo sapiens
tcggttggatcattgttcgggaatctgtatccagccagccatgcatcccctggacttttccgtcacaaggctggtaaattccctttttgccaaacccagttggagttagtttctgtcacttc

SEQ ID NO: 114285 - DNA, 122 bp, Homo sapiens
aaaatagcccagatgaagcacaataaccattttcgttattaaaagctcttggaagcttgtcgctgttgttgaaatagcttttcctgtgtagctactgaaatttgcagcagcatctctttgtc

SEQ ID NO: 114286 - DNA, 122 bp, Homo sapiens
tcccacagggtcccatgccgtgatccgtattgtttccactcacccctctcttgaaatgttcgttgcatttatgtctggcagtgaccaccccagttgggccagactactggagggccccctgg

SEQ ID NO: 114287 - DNA, 122 bp, Homo sapiens
gcgagggtgacccccgcccagagctggtgccctttgacagtgactctgacgatgagtcttcgcccagcccctcggggacgctgcagagccaggccagccggtccaccatctcctccagcttt

SEQ ID NO: 114288 - DNA, 122 bp, Homo sapiens
tgtttgtaaaaaccgcaggattggagtatttagaggactctgtccccctgcaagtattgccgttggatatgaaacacacagagcaaaaccccaaggtgacaaatgagtgaaaacctaaggtg

SEQ ID NO: 114289 - DNA, 122 bp, Homo sapiens
cgccccgctggcctcgccttattagcaagttctctggggagccgcggtagggcccggagccggcgagtgctcccgggaactctgcctgcgcggcggcagcgaccggaggccaggcccagcac

SEQ ID NO: 114290 - DNA, 122 bp, Homo sapiens
tagataagtcgtgataaaggtgttgaggatattgtccaattacattacatggaataaggacgtttgggagaaattcttacctggcctttacagtagaaactatttgtttttagtcttatgga

SEQ ID NO: 114291 - DNA, 122 bp, Homo sapiens
ggactgcgagctgtgcggtgtggggcgcgggggtctggctcacctggaggtgacgagcaccgccggggactgcatgacggcggcggggactccgggcggggcgcgcagtcacgggacccggc

SEQ ID NO: 114292 - DNA, 122 bp, Homo sapiens
accttttctgctgggacgcgctcaggaaggacagcgctcagtgctgggtgctcgctcccccgcgcagccacacctgggcttaggcgcagtgtcttctgcaccaaccccaagtccacttcgtt

SEQ ID NO: 114293 - DNA, 122 bp, Homo sapiens
tgctcagtctgggcccccccactgctgcccagcatagaaagaattgacatgggaggggggcgcagatggactccccaggtttcatcatggggccttccagggaggctctgaggcagggtaga

SEQ ID NO: 114294 - DNA, 122 bp, Homo sapiens
cgtccctcccccgaccccctcccggcgcccggcgtccggcctgccgctcccgctgctgcgcgccccccttccgaaggcaaagcaggagcccgccttattatcataatgtattcaccttggcc

SEQ ID NO: 114295 - DNA, 122 bp, Homo sapiens
aattcctatcacctagtgaccttgtagccactgtaacgtcatagcgcaacacattcctcacgtgtttgtggtgatgctggtgtaaacaaacctactgcgcccccagtcatataaaagtatag

SEQ ID NO: 114296 - DNA, 122 bp, Homo sapiens
cgcctctgagcaacctgcagccatgctgcttgtcaaggttcccacggcgcgcgccgttgacgcaagcacaatcccatgtccccggcgctcgttttacgccatccaccaacgaccacgcccct

SEQ ID NO: 114297 - DNA, 122 bp, Homo sapiens
ccgcgaggccgggccggggtgactgtcgcgggccggggctggccgcgcctgctgtcggggcggctctgacaccgcgtcgaccagatcggctctggtccctccgctcgcctcttccggctcca

SEQ ID NO: 114298 - DNA, 122 bp, Homo sapiens
cactgcacccataggtgcggaacgaacctgctgccccgaccctgcggctccgaccggggccgagcagcgaaggaccaccctggtctggtcacctacgattctgggtccagctcagctggtga

SEQ ID NO: 114299 - DNA, 122 bp, Homo sapiens
gtctataggacatggcttccaaatggacagaagatcagtcaatcatccatccatccatcccgccagtgctgatgacacggtgataaatccttattccctagcttttccagactcttcaagga

SEQ ID NO: 114300 - DNA, 122 bp, Homo sapiens
ctgtatgcccccctagaggtttgagcagcctggcactgaagaagcgagccacaccgccctcgcacgccacactcccctcgcacgccacacccccgtcgcacgccacacccccctcgcacgcc

SEQ ID NO: 114301 - DNA, 122 bp, Homo sapiens
gtctcttaggtccacttgatccagagctgagttcaagtcccaaacatccctaattaacatcgatgcaaaagtcctcaataaaatactggcaagccagatccaacagcacatcaaaaaggtta

SEQ ID NO: 114302 - DNA, 122 bp, Homo sapiens
ggagtttccccctgaaaaagagctgagcagcccctcttgggcctgattcactgttctcagcggggcaaggctggtagccacagaagtgggattgagctgacagcttctgtgagctggcaatt

SEQ ID NO: 114303 - DNA, 122 bp, Homo sapiens
aaaaaacaaacaaacaaacaaacaaaggcaccaagatagctgccttagttccagacatcacgtacagacacaacaatgtgatagaggagagatttttccattaatgaatatttctgtttaag

SEQ ID NO: 114304 - DNA, 122 bp, Homo sapiens
ggtggcaaagagggaaagagaggctgccaccaagcactccaaggcatccctgcccacgggcgaaggcagcatcagccatgaggagcagaagtcagtccggctggtgagtgcagattttccct

SEQ ID NO: 114305 - DNA, 122 bp, Homo sapiens
attcagggtgcatctgccctggccaacactggagtccttagggcctctgggaacacatctcgggactcaaagctcacaacatcccctctgtaacctgctcttcgtgtcaggctgctagaacc

SEQ ID NO: 114306 - DNA, 122 bp, Homo sapiens
ctgcagcatcagccaagaaaccgtctctttcagacgcttgctggcttcagggctgcagcccggggatcttctctagataaagcgcggtggaaacacacacagacacatgacgatgctgtcga

SEQ ID NO: 114307 - DNA, 122 bp, Homo sapiens
aggcctcagggccaagagggctcagcctcagcacggggggagccctggggtggggagacgcgagcgcccacctgcgcaccccagcagccttccgccctccgcctgggctcaggggagcagag

SEQ ID NO: 114308 - DNA, 122 bp, Homo sapiens
tacagagttcaaagagggaaacccagcaaccatggaaatcgactctgagactgtccaggccgttcagtctttgacccaggagagcagcgaacaggacgacacctttcaggattgtgccgaga

SEQ ID NO: 114309 - DNA, 122 bp, Homo sapiens
tcaaagggcagactgctgagctctggccccagactttctatctacttcagtgggtatgagcgcatttgtaactagttcccaggtgatcctgctgctacaaggcacctgtcgagaaccactga

SEQ ID NO: 114310 - DNA, 122 bp, Homo sapiens
acaagcgtgtagtcggaatgttgctggcaggccccgagcaatgtgttatctgtggactgacgtgtgcacaggacggtggctttgctgtcattaggagggatggggaggtgggggtcatgtcg

SEQ ID NO: 114311 - DNA, 122 bp, Homo sapiens
ttggtatgcacctgcagccccaaagaagaactggcgggactcgagtgtggccgtgtcagacgtggcaagaaaaaccagcagttgccttttcatctcttttctgatgatctaaccatgaagtc

SEQ ID NO: 114312 - DNA, 122 bp, Homo sapiens
ctgacccaccgcgcccccaaggtccggccgcgcgccgagtccactcaccttccagcccgccgagctgttgctgtcacccttatccttgaagtagggcacgctcttgaccatccactcgtaga

SEQ ID NO: 114313 - DNA, 122 bp, Homo sapiens
aactccagtgcccactgaggccgcaggagatgaagcagcctgggccgagcccgaggaggccgcggccacccccccgtcgtcgggcccggccgcgccgccctcagcgccggccctgccgcctt

SEQ ID NO: 114314 - DNA, 122 bp, Homo sapiens
acagcccatgacaatcgaggtggggaacagatctgctggggaggagggtagggccgagggcgcagctacaggaaggagcaagggggagttctgcacgcccttgtgggttaggaagctgagct

SEQ ID NO: 114315 - DNA, 122 bp, Homo sapiens
ctggggtgaggcagggtcaagtgctacgggcctccttcccgtgtcctgctggaacgtcttcgtgtccacctgggtccagtcctgaatcatcttggagaaacaccttggtttctaggatggtt

SEQ ID NO: 114316 - DNA, 122 bp, Homo sapiens
ggcggcaggcccgggcaagggtcgcttcctcgtccgcatctgtttccagggagacgagggcgcctgcccgacccgggacttcgtggtaggagcgcttatcctgcgctccatcggcatggacc

SEQ ID NO: 114317 - DNA, 122 bp, Homo sapiens
tccgctgatggggcagtcagcatggaggccaggcttggcaccgcaggagggattccggagcgctggtagtcctgcacgctggaaaggcttttctcaggagtcttccctggctccctgggagg

SEQ ID NO: 114318 - DNA, 122 bp, Homo sapiens
gcgcttccacgcagaggaggcgtcggcttccaggcagcttggcgatcttgttattggacacgcgagagtttagagacccagagaaatggagtgagtcaaagtcaaactcaagtttctcggcc

SEQ ID NO: 114319 - DNA, 122 bp, Homo sapiens
gtataattcatcacattgtattgtatctacaggcagtgaaccccttgagcacggggcccgcgcctggcttgttctccgctgtctccagcacctaggacagggcctggcacgaagtaggtgca

SEQ ID NO: 114320 - DNA, 122 bp, Homo sapiens
ccaggcctgggcctgcccggcagcgccctctgctggccggagccgcgacggcgggggccccgcctgaaccggagccctgagcctggggctgggagtccaaccttcccagagtttgcagttct

SEQ ID NO: 114321 - DNA, 122 bp, Homo sapiens
agcagaagctgctcttggtccagcagctcctgcagggtcgcgtgggaggactcccagaggcgctggtaagctctggggagagggtggcgggcgccgcgtgctctgagccacggaggagtggg

SEQ ID NO: 114322 - DNA, 122 bp, Homo sapiens
gagcaagagcaaggctctgtctctaaataaataaataaacttctcttgaccatacaatcccgtagctagaggatgctgtgacttgcacaaacaaaagcatttgtcatgcttggcaataacct

SEQ ID NO: 114323 - DNA, 122 bp, Homo sapiens
tgatcccgggcgggtggcggcggcggcagaggcggcgggaggatgacctcttaccgggagcggagtgccgacctggcccgtttctacactgtcaccgagccccagcgacacccgaggggcta

SEQ ID NO: 114324 - DNA, 122 bp, Homo sapiens
agggggcggtcactatgcagatttcactctgcctcgggttaaaccccgcggcgaaggaggcggggctggaggccgagggtcgggcacgcggctgggatgggggtggggatggggggggatgg

SEQ ID NO: 114325 - DNA, 122 bp, Homo sapiens
cagggctatcttcagcttctttctatctgtccttgatcacaaatagtcacctgcaataggcgactgcttacgctgagaaattatgcctgctgaagatataaatacactcaagaagtagttgg

SEQ ID NO: 114326 - DNA, 122 bp, Homo sapiens
cagccttgctattccgtgacttgctccagattcaaagtcccagttggagcatccgattggcggagctcatgtcttctgcctgcaaccccagagccgagtcagggagagcaagcattggggct

SEQ ID NO: 114327 - DNA, 122 bp, Homo sapiens
gtcttcttggcagggttgcccacattgttggtggctgtgcagttgtagtagccagagtcccgggcctgcactgaagggatgctgagggtgccaccctgggccagagcacccaggggcagtgg

SEQ ID NO: 114328 - DNA, 122 bp, Homo sapiens
tcggctttgaactaatttattgtgtcagttaaagaaggccgttccgtgcttgtggaggctcgagcccgctccaagcctcttgaaatcaatgttttccttgtgcgcgggatgttttctaggct

SEQ ID NO: 114329 - DNA, 122 bp, Homo sapiens
ccatcggtgagccgcccggagcctccctccgcgcccgctccagccccagccgtcccggggcgcctctgggtttcggtcccacctctgcccccgcccagctgagctactttggacgggtcatt

SEQ ID NO: 114330 - DNA, 122 bp, Homo sapiens
tgggagttgggggatggggagacgccggagcaggagaggagaggggccaggcctccaccccgtgattccactgtgctgctagcacctgagctaataacctcgaccccgcccccgggatgggg

SEQ ID NO: 114331 - DNA, 122 bp, Homo sapiens
gattgagaaatgacagccttgaaggggtccattctgttcatttttttcccacccacaggccgccctccttctgtcatctgtgaaatgacatctgagaggaagcaggggttccttacgttcta

SEQ ID NO: 114332 - DNA, 122 bp, Homo sapiens
caggctttagtgattttccctctcaagggttggccttggtggccaatttcactcagcagtcgccgccgcccagccccagcctcaggccgcccaggatgattttggactggccatcgctgtac

SEQ ID NO: 114333 - DNA, 122 bp, Homo sapiens
tgcctccttgcctgactggggcgtacctgcagtgttccccttccaaccgctcagcagtggcgcaagtgcttcctccacttgcgtgggtggcgtctcagcgaaggtccgcgcccttcgagtgt

SEQ ID NO: 114334 - DNA, 122 bp, Homo sapiens
gcgctcgggtcttcccggcgggtcgtcctgcactttctccctctccggtacggaccgcggcgttctgtttccaggcaaaggaaaataagtcaaagactcagaaggcagcctgaatccagggc

SEQ ID NO: 114335 - DNA, 122 bp, Homo sapiens
ctaacagcgtcaggtccaaagcgcttgttgaacgaatgaaccaaggaacgagtgaatgaacgaatgaatgcccgcgaaggacgtggtgccgcgcggtcttctgggaatcgtagtcccctggt

SEQ ID NO: 114336 - DNA, 122 bp, Homo sapiens
ttgccttcccaggcccgtgggaggagtgctgtgaggctgagacacagcccggcttgctgacggcacaaatgccggtgcgccctcggcacagtttgtttgcttcatcgggcggagaaggccga

SEQ ID NO: 114337 - DNA, 122 bp, Homo sapiens
atcttcctcctctgatacctagcccttttctcttaaagaacacagtaaagtgttagacatcggtaggtccctgagaaataattattgactcatcagtgatcacagggaaggaagttgagtag

SEQ ID NO: 114338 - DNA, 122 bp, Homo sapiens
tcctgatctagggagagagtaggcgggttagcatgagaacaagagcccggaaccccagctcggacctgggacagcagcaccaccacctggattcagaggatgcctgggaggctgggccatcg

SEQ ID NO: 114339 - DNA, 122 bp, Homo sapiens
acccccgggtgtcctgactccctggtggccctgggctgacagctccacaccttgggaggccgcacccccacctgccgcatttcctcgttctgagtcacccttgctcagaacgcttgactttg

SEQ ID NO: 114340 - DNA, 122 bp, Homo sapiens
tttcctttcacagggagtgaacttctggcccaggcagtgggcagtggggcacggttgccccggagatgagactcctcttcccgccctggggggtgggggctggctggtggctgagggaacta

SEQ ID NO: 114341 - DNA, 122 bp, Homo sapiens
cccccgcattaaactggtttgggcaaaacgacaggcattgctgagagccgccaggccgcccgccagctgcgggtcccctgtaggcagagccctgggtcacacgcggacgcggtcccgatgtt

SEQ ID NO: 114342 - DNA, 122 bp, Homo sapiens
ctgaaggggagggaataagaatgggtgggctggaccttcacttgacctctcctgtccctccggagcaggcagcctcaagagatccttggaggcacaaagactgttctgtgtgtgtgtttgta

SEQ ID NO: 114343 - DNA, 122 bp, Homo sapiens
gtacattttctcctgaataatgacgtaagcacagcctttctagggattaatgatgaccgccgggagggctgacagcccagaaaacattgtgcaccatctcagctctgttcttctctgggcaa

SEQ ID NO: 114344 - DNA, 122 bp, Homo sapiens
ctctcggccggctggcttcccggcctgggcagcggcttgagctctgagcacgtgactgaccggaccctggcaccaagaaaaaagcgcacacatccaatgaaaacaataatttatttaaataa

SEQ ID NO: 114345 - DNA, 122 bp, Homo sapiens
gcgccgcctttgtcctcgtcttatataggccagctggcacggccccgcctactccacgatcgacagctccaatagccaattgcaattactatgcttgatgacactaagttgcgaacctctga

SEQ ID NO: 114346 - DNA, 122 bp, Homo sapiens
ggccagctggagttctgggtgggcgtgggcttggcggaccccacactcagagcagccggccggccctgctgtccccaggcaataagaggcttagcacccgggccagcggctgtggagggtgt

SEQ ID NO: 114347 - DNA, 122 bp, Homo sapiens
cagcggaaggtggggttcagagagagagggaccatgaaattcacttcgctcaaacttcaccgttttgcagacaaagataatagaaacctagagtggatcaaggatttgcttaaggtccacag

SEQ ID NO: 114348 - DNA, 122 bp, Homo sapiens
ccctggcccctacacagacacagacaagtatgcgcacggatgcacgcacacacatacacacgcacaatgcacacaggacggcccagggctaaaggaggcacagcccaggacctgaggggtgg

SEQ ID NO: 114349 - DNA, 122 bp, Homo sapiens
tatctgctttgaagggcctacctggcccctcgcctgtggagctcagccctgagctgtccccgtgttgcatgacagcattgactggtttacaggccctgctcctgcagcatggcccctgcctt

SEQ ID NO: 114350 - DNA, 122 bp, Homo sapiens
ttggaagagccagctcagagaggggaggaagggagggcgggtcaggagacagggtggggccgggatgagaggaaactgtaaaaccaacggggcggattcacgaaaaattcccgagcgtggtg

SEQ ID NO: 114351 - DNA, 122 bp, Homo sapiens
acagcagcagcacctgagatgagagggtgaatgaaggtaggagatttcaccgcccgcgggcggcaagggatctgccgcagctctaaagcactgcatgctgggagttgtagtctcccggggag

SEQ ID NO: 114352 - DNA, 122 bp, Homo sapiens
ggcagcacaccgcaggataaatgcccccaggtgcggggtgcagggtcccgcctcacatgccgtcctggctccctcctccctccatggaggcctctgtgggtagagactcggctcctcctctg

SEQ ID NO: 114353 - DNA, 122 bp, Homo sapiens
cctcagcccaaccccccactgctgtcccgcccacgggggcgggagccgtgtgcgccacgccgaacactagtctacgcctcggcatattctattggctggaaggccgtgggaagcggctacca

SEQ ID NO: 114354 - DNA, 122 bp, Homo sapiens
cgccatgttgttgtggttgtgagaaggcggcggcggcggcggagtagcagccggacgagacgtcccagcggctcaggcgctgcccagcgccggccctggcagggagcctggtggggtggcgg

SEQ ID NO: 114355 - DNA, 122 bp, Homo sapiens
cagcgggagttggaggcggggaggtgcagaggcgtgaagcgcgccgaaaagccgggggcgcgtcggagagtctataggagctttcacgagagaaatgcccgccaaggccgcgccgcacttac

SEQ ID NO: 114356 - DNA, 122 bp, Homo sapiens
ttcgagccggctcgtgggcgtggtcaggtgcgtgggcggggactactgggcggggctcggcgcgggggcggggcctggcgggagtagtctcggggtcggggcggggcccggcgggcggggct

SEQ ID NO: 114357 - DNA, 122 bp, Homo sapiens
agttgctagcaaacctgactcagcccagggggtgaccttgaggctctggagcaccaatctcgatgcacaccttggccaggactctgcctctgcctggggtggaagagaggccctggtgagag

SEQ ID NO: 114358 - DNA, 122 bp, Homo sapiens
aactgaagcccagcaaacaggtggccccgagacgaggccgcgtctccatggcagtaggtgcgcggggccacggggctgagcggacgcagggccggagtcccagcagacggtccacacagttc

SEQ ID NO: 114359 - DNA, 122 bp, Homo sapiens
gtggtttcgcggaggaatgatttaccatcctcggacgtcctcggcactgcgaagatctagcgttttcgataaaatggtggaaatcctgggccacatcgaagttccagagtgcgaaggttgga

SEQ ID NO: 114360 - DNA, 122 bp, Homo sapiens
gcaggacgcgggccgaggctcccagctgccggccatgccctcggctcctctcccgacacgcgccagcactgccccctgctggcctcccgggagcactgcccgctgccgcggcgggaggagac

SEQ ID NO: 114361 - DNA, 122 bp, Homo sapiens
catgagaaaacacccgcccggcagacgcaattaaaccttctcagcctgcgggctgagaaccgggacaggagcggaagagaaagagaaggaaaattcccagaatcaggtcattatatttttcc

SEQ ID NO: 114362 - DNA, 122 bp, Homo sapiens
cacaagagcttccttggggactaagggactgggtagttcgggcatgaagagtgccctccacgtatttaagagataaagatacagcattttctggaaaggacaatagtcctgcaagtcctcca

SEQ ID NO: 114363 - DNA, 122 bp, Homo sapiens
ctccattgagccctggctaagcaccagctcccaccaggcaggaagcacaggcccaggacacgcacactagggcttggcgggtggggtccaagtcaggaagtgagagccgaggccctacagga

SEQ ID NO: 114364 - DNA, 122 bp, Homo sapiens
tagggacaaatataattcctcagtgtttattcacttcatggccgcttggacatagacacccgggttaagggacccggaaggtgccttctgaaaatatggcgaccacccttcaattgtcacag

SEQ ID NO: 114365 - DNA, 122 bp, Homo sapiens
ttcctgttcctgggtctgggtggtgtggagtgcctgcttctggctgtcatggcctatgaccggtgtgtggctatctgcaagcccctgcactacatggtgatcatgaaccccaggctctgccg

SEQ ID NO: 114366 - DNA, 122 bp, Homo sapiens
ctgcggtccttctgcccaggcatgtgacgaaggtggtgaactcagcactcactgaacacccgcccatcccaccccggatggggactctggggtgtgcatcagcagtttcaagaaacacagaa

SEQ ID NO: 114367 - DNA, 122 bp, Homo sapiens
tacaggccccgcccgctcccctgggccgagggccccgtttcctgaacagcaattggtggacggcaacaaagccttagcaaccggctcctagtgacccgcggggcgcctggtaactggggctg

SEQ ID NO: 114368 - DNA, 122 bp, Homo sapiens
ccatcagggtaagggtacctggacttgcggctttttaggtcggcctggctccgctccttccgcggtgacgaggtcccccggcctcctagggttgggaagagctgctttcctgactctcgttc

SEQ ID NO: 114369 - DNA, 122 bp, Homo sapiens
atatcctatcttttctccacaataaaattgtgaactcttcttggaccagaacccgaataacgaagtgttcaataaatattacgttttttggtttgtttgtatttgtttgtttgttttttcga

SEQ ID NO: 114370 - DNA, 122 bp, Homo sapiens
ggctccggctggggcgcctgcgatgtctcaagatggcggagctgggcgaattaaaggtaccggccccctccccccatccccatctggactcagcccggcggtacgccgtgtccgggaagcga

SEQ ID NO: 114371 - DNA, 122 bp, Homo sapiens
agaattgctttaatttaggtgacttctatttctatttacacttatatagctctagcattgcgccaggtactattataagcagtttacacatatttacttatttaatcctcttaacagctctt

SEQ ID NO: 114372 - DNA, 122 bp, Homo sapiens
caggccagaccgaggccgagagcgatttctccagacaacagtctggaattcctcaaggagcgtaccctctagttttcacgataggataaagggcttgagagagcactgaggaggagtcactt

SEQ ID NO: 114373 - DNA, 122 bp, Homo sapiens
tgaccactggaagctgttctccagctgctcccagcccagaccaggccaaccagctccgtccgtgtatgcagcctcaaaccgatgatgctgttgccaatccttgcttctcagctgaacgtgtt

SEQ ID NO: 114374 - DNA, 122 bp, Homo sapiens
ttgcttttgacgtcttaggtggcagggctgttccctccaggcaaatgcccttcaaaccgacgatcattgtgcccacttaccctgggctggagagttggtttcaggttcctacaggagatagc

SEQ ID NO: 114375 - DNA, 122 bp, Homo sapiens
ccgtggtgggccggtcgctgtagcgcacgacccccacacgggtgcggtcggggcccacctcgaaggtgtccaccaggttggccacccactgccggaccttctcaaagtcctccttgcccacg

SEQ ID NO: 114376 - DNA, 122 bp, Homo sapiens
cttgcgtcgtggccatgttggtcctgggggaggcgcctgcgcgcggtgaggtagtttttgcgtttggctttgccgccgcggtgtagtccgcgggggcgtctcgcgcgggcagactgccgccc

SEQ ID NO: 114377 - DNA, 122 bp, Homo sapiens
cagcgcgtccgcctcggccacctccctgctcccgcctcggccacctccctgctcccgccccggccctgggggcctctgttcagcctccaccagctcagtcgcccacggagactcccgaactc

SEQ ID NO: 114378 - DNA, 122 bp, Homo sapiens
cagcagttctctggggtcccttttatgagggcacaattccctccactcccatgacctaatcgctttcccaaagcctcaccctaaccttggggtctcagcctgtgagtctggtcggggggcac

SEQ ID NO: 114379 - DNA, 122 bp, Homo sapiens
ggctgtagttaatcatgcaagctgctgtgtcactggggccggggtagttaacagttaactcgatggattaaggatcctcagccaggctgagcccatcacagagttacgtgcaaaaaccggat

SEQ ID NO: 114380 - DNA, 122 bp, Homo sapiens
acggggtcgcggccgggcagaggcgctcttcacatctcagacgggtcggtggggcagaggcgctccccacattccagacgatgggcggccgggcagagacgctcctcacttcctagacagga

SEQ ID NO: 114381 - DNA, 122 bp, Homo sapiens
gagcgctaaggaccgtacagccatgtcggtgacactggagcagtgcctgatcctgcaacacgagcatggcatggccccgcaggtcttcacccaggccctggagtgcatgcgcaggtgagtgc

SEQ ID NO: 114382 - DNA, 122 bp, Homo sapiens
agccctggccggcgaggactccccctggcgcttccccagggcgcggggcagggacggaagcggagcaactctttgcaggcagagaggggagctgcatttcagcacacttggcttccacgtct

SEQ ID NO: 114383 - DNA, 122 bp, Homo sapiens
gtgactatcccatgtcatattccttgaaaatgacaccataagtagatctgtatttactgacgtaaaagatgtctaagttgttaaatgaaaagagtacagcatggtctcctgtactgttgata

SEQ ID NO: 114384 - DNA, 122 bp, Homo sapiens
acagcgccccagagcacaggccaggcttcagctcctgctccttgggcttgtctggaggggcggggtgcagctggtggctggcactctccggggaggagtgcaggatggctcctgaccgtggc

SEQ ID NO: 114385 - DNA, 122 bp, Homo sapiens
gcgagagcaggatgccaaggctcctaggcctggaaacgggaaggaatataaatactgccccgagattgaccagactggtgagcagccaaagacctgttcaaagggtgtgtgtgggtcaggga

SEQ ID NO: 114386 - DNA, 122 bp, Homo sapiens
gcactcactatctccaggccattctctgttatttctattgttactattattattttgagacggagtctcgctctgtcgctcaggctggagagcagtggcaagatctaggctcaccgcaatct

SEQ ID NO: 114387 - DNA, 122 bp, Homo sapiens
gctccgggggcggtaccccacagtcgaggtggtctggagtaaacgaatctgccttcctcccggggtgaaggcgatggtgaccgggttcacacgtgagctgcagtacagcagttctccgtggc

SEQ ID NO: 114388 - DNA, 122 bp, Homo sapiens
aagcggcccgcttctttctcatggcaccttgaagacgcgccagcgtgaaaggcctctcaccgcgcatgaccatgggggcaggacgtgagggcgcgggttagtgtcaaaataggaagaggagg

SEQ ID NO: 114389 - DNA, 122 bp, Homo sapiens
ggccgccgccgctacagccgggcccgtcacgtgaacggcgcgggagctccgcctccgacgcgccgaagccccgcccctagcggtgccccctgcccacccgcgcgaccgccttccgcccgcgc

SEQ ID NO: 114390 - DNA, 122 bp, Homo sapiens
caggcacagtggctcatgcctgtaatcccagcactttgggaggccaaggcggatgaatcacgaggtcaggaatttgatacaagcctgaccaaacatggtgaaaccccatctctactaaaaat

SEQ ID NO: 114391 - DNA, 122 bp, Homo sapiens
gttctctctccttgccagtcgcctctcaaggcctcccgccagaccaagatagcagagagacgtgctctttggagaccgcctctagggcttcgctggcgtgaaagtttgccgcgccaggtctc

SEQ ID NO: 114392 - DNA, 122 bp, Homo sapiens
cccaattcttgtcaccttcgaggaggccatggaaaccccaacacctttgccgcctgtacccgcctccccgacctgcaacccagccccacggacaatccagatcgagttcccacagcatagct

SEQ ID NO: 114393 - DNA, 122 bp, Homo sapiens
cccgcccagcgggggagtccgccctcacctcctgttctccctgggtccaggcgatgccgccgtcaccagccacgcggagcagccccagcccgtcgtggccaccaagggccccagggaggccc

SEQ ID NO: 114394 - DNA, 122 bp, Homo sapiens
cctgcacctataccactttcctgaaggtctgggtaaattgatgaggggacacaaactgtacgatgcttattttttaaaatgaaaagatgtttaacaaagcattttattcatatatgaaaaca

SEQ ID NO: 114395 - DNA, 122 bp, Homo sapiens
ccggatcaaggtactggggatgccgctagggtcaggcccgcgagcgcggagaagacagagcgcggcgcaaaagggaaagtggcggggccgccacgcgcggccgggcggcggatgtgcgcagg

SEQ ID NO: 114396 - DNA, 122 bp, Homo sapiens
ggggcgtaggcccagtctttccaaactcctggagtgggcggaggaggagctaaagacaggcgctcatcgccatctggtggccaaatagggatgcccgtcacctgccgccaatttttgaggaa

SEQ ID NO: 114397 - DNA, 122 bp, Homo sapiens
ggccgcctgcacggccgccatcttcccggagggcccgacccaaaagtaaggaggatagtacgttaatttccaggtcaaggtgcgaagccccacctcttccgggggagagggggcgggcactc

SEQ ID NO: 114398 - DNA, 122 bp, Homo sapiens
agaacaacaaagatggcacctacgcggtgacctacgtgcccctgacggccggcatgtacacgttgaccatgaagtatggtggcgaactcgtgccacacttccccgcccgggtcaaggtggag

SEQ ID NO: 114399 - DNA, 122 bp, Homo sapiens
aagtgtatgatcacccaacaaaggctctatcactctctaagcaaaataaacaggataaaacgtgacaattttatcattatggattattttaatttttattatttgtgttttacaaactttct

SEQ ID NO: 114400 - DNA, 122 bp, Homo sapiens
tttattccatcgtattcccaggtctcatcggtgtcgggaactttgctcattttattccatcgtattctctctgctgttcagaatgggcagatgggcagttcctatcggtccatctctgagtt

SEQ ID NO: 114401 - DNA, 122 bp, Homo sapiens
tgggagcaacctccccttggttagtgggactcagaccccacctcttaaccatctatatcccgctctcactggtgagccatcttattttacaagtgctccttggtcctgtccatctgtcctgc

SEQ ID NO: 114402 - DNA, 122 bp, Homo sapiens
cttcctgcgccatgactgcaggattagacactctacttccgcccttcatccaccggacttcggcccggagttactacttccgctctagactccgccccttggcgcacacccttaaaggacca

SEQ ID NO: 114403 - DNA, 122 bp, Homo sapiens
gctcggaaactgacattcgctacaaatcagggctctcctgactcccagcctgttggtaaacgtttcccagcacatcattgtctccatctgcccacttgctgcttaggagacttttgaagatg

SEQ ID NO: 114404 - DNA, 122 bp, Homo sapiens
gatgagccagccctgctatgctgaaactactcccggcccagtgctagccctttgggaccccgtttgaacgtctgactgccctttgacacctggaccagtgggcaggaagagaaactaaaatc

SEQ ID NO: 114405 - DNA, 122 bp, Homo sapiens
ctggcagcggagtgggggcagtccaagctccggggtacctgcaggaggagactcgaccagcgagaggggccagcgagggtgaccaggtgcccgcttggggaccccgccggcggtggccaggc

SEQ ID NO: 114406 - DNA, 122 bp, Homo sapiens
cagttggaaagagggggtggagcccgggccttgtcaagtgtgaccaaccagcgagaggagcggactttgcggggtggagccctgaagccctctcccaatcgcacaagtgtaggggcggggca

SEQ ID NO: 114407 - DNA, 122 bp, Homo sapiens
gctggggtgggctgggctggcctgggaccgcctcgatgggacaggctcgggtttccctggcgctgtttctccctcctgcggtctacggcgaggcggagtcacagagtcctgttttcgtgctc

SEQ ID NO: 114408 - DNA, 122 bp, Homo sapiens
catctgggggagaggaagggagggctcagtgccgtggctgggagcactctgggaaggagacgtgctggcagagagggatcgggatctccgtcactcacatcataggacaggcatttgagggg

SEQ ID NO: 114409 - DNA, 122 bp, Homo sapiens
agtgggacccgctgagtcgttagtactgggtgctttgccccggtccccgccaaatcacggcgccgagccctagcggacccatcgctccggggccgggtcgggaagcgcagcctgggcgagtc

SEQ ID NO: 114410 - DNA, 122 bp, Homo sapiens
cacccttctcagaagccccgcccctaagatgcaccgccccaaccggacgccccgcccacgcggttcctggaagggacccattgcttggtggcaccagcttgaaggctgcaaaagtgaacccg

SEQ ID NO: 114411 - DNA, 122 bp, Homo sapiens
gtggctgcgcagtggagcctcggcgccttttgcggctgcgcagtggaacccctgctgggccgcgggtgcggttgtttcccactgcagtaatttactcctgcgggttgaactctactgacgag

SEQ ID NO: 114412 - DNA, 122 bp, Homo sapiens
tgtggctccccttcaccttccgccttgagtggaagcagcctgaggccctcaccatcctggcgccatgtttcttgtccagcatgcagaactgtgagccaaatgaaacttttttttttggagac

SEQ ID NO: 114413 - DNA, 122 bp, Homo sapiens
tcccacccgccagcgagtccgcaactcccggccccggcccgcgtccccagctccaggccccggccccgccccgcccctgctcaggcaccgcccactccgggctctgggccctcctctccctc

SEQ ID NO: 114414 - DNA, 122 bp, Homo sapiens
agcagttaacacctgtattattatacaacagtctggagccacaggccaggctgtgagccacggtgaagggcgacattaataagggatgaatgggagatgagaagattcagcccatggagaaa

SEQ ID NO: 114415 - DNA, 122 bp, Homo sapiens
gcaaagcttaaactgtgagtaaccatccacacagcaggaaggagagcacgaggctactcacggtcaggatgttcatatggcaaccagtggtgtttggtattctggtattcaaagtgggagtt

SEQ ID NO: 114416 - DNA, 122 bp, Homo sapiens
gtccaacccgttttctcttgggatttttggctagccccttgacgccactttttcttcattcgcagacccactttctagatgggtcatgaacactgtccacccaactgcagtttcccgtcaga

SEQ ID NO: 114417 - DNA, 122 bp, Homo sapiens
tcgtagacagttgagcaatactttctaagggctggtcggagtcaggaaagtcaggtaaggcgcctcacgtgcacctcaacgcgtcgcgggagcgcgtcccgacctcacacatggacaagctc

SEQ ID NO: 114418 - DNA, 122 bp, Homo sapiens
agatacaagattgatttgtaaaacccttgaaatgtagatttcttgtagatgtatccttcacgttgtaaatatgttttgtagagtgaagccatgggaagccatgtgtaacagagcttagacat

SEQ ID NO: 114419 - DNA, 122 bp, Homo sapiens
cgttctggggacccacttacctccaggagggagagagggagggagggagaagccggtgcccgcccagcggagatgccagcgcctagctttgcccccagtgtgagctgagggtggggcagaca

SEQ ID NO: 114420 - DNA, 122 bp, Homo sapiens
catggcatgggcatacctgcctcttgccttgctctgagtgggcaaacctctgtggacgtgcgagcttgatgccggactccagcatcaaagacagaaggaaccagctttgtgaatgaggtcaa

SEQ ID NO: 114421 - DNA, 122 bp, Homo sapiens
agacatcagcttcaaatggaaagtactacttatgacgcttcccactgaggaagtggcaggcgccttattggttgtgctcctgcattttacttagaagttttctagaataatgcaacagagga

SEQ ID NO: 114422 - DNA, 122 bp, Homo sapiens
gagattaaacaaaaggcgaggggttggagggcgcgaaacggacctcaggtgcagggcagacggcatttgagaggaaactgggagaggccggagtgcgacttggggagtcttagcctccaagg

SEQ ID NO: 114423 - DNA, 122 bp, Homo sapiens
atctcaaaaaaaaaaaaaaaattctgtaggcagctttaaatcttagaaacttatgcttaacgcatgaattctctgtattcctgcctgatacacctccaaagatggggggccagttatcatga

SEQ ID NO: 114424 - DNA, 122 bp, Homo sapiens
tagcagcagacaccgcagcctcgtcaagatgtcggacaaaaaggaagcgctgctcagaaacgggcccaaaaaccaccgtccgctgtgagtacttccggggcaaaaggcggagccaggcagaa

SEQ ID NO: 114425 - DNA, 122 bp, Homo sapiens
acttccgttggaatgggattcatgttacaagcttgaatggttcagtttagatatgtgaagcggatgtcatcattagcactgatgactgacagtagttataaaaattacaatcaggaatgaac

SEQ ID NO: 114426 - DNA, 122 bp, Homo sapiens
atagtcttctgggcaccttctgcagggattacagcttggaagccttggggcagctgtgctcggatttggcacagaagctgtgaaggggaaagtgcaaagatcacatagcacccagactttag

SEQ ID NO: 114427 - DNA, 122 bp, Homo sapiens
accccgccctcactgaggcgcggagccggatccggaggcgccgagccgcatccggagccgcgcacgcgcaatctgcatgaacgaaggccagtgcttaaagacgtgccattcattgccagaac

SEQ ID NO: 114428 - DNA, 122 bp, Homo sapiens
agcacctgggccagcagctgctgtgctcggtttctcgcccaaccttagctgcctccccgccgagcaggcttgggacctgcagcccgccatgcctgaacctccccccgccccaggctcctgcg

SEQ ID NO: 114429 - DNA, 122 bp, Homo sapiens
gtggggtgggaagggggcgggtgcagccggctgagagcttgatgatttcctgccctcgcccggcgctcaccacagcttcctgccgcaggcgggcgggagggcgggcacggagaggcgggcgc

SEQ ID NO: 114430 - DNA, 122 bp, Homo sapiens
ttcctctgactatcccaatctctcataaatttgatgccagaggaacagaaacatggagttcgcccatccctgttcagctggagatgaactcacatcagggagcagtttgtgttgcagccaga

SEQ ID NO: 114431 - DNA, 122 bp, Homo sapiens
agtccaacctcttagctctctgtgattctgacagtgtgttgcttttatctacagtagtagcgatgtctttacgttagagaaaatcagagcccatgggaaaggatgagatttcttattgtggg

SEQ ID NO: 114432 - DNA, 122 bp, Homo sapiens
gatgtggcaggagtgaagaccacctgcccagtcacctgccacacgcaacagcccaggccccggcagggtgaccctctgcagagctgccccaccaagacccctggatactcctccacgctcct

SEQ ID NO: 114433 - DNA, 122 bp, Homo sapiens
gaggcggatgttgcggtgagccgaaatcgcgccactgcactgggcaacagagcgctacttcgtctcaaaacaaaaaaggcgttttacagtcaggcaaaccctgcctctgcccagtccagcgc

SEQ ID NO: 114434 - DNA, 122 bp, Homo sapiens
cagagaccttcagggagagtgggaacaagctgtgtgggcgtttgtggaagaagcagtgagcgagaagaccctgagcctaagtggactccacagggttgaggaaaagcgggaagaccagtgag

SEQ ID NO: 114435 - DNA, 122 bp, Homo sapiens
caaacactcgctctactcctagatagtggagctttgcgacagctcggcagagaagcacttcgctctgcccagctgcagccaggcatgacatggtgtctgcaaggaaggggctcaggtgggcg

SEQ ID NO: 114436 - DNA, 122 bp, Homo sapiens
tcaaagtgcaggtcggggtcattcctggaagttggcaggaagtcctgggctgcattggcacgagacacctcacctaaggctgctcggaaccgccgagaagaaccaggtccaaagtaggcggc

SEQ ID NO: 114437 - DNA, 122 bp, Homo sapiens
gctcgcgaggagtactggctttgaagactggagatttggagcccgccacggacccctccccgcccgcgtcggacatgctgaccactgtgtactcggagccggcctcggagtgacgagagctc

SEQ ID NO: 114438 - DNA, 122 bp, Homo sapiens
caggctcccaggggcaggagctgtcaggcacgcggctcaggtccaagtccgagtgcagctcgtccaggccatcgaaggtgaagagggccacgtgggggaagcgcagcaggaaggcaaacacc

SEQ ID NO: 114439 - DNA, 122 bp, Homo sapiens
cgcccgctgaacccggagggtgcggtgaggaaaataacggtctcaccttgagtcggaggacgtccggctagctctgtgaacggtgttaccgcactcgtctcttccggaggtagaggggctac

SEQ ID NO: 114440 - DNA, 122 bp, Homo sapiens
gatttgtagttcccttacggccaccaagtgcacttagggcaggcctcttactacgagtcccgtgatgacccgaggccgggcagcgcctgcgtattgaagccgagggagcgtgcgggcggtac

SEQ ID NO: 114441 - DNA, 122 bp, Homo sapiens
tatgtgctgtgggcagtgacagggctcggtgagggtggagattgggaagggaagccaccccggccctgccgacctcagagagtctcccattggactctgcctcctggtcccctccctggact

SEQ ID NO: 114442 - DNA, 122 bp, Homo sapiens
tagaatcacctggagggcttaaaaaaatccattgcctgggccccactctagaccatatatcggaccctctcacagcaaccttctatggtaccaccattacctttgttttgcagatgagcaga

SEQ ID NO: 114443 - DNA, 122 bp, Homo sapiens
cccggcttcgggtgactcgtccccccttccaaacgtcagcacagtcgaaaacgtgcaccccgcagcctccactgccgcgagccacacgccacctccagagggccggggcctacagcctcaag

SEQ ID NO: 114444 - DNA, 122 bp, Homo sapiens
gagcttgtcaggggagcgagcgcggggacctggactgggctgagcatggagtgaggaggacgagagcagagagacccccgggacttcatcaggcctggcagctgactgcatgtggggtgaaa

SEQ ID NO: 114445 - DNA, 122 bp, Homo sapiens
tcctcataaacaggcctttcttgcctgccctacctacgggcccttctcatctcacgtcatcgtggaacttccttcaaggcacttgcaccaccggtgatgactggtgagttgtttactctgtt

SEQ ID NO: 114446 - DNA, 122 bp, Homo sapiens
caaagtgtactatctctcgcagttgcctctgctccacaatttccagggttgtcaggcagacgtgagaaacaagatctgaggaaaactttatgcattaataaataagaatacctggacttcct

SEQ ID NO: 114447 - DNA, 122 bp, Homo sapiens
ctcacagaagtcttttgtgaatcaacatttgtgaccctgaggggatgaggtggaggagatcgaggagtctggggttgggccaaccggactcagagtaagatccaataaattgatgaccaatc

SEQ ID NO: 114448 - DNA, 122 bp, Homo sapiens
agcacagtcactgaaaacgttttgataccagaaaatcatttccacgacagtgcaagtgttcgaaagcacaaaggcagactgtctacccgcgacagttcgcaagttgcggtggcggggcggct

SEQ ID NO: 114449 - DNA, 122 bp, Homo sapiens
aatttaaaaattttttaattatttagagagatgaggatctcactgtcacccaggctggagcgcagtggtgcaatgataactcaaagcagccaggccctcctggactcaagtgatcctcttgc

SEQ ID NO: 114450 - DNA, 122 bp, Homo sapiens
ctttaggccaaaagtgccctagtcgagcatgaaatcttcacagaagttgagagtccccatcgccctaaagtcgaagctctataatcaccaaggagggtatagtgacaatctaaaactaatac

SEQ ID NO: 114451 - DNA, 122 bp, Homo sapiens
aggtctgtgagccgtctccctgtctttgatggcctgtgttttttccactgaggcctgtttcggtttggattttttctcatgcatcctgcttgggacttatgttttctgagtccaggaatatc

SEQ ID NO: 114452 - DNA, 122 bp, Homo sapiens
caagctacctgcgacagcttgaacttttcctagggattccgctccacccgccggttagagcgtattgctcattaaatccgagacctgtgtgcttgctactgaaataaaagaagtattttttc

SEQ ID NO: 114453 - DNA, 122 bp, Homo sapiens
ccgtgctccgtgctccgtgctccgggacgaagggggctgtggggtcggcagagggcttcccgtgaggaggagcacaccaggagtgctgaggccgggggtgggaggcgggcagatccctcagg

SEQ ID NO: 114454 - DNA, 122 bp, Homo sapiens
aaacatactattgagcaacgaattaaaacactgagcttcctgagacccaggtacgccaaccgcttacataattgtcattttcaaaagaggctgaaagtttctcaaaggaagaaaaacttttc

SEQ ID NO: 114455 - DNA, 122 bp, Homo sapiens
gacaaggcaaaggccatttctacttctcttgtgcttaaagaaatgtacctcaaaaggtggcgatctgaaactgccttcaacaattggcagtggaggcttggctactgagtcttgcatatgca

SEQ ID NO: 114456 - DNA, 122 bp, Homo sapiens
tttcagcacagtcagccaagggcactgaggaggcagctgggtgtggggagcagaggggggcggggggacaccagcctcacctggcaaagcttcgtagcggctcgaaggctcgcagtacgggg

SEQ ID NO: 114457 - DNA, 122 bp, Homo sapiens
gaggcgacctgggcagacgctgctgggaactttgaaaaactttcctggagccaggcttgccgcagattcgaggggaagcctcggccgcgtcccaccccctcccaaatccgagtctgcggagc

SEQ ID NO: 114458 - DNA, 122 bp, Homo sapiens
gcgcacaagtgaggggaagccccgccgcgggcgcttaaatgcgtgcccgtcgccccctagcgctcgggaggccacacaccgcttctctgcccagggcatttaaaagggagcccctcccttcg

SEQ ID NO: 114459 - DNA, 122 bp, Homo sapiens
gggggcaaaagataactggtcttcaggcatctgctatagaaatgtgcaggttggacagtgcgtaacccacccaactgcacctggaggtccagcacagagtaggtgccagtcacgaagtgatc

SEQ ID NO: 114460 - DNA, 122 bp, Homo sapiens
ccctgatggcacacactgcattttaattgcaaggttacctgtcaatctcccctactaggccgggcacagtggctcacacctgtaatcccaaccctttgggaggctgaggctgagacctttgg

SEQ ID NO: 114461 - DNA, 122 bp, Homo sapiens
catgcaggggcagcagtgacaaacgctcttccctcctcccggcccgtgtggcagcatgaccgataggagcctcaccctttgtggaagatctcaaacttgatgcctttgctctggatcaccct

SEQ ID NO: 114462 - DNA, 122 bp, Homo sapiens
taggctggggtagcacatggactcccacagagccgaagctcacgtcactggtgcggggtgcgggggtggggataccgcgaccacctgaggctgggttcccggaccgcccaagggcaggaatg

SEQ ID NO: 114463 - DNA, 122 bp, Homo sapiens
tcccgggttagttgtgtttggacgcacatacaccactgtgtggcagtcgcctgtggcattcggtacaggagcctgcacacaggtctgtggcggaggagcgctggctgtaccttgcagcccag

SEQ ID NO: 114464 - DNA, 122 bp, Homo sapiens
tgctgagccgccgaggggctgggtcttcgcctttatttctggtgcacgtctagaggggcccgggcagaggccacccacggtccctgaagtagggcctcagctcctccaggctgagcggaggg

SEQ ID NO: 114465 - DNA, 122 bp, Homo sapiens
tctaccctgggcctgcctcggttgctctcttgcttccttcttccttcctctcttatcactcgaaaaatctgtacctggaggagctgtgtattctagcagctggctctgaactgatgcccaac

SEQ ID NO: 114466 - DNA, 122 bp, Homo sapiens
gcaatggcggctaagggcggggccacagcccgccggccccgcccccggcagcagctgcgccgtctggctccacgcaggccccgcctccagacccgcctctaccgctcgcgctggccgccgca

SEQ ID NO: 114467 - DNA, 122 bp, Homo sapiens
aagacctctgcagccattctgcttcctgtccttccactcctgtgggacctcagagagctacggggctccctgggtaccaactggctcctgaggcctgggggagggtggtcttctgggagaag

SEQ ID NO: 114468 - DNA, 122 bp, Homo sapiens
gcagatcggggagggagccctgcccgggagagggtgggtcgtaggagctcgagggtctcccgctgtggacctttgggagccgtgtgtcttgaactccgcagcagctcagtctgtcagcagat

SEQ ID NO: 114469 - DNA, 122 bp, Homo sapiens
ttcatacacttccatgccacatagctattactcgcaatacatagacaatgccaaaaaattcgcatgaagaaacatgaaggcatttatccaaccagcctcctaaatattttcctacctccaat

SEQ ID NO: 114470 - DNA, 122 bp, Homo sapiens
ctgcacaagcgccttgtggagcttgggtctgacccagtatcacgtcagcgagaggagcttcgcttgcaagaatcccatccgagtcgacttgctcaaagcggtcatcacagaggccgtctgct

SEQ ID NO: 114471 - DNA, 122 bp, Homo sapiens
gttgttttaaatttgaagagtctagcacccacagtgtcggggttctctgtgcctagatgtcgtcagctccaggctcctagtatttggtgaccacacaggccacagccgcccacccgcccgtc

SEQ ID NO: 114472 - DNA, 122 bp, Homo sapiens
gggaagcgccgggatgctccacagactgcaggcttcctgctccgcccctgccctgtgccccgggaccccctggagcatgccagccaggacatgacctccagctgccaatcactcttccctcc

SEQ ID NO: 114473 - DNA, 122 bp, Homo sapiens
gcttgctgtttgctgcccagccataacccactcagtgacagacgaacacagctaaggcctcgctgccagccttctgacggcgggcgagcacacggtctcttcccctgccccaactggccctc

SEQ ID NO: 114474 - DNA, 122 bp, Homo sapiens
gtcagaggtatgtttttggaaatatcatttggagtgggatgtgtcctgtatgactggaatcgttttctatttgtaacagagaagcgtgcccactccttgcacccatagataacccaatgccg

SEQ ID NO: 114475 - DNA, 122 bp, Homo sapiens
gcatagatgggcgtgcaggaggccatctgcaggtgcctgaacttcagtgcggggtcctggcggcggggcggcagggatgactacgcagaccctggccctgaggcgggaggaagcacctcctt

SEQ ID NO: 114476 - DNA, 122 bp, Homo sapiens
tcgtagccacgaggccgagaagtcgtgtgtgtgcttttcctctacgttctggctccgtctcgggttctcgggcctggggccctccctgcagcctgccccgcggtgggcttcctctctggtgg

SEQ ID NO: 114477 - DNA, 122 bp, Homo sapiens
ggtgaaactggtgcttactggcttaaaggagagataattgtttccattttttcccaattccgcattcagaggctcatgttgtagcttgacactggctgtggtaggagtatttacaccatggg

SEQ ID NO: 114478 - DNA, 122 bp, Homo sapiens
tcccgctccccagggagaacggtgggcgcgtcccagggaacacgacacccaaggagagggcgggcgcgagtcccaccgggtgacccgctccctggggggcgtgaagcccccagacctgccct

SEQ ID NO: 114479 - DNA, 122 bp, Homo sapiens
attcctccattacccactgaccctcaaagatactgctaatcaaacttccacagacatcaccgtcactgactcccaagccccaatctctgatgctcccagatgctcccaatcactgaatttcc

SEQ ID NO: 114480 - DNA, 122 bp, Homo sapiens
acggtatttttgaagctgataaaatttgctgtgataatctacctgggaggctggctgaggcgaggctggctgaggtggggctactctgtaaagtaggtggaatcactggggagttactgact

SEQ ID NO: 114481 - DNA, 122 bp, Homo sapiens
gggcaagggttggggtaggatgccaagggaatgagaatcaaaggcagcgcagggctcacccggcataacctgccttgcttgggtgccagagagaataagcagacccctcctcctgcctcttc

SEQ ID NO: 114482 - DNA, 122 bp, Homo sapiens
ctgcacccacgacgagcgcagctgcctgagcagcctgcagtttgtgtcgccgctgtacttcgtgagcttcgtgctcaccgcgcagttcgtgctcatcaacgtggtggtggctgtgctcatga

SEQ ID NO: 114483 - DNA, 122 bp, Homo sapiens
gaaaaagcgaacttgtgtctcggccgaccctgccgcagccacaattcggcaattcggatccggagcgcactctcactcaaagtttgccaaccgccattcgttcgccctccgggctgcgctgc

SEQ ID NO: 114484 - DNA, 122 bp, Homo sapiens
gccacccctgccggcttcttttttcttgttctccgctgccttcagcacctcgaaggggtccgattcgtcgtcaaataactggtcgaatcggttggtgaccacacagccgaagccttcctgta

SEQ ID NO: 114485 - DNA, 122 bp, Homo sapiens
gtgccacagaagcgagacatccccgactacctgtgtggcaagatcagctttgagctgatgcgggagccgtgcatcacgcccagtggcatcacctacgaccgcaaggacatcgaggagcacct

SEQ ID NO: 114486 - DNA, 122 bp, Homo sapiens
gccgcctcctgaatgacaggcgccggcatcgctgcattcctcccaggtgactaagagcgccgtgccacctgacctcagtgagcagcacctgggaatgccggcatgttcccggccaggcacgt

SEQ ID NO: 114487 - DNA, 122 bp, Homo sapiens
ggaaaacagcatacctcatctggaatggaaatctatcgtctctcgcccttgcacgggtcacgattatacaccttcgtgacctttagcgggcttacatatgtatctttttgtgttccgcaggc

SEQ ID NO: 114488 - DNA, 122 bp, Homo sapiens
agaatctagcaaagcccattcctcctgggtaaagttcacagccacatcctcaaaagccaccgagtcctagaacattccacacatgtggatagaaggatgggtgagactgacagcactgggaa

SEQ ID NO: 114489 - DNA, 122 bp, Homo sapiens
ctcgagttcatccaggagtttaaaccacttcctttgcccccccaccacccgcgccccgggcgcccccaggaaaactttagcacagcgcagcggcgcgatccaggcccctcccctgtggcgcg

SEQ ID NO: 114490 - DNA, 122 bp, Homo sapiens
acgcttaagcaccagggccggcgagtgccctgccgtggcacggctccagcgtcgcgctctcgaattcatttgctttccttaacgagagaaggttccagatgagggctgaaccctcttcgccc

SEQ ID NO: 114491 - DNA, 122 bp, Homo sapiens
cttcatctctccatctctccactgctctttctccccacccccacttcctccctctgagagcggggctcgggttatggcctgagctactggcacattattaagatcatcatcatcattattgt

SEQ ID NO: 114492 - DNA, 122 bp, Homo sapiens
gcaattaacatgatactcaacatccggaacgaagttttgttgaacgtggccacatccattcgctcgtatgccatccgtagctgtagctgctttcacactgaaagggcagctttgagcagctg

SEQ ID NO: 114493 - DNA, 122 bp, Homo sapiens
gtaaggctcccagcctgcagctcgtggacagggctgggttcagatgcacttcatgggcctcgctgccggctctacagggcatccgggctgggaaaggcagaatgaagagtcccctgggtttc

SEQ ID NO: 114494 - DNA, 122 bp, Homo sapiens
gctgcgaccaccgctgcctccacaggtttagaggcggccatgacaagtgtcctctgccaccgcctccctgtctgtcgcgagcgccacaatcaccaaacagcgtgcgaaggaagaccgaggga

SEQ ID NO: 114495 - DNA, 122 bp, Homo sapiens
aagaaagcccccttcccctcccccgcaggccagccagcgtggggcctgcttccccagagacgctaatgagtttcaatcttagaagaaaacactgaggcccgctgttccattcctgttttaca

SEQ ID NO: 114496 - DNA, 122 bp, Homo sapiens
gacagagaaagagatctgagctaactgagtccatcttgcttctgtcctacaagctgtcctcgttcattccagagtgtaggctgaactaactttgggaagaacttaatttatggcttagcttc

SEQ ID NO: 114497 - DNA, 122 bp, Homo sapiens
gagtccgccgccttcgcggcccagggctcggccccggctctggcccgcgcccccgccccccggcgctaaaaaaggagtgcctccgacccctcgtccccagcgctccgcacgcggcacagtga

SEQ ID NO: 114498 - DNA, 122 bp, Homo sapiens
gtcttcaacccaaccctgttgactactattgggcaaatctgggcaggttttatgccctttcgaaacttcagtttcctcatctatcaaatggaataataatagtacctgtcttctaagtttaa

SEQ ID NO: 114499 - DNA, 122 bp, Homo sapiens
gtatcagatgtcccaaaaaaggtattattttaacttctcctctctagttctgagctgttgcgggcacttggtaaatactaatgaatgatgaggctggagctagcctgagagggtgctgggag

SEQ ID NO: 114500 - DNA, 122 bp, Homo sapiens
gaaaattcacccacctctagagcccagcgtctggtgcagggcccgcggcgccgtgacctgcgctgctgtttccacgatggtatctatgtgattccggacagagctcctccgcgcccgctcgc

SEQ ID NO: 114501 - DNA, 122 bp, Homo sapiens
gtgggaccgggtgccgggcctgtgggggtgtcctcgcagcccccctagagagggggcgtgcggaaatggatcttcttggctgtttccacgtcggacttcgcgaccaggaaccgcatcttctt

SEQ ID NO: 114502 - DNA, 122 bp, Homo sapiens
gtgtatagtatgtgtccagagtatacatgctttggaacaaaatgaatttaaggaggaatgcgtttgtattttgtccttagtgttattttaaggtacaaatatgggtaataacttgcagacta

SEQ ID NO: 114503 - DNA, 122 bp, Homo sapiens
caggggtccattgtaaccacaggatctttatataggaagatggggacagaagagggagaacgagacagagggcacactgaggacccagcctggtggagctccatttgtaggtgggaaatggg

SEQ ID NO: 114504 - DNA, 122 bp, Homo sapiens
aggcctgggcggaggggacggaggtcagaccgtgcggaaagtgacccgggcaccccagggcgcccaggcccccagggagcgcggaaagtgcggtcgcggcccggccctcgggagacgcggga

SEQ ID NO: 114505 - DNA, 122 bp, Homo sapiens
ctagagtgcagcgagtgcaagaagctgttcagcacagagacgtcactgcaggtgcaccggcgcatccacacaggtgagcggccatacccatgtccagactgtggcaaagcgttccgtcagag

SEQ ID NO: 114506 - DNA, 122 bp, Homo sapiens
cgcgcaaaacctccaggcctctcccgttcacataacgaatcgagggaggcagagctcttacggcgctccagccagtgtctgcctgcttctggaaatacctcatcttccagaaaagcattcat

SEQ ID NO: 114507 - DNA, 122 bp, Homo sapiens
acaccgccaccacctgtttcagagcctcgccccaggctcacccagctgtggggcccacggcgcatactcccttggtagctatcactgaaaactgggattcactcctcagacatttaacaaac

SEQ ID NO: 114508 - DNA, 122 bp, Homo sapiens
gcacccagtctctgtaagcgttcgatctggtgtgggcggacacgaccacgatggttggtgcgcacaggacattcatatgctcagaggacattggcacagctgctggcatttacctgaccatt

SEQ ID NO: 114509 - DNA, 122 bp, Homo sapiens
agcaactgtaagcgtcttaattttaaaagcgtttctttacctcctttttccacggcccttcggtagtggcaggtgaacttcacctggagaggggacgaagggacagtccgcccgaagtaggt

SEQ ID NO: 114510 - DNA, 122 bp, Homo sapiens
cagggcgagactccgtctcaaaagaaaaaaaaaagaaaaaagttttccctctccaaataccgaaggtcaaaacaataatacatggtgtgggcaaagttgtgaagaaacaagcactctcaaac

SEQ ID NO: 114511 - DNA, 122 bp, Homo sapiens
agattccatgcagcagcatccagccccaggctgagcgtgaacaccggccccctcccccagcgggagccaccgcctgtgagggccctgccctgcctgctcgctggcgcaatggcttactcttc

SEQ ID NO: 114512 - DNA, 122 bp, Homo sapiens
actaataaattcttatattcactctccgtagaatttgtatttaaaataatattgctgccacgaaaaataacatattacatttagtggatgctcccaatgtttttcagcctctggtcatattt

SEQ ID NO: 114513 - DNA, 122 bp, Homo sapiens
ccaggctcgcgggctcccgggctgcctagggccagcgggagtcacaggccgaccgaccgacggaccagccgcccgacggactggcctcagcatccttgcccgcagtcccgggcgcctgccca

SEQ ID NO: 114514 - DNA, 122 bp, Homo sapiens
aaggcgcacacccagctaataacgttctcaagagctctccaccacaatgagaggaggcgacgtggagggatatggtctctaaccatttcggtgccaaggtggccacacaatgcaggagggct

SEQ ID NO: 114515 - DNA, 122 bp, Homo sapiens
ccagctgcactgtcggacgcgacacatgccatgccccctcctctgctccctgtgtgagaccgcatggtcatggacatcccgctgagtgcgcctaggtcagatgcacttgagacccggcattg

SEQ ID NO: 114516 - DNA, 122 bp, Homo sapiens
aaggcttggctcccaaggctatcatgggattagccagtaactaagccacaacgctggccccgcggctgctgctgatggcggcacatggtgggagcatgtgtgctggcagcggttggtgataa

SEQ ID NO: 114517 - DNA, 122 bp, Homo sapiens
ccttgccactagctagaagagcttctcactgaacttttgtttagttatatcccacccttacggctcacctaagatcctgggagccttccccgggaacttccccggggtctcacctcaagcga

SEQ ID NO: 114518 - DNA, 122 bp, Homo sapiens
cgcctgcccatctggcgcaccccagcgcgccgcgcacacctgggggcccgcacaccagcacgtcctcagacacaccgacacccacggcagcaggcgggggccaacgccgccgccgcggttcg

SEQ ID NO: 114519 - DNA, 122 bp, Homo sapiens
gggttgggggcagcctaggcaggggcgaaggtgacagttggcggccgggcaccctgccgccgcctctcctgcagtctgaggaccaggaggagatccaggaagcagtccgcacgtgcagccgt

SEQ ID NO: 114520 - DNA, 122 bp, Homo sapiens
atcatccttggctctgggccctcagggtaaatcagctgtgacaggacggcgtggcagaagcgggccaggctcgtgccgtacccaagccactagctgtcacactcatctcagctcacgtgacc

SEQ ID NO: 114521 - DNA, 122 bp, Homo sapiens
ggcccagccctccagagctggcgcagggtgggtgtgcaggcaccaggttctcatcagccccgggagcccggtggagtggacatccagggcagggcggaccccaatgggaggcccagcacggc

SEQ ID NO: 114522 - DNA, 122 bp, Homo sapiens
ctagatttgctggaagttatctccttcaatggattacagcacatgatctagcaataataacgtaccttgtcaccacatcgaatgattttgaacacttcccatcaatcgactaccgactaaca

SEQ ID NO: 114523 - DNA, 122 bp, Homo sapiens
caaggctgctcttcaggcgggtcctcaaatgaagggaaacctcaaggtctggaactgcatcgtggcagttattgtcagcatcatgtggtttttattttaaaaagcacatgtcgcttcatttc

SEQ ID NO: 114524 - DNA, 122 bp, Homo sapiens
tgaagtccccgtccttcaaggctggcaccttcttgagggggttcacctgggcaaaggcatcgcttaagtgctgacctgggaagagtccagcatggtgggtggtgggaggagaacgctgagcc

SEQ ID NO: 114525 - DNA, 122 bp, Homo sapiens
gtttgttggttgattacaccagtggtttttaaccccagccactgagtgatggagggttaccgactcacaagcgagcattaacgcctgaggtccgcctgctgtcagggcagcaaggcatcaga

SEQ ID NO: 114526 - DNA, 122 bp, Homo sapiens
ttttaaggaaagtgatactttataaagttgagtcacgctactccagagaatacttgttttcgttctgtgacaaagtttattttgcagggcttgctgtgaactgtataattggtaggacgtga

SEQ ID NO: 114527 - DNA, 122 bp, Homo sapiens
tcaaaacagcaaggaggcagttaaagtctagataggaaatggtaaggttcgagactatggcgatggtagcagaaatataaaggaagggatttatacaagggacacttagtggacagtgatga

SEQ ID NO: 114528 - DNA, 122 bp, Homo sapiens
cgtttatcctttttatcacaggattactacacttagcaggatgtcccccaggctcatgcacgttgtagcgtgtcagggtttccctccctgttaaggtgagtcgcgttccatcatacgcaccc

SEQ ID NO: 114529 - DNA, 122 bp, Homo sapiens
ctctgcggttccccatactcttcaacattacggaaaggataggttcctctggtgactctgcggttccccatactcttcaacattacggaaaggacaggttcctctggagactgtggtttccc

SEQ ID NO: 114530 - DNA, 122 bp, Homo sapiens
gctccgcagcctgaggtgggccaggcacctgctgggctcggggtggcagagacagctgtgcggtcccagctgttcctgagcgcaccgctgagggacgcactcccttctacaacggctgcacc

SEQ ID NO: 114531 - DNA, 122 bp, Homo sapiens
atgcctttcacctgaaggcttctgacctctactttttcatccaatactaccgttcctccccggagaagcctttcatgacccaccccccgccaccccacccccagcatcctgtgtgcttttct

SEQ ID NO: 114532 - DNA, 122 bp, Homo sapiens
acgcgactcgtggtagtagatgtttcctggctcctggatgagggccctggccagtcagaacgcaccacttcccctttaagagagcacgcccagacgagattagggaaaggcagaaagaaaag

SEQ ID NO: 114533 - DNA, 122 bp, Homo sapiens
tttataggctactgctccttggggaggcctcagtgattgaggatactcctgtatgagcctcggccctgaccccaggatgggggactggaggatcctaacaggattgggggttggttgggtgt

SEQ ID NO: 114534 - DNA, 122 bp, Homo sapiens
acccctcccaaagcaacgacgcgggggagttgggagcaggaaccagtcgggccaggttggcgtcatctgggagctgggacatggagaagggagggccagaaggtacgctcgcccccgcggac

SEQ ID NO: 114535 - DNA, 122 bp, Homo sapiens
tcgccctggtctctgtgcccgggaacgtgctggtgatctgggcggtgaaggtgaaccaggcgctgcgggatgccaccttctgcttcatcgtgtcgctggcggtggctgatgtggccgtgggt

SEQ ID NO: 114536 - DNA, 122 bp, Homo sapiens
tctgttcctgtgcacctcttcttggaatataaatttctgagcctcaatgtgccctgatgccgttcctttcttccaccgtaagagttaccgaaagctcggcgtccgtgatggggtagagggct

SEQ ID NO: 114537 - DNA, 122 bp, Homo sapiens
gcggccccgggggcgagcggctgtgcgcggggccaagggcgggggcagcaggtgagtgcgcggccgggcgggagttctgggcggccgggcgggagttctgggcactcgcgcgcggcagagga

SEQ ID NO: 114538 - DNA, 122 bp, Homo sapiens
cttcagataacagggagcgtgcttatgaacatagtgcctatggacaccatgaacgggggacgggaggatttgatcggacaagacattacgatcaggattactatagagatcctcgagagcgg

SEQ ID NO: 114539 - DNA, 122 bp, Homo sapiens
ggaaggccagcaccctgatggcattgcggtagcggaaggcgtcctcgttatggttgaaaacgcagtacctctgcttagacttgctgtagcccttgtcatagatgcaggagaacacgatcaag

SEQ ID NO: 114540 - DNA, 122 bp, Homo sapiens
ccctccacatctcatgttggcatgtgatcctcggtgctggtggtggggccaggtgggaggcgtctgggtatgggtgatccctcatgacttggtgccatcctcatgagatctggttgtttaaa

SEQ ID NO: 114541 - DNA, 122 bp, Homo sapiens
acccagcaagctctgcatcacaacatgtttctccaagcagccgttgggctgtaaaacggacgatcgctgtttgcagtcaagctctgttatgctgggcaagtcaaagccagttcccttctgcc

SEQ ID NO: 114542 - DNA, 122 bp, Homo sapiens
ctgcctggaggagcgcacgcccccagtccccgactcgggaagcgccaatggcagctttttcgcgccctctcgggacatgtacagccactacgtgcttctcaagtccatccgcaacgacatcg

SEQ ID NO: 114543 - DNA, 122 bp, Homo sapiens
acctctgtctacatcctccgctcaaaaagaacaccactttggttactaacacgtggtaggcgttcagtaaacagtatgtccctttacacccattcctccagcaccttcttcgtctctgcctt

SEQ ID NO: 114544 - DNA, 122 bp, Homo sapiens
gagagacccggaaggcggggagcactgaagactccccacgggagtcagtactgagagatccggaaggcagggagcactggactccagacggggagtcagtactgagagatccggaaggcggg

SEQ ID NO: 114545 - DNA, 122 bp, Homo sapiens
tcgggatagcgcacctggctcatcacggaaccaagcacaccccccacagctccacggtctcgggatagcgcacctggctcatcacggaaccaaccacaccccccacagctccacggtctcgg

SEQ ID NO: 114546 - DNA, 122 bp, Homo sapiens
tttgggagctgaagcctgaatttgcctgccctgcactaagcagcatgagcctggtgccaacgggaacggcaaggtacataggaggtagggacggggattggaaaggcaggctccctggacaa

SEQ ID NO: 114547 - DNA, 122 bp, Homo sapiens
gcgagccaggaaaacacaaactcggccaggaaacagccacccgggggtgcctgaagaggacgctgcgaggcggattctttttccgggcctgcggcgagcgcttccggggcggtggcgacgga

SEQ ID NO: 114548 - DNA, 122 bp, Homo sapiens
atgcattgacatgactgataacttcctaggtattaggagacttggttggcaaccaatgtacgaagattctgcttttctctttactaattttttaaaaattcttttgactacaatagctgagt

SEQ ID NO: 114549 - DNA, 122 bp, Homo sapiens
ccccgttggggggggccctcgccgggacaatgtgctccgaacggggagctgggaaggccccgcgggattgttatcgaattagttgaagtcagaagtcccctgaatggggtaaagaagggaag

SEQ ID NO: 114550 - DNA, 122 bp, Homo sapiens
accgacggaacatctctacctgcgccccgggagccctcgccgtctcacctcgcgcgctgccgtccgctggaagcacctccgcgcctccccaggcgccagactccatcccgccccactgcgcc

SEQ ID NO: 114551 - DNA, 122 bp, Homo sapiens
aaaatattggtgttaattacataggcttgagatacatgcaaagaagagggtgaagacagccgtgacctctgaaagagaggcataggtcagtaaaagatgcattcattccaaagactgctgct

SEQ ID NO: 114552 - DNA, 122 bp, Homo sapiens
ctcgctcccagcgcccagagtcagccggttccaccttcggctgcgagagccgccgccccgcgccacccccgcccggcccggcccttgtcccagcccggctcccccgccagctgcgccgccac

SEQ ID NO: 114553 - DNA, 122 bp, Homo sapiens
agtgactagagctcaaacacagagaacaaatgtcccaggatgacaagcccattaggaacacggaaggaagtgttcccttcctactgagatgaacaagagcaggaaaagtggagatctgttgt

SEQ ID NO: 114554 - DNA, 122 bp, Homo sapiens
tagagcatgggagtaaaacaaacccccagaagtttattggaagtttgggttcccaaggcccgggtctgtctgaatagccttgccagaaagagaaatgagtaacaatgatcagaatttttgat

SEQ ID NO: 114555 - DNA, 122 bp, Homo sapiens
gaaagtacagcttttctattggctatctgactagcatttgctaccgaccaatcaaaaagtcggatttactccccaggaactacctataaaagcggccatgttttacatatttcttgattttg

SEQ ID NO: 114556 - DNA, 122 bp, Homo sapiens
gcactgcaccgctcttcaccagggtacagggaagggagacggccacccacctctgagtgacggcactgcaccgctcttcaccaggacacagggaagggagacggccacccacctctgagtga

SEQ ID NO: 114557 - DNA, 122 bp, Homo sapiens
cacaggcaaaaaggcaggggaaggtacttgtaggctagagcagcagcccctttacacaatcgtcagcgttctaggcccctctgtcttttcacactgtcacctttggcatgttggtttgcggc

SEQ ID NO: 114558 - DNA, 122 bp, Homo sapiens
ccatttagcagcttgtgaggaatgaattttcagatttgccactcaggtagtgatgtgtcccgcacagcgcttgtgcttgttctaactggccaagctttaattgcaaccttctgggtagttcc

SEQ ID NO: 114559 - DNA, 122 bp, Homo sapiens
cgacgccgaccgagacacaaagaccgaggctgagaccgccaggggttgagggtgaggccgcgtcccggggccgctggagcgcgggcgtcatgcgagactgtcccggctgcgcgccgccccag

SEQ ID NO: 114560 - DNA, 122 bp, Homo sapiens
ctcacctgccggatgtcctgtagccggtccagcaggggctgttcgtccatcagcatcgtccgctggactgcagaggtgagggcacaggccgtcagcacccggctcctcgcccaccttggaag

SEQ ID NO: 114561 - DNA, 122 bp, Homo sapiens
ggctggggccgcggaaacttctgctcaagtgactttccccattttctcctctgcctgggacgggggttcgccttgcgctctttctctggtccgcgctcactgcggggttccggcccctccgc

SEQ ID NO: 114562 - DNA, 122 bp, Homo sapiens
ggaagggagaggggaataggtgcaaggtttgtggagggcggcaaactgcactccatgtggcgcgaggctgcgcttgcggagatccgggttctggtgcctggcgccggcagccagtaggggcg

SEQ ID NO: 114563 - DNA, 122 bp, Homo sapiens
gagaccctggtcaggtgagcggcgcccccgtgacttatcggcgaatcacgtgaccagaggcggctctgcgcctgcgaccccaggaggacccacaccctgccctttcacttccggcctggacc

SEQ ID NO: 114564 - DNA, 122 bp, Homo sapiens
actggcttgacgcctcccagcagcccggccaccaggatttctacagggtgtatgggcagccgtccaccaaacactacgtgacgagctaacgccacgcaggcggcggggcgctggggaatctt

SEQ ID NO: 114565 - DNA, 122 bp, Homo sapiens
tcagccatgagggcatcacggcagccctgaggcctgtgcgggtgcccggctatgccgactcggatcccaccttctcgctgagtgtggatgaggactatgacctccgcctgtctggcctctcg

SEQ ID NO: 114566 - DNA, 122 bp, Homo sapiens
tttctcctgtgctccggagaaggggggagggaagggcgaggggtggggaaacagcaccagcggtgtgtgcgtatggggtgattgtcatggttacgctctgacaaaacaaatggctcggcctc

SEQ ID NO: 114567 - DNA, 122 bp, Homo sapiens
ttacacaaatccttgtcgtaaatccaggttgatcctgatgaagaggagccaaatctggctcgggctgatggacgctgtgtgcaggctcagagttcaccctgggaagcccaggtgtgctgccc

SEQ ID NO: 114568 - DNA, 122 bp, Homo sapiens
cagtggaaggcgtgcttgcttcatgcagaacagcgggggcagcagccaggctgccgtgaccgagcgcagagacagcatctctgccaatacgtggattcagtgtgcagctgcagaaaaaggac

SEQ ID NO: 114569 - DNA, 122 bp, Homo sapiens
ttttcccccaccgccgccttggagcctgcgcggagctctgggaggggccggagccaggcccgggacagccccagactgaccctcccgtccagcccccgcaggactcctggggccagccctcc

SEQ ID NO: 114570 - DNA, 122 bp, Homo sapiens
aaagaccagctcgcagggcatttgctcacccagccaacaatatttcctcagtgtccaccgcgttgcaggcattgttttaggtgctgaagatgcggtagtgcacagtgcacatgccagggagg

SEQ ID NO: 114571 - DNA, 122 bp, Homo sapiens
agcatgagaatacagtttctgtatcttcctgtcccctgacttcactctgcactctttgaccgatcaataatctccacactgtggtcatcccaaaacccttaaacagtctaccatcaaactcc

SEQ ID NO: 114572 - DNA, 122 bp, Homo sapiens
gagagacacccggaaacggattccgcttcggggcccgcgcgagttgggtgcttcggagggcgcgagaggagcgggcgggtgctgctgagtaatccccgcggcggcggccggacgcccacctc

SEQ ID NO: 114573 - DNA, 122 bp, Homo sapiens
actccgccatcttgccaaagaaaagggagtctgtgctcactaaaactttattggtagcgccgacaaacgaacagacagatcctgtactgcgcatgtgctgtggtaaaactggcctaaagaaa

SEQ ID NO: 114574 - DNA, 122 bp, Homo sapiens
aggcctcctgacgatcacacagacaggcctcctgacggtcgcacagacaggcctgcatgacggtcacacagacaggcctcctgatggtcacacagacaggcctgcagagcgctccagttaca

SEQ ID NO: 114575 - DNA, 122 bp, Homo sapiens
gcccgctgctgctgccgatgcggcccggacacttttagctgggcgggagggctggagagccgggggccgccgagaaccgccagcgagctgtgccgagagccgcgccgacccgctgcgatcag

SEQ ID NO: 114576 - DNA, 122 bp, Homo sapiens
aatttccactcgaactgttggggagctagttactggtagaaaggccccaaggccgggcttcggtggctgcagtagactggatctggatctctaaatggcaatctattgacatggctgccagc

SEQ ID NO: 114577 - DNA, 122 bp, Homo sapiens
cctgccctcagcctccaatccgtaagagacacccagccccagcaattggattgggcagcccgtcttgacacaccactgtgctgagtgcttgaggacgtgtttcaacagatggttggggttag

SEQ ID NO: 114578 - DNA, 122 bp, Homo sapiens
ccactgtgcccatctctggtttcaccaggctccattccttccccagttccctgtttctcacggccctgaaaccagccgacagggatttgcattttgaaaaaccttgcgtggctgccggcgct

SEQ ID NO: 114579 - DNA, 122 bp, Homo sapiens
gcccccgcgcgcggcgcgctcccggcacggcgtccacgagcacgcgccaggcccggcacgcgcccccgccccgctcgccgcgggcacccgcacaataacaaaccccggcgcgcggcgggcgg

SEQ ID NO: 114580 - DNA, 122 bp, Homo sapiens
tgtctttttttttttttcactgtttagcgttgcgagggttaggggcatgcaggaaagggccggtgctcaagttggggaccgaagccaggcaggcgctgacaagtccaccaagcctagacgcg

SEQ ID NO: 114581 - DNA, 122 bp, Homo sapiens
aaacaatgtttatttgtttgtaaagtgccagttttatatttaagtaaacattgaaatctgcgctgaagcagtgaggctgcatctttcaactttcaactccctgtgctggttaaatgactgtt

SEQ ID NO: 114582 - DNA, 122 bp, Homo sapiens
agctcaggcagccacgtgggctgcggactgtgtttgtggactacatctcccaaagtgctccgcaggcgcgcccacaggaagtcgccggagcatctcccgcctccacgccgaggcgaagaggt

SEQ ID NO: 114583 - DNA, 122 bp, Homo sapiens
ccaccgaaccgggagggaggggaaaagaaaggccactccccagaagcggcgcctgaccgccgcctccgctaccgcggaatccaagatggcggcttcagcagcccccagcatcccagcccctg

SEQ ID NO: 114584 - DNA, 122 bp, Homo sapiens
aggaccagagtcccgtccagggcgggaatgtcaatggcaatctcccacccttacccacttcgtagagaccaccggacagagaaacctatgtccagaagacaagttacgaactgaaaaatctg

SEQ ID NO: 114585 - DNA, 122 bp, Homo sapiens
ccgtttcatcagaagccggaggacgggcgccagggggcaacttcctacaggagggcgtcccgttagaatgacagggcttttgcaaaagtctgacacccgtggcacagagcgccccagatatg

SEQ ID NO: 114586 - DNA, 122 bp, Homo sapiens
ggggctgctgggcgggtgctgtactactgaataactatgaggttcttctaaaacatcctccgaacactctgagtttactctgaatgctaatgggattaatctgatcattttaaaggtgcatg

SEQ ID NO: 114587 - DNA, 122 bp, Homo sapiens
cagggacgggtacaattctcgtggatggtacatgttgtagttccgtctggcctcaggtctcgctgcttagggcccccggtgctgcgagatgccccctttatagctcacagctcagccccttc

SEQ ID NO: 114588 - DNA, 122 bp, Homo sapiens
acctacacagcaggaacttttgatgtgggtgggtcctggcaggaagttatccaagcagaacgatgctatctgggagacctttgggttggggggtgcatttcatcatagggctaataacttga

SEQ ID NO: 114589 - DNA, 122 bp, Homo sapiens
tgtcccacagcacaggcgggcagggggtgcccagacccagtaaacccctttggccaaggccggcgctgggattccagcccaagtgatgtggcttggtgctcataggagaggagagaagggaa

SEQ ID NO: 114590 - DNA, 122 bp, Homo sapiens
cctcgccttgcctctgcgagctcctcagcctcggcccggccctgtccacggccacgaccacggtcccagatgccactaccgaaacctccgcggaagccaccgcggttgcccatcccagggcc

SEQ ID NO: 114591 - DNA, 122 bp, Homo sapiens
actgttccacctggttttttttttttttttttaccatgctcacgaggggacacctggggtcgctgatagaagttcagcggtttgccattcgccattctcaggcttgaaactctgtgcctggc

SEQ ID NO: 114592 - DNA, 122 bp, Homo sapiens
ccttagaagcgcctctaacaaccaaatttaatgagggtagcgcttctcaccatcttcccccgttaagtcaggctttgtctaattgagttaatttacagagcacccagtcatactacttatta

SEQ ID NO: 114593 - DNA, 122 bp, Homo sapiens
tctgtttcccagaagatgaagggagcaggtgcctgaggtgtgctcctgtggaggaaccctcgggcagagcttcagaactcataaaggtctaaggctgtgggaatctaatgtctagggctgtg

SEQ ID NO: 114594 - DNA, 122 bp, Homo sapiens
ccggggcccggccgactgggctgcagctggcgcagggcgtccctgtcctcagcgcagaggcgtctgctgcacagctgcagttcccggagctgcgcggctatcttgtcccacaggcccaggcc

SEQ ID NO: 114595 - DNA, 122 bp, Homo sapiens
agcaggaaaaactgcagccatgttcactctcatatccctcatgcttgctcttagtgaattcgaatggagggaaaaaaaaaaaaatgcgtaagctccaaggcactacacaaaacagattaaac

SEQ ID NO: 114596 - DNA, 122 bp, Homo sapiens
cagagacgcccctgtctggggcggggtcctccttgcctctcccggcggtccccccgtgggcgggtcctctccacggcaccccctgccctgcacaggcctcggcgctggcgtgacgcggccgc

SEQ ID NO: 114597 - DNA, 122 bp, Homo sapiens
tactggccgcaggtggttcctgaaacttgtgggactggaacctcctgttggctgagaccccggggggtggttgcagaggtggggctggtctgggagtaagcagggcaggacacctgcggggt

SEQ ID NO: 114598 - DNA, 122 bp, Homo sapiens
agtcgccctgcttcttagctctcgaggtcccgcgtgttacgtgttagcaccgcccgggggcgtcagcatgacccgaggctgcaggaaccgtgaactctctgccccgcgggcccaggtgaccg

SEQ ID NO: 114599 - DNA, 122 bp, Homo sapiens
cagaagacaaccagctgaagtggtttgggccttgtgacagcaccagatccagggcgaggtcgtgctgctggtcctcagagtacacgggccggtagttctgcagctgcagtgcgccgccgcac

SEQ ID NO: 114600 - DNA, 122 bp, Homo sapiens
tcctgtcttcagacctctgctctgggattgggtccaaccctgtcctttgcagccatgtggcgatcctcagcatggagctccttgccactgtcccccaaaggggctcagtcgtccatcttcac

SEQ ID NO: 114601 - DNA, 122 bp, Homo sapiens
ctgggaagccaggtacctctgtcccccaacacaagacacaactcctgggctttccccaaccgaaacacagaccttggaggctccaccaggactaggtaaggtcttcagaaagacacaggact

SEQ ID NO: 114602 - DNA, 122 bp, Homo sapiens
ggggtccgcctctctctcttacctcctcccccgacagggaactggggcccggcccggctgcgttgggagcctagcagtgtccccaggaaaaagaagcttcttggtccatgctgacatacgct

SEQ ID NO: 114603 - DNA, 122 bp, Homo sapiens
gcggaagctcagagaagctaagtgactctccagctggtcagcaggctggtgatggagcagcgtgaaacatgcacctcctgaccccactaggaatcttctgtattccaaaagactcatctcaa

SEQ ID NO: 114604 - DNA, 122 bp, Homo sapiens
caccgcccacctgaccctttcctcgcacctcgcggtgttctgcggctctcgtctgctccgcgaaacttagattgtatgtggaagcattggaatctagggggtgctcaagtttcttgcttggt

SEQ ID NO: 114605 - DNA, 122 bp, Homo sapiens
ggcggaggcagggaaggaaatcgagcgccgcgcccctacccggcgccaggcccggggttgcgagcggtgatcttcaacgttgatcgtcgcatcttcaaactcgctgccaccgccaagatgct

SEQ ID NO: 114606 - DNA, 122 bp, Homo sapiens
cctcacagccgcagccatcggcactgagccggtagccggcgtagcagccgcactcgtacccgccagggttgttggtgcacacctgctggcagcacgggctgtctgcacagtcgtcgacatct

SEQ ID NO: 114607 - DNA, 122 bp, Homo sapiens
catgttgataccggtgggccagaggaggtctccaaataccagtgggaccttgaccgtggccggtgtccaggctcttgacaccctctcaataaggaattcaaggatgaatgaggaggctgggc

SEQ ID NO: 114608 - DNA, 122 bp, Homo sapiens
acccagcgcagatggtggctgtgctgccactggactcagtttctccagcttttggggccccgcagagccaagcgctcgtttcgtggctgaatctcccttgcgtcccggcattttaatatcat

SEQ ID NO: 114609 - DNA, 122 bp, Homo sapiens
ccagcccatcctctggcctttggacttcagggcacagttcatatctcctggcagctctcccggggcaccctcctgggcctagatgagtcccaggtctgctgctatttggagtttggggaaat

SEQ ID NO: 114610 - DNA, 122 bp, Homo sapiens
atccatatttctgagtcatctctcaattagaatcaaccatccataacatgctcaaaaatgcgtcctttgatgctagcctctacacattttttttgttttgctatattgcttataatgtttgt

SEQ ID NO: 114611 - DNA, 122 bp, Homo sapiens
cgtattcggggagagtattctaaggtctcatatgaagccagaggccaagtgcagggcacacgtccgcagttcagggtctttagccttccattgggtccgccccgccccaggacccaacctgc

SEQ ID NO: 114612 - DNA, 122 bp, Homo sapiens
tgtctccgagcagaagcgtcttctcagctgaaccagacccaccaaagaggagaatctgcacgtgacgtcagtagctgatgactgacgcaggctggcaaaggagactcaaggcggctgctccg

SEQ ID NO: 114613 - DNA, 122 bp, Homo sapiens
ctagatttacttttgttttttattgcagtgagacaaatttgaggacaccctggggcagagcgcaaccaaaggtgccttgcggtctcattagtcatatggaattcagcactgaccagggctta

SEQ ID NO: 114614 - DNA, 122 bp, Homo sapiens
aatcagcagcaaccacctccccgctttaagcctgccagtataaagggatggcccatctcccgaattccagcagcgctgaggataacctgcattttcatggtgcagaaaaagtgatactggcc

SEQ ID NO: 114615 - DNA, 122 bp, Homo sapiens
cgatcgcaccgcccagaccaccctactctccctgccccggaagttacacactgccgacaccgggacgtaacttccgggaagggcttacttccaagacagacacggaagtgctgggaggcgcc

SEQ ID NO: 114616 - DNA, 122 bp, Homo sapiens
agtctgatgactatgcactccttcctcctcaggtggataactcatccttaacaggagagtcggagccccagacccgctcccccgagttcacccatgagaaccccctggagacccgcaatatc

SEQ ID NO: 114617 - DNA, 122 bp, Homo sapiens
tttctcccccttttctttttgacaaaactgccatcgtcatactggcccgttctcgatggtcgctgtctctttggagctgttgggtacacctgcagaaaggctgtcacttcacacttggaaga

SEQ ID NO: 114618 - DNA, 122 bp, Homo sapiens
ctcaagtccactaagcagattgatcaactcagatccacagccaaaatatcatacttccaccgtgattacatgctcaccagtcgcccctcccactcgatctttctgagctttatatggttggg

SEQ ID NO: 114619 - DNA, 122 bp, Homo sapiens
cctcttcacgagcatccgctgtacaaagaccaggcctgctatatctttcaccaccgttgccgccttctcgagggtgaggccccaggacgggcggcaagggaccgtgttcctctaaccagcac

SEQ ID NO: 114620 - DNA, 122 bp, Homo sapiens
agagccgctcccctctcctcgccccgccaccgggacggagagcgcccgccgctgcatttccggcgacacctcgcagtcattcctgcggcttgcgcgcccttgtagacagccggggccttcgt

SEQ ID NO: 114621 - DNA, 122 bp, Homo sapiens
gccatcagaccttggcaatgaccttgagcaataggatataaataactcccacatgcttagcgttccaataatggaacactaggcataaatgggttaagaggtcctgcttaaagactcataaa

SEQ ID NO: 114622 - DNA, 122 bp, Homo sapiens
agcagctcatctctccagctggccccacacactggggtctggatgctgagtatgactgtgcgcttccttccaagggccctgcgagaggctgccacgacacactttccccgatgctggttcaa

SEQ ID NO: 114623 - DNA, 122 bp, Homo sapiens
cttgagcgattctcccgcctcagcctcccaaagtgctgggattataggcaagtgccactgcgcccggctaaaatagatcttgaccaatgaagtttgtgacaccagctaattgtaccttcctg

SEQ ID NO: 114624 - DNA, 122 bp, Homo sapiens
attgtcctctagctccataaatacactttcagcttcttacatgacatactgtattctgagcgcttttcacataactcacgccgccccaacctcttcccggctgcaggccttggcctgagtca

SEQ ID NO: 114625 - DNA, 122 bp, Homo sapiens
ttctgattggcaaggctgagaaacacaagccagccctgctgaagaactttctgattggcacgctgtcctttcgcagggcctggaattggagtaagtagtttggacaactccggggaagcagt

SEQ ID NO: 114626 - DNA, 122 bp, Homo sapiens
agagggagggtgtgaccatggcccggagctctccgaaaggctgtgcggattgctcggtggcgggatgtggagcgcgtcttctatgatgccaggtgctggccaagcgctcgatgcaggctgct

SEQ ID NO: 114627 - DNA, 122 bp, Homo sapiens
tacagcctgaattttggcaaccgaaaggcagcgccggcgccacgtgcacacgggctgggccgctccgccagctgccagggccactgccgcgctcactcccagagcgcgctgcgagccgcggc

SEQ ID NO: 114628 - DNA, 122 bp, Homo sapiens
gcctcctagcagaggcgtcaagggacttccctagaaccacagtgttgtttatgacagagccgcagcctccacccaggtgtccgtccctacaacccaggcctccttctgaaccaaagtcgaca

SEQ ID NO: 114629 - DNA, 122 bp, Homo sapiens
aaaagtgcttttctgggtttccacgactgcctcccttcctccccaaaacgattctccatccgaggaatatttgaaacagctgctgcccgtcctaatgtgccagggctgagattgctgctgga

SEQ ID NO: 114630 - DNA, 122 bp, Homo sapiens
acacgtgtgcccctgtccggcccggggggctcatctctccttcacgtggttctgtgctcccgggcccccgctgccggccccatccccactgcccccactgtggaccccgccggccccgctgc

SEQ ID NO: 114631 - DNA, 122 bp, Homo sapiens
tgacagaggtcaccattcccgagctaatgtggctcagggatccaggttagggtcccttcccgggctgcacccagccgtcgccagctccatccctgtcacctggatgccagggtggtcttaga

SEQ ID NO: 114632 - DNA, 122 bp, Homo sapiens
ctgccgcgaggcggccgtgcctgcagtgtgggcgggggccggggggccgagaggtaccgccgccaccgcgcggggagccgcagcggttccgagcggggcccaacatggcggagagagaggtg

SEQ ID NO: 114633 - DNA, 122 bp, Homo sapiens
tagaacaattgtgagtatgcaagctcctatggtctaacaagttacctgtcaatgtcagaccgaaattattagttgtcatagcagcagtacacaacactgcctgctcagattagtcataagca

SEQ ID NO: 114634 - DNA, 122 bp, Homo sapiens
agaatattctacctcctcaattattctgaacagcatgtttggccccttccaggttcccaccgctagcgagccctccacccctggtgtgtgcaaacggtggacctttcggcgcctaagaaacc

SEQ ID NO: 114635 - DNA, 122 bp, Homo sapiens
aatgcaaactaaaagattagaactaaccccataagcctcttttccaaccctgtgtggtcccggctggcgggagagacctgggctctgagactctctgggagccacgtgcacgggggcgtctc

SEQ ID NO: 114636 - DNA, 122 bp, Homo sapiens
tgatccagaaagaaatagacacaaccaagttaattatgaaagttgcactagaacccaggtcgtttgatgtccaattttgtattattccacggcactataaagccttctgatggcttggaagc

SEQ ID NO: 114637 - DNA, 122 bp, Homo sapiens
actcggctccgcgccgcgaccacgcgccgccctcctcgttctagaggcagcccgccagggcggggaccactcacccgcttccccggcgaccctagtccactccttggcctggcaaccggcgg

SEQ ID NO: 114638 - DNA, 122 bp, Homo sapiens
ggtgcctcctggctggggagctccaggtcacgctggcacgaggccttcaggcggccgtagcgcatgctgcagtggtgcaggctgcggcgctgccactgctgccgctgcccctcccagtcgcc

SEQ ID NO: 114639 - DNA, 122 bp, Homo sapiens
tatgcgccggcggggcgcgagggctcgctctctcactcccacccgcgctggtccctcctccgcctccgccccctgcagctgcctgctgggccttgtagttccccagccgcggccccaaagga

SEQ ID NO: 114640 - DNA, 122 bp, Homo sapiens
gcctgaacctggaaactcttattatgaacctagacctatacacaccctacctcagctgctcgggaggcacttggaggaaggatgtcccaagccggcaagaaccctgtggtctggcgggtgtc

SEQ ID NO: 114641 - DNA, 122 bp, Homo sapiens
atatctagcttaactcaaaaacacattttaaatttactttttattttctaaaacagcactcggctgcaacaacaacaacaaaaaagcaagtaagctaatactaccataacaattacttccaa

SEQ ID NO: 114642 - DNA, 122 bp, Homo sapiens
gcccaaccctcttgggctgcccgcctcctctcatgtttcctgctgggattctagtccagccgcctcgtcatcaacgggcggggaacagttaagagctaccgtttccagcctgcctggccagg

SEQ ID NO: 114643 - DNA, 122 bp, Homo sapiens
tgtatccacaagctgcatgtactgcttatttctttatgggcacagcttcatagtcattggcgtcctagtgacccatgttgcaagacgcatccttccttcttaaataatactgcattatctac

SEQ ID NO: 114644 - DNA, 122 bp, Homo sapiens
accctgagttacctgcttagatgccaaccgccagccaggaattgccttcttgctgccactcgtagctggcccctcagacacaaggaagattaattggcagtagctgggccgtgtgcaaagga

SEQ ID NO: 114645 - DNA, 122 bp, Homo sapiens
gcctgtgacagggccatcttgggtgctggtaaacttgcacctagtcccttttcttccttgcgagataaagttgaggtggtgctgggattatgagttcagagtttaaagacccatcctaaaaa

SEQ ID NO: 114646 - DNA, 122 bp, Homo sapiens
ctgactccctgtcaggcctttgtcctgggcaccagggaggggacaggagggatagagggacggggcacttgcttccgggagagtctccaaagtaacaggggaggtgaacagatgaacttaga

SEQ ID NO: 114647 - DNA, 122 bp, Homo sapiens
acgtggatgtagcacggtcaccaaaaccccgcgtgtccgagatggtggagcagcttttcccggctcatgtgagggctggccagccacacagcaccaggctgactttagcagcttggtctccc

SEQ ID NO: 114648 - DNA, 122 bp, Homo sapiens
aaagttcctcggaaactgggttcccccggccgcagctctgctgggcggtcgaggcggaggcggggcctttcggggaggacccgccctcccagatagacggccccgccccaccttgagagagc

SEQ ID NO: 114649 - DNA, 122 bp, Homo sapiens
atggcgcagtacaagggcaccatgcgcgaggcaggccgtgccatgcacctcctcaagaagcgcgaaaggcagcgggagcagatggaggtgctgaagcagcgcatcgccgaggagaccatcct

SEQ ID NO: 114650 - DNA, 122 bp, Homo sapiens
ttgcaggatctcaagtttcccagcaggaactcgccatgcggggtcatgggggcgcagggacggagggaagggccttaccgtctgtcggccgtagggccaggggtaggagttctccttctggg

SEQ ID NO: 114651 - DNA, 122 bp, Homo sapiens
ccataccaccctgagtgacatctacctgaataatatcattcctcgatttgtacaagtcagcgaggactcaggaagactctttaaaaaggtacagagatatttctagtcacagaggttcttgg

SEQ ID NO: 114652 - DNA, 122 bp, Homo sapiens
tgaccctgaccctgactctggttcccacagctcctggagctatttgatagtgaggatccccgggagcgtgagtacctcaagaccatcctgcaccgggtctatggcaagttcctgggtctccg

SEQ ID NO: 114653 - DNA, 122 bp, Homo sapiens
agatgtaaaccgtttacccacccctctctctggacctagcccagatcagagatcatagatcgtagatagttgctgcattcaacaactatctcatttgcatctattatcattctataacatcc

SEQ ID NO: 114654 - DNA, 122 bp, Homo sapiens
ttgggctgcattcaaagccgtcctaaagtttacaaatttgtgttgggctgcattcaaagccgtcctgagccacatgcaggctgtgggttagacaagcttgaagtagatgatctgatctgttt

SEQ ID NO: 114655 - DNA, 122 bp, Homo sapiens
ttcacttgtagaagcacatggccaccgcgtctcacggagggccatcagtcacccccaaggcgctgcagacctaaagtgtggagaactcgagggaaatgaaatgtttttcatacttttgcagt

SEQ ID NO: 114656 - DNA, 122 bp, Homo sapiens
tgctgacaccatctccaccttctcctggagctttctctgatcagaggctagagctcaacacgttcctaggctttctgatgcgggaactggagctgaagctaattgtaagcagacttttggaa

SEQ ID NO: 114657 - DNA, 122 bp, Homo sapiens
gatgaaatctgggcagtagcagaaagatcagagggactcagtcacatgtgactgggggttcgggagtggtgtacattttaggccaggaaagggcaagtgcacaggccctgaggctgggactg

SEQ ID NO: 114658 - DNA, 122 bp, Homo sapiens
gcggcggggaggagggtctgggagcccgggtgcgatttgcaagcgctctgagcctgcgtccgccgagggggagggtttccccagcccggccggagttgcggctgtgcgctgcttctggctca

SEQ ID NO: 114659 - DNA, 122 bp, Homo sapiens
ccagtcacacaagggaggggtctgcctcgcaatcccagagacgactcagacagatgggggcgcgtgcagctggctggccccctgccccgcaagcccccacctcccacccacccccatgtcca

SEQ ID NO: 114660 - DNA, 122 bp, Homo sapiens
ggccaattgcaagcgactgtcctagcgaagagggcggaagaggagagatccagttccggacgcggccgccgccgtcgccgccatctgtcacctccactccggcatcagcagccagtcgcccg

SEQ ID NO: 114661 - DNA, 122 bp, Homo sapiens
ctcaggttgagagaggaacgcaccaggatgggcaaccttgagaacagacacctggggtgtcgtcacgcccggtttacccccagggctcagacagtgcccgtcacaaagggggcgtccaacag

SEQ ID NO: 114662 - DNA, 122 bp, Homo sapiens
actaactgtaaggcaagatgcagcccttttttccatcacttgcctaagctgcgtttactccgccaataaatttaaatatgctcagttttcagttacagtagattcaccatggtaccactgca

SEQ ID NO: 114663 - DNA, 122 bp, Homo sapiens
atacttttgtgtgtgtgtgggaactaggccacaaaagtgctttatgaaagagtttccttacgatcatgtccggattcaaatttcaagtagtttgcatgatcttcatgtaatatctgggacac

SEQ ID NO: 114664 - DNA, 122 bp, Homo sapiens
cagtcttcagagtcacttgtaattgtaaggaacatggctgtgctttcgtcaaggataggccgaggtaaacatccaaagtgactcagcgagtttagagtgcaggcatataactccacttgtta

SEQ ID NO: 114665 - DNA, 122 bp, Homo sapiens
cgagaaccagcacggggcgggggccttgggtagcctcagcagcaggagcccggcccgcggcgccaacaccagcgcctctctggagggctgccaagatcaaaaaagtgcagcgatgcgcagat

SEQ ID NO: 114666 - DNA, 122 bp, Homo sapiens
agaggcatattatgaaacttatgcttatttagtttagcctatctcttttttcagcctgggcggcctttcaaaaagatgtttagggtaactactgcacctgagataggaatacattttatttg

SEQ ID NO: 114667 - DNA, 122 bp, Homo sapiens
agtgtgctaggcactaacaagaaacatcaagaaggtttggaggctgggcacagcggctcacgcctgtaatcccagcattttggaaggccaaggcgggtagatcacctgaagttgggagtttg

SEQ ID NO: 114668 - DNA, 122 bp, Homo sapiens
gtggcgcacgcctgtagtcccagctactcagaaggctgaggtgggaggatcgcttgaacacgagatgcagagggtacaataagccgtgatcacgctactgcactccagcctgggcaacagag

SEQ ID NO: 114669 - DNA, 122 bp, Homo sapiens
agccaaagtgtctgcttgtcagaggagttcaagtgttcctgtgttctttccttttccagtcgttaggagtaactgagcttactctgagatttgcacccagagggatggtctcagaagacgct

SEQ ID NO: 114670 - DNA, 122 bp, Homo sapiens
tgaaaagttgggaaaaaatatttctaatcgccatggtcacaccgtccaaaaagcaaccaccgctaacatttgtgtatctctttccaggcttttacccagccatttttagggagttatgcctt

SEQ ID NO: 114671 - DNA, 122 bp, Homo sapiens
ttatgcatcaactcaggcctgctacaagtcctagatccacactgatatgaaacaaaatgacgagcattccaaaaattcaactttattctttcattcatttaacaaatatttattgagcatct

SEQ ID NO: 114672 - DNA, 122 bp, Homo sapiens
ccagggtgactaatccagagctgactctctcccacaggcagcactgggcacttaaaagaacgctgggcttgggctcctggactgtgttctgaggcccagctctgcccttcggtggtcatgtg

SEQ ID NO: 114673 - DNA, 122 bp, Homo sapiens
ggaggacagggtgtcctgctggctggaccaggacatggcatcctcctgggcctgtggcagcggcgtgggcggctggctgtgccgcagctcaggtccctccatggtgctgtagtctccggact

SEQ ID NO: 114674 - DNA, 122 bp, Homo sapiens
tatctttgggttactaatatactaagcctttctggactaagtaaaagatgcaggttcctgcggctagggatagaagccagactggcgtcttcagaatctcccaccaaggctgtacctctgga

SEQ ID NO: 114675 - DNA, 122 bp, Homo sapiens
cccgggccacgccaaccagtgggctttgcacactgcaccactccagggctgatgtcatggcgcgaagcccggcggtgctgccctcctaggccccgggaaggccggccggcaggggcgggggc

SEQ ID NO: 114676 - DNA, 122 bp, Homo sapiens
ggtggctgggatgcctgcagcgcccaggagaaggtgccacacagcccggggctcagcactcgcaggcaccggagcaaggcaccggggtgtctggctcttgctgtatctttattgtcttcatg

SEQ ID NO: 114677 - DNA, 122 bp, Homo sapiens
accggcatgcggtgtactggaacagctccaaccagcagtgagtcggggaccctgggagtccgcgcgtcccgtctcagtgagagggggagccggtgggcccgagaagtcctgggggatcccgg

SEQ ID NO: 114678 - DNA, 122 bp, Homo sapiens
cggaattttatgaccagcgcccgctggccgtcgtcaccctctaatttctcgcaaaactcccggggacccttcttaatgtcagtagccacagtcgccgccgctcctgcgcctagaagccttcc

SEQ ID NO: 114679 - DNA, 122 bp, Homo sapiens
gttgtctctaatcctttctttaaattcttcattatgaaacataaaaacaaatgccaggcgcggcagctcacgcctgtaatcccagcactttgggaggccgaagcgggcagatcacccgaggt

SEQ ID NO: 114680 - DNA, 122 bp, Homo sapiens
agggaaaatgaaaagcggcaatgattccacagaagctgccacaggggttaagtgcagtggcgtccgcgaaccgctactccaacatcgggagtgttcctggtcaccccagggcagctccagat

SEQ ID NO: 114681 - DNA, 122 bp, Homo sapiens
tcagtctaacctcagcagagcgcagatcacccatcttcctaatgaataacggctgggaatcgtttcagtctaacctcagcagagctcagatcccctcatcttcctaatgaataacggctggg

SEQ ID NO: 114682 - DNA, 122 bp, Homo sapiens
atccggcacctggaggaggatctgcgcacaaagctcctgagcctgaagctgtcccatacccggctagaggccagaacctaccggcccaacgtggaactctgccgggaccaggtgagagggtg

SEQ ID NO: 114683 - DNA, 122 bp, Homo sapiens
caaaacctacgcaggctcctttcctccgagctggttgctaggtgatctccgaaggctgtccgaagtctcgcgagggcggacccgttgcctgatgacgagagttgggagtgtggctggggctg

SEQ ID NO: 114684 - DNA, 122 bp, Homo sapiens
cgtcccgcctcggtgccctcactcggtcctcctgagccgacttccctttcatacccagcccgtagaattgtccctgggtcttaacaactcatttgtaactgatccaggtctcctccctctgc

SEQ ID NO: 114685 - DNA, 122 bp, Homo sapiens
acagaagacaagtaccactcactccccaaaaagacaccaagccaacaacccctggggacacggctccccacagcccacccactccaagagatagacccaccctgcgccggagaagcgaggct

SEQ ID NO: 114686 - DNA, 122 bp, Homo sapiens
cagcagcaagaagcactagagcaggttgggcggcagcacatggtctggcagcagttggggcggcagcaactggagatgcagcaggagagcctgcagcagctgaagccacagcaggaggagct

SEQ ID NO: 114687 - DNA, 122 bp, Homo sapiens
gccggggctctggcccccaacgtgtctaggagagctttctccctagatcgcactgtgggccggggccctggagggctgctctgtgttaataagattgtaaggtttgccctcctcacctgttg

SEQ ID NO: 114688 - DNA, 122 bp, Homo sapiens
aggaggtcatgcgggccttgaggagggtcctgggaaaatacatgctgccagcacactccacgctctagggaaggatcatggctagcttccagaattccttctcctgagagtcaaaagattca

SEQ ID NO: 114689 - DNA, 122 bp, Homo sapiens
cggacgacgatgaggaggagcctgacccttatggtttcatcgtgcagacggcagagattgcggagattgccaggtgagtagcccattcagagtaaatccactgggtgccagtgcgttttctt

SEQ ID NO: 114690 - DNA, 122 bp, Homo sapiens
gcctctcctccagggcacacgcccctgcatgaggaaatccgccacctttgatttctggaacgtggcccccaccaaagcgatggccctgtccaccgcagccaccatcctgaagagggcctcca

SEQ ID NO: 114691 - DNA, 122 bp, Homo sapiens
cgtggatgtaaaaccaggcaacatgtagccgctggaggcaggcgaggccctgtctgaggacgaagaccgcccgcagcagcgccctcctctgctgctcagtcagggtggccgtgtggtgacgc

SEQ ID NO: 114692 - DNA, 122 bp, Homo sapiens
cgactgtaatgtgcagacgataacagagcaatgataaaaatcctccagctggagtggagtcgcctgaccgtcactggagcctccagccctgtttcctgtgcagggcacattggaaacacatt

SEQ ID NO: 114693 - DNA, 122 bp, Homo sapiens
tctgcggcacgcggccctccagctccgtgtcgatggtcaggtgcccatgctcatcgatgccgctgaaccgctgcttaatgaccagattgcccgggtgccccacgaaggtcacctcagcctgg

SEQ ID NO: 114694 - DNA, 122 bp, Homo sapiens
attaccgcctctccgtgccctcttctcttaacctgccctgggccaagggcctcggccccgcgaaactgcgagtcctccagaaagacacatcgctgttggggtgtccaacctttctgggattc

SEQ ID NO: 114695 - DNA, 122 bp, Homo sapiens
tggccacacacggaacgcgcctccacagccccgggaggtggctcactctgtacaggtcttcggaggccgtgtttgtatctaactgtgactgggctgaagcatgatgtttgcctaatggttcg

SEQ ID NO: 114696 - DNA, 122 bp, Homo sapiens
gggaaagcgcggctgcagtgtcgcaggtccatgtgggccacggtggacctaagtaggcaccgcaccctgcagcctgcccggcctgtgaagtttttagattgttcggccaggctgactcacgc

SEQ ID NO: 114697 - DNA, 122 bp, Homo sapiens
cgaactaattaaacaaaacaacaaaagaaaacctggcatcagtcctggtcactgtgctcacgccagcctctccatcccggctcctcttccaactctgcttcctgcttcagtgactcggatgt

SEQ ID NO: 114698 - DNA, 122 bp, Homo sapiens
tgcttttattttctgtgtgatttcgccgtcattccactttttaaagtccgggatggctttcggtgtcgagcgctgtgggtttgagagcgagagggttgcttgtggtctctttgtccccttca

SEQ ID NO: 114699 - DNA, 122 bp, Homo sapiens
cgcagggcacagctagtctgagggaaccagggtgtggggcagggccagcctggcaggccgcggtgcctctgactgaaatgcagtagacagagcaagacactgcagctttgcagctgcggaga

SEQ ID NO: 114700 - DNA, 122 bp, Homo sapiens
gggtcccccacggttcaagccttggctctaggccttggctgggccttgtaatggcacccgcgaccctcagttgcctcactcattggggcttcgaaggcctctggtgccccgagggtccttcc

SEQ ID NO: 114701 - DNA, 122 bp, Homo sapiens
tggctgtgttcctgcaggctggggcagggcggcggctctcggcctcttcgaggaatggggcgggagctgctttgtcagcacagtcccagtgctcatctctctgccagggcccagcagggact

SEQ ID NO: 114702 - DNA, 122 bp, Homo sapiens
ggccctgggtggctgccctgtgtgctcagggagcagtcacgggccctgagtggtgttgcccgtgggcctggaaggtccagccgagggttggggcctgcggatgtcgcttctctgaagatgag

SEQ ID NO: 114703 - DNA, 122 bp, Homo sapiens
gtcccaaagatatctcagaactgggcagaggcagaactggctaacataactgcagtgggccgtttagcccccttaacatgacttggtatctgctagagtttcacatgcatgtatgcagagat

SEQ ID NO: 114704 - DNA, 122 bp, Homo sapiens
ccactcagcctcttcctggcctgttagagaaggctcttccttcaggtgttatctgcaccacgaataatgttaggtttgagtcacctccctctaggacacctttccttaaagaggaaatgttt

SEQ ID NO: 114705 - DNA, 122 bp, Homo sapiens
catcctgcccacgcttgtgccctggtgtttctggggtgaaacttttcaaaacagcgtgttcgttgccactttcttgcgatatgctgtggtgcttaatgccacgtggctggtgaacagtgctg

SEQ ID NO: 114706 - DNA, 122 bp, Homo sapiens
actacagtcccagctggctccggagcccgtgcgtgccaggggcgagtggccgtcgcgagacggctcctgcctttcgtgtctctgcagcgtggagactggaaccggcaatttcaaaggacgcc

SEQ ID NO: 114707 - DNA, 122 bp, Homo sapiens
gttctggtccttctctctgtgctgaggggctggagtcggccactgaggactctgggtccacgggtgaaactgtgccacatcttcacacctctggcctcagtttccatatctgtgcaatgtgg

SEQ ID NO: 114708 - DNA, 122 bp, Homo sapiens
aatcagaggtgtgtggagcagggagtccggactgggggccaggatgcgggtcctctcgtccgctacatcttggtcctcaggaagcacaggcatccgggtgtataattctgtctgattgacca

SEQ ID NO: 114709 - DNA, 122 bp, Homo sapiens
aggtttcgggggccacagtcagagagagaaatttagaattactagaggaggagactgaaccgggggttccagaggaatcacttagagtgcaacatgaagagacaggtctagagcctccagag

SEQ ID NO: 114710 - DNA, 122 bp, Homo sapiens
ggcatgtatttatacaatggaatattattcagccttaaaacaggagatcctggccaggcgcggtggctcacacctgtaatcccagcagtttgggaggccgaggcaggcagatgacctaaggt

SEQ ID NO: 114711 - DNA, 122 bp, Homo sapiens
aggaggaggaaagaggctggagtatggggtgatcttgggcttgtaaccgaatccaccagccgggcaggacgctgattggctgaggagtgcacttgccagggcccacgcccccattctgcctg

SEQ ID NO: 114712 - DNA, 122 bp, Homo sapiens
gtttggagaagttcaagggaggaatcctgcaaagaagaggggcgactttttccgtgtctccggacagctaatcgttttagtgacaggatgagagagcccttcgtgttctgagggaccgagtg

SEQ ID NO: 114713 - DNA, 122 bp, Homo sapiens
agaaacgcggcgccggatcccagtcagaggccggctggaacgcttcccacaggctcctggcgctccggtccccaccaggcgaccttgatcctggcgtgctcagcggagccagcgcagcgtcg

SEQ ID NO: 114714 - DNA, 122 bp, Homo sapiens
gctgagacaggggaaatgcgagggcttcggagggacataccctcttccccaggcccaggtcgctccatccctgctggggcctcagggctcatgtctgggatttccccacctttgcggggcag

SEQ ID NO: 114715 - DNA, 122 bp, Homo sapiens
atttgaacatccatggatttggtgatctgtagaggttctggaatcaattcctcattaacacggaggaacaactctgtaccttttatgtactctgctattagtaattgtcttgttttgtcttt

SEQ ID NO: 114716 - DNA, 122 bp, Homo sapiens
cccagggtcacttactacaaagcgaggtgttgaggcatttcttcctgcaagaagtcatagcgggaggccgtggcggaccccaccacgcagaaggcttccctggtccacgttctgatcccacg

SEQ ID NO: 114717 - DNA, 122 bp, Homo sapiens
ccccgcgtgtgtttcatcagcacctgcagctcctacagtgggacactcgggaccacatcacggtggtgattgtgaaccagcgtcccgcttgcttttgttgtttgtaaggagcacattctaag

SEQ ID NO: 114718 - DNA, 122 bp, Homo sapiens
cggcagcgtaccaggcaccccgccaggcaggtacctgttcctggagttagcaagcagccccgaccgtcttggctccgcctcctcagttttactgccgcgccgccgccagaccggttgctggg

SEQ ID NO: 114719 - DNA, 122 bp, Homo sapiens
aaccgcagttctcagatgttgctctgagggttaagtggatcgtgtgtgatgtgcctggctcggttcctggctcactgggtgagctctgttaagtggcagctgttgttgctgccactgccact

SEQ ID NO: 114720 - DNA, 122 bp, Homo sapiens
gccccacaggaagcagaaaccgataggctaagtaggatacacacaaagaaaagtagatcccgagaggcatttccccgagggctttcatgtggtttctcgtgaggagaagctgactgcagggt

SEQ ID NO: 114721 - DNA, 122 bp, Homo sapiens
cgggcccccgccagtcaggtgggtgccaggccctggccgtggcgaaagagccggcggagccggagacccgctcccggagacgccgcctcgcgatccccgcgcgggcgggaccgggcggccgg

SEQ ID NO: 114722 - DNA, 122 bp, Homo sapiens
ccttggccgggggttgggcaggggcctggggggcttccctggggggcttgtcgccggggccgcctgggctttcaggtcttccgaggtgaggacggtgctctgtggggagcttgcaagggcgg

SEQ ID NO: 114723 - DNA, 122 bp, Homo sapiens
catcgtcacccaggcactaagacataactagggcataatgagttttatttccaccaggggcgcctagtaactaccaggttcaacgctcccaggtggccgacatgtgatgtgctctactgttt

SEQ ID NO: 114724 - DNA, 122 bp, Homo sapiens
tcctgctagtgggaggggagagccgtgtcaaagtgacccgggagagcgcgcagcaagcgacgacgtgcgtgcgccgcgcggcgggcgggcggcgaggggctgggagcgctcggggaacggca

SEQ ID NO: 114725 - DNA, 122 bp, Homo sapiens
gagggcaggggaggagcgaggcaggcggccggctgcggcggcagagagtaggcggagcggcgcggcccggccgaaaggcggcacagcccagccgggggtcgggggggtgcggtccggagccg

SEQ ID NO: 114726 - DNA, 122 bp, Homo sapiens
attaaaggctcagtgaggagctggtgtttcagacatgggcaagctctagttcatgcaaaccgtgaatcaacagccaaccctgaaagggtagatagtattgatgtatctgcagtttacagatc

SEQ ID NO: 114727 - DNA, 122 bp, Homo sapiens
tggttaactttaaatcaaaactcaaaatatgttcatccagagtgtgtcttaagtaacttacgtgtcttaagtaacagggaccagagacatgttacctacaagagttctgggctatccttttc

SEQ ID NO: 114728 - DNA, 122 bp, Homo sapiens
tgaatgggaatacttgtgctcctaatttaatgcaaaagctctatgcctttctgacctatgcggtctgcattatttttgaaaagtataacttagttatttgtattgtaatccatttaacaaac

SEQ ID NO: 114729 - DNA, 122 bp, Homo sapiens
cccgggcaaggtctccaccgccgtggcaccgggtgcgggaggcgttttcccccctcccagcgggtccatgcaggggatcgggatgttctgaagcccccactgctgtgcctggaacacccgtg

SEQ ID NO: 114730 - DNA, 122 bp, Homo sapiens
cagggaaaggagcccattccacactttccttacccacaggcagccccagagtgtggtgggcggtgggcagggcaaagcggaacctcttggtgttgtggctcacagtctggagggtggaggac

SEQ ID NO: 114731 - DNA, 122 bp, Homo sapiens
tggtgcccgtcagtgcccgcccctcgcgccctagcgccccctgcgcgctgccgagggtttcgcccagtctcagaaggcagctgggggcctctagggcctatggtcctgctcccctcaacgca

SEQ ID NO: 114732 - DNA, 122 bp, Homo sapiens
gtgttcctagcgttaggagcaaagaacgccggacaaacgctcgggaggcggcgagcctcgcggttcttccaacaacgcaatctgtcagcgcggctaggttggtgccctctccccctgtatcg

SEQ ID NO: 114733 - DNA, 122 bp, Homo sapiens
gaaaagcagaggtaagcagatttccatagcagacttcccagggcctttaatgtgctaatacgcatggcgaatctccaagagggaggcagagcatgtggcgcagcccagccttatgtgaccaa

SEQ ID NO: 114734 - DNA, 122 bp, Homo sapiens
gaacactcagagaaaggggagatctgggcctgggaagattccggggcaggggtgagcggacgttcacatgagtgggtctatagcccgctccgggcatcatctagacttagcatgcattcact

SEQ ID NO: 114735 - DNA, 122 bp, Homo sapiens
cccatcatctgcacctggtccccaaaccagctgtccatgagcaatgacaaagaactaaagcggggatgggggagagggggtgtagggcccaagagctggggagcattatggcttgctgtcag

SEQ ID NO: 114736 - DNA, 122 bp, Homo sapiens
ttggtcccggcttataccttaggaccaaccagagaaagccaaatatgccctgctaatcatcgcataggatacccgcttctagttagctacctacagcttcccacatcagtggcctccaatca

SEQ ID NO: 114737 - DNA, 122 bp, Homo sapiens
aatgaggcttgcatctctcttttgctaccatcgagagcagcagctcagtcagctaacttccgtttgcctgccggcatgagttcagcgagtttccccttggttttagagccaaagcctgagca

SEQ ID NO: 114738 - DNA, 122 bp, Homo sapiens
cccgcgaggcgggacgccaagggttaataggggctgcgcccccggccgggcgagagttggcgaacgctgcccgccctgccgcgcctggcccggctgcccgatcccgttggggcgggggcaga

SEQ ID NO: 114739 - DNA, 122 bp, Homo sapiens
gcgtggttctccgcccggtccgcgctacatctttaagcccctggaggcgccagggccccccgcagccccaggtgagctagcccgagagcaagacctgcatgaggccggacagggaaagtggc

SEQ ID NO: 114740 - DNA, 122 bp, Homo sapiens
ttaaatattaaaaatgattccaactgaaagtgtcatcctaagtaccttgaaatgagaccacgtcagagacatgtactgcccctcacattttctcacctaaaccagcagcacctccatcttaa

SEQ ID NO: 114741 - DNA, 122 bp, Homo sapiens
cagcgtttggtgtcttcactattattcatcttagccattgtgataggtgtgtagtaatatcgtgatttgaatttggatttccataatggctgatgatattaaacatcttttcatatagttat

SEQ ID NO: 114742 - DNA, 122 bp, Homo sapiens
actgaggctctgagagtttaaacgacttggccaagatctcacagcaagttgggccagagtcgtggctagactccccgacctgattcccagctcggtactcccccaccttttcagggggcagc

SEQ ID NO: 114743 - DNA, 122 bp, Homo sapiens
aaagcccagccggctttcgggagaggccgctccctctggaaacgcgctctagttcctccccggttttctgtttcatagattgtgttttgtcttttacgattctggagagcagcgtgtgcccc

SEQ ID NO: 114744 - DNA, 122 bp, Homo sapiens
ggctggaggaccagtcgaggccaccttgcagggatcgcattccggagtggggagcagatacgacagaaagggagaaaccacaaccagcagcacaaggacagccttgagggatgaaggacaca

SEQ ID NO: 114745 - DNA, 122 bp, Homo sapiens
catgctgggcaacgtcctgctgctctgcttcttcgtcttcttcatcttcggcatcgtcggcgtccagctgtgggcagggctgcttcggaaccgatgcttcctacctgagaatttcagcctgt

SEQ ID NO: 114746 - DNA, 122 bp, Homo sapiens
cttgcctgtgctaagccgtttcccctccaggccgtccgcgtccgacacctcgccccctcccggatttgcagggcccctgaccccccaaggcccggccctggcactctcagcagggcctggcc

SEQ ID NO: 114747 - DNA, 122 bp, Homo sapiens
actgcaattaaatcactggtcacctttactgactgacttagcaaagtgaaaaggacaaaacgaaaacacggagaagtgaaatgagaaacagaaatgaggaaatcttcacaagagagtaactg

SEQ ID NO: 114748 - DNA, 122 bp, Homo sapiens
aggaccacgcacaaaacgaggctatgccttggtccattgacaaaaatgtgactggaggctcgcgggaacctagccccgtgtctcctgagtagcggtggttcaggattcactaattcatcatt

SEQ ID NO: 114749 - DNA, 122 bp, Homo sapiens
ccacaagtcatcctaaataaacactccatctggatgacaatggtgtggttgatatgcaaacgcagctcgaggcaagtacctggatctcctttcctggcaacctacaacctgtaagcacctcg

SEQ ID NO: 114750 - DNA, 122 bp, Homo sapiens
caggaccagcgtgcctggcagaatcaggagccgggggagtagggctcccggaaagtttatcgggaaaaagcctagcaccgtgggggctgggaggctggagaaactgaagccacagaccaggt

SEQ ID NO: 114751 - DNA, 122 bp, Homo sapiens
tgaggtgaggagtggcaatctagccgcagaaagatcagtcatgttcagccagacgcagaacgcgaccctcaaacatgggggaagttgggcgaggcgagcctgaggcactgggcacctttcga

SEQ ID NO: 114752 - DNA, 122 bp, Homo sapiens
cgctgtccatgtcgcagaatctggcgcgtctggcccagcggatagacttcagccagggttcgggctccgaggaggaggaggcggcggggaccgagggcgacgcgcaggagtggccgggcgcc

SEQ ID NO: 114753 - DNA, 122 bp, Homo sapiens
cccactcccgcggcgccgtcccccatagtcggtccccgagggccgcgcccagctcctgctcggatttcagcccgcaccgcaccccagccgccagggaaccttccagaaccctgcccctctgg

SEQ ID NO: 114754 - DNA, 122 bp, Homo sapiens
agaaaaaaaaagaaaagacctttatttctcaagcaagggcagaaattcagggctccccttcgactctggctgctcccaaggtggctttaaagcaccaatgagtccatggcttgtgtaagaaa

SEQ ID NO: 114755 - DNA, 122 bp, Homo sapiens
tgtgtctggtcagcccaggggggcagggccagcaaagatggatgggcccatttcaggctgcgtccagatccccttcccagcctaggggctcgggcttcctttgggggaagttctacaaggta

SEQ ID NO: 114756 - DNA, 122 bp, Homo sapiens
agtcacgatgcgtccagctagctatagacacaagcagaggagccagtaggccaaaggagacgcacagctgatccgtgccgaggcgcgggctccactccctgaagtggagggacccttgaatc

SEQ ID NO: 114757 - DNA, 122 bp, Homo sapiens
aagatatctgtgttccttctttattagcaaccatagtcataggcttcctaattttgaccacgggaaaagaggagaggcctctgcgtgtttgtgtctgttggttaggctgtggtgcagctggt

SEQ ID NO: 114758 - DNA, 122 bp, Homo sapiens
tccagtgcagagacaacccctgctgtgcttatgagcaccttgcttgacaaagtcagcacgcgcttagggatcccgtacggatggagttttttggtgcattcatggttttatttaaagaaatc

SEQ ID NO: 114759 - DNA, 122 bp, Homo sapiens
atttaatgctataaaatataagcactccaaatgccttaaattggatcatgcaggaaaccacggaaatcacattattttgcatttcagctttggaaaaaagccacactttgagaatgctcagg

SEQ ID NO: 114760 - DNA, 122 bp, Homo sapiens
gggaggggagagggagaccagcagaacacccagtcctggaacactgaaaatcccccagagcgaggaggttggcagatctcagccccatcaccactcacatgccctaaggggacctggggtta

SEQ ID NO: 114761 - DNA, 122 bp, Homo sapiens
tcactatttccaattttctgatgctaagcattcatatgaagtcctcagacccggtcacagcgccactcctactttgtatgctcatagtttaaatttttgtaggaaactttcaattgttttac

SEQ ID NO: 114762 - DNA, 122 bp, Homo sapiens
ttttaaacacttctacacctctccgtcctatttttccatgctccacgctcgaaggaaaaccgccacccaagaaacacacggagctagccaccccgaagcactggaagggcgcaatagttttt

SEQ ID NO: 114763 - DNA, 122 bp, Homo sapiens
gaggcttggccgcgtgagagcccaccacagggggactcgggtatggcgggctgcaggtcccgagccctgccctgcaggcaggcggctgaggcccgtcgagaattcgagtgtggcgccggcgg

SEQ ID NO: 114764 - DNA, 122 bp, Homo sapiens
tcaccatgttggccaggctttggtatccgtgtatcctacacctgctctccgtgccacatgcgcccgcaggttacgccaaggaggccctgaatctggcgcagatgcaggagcagacgctgcag

SEQ ID NO: 114765 - DNA, 122 bp, Homo sapiens
actcggaggccccgggcttttctgcagggagaaatctttgtagatttgtgccgtgttttgcgttttaaaggctctggggaagatgacctgttctctgctcccgggtgagcctgcgtggcagg

SEQ ID NO: 114766 - DNA, 122 bp, Homo sapiens
ctcaaattgacacccttccccccacccccactaccaatgccatcacacacgtgcactgcacggcacatacacagagaaggggacaattcaaagaatcttttctggaagggttgctttgtctt

SEQ ID NO: 114767 - DNA, 122 bp, Homo sapiens
caggcttaagtctttttaattcttcaaaatgggacatttaaaatacagcacaacccttttcgtgccatatttgatagcatcacaaagcagaacagctagagcagagaccctaaggtaggagg

SEQ ID NO: 114768 - DNA, 122 bp, Homo sapiens
ccacttagtgcatccatgtaactgctctaggattacaggagttgtaggtatatggttacccgaaggattagatgcaggcagagagtgcatgtgcccaaatccacaggctgtggtttctctaa

SEQ ID NO: 114769 - DNA, 122 bp, Homo sapiens
tggggcgtgtggcttggccatcgctgtggcaacggattctcagtggtgctgaggcctggtcgtggtcatggtgctaaggcctggccgtggtcatggggaaggattctcagtggtgccgaggc

SEQ ID NO: 114770 - DNA, 122 bp, Homo sapiens
cccagactcacagcctcagattctctgcaggacctaactgagtaacggccgtgaaggtgccgtgaccagcagagctgaaagctgcccaggcacagctcacacgctccccaccggactcctgg

SEQ ID NO: 114771 - DNA, 122 bp, Homo sapiens
cgctctcttgcctcatctgcagttgactaagctgcagccagtccagccttctcatcgacccggataactcagcctcaggatctctgctcctgtggttccctgcccccagctagcccagccct

SEQ ID NO: 114772 - DNA, 122 bp, Homo sapiens
cagggtctggattgggacccctttcctgtaacacttccacctctgggcagctcacaaccacgggctcacagactcagggttgcacaggcttcaagtggggactgagtgcatgcaatccatgt

SEQ ID NO: 114773 - DNA, 122 bp, Homo sapiens
tcgggacacgccgccattaagaactgtaacaaacaccgcgagggtctgcgtctttattctcgaagtcagccagaccgagaacccacgaattccagacacagactcagctactcgggaggctg

SEQ ID NO: 114774 - DNA, 122 bp, Homo sapiens
ttgttccaggaaagccctggcgttctctgtctcctgcaactactacaacctggcagacagcgcgcccggcttcgcttctgctcaagccgggctgctgcttccgcgtccccgccacgcgccca

SEQ ID NO: 114775 - DNA, 122 bp, Homo sapiens
ccacgcccttgtgcctggctcccagctgctccttacagcacccagggagtcgtgtttccacggggatgactctgcttattcctgccaaccctgccctcagctgctcactggcccctgtcgtg

SEQ ID NO: 114776 - DNA, 122 bp, Homo sapiens
tacattcacacgagcgcagggcaacaatctgagcgagtgttcgtgtgtgcccgtgtgactcgccatcgcgtggcagatgttcagtagaacattacagtaatttctgttacaggtccatgggc

SEQ ID NO: 114777 - DNA, 122 bp, Homo sapiens
gcgccttggagttcctttgcagcacgcttggaattgcatcagactgatcagaaatccccccgcccccaagctcagcccctcccgccacgctcccctgcccgcccctcccctcccctcccttc

SEQ ID NO: 114778 - DNA, 122 bp, Homo sapiens
ggttggtgtgtgtcgaagaaacctgactgcgccctgaggagaacagcggagaaggtccaccgagcctggcgaaaggtccgctgagcgggctgtcgtccggagccactccgggctgcggagca

SEQ ID NO: 114779 - DNA, 122 bp, Homo sapiens
gcttgtacctgaagacgcactaattttttgggttgcggcttccagtgactattgcaaattcgagtactaaaaaagttgatgtgatttcactatttggaaaatgtagtgtttttgtttctttt

SEQ ID NO: 114780 - DNA, 122 bp, Homo sapiens
gcactctcgccaagccccgtgagcagcgcggcccaagctcccgcagtggcccgtgagcagcgcggcccaagctcccgcagtggcccacagggacactgcctcccgtggggcgccaacccgct

SEQ ID NO: 114781 - DNA, 122 bp, Homo sapiens
cgccacgccacgaggaggctgccctgatagccggtgcaagtgctccttggcggggcggcccgcgactcccgccttggaccgttcactccctgaggggcctgggggtcagtcagaagactaac

SEQ ID NO: 114782 - DNA, 122 bp, Homo sapiens
aatctccggcacgggcctgggattgtcctggaggcacagcgcggctggagtgcggggcagcgcggggggggcggggtctgtctcctttctgggcggggccgtatcctggagcaggcggggct

SEQ ID NO: 114783 - DNA, 122 bp, Homo sapiens
gcgcatcctggctcaagcaatcctcctgcctcataccccaagtagctgtgactacaggcccgagctgccatgcctggctaatgtttgtatttttcgcatagacacggtttcaccatgttgcc

SEQ ID NO: 114784 - DNA, 122 bp, Homo sapiens
atacagcagttagaaatgatggagtagatatgctcaaaaccacatggatgaatctgaaaacgtagtgcttggtgaaaaaggtaacaaatagaaagatctaaaacacaattctagttatgaaa

SEQ ID NO: 114785 - DNA, 122 bp, Homo sapiens
catggcacaggtttgagagatggacgcagaggcccccgggacgctggccacgcggagaagcgtgtgaggagcccaggagcgatcagggcaacagaaccttccagatgcatcctctgctctcc

SEQ ID NO: 114786 - DNA, 122 bp, Homo sapiens
caagggcagtgcagagcatggcacccagcacccgacaggcgaggacggcccaggacaaagcggcagctctagctgtcctcagattttgggagggggctcccaacacggacacggtaggtagt

SEQ ID NO: 114787 - DNA, 122 bp, Homo sapiens
tcgacaaccactgccaccccccaagctcggcttgtcacctgccctaggagacgcagccgccggaccctgcccagggcacccacgcctcggcgaccaccatgtcccagaccaaaatgctgaag

SEQ ID NO: 114788 - DNA, 122 bp, Homo sapiens
ccccctcagagggcactgctgtagagaggggcacagcagagcctcagccccagggcaggccgtgaaaggaggcgggggcgccccgaggccctgtggaccccaggcaggggtgttcccagcag

SEQ ID NO: 114789 - DNA, 122 bp, Homo sapiens
ggttgctgtttcagtaacttcagcagtcaacggagagaagagtggaaaccttactggatgcggacaggagagccagttactgaaagcagatataacgcggatcctgtaaagagtggtgtgta

SEQ ID NO: 114790 - DNA, 122 bp, Homo sapiens
ctgagaatgaagttatccatggtcttcaaatcaaggaggctggggcacagtcagaatcagcgaacaagacaagaacactggaccaaaacataaggaacagtagctaatgtgcaataagggat

SEQ ID NO: 114791 - DNA, 122 bp, Homo sapiens
tatgggcaggtgtatgaatgtgcagcctctggagtgggtagagtggttttctggaatgcccggggactggataaaaaggtagagatgtaaaggcttttaaagttctagaggccacggagctt

SEQ ID NO: 114792 - DNA, 122 bp, Homo sapiens
cccgaggagaagaggctgcggctggttgctggagcggggaagcgcacagcccgaggactgcgaggacggggaggacgctccgcggccaggcagggaggagacctgcacccagacaggtggcg

SEQ ID NO: 114793 - DNA, 122 bp, Homo sapiens
gtgagctatcctcacccaatggggctgaaagacagggctttgatatcctgccccagagcccggctgttaccacatggtttgatttgcgatgccaagcaggcttccttacgggtccacacacc

SEQ ID NO: 114794 - DNA, 122 bp, Homo sapiens
aaggatctgatatcaaatatttggtctcactgacctcttaggaacattcttatttgtctacgtaagcttattttgagattgtaaacgtatgatcatcttacttttacttctctgtacatggc

SEQ ID NO: 114795 - DNA, 122 bp, Homo sapiens
ctcagtgttctgaggtgtaaaaagtagataacagtgtcttccctgcctgccttacagactcgctagaggacaaatgagacaatttatccccttacagccatgcatcctgccttcctcatgca

SEQ ID NO: 114796 - DNA, 122 bp, Homo sapiens
tttcatcgtgtctcttaacactgagaaaatacttaggatttgtacttaggatttgtggatcgagaagggggcctattgatctgtattaaacctcacattcacaaaaagtaaactgaggcctt

SEQ ID NO: 114797 - DNA, 122 bp, Homo sapiens
cgaccacctgtgctcaagcaatcctcccatctccatctcccaaagtgctgggatgacaggcgtgagccacagctcccagcctaggcccttaatcttgctgttattttccatggactaaaggt

SEQ ID NO: 114798 - DNA, 122 bp, Homo sapiens
ttacagatttattgggggaggccccaaggagaagacctatcatcatgtcacgggagctcacgttccataccaggaaaggagtgttcctgtcaccaggtgaagggggaagggtcctgggaccc

SEQ ID NO: 114799 - DNA, 122 bp, Homo sapiens
gaagaagggaatgtggctagaatcttaccatctcattctcttctccttcattgagcagagcgtgctggcccttctcaaagtgtcccatgaaaaagttattccacacctcctccctgaccttg

SEQ ID NO: 114800 - DNA, 122 bp, Homo sapiens
caggagaagctggagaaggcgcgcgcccaggcagagcaccgaaaacagtgccaggtgcggcgcctgcgggagcaggagaagatgctacggaacctccgggagcagcacagcctgcagctgca

SEQ ID NO: 114801 - DNA, 122 bp, Homo sapiens
cagcttgtacccaggtagaagaggccctcaaattcctccacgtaaggcaccactcctgcccgtgcacagacctcgtcgcgaggctccgggacttaccaccacgttcagcagtcctccgtatg

SEQ ID NO: 114802 - DNA, 122 bp, Homo sapiens
gcagctccaggggggatctctgacccttcccaagcagtgaaagttgggaagtgtctcccccgcagctgtggcttccagcagagaccggagactagaaccagcagcacttacagagatttata

SEQ ID NO: 114803 - DNA, 122 bp, Homo sapiens
gggccggcttccccctgtgtggcgcgcggtcttgatccccagctggcaccatggcactcccgactttgagggccccaacaatccatccacataaaaggttccaaagaggcgacaggggctag

SEQ ID NO: 114804 - DNA, 122 bp, Homo sapiens
ctgcccatgggaacccaccccttgcagcagtgtgccctggatgtgggacatgcagtcaaacgagattgttttggggctttaagatttgataactgccctgctagatttcagacttgtgtggg

SEQ ID NO: 114805 - DNA, 122 bp, Homo sapiens
ttctcataatttttagactataaatgggttggttcgtcacatgtggttcagctgggaaaacgttcctcgcatgtggtcccaggagagagagctcttcagcacactccgatggcactgggtga

SEQ ID NO: 114806 - DNA, 122 bp, Homo sapiens
acaggggctggaatggcaggctgccggccgctgataacggaacacatcggagttgggtcgcgagacagcaatcaaaagacaaaaagagtctgattttaaatggtagcaagcctggagagctt

SEQ ID NO: 114807 - DNA, 122 bp, Homo sapiens
tgctgagacctcattccggagaggcggcgggaggaagggctttgatgggttcttccgtcccggccccacaaggctgggacgaaaagcaaaacccagtcagcatcccgttgagcctctgccgc

SEQ ID NO: 114808 - DNA, 122 bp, Homo sapiens
ttgcccgtcaggggaagctgcactcccacggcccatacaagtgggaggcctctggggaagcggccctggacattccgtttgcctctctggaggggaaggggtggcccagagcgaacccccac

SEQ ID NO: 114809 - DNA, 122 bp, Homo sapiens
cacacagcttcgccagctgcaggcagagcctccgggtgtggtgagtgttcccggctgacccgagctggaggccaggcaggggctgcggtgacagtgggacagagctgggctccagggtggcc

SEQ ID NO: 114810 - DNA, 122 bp, Homo sapiens
cgtgggagagcccggaatggggagcgcgtggccggtggaggcccgaggctgtgcttccgtcgctggctctgaggcagaggtccaggccggcaggctgcccaggtggtcctgtctcagagctc

SEQ ID NO: 114811 - DNA, 122 bp, Homo sapiens
gctttaagatttttttctttttcctttcttcccccacactagaacgcaagctcctgagcacgggagtttactgcctcctagatgagtcctaagcccccagaacagtgcctggtgtggagcag

SEQ ID NO: 114812 - DNA, 122 bp, Homo sapiens
gtttcacctaatgaagtcttctcagtgctttagacctcagtgagatctctggatgcatatcgctaacgcctttttatgctcaatcacatgccacagtcaacatgcaatactcaagacagaaa

SEQ ID NO: 114813 - DNA, 122 bp, Homo sapiens
cattgttactgtgagcgacccacgcaccagctccacacggggctccctaggtgcagcctccggtgtgtgttaaaacctggtggccacggttcccttgttcatcttttgttccagaatttcct

SEQ ID NO: 114814 - DNA, 122 bp, Homo sapiens
tcccccagcaggtgggcaggcggcaggtgctggttctgtgcccaggcacctgctggcatccgggaatctcctcccgtcagaactgggttagtgtctctgatgcgaagtggtgagtcatcata

SEQ ID NO: 114815 - DNA, 122 bp, Homo sapiens
cacgggccacctcccttatgtggcgtgaacgtgctggccagtcagcgtccatcacgatcacgtcaggccatgctcccaccagcagggcgtgaaagcgaccagctcacttcccgacataagcg

SEQ ID NO: 114816 - DNA, 122 bp, Homo sapiens
agtgatacgcgaaaaacagacggaagaccccgttaattttactctgcccggctactacaacgagggggaaagaagcgacacacaaaaacacaaccacacacacaaacacaatctcatacaca

SEQ ID NO: 114817 - DNA, 122 bp, Homo sapiens
cccggggtcgggccggggcagcgcgctgggcggagccgctccgtggcccctaacaaagggcgagctcattgcccggtgggaactgtgagttggtgtcagagtcctcctaggaactcagtata

SEQ ID NO: 114818 - DNA, 122 bp, Homo sapiens
cctgtgacacattgggtagacaggttctttgagaacgtcagcacagacttcttgcatgagcggtactcgcttcctccagcgtggggagtgacatgaagagcaagggttttcctttcaaactg

SEQ ID NO: 114819 - DNA, 122 bp, Homo sapiens
gagagctgaatttccagtctgggacgcggtacttgggctggtccctgaccccaaggacgacggacgcaggaaaatgggcgcccgggcgcacagtctcccgtggctgggaccgggagggctag

SEQ ID NO: 114820 - DNA, 122 bp, Homo sapiens
cctccagctcagctagcggccggacgcgcagcccgccgactagccctccaggtcctagcgcgactcccggatcccggatccggcggatctggccgaccactcaccctcccctttccgcaagt

SEQ ID NO: 114821 - DNA, 122 bp, Homo sapiens
ccgcgaaggttgagggggcggaggctgccgactgccagcccccggtccgcctccggcccccggcaggagagagggaggagccatggcaacaggtgccaaaataatcacctcaccaagtctgc

SEQ ID NO: 114822 - DNA, 122 bp, Homo sapiens
tggccatggcctcatgcacagtgcatccgtggggcctccagagttggcccgagtggctggcgccctaattcctttaggctgaagcccaggagtgtttgccacccccacctcccacctgatca

SEQ ID NO: 114823 - DNA, 122 bp, Homo sapiens
gagcctccccctgagctgctgacagaaaactacatcacacccaaccctatcttcttcacccggaaccatctgcctgtacctaacctggatccagacacctatcgcttacacgtagtaggagc

SEQ ID NO: 114824 - DNA, 122 bp, Homo sapiens
actgagagagcggaaagcggtggttgagcaagggtctgaagtatggtctgttcccccatacgggccgcagacgcttcctggtggctgctctgagccaggcctgggccccggcgagggatcac

SEQ ID NO: 114825 - DNA, 122 bp, Homo sapiens
gctctggcatttgcaaagttggctggtcaattaccaaagggcgctggtgcgtgcaggtcccgccgagccgtttggggcttgatttatctccacctgcccgcatcataagggtctgcgtggtg

SEQ ID NO: 114826 - DNA, 122 bp, Homo sapiens
cgcagctgagcgcgtcctcccagggctgcccgagcgctggattccagcgagtgccacccacgtgtaaacatcctttagaggggagaagcggctcacttgcttatctcgagggttcatccgag

SEQ ID NO: 114827 - DNA, 122 bp, Homo sapiens
tttctaccaagcctttgtgaacattgctcttcattttggcctgtacttctccctcagggacgtagaacaatggaatgtcagtcagtctctgtagttaaaactttttctttaaaattcaatta

SEQ ID NO: 114828 - DNA, 122 bp, Homo sapiens
aggacagagcagctgaatgttggctagcaggtcttaccagcactcacaacccacccattgcggaagcaggtttggagagtccggcccaactggagtctgagaaggggtcgctgtccaggggc

SEQ ID NO: 114829 - DNA, 122 bp, Homo sapiens
gtgactgactcttgcatgctcatgcccaggtgcttgtgagctctcacccattcccaggagcgggcaggctggagatgaggaattgtggtcttttgcattgggccgtctcccctttcatcagt

SEQ ID NO: 114830 - DNA, 122 bp, Homo sapiens
tcgcagtgcctgcggtaggcactagatggcgcccaagcacaccaagaaggcgctgagaggcgggccgagcagcatgagtttttggtataggggtttcctggaagattgaagcagtttatcta

SEQ ID NO: 114831 - DNA, 122 bp, Homo sapiens
gggataaaacgaggtgcggagagcgggctggggcatttctccccgagatggcgggtctgacggcggcggccccgcggcccggagtcctcctgctcctgctgtccatcctccacccctctcgg

SEQ ID NO: 114832 - DNA, 122 bp, Homo sapiens
tatgatatgaaaaatccgtgatttcttgtagagacaaagtcacatgtaatacaaatatgacggtttgctccctgccatcataatagaaggaaatgctaatttttagtagaggttagtgaaaa

SEQ ID NO: 114833 - DNA, 122 bp, Homo sapiens
attggctcggagcactggctgtctgactccatctgcagggctgtaatacctactctcctccgatccattcaccacacaacttcagccggctgaacagactcacgcagctccagcccatcttg

SEQ ID NO: 114834 - DNA, 122 bp, Homo sapiens
gcgctgcccgctgcaaagaactgaataacatggtctgcaacgctccagacaaaaccaaaacggcatagccaggctccagcacgagatacacattgcatgggtgcagagtgaaacacaaacgc

SEQ ID NO: 114835 - DNA, 122 bp, Homo sapiens
gtccgggacgaggcgaggcccgtgcagacccgatggcaccgcacactcacgccccacacacggatgggacctgggctcagcccagctaccagcagctcacatgtggggtgtggggacctcgc

SEQ ID NO: 114836 - DNA, 122 bp, Homo sapiens
ccgcccagagtgaccccgcccctgctctccggcaggtgttccacgtggccatagcgtttgcgtcacaatgacctggcggacaggtgggagccacagcgtacaccccagggttccctctgtgc

SEQ ID NO: 114837 - DNA, 122 bp, Homo sapiens
cctgctgctcttgggacgcccttggctgcagctttgtctgctctgattgcggtgagggcacgttccggggtgagcagcactcacaggcccttccccttccctcctctccttcaggagggaga

SEQ ID NO: 114838 - DNA, 122 bp, Homo sapiens
aagaccagtggccaggtggccgctatccgtcgttgtctgggacactgctcaccttccggccgttgttaatgccgttgttcctgtcgtcaggactaggtcggtctcgaccagttgggacagag

SEQ ID NO: 114839 - DNA, 122 bp, Homo sapiens
ctgctggcaagggtgcttgcctgtgctggggtgggcggagctaaacccggagcgggatgacgtcatgaggacgcagccgcagagcgattcgcgtcccggaagcggcggtggcggccgcggcg

SEQ ID NO: 114840 - DNA, 122 bp, Homo sapiens
ctttgaggcttttaggagcctcaggctgagcaggctataagttgagggtgacatcagaggcgagtaagagtcagggcagccgacccagcgtggtggtggtaacaggacttagatcatgccct

SEQ ID NO: 114841 - DNA, 122 bp, Homo sapiens
cgtgtcctgttaacctttgatggctttgacgagttcaagttcaggttcacggatcgtgaacgccactgctccccgaccgaccccacctctgtccagaccctgctcttcaaccttctgcaggg

SEQ ID NO: 114842 - DNA, 122 bp, Homo sapiens
tgcacacaaacttctttgttccttcacctcaaggagcgtccttggaaagcaaacatacttcggggcatttcagtgggggcgcagtgcgagggtgtcctttgcgcctcagctccggagaaaaa

SEQ ID NO: 114843 - DNA, 122 bp, Homo sapiens
agcctcctacattccaccttggactttcccttctgaatgggttttcagcacacaattgtacggccttactcagtgcttctaatcctaggtttgcctgtctaggccacaggttagcaactaca

SEQ ID NO: 114844 - DNA, 122 bp, Homo sapiens
ttaagtctgtcaaatggccactgagtgtgtctaaactcaaatacaacaggcagagcgtaccgcagggccagcgcgcccatcttggggctgcccgtttgcagactgaggctgggagcgcggcg

SEQ ID NO: 114845 - DNA, 122 bp, Homo sapiens
cactgtgggcacgacagctgggccagaggaccaccaccagctggtaggacacagcaccctcgcgtgctgggagcagttgggtgcactttggcgctctgtgtcttgtgactggaagctgtgtt

SEQ ID NO: 114846 - DNA, 122 bp, Homo sapiens
tgtgtccagcgagcatcggccaccgccatcccatccagcgagcatctgccgccgcgccgccgccaccctcccagagagcactggccaccgctccaccatcacttgcccagagtttgggccac

SEQ ID NO: 114847 - DNA, 122 bp, Homo sapiens
agagcggcgcggggagaagcccgcagtgcggggccgggcgggctcagccaatggggagcgcggacggcggcgcgcgcggcgggggggcgggggcggggcactatttcagcgggggccgcgcg

SEQ ID NO: 114848 - DNA, 122 bp, Homo sapiens
tgagcccgggagctgggagttcccggaatttgcttccaaggcgtctgttcccaaggcccacggggaactcgggagcaaaggcctgcagccctcaccccgccgtgacccttgccgggggtttc

SEQ ID NO: 114849 - DNA, 122 bp, Homo sapiens
agtctcagctaatcccagcagccagactttgaccactcacaggcagccaacctctcaaaccgtgctaagaaggcaaacgcgagctgtaagcaacccagcagtttccgtacctcacttccgtt

SEQ ID NO: 114850 - DNA, 122 bp, Homo sapiens
tcaaacccgggtgacggtgagactccgtcacaaagaaaaaaaaaaagtttcagctgggcacgatggctcacttctgtaatcccagcactatggaagaccaaggcaggcagatcaattgagcc

SEQ ID NO: 114851 - DNA, 122 bp, Homo sapiens
gtgtgtgtgtttttcctccaatcgtggcagactgacagatgctttcttcaagactctgctcgattgtctaacatcatagaatcactatgcattacttatatgacatttttccatcctcccca

SEQ ID NO: 114852 - DNA, 122 bp, Homo sapiens
tgcctgcaccagagaaggaggccatcggcaagccaaggagagccctccccagaaatcacacggaccagcaccttgatctgggacttccagaaaacagaactgtgaaaagacaagtttctgtt

SEQ ID NO: 114853 - DNA, 122 bp, Homo sapiens
tgttggggcgcgctcacgttctcgcaaaaggctcctccccagggctcaattccccgactgcgggaagccctttggtgccccaggagccttggaaacccaaggtttcctctgacctcgtcgct

SEQ ID NO: 114854 - DNA, 122 bp, Homo sapiens
tgagcccctccaggcccccacacccgggctgcggctgtctctgctcatctgtcagtcacccgatcccccacacctgttccaggcacagctgcccacccgcacgcacagctatgaatagggcg

SEQ ID NO: 114855 - DNA, 122 bp, Homo sapiens
gtccacacggtgcacacctgtatgtctccctacactctggattctgtgagtgcatttacacggtgcacgcctgcacgtttccccacactctggattctgcgagcgcgtctacacggtacatg

SEQ ID NO: 114856 - DNA, 122 bp, Homo sapiens
gtttgctcccagagaaggggctccccgccccgggtccgtactccaccccgctccggactccgctttggaatggctcaaaccactgtacgtaccggcctctcagtctgctgttgtagggggtg

SEQ ID NO: 114857 - DNA, 122 bp, Homo sapiens
agccggccgcggggctcacggccagggccacggccaggatggccagcaggagcagcggggcgcgcaggggcccggccatggtcggctaggacgcgggacgcggggagtggggcgcaggcgag

SEQ ID NO: 114858 - DNA, 122 bp, Homo sapiens
ggagggccagggtgacgcaggtcagaggcaccaggacctgtgccgccaccattttccactcgcgccagctgtatgcggccttcttcaggaacatggcccagaattgctggcagtgcagggcg

SEQ ID NO: 114859 - DNA, 122 bp, Homo sapiens
tcggtgatccatgctagagtggacatagggtgctgagtccctcgggcccctgcaaggcagcggggactgaagtcgacacatagcacgttcgtgcctgtgccttgagagggagctcacacgcc

SEQ ID NO: 114860 - DNA, 122 bp, Homo sapiens
cgaacccaggtagagcggcaaggttctgtttcgaaacttgggttctaaacacaaaccgagcgtcgacagacgtggttctccgacagcaccccgcgagcgcggacccccgcgggtcctgaccc

SEQ ID NO: 114861 - DNA, 122 bp, Homo sapiens
catggcttaggcaagacaaagatgcaagagtcacaggacagcacaggtggggcagggttccggttcaggcctcaccgtcaggagctcccttgctggcctctcattcttctcctccagttctt

SEQ ID NO: 114862 - DNA, 122 bp, Homo sapiens
ccagactaaactcctcccctcggcccggcccgcccctgggcccgggctggaagccggaagcgagcaaagtggagccgactcgaactccaccgcggaaaagaaagcctcagaacgttcgttcg

SEQ ID NO: 114863 - DNA, 122 bp, Homo sapiens
atagccaaactttacaaagggctcttaaaaatcactaagaaggctgcgcatggtggctcacgcctgtgatcccagcactttgggaggccgaggcaggtggatcacctgaatttaggactccg

SEQ ID NO: 114864 - DNA, 122 bp, Homo sapiens
catatatccctttatttcttgctaccatgcacttaaaggactcccaacagcgggtcaacccggaaagtctgacaatgctgccccccacagcacagcgctcggcacagcgttagggacagaag

SEQ ID NO: 114865 - DNA, 122 bp, Homo sapiens
aatgtagaaaattattcacacggtgtaaaaaagcccggtgggaaagtacactgtggtttccgtctctggccctgccacagggaaggaaactggaacacaccggtctggtaggaagaagaggg

SEQ ID NO: 114866 - DNA, 122 bp, Homo sapiens
tttttaagcctgttcccagagcccagggtttctcagtacctgtgttaactgagatgccttcgcctgccagctcagcctctgcaggcacagaactgctggctggggcacatctgcctcggtcc

SEQ ID NO: 114867 - DNA, 122 bp, Homo sapiens
agctaaaagtaagaacagcaacaatagttgtatggacatatcattccaggaaagagccctcgtgaaagcaaaggtacagtcaaaagagtaagtaaatgagttctgtctctgttagcagtgag

SEQ ID NO: 114868 - DNA, 122 bp, Homo sapiens
atgggggtgttcatgcctgagtcaggggctctggatggtagaaatgtctgggagttctgacggaatgggggtgaggaggcctaaagataacctgttcatagtctttcagggccttaaccatt

SEQ ID NO: 114869 - DNA, 122 bp, Homo sapiens
cctcccaccactggcggagatggacctcagagagtggttgcagcggcgatgcttaggccccgtaggcaggaggcgaaggaggaggacgcaggtacgtcccttggcccggggtccgggaccta

SEQ ID NO: 114870 - DNA, 122 bp, Homo sapiens
gccctcttacatgatcccactcaaattacattttctcctctctgctcccatcatgggcatcgcccgcttaccttcagcctttggaaatgccaagacaatccgcaacgacaactcaagccgct

SEQ ID NO: 114871 - DNA, 122 bp, Homo sapiens
ggggagaggcggggctggagggtgggaggcagccgggggccggggagcgaggtcaaggcccgagaaattaaatgttcataaatgtaggcctggcactcacaaagtagggcagagccattagc

SEQ ID NO: 114872 - DNA, 122 bp, Homo sapiens
tttcagaccaacctggctgctctatcaggcacagattaatgacaatataatacaatatgccggaggcaaacgaacaacccgggcaccactgccgacctcttgattctcccaccttccctcaa

SEQ ID NO: 114873 - DNA, 122 bp, Homo sapiens
aaggaagatgtttcttaaccacaaatgtgccatgtgtttgcgccctttcttggctcccgtcgcgtacagggtggagtccagactccttggcctgacgcaggaagtcctcccacatctggtct

SEQ ID NO: 114874 - DNA, 122 bp, Homo sapiens
aggaaaggcaacctgaggagagggctctgcagccagagaggggcctgaggactgtgggaccgagagctagcagacgcactttagtgcttatagctcttcctgctggaggaggaggtggtggt

SEQ ID NO: 114875 - DNA, 122 bp, Homo sapiens
tgcagacacaggaggttggggtctggggcagacggctgagcgctcccacacgtccccgggcgtgagtttacttccctgtgaaaaggcttcatgttggtgtctctatcccagagttgtcaagg

SEQ ID NO: 114876 - DNA, 122 bp, Homo sapiens
gacagagcaatgcggcagtatcagaaatggttcggaaaatccgcagcccccatcccaacccggccacctcagcaggcatgcaattgtgtttccagcttagctgacaaagagctctcagaact

SEQ ID NO: 114877 - DNA, 122 bp, Homo sapiens
tctccctctctcagtgtgtgtgtctctctgtctgttttcacactctcctccccaatcgagcgaggcccacacctggcgcatcactgccgagccattagctgcgggtttcctttcatcttcgc

SEQ ID NO: 114878 - DNA, 122 bp, Homo sapiens
ggcaagtcatgtctgtggaattatacaatgtttgtccttttatgagtggtttgtttcactcggcaccatatcctcaaggctcactcatgtcatagcaggtgtcagaacttccttccttttta

SEQ ID NO: 114879 - DNA, 122 bp, Homo sapiens
ccccaggtaaccgctgtaaatcattaggtgtatattcttcaggtcctttctatgtgttctcgcacatgtctgcacaggcagagtatgtttaaaaagatctgtaatttaaaatttttctggtt

SEQ ID NO: 114880 - DNA, 122 bp, Homo sapiens
ctcaggcctctaaaacacaacctcctatctgccaattgttctttatgtaattttttgccacgtcatgaattggcaagtaccagaaccaaaggtaccccttaatcacatgtgcgactaaggaa

SEQ ID NO: 114881 - DNA, 122 bp, Homo sapiens
caggacaactggcacaagcgccgcaagactggcagcaagagaaagccctacgacaagaagcggaagtatgagttggggcacctggctgccaacaccaagattggcccccaccacatccacac

SEQ ID NO: 114882 - DNA, 122 bp, Homo sapiens
cgattccttcatccgtacaatgggggcgacttgagacggagttcccacacaacgggtgctcgccgaagcgccgcatccctccgcactcccttccgggacttcctctccctgtcttgccccgc

SEQ ID NO: 114883 - DNA, 122 bp, Homo sapiens
tgcttttctctctgtaagtgctcaagtgcagcggtctccaattttggggggaccagggaccggttttgtggaagacagtttttccatagactaggggcagcgaaggtcagttttgggatata

SEQ ID NO: 114884 - DNA, 122 bp, Homo sapiens
ggcctaggggctgggccctcccctcgccggtgcgggacctgcaggcctcccctctcccctcgcagctcatcacgccccacgccatccgggtgcagacgcccccgcggcacatccccggggtg

SEQ ID NO: 114885 - DNA, 122 bp, Homo sapiens
ccaaaaggcagaaaatacacacgcggcgaagacacccgggcagccgtggaggctccggcccgtccttggtcgtcaattacctcattgtggatctgccagggccaaggtggccgaaattgcct

SEQ ID NO: 114886 - DNA, 122 bp, Homo sapiens
ataggtgcagttacagcagaagcgaataatgaggagaatctccatggcagcctctgtccccgcggcgggagcgtgcagccatcgctccaggctccccggcgcccaccagcagcccggccact

SEQ ID NO: 114887 - DNA, 122 bp, Homo sapiens
aggggtgcgaacggagaagttgtcccccagtgcgctcgaatcagagcaggctgggctgtgcgtgcccggcgccgcggagcccagagcccgcgggatccccaggctcctggtaccctcggcaa

SEQ ID NO: 114888 - DNA, 122 bp, Homo sapiens
tcctctcgatgttcagccgcttgtctctctgccagctgagctctgaggtttataggagcacgagatacggaggctgggtgggccaaaaagtagcatttgagctggaaaacggataactgttt

SEQ ID NO: 114889 - DNA, 122 bp, Homo sapiens
gcgatctgttgcgcgcgggagtgagaggaattccccatttgtgccggggagcgctccccgcgcccttatctggaagatagcaggaagtgaaactccctggacggtgagacccggagcggcag

SEQ ID NO: 114890 - DNA, 122 bp, Homo sapiens
ccccgcctgtcacggaagagctgcgccagcttgctcatgcttctccctcggcccctcccacggcctcagtttgaaccgccatccgtgcagtttgtagtacccacatctacgtccagagggcg

SEQ ID NO: 114891 - DNA, 122 bp, Homo sapiens
ataggagtaggtggggcagcaaatcccagattgaatttctgaagcattcttctgcctgagcgttttggaaagtcacacaaggcattagtaggagcctcctgtggaaaaaagctctcttaact

SEQ ID NO: 114892 - DNA, 122 bp, Homo sapiens
tcacaccggcaagcttcacgtcatggctgagctatgtgtcttctccttcagccaggagatcgagtactggggcatcaacgagttcttcattgactcctgctgcagctacagctaccatggcc

SEQ ID NO: 114893 - DNA, 122 bp, Homo sapiens
tgcggaagatgctacaggaagagggaggtgcggtcctggccgcggtccgggggtggggggcgggagttttcaggctcctggaccaggagggaagccggctccggctactcccagctgcctgg

SEQ ID NO: 114894 - DNA, 122 bp, Homo sapiens
ctaccccttcagccgcgctgcaatctccatcgccaccaccaaccgcagcaaggcgagttgcgccgcagtgctcaacaggaaagtacggaaacctaaagaaaccctaacctctcttcggcatt

SEQ ID NO: 114895 - DNA, 122 bp, Homo sapiens
ctcagttccgttagattaggatgcacttttctgtcttcctttgtgtcatctttttacctgcgtaggtctcagctgcggttaaggaatttttcagataagcatttcccctctttcccactacc

SEQ ID NO: 114896 - DNA, 122 bp, Homo sapiens
agccaggcggtggtctctgccagatgccaactgttgcccgctggggttcagcgacatgtccgaatgtcccgaggcctctgaggttgttttcttttgccgcagaacaaatcaccacgaacagc

SEQ ID NO: 114897 - DNA, 122 bp, Homo sapiens
gagcacaatgattggtcactcctattttcgctgagcttttcctcttatttcagttttcttcgagatcaaatctggtttgtagatgtgcttggggagaatgggggcctcttctccaagaagcc

SEQ ID NO: 114898 - DNA, 122 bp, Homo sapiens
aagcacgtgtgctactgtggttgaaccttggaagggtcgggcaagctgtcagtcctgtgccggctgagttgctgctgttgctgagactgatgttgctggtgatgtgactgagggaaggtgct

SEQ ID NO: 114899 - DNA, 122 bp, Homo sapiens
cctcagaggagcaagtcagtggctcgcagggaccttctgaagagaaacctgctccgttggcgacagaagtgtttgatgagaaaatagaagtccaccaagaagaggttgtggccgaagtccac

SEQ ID NO: 114900 - DNA, 122 bp, Homo sapiens
gttggctgagcgagtctctcgcctccgtagttctcgtgtgtctttggccgcacagcctctcgggagttgtagtttccgttcaactcccaccttggagcaacagtttagaatcccacgaggcg

SEQ ID NO: 114901 - DNA, 122 bp, Homo sapiens
actccgtctcagaaaaaaaaaaaaaaaaaagaaaaaaaaaagtactgaccactgcggagacgtgggggaacctataaggaattaatgagaattaaaaccccaagattacgtaatagatcatt

SEQ ID NO: 114902 - DNA, 122 bp, Homo sapiens
cccagttgctgtttggagcttcctttggggtgggaggatggcgggggcagggggccggggcggtgccttaacgaggggagatgcttttaaatagctgccttccaaaaaccatcctccctgct

SEQ ID NO: 114903 - DNA, 122 bp, Homo sapiens
ggtgctggcagttctcttcttccacgcctcctgggcctggcccctcatccagggccgagccggggcgttttgctagcagatttctcataagatagttatgtaacaagaataggaaaacgatt

SEQ ID NO: 114904 - DNA, 122 bp, Homo sapiens
cgcgcagctcgcggcggcggccggggaggctctgggtggggaaaaggacccagcgaccaacgagacacccctgagccgcgcgctcctagccctccgcacgcgccacatcaaggcagcggggg

SEQ ID NO: 114905 - DNA, 122 bp, Homo sapiens
gccggggtttccactgggctaggtgtcagagttgggaatgtctaaaacaaaaaaggcttccgagggttattcatggccaacagtttccacaggagaatccaaagggaaactagtttccgggg

SEQ ID NO: 114906 - DNA, 122 bp, Homo sapiens
ttccagtccctggtaactctgttttactttctgtctttataaatttgcctatcctaggtacgtcatataaatggaatcatacagtatttgtccttttgtgtctgccttctttctttttttct

SEQ ID NO: 114907 - DNA, 122 bp, Homo sapiens
cgagaggcagatgtgcggccccgggcacacgaaggggtccagctctctgtgcctgagtaccgcagccgcgtctatcaggtgctccggctctcgacccctatcatcccctgtctactgcaccc

SEQ ID NO: 114908 - DNA, 122 bp, Homo sapiens
gcaggcagacaggatggggtaaagttaacagttgggctttgtccctcccccaatctcagccggggacagaggaaggacattttgtgctacagcagctgttttcatactggtcagaccaaggt

SEQ ID NO: 114909 - DNA, 122 bp, Homo sapiens
cggcctggcagtctggagcctctttgtttgcctgggtgcagacagggcccctccattcatcgcccggtgacctcagaccgagtcctgaaggcttttgagcttgttttctgacctttagaggg

SEQ ID NO: 114910 - DNA, 122 bp, Homo sapiens
tgcgttccccttaccaagagaggagaggaccaccaggaccaggaacagcgagaggcggcgcgtctccgagcccaggcagcctagaagccgacgcacagggtttccagagccgccctgaccgc

SEQ ID NO: 114911 - DNA, 122 bp, Homo sapiens
tgggggaaaggagcccaaatctgcggcttagctaacagtcatttcaaaaagcagttacaacgcctccacgcccctccagccccgcctggcccagcagagggctctcttcttcctcccatctc

SEQ ID NO: 114912 - DNA, 122 bp, Homo sapiens
gatttggcaaaaaccatgaaagtgttatggatataatgcaagtctaagaaacagtatgtccggccagtgtttggcaaattatggaccttgggccaaatccaactggctcctgcttttgaagt

SEQ ID NO: 114913 - DNA, 122 bp, Homo sapiens
tggggttaatgtgagtcaaaagcactatgagtcacatcagggggacaggcccactggcagcgagataacttcagaaactggagcaggtgtgagccccctgggatgcagccaggcagaaaact

SEQ ID NO: 114914 - DNA, 122 bp, Homo sapiens
tgatagccaattaggcttggggacctgcatgcccagcccctgccttcctggagcccatgacgcaggggccatccctgaccacagcagatttcatcgagtacttgcttgttgagtggtggagc

SEQ ID NO: 114915 - DNA, 122 bp, Homo sapiens
tggggagactgtcctcaaagctcacctgcatggcctgtgagctttggaagggcatccattcgcctttagactctcagcccacaatacctcctctgacactttttctgatcagcccctgtctc

SEQ ID NO: 114916 - DNA, 122 bp, Homo sapiens
ctggcaccctcggagatgtaccccggccctcatagccctcccctctcgcctcctctctcacgacgcagcctttgttcctatggagagcgaagcccctcccaggcccggtcaccttccccagg

SEQ ID NO: 114917 - DNA, 122 bp, Homo sapiens
cctggccaccggctcgcagcccccatgcctcggggcccagtgccgagggtgaggaggggccgatcttgtgtaaagcagagaaactggacctcgtggctgtggcagcaggatggcaccttgct

SEQ ID NO: 114918 - DNA, 122 bp, Homo sapiens
ggcccttcccccggggctgtaagcccaaagaaccacctgcaaaaccaacaccctgaatcacgcgggcccacgagggtcccctctaatggtgcccaaagccgcagctgcccacctgccccggt

SEQ ID NO: 114919 - DNA, 122 bp, Homo sapiens
tggccgggccaaacttctagttggagacgagactcagctttccgctggtacaatgcggagcggagcacgagggtcgcaggtgcagaacagcgggaagatgcgctcccccagggggccaggcg

SEQ ID NO: 114920 - DNA, 122 bp, Homo sapiens
gttcctcgggggcctgagtggggcccacagctgactcactgagaagagatgcgtctgaagcgtgcggggcaacgtgggaggacgatctgtctgactcccttcctcatctcccagcctcgacc

SEQ ID NO: 114921 - DNA, 122 bp, Homo sapiens
cgcagggaaattcgagtggtgggcttgggcccgtcgttctggtagcttcccagtagagggcgccgtaagcatatgcgtcttcagcctgactgggctggagaggcggtgcgtcctcctggccg

SEQ ID NO: 114922 - DNA, 122 bp, Homo sapiens
ctgctgcggacctgcgtccctccggctgcaacacaagacacgaggggtcagagcagcgcccgggtcctgtgttgtagcccgaggtctcacactgtgtcatggtgagcccgacctgcagcacc

SEQ ID NO: 114923 - DNA, 122 bp, Homo sapiens
tcggccggcgcacgcactcaccatggctgcggttccgcgggctcagcactcctaggggagcgcagctgacgtttcagaagcactcgcgtgcaccggaaaaactcacagaagcagcagcggaa

SEQ ID NO: 114924 - DNA, 122 bp, Homo sapiens
gggcccatcagagccagttactcttggtccccgctttactggagggtcgcaggagactttcgcttccaaaagcacacgctcacagcaggcttgtcaccccctcctcccaggagcgcaccttc

SEQ ID NO: 114925 - DNA, 122 bp, Homo sapiens
ccgaggcatgctggttgttgtagtctagcgttggcgcagtgcctgatgggagttgtagtacgtcccgcgcacacgctccctcgaagagtttctgccccattcctggacgtcacagccggtcc

SEQ ID NO: 114926 - DNA, 122 bp, Homo sapiens
ggatgagtggcggttagggctgggccgccgctcatacaggaagtgcgactgggtccccgtcggctgcgcctgggggaacgccggccggcgctctcctcctcctcgtcccgccaccggccccg

SEQ ID NO: 114927 - DNA, 122 bp, Homo sapiens
ggactgccccactgcggaggcttctggcggacggggcgcggggagtggacgggacagggacggctccccccagcccagccggtcagcgcgggcctgacctccactttgagcggcggcttggc

SEQ ID NO: 114928 - DNA, 122 bp, Homo sapiens
cgggcagggttggcggggagaggcgcggggatgctggtgagggcgggtggcgagagtcggcggcagcctcccattggctacgtttgtgtcacctgagctgaaccctggaactggtgccgctc

SEQ ID NO: 114929 - DNA, 122 bp, Homo sapiens
gaggaggaggaggaagaagacgtggacaaggacccccatcctacccagaacacctgcctgcgctgccgccacttctctttaagggagaggaaaagagagcctaggagaaccatggggggctg

SEQ ID NO: 114930 - DNA, 122 bp, Homo sapiens
aacggggatacaaacgcccctgagagagcagcggtatacagggatagatgaggatggtcacgtggtggagaggcgtttttgggtaccagcccttcacctccgtcaaccttctcaactgcaaa

SEQ ID NO: 114931 - DNA, 122 bp, Homo sapiens
ccagccgctgaggctgccaagcagaaaagccaccgctgaggagactccggtcactgtcctcgccccgcctcccccttccctccccttggggaccaccgggcgccacgccgcgaacggtaagt

SEQ ID NO: 114932 - DNA, 122 bp, Homo sapiens
cctcaggccttctgcccttcaggctacctgtctggcaggggaatcccaagaacaaaaatccgaggtcccgtaactttcatgggagtgagaagtggctagggaaggctgaggaggggaggggt

SEQ ID NO: 114933 - DNA, 122 bp, Homo sapiens
ccgaacgcagagtggagagacaggaagtagaatggcgaaaatgaaaagcccgcgggattccgaaacaatggaaaatgctctcgctggttttgtgcaggcggaatacgcgcttcttggtggaa

SEQ ID NO: 114934 - DNA, 122 bp, Homo sapiens
tgcgctgggccaggggcagggatcacatctcagctccatgtcgccgcttcaagacaggtgcgatcgtctctgttttatagaaaaggaaactgagtctctgtgggcctggtcctaacccagtc

SEQ ID NO: 114935 - DNA, 122 bp, Homo sapiens
gagaatgaaggggagaggggcatgcccggcacctttgaacacagcactcagagtttttgccgtcctgctgaaactagctgtgggaatctggaagaaagacatccagcccctgattttcagga

SEQ ID NO: 114936 - DNA, 122 bp, Homo sapiens
ggagtccccagcattcgtccagacccagtctcaaatcaaaatcaacgttcggggcgggtgcggtgactcacgcctgtaatcctagcgctttgggaggccgaagtcaggagttcgagaccagc

SEQ ID NO: 114937 - DNA, 122 bp, Homo sapiens
taaaaataattgcaggcaccaaagttataaacagggaaggcaggatgctagctggaaatgcgcagcactagggagctaatttgttgttacagattatatatctgcaccctgcttggagaagt

SEQ ID NO: 114938 - DNA, 122 bp, Homo sapiens
ctcgggcgcacgaaagctgtctaaggcttgggcgtatatggggaactctggcttttgccacgcacttttgggaatgggcaggagacctgcttcctctctccagaggttgcattttcccaagc

SEQ ID NO: 114939 - DNA, 122 bp, Homo sapiens
tcttggggggtgatgggaggtcctgagtcatagcttccacataccatatgggcaggaaggcgtaaggtgcatcttggtgtacagacacggtgactgggccgccaggctcccaagagaagaga

SEQ ID NO: 114940 - DNA, 122 bp, Homo sapiens
tcaactgatgttttgtctgagcctgaagtaccaccataggcacagttgggaggggaaggccgagtcctggcaatacttctcactggtttgaaactctgagctctggccacagaagcaccatg

SEQ ID NO: 114941 - DNA, 122 bp, Homo sapiens
aggtaagtgggcattacaggagaagggcgtctctaacatgcactgtagatctaaaatcttcgggaagatacagcatgagtttctgtccaagaggttttagctgtaatgaagcctcagtggga

SEQ ID NO: 114942 - DNA, 122 bp, Homo sapiens
gcgcgcgccgtggggagcggggtgtccgggagggccgggccgcggcagcaccaaggacagcgccgggtgggggcggggccgagcgcgcaggcgcactaggctgccgcgagcgcgggtggcgc

SEQ ID NO: 114943 - DNA, 122 bp, Homo sapiens
gttctggcagcacacagcctcctgccttgccagtgtgaaacccggtgctgtcttgttccccgggtggaatgcaagagaatgcttgggaagaactttgttacccaatgaagcctcctggttct

SEQ ID NO: 114944 - DNA, 122 bp, Homo sapiens
aaatgttgccagacattgacagatagcccctggaggacaaaacagcccttggttgagaagcgctgagtgagaccaaccaaaacccacacccaaccctggcactggggatgaggctcacttcc

SEQ ID NO: 114945 - DNA, 122 bp, Homo sapiens
tgaaccagaggtgttgggagggtagggttaggtgtagtctagggcaggagacaaggattccgtgagagttgccaggtgaccatgatagagagccgtgtttggatcaaacacagagaggagga

SEQ ID NO: 114946 - DNA, 122 bp, Homo sapiens
gcggggcgcgtgcgcgtgcgtgacgtcaggccacggggaggtggcgccgccgtgccgagccggcctcagactcacctctgacgccgctcttcgcgctccgctggtgaatggagtcgcgttct

SEQ ID NO: 114947 - DNA, 122 bp, Homo sapiens
cagagccgaggagagggcggcatcgggagctgttctcagaggggccgagtgacaggaggccgtttctgggtctgggttctcaccgtaaaagaagacggtagaacacagttctcaacacgggc

SEQ ID NO: 114948 - DNA, 122 bp, Homo sapiens
tgtgtggatggggctcggggaagctggggatacgcccactacgggcctttctgcagggtccgggtgctgatgacagactcactcctaggggactgacaggcagtggctccagcggtatcttt

SEQ ID NO: 114949 - DNA, 122 bp, Homo sapiens
aagagggatgccctgtgtgcatctgcccgcactgcgagtccttgccactccttagatcaacggagccagagatcttgccaccaacacactggcaaagcagctggtttgtctacactttctgt

SEQ ID NO: 114950 - DNA, 122 bp, Homo sapiens
caacgtaggaggtagagtcttcctcactgcaagagggaatggaagacgcacgcccgcaatcgctgggaaaaccaaaccccaactggttgctctgacagcctgctgtcctgacagtttgtcct

SEQ ID NO: 114951 - DNA, 122 bp, Homo sapiens
cctttcctagtcaaagaaaggggtgacggacggcacctggaaaatcgggtcactcccacccgaatacggcgcttttccgacgggcttaaaaaacgtcgagattatatcccgcacctggctcg

SEQ ID NO: 114952 - DNA, 122 bp, Homo sapiens
cttggctgcaggggattgaggagggattgggcctcaagaaacggggctgggactaagtcacgaggtgcgtgaatatcaggcgggactttaactcagccagtggagagctatggagggttttg

SEQ ID NO: 114953 - DNA, 122 bp, Homo sapiens
gtcagcgccagggaccagcccccaggttccccagctcccaggtgagtgcagagagaggggcggcagctacagcccacttagctcaggccacctggtcccagcgccacgaggccggaagctgc

SEQ ID NO: 114954 - DNA, 122 bp, Homo sapiens
gtgtacgtttctgctgcctctgtcagcctattaaggtgtgtagggcagatgatataattgcgctataaataaacagacagcaaggatggtgccctttccaggcagatcaataagcacatagg

SEQ ID NO: 114955 - DNA, 122 bp, Homo sapiens
ccattggatcccaaggaaacaaaacatgtggagccctttaattgtaattttttaattttacgtccttgcttgcatggacaggaaaatctgcaaaatccagtggctagcacaagatgacatgt

SEQ ID NO: 114956 - DNA, 122 bp, Homo sapiens
gacgctgttggaaaagtggcggcgcgagcgggaagttttccgctgcggggtgcgggggatcggggagataaggggcgaggggaatcagaagctgggagggaaaccacccgagtggagcaggg

SEQ ID NO: 114957 - DNA, 122 bp, Homo sapiens
ggcccacgaggagccagcctggcgctgacgcttcgcgttaggatggacgagctgaggattcgttctcagggcagcggatgcctctgcctgaccccttggttccagtacattctttcaaatgc

SEQ ID NO: 114958 - DNA, 122 bp, Homo sapiens
ccacctggagggcctctagtagttgaatactagtaactatcaaaaataataacaaatagccgggtgcggtggctcacacctgtaatcccagcactttgggaggccgaggtgggcggatcacg

SEQ ID NO: 114959 - DNA, 122 bp, Homo sapiens
ggaaaacgaaaacagagcatgattctcaaggtgatccaatctatgatggcattattcatgcggttgtgctccttcacagattttattttcccctttttctttccttttctttattctttgct

SEQ ID NO: 114960 - DNA, 122 bp, Homo sapiens
cagaattagatcagctaattaaaatgcacacaaacttctttgttccttcacctcaaggagcgtccttggaaagcaaacatacttcggggcatttcagtgggggcgcagtgcgagggtgtcct

SEQ ID NO: 114961 - DNA, 122 bp, Homo sapiens
cgccgcccgggcactggcctcactttgtcgcgggaggggaccagggctctggagaaggcccgggccagcggctgggcggggctctccgaggctcccacctcgcggtccccgcctggcggccg

SEQ ID NO: 114962 - DNA, 122 bp, Homo sapiens
aaacagaggaaaagaagagtgtgtgtggagaccctcttgtcactctgcacctcttacaatcgttctttctccaggggcccctcttggccctttttcaccttaggaatcaggtagaagagatg

SEQ ID NO: 114963 - DNA, 122 bp, Homo sapiens
atgtcaccaaagctatgaataatatcaggttgaagcaaatatggtacttcagcaagtggccgaaattccgtgaatataaataactatttcatggcatgtctgctttcttccttgcatcctaa

SEQ ID NO: 114964 - DNA, 122 bp, Homo sapiens
cggcgggagcagggccccagacaccttgtcttgaacctgtggcctccagcctgtgagaggcgggaaggaggctccgcaagacccttcggcgggagcagggccccggacaccttgtcttgaac

SEQ ID NO: 114965 - DNA, 122 bp, Homo sapiens
cactctgccgcatgtccctacgcccgcttttcagattctgaagatgtttcctccagcgatcgaaaaatgtccaaatctgctttaaaccagaccaagaaacggaagaagcggcgacacaggtg

SEQ ID NO: 114966 - DNA, 122 bp, Homo sapiens
tagcaccccagttcattcccggtacccttcctgtcccagatgtcctggaatgagctgctccgggccccagggaggtgccctggacgccccttacccagggactcgctactgcccagaatgct

SEQ ID NO: 114967 - DNA, 122 bp, Homo sapiens
ggcgctactaccggcgggcgcgctcggagcagcccccctccgcgtcccctcccctgctcccgcccccaccccggcatggatgttgcagccactctaccggccgctcgccccggagccgccaa

SEQ ID NO: 114968 - DNA, 122 bp, Homo sapiens
ggcgggtgcacgtggctgcagacagcagctgctgagaatgacacgcgactctgatgaaagcgatacagcttagccggtctggctgttcaccgtcctgctgcactctacgacacatctgctgg

SEQ ID NO: 114969 - DNA, 122 bp, Homo sapiens
cgggttaccgacctcgcagagaccctcccacaccctggggtccctgtcctataatgggagcgtgtgccaggtcccccaccgtggccaccagccccagctgttcttggtagcgccgctcggtc

SEQ ID NO: 114970 - DNA, 122 bp, Homo sapiens
atctgcaatgaagtcatcacatgtgagttctacaaaaaagcacaaatgacaaaacactgacgtacgggctttcatttgtgtagaaaacaaacacttgtctgctcagctgaaaacaaatctcg

SEQ ID NO: 114971 - DNA, 122 bp, Homo sapiens
ctgcagggaaagggtctgagcttttccgcggtggcggggactgaggggctccacagacctcggggatctaacacttccaccctccagagcctgtctccggccacctaccttgggggattctt

SEQ ID NO: 114972 - DNA, 122 bp, Homo sapiens
ttctactggggttggtagtgccatgctctttctccctctgccgggagtcagctgtatttccgcaagtagaggagtgtctggacactgaatccggagtctgggaaggcacccagctcagggcg

SEQ ID NO: 114973 - DNA, 122 bp, Homo sapiens
actgttaaggctgggtcactggactttctgcaaatggaggaagccaagtccctggaccaccggagatccaatactcgttgagttaattggaacccgacttggaagagaactctgcgccggtc

SEQ ID NO: 114974 - DNA, 122 bp, Homo sapiens
aggataggagagccgtctttttgcctcctggccgtcttcccatctcggctgactggcacacgctggtgttgctaagacctttcctggaaagaatcaacaggcaaaagctcagagctggatgc

SEQ ID NO: 114975 - DNA, 122 bp, Homo sapiens
gtccactctcgaggtttaactaagaagtcatactttactagacaacccaatctcagaagtcgtcatttcccccttagctacttgaatagtacctggcacctcttgcttcctccattaactac

SEQ ID NO: 114976 - DNA, 122 bp, Homo sapiens
gctgggagcacaggcaccttgggcctagtgtgtgtcctcaccaacacctgtgacacgctgcggctgttcctcagggcctggctcttcccccaggcaggaggtgacaccagctcacttgtcct

SEQ ID NO: 114977 - DNA, 122 bp, Homo sapiens
tatggtatactccttagttgttagataatagacttttgataatgttggataaattacttacgtttaaattagttggataaaggaaagttaaatcattatattaagttatgtgtggtatggat

SEQ ID NO: 114978 - DNA, 122 bp, Homo sapiens
acatttcctaggaaagcagtgtctgaatacttagatgattctataactgacttgcacagacgttctgctgtcacagtaggtattactgaataatgtggctgctccaagttttttagttatgt

SEQ ID NO: 114979 - DNA, 122 bp, Homo sapiens
ctagaggggtggggccccgtggggcagggtggggagactgtcccagccagagaggggaggcgtgcctggccctgacttgggctgattcagacaaggaccaggaggaggcctggagataagcc

SEQ ID NO: 114980 - DNA, 122 bp, Homo sapiens
agccctcagccaggctcggggttattaatagccaggccttagtgccccgctcggggagggcggctccagctcctggagcaagaggagggcggagctgagcggagtggccaggggaggagaga

SEQ ID NO: 114981 - DNA, 122 bp, Homo sapiens
gcagggttcaggggctcatgcctgtaatcccagcactttggaaggctgaggcaggaggatcgcttgagttcaggagttcaggtgtcatggagcatgcctgtggtctcagctacttgggaagt

SEQ ID NO: 114982 - DNA, 122 bp, Homo sapiens
gcctgcaacccaaactcaccggtttctgggagctggtgaggggctgcgctggggctggggcgaggccccggccgtgtggggagaccaggggagcctccacgctgggcgcccgggcagggagc

SEQ ID NO: 114983 - DNA, 122 bp, Homo sapiens
caaaaacgctaaggcagctgcagtaccggcggccatgctgtaagagccttcttcaaactccgcccccgacacgcacaaagccggggaccctcggccagttccggccccgcccattaaaggag

SEQ ID NO: 114984 - DNA, 122 bp, Homo sapiens
agggggcgggaaggaggcggggagacggttgtcgggctggttcctgtgctggatcctgggcggcctgaggggtacggagactctgggggagggagacggcagcggcatggcggccgggtgta

SEQ ID NO: 114985 - DNA, 122 bp, Homo sapiens
cccggggcgaggagtcctccagcttgatgtcctccatttgtcctccaagggagtgttcctcgctgtcgggggccaggctggccggcaggggctcaacagactccaccacgtaaggctggcct

SEQ ID NO: 114986 - DNA, 122 bp, Homo sapiens
tggcgtccgtctcatacttggtcctccactgggccacctccgagttggccttggaaaggacgcgctgcagctcggccttggcctccgtctcctcctcgtactgctcccgcagcaggtcgcag

SEQ ID NO: 114987 - DNA, 122 bp, Homo sapiens
taaagcaaagctgaatccttccatctccagacagtggctttacacttgtccacttggtggcgcagtcactttagtaactgcgggctcttaatttcccttaaacagtattttctgttctgagg

SEQ ID NO: 114988 - DNA, 122 bp, Homo sapiens
gggggcagtgctcgacgcgtgtccgcctcccgctagctttgagggaccactgcaataaaccgcctggtcctgattgtccccactggcccctccgggagctgggacctccagaattggaggct

SEQ ID NO: 114989 - DNA, 122 bp, Homo sapiens
ttaggagctctaacactaacagcgaaagtctgcagcttcactcctgagctagcaagaccacgaacccaccagaaggaagaaacgccgaacacatccgaacatcggaaggaacaaactccaga

SEQ ID NO: 114990 - DNA, 122 bp, Homo sapiens
gcgagtgctggagaggaaccccggacgccaccatttcacatggaagatgcaggcgacatgcgagtgctgaggaggaacgcttgacgccactatttcacatggaagaggcaggcgacatgcga

SEQ ID NO: 114991 - DNA, 122 bp, Homo sapiens
ggcacgtagacccggatccccagctcccggaccccttccgactgctcccttcgccactcgcgcggcttccactcctggactcggcctccacccctgggcttggcctcaaagcctcctcagtt

SEQ ID NO: 114992 - DNA, 122 bp, Homo sapiens
tgggttaaaatagggctgtggtaaatgaaccagtggagctgatgcagacatttgcagctgcgatgcagctaatatcttattgacacaggatggcctggaaatgaagaacttgctgtgccaat

SEQ ID NO: 114993 - DNA, 122 bp, Homo sapiens
caataggcgctcaataaaacattattgtcctgaattaaattcccggggaaggcgcgccctcggggacttgggtacttcaggccccgcccaccactcccctggggttccaggccaccgcgccg

SEQ ID NO: 114994 - DNA, 122 bp, Homo sapiens
ctgcgcttgactgtgggagcacagtctcgggaacccaacggatctggaagaatggatgggcgggagccggcccagctgctgctgctactagccaagacccaggagctggagaaggaagccca

SEQ ID NO: 114995 - DNA, 122 bp, Homo sapiens
tgacacgcggaatcctcacctccagcaaccccgtcctgtccctgtgctcggtggcccaggcgtcagcaagacggctggtccctgcgttaagagcactttcaataaggacagatggagcctct

SEQ ID NO: 114996 - DNA, 122 bp, Homo sapiens
gtttccaaacattttcactgtgtcattaaattcatgtgtttggccaggaaagcttgctcacgcctgtaatcccagcactttgggaggccaaggtgggtggatcacctgaggtcaggagttcg

SEQ ID NO: 114997 - DNA, 122 bp, Homo sapiens
agaggagaaggaaattgtcccgaatccctgcaggtcagtacctggaagattccataaagtcggggtgcttgagggcgtagggccgagaccgtcgcgggtactgaggcgcctccgtcgtctct

SEQ ID NO: 114998 - DNA, 122 bp, Homo sapiens
acaggagcttggagagtacaaggataaatcaaatcatatcagttgggccctcagatgaggcggttggtagcaatgcttgtcctcctttaagacaaaaatccctaacattgtgctgtcccttg

SEQ ID NO: 114999 - DNA, 122 bp, Homo sapiens
ctgaaaaagagaactgcaaatgtactttgaaaattactttccttgcctatacccagcatgcgtgaatgtcatctaatgagctatttgtaggctgaggaagtgaagagttgaaatgcagaatt

SEQ ID NO: 115000 - DNA, 122 bp, Homo sapiens
actgctctctattgctcctgcaacctttgttttctgattttctaaaaatcatttctcctccgggtgctgtggctcatacctataatcccagcaccttgggaggccgaagtgggcaaatcacc

SEQ ID NO: 115001 - DNA, 122 bp, Homo sapiens
agcggtccggcgggctggcctcgcagtgacatgtttattctccaggcccactgctggccccggctcttggcaggtccgagcggagggctcttggtgatggggacaggctggcggcttggggc

SEQ ID NO: 115002 - DNA, 122 bp, Homo sapiens
atatttgaagataacaggccagttattttttggacgatctctcaatttgagtttgtctgacgtttcttcatgagtagatgcaactttggcagaaacacaacaggaataattctttgttctca

SEQ ID NO: 115003 - DNA, 122 bp, Homo sapiens
gtctgcagactgagagatgatgttaagattggtaaaaagcaaggcccaggctcctttggccgctcctgcaggcagctgaaagtcatcttctgcaaatgtctcaagcccagttagagttaagg

SEQ ID NO: 115004 - DNA, 122 bp, Homo sapiens
ccagggcgaagtgggaggccccgactgcccgggaggccaagtccgtggttccccggcccgcgctgggaaagtgacaggtcagactcttgctaaggtggccaagcgagaagacaggccgggct

SEQ ID NO: 115005 - DNA, 122 bp, Homo sapiens
caaggcgggggcttgcccagccctgggctcccactctgctggagaggctgtggggggtggcggatctctctgccgcagggactggggagaggccggcctgggggcagggcgaggccgttgcg

SEQ ID NO: 115006 - DNA, 122 bp, Homo sapiens
ctgagtctgacgaatttagccagttcctttattccattggccagatcagactcctcctctcgtttatcctgttgggggcggaagtgagaaagcccttattcgtattggcttagatttgcaag

SEQ ID NO: 115007 - DNA, 122 bp, Homo sapiens
accggcgcggtcagccctggtgacccaagccaggggctggggagcaatctgagaccattgcggctgggctgtggggctccccagtcccggcaggtcctggcgccgctgtacatagaaaccgt

SEQ ID NO: 115008 - DNA, 122 bp, Homo sapiens
tgctgtttaatgttttcctgcctccccaaccgggctgcacgccagcggttctcaaaatcacggcaccgcttgtctaacaacaccgaacgctgggcccatccccagacgttccgattcagcgg

SEQ ID NO: 115009 - DNA, 122 bp, Homo sapiens
tctgctaaatgaagactaagacttgtctggacccaggtttcctgagctgacccgactgcccgcagtttgatggcatttgtttagatgagactacatctttaaggcttctgtgcccggttaaa

SEQ ID NO: 115010 - DNA, 122 bp, Homo sapiens
tggacttgatttactgatgttctgcttcactgacatattcaataaattgcaattagttttcgcagacttaatattcaaaatccatggttactggagtgtgctttggaagattcagtcatgta

SEQ ID NO: 115011 - DNA, 122 bp, Homo sapiens
aaagtgtttcgtctcagaatgaagcagtaatgtattactttgcgtactgtgtacaggggccggcagatgtttctgatgttatgaagctatgctcctggaagtggttgtgaaaatcgcagccc

SEQ ID NO: 115012 - DNA, 122 bp, Homo sapiens
tgggcaacatggcgaaaccctatctttgcaaaaaatacaacaattagcctagcatggtggcgcatgcctgtagtcccagctacttgggaggctaaggcaggaggatcacttgagctaaagag

SEQ ID NO: 115013 - DNA, 122 bp, Homo sapiens
cccgcgcggtttccagggcagggccagcctgggggggtggaagcaggaatccagggggtgcggggagccccctccagtgcccaggcgactttggggaacaaggatgaaaggagaggggaaag

SEQ ID NO: 115014 - DNA, 122 bp, Homo sapiens
actgagtgaaaggtgctgttgatgtgtttacctacttaccgcacagagttggaaagagtccgcacatgctgcctctgcctgagatacatctgtagcgaaaatgcgtccagagtgtggagccc

SEQ ID NO: 115015 - DNA, 122 bp, Homo sapiens
gcgagcccgagggacgcagggacgatcccggtcccctgcttttcagtcctccagtcgaatcgcccactttgttcaatcacagtattcgaatcaagaggaaaatgaacattccctttatggta

SEQ ID NO: 115016 - DNA, 122 bp, Homo sapiens
aaccgtgtgaggactggagttccccgggccgcgtcggctcctcctcggcccggcgggccccggcaacacgcctcgggtctgtcacgacgcctgaggaaaatcctccgtgacaggaatgggga

SEQ ID NO: 115017 - DNA, 122 bp, Homo sapiens
tacgtgcgagacgctgttggcttccggcaagcagccacagacgtgatgaatgagcttcctcgtgtgagggagtctggcgcttgggaggaagggggtcaggccgcctgttagacattagttat

SEQ ID NO: 115018 - DNA, 122 bp, Homo sapiens
atcaggtttctatggggtttgacttcgccttggcacagggcgctctgagtgggtagtgagcgtgctcagcacaggaagaaaggggctctctgtggtgttcattttgaaggtttatgttttta

SEQ ID NO: 115019 - DNA, 122 bp, Homo sapiens
agtgcagaaacagcacacagcagtcacagacacacccaggccctgaccagtggcgcagtccggcaccaaatagaaaccacttgtgtttattaatttaaagaaacaggccgggtacagtggct

SEQ ID NO: 115020 - DNA, 122 bp, Homo sapiens
acactggtcttggcccctgaaggatttggggagtagacctgtgagaagcaaccccatctccgatccctgcagctgggcttgggaccttgaagccagaacaaccccagggaaggaggtccagg

SEQ ID NO: 115021 - DNA, 122 bp, Homo sapiens
cgctgtctgcacgtggacctgctgcacagcatcctgcggtcacccatgagcttctttgagcggacccccagtgggaacctggtgaaccgcttctccaaggagctggacacagtggactccat

SEQ ID NO: 115022 - DNA, 122 bp, Homo sapiens
tcaataaagttaataactgaaaggttctgaaatcaccaaatacgttcctatcaaataatacgtggcaataatgaccttcgccagtcacctttggaagacagcaggggaaaaaaatcattatt

SEQ ID NO: 115023 - DNA, 122 bp, Homo sapiens
gcgcagccccggctcctgccggggcctctccctccatacctccctgctagcagagggagccggctccggccttggtcagccccagagaggagcccccacagcgcagaggtgggctgaagggc

SEQ ID NO: 115024 - DNA, 122 bp, Homo sapiens
ctctattcggcgcagctactcagtggtccaggttcctcccacgttttgggtctgtctccccgggagcctcgggtcctccctgggatcccgtatctggctaccgataagaagagggagacagc

SEQ ID NO: 115025 - DNA, 122 bp, Homo sapiens
ggtatcttctccaccacctgcaggtggtccttctctacaataatctaatctgaagggtaccgccgactacccacctgggagaaattagttataaaaaataagggtgttgggttggggaggga

SEQ ID NO: 115026 - DNA, 122 bp, Homo sapiens
ccccaggccttgaaacctaatcaaggaatgtccaacatttgtgtggctggatttcaaaaccgctatggaacattgactccatgtctccattttcctcaattttgaataggaatgtcactagt

SEQ ID NO: 115027 - DNA, 122 bp, Homo sapiens
gtgtttagttaacacttgccgcgtgtcacggttgtccctgcagaccaaccagcgatacgccgctagccctggctcccagaaagccgcagccttgcaggtgcagaaggagagtgaggcccagg

SEQ ID NO: 115028 - DNA, 122 bp, Homo sapiens
tgtgtccccctctgggtcggatttcacttgctgggtgattttcccagagggaaatctccacgttgtacagcactgcagagctgcggactgggaggcacccggggacgggacctcatgccctg

SEQ ID NO: 115029 - DNA, 122 bp, Homo sapiens
cttgagaatctaatgctgctgctgatctcacaggagacacagctcaggtggtaatgcgagcgacggggaattgctgtaaatacccatgaagtttcacttgctttccactcatctcctgctgt

SEQ ID NO: 115030 - DNA, 122 bp, Homo sapiens
cgggcccgccgcagtagcagtagcattgctgctggttggtgcgatggggcgagtcccactcgagctcctcgggctggtaggacagcaccatcttcacggcctgcagcgtcctggcgatggcg

SEQ ID NO: 115031 - DNA, 122 bp, Homo sapiens
acccgggccctctcataggtctgggcgcctaacagctcagctgcgacctcgcctcaaacgcgtggaactacacttcccagaaagccagcgtcctcccgtggactccatttcctagaggcctt

SEQ ID NO: 115032 - DNA, 122 bp, Homo sapiens
ctgcactggaggcggagaagaggccggcgagctgcacgccccgctcgggggtagaggctgcgctctcttggccctgcaccgccacgcaccgggccctgcaccgccacgcaccgggcccggca

SEQ ID NO: 115033 - DNA, 122 bp, Homo sapiens
aaataaagtggtgcacagtggaacagaggtcttgctatgtcactcatcctctgtgtaagccgaacctttgcaagatgtcctgtttgcatctagatcctgtgatctaacagatggggacaacc

SEQ ID NO: 115034 - DNA, 122 bp, Homo sapiens
gcttaatgggcaggaattatgtctgttttgctttccgttggatccccgggtctagtagagcgccttgacacatagtaggtactcgacacagatgctggcttcatgatgaagcaattgtcctc

SEQ ID NO: 115035 - DNA, 122 bp, Homo sapiens
gtgagaactgggcgtcggtgctgggaccctgtggacactgcgagtgtgagaactgggtgtcggtgctgggaccctgtggacactgcgagtgtgagaactgggtgtcggtgctgggaccctgt

SEQ ID NO: 115036 - DNA, 122 bp, Homo sapiens
cccggacccgtgggggacgtcgaggggtctcggggcgccgcgctcagctccccggccccgcggccctggacaccgctccaggaccctggcggctgggaccccaggtcttgccggcagctggg

SEQ ID NO: 115037 - DNA, 122 bp, Homo sapiens
ttggggcgagagggagcgggtggcgcagagcagctgagcgggaatgtctgcagggcggcgcggcgccttacctgcggcctccgggctggaggtgtcggagatggtgtgcacctccagcctgt

SEQ ID NO: 115038 - DNA, 122 bp, Homo sapiens
ctttaagcaccagcgcgtgcacacaggcgagaagcccttcgcctgcccacagtgcggccgcgcctttagccacagctccaacctcacccagcaccagctcctgcacacgggcgagcggccct

SEQ ID NO: 115039 - DNA, 122 bp, Homo sapiens
ataccaaaatccagtgaagaggttgtagtaccccaggagagcacaaagccaagaaacccacgctgaaacaggtaagaagagtgatttcatcttacccacatcaacccctccctgaagctagc

SEQ ID NO: 115040 - DNA, 122 bp, Homo sapiens
cccccaaatattcaacctgctgttgcctagacataatcacaggagacaacagtttcaggacgagtgctgcaaaggccaggaagaccaaaccgaacatagggtagtcgtttaggccctgaact

SEQ ID NO: 115041 - DNA, 122 bp, Homo sapiens
tttaggagctctgcacagagctttgtctttgaccctggttcctgacatagagtgcctaatcgcttagaatttcctagataacaggagtgtcttttgttctaatgaggtactcttggtgggct

SEQ ID NO: 115042 - DNA, 122 bp, Homo sapiens
acgtggagtatgagaagacaaaccgcgcgcgcaagcaccgaccgtgcctgtacgacccgtcgcaggtgtgcttcaccgagcacacgcagagccaggccgcctggctctgtgccaagcccttc

SEQ ID NO: 115043 - DNA, 122 bp, Homo sapiens
tgagtcatgctctcagaaacacgcatgcgtgagtcatgctctcagaaacacgcatgcgtgcgtgagcacgtgcagacgcgtgtcctcgtgtgcctgtctttatgtccgtgtgtgtgtgtgtg

SEQ ID NO: 115044 - DNA, 122 bp, Homo sapiens
aattaaaacacggattagagcaagtatgattggggatgacaagcggggcgggtgtagccgcggaatgagccgtgttgcccatatggtcctcggaaagcccacgcagcgcagctctctcccca

SEQ ID NO: 115045 - DNA, 122 bp, Homo sapiens
ttctgactgcattttgactgcaacccatctcacaaggtcaggtggattttccacttatggcgtcatgtcagcactcaaaaagtttcagattttgagcacttcaaatttcagattacggatgc

SEQ ID NO: 115046 - DNA, 122 bp, Homo sapiens
tccattgcgcgtgtgggctcttagtctaagccactccatattgatttatttcccttcctgcgcatgtgttaaaggtaggaatttttcactgtgggcatatttaggcaagctccctgtgcaag

SEQ ID NO: 115047 - DNA, 122 bp, Homo sapiens
tggccgtgtacatttatgttcatcaacaccacacagaattttaaaatgcaggttctcactcgtatggtcccatctcaggtgctcagtagccatgagtggctggtgctgccctgctggacagc

SEQ ID NO: 115048 - DNA, 122 bp, Homo sapiens
gtcacgtcacacaatatcggatcgtccattcgctgccgccgcccgccactcaagaaatcccgtggatgataggtagctgcggcagagtgccctgccccacgtaagaaaaaggaacacggcgg

SEQ ID NO: 115049 - DNA, 122 bp, Homo sapiens
cttcgatctgggtaggtgctgccgccatccttttcccgagggggtttgggggcttcgctccggaggggctggcgggggcgggtgggggcgctgcctctattgtggtgaagcccccatgcccg

SEQ ID NO: 115050 - DNA, 122 bp, Homo sapiens
cgtgatcgtgttccagctgcttcatctgcagagacatgatctcttcgttctggatgtgagcgatatcatttgtggtgtttctctggggactggggcgcctgtgagtctcatggcgcctcttg

SEQ ID NO: 115051 - DNA, 122 bp, Homo sapiens
attaaagtagggttgaggagtccaaaaaacagataagggggcgagagggacaaaggggcacgtttgcggcttggggagctaaaatgctttgcaaagacccatgaagcccaagctgctgtttg

SEQ ID NO: 115052 - DNA, 122 bp, Homo sapiens
ggggtcggtactgaccgtcctgccagcagctctgaattttgaaaatacagatatcaccttcggggaagggggaaagccatttagccaattggagaaataaatcctgcccgcagcagcagcag

SEQ ID NO: 115053 - DNA, 122 bp, Homo sapiens
gggccgcagcgccaggatgcagcgcatgcgcacacctggagggcggagagcggtccagagcgagtggaaagatttgggcgagaacttgcgcgggagccggactgagcggtgcgagcgcgcag

SEQ ID NO: 115054 - DNA, 122 bp, Homo sapiens
ggttggggcatgcgcgggcagcgtcgagtgggtcccttgggggtgggggtggggggcagtcgaactagggagagagtctgtggaagggctcagttgtcacttcacacctttccccgctgttt

SEQ ID NO: 115055 - DNA, 122 bp, Homo sapiens
gttttggggagcatgtatatttccctcctgtgacgcactgcttccacagagaggtgcaaacgtgcaaacgctcagcgaccgcagcgctcctgcccctcccccaccgtaactccggggtcgcg

SEQ ID NO: 115056 - DNA, 122 bp, Homo sapiens
cggcccgccctcaccttcggttctctgagagcttcctggagaacagggccggtgcacaggcgggcgctgtgctcgcacccccgggtcctccccgagcgcaggccggggacccgacgggaggc

SEQ ID NO: 115057 - DNA, 122 bp, Homo sapiens
gccagtaaaacggctctgcacggatgtgctgccggacggtggcggcatccagcaggaagtcgggggcctggtagtaaaccccctcggtcgtgcccctcaagttactctgagaaaccacacgc

SEQ ID NO: 115058 - DNA, 122 bp, Homo sapiens
atgtgtatttgtgcgacagagaagagggaagggtgtgtgtgggcgcttgtgttgtgtgcgcgcaccaaagctggtagtggggaatgggaacaatgcaataaagtgtgtgtttgtaagagaga

SEQ ID NO: 115059 - DNA, 122 bp, Homo sapiens
tctttcacttggtttgcaccagtattcatctcttcatctgagagggctgcctcagattgccgttaggtcagaagtcacaagcttcctttaacttttgtttgcttttcagcactctgagctaa

SEQ ID NO: 115060 - DNA, 122 bp, Homo sapiens
cggcgcccaccccacgacggctctctcacatccacaggtctctgagttcacgtctcacggcgcccaccgcacgacggctctctcacatccacaggtctccgagttcatgtctcacggcgccc

SEQ ID NO: 115061 - DNA, 122 bp, Homo sapiens
ggaagtgggggaagtagccagagatctactggatggggcgggtggggctggggcacacgtcggtggccacatgctcctggatacaaatggtcgccttttccccgcaccgccggtgggggggt

SEQ ID NO: 115062 - DNA, 122 bp, Homo sapiens
gactcttttgtttacagaattaaaggaagcaccttgttctgaatccagttttgccattgacggactcactgtatgactaggccaaaaccctctggtttctgttttcccattagttggttgaa

SEQ ID NO: 115063 - DNA, 122 bp, Homo sapiens
gacctcaagtgatccacctgccttggcctcccaaagtgctgggattacaggtgtgagccacggcgcccagcccattgtatccttcttgtgactttgtgtcttcatagcttagctcctactaa

SEQ ID NO: 115064 - DNA, 122 bp, Homo sapiens
aaagaatgtaacaagccagctgctgggcgtggtggctcacgcctgtaatcctgacactttcggaggccgaggttaagtggatcatttgaggtcaggagttcgaaaccagcctgaccaaaatg

SEQ ID NO: 115065 - DNA, 122 bp, Homo sapiens
acctcaggtgatccacccatctcggcctcccaaagtgctgggattacaggcatgagccaccgcgcctggcccagaacaggcagaacttatctgtggtgcagaagtcaggaggcagcaggctg

SEQ ID NO: 115066 - DNA, 122 bp, Homo sapiens
cggaatcgccctgagccaggttcgcttccgctctattgtaaaaagctggattctgatctgcggcctccgcggtgccccagaaacagcccgcttttctctgggccccctcttttttttttttc

SEQ ID NO: 115067 - DNA, 122 bp, Homo sapiens
gctggccacagaaaccccgttggttagagcacagtgtgggatgaggtgaccctcagtgcacgacttggggtgacccctgcccccatcctgagacagttacccctccccctctgccatcagca

SEQ ID NO: 115068 - DNA, 122 bp, Homo sapiens
ctgggccagggacccgcgaggcggcggctgcttgctccgaacggaacgccgccgggtgtgcgttagaccagcggatagacgcccgcggcttggggtcaagaatcttttcctttttagcaaag

SEQ ID NO: 115069 - DNA, 122 bp, Homo sapiens
cctggtggttggaatttgcagagttcgtctcagtggtggctgctaatttattcgtttcatcggtcgaaaggggcgtatagaggtgggtcagcggggcacaaccggatccctctaaccggacc

SEQ ID NO: 115070 - DNA, 122 bp, Homo sapiens
gagcccctggttatgaacagctggggctccatgcccagccctgtgctagacatggagtggcgagtcctggtctttaaaatttctccttctggccctgaatcagaactgagtgcctcagcaga

SEQ ID NO: 115071 - DNA, 122 bp, Homo sapiens
ggacgggagaggaaagagttttccaacaggacgtagaaaatgcaaggcctgctgggaagacgtggtccccgtgtatcactgagggctcaggcagcagggaaaggaaaagctccaaccgggaa

SEQ ID NO: 115072 - DNA, 122 bp, Homo sapiens
tcttttatacaagctttcagatctcctcttggttctcatctagctcttgcatctttatgccgtgggttgattcctctgcctgcctatctgtagtagcttgtctcctaggatggctgccatca

SEQ ID NO: 115073 - DNA, 122 bp, Homo sapiens
tctgtgccgctgtctccgggggctgctcctctccgtggcccgagctgagcagccacacggcgcccaggaggccaaacaagaatccccagccgcggcccattgcagctccggcagcttgtcgc

SEQ ID NO: 115074 - DNA, 122 bp, Homo sapiens
tgtgatgtgtgtgacaccatgtggggccggcacgtccctgctgtgacatgtgtgacaccacgtggggccggcgtgtccctgctgtgacatgtgtgacaccacgtggggccggcgtgtccctg

SEQ ID NO: 115075 - DNA, 122 bp, Homo sapiens
actacgccgccttttcggtgggccggaagaagcccatgcacagcaaccactactaccagacggtgatcttcgacacggagttcgtgaacctctacgaccacttcaacatgttcaccggcaag

SEQ ID NO: 115076 - DNA, 122 bp, Homo sapiens
gtaatgagaaagagtcttcagaaattggaatttccagtgtgatttctactggcaatttagcgacaaaaacggtctgttcctggaagcgttccaagttgtgaatgtcttcaagcgtcacatat

SEQ ID NO: 115077 - DNA, 122 bp, Homo sapiens
cagacgcgaacccgcgctctctgatcagaggcgaagctcggaggtactggagtggggctccgggagtctggctttattttcctcctgttgtgccagggggcctgagggtgaaccctgggact

SEQ ID NO: 115078 - DNA, 122 bp, Homo sapiens
ctccgtaagggccctaccaccgcggccggccagatcctcggcgggccagtcctggcgctgcggtcatttagcctgatgacccctggccaggttcagcctcaattgctccaaagaactccgga

SEQ ID NO: 115079 - DNA, 122 bp, Homo sapiens
agccttgtcttctcaccttccgggtctctgcccagccctgagatctggcacataccttagcgttaagcagtgagcagctgaagcaaagacgttttctcccttccagatctataagtagtaag

SEQ ID NO: 115080 - DNA, 122 bp, Homo sapiens
gagatggggtttcacccaccatgttagccaagctagtctcgaactcctgacctcgtgatccgcccgccaagacctcccaaagtgctaggattacagacaccgtgcctggccgagtcctcctc

SEQ ID NO: 115081 - DNA, 122 bp, Homo sapiens
gcgattactgactcggggcccgaccagctctggcacgactcagcggaggtgggagtcctgcgggtcccatccctgcctcccggagagccagaccccagcgatagaaggcccgggcgttgctt

SEQ ID NO: 115082 - DNA, 122 bp, Homo sapiens
ggaaagattttgtggccatgctttcatattgccaaacgtcctcctcctacagattgctgacgcaccgctcctggcattgataaggctcaaaaggtcctacctctacagcttcgttgggcttc

SEQ ID NO: 115083 - DNA, 122 bp, Homo sapiens
cagcaggggaggctgagggagtacacggctgggaacaagggacactgccgcccccagccacgcaggagcggtgtctgcaccactgaaagtcccccggggcccacagctctatccaggcggaa

SEQ ID NO: 115084 - DNA, 122 bp, Homo sapiens
gtagtttatgaaatcttgaggggctcttttactgggatttcttatttttttgttttttcccgcttaatttggtgggaggtcaaattgaatataacccaataaaggcttcttaatgacaaaat

SEQ ID NO: 115085 - DNA, 122 bp, Homo sapiens
acaagaagaacgctctcatccggaggcaggaccagctgcagctgctgtgagtgctggccccgggccaggagagcagagggactcttagctactttggttagagttcttcactactttcttat

SEQ ID NO: 115086 - DNA, 122 bp, Homo sapiens
tttctggaattgacagcaaaggaaagaagcccagtatattattctatgctgcttctaaaacgaagctgtggtgctcagaatctagtgtgttgaaaagagcctttgacagctgatcttaacgt

SEQ ID NO: 115087 - DNA, 122 bp, Homo sapiens
ctgccttatttggagacctgcaggaatgccacctcccccggcagctcctatatagctgggcggacctggctgccaagagggtgtgctgggggactgtgcagctcgaggctccagaggcacac

SEQ ID NO: 115088 - DNA, 122 bp, Homo sapiens
gcaaacgcttcccatatcggaaatgggcagtaccagttaccgaagaagttactgcgcctgcgtgcgcgggtaatgacgcatgcccggaacggcccctaaagtaggacctagttctccaggtt

SEQ ID NO: 115089 - DNA, 122 bp, Homo sapiens
gagaagtcgagcacagcagccgctggcccaggtgctaagccgctcactgcccggagccggcggactgctccgagtgcggggcccgccgagcccacacccacctggaactagcgctggcccgc

SEQ ID NO: 115090 - DNA, 122 bp, Homo sapiens
tctgtagatcaagctggtggtactgcagggctgtgtcatactcccccatctgctggtaaacgccccccaggccacaggctgcgtcactctccagggctcggtctttcatatctctagcaatg

SEQ ID NO: 115091 - DNA, 122 bp, Homo sapiens
tccagggcccgtttccacactggagtgggtggaggcaggctttgctgagatccatggcaccgtggggcactcccgaggcacctggctgggcagggagggtctctctgggatgggtgggctca

SEQ ID NO: 115092 - DNA, 122 bp, Homo sapiens
tgatgcctgccagggtgaccagcacaactgccaggagcaccagaaccaccaccacgaagacggggaggctcccggacgctgtgggacacacggccccacatcaggcaggcaggccgcgacct

SEQ ID NO: 115093 - DNA, 122 bp, Homo sapiens
caacagacaacaaacgcgtcatgaaggtagcagcgagaaaagcagcaggctctggtggaccggagccgtgatggctgggtggaaggaggcaagccaagggttgtgtaaagaatggaaagctg

SEQ ID NO: 115094 - DNA, 122 bp, Homo sapiens
tgcctcggcctcccaaagtgctgggattacaggtgtgagccagcatgcaaggccatgccccgatatttttgatatgccttctattgcattctacaagtggctctaggccaggggcagtggct

SEQ ID NO: 115095 - DNA, 122 bp, Homo sapiens
taccaaggggcatgtcggggctgcagggagaacctccccccggggtgctcctggttgcctcgctgccagtctccctgatataggactaggctcctctgcagctatgcctcccctttgcctgg

SEQ ID NO: 115096 - DNA, 122 bp, Homo sapiens
agcaaaggaatgttggagccacatccacaagagactcactgaagattcgccaaacgcctacggaaagtggcagggaattcattgacagtaattgtttcctgcttgatcagattgaagagctt

SEQ ID NO: 115097 - DNA, 122 bp, Homo sapiens
ccacccgcgcttctctccaatacagccacagccctgcccaggtgggacagggcatcctgccgccacagaggctctgattggcccagaatgagcacatgacaccatccacagaccaaccagca

SEQ ID NO: 115098 - DNA, 122 bp, Homo sapiens
gggagaatgctaaaccccagctctccttctttccctgccactgtttgaccttacacaggtcgtattctctctgggcctcatttgtccctgagaaaagagaaggagctggagtgatgatgtgg

SEQ ID NO: 115099 - DNA, 122 bp, Homo sapiens
cttcttcctctagcccagcttgaggactgggatggctgggcaaggaagccataggcattgcggccccttgccttggtgcagatgtgagtcccacaaacacatctggagaagctcaaaggccg

SEQ ID NO: 115100 - DNA, 122 bp, Homo sapiens
caggtataattcaagcttttcatgtagtcatgtagatcactagactccttggtgtactgacgtagcaatttaaaagcagatcatgtgtagtacatctagaagtagatttacaaatattctga

SEQ ID NO: 115101 - DNA, 122 bp, Homo sapiens
agcgcggtcctgacagcgaagacccggccggggcgcccctccctcgcccaacccgccccccgccactatgcggcaggagagaaagaaaaatgccccgcgacctccccgggcggccggcaacc

SEQ ID NO: 115102 - DNA, 122 bp, Homo sapiens
gcctgaagaataaagtcaggacacagccactaaatgcaggcacaaacgcctgtgccaggccggcacgtggaccaagacccggaatcgcagcagaggcaccgcgtgaggacggtgccagctcc

SEQ ID NO: 115103 - DNA, 122 bp, Homo sapiens
catgaaaggggggtgtctacctccctccatatcgggagtaatattacccccctctcgccccgtggatattatgagccatatgacagaggtgtgtccacctcctgccatatcgggagtaatat

SEQ ID NO: 115104 - DNA, 122 bp, Homo sapiens
cagagcgctctgtggcggccgaagaaccaggcgccccctagtgtgggataagcgggccatcgggttttttttggggctgcgtcagccagtggcatttagggcgatggggcgctccgccgcgg

SEQ ID NO: 115105 - DNA, 122 bp, Homo sapiens
cagccaagcaacgccagaaagccggcttcacgctcaggagaaaacgctacctctcttcctcggggttttcggtgctctacacgttcaaagaaacttctctagtaacacactatagaaatgat

SEQ ID NO: 115106 - DNA, 122 bp, Homo sapiens
cggagccgggatggcagcctgcgctatggttggggaccaacgtggtgcacgggcaggggccggggagagaggcggccgcagcgggagcccgggagcgcagggcgggcctggaagagctccgc

SEQ ID NO: 115107 - DNA, 122 bp, Homo sapiens
ttccaggtggcttacgaggattcagactgtgggaaccgtgcgctcttcagcttggtggaccgcgtggcggcggcgcggggcgccaagccagaccttatcctggggccagtgtgcgagtatgc

SEQ ID NO: 115108 - DNA, 122 bp, Homo sapiens
cctgcttaaaccccgccagaggagaagttcgcattcaggatggcgtcccccaggggagggcgcgtggatgggagcggggctggggctttggggccggtgaggcaggtgcactcaccagtgtc

SEQ ID NO: 115109 - DNA, 122 bp, Homo sapiens
ccggagggttctgggggcagggagggtcagaaccacatctcgtaatcctgcagcggcttgcggctgaggattgtgaccgcctgtccccccaccctgccactagggaggccaccaggacacgg

SEQ ID NO: 115110 - DNA, 122 bp, Homo sapiens
aaaaactaacgaaactgctcaggagaagctgcaggcttgacccaccagaggtgctgccaccgagatcaattctgctcggacgaatgagcggtgctatgactcagaaagtgccagtccgagga

SEQ ID NO: 115111 - DNA, 122 bp, Homo sapiens
ttatatttacaggatgacggagaagaaggcagagtcccgtggaccccacgcccacgtccccgtactggtgcctgtgtcgtaactgaccagcccacactgatcactgatccgtcatcatcgac

SEQ ID NO: 115112 - DNA, 122 bp, Homo sapiens
gtgcatttggcatcggagcactgggctgagattcgtgttaaacagatctagaggatcaagcgagaccggtggccccggatcatctcagtgcctctgaattccccaagggtgagaggactgag

SEQ ID NO: 115113 - DNA, 122 bp, Homo sapiens
tcttaatatcccgacccccagtggttgctcttttcttagacaattgtagtatttatctatcgctcttgttatccattaaatcctgcccatttctactcctaaaaggtcaaggaccatgtcct

SEQ ID NO: 115114 - DNA, 122 bp, Homo sapiens
gagaagacctcctccagccgcagcagagctgcctcctcagggttgcacatggccaggtgccggactcagggcctcctaggtagggcacaggttacagctagatagcacagacaggagcaagg

SEQ ID NO: 115115 - DNA, 122 bp, Homo sapiens
cggcggctctgacgtaggacaccggctccctctctccaggcagctgcatgtgttgcaatccgctcacatggggcctgtgacatcacttcctccgccaggggcggagtggaaggcggcaggcg

SEQ ID NO: 115116 - DNA, 122 bp, Homo sapiens
tcgattttctgatggataaaggggtttctaatacccagctcacatggctgtggtgacaaacgggacagtggatttaaagcaggctatttggcccgtggcatatggtaggggcacaacccatt

SEQ ID NO: 115117 - DNA, 122 bp, Homo sapiens
gcagcgtcctagtgccggttgtctgttgccctggccttgcccccaccccaccccccacgccgccccgtgccatggacatctgggtccactcatcgcccctccaggcccccggtgccccaccc

SEQ ID NO: 115118 - DNA, 122 bp, Homo sapiens
gagcaggattaccattgcaacaacacacatcacggagggtaaaactaacctgtctcactacgatctaaatccagctcacatgccctattagtgggtgaacaatccaatgcttggtgaattct

SEQ ID NO: 115119 - DNA, 122 bp, Homo sapiens
tcggggccaggttctcacaccatccagataatgtatggctgcgacgtggggtcggacgggcgcttcctccgcgggtaccggcaggacgcctacgacggcaaggattacatcgccctgaacga

SEQ ID NO: 115120 - DNA, 122 bp, Homo sapiens
gcacagccctgagcgtggtgggtcgcagacgcactgaggccaggagcggggcagggaggacgcagggatttgtcttttccaaaggagatgtcaggaagtgttatgaatcgagagtggccttt

SEQ ID NO: 115121 - DNA, 122 bp, Homo sapiens
ccaattaccatgtagcattaacttgtttcagaatgtttaatattactgggaagacagcatcggtagtggtcaaagtgatttgtagttcacaaagcatgtaggcatttttttttgaagaaagt

SEQ ID NO: 115122 - DNA, 122 bp, Homo sapiens
gggaggggctgggaagatgtcacccaggcctgatggggaaggccaggctgagggctctctcgaggaccactgtctttcgtgggagaggagagtgtctgaactccgggtgagaggctagtgtt

SEQ ID NO: 115123 - DNA, 122 bp, Homo sapiens
tcttacttgcacagtttaaaatactataccttacagagcttcctggtttgaggcctgcagcgttgctgattggttagcaagatattgtaacatttatcttcctctctggcaaaataagttgc

SEQ ID NO: 115124 - DNA, 122 bp, Homo sapiens
gggaggaaggaaggggggaggaagggggagacctgtctgaatattgcaataaaaataaagcgagaagaaagaagcggactcacctttatgaggcatcctttctggttgtcacagcttctgtc

SEQ ID NO: 115125 - DNA, 122 bp, Homo sapiens
ggcagggcctgtcacccccatttcatggagttggcagagcctcagagagggctcggggtacgaaagtcacgcagcctgagcctgttggttacagaactggcagtcgcagacccattctcaag

SEQ ID NO: 115126 - DNA, 122 bp, Homo sapiens
gacaccttgaggcggtccagggcggcctggcctcgcttggtcctggggggcagcatgcctcgcaccgcccgcaggaagatgcgttgggggcccggacgtggcaggggcctcaggaagggttg

SEQ ID NO: 115127 - DNA, 122 bp, Homo sapiens
gtgacgcggcgttgcgcggcgatgttaggcggtgacgtggagttgcgcggcgatgttaggcggtgacgtggagttgcgcggcgatgttagcgggtgacgcggagttgcgcggcgatgttagc

SEQ ID NO: 115128 - DNA, 122 bp, Homo sapiens
aaaagtgtgtattggggctcagattgcctacctggcaattagtcaaactgatatataggccgggcgcggtggctcactcttgtaatcccagcactttgggaggctgaggcgggcagatcact

SEQ ID NO: 115129 - DNA, 122 bp, Homo sapiens
aaaaaaaaaaaaaaaaagaaaagaaaagttatccgaagcttgaagcttgaaggcatgggtcgggcatggtgaatagcacagacagatggaggacattctgtctgccacagagcctaaaatat

SEQ ID NO: 115130 - DNA, 122 bp, Homo sapiens
cccagaaccaaggcttgcttctgtgggcagccttccatcccatctccaccatataatagccgccaccattcagcagaatcccagcagactgtgcagtggggcaaggatttcatgagcatcct

SEQ ID NO: 115131 - DNA, 122 bp, Homo sapiens
atcacaggcagccagctgggaacaagttctcactcagcacaaatgaagccaccgctccagcgttcaccaatcaggatttatttcctctgtttccacgtttacctagaagggcttttcccctc

SEQ ID NO: 115132 - DNA, 122 bp, Homo sapiens
ggcatgagacacagcctgccacattaactgctaggtttacatctacaacacagctggaaacgctcactggatcttcacccacaccccgtttaatctcccaacaacgccatgcccacttcctg

SEQ ID NO: 115133 - DNA, 122 bp, Homo sapiens
cgatacagtggtaagcagtttaaaatggactacatgacctccacctggcagcttgcaaaccgtaccaataactggatcattttagatcacaatagctatttgggggacaagggaactaaaac

SEQ ID NO: 115134 - DNA, 122 bp, Homo sapiens
tttatatgctttttatgcattgtctcccagctccgaacgcgtccttcaatatagcatatgcgctgacgtggacttctccaagcatctctctccttcagtgagctcggcaagattgctcggta

SEQ ID NO: 115135 - DNA, 122 bp, Homo sapiens
acagatgggaaggctgaggcacagagagcctgagtaagtgaaccaagctcacacaggagacggatacccaagattcaaaatcagaccatcgggattcagagcccacagttgcaaatctttac

SEQ ID NO: 115136 - DNA, 122 bp, Homo sapiens
ggaagaaaaaggaagtcctgcacaggcccacgtgctcgcgccaacccctacgccccagcgcgccttctccacccacgcacgggcctcggacgcatttccagccccggcgttggttgtggatg

SEQ ID NO: 115137 - DNA, 122 bp, Homo sapiens
gggattctggggtgtatttccgtggagtatgtctccccaggattaaagttaagaagctgccggaaaggttgttgccgctgacttcactttgtgtgcccaccagcacaggcacaagtcatagc

SEQ ID NO: 115138 - DNA, 122 bp, Homo sapiens
agacagaaccaagaagtaactgccacttttgcataaataaaactctagacaaatggttaacgcaggcagaactccttattgtgggacttgaaggaatcattttctcatcattaattatgcac

SEQ ID NO: 115139 - DNA, 122 bp, Homo sapiens
tattggcgttagatgggggtggggaatccagttaggtgcgcccacgtgttggagaagcaccggtgtgcacctagatttccttctaggcttttttctcatactcaattggaggcattttttac

SEQ ID NO: 115140 - DNA, 122 bp, Homo sapiens
tgtgatccgcccgcctcggcctcccaaagtgctgggattacaggtgtgagccactgctcccggcctaaaatttttgtttgagacggagtctcgctctgtcagcaaggctagagtacagtggc

SEQ ID NO: 115141 - DNA, 122 bp, Homo sapiens
ccggcatggagcgggacttggtggccattgaggcaaagctgagtgacctgcagaaggaggcggagaagctggagtccgagcaccccgaccaggcccaggccatcctgtctcggctggccgag

SEQ ID NO: 115142 - DNA, 122 bp, Homo sapiens
cccatagccggactcctggctgggcccttcatggggcgggacgcctggaatctcgaggggcgggggcctggcgcaggctcccgcccggggttcccgagctgctccactctgcgcgaagccgc

SEQ ID NO: 115143 - DNA, 122 bp, Homo sapiens
ctgcgagcagagaggaaagttcagattcttctaacatagagaaccagccttccaggaggacgagaaggaaggaatgaggggaagagaggactacctccaccctttccatcccgttggtctgc

SEQ ID NO: 115144 - DNA, 122 bp, Homo sapiens
cctgcttgcccacctgcttactccttgtcgcccccccacccacgtgtctttcagcccggccgcaccacctgggtctccgccatgaacgggcctgccctgcagccctcctcgccctcttccgc

SEQ ID NO: 115145 - DNA, 122 bp, Homo sapiens
tggggcgcgcgggctcgcggcactgcggacagggcagtgggaaggggggcgcgcgggtggcggccccaacagaccccgcgcccgggcgctcccagcagcgccctatgcaggcgcggcagaag

SEQ ID NO: 115146 - DNA, 122 bp, Homo sapiens
aggaagagcagcgcgcacccggtcagcgacgcggcgggctccactgtggcgcgcgcactccgagcacggagggctgcaggctcacgccacctggctccgcgcccatcccaatccgcacccgc

SEQ ID NO: 115147 - DNA, 122 bp, Homo sapiens
actcgcagagggagctgctgcagttcgtgtctgggtgcgaggcccaggcccagcgcctgccgcccacccctaagcaggtgatggagaagttgttgcccaagagagtccgggaagtcatggtc

SEQ ID NO: 115148 - DNA, 122 bp, Homo sapiens
gagtcagccgacccactactcagagtgagtgaccttgggtaggttaaccatctgctcttccgccccttcgctttttctcatctttcaaacgagaggctagggggtctttgcagttccagaat

SEQ ID NO: 115149 - DNA, 122 bp, Homo sapiens
attcttacttactatttccctatggcataagtgttaaagtttgtgaataagatgaacagtcgtcctggcggcgacaacagttttgcaaatctttgtacttgttttattcacataatttgctc

SEQ ID NO: 115150 - DNA, 122 bp, Homo sapiens
attgccacctctaacagcaccaaatcaaaatctctccactttcagctgtcttttggaggacgtacgtaataaggttttaatttagtaaaccaatcctatgcatggtttcagcactagccaaa

SEQ ID NO: 115151 - DNA, 122 bp, Homo sapiens
gctaacacctggaggcaacagggtgggcctgtaaggagcactcagcctccctccccatctcgtgctcccgtgtacactctcaaggagatgctggtcttccttatctggatgccatctggctt

SEQ ID NO: 115152 - DNA, 122 bp, Homo sapiens
aaagaaatcatagaaaatacatgtcttccggagttgacttttggaaactgagttgttagacggcctctagaagcgatacgttcacgtttgttcagtgggttagatgacatggagctcgaaga

SEQ ID NO: 115153 - DNA, 122 bp, Homo sapiens
gacaatgggcggaaatgcccagacactagtactcccactgtacttattcgccagggctgtcgagaaagctcaacactgttgttccaactcaacactgtagaggacccttaatgcccactggc

SEQ ID NO: 115154 - DNA, 122 bp, Homo sapiens
tcttcgcaggatcaggaactggcatttcagcctggcgcagcctggaacatgggaagccaccgtggtgctgatgaaactgagggaaccgcaaggagaacgagccagccccgtgaaatatggtg

SEQ ID NO: 115155 - DNA, 122 bp, Homo sapiens
tttaataggtaatagaagaggggcgccgttgtcctctggctgcttcttgctggataggggcgatggttggggggagaggctgggtagtagggactgctgttcctggagctgtcggtattctc

SEQ ID NO: 115156 - DNA, 122 bp, Homo sapiens
agtgcggccggggctggacttggggcgcagcccgggaggcccgagcctgcttggggctgccggctgcagactccgctgtgggcagagcagcttgcttggggatcactacggccgggagaagt

SEQ ID NO: 115157 - DNA, 122 bp, Homo sapiens
cagcaccacctgctctccgcaccgcggcggatgatggcggaggaggaggattttgaaagccggcagtttctttgcttcgatttgatttgttcgaggccccggccggcttgccctcgccccgc

SEQ ID NO: 115158 - DNA, 122 bp, Homo sapiens
ggtggggtctgagacactaaaactgagcggcctcaagggcccgagaaagttacagggctccgagagctgcaacagcagcaggtagagctgcggccgggaaccgcggccctggcctggcgggt

SEQ ID NO: 115159 - DNA, 122 bp, Homo sapiens
acgtttctccagtactggtcccagaccagttgcccggccacaccctggcagtgcccgggacggtcaaattctggacacacttatgaggcccagggattggtctttttccccccctctctcct

SEQ ID NO: 115160 - DNA, 122 bp, Homo sapiens
gcgagagcaagccaatgggaggccgcgagctgacgataggcgagattgattggaagcggccgtgggctctcgccgcgaggggcgtggcgcccccgccgggctttctgcctgcccatttccca

SEQ ID NO: 115161 - DNA, 122 bp, Homo sapiens
gccccgcgggctcaggggtggagacacagaaccaggccaaggtccaggagtgacagggtccgcttacgccctcacagcccgcccccgaccccccgtctcgctcactgttctggagcctcacg

SEQ ID NO: 115162 - DNA, 122 bp, Homo sapiens
atggccagtcctcccacctcctgcccacccctcttggccagtgcgctgggaccagggctccgggcaagacagaggctgaactggatgtggacacccatgctggcgacctccccctgcagccc

SEQ ID NO: 115163 - DNA, 122 bp, Homo sapiens
catgtggcctgcctcattgcagctcatcccagcctggggcttcagctatccctgattcctcggcaggcgcaagattcctcctaataacgagaactccccctcccgctgccatgactgaggca

SEQ ID NO: 115164 - DNA, 122 bp, Homo sapiens
ggccaggaggagactgtccgtattgtggctttggatcgagatttccatgttcactgctaccgatgcgaggtctggttgacagccctgccctgccagtctgtggcaggcgttgaaaggctcgt

SEQ ID NO: 115165 - DNA, 122 bp, Homo sapiens
gctcagaggcttcagcagggccccgtggggagggtgtggggacaaggtctccctgaaggccgagggaagcagcttattccccggagccagtggctcttgtcctttacccgtttcttgctgca

SEQ ID NO: 115166 - DNA, 122 bp, Homo sapiens
cctgtcatcccggttttctttcttgcccgcctaagtgtggcggacagggatactattccccgccttccataccgccccttcctccttgtcgcggactccttgtccttgccggttcacctccc

SEQ ID NO: 115167 - DNA, 122 bp, Homo sapiens
ttcggctggttccgaaagtttgtggcagagcgtggagctgtagggactagccttgagggccgctgccggcagctggaggcccagatcagaaggctaccccaggaccctgccctttgggtgct

SEQ ID NO: 115168 - DNA, 122 bp, Homo sapiens
tgagtttttccctctggtaaaattctgactcagggcacaaggctgtctataagtgggaaacgcacgtcacctgtcctcgagtccggagatccatcctcaccccagtcccatttggagactca

SEQ ID NO: 115169 - DNA, 122 bp, Homo sapiens
gatgaagcctccaggtagcagccttcagagagaatagatggcaaatgtgtcttttcagaccgtaaaaggtgtcaaggccaggccccgtggctcatgcctgtcatcccagcacttggtgaggc

SEQ ID NO: 115170 - DNA, 122 bp, Homo sapiens
aagccccgcccctttctttgagccccgccccaaagctcgtgcatttcctgaatagaggctcgtcccttcggcaagccccgcctctgccgggtcccgctcttttgccagtcctaggtgtaagc

SEQ ID NO: 115171 - DNA, 122 bp, Homo sapiens
cggggttatttaaccagccccctcctaccaggcagttcttttgtctctggccctttgctacgtatattagtttaaagttcactttgcaagtggccaaggctgtttccctcatttccaggttc

SEQ ID NO: 115172 - DNA, 122 bp, Homo sapiens
caagatttgacctggcgcgacccggctttctggccggggttccccctgagcaggtgactccgtgggaggggtggaaatgagtctctggaattccgggccaaagacaataactgtggttctgc

SEQ ID NO: 115173 - DNA, 122 bp, Homo sapiens
cctaccgccccggcgccccactcagctcgctcacctggcaagtagcctcctctccgtgcgcgtgcgccgctgccgccgcgcgtcctccgggccaccacgtgaccgcgtgggcgcagtcccag

SEQ ID NO: 115174 - DNA, 122 bp, Homo sapiens
ggctacccggctgcctcccggccactcagcgcccgtcccgctcggatgggcagtgccggtcgcagcacccgtccccaacacccccgccacctccggagaccgcggccgtaccctccacaacc

SEQ ID NO: 115175 - DNA, 122 bp, Homo sapiens
ctagagggaaccgcgaggtgcattgtgggtgggggaggagacacggttgggccctgaagtcgcctgcgtggtgacccaggaaatccccgagccgagccgtaaggtccttaagtgagtaactt

SEQ ID NO: 115176 - DNA, 122 bp, Homo sapiens
gccctccactttcacgggggcggggcccaaagtcgctggagttttgctcctgggactggacgtccgagaggtaagagagctatcacaaggttttctaatccttatgtttcttttagtggatc

SEQ ID NO: 115177 - DNA, 122 bp, Homo sapiens
ttacacgcagcggttttaggcactatgaagtgtttattgcctcggggctgggaacctttgcgcccttcttcagctgtgctctcaggcagttaccggccagacccggaccggaaccttggcgc

SEQ ID NO: 115178 - DNA, 122 bp, Homo sapiens
ggcctggccatcaccctggctttctacgtggccggccaggggagtctggtgggtgagcagcgcctgccttcctctccagttctggcagctctacaatgccgtcacgctgtttgagctctcca

SEQ ID NO: 115179 - DNA, 122 bp, Homo sapiens
gtacgtcagcgtctgcggccttacctcctgacacctaaggccagagacagagcaggcccgcgccctgggaggtcctgatgtccagcctgaagattgaggacaaagccaccacctttcacaaa

SEQ ID NO: 115180 - DNA, 122 bp, Homo sapiens
ttgaaacagatctgccagatccacaattcatctttggcttcttaaggtcacaagcagtctcggggactatttccattccaccttcctctagctcttagctggcttttcacatatgctaatga

SEQ ID NO: 115181 - DNA, 122 bp, Homo sapiens
tcccggcctcctggctccctgccgctccacacagcagcgagagcagcagcagcaagaggacgagacccagctcagggcaacgtccacacaccagccctagtgcgggcgcagccatgttgtcc

SEQ ID NO: 115182 - DNA, 122 bp, Homo sapiens
accccgcgccagaccccggggtcacggcccgaggaggagcaggccgctcagctgccccaccggagcccccgcgctccggctgcaatttaaatacctctcccgccggcccgccccgccacgcc

SEQ ID NO: 115183 - DNA, 122 bp, Homo sapiens
gcacagacacaggggaggggcagatcacagggagtctccacagagagcttccaactggggcggcacctccctccatcctccattcacagctctgccctgtctctactcagccccaaactctg

SEQ ID NO: 115184 - DNA, 122 bp, Homo sapiens
atactcactactccctagggtctctccttgctgcgttttctgtagggctggacctagggccgtgcgctcagtggctggtgagctgagggcactctctgggtctagtctacttgtgatggcac

SEQ ID NO: 115185 - DNA, 122 bp, Homo sapiens
ttattgagacagggtcttgctctgtgacccaggctggagtgcaatatcaccatcacggctcgctgcagcctcaatctcctgagctcaggtattcttgcctcggcctcccgaggagctgagac

SEQ ID NO: 115186 - DNA, 122 bp, Homo sapiens
cttccatgctaggagataaattacctgctgtacctgccccgggtgtgcctgcctacaagacgcccgatcttccaagaccgccattaaaagtctcgcttctgctgtttttcgtgtctccgagc

SEQ ID NO: 115187 - DNA, 122 bp, Homo sapiens
gcgctctgggccctgcctgctgcctgctaaagagctggaaagcccgggaaagtttcccctcgctcagctgcccacgggtcaccccacccgccccagtcagaggagggtttgtagagattgag

SEQ ID NO: 115188 - DNA, 122 bp, Homo sapiens
ctggagtccgaattcagttcagaaaacctcaggtaaatctctcaaagtttgagctgtgtgcggaatgtgtgtgaagaaatttgcataatcggtctctccatctctctctctctcaatgaaac

SEQ ID NO: 115189 - DNA, 122 bp, Homo sapiens
taaataatagagtaaggcgcagaatactgcccgatctggcaatcccactgtcacttaatccggaggcccacaggtcccaggacgtgctgtgcccacagtggtgagcgcatctggatccccgg

SEQ ID NO: 115190 - DNA, 122 bp, Homo sapiens
tgggatccttctactgtgtcaaccacacagtgctctgtgccgatggctatatcctcaatgcgcacaggaagtgcgtgggtaagccagggccccgcctgccgcccgccgtcacagctctccgc

SEQ ID NO: 115191 - DNA, 122 bp, Homo sapiens
ggtctatggggttgtacctgcggtctgcatccactggggtggacatgttgattgagtccacgggggtggccctggagcctgtgttcatgagggtgttcctacagcctgtgtccatgggatcc

SEQ ID NO: 115192 - DNA, 122 bp, Homo sapiens
caggcactgcaacatggtgctggagaacgtgaaggagacgtggactgaggtacccaagagcggcaagggcaagaagtccaagccagtcaacaaagactgctatatctccaggatgttcctgc

SEQ ID NO: 115193 - DNA, 122 bp, Homo sapiens
aactgttcttgttcccatcatatcgacagcatcttcctgcaaggagcccacagtcctctacgggagagaagatggccatttagaggatgcaattagagaatgaggagcacacaactaaatcg

SEQ ID NO: 115194 - DNA, 122 bp, Homo sapiens
ctctgaaaattgtttattgacaattagaatttttttttcaatttttgagacagagctttgcgctgtcgcccaggctggagtatagtagtgcgattatagttcactgcagcctggaactcctg

SEQ ID NO: 115195 - DNA, 122 bp, Homo sapiens
tagttaattttaaaagttgaaataattttgttttcggaaagtgattatcaagaacacctacgaaatcagctaaatgggtttgccaagactatttataaagtcctgttgtgttagtgtttttg

SEQ ID NO: 115196 - DNA, 122 bp, Homo sapiens
gatgattgaggagagctcagcaagagacatctttaactaagggtaacaaaattcccagtccgtgaaaggattgttaagttattaaacactttcctaggatatgagttggtgacaggatccaa

SEQ ID NO: 115197 - DNA, 122 bp, Homo sapiens
cctgggtctctgacttcaggagggcggagggggcccgtgtcagagccttccgcgccccagcgcatcgctccctactccgcctctcgggatcctttaagaggcggggcttggctgccagctcc

SEQ ID NO: 115198 - DNA, 122 bp, Homo sapiens
ggggaacgttgtgtgctttggggggcccaagcctgcccatctggtttctgttgggcagggcgtaggttcacctgtgagttccagctgctcctggctgctgcgcctgtggctggaatgggagg

SEQ ID NO: 115199 - DNA, 122 bp, Homo sapiens
ggatccaggcgctcttggtgggaagggggcggagcctgcctggcccggagcccggggccacgcccccacgctttgcatatgcgaatccgggcgtccagacctttcatcccagtgtggaagcc

SEQ ID NO: 115200 - DNA, 122 bp, Homo sapiens
ggcataacgaggtcctgggttctgggcttctaccctgcggagatcacattgacctggcagcgggatggggaggaccagacccaggacatggagctcgtggagaccaggcccacaggggatgg

SEQ ID NO: 115201 - DNA, 122 bp, Homo sapiens
cggcgcctgcgtatcgagcctccgtgaagaaaatcactccccagaatgagcccggctttgcggctgggtcctaaactgcggtgagctgaaccttctcgtgggaatgtgagaaagcggaacac

SEQ ID NO: 115202 - DNA, 122 bp, Homo sapiens
tcccctccagtggcttctgctttctgccttaaaatacacccaggttcctaatcctgaaaacgtctgttgtgcaccgatcccaccctcccctcgtgttaccatctccatttccttcccctttc

SEQ ID NO: 115203 - DNA, 122 bp, Homo sapiens
tctcggggctgcggccagaggatagtggccttatggtcttcaaggccgaaggagtgcacacgtcggcgcggctcgtggtcaccggtgcgttggggggccggcagggcacagcacagagcacg

SEQ ID NO: 115204 - DNA, 122 bp, Homo sapiens
cagaggaagaggccgagcactgctggacgtcttttcgccaaaggggctcatgtcaaagggcggaaggtcttcatgtctgggagctaatgtgagtgcactcctgcttgtgtgagcctgtacat

SEQ ID NO: 115205 - DNA, 122 bp, Homo sapiens
gctataaaagcctttcttcccagggtggcggagtgcactactctcacatttaatcctgcccggtatcctgaagaggggagggccagggttgtaggtgagttgcatggagttattctggaata

SEQ ID NO: 115206 - DNA, 122 bp, Homo sapiens
aacaaagccaaagattactcaactgacgtgtaagtctaaaactcgagttagaaaaaccaacgtctctccatccagctatccattcaacaaatttgcatcatatcagtgaatgagagagagaa

SEQ ID NO: 115207 - DNA, 122 bp, Homo sapiens
cggatcagcgggctggctttccgtgctgtgcggagcctttgggcggcggtcgtcttggaccggaggattccaagggctcgggtcgtctaagggtcggggagccccggagacttgatcccgcc

SEQ ID NO: 115208 - DNA, 122 bp, Homo sapiens
ttagatcagaatttccaggagttgaggtctgaacatcattaattttttaaagctccccagcggattttaatcagtagtcaaggttaaaaaccaatggtttcacctcggccatctcattattg

SEQ ID NO: 115209 - DNA, 122 bp, Homo sapiens
tcctgggagcctccaccctaaagacactctctgctccttctctcatcccacacgctttaccggttccttcaacagcacccaccgcgttcatcctgtgaacacttccttagtgataaccttgt

SEQ ID NO: 115210 - DNA, 122 bp, Homo sapiens
cccattcccggggccccagcaccatcgtcagacggagagatccacccagggccacggccacgcggactctgtggaaggtgacggataaatgacttctacagcgatcacatgccaaatacggc

SEQ ID NO: 115211 - DNA, 122 bp, Homo sapiens
atcattgttaaaggattgctgcaaataaatacactttaatttcagtcaaaaactgctctacgtggcctgtgattcgctcggtcccctcccccagggtcgtaacctaatcgccgggaagatcg

SEQ ID NO: 115212 - DNA, 122 bp, Homo sapiens
tctattcttttcttttttttttttttttttttttttttttttttgagatggagtcttgctcgtgtcttgcttttggtgcttagggactctcacagccagattggtagcaagggatactgacc

SEQ ID NO: 115213 - DNA, 122 bp, Homo sapiens
gtgtcccctggctcatccaggcaagatgctgctttctccctcttctctgctcccaaagcacgttgctcttacctcttttaaagaacttatcacattatattgcaatttgttttgcgtgcttg

SEQ ID NO: 115214 - DNA, 122 bp, Homo sapiens
aggaggggaaactgaggccccactgctccttgctgcaggagaggtcatccctgtctttgccgagatcgacaacggctccacacgtcctgtgctgcctcgggcagccgtggtgcagacacaga

SEQ ID NO: 115215 - DNA, 122 bp, Homo sapiens
cgacttgcagacctaggttgagcagagctccaccgcagtcccgggtgtctgcggccgcaacgcaacggacactggctggaaccccggaatgagccttcgaccctgaaatccttggggtgcct

SEQ ID NO: 115216 - DNA, 122 bp, Homo sapiens
ggctgagtgacatttccacatccacctggactgcagccaccccggtggctcctaacacagcgttagttcacaggttaccttctccaaagacgtgttgctgatatgcaaaatacaacagatga

SEQ ID NO: 115217 - DNA, 122 bp, Homo sapiens
cccggcgcgagggagggagcgcggaacaaggcgctgactgtctcccagcctcccctcctccgcgccccctcggcagcagcgaaaacccggaaatctgatcctggccccaggagagccgggtt

SEQ ID NO: 115218 - DNA, 122 bp, Homo sapiens
ggggccccgtacccacgggcgcccaatccgcgctcgccagggccgagcccgcccgccgcgcgcagcccccgccccaccgcctgccggccccgagcacacgtgactccgccccggcccgcccc

SEQ ID NO: 115219 - DNA, 122 bp, Homo sapiens
tcataggccacaaaagcctggtcgtccaaggcaagagaataggctttaaagtccctggctcggttaaaaagctggttgcgtagattcctgtcaatgctcaggatcctctgccttgtgatatc

SEQ ID NO: 115220 - DNA, 122 bp, Homo sapiens
ctctgggctacagagtccttgctgggggttcggggagcgcttggaccccggcttctgggacgcgtcaggtacgtctccgagtccggcgtcgccggccagcgctgcctgggttcactcggggg

SEQ ID NO: 115221 - DNA, 122 bp, Homo sapiens
ctcaccccagtgcgggggaagccgctcaaccctacgctccgccgcgggccgccccctccccgcgcactaaaataaccccctgctgccggcccagcgcgcggctcactagcgttcctgcggct

SEQ ID NO: 115222 - DNA, 122 bp, Homo sapiens
gtgtgggcacttctcgtcttccagcttgcagaaggtgatgttcatgatgttctcctgcagcgtcagcacgtccacagcccccgccaccttgtccacgtcgatggcgctcagccgccgccagt

SEQ ID NO: 115223 - DNA, 122 bp, Homo sapiens
taagttgtcttcttaatttttcttcctccaaatagaagcctttcatcatatacagtgttacgaatactgaaaatatttctcactgggaataactgcaaatgtcatgggccacaggaaaatac

SEQ ID NO: 115224 - DNA, 122 bp, Homo sapiens
gagtaaatgattagaatcaagtttttcatttgctgagaagatcttttgtccctcaagcaacgacaatgatttcataatggaaaatagagttctgtatgaaattgcttaactagaagcaaggt

SEQ ID NO: 115225 - DNA, 122 bp, Homo sapiens
ggaggcaatctgtcactccaccagtttcccaatcaacatttgccgaggagttctggctcccggtgcagaactgacttgtggcgacgtgagggaactggcagcttcttagacccaagttctcc

SEQ ID NO: 115226 - DNA, 122 bp, Homo sapiens
gcgtagagctacgttgctcgagcaacgtagagcagcacgttggtgggccacgggtggcgccgggccgtgcgcgacaacgccggccaccagcccgccatgtccgcgctgtgggcgcccgcgat

SEQ ID NO: 115227 - DNA, 122 bp, Homo sapiens
cactgctgtggaggaagcagcactgccctcctaagtgtgtgcgctcccagggaaaggggacgtggggaatggtgatggtgagtgaagactcactttgtcttcaaatatcgcagtcaatggat

SEQ ID NO: 115228 - DNA, 122 bp, Homo sapiens
aatggtaactatattcatggaatttctcccattgggctgttgcacagaatgagcgcaagacgtaaaagacttagctcaatgcctggcatataaacactctatacatggtaactatcatgatt

SEQ ID NO: 115229 - DNA, 122 bp, Homo sapiens
cagtggggagaggcggttgctgttactccccgcatcgcggggggcgctctcacccacctgcgatgtggctggtaacatccagtggggagaggggctgatattactccctttctcctattttg

SEQ ID NO: 115230 - DNA, 122 bp, Homo sapiens
gcccacgaggagcctcccggcctgctggcaccgcccgcccgcgccctgggccttgacccgcgccgtgactatgccactgccgtgccccggctcctgcacggcctggccgacggcgcgcacgg

SEQ ID NO: 115231 - DNA, 122 bp, Homo sapiens
cgcaaatacatctccagggcttcccaggcctcccatctttccctcggcacaggctcggggcgccctcttgtgttacaaatgaattactgtttctgcggggcccagacctttccaaaggtgcc

SEQ ID NO: 115232 - DNA, 122 bp, Homo sapiens
ttagggagataaatccagcgggtgcaccagagacaaggacaggggcatggccagaggctgcgggcagatgggaggttggtgtaataggggcaagacattgagaggtgccttggagctcagag

SEQ ID NO: 115233 - DNA, 122 bp, Homo sapiens
ggtgtcctgttttttgttttttaccctcggcaacgccacgggtgccaggactagttgacacgccgcctcaatttaagtcatccataatttatacgttacgaaatggaactttcaaaagtgtt

SEQ ID NO: 115234 - DNA, 122 bp, Homo sapiens
ctttcatggagatatttagctggttgtttatcaccgcccaagcgtctctcccagggcacccggaaggggcacatgaacctgttaccaggcatccgggaaattttttgtctcaacactcgaaa

SEQ ID NO: 115235 - DNA, 122 bp, Homo sapiens
cacccattccttcactgtcgcgcccggtcctgggggacggcatggcaccagccaacgtcacgggttgggtgtgagttcatggtagattctcacacgccagcctcacaagaggcactgccgag

SEQ ID NO: 115236 - DNA, 122 bp, Homo sapiens
ctgatgggggaacagggaagaaacctcaaatgcctacctgataattctgggcagcttcttcgatcaagctgacattatgggatttgtggtccttggattcacgacacacaaaacagaggaac

SEQ ID NO: 115237 - DNA, 122 bp, Homo sapiens
gccgccccgggaccgccctgctcaggcgccgtggggttcggcgcggctacgtgcagaatccgtctagctaaaatgtaatttcagattggacaagtactgtaagtgaccctcctctcagtccc

SEQ ID NO: 115238 - DNA, 122 bp, Homo sapiens
agccaccgtgtggggcttcagtgtgtgttttcttaaaatagggatattttcttacataatcgcagtgtagttattaatgtcagcaagttttttattgataaacatttttctctaatctgcta

SEQ ID NO: 115239 - DNA, 122 bp, Homo sapiens
cccataagtaaagatctctttttaaagtgtaattttatattgagcaaacagcttgatgtgcgtattttcataaagtcatagaatgttaaagttgggtggaaactcaaatcacttaagtcagg

SEQ ID NO: 115240 - DNA, 122 bp, Homo sapiens
cgtgatccgccctcctcggcctcccaaagcgctgggattacaggggtgagccaccgcgcccggcctcattcagtattttattgagcgccgatggaacacagtggggctgggccgcgctggtg

SEQ ID NO: 115241 - DNA, 122 bp, Homo sapiens
agcaaatacacagtaattcccccgtttcctattgacgtcccagcggaagtctgactcctgcgcgtcatgcagtttctgaggcaacgaatcactggcacggaagcttttcctggcgcgtttcc

SEQ ID NO: 115242 - DNA, 122 bp, Homo sapiens
gtcaccacctctgggaaccaccatcatcactgttcttttaatgaggggatctccagtccccgccctacctttcggcctcccccgcgtgttgaggggtgggggctggacagtgactctggggc

SEQ ID NO: 115243 - DNA, 122 bp, Homo sapiens
ggcttatcagcatttactggggacactttacttaatttgttgccgagctcatgacctaaacggaaacattgaaccggccacctgaaggtctagaagttttagactgtggaatcagcgctgtg

SEQ ID NO: 115244 - DNA, 122 bp, Homo sapiens
gccctgacccaacaggcctcgacaccactcacccgcgacatccctcacgcgcgtgcgcaccgcgtctcttcgcactacgccacgcccactggcgccacgccccttcgcgccgcgcgacgcgc

SEQ ID NO: 115245 - DNA, 122 bp, Homo sapiens
tgcaggtcagctgcttcagaacctgaagttttctgaggttcccatccagcatgtggcttccgactcagggtcacaggaaggccactggtgcacattccagacaagtgaaagggaaagggaga

SEQ ID NO: 115246 - DNA, 122 bp, Homo sapiens
ctaaagaacttgtctgatgttcagctctatacaattgtgtaatgggaagccctgatgcaacgtttaaagaaccgaaatcacagacgtgaagggaagggcacatctttcccagtttttgcagg

SEQ ID NO: 115247 - DNA, 122 bp, Homo sapiens
cctgccgggcaagggggcgtcgctggatgcaggctcgggggagcccccgatggactaccacgaggatgacaagcgcttccgcagggaggagtacgagggcaacctcctggaggcgggcctgg

SEQ ID NO: 115248 - DNA, 122 bp, Homo sapiens
ccccgcctccaggacggcccctacctccgagaccgccccgcctccgggaccgccccgccccgcctcgcctccgacccgtcccccgcgcgccactgcagagcctgtccgtcagtccctaggta

SEQ ID NO: 115249 - DNA, 122 bp, Homo sapiens
gacggacatctgtccgttcctggctacacctccggcccatctggcccaccccaaactgcgcgaagcccctctccaccgacgccaggcctgtggcctcgcgcgaagctgttggtcgttaacat

SEQ ID NO: 115250 - DNA, 122 bp, Homo sapiens
ttttcttgtggagttgcataaagggggagaggacaaagctcgccaagttgcagcagaacacggctttggagtccgaaaggtaagctctcccatgcatttcgcatgttgtttcaaaacggggg

SEQ ID NO: 115251 - DNA, 122 bp, Homo sapiens
tcgctgtgaaaatccaagggcctggttgcctgctccatgccgaagtgtaagcagcatccacggacccagaagtcgggaaaggccggggctgccccgacggcctgcgacgggagcagtgcctc

SEQ ID NO: 115252 - DNA, 122 bp, Homo sapiens
gttaaattagaaaatgttagtaataataatgacaacaacaataatgaagtgcttagtccacggattgaaacatcttcataacatgtgagacactgttgctctgtggtccagtgtgatgaaca

SEQ ID NO: 115253 - DNA, 122 bp, Homo sapiens
tgttacaagccgaagaagcccaaaggaagcactccatcacgggaagaatgtttttataagcgtgctctttgagggccccgagtgaggggctgcggcagcgcggggacgcgggatggctgcac

SEQ ID NO: 115254 - DNA, 122 bp, Homo sapiens
ggggaaggagggcaaatggccagaatagcttccgagtcagccggaagtgaccctctggaacggttgccatggcagcggctgggcgtgctgcttagcaggggaaagatggcggtgacgggctg

SEQ ID NO: 115255 - DNA, 122 bp, Homo sapiens
gctgtgaggttgtgtctctttagtcacaaactttaaactgtaagtgataaaaacattaaacgttgatgatttttctgagagcttcgactagattacagctaatcatgagactccatgcatct

SEQ ID NO: 115256 - DNA, 122 bp, Homo sapiens
ataaaaacctagacatttctgtgtctctagtcagcagtgcggcactcagcagggtactgacgtcagcaattacgcccgtacactgcaggaaaactagaggaaaatctctttgctccctgatc

SEQ ID NO: 115257 - DNA, 122 bp, Homo sapiens
actttgttttaagaacaaagatggttcctagaaaaggaaggaattttctttagcaattagcggtcactgtttggacaacttggattttaccaagaggagtgggaggaacagtccggtcatgt

SEQ ID NO: 115258 - DNA, 122 bp, Homo sapiens
accatataaagcaagtctttatatcaccataaagtttagtacagaacagggcactgtatgcgctccataaatattgacagaaaagccctttttaggctctattttcaaattgtgttgacatg

SEQ ID NO: 115259 - DNA, 122 bp, Homo sapiens
tcacaccaaatttttctatcaaataaaactagtgacagcttgtggctttttattagagctcgccacgaactagggtaaggtgagtgtcttagcatattttaatgcagttgcttactaaaggt

SEQ ID NO: 115260 - DNA, 122 bp, Homo sapiens
accgagtagttagttgacaacttcctgaattgctctgcccgctttagacaaatccctgctcgccgggtctccggcatagaaaggcctaagcatcgtccaagtcaggccgggctgccgctggg

SEQ ID NO: 115261 - DNA, 122 bp, Homo sapiens
gccacgtgtcttcacggactgtggaagtgccacgtgtcttcatggactgtggaagtgccacgtgtcttcatggactgtggaagtgccacgtgtcttcagggaccgtggaagaggggcttttc

SEQ ID NO: 115262 - DNA, 122 bp, Homo sapiens
tctgaatccccagaaaacaccgcggcgcggcaggtcagtccgaacccggaaacaccgcggcgcggcctgtcaatctgaacccggaaacaccgcagcgtggcctgtcagtctgaacccggaaa

SEQ ID NO: 115263 - DNA, 122 bp, Homo sapiens
agcgtagccagccggagcactcaccctggaagaacaggacgcccagcagagggaagagagcgcagccacggcttccagctgctcctctctgctgcatcccggcagctcttcagatgcttgca

SEQ ID NO: 115264 - DNA, 122 bp, Homo sapiens
tcgacctgtccgcgcagtgagtttccaagattcccgagggatcttcaaccctgtagagggcgccgccgtgcgcgttagggacccgcgggcggagactgcacctccgcagctcgcggccctgg

SEQ ID NO: 115265 - DNA, 122 bp, Homo sapiens
ctgccagaacaggctgggagcgctggggtcttggcgctctgcagccaccagagatctggccgagtgggtctggttacccccacccctgtgccgccacagcccggcagatcgcctagcttggc

SEQ ID NO: 115266 - DNA, 122 bp, Homo sapiens
tctgttttcaacaagtgacccaggtgattcttctcatcagtcaggtttgataaacactgacgtaggagttttagccaatgggaacaaacatcattgtcttaagcactatgtattatatagtc

SEQ ID NO: 115267 - DNA, 122 bp, Homo sapiens
gttttttttttctcatacaaacccgtagtagaaagtgggacctaccaaattttactgctacgtgatccagttgtagtcttttaaaagcaaagaacatatctagggttatgttcaatgctttg

SEQ ID NO: 115268 - DNA, 122 bp, Homo sapiens
tcactgtttctgtttctcccctttccccagcaagcttcctgatgcaaaggaacaccggagcggggcgattgcctccctagagctgggccggccacccccacccctcgggctgctaaagcagc

SEQ ID NO: 115269 - DNA, 122 bp, Homo sapiens
gtgagtctgacacacattaattaagatacctacttcagaaaatcttaaaatatgtatcatcgagggctgggcgcggtggctcacgcctataatcccagcactttgggaggccgagacgggca

SEQ ID NO: 115270 - DNA, 122 bp, Homo sapiens
cccccggtaaccgttttccttccccgcctaagaaaaacagttttttcctctagaccacttcggcggcctcttctgacagttttgcttctcctatgccagcgggtctccgcgcctttaggggg

SEQ ID NO: 115271 - DNA, 122 bp, Homo sapiens
atttccgccgaggcggtgcagctaccgcgccgtgttgtcctctgtctgcaccgccgctgacggaaagctaggcccttctggagacccgctttcccaagggcgcggcctcctgggccgggatg

SEQ ID NO: 115272 - DNA, 122 bp, Homo sapiens
ccccgccccagcccccttcctggcagcattaccacactgctcacctgtgaagcaatcttccggagacagggccaaagggccaagtgccccagtcaggagctgcctataaatgccgagcctgc

SEQ ID NO: 115273 - DNA, 122 bp, Homo sapiens
ccggggacccagctgcggcgaaagctgttgggcgcgcgcttctccgcagctccgcgcccccgccaaaacccagtgagaaattatttgcattcctggaggctgcaggagcgagaaatgagctg

SEQ ID NO: 115274 - DNA, 122 bp, Homo sapiens
ggtcgatctaaaaatcacagcgctatgaattttctgctgaattatagtagaatcaaagtccgattagaggtgaatttacaaacattcttccccttcttctagtcaagcggactattccaagt

SEQ ID NO: 115275 - DNA, 122 bp, Homo sapiens
cccgagcataactggaacggcgctctcccttaggtgcctgtgaatctgctccgtgcgggccgcatctttgtgttcgagccaccgccaggggtgaaggccaacatgctgaggacgttcagcag

SEQ ID NO: 115276 - DNA, 122 bp, Homo sapiens
tgaacgctcccgccttgagcacagccacaggcctgctctggtcacaatgtggggtcgccccgcagacactggtgaccagtgggagcatgaccaggaggtgattaccttctgatcacccttgg

SEQ ID NO: 115277 - DNA, 122 bp, Homo sapiens
tgctcacggacacaaattagaaagacattcagggaccgacctgggtgaagctaagcgccacgtccagcgctgggttcccccttcatccctcccaatataggaaaagggacagaagagggcag

SEQ ID NO: 115278 - DNA, 122 bp, Homo sapiens
ctctcgcgtccgccgcgcgcctgtctgctcggcctcttcttcgccttctctccggccgcccgggtcaaaacccaaggccaggttcttgagggtccgggtcctccagccgccccctccttgag

SEQ ID NO: 115279 - DNA, 122 bp, Homo sapiens
tagcccagacgagaggagggaaaggccgcagaggccgcgaggatgctgcggaggcgcgggcggccggctgccgcctagttgtgcagcccagaccaaggaaagagaagtgggaggagcgggga

SEQ ID NO: 115280 - DNA, 122 bp, Homo sapiens
cccccctccgcccccagtgcacctgccgccgccatacccgctgaaggaggtggaagtccccgtagtggaaaaccacctttgcaacgcggaatatcacaccggcctccatacgggccacagct

SEQ ID NO: 115281 - DNA, 122 bp, Homo sapiens
gaacaggtggcctccaactcggaaaatcccgggcgagggtagtaagaggctgcggagtcccggctgttggggaggagaggaggcctggcacacagcgccaagcaggagtcgggggcagggag

SEQ ID NO: 115282 - DNA, 122 bp, Homo sapiens
ccacacagaggctcataccttcacaggagtcacccagggggctgggccggtagcccccatcgcagtccttgcaggagaaggagccagccgtgttggtgcagactccggaggggcagactccc

SEQ ID NO: 115283 - DNA, 122 bp, Homo sapiens
gcagggaggcatcaaggaaatctcaccatggataggcatgcaagggcatgctctgggcaacgtggctctcttcaccatcctgagcccttccagatctggacaattgaagcaccctgttacat

SEQ ID NO: 115284 - DNA, 122 bp, Homo sapiens
caggttcacgccgagaaggagctggaggagagccgcccggctccagccggaccgcttgcccgccatcaccgttgtaatctatgcagcaaacaagctggaacccgctgggtggcacctgcaag

SEQ ID NO: 115285 - DNA, 122 bp, Homo sapiens
cttctgtgacgcacagtcctcgcaggagatccaccagacggttttaaatgaagccgtgggcgccacgatgtaccacaccatcaccctcaccagggaggacctggaaaagttcaaggccctga

SEQ ID NO: 115286 - DNA, 122 bp, Homo sapiens
tctgggccaggcgtggaggcgcgagagccgtcagggcttgcggacagttttgcggaatggcgtggcctgaaactgacgaggcggcatatggctggtgtgcctctgggttagctcttggtacc

SEQ ID NO: 115287 - DNA, 122 bp, Homo sapiens
agaggaatataattgagacactacccttacacatcaataagcttaatttaaccccataaacgtttactgaatgctcattatgtgtaaagcatctgtgctcggcactggaggagatactgaga

SEQ ID NO: 115288 - DNA, 122 bp, Homo sapiens
ctagcactctctttttccaccaggctgtcaaatttacttggggtacaggggcttcttcaacgagtttcattggaaatcccacttatgtgttgtgtctataatggttttattaaaaagccttc

SEQ ID NO: 115289 - DNA, 122 bp, Homo sapiens
gtgaaggcttggctgctggctgtcactccctccagagacacacttgggtgcagggaccttcgcaggccccagatgcgcaggactcagtctgaacaggtggctcccctcgtcttccccctggc

SEQ ID NO: 115290 - DNA, 122 bp, Homo sapiens
acttccttttctttcttctccttctttccttccttttgagacagggtcttgctctgtctccgccgctggagtgcagtcacagctccctgcagcatcaacctcctggacctaagcagtcctcc

SEQ ID NO: 115291 - DNA, 122 bp, Homo sapiens
ccagaggtcccacaaggctcccccagaaagctgagattccgaaggcctggtccccaggggcgatgaacacgccttctctccccaccacaccccaccctgctccccgccccacctctaacccc

SEQ ID NO: 115292 - DNA, 122 bp, Homo sapiens
tgattggggtagaggggggaattgagtggttcacccagcagccctcctttttcttgacaccgtctctcctctttccctttcataatgtcatatgatataaaagggtatctaacctaatacag

SEQ ID NO: 115293 - DNA, 122 bp, Homo sapiens
tgcaggcgggcgggtgggtgggcgggtgaggagctgacaggcctgggggccgctggacggcgtggattctacccctgttcccagcgtcgctgtcgccgtcctcccaacgcccaagcctggcg

SEQ ID NO: 115294 - DNA, 122 bp, Homo sapiens
cctcacactgccccctcctccccaggccgaactgatgagcagtctcattgagtactgcatcgaactgagccaggcggcggagcccgcaggcccccaggacagtgcgactggctcgccctcgg

SEQ ID NO: 115295 - DNA, 122 bp, Homo sapiens
cgacacgccccgtcttgggacaaagcgccagtccggtggggttgaccagggtcccccagccgccgaaggtgtggtggcaggtgagggctccgggggcgctgggggcggcgcgatgggcggcc

SEQ ID NO: 115296 - DNA, 122 bp, Homo sapiens
tcaccttggctttatctcccttagcatccccttcagcctttctcttgggcatggtggtggcggcgacggcagcaggacgtaggtgctggacgcgggatgcagtggcgcgcgggctttggtcg

SEQ ID NO: 115297 - DNA, 122 bp, Homo sapiens
cgtttccactggcccatcactgagtcacagaaaaggcacaggccctacgaatgccgacatcgcctcccataaaacctgacgggggaagaggaggatccaatttttggtgttagaaaaattgt

SEQ ID NO: 115298 - DNA, 122 bp, Homo sapiens
cttggagaggggagcaaggacaacaatcactcagatttgtttagaagaggaaagctgaaccgtagggtctcatcattaaagggggagactgactcctggatctgggcaccttccccagggag

SEQ ID NO: 115299 - DNA, 122 bp, Homo sapiens
ccaaattctccaagaagtaagagacttgtgagtaagctcatatgaggaaagaggaaactacggtaccagagccaaaccagcttttaaaatgactgtgtatttacattatcagacaaatgaac

SEQ ID NO: 115300 - DNA, 122 bp, Homo sapiens
atatcaggggccctgtgcctttcccatgttcaaatgtgttttccgttttggtttctaagacggcgactgccggtttccccaccgcatccacccccggtccggccagcaggaaccaggggaag

SEQ ID NO: 115301 - DNA, 122 bp, Homo sapiens
accccgcgggcaacgcgcggagttcctggcacttcccggcggtgtctcttgttgtctgcccggggaccgacttcgcatgctctcaggctgacctgtccaagcccgaacaccgggaccatgca

SEQ ID NO: 115302 - DNA, 122 bp, Homo sapiens
ccccagtagtcacccactctcccaccccacctctgttccttttcgcggccccgtctcccgcgccctcaggcgcccagaacgccccggccatgggcatccgaggcatgctgcgagccgcagtg

SEQ ID NO: 115303 - DNA, 122 bp, Homo sapiens
aacaaaagttatccagaagaagaggcaaggaaagtatgttacaggcagaggaaataataacggcaaagttctggaggagagagagagactgtggctcattcaaggaaaagaaagatgttaat

SEQ ID NO: 115304 - DNA, 122 bp, Homo sapiens
gctggctggagtttgcctgcgcgtccggcctctcccccggggatcccctgggattaccgacggagctcaatttcgagagtatggtgccagcgcccgggctaatctagtcctctctactcgct

SEQ ID NO: 115305 - DNA, 122 bp, Homo sapiens
cgggcaggcagacatgatcgtggcgccgctaaccataaacaacgagcgcgcgcagtacatcgagttttccaagcccttcaagtaccagggcctgactattctggtcaagaaggtgggcaggg

SEQ ID NO: 115306 - DNA, 122 bp, Homo sapiens
gcatttggttggggattttgatgtcttgcgatacaaatgacagaagacagatttgcacagcgcaagcggatgagggactaagatgtgcagagcaggctgggtggggactcccggggaggtct

SEQ ID NO: 115307 - DNA, 122 bp, Homo sapiens
gttattcataggcatgaatagtggttcactaaggctggaacttaagtaattctcctgcctcggccaccggagtagctaagactacaggtgtgagccaccttgctcggctaagtttgaaataa

SEQ ID NO: 115308 - DNA, 122 bp, Homo sapiens
taggtgttacggctttctcgtcgttttgcttccgtatgttaaacatacagcactcaccaacgttgaaatgggcattttccgctgttggaacagcaaatctgttaatttcaagttgctccaga

SEQ ID NO: 115309 - DNA, 122 bp, Homo sapiens
ttcggccccggtctggtgctcggaagacatgtgcctccctctacctgccccccgtcctcccgccactgtgaggccctgagaggccctgagattcttgcgatgtgtgaataagggtgccgcat

SEQ ID NO: 115310 - DNA, 122 bp, Homo sapiens
ggtggaaggcatggcagataggactttggcaaagaatagtggaaagaaagttgaagactgcggggaaacacaagtctgtggatacacaggttgatacagtctctcttagagggcatgaatgg

SEQ ID NO: 115311 - DNA, 122 bp, Homo sapiens
tgctgcacccctggcccaaggcacacagtaggcacacaacaaaactgtgaactgaatgaacgtttttaaggtcttcctggattcccctcagaaactacctcacagggggctgaagttgaaag

SEQ ID NO: 115312 - DNA, 122 bp, Homo sapiens
aagaaacttaaattgcttagcgtaatgaacagatgcactgatagatactagaaaagatgacgacctggaatacttttcttgaaatgtgctgcaaggtgatatggtcttgacctcaaccaagt

SEQ ID NO: 115313 - DNA, 122 bp, Homo sapiens
actgctccagagcccgagtcggagtgtatcacagaacctgggccgggggggacagcgggccgagcctccttcttccagctgatccctggccgggctggacctgcgctatcagcgcgccccca

SEQ ID NO: 115314 - DNA, 122 bp, Homo sapiens
gaagcacaggaaagaaaatgtttgattggttaaaatggaagtttgtagttcgaggttaggcgttagtttcggattgttaagctcgagttttgcttttctaggctatgactctactctgagtt

SEQ ID NO: 115315 - DNA, 122 bp, Homo sapiens
ggctgtgcgatttgtatccgggtcctggctggctctgcaagagactgtaggaggtggggacgcacctgtaggctggccgggaccccccgggatgtcacccgtgagaaccgtaccccagcatg

SEQ ID NO: 115316 - DNA, 122 bp, Homo sapiens
ccctggggacgggagccctgggctcccctagggcggctcaggggctggggttcaggggctcgggtcagagggcccgacacaacagctttaccagccccagccctccgggggctcaccaccca

SEQ ID NO: 115317 - DNA, 122 bp, Homo sapiens
ggattatagtgtgagccgccacgcccggccgctgggattgcaggcctgagctcccgtgcccggccatcgttgatgtttttatgaatcacttttagattttgtagattaacctcttccatcat

SEQ ID NO: 115318 - DNA, 122 bp, Homo sapiens
tatttcagaacagtgtattgtgatcctgtttttgttaaaaaaaatacttgttaaaaattacgatatatgacataagagttgtaatgggtttccctgagtgcctcctctgccttgctgaattc

SEQ ID NO: 115319 - DNA, 122 bp, Homo sapiens
ctcttccctgcccatatggagtgctgtggagggttagcctcacaggcagaggaaatcatccgccggagaaagggtagcggtgaatttgaggagctgacaattggccacaggtggagtgcagt

SEQ ID NO: 115320 - DNA, 122 bp, Homo sapiens
ggacgggcgcacctgcatggaggggtccccagagcccccaaccagtgccagcatactcagcgtggccggtgagtgggcaggagtacgggccacccgagggactcgggacgggcgtccgggct

SEQ ID NO: 115321 - DNA, 122 bp, Homo sapiens
gcttcccaggctcaagtgatcctcccacttcagcctcccaagtagctgtgactacaggcacgctcaaccatacacagctaatgtttatattttttgtagagatggggcttccccatgttgcc

SEQ ID NO: 115322 - DNA, 122 bp, Homo sapiens
taaactaatctaaagctgacttttacatagttacatctaatgactgatcatgttggacgccgtttcttttttttctttttgaaacagaatctccctctgtcgcccaggctggagtgcagtgg

SEQ ID NO: 115323 - DNA, 122 bp, Homo sapiens
ctggcactgaccgctccagtcttagaggttggaagaagcggaagcggatgaagtcccccgcggcaggggtgaaggcccagaagaagtcctcgcgcaggtaggctttctccagggtgaagtgc

SEQ ID NO: 115324 - DNA, 122 bp, Homo sapiens
ctccgaccctgccgcccccattctccgctccccgctctggggctgagtgaggcaggatggcgagagacccctgagccaccaagtccgcttacctcaggcagatcccgacgggggctcggcgc

SEQ ID NO: 115325 - DNA, 122 bp, Homo sapiens
aggctgctggcttccagtgacatcacatgactttggggccactgcctcatcccgtatctgcgcgtatgagatgcattgtctcttcctctgcagttgagctgaatgaatacctccgaagccgc

SEQ ID NO: 115326 - DNA, 122 bp, Homo sapiens
gatgccttgctttctctgaaaagtgtcctggttttaggggaatccagcagtggtatcagccgcgatgattatattggccaagtggccaaagaaatagaaaacaagatgcccaaagtctttga

SEQ ID NO: 115327 - DNA, 122 bp, Homo sapiens
cttgaaccgagatttaagtctgcagccataaatcaccgagacgtaaactccgccattcagcgccgggagcggccggttgcggccctgcttaccttaacttctgacgagcgcaggctcgggct

SEQ ID NO: 115328 - DNA, 122 bp, Homo sapiens
agagaagagaatgtggtgagatcatgacaagtctcagagcacagacaatcccaccacaaacgctggatgaaatatacttattattgttataatcatctcaaattattaggtatgtggagaca

SEQ ID NO: 115329 - DNA, 122 bp, Homo sapiens
tttgcacctgtcccgattccagcgtcgagcaggtgagcaggcgaggaaggcatggagttccgacaggttccagcacgcatgtccccttcgcaagcgggggaggccctcgcacatccacacac

SEQ ID NO: 115330 - DNA, 122 bp, Homo sapiens
cgcgagcaaccctacaccatgcaccagcgccactgctcccagcaggagtgggttttgcagcggtggcggcagccccgcgcccaggccgagcagagtcagggctgccagcgccgtaagcagca

SEQ ID NO: 115331 - DNA, 122 bp, Homo sapiens
gtggtagtggtatttgcaagcagttgctagggtgtaatagttaagactgtacttaagtatcgtcttctgtacttaagacagtgtctagagatggtggaattggttgaataaaccatatcgtt

SEQ ID NO: 115332 - DNA, 122 bp, Homo sapiens
gccgcagcctcacgcgcgaaggaacggcatcccgcagcaccttcagacaaagggctgccccgccccgtctgcgcagccgccaatccctgggggctcctgcccctcagttcccgcccccacag

SEQ ID NO: 115333 - DNA, 122 bp, Homo sapiens
agtcacttctacccggcgagcccgccctcccgccaatcgtcatttccggcgggtgctctgcgtcatttacgtcgtcacttcctgccgatgccggtgtggacgctgtgaatcgtggctggccc

SEQ ID NO: 115334 - DNA, 122 bp, Homo sapiens
aactgaacagaagccattgaaactcaaatatcatagatggttgttacaaagttccttgaccgttcttagtaaaggttgtgtcttagtcactttcttctttcttccgtaggctcccttctgtt

SEQ ID NO: 115335 - DNA, 122 bp, Homo sapiens
ctggggctctggggctcccgagacagagcaggggggatcttgaacctcctggacaaaaagcgggaggcaataggaaaacctggttgtgaggaagaggcccccacatgggcaaaggcctgggc

SEQ ID NO: 115336 - DNA, 122 bp, Homo sapiens
cagcagccgcggcagcccaggaggcggaggcagcggcaacggcagagacagcaacgtgcccgccgcagtcagcccggcctcgtcggacccgcaccggcccgcccgcccgcccgcaccgcgtc

SEQ ID NO: 115337 - DNA, 122 bp, Homo sapiens
cactcccttaccaaatcatcaaaaagcccggagtggcagggccgggagccgagcatctcgcgcgcagccccagcctgcacaggtgcggagctcgggggcggctgggggctctcgccccgccg

SEQ ID NO: 115338 - DNA, 122 bp, Homo sapiens
gtgcatatacgagactccgtctctccaaaaattataaacattagccggcgtggtggtgcgcgcctgtagtcccggctacttgggaggcggaggatggaggatcttgaggaattcgaggctcg

SEQ ID NO: 115339 - DNA, 122 bp, Homo sapiens
ggagcggaggtccaccacgcaaggactcgggaagcgggcaagtgggcaaaactctgcttccgggctctcgatttctcgttgatcactaagtggtatttttcccccttctctcgatggcaaat

SEQ ID NO: 115340 - DNA, 122 bp, Homo sapiens
ctgttgcgggttcaaacccaaattgtctttttcttttcagacttttggccagtcttgtctcgctccaacctcctacccccaccccattcctcagtgcattcgtgaatttctccaagcaggcc

SEQ ID NO: 115341 - DNA, 122 bp, Homo sapiens
gcagagcggcaggagctggggccttggctgaatgcgggccgggctggccaggtggcggcgcggggctggcgtccggcgcggcccgcggaccaggcgaggagtgaacgcggagggccgggcgc

SEQ ID NO: 115342 - DNA, 122 bp, Homo sapiens
cggaatgtctcaggcgggctctgaaacctggagcttttctgtggcagaagaaatgcagagcgggagttttgtaggcaatctggcaaaggacctggggctgaaggtgagagaactgtcctcac

SEQ ID NO: 115343 - DNA, 122 bp, Homo sapiens
tccctatccctgcacactttcccctggctgctgttgtaatctacttgttctgctgacgcccgaactgacttctttcccggtctctccccactttctttagatggtcccttccctctttctct

SEQ ID NO: 115344 - DNA, 122 bp, Homo sapiens
cctggagggaccagagtctgagctggtccttccagccaggcctggcagccagaggtgctccgggattgcaaactcctcttctcacctgccaaagatggagaagagtgccagggacccctcaa

SEQ ID NO: 115345 - DNA, 122 bp, Homo sapiens
catcggagaaactccctgcgatgagccactagggtcacggacagggaactttttgatgagcgccgagtggctggaaagtccttccgaccaggccccctccccccggtacttccctgcagcct

SEQ ID NO: 115346 - DNA, 122 bp, Homo sapiens
caccagatgacaagccgtagaatctcaagactgcgaagtcctagagcctccaaaactcaccgcaaggggtgaactgaccagcagtgggctgcggatgaagcggcagaacggcaagtctggag

SEQ ID NO: 115347 - DNA, 122 bp, Homo sapiens
tgcctgtggaggcacgtgccacgtctgaggggccggggacagggcaaggtctggtgacatcggggtggtgccggtggctggcgggggggagggaggtggaggtctgagtggtcaccaggatt

SEQ ID NO: 115348 - DNA, 122 bp, Homo sapiens
caccagaacagggtcagcatcaaggcgcccaggcattggaagagctgattggttcccggacgaaccaatcaaccagcgaggccgtgcacggataggggagggccaaaactaccgaggggatg

SEQ ID NO: 115349 - DNA, 122 bp, Homo sapiens
acctggaggtagttcagagcttctgaaaggtaacatccatatacaaaaagaagttccttccgatccagatcccagctttggtgccagatgcacatttgaggagtaggtggctagtcagactc

SEQ ID NO: 115350 - DNA, 122 bp, Homo sapiens
ggcaggtctgggcaggagggagcaatgaagggcggggcagagggagggcaggagggaggccggccccctagtaggaaatgagacacagtagaaataacactttataagcctcttcctcctcc

SEQ ID NO: 115351 - DNA, 122 bp, Homo sapiens
ctgcgagctgccctgcaaagagtacgacgtggcccgtaacacgggcgcctacacgtcctccggcctggccaccgccagcttccgcacctccaagtacctgctggaggagtggttccagaact

SEQ ID NO: 115352 - DNA, 122 bp, Homo sapiens
gggaagaggagccgcttgggggcgaccgagagcccatccgtttcccctttaagaccagagcggaagactacagtgagaaggccctttgtgtcggcgggaaagaaatatgcctgcccctttaa

SEQ ID NO: 115353 - DNA, 122 bp, Homo sapiens
tatattactttagagtctgcatcctccactagaatgtaaggtccatgaatttaggactctcgtctattttgttcactggcaaaaccccaaaatttgggcctgacaaatagtaagcaagtgac

SEQ ID NO: 115354 - DNA, 122 bp, Homo sapiens
agagaaagggtgttatgaaacacaggctgaatttaagcctggaaagacagttccgacacacggagtctctcaaattgtcaaccagtggcctgaccaagagaaggtaggggctcagaactagt

SEQ ID NO: 115355 - DNA, 122 bp, Homo sapiens
gcggacacacaagaagtgagacggtcggccgagttcagcggctctccctgcccgaagacccgcacagcccaagcggcgacacaaatggcctcctgaggccctcgaagggcccccgaggcccg

SEQ ID NO: 115356 - DNA, 122 bp, Homo sapiens
gggctgcgtcccttttcagcagctgtgttcggagctgagcagcttggagccacacacgtgcgttatctcagggttccgggacacgcgtgctgggggcgctgcccgggccctcactaggcggg

SEQ ID NO: 115357 - DNA, 122 bp, Homo sapiens
cacctctcacaaggattgttccttctttgcttctggcccgtggggaggccactggtgcctcgtttagcccatcagtgtcttcatcttacaaaacacttgtcctgggcaaattgggatttgtc

SEQ ID NO: 115358 - DNA, 122 bp, Homo sapiens
gctggcactcacacaaccacatgtcagcacgcccaagcgctgggatagctgtctgtcagtcgtaactgctggtggaattttttagacagctgggctcaagccgggaaatgaatataagttgc

SEQ ID NO: 115359 - DNA, 122 bp, Homo sapiens
tgggagacgctgcgggtcctgggcccaggccttgggatgggcgggaaggcttggccgcgccgggctgtgggcactgcaggaggcccctgtgcaggtggagatcgccgcggccctggcgggac

SEQ ID NO: 115360 - DNA, 122 bp, Homo sapiens
cgctctccttgcagcggcggggacggcggtgcgcggagccgggcatctcccgcgcccccccgcctctcccgcgcgccccccccgtggaagttacacacctttggattgcatttcgccgtcac

SEQ ID NO: 115361 - DNA, 122 bp, Homo sapiens
ccctttctgagttgtgtcctcactctgctagcttctctctcaagctgtcagcacaatggtcggcctgaatagcattcttaaggacataaagcatttatagagtagggcaacatgaattgttt

SEQ ID NO: 115362 - DNA, 122 bp, Homo sapiens
ggagtcgcgctgggtatcggaccaggaactcactgctttcattggctgcggaggtcagaccgtcccaccctcttctccccgccgccgcggcaaggccagggcgaaagggacaagtgcgctgc

SEQ ID NO: 115363 - DNA, 122 bp, Homo sapiens
tgggagaataagaatgtgggagaaccaagagaaaaagtggggctgggagagtggagttcccgtagggcataggcctgtgaagtaacactggggcagatatgtatgttatatacaactatttt

SEQ ID NO: 115364 - DNA, 122 bp, Homo sapiens
cagccgaacctgtcagccaccttgcaagcctttcctatattcgattcaatgtacttttcccgaagcaaaatgaaagttctcacagaggggccctcctctgccttgtcctcagaattggaaaa

SEQ ID NO: 115365 - DNA, 122 bp, Homo sapiens
tgaggacgggagagggctggcttcttgattctctctggctgatactcaaacttggctctgcgtccacacctccctccctcctttccccactcctactctcctccagtccccagagcccattg

SEQ ID NO: 115366 - DNA, 122 bp, Homo sapiens
tcctcagctcccaggcacaacacggagtcatctcccatcgtaactgcagagttgtggagacgtggtaagatgtgacaccgagaaagcggatactgcagtcatctcagctctgtgtaagaacc

SEQ ID NO: 115367 - DNA, 122 bp, Homo sapiens
agtcccccagcggcgggccagacacgcgcggcagaagctgtgctcgcacgccagaagcaccgggtcctcgaaggagcccccgcacagaggacacgtcgccagctgctccagacgctccacca

SEQ ID NO: 115368 - DNA, 122 bp, Homo sapiens
gggggtcttctccatggtgatctgcccatccagggttcggggcatcagactcctgcgggacgggtgcaaggagagggggcctgagcctccccagccctagaccggcccccaggggcccggga

SEQ ID NO: 115369 - DNA, 122 bp, Homo sapiens
taaactcctgggctcaagcgatcggcgcaccttggcttcccaaagtgctgggattacaggcgtgagccaccacacccagcttccaagcctcattctttgccagcattaggacccaaagcccc

SEQ ID NO: 115370 - DNA, 122 bp, Homo sapiens
cagaggagcccctggtgctggccccgtcgtctctgccgagccgagcaccagagtcggctgcgtgtccacagccatgactgttctccaacgagaggagaacggaggccttggaggaatcctca

SEQ ID NO: 115371 - DNA, 122 bp, Homo sapiens
gcgggggagcctgggggagccgccgccacctccacgggcctctctgagctcggacaccagcgccctgtcctatgactctgtcaagtacacgctggtggtagatgagcatgcacagctggagc

SEQ ID NO: 115372 - DNA, 122 bp, Homo sapiens
ggtgggccactttgggcatctcggcgtggcctgcgccggggtcacggggagggctgtcagcgccagggcggcggaacccgaggtctccagacgagtgagggagggatgcaggcttgggggtg

SEQ ID NO: 115373 - DNA, 122 bp, Homo sapiens
ggaagtgtggcggcggagggcggggccggcgcgttgaggcaggagtgagcgcagcttcggcggtcaacgcgctttattccgaggggcttcagatacagatgaccccagccctgcatccgccc

SEQ ID NO: 115374 - DNA, 122 bp, Homo sapiens
atttttgctgtcttgccacgtttcttccagagaaggatgttctaagggcagcagaggccacgtggatgcccgtttgtgggtctctgcacacacggtggccggacggcagatccggggctgcc

SEQ ID NO: 115375 - DNA, 122 bp, Homo sapiens
aggctcggccatctccggctttgctgcgccaacaagagcattgcctgctgctatcccacgcgtcctcatcccaaatcccagatgagggcgctgtggccttggccacccccaacacggcgcct

SEQ ID NO: 115376 - DNA, 122 bp, Homo sapiens
gtgagagcacgcggggcccgtctttctgtgcctgactgactccacttcacataaaggccccgctcccccgaccccggctccccgccccgcccggctcacccacgttgccgggaatgatccgt

SEQ ID NO: 115377 - DNA, 122 bp, Homo sapiens
agcacggcgtgggtatccgcaggcggccatggacggtgatcacagtgaccagagggacagcgcaccctccggtcgaagcggggtaggcgttggcaggggaggggcgacgaagactggcgagg

SEQ ID NO: 115378 - DNA, 122 bp, Homo sapiens
cgaggcacctttccccggtgaagggcagtgtgggagcaggacatccctgggccctgcagtcgggtcgggcagaggcagggcggtggggaggggccaggaaggcacaggaccgtgcgagacag

SEQ ID NO: 115379 - DNA, 122 bp, Homo sapiens
ctcctaagtaaagaagcaaagctcatatagacactcaaaaaatggatctgttgtctcagccggatttaatttgcaggattcactaagagaaaagggaaaacaaaaaacaaaacaaacaaaca

SEQ ID NO: 115380 - DNA, 122 bp, Homo sapiens
aagaaaacagaaaccttcattctcacctgcaggtagccttaatgggttataaggaaacttcgttgtcagctggattatactggtgtgattctaagtgtatggatctagacaatacaccgaag

SEQ ID NO: 115381 - DNA, 122 bp, Homo sapiens
ccgagcggctggcggtgcctgggccagatgggggcggtggcacgggcccatggtgggctgcgggtggcccgggcccgcgaaagtgtcgccgggggcaggcaccgaggtgcaggacgccctgg

SEQ ID NO: 115382 - DNA, 122 bp, Homo sapiens
cagtcggtgcatacccaagccgtgggatctgtttttgcattctcacacgagcatattgctcgggttctaaaggatccagattttcgcagacagaagctcgaccgcctctgttcccaaaaggg

SEQ ID NO: 115383 - DNA, 122 bp, Homo sapiens
aatacacactacccactgcaaacctctggctgcaggggtcggctcagttgctagcgataccgttgctaactactcgcctgaaagtgacacctgtgatctaaccctggctgctagatcccaga

SEQ ID NO: 115384 - DNA, 122 bp, Homo sapiens
gtggatggagctcagggaagccgcgcctgtccactcaggcctccgtcagggtcttctccacggcatcccccgtgtccttaactgggcaaaataagttcttccagaaataggtgtggtgtccg

SEQ ID NO: 115385 - DNA, 122 bp, Homo sapiens
gaagggactagcattagaatgaggaaactgaggaaagaagatggccctccccagtgtgggcggcatcatcccatctactatgggtgcagagggaacaaggcagcggaggagggaggcagtgg

SEQ ID NO: 115386 - DNA, 122 bp, Homo sapiens
gccgggacggactcgacagggcgcggaagggagcggtgggcgcgccctgggaggcgagcgcgtcgcagcctcaccttggacaccattttcttgagctggctctccgacaccgccatgacggc

SEQ ID NO: 115387 - DNA, 122 bp, Homo sapiens
cgggcgggggcggggctgggggccggaggcaacaagtcgtcaccggtgactctgggctcgcggtcggtccccagcttccctaccccatccgcaaccctactcaggctcagcatcttttcaca

SEQ ID NO: 115388 - DNA, 122 bp, Homo sapiens
ggtaggagcccggggaacatcttccttctggctccttccaaaaccccagaacccagtgcacgggcagccttttgaagacaggcgagctggctctacctgtctttctgatttgaaatctaggt

SEQ ID NO: 115389 - DNA, 122 bp, Homo sapiens
agcgagcctggggacgaagggggcgcggtgcctcctgggtgttgtagtttgcttccttggcgagaggccttcgggctggctggacgccggggccttgggaactacgcctcccagcgcgcccc

SEQ ID NO: 115390 - DNA, 122 bp, Homo sapiens
ggcgtacttggccactaggaaagcacctccccctttccaaaaatgctccggaagtgccttcgccctccgtaaagatggccggggcagtcggcacgagggaggcggggatgcgcctgcgcaac

SEQ ID NO: 115391 - DNA, 122 bp, Homo sapiens
tgtccaccgagccctgggatcagggtggcagttctcaacgatgggcaggagggacctcggcggcgacccctaaaacaataccatgccccgggatccccgctgctgccgcgccagcgtcttcc

SEQ ID NO: 115392 - DNA, 122 bp, Homo sapiens
cgttccagtggagccgcctccccgggggacagacgcactcgtagctgcccttggtgttgacgcagccctggtcacagctcccgttgctcatgctgcactcgtccacatctggaagcacagcg

SEQ ID NO: 115393 - DNA, 122 bp, Homo sapiens
ttgaggaggatgcagctctgtcaggtttgccagactgattcacttctactcggccatagtcgtagtatcgtgggggcagtgagaatccctgcagggtctcacagggagaaaggcttcccaga

SEQ ID NO: 115394 - DNA, 122 bp, Homo sapiens
gcaatcgacaattcttatgcagttatgtcaagtttttgtcctgcgaaacaaaagctcatccgtcaggaatccgaggacccgtcggaaaataaggaaatgcctgggccgggcctaggcgctct

SEQ ID NO: 115395 - DNA, 122 bp, Homo sapiens
ggcacggttgcgtaagaatcgcacggtcccatgaaatgaaattgagagagctttttccggcgcctggttggttggggcggcctccgttcggtgcttttttcatcctcgacccagtgaccaac

SEQ ID NO: 115396 - DNA, 122 bp, Homo sapiens
cattaatacaattaagttcatttctttccatttgtaaccaattcagggtttttactcacccgtgttgatattattatcatatgtcaaacattaacatgattccaaaggtcagaactatacaa

SEQ ID NO: 115397 - DNA, 122 bp, Homo sapiens
acctgcctcagcctcctggaagtgctgggattacaagcatgagccaccacgcccggcctgcgttaatatttaaaaacctggataaagtaagaaatagctttattgatatggagaaaataaat

SEQ ID NO: 115398 - DNA, 122 bp, Homo sapiens
ctgttgcttaggaaagatgaatgctgggtagggtggcctggcatccatctccctcagccacgtctcagaaaattgaattaaaacccatatttttcagctgctgcccgcctggctggctggct

SEQ ID NO: 115399 - DNA, 122 bp, Homo sapiens
tgggattacaggcgtgagccaccgcgcccggcctctatagttctttatgtctaggttcagcgtatgctaagaggctaggatctcagactgtggagactaagggtttagattttagctgagcc

SEQ ID NO: 115400 - DNA, 122 bp, Homo sapiens
atgagactgtgtgtaaatgactaagtgtagataactagaaattagataggggtcatcaggcgtttcggtatacctataaccagcactcggaattcctgacactgtttacttgatttaggaaa

SEQ ID NO: 115401 - DNA, 122 bp, Homo sapiens
ggacttatatttgatcgacagctacattgatcaatggacaaagggcaaaggccaatgaagcgctggaactggagagtctctcgcgtgtctgggagggtgttttgcgcggggcggggtggagc

SEQ ID NO: 115402 - DNA, 122 bp, Homo sapiens
gccgatctgacaggaggcggagcttagtcagtaaggagagggatggggagcatctgtcaacgcagacaaagcttcagtcactggcctgccactcacctcctgctgtgctccccagttcccaa

SEQ ID NO: 115403 - DNA, 122 bp, Homo sapiens
cgaagccgctccagggctgctctcagaggacgcgcggcaggcaaagagaatgaacctgagcgtccacgaaacgtcctgcacggctcccgggagctgggagaaacaggtgcctttctccgacg

SEQ ID NO: 115404 - DNA, 122 bp, Homo sapiens
gtctgagttttacttaggacttccctccaggggcagcgtgcgagaggctttgtcagaaatcgaacgcgttgtcatcagaaagcacagttccgaagtgccatttgtcaggctgtatttggcta

SEQ ID NO: 115405 - DNA, 122 bp, Homo sapiens
gaaaaggaagagggggtcggccagtatccccgaaagagggctagggcgcatgaagaccagcgcagagctccacgagcaggaaaagcccccaagcagccccagggcgactggaccgggccgct

SEQ ID NO: 115406 - DNA, 122 bp, Homo sapiens
tttttgagtgctcacaatgcagatggttctggggtgaatgggccttgcaagtggctggaccggcaatggcaagcctcagctgagcctgattcatagtgacagttcttctgtctgcaatccat

SEQ ID NO: 115407 - DNA, 122 bp, Homo sapiens
ccagaggcctgaggttaaaagattatccccccactctaaccacatgtgctctcaacctaccgcgaccctttcacgtggaaccccttagatttgtaagcccttaaaaagggccagggaatctg

SEQ ID NO: 115408 - DNA, 122 bp, Homo sapiens
tgtgtgagttcgtttgtgtattttgagattttctgatctagcaaagaccttcccacaccccgggaaaggacaagggaagggcttctcgcccgtgtgcacgcggatgtgatttacaagtttgt

SEQ ID NO: 115409 - DNA, 122 bp, Homo sapiens
gccacacaaatacaaacacgaggaataaatcggcacactgcccattatccaggagacaaacggatccactgctattttaaattcaccaagtaggctattagttgccacagattcccatatat

SEQ ID NO: 115410 - DNA, 122 bp, Homo sapiens
aaagacgtgatagggatctctccctagatcttgggataggagtccactgcctcgtacagacgacccgtgagcctggtacacttacgccaaggtctcactaagggtgggtattacccttgagc

SEQ ID NO: 115411 - DNA, 122 bp, Homo sapiens
tgatgttaaaggcctcactgtaccaaaattttgcaggtttgaaaagagtccatgagttagcgtcttttatcaagtctcctgttaacggtgatgctcctccacctggacccattatagtacta

SEQ ID NO: 115412 - DNA, 122 bp, Homo sapiens
gggtgtgtgcacaatgcctgtgttacgggtttgtgtaggtggctgttatgtgtgtgcatgcgtgtatacatcgtgcaggcatgggacatggagacccaggatcacagtttgtgcttttcagg

SEQ ID NO: 115413 - DNA, 122 bp, Homo sapiens
ggagaggcggcgaacagagccgcttccgcttccgctcgcgccgcgcacaccccggggtgacgtcacgcgcccacgactcgccccgcctgtctctgttagtgctctccagcccgctccccgcc

SEQ ID NO: 115414 - DNA, 122 bp, Homo sapiens
gagcgccccaggctgttgctgggcacacaggtgtacttccccgagtcctccggcttcacccggaagatgatcagggtcccatcgattaggatgcgcaccctcagcttcaggtcgctgcaaag

SEQ ID NO: 115415 - DNA, 122 bp, Homo sapiens
cacagccgtaggtcttattggcctgtagcatgtgggctgcgtctttggctgctcccttgccgatgaggtggctgtacttgtccttgtagtcgctggcagggctcaccaccacaggcccctgc

SEQ ID NO: 115416 - DNA, 122 bp, Homo sapiens
ccttaaactcacgtgacgaagatcacggagcagtttagtccaaatccgggggtaacgcttcggggttctgtcggcccctgtaagcttctctcctcttctcactgaagctcttccgggaaaaa

SEQ ID NO: 115417 - DNA, 122 bp, Homo sapiens
cggccgccgctttgccaaggaccggctcacgggtgaggttgtctgacccctccagcgtcacgcccgactctgaccccgtctcctcatttcttagctttctgctccaactcaaggaccccttt

SEQ ID NO: 115418 - DNA, 122 bp, Homo sapiens
ggaagaggcagtgttgtttctccaagtgccaaccttgagtagatgcatctctctcttctccgagtgacttaagaaccaacctaacagttgcacatctgttgacaattaatttaaaataacga

SEQ ID NO: 115419 - DNA, 122 bp, Homo sapiens
cggcttcggaggagggacagtggccggggcggggcgcggccaggggcggggcggtgtcggcgcccgaggtcctgcgtgtggcactgccggggagcccaggcaggagcgacttttgcggtgaa

SEQ ID NO: 115420 - DNA, 122 bp, Homo sapiens
cccccgcccccgcttctgtctccctagggactggtgattgcagctggaagtgcccatgaccgagctggcgtcctccgggggcgggtcccctgcgggggacggggaggagggtctgggggacg

SEQ ID NO: 115421 - DNA, 122 bp, Homo sapiens
gagggtgcctaactgggcctcctggggggtccagctgtgattccccctccccaaacctcacgccaggcctggaggctccacaggggctatggaggcaacagccaccctactcacagtgctgg

SEQ ID NO: 115422 - DNA, 122 bp, Homo sapiens
actcctcttttgtgaatcactacaatagtccagccatgtactctgccagctcttctgttgcgtctcagggatttccctctacttgtggtcattatgctatgtcaactgtttctaatgccgcg

SEQ ID NO: 115423 - DNA, 122 bp, Homo sapiens
ttcttcctaaatatagagtttgatacaagccatacgctggctgcctccgaaaggcttgaccgtgcggaaagcaggctcaaatgtcagccgggaggtggctatggtatcttacttgccctcct

SEQ ID NO: 115424 - DNA, 122 bp, Homo sapiens
agggcagtgaccgagtacaccttgcagggaggtaagcttgtctccaaaaccacgaggtggcgggatctttgccggggaatgggatttgcaaggtttgactggagtacgttagaaagaaaaac

SEQ ID NO: 115425 - DNA, 122 bp, Homo sapiens
cttattacatttttaaaacactgtatgattaacgcggaaaccctttcttcggcactttctcgccactggaatcgcgtcagtttctcaaagttccaaaataacctttcccgggcacggattgg

SEQ ID NO: 115426 - DNA, 122 bp, Homo sapiens
ttccattccccttaccactctttgggtgtaggcagggcctgctggtagtgctgggaaagccgaccatccttctttgagcaagtccaatagctgctgctgctagttctgtcccaccataggca

SEQ ID NO: 115427 - DNA, 122 bp, Homo sapiens
ctccaggtgctccctgcgaacccccctcccatcagaatcccccaaatcacatcctggtaccggctgaaggctgctccttggtctcaatcaataagcaatgatttcttcaagatcctactgta

SEQ ID NO: 115428 - DNA, 122 bp, Homo sapiens
tcgatgtcccggcgcggcgtttccgaagctgtttcttttcctaggttaagcttacaccgccgcttttggccacacaggtctttctcgtactcaatctcttccctcctcctgccttatcacca

SEQ ID NO: 115429 - DNA, 122 bp, Homo sapiens
aggctagtcccactcactcagcacaacacacacacacacacacacacatgtgcacgcatgcgcgtgcctgttaaccatcctgccctgttgccctagtcagctgacctttgcaacctgggaaa

SEQ ID NO: 115430 - DNA, 122 bp, Homo sapiens
cgagcctcccaccccagctttcaagacaggatttacgggtacacggtgtgaacaagacaacgcaaccccctttttacaaataaaaaaaaaatcaaacaagcccccaggcccgaagacgctca

SEQ ID NO: 115431 - DNA, 122 bp, Homo sapiens
agcttgcctttgtgattccatcaacgtgtgcatttcattagggtaccagtgtgtagcccacgtgccagggagccgtcttctcctgatgaaggtgtcggggttgcaatgagaatatttgagac

SEQ ID NO: 115432 - DNA, 122 bp, Homo sapiens
tgcaatgtggattttgctgaggatttttatcttcaaatagaaatacacacatttttgcagcgttgaaaaatgttacataaaatggtaaagcccttgttggttggcataatttttcttaaatc

SEQ ID NO: 115433 - DNA, 122 bp, Homo sapiens
gcaaacccctacttcatgtgctaacattcccagtattgatttaggaaaatacctcatcatcgttgtatgcaatcttgataggactgtcaatcaatgtgccttgtgttcacctaaccaaagca

SEQ ID NO: 115434 - DNA, 122 bp, Homo sapiens
cgggaggtcagggcgagtgttgtttgcatttcacagagcaggaagcttaggcacagacagcggctccccgaccctcgctcggcctctgctgagcagggaacggcctgaacgcgtccggccaa

SEQ ID NO: 115435 - DNA, 122 bp, Homo sapiens
gggagggtgtgggcgaggtgggccgtcctgggagctctggggacgcacattgtgggaggccgtgttgcctgagggccgagagatcgggtggtggagtcagacctgggttgggttccgtgcgg

SEQ ID NO: 115436 - DNA, 122 bp, Homo sapiens
gcgcagaccgggccccgggtcgggggtgtgggcgaccgcgctgaggggcccgagatgaggcgcgccgccgctccgggtacagggcgcgcggacgcagcgagacggcctcccgcccctctccc

SEQ ID NO: 115437 - DNA, 122 bp, Homo sapiens
cgcagttacagcctcaagaggcaaggcaggggagggagaaaagctggacctcttgagaaacgctcctccaacagattttccatggcctcgtgttggagaaggggcgcgggggaggagcgagg

SEQ ID NO: 115438 - DNA, 122 bp, Homo sapiens
ccgggcggggcaggcgggggcgcggcgagagccgcggagctttctttatgggtgggggggcgggggcggccgggctccgcctccgggggatcggggcgcgctccgccaatgggtagccgggc

SEQ ID NO: 115439 - DNA, 122 bp, Homo sapiens
aatggggggcttaatgcagaccgggcctgacacaggagcccacattcacactccgcaggacgcctcaacctcaccgtgtaacagacacacaccgcgcttcatgtgcaaactgaagccgtttc

SEQ ID NO: 115440 - DNA, 122 bp, Homo sapiens
acgactagaggctttgcgaggctgaggctgggcttcgggaggggattgccctgagaggtccgggaggacttgctgtggaattcaagcgaccgtgggccttgagggaaccggggggcaagaca

SEQ ID NO: 115441 - DNA, 122 bp, Homo sapiens
ttagtaaaaaaatacaatatttcagttaggaggaataagttcaagagatttattgtacaacgtggtgactgtagttaatgatgatgtatacttgaaaatgctaagaataaattttaagtgtt

SEQ ID NO: 115442 - DNA, 122 bp, Homo sapiens
ctctgtctccgcggaagcctctggagcctggagggggtgcctcaagggctcaggggtcttcgcagccctgtgccggtctttgaggggacgaggcgagagaatcctgtctgtgcgctgaaaac

SEQ ID NO: 115443 - DNA, 122 bp, Homo sapiens
gcaccctcactcctgcaaccaccaatcacccaagccacagcatggtcccagacccaccctcgccccttaggaaatggctttccaattgtgttttcacaggagcatggccactgggcaatgat

SEQ ID NO: 115444 - DNA, 122 bp, Homo sapiens
ctcccaggttcaagcaattcccctgcctcagcctcctgagtagctgggattacaggcacgcgtgaccacgcccagctaatttttgtaattttagtagaggcaggatttcaccatgttggtca

SEQ ID NO: 115445 - DNA, 122 bp, Homo sapiens
tcacaagttccttatgtgacccatcctgggcctcaacttactcatcctgggaacgggagacgattcacagaagaaagcatgcaagagcagcgtccaggctgaaagaactttggccacctggc

SEQ ID NO: 115446 - DNA, 122 bp, Homo sapiens
gcgcaggcaggccaatggagtggtgagcagccaggacgcctcagatactgaaagcgtggccgagtaattggcttggcaacgtgggcatggccagggaagacgcccggtaacggggacgtggc

SEQ ID NO: 115447 - DNA, 122 bp, Homo sapiens
ttactttgttttgtaaactttcccagaagatactcatcagtagccaaggagagattcactcgagtcatctgtcagctcctagtagacaggcaatccagtttctttcaagtttatgtcccaag

SEQ ID NO: 115448 - DNA, 122 bp, Homo sapiens
ccttttacagaagtgcacaaaggtgggtgtgagattcctggcacatggccaggtctccagcgccagcttccatctcctccttaaagttatccaagctgaagcatgtaccggtgcagcctgta

SEQ ID NO: 115449 - DNA, 122 bp, Homo sapiens
ttatgctcagcttgcactgcagcttccgacacaatgtaaggaatatctgtgctatgagagcgcgtgatcttttgaacttggcattgccattccgtcgtcaattgctggtccgtgattgaact

SEQ ID NO: 115450 - DNA, 122 bp, Homo sapiens
ctctgctggtttgttctgctccgggactctccaccagggagaaatccgagctggggacctcgcaccaccaggctccggcctaagcccgcgccttgcaagccgcccgtttcctacctcccgta

SEQ ID NO: 115451 - DNA, 122 bp, Homo sapiens
agtgggtgccaaggccgaggaggtgccgagagcgagcgagggctgctagcatgctgtcatcgctcaccgtgacttagaatgcgtaaccatctgggaatgcggtccagtaggtttcagcctta

SEQ ID NO: 115452 - DNA, 122 bp, Homo sapiens
cggggaggccacacagaggcagtcaccatgctgctgcagagaggtgtggacgtgaacacccgggacacggatggcttcagcccgctgctgctggccgtgcggggcaggtaatggagctaggg

SEQ ID NO: 115453 - DNA, 122 bp, Homo sapiens
gacagtgataacagagccaaatctctgtctatccaattgtctatcaaaacaggaactcaacggattggagcctactgggcttgagagccccgctgaggagtccggaggttgggacgcaacta

SEQ ID NO: 115454 - DNA, 122 bp, Homo sapiens
tccttcccagaggaaaagcaacgggggccaacggcacctctcgccccagctcccaccccacggcccccagagaaagaagaggagttataatccagctattttattggatgtgctttgcattc

SEQ ID NO: 115455 - DNA, 122 bp, Homo sapiens
gaaaaatattcccacctctatcacttcttagctgtgtgcccaggctccatcctgtgtgagcgggggtaagaattccctccagtcagcagagaatgcacctgtaacccagctgattcccaaca

SEQ ID NO: 115456 - DNA, 122 bp, Homo sapiens
gccagccctctctgggcccagggacgcacaggcaggcgggcgggcgggcgggcaggcgggcgggcctgagggagaggatgcttaaggtcagtacctgtggaggtttccatttgtctcccgct

SEQ ID NO: 115457 - DNA, 122 bp, Homo sapiens
aaaaaaaaaaaagagagagagaaactgaggcacaagacagtgacttgacctgtatgagaccgaccctatggctcaccagacctgtgttatgggcctaagctactctccagtgctctttccag

SEQ ID NO: 115458 - DNA, 122 bp, Homo sapiens
ggaggtggcaggaggaagctatggacaagagagcaaccggagggacagaaccgtgccaagcgcgtgtgtgactgcaaagccagcctctaggccaagtaaggcgctggaatgtggggcttgct

SEQ ID NO: 115459 - DNA, 122 bp, Homo sapiens
caggattgtttaggagatttggaggtagaaatatgatggattggatttgaattcacttagcgctgactaagataaattgtcactaaaatcataaggctgcatattttcacagtcaagcccat

SEQ ID NO: 115460 - DNA, 122 bp, Homo sapiens
agaggaatgtggatgaaataaaattgattatgagttgtggttgctggggaattggggtcacgggggttcattagaacctcctatcagatgtggttcagaagcctcagacctgggagctggct

SEQ ID NO: 115461 - DNA, 122 bp, Homo sapiens
agattgaatcttggccccagatacccaaacccacagaaatcagttataacaaacagcgcacgccatcactaggaatgtgcatccagtttgctgtgtgcctgttcgtttactcaagacattta

SEQ ID NO: 115462 - DNA, 122 bp, Homo sapiens
cattcagttcaatgcactttccaccacagcatcctgttttctcctggtaacattttaaatcgcctttgttgaggctcaatgcggggcagacattttgccatgatattagaagacgtatccac

SEQ ID NO: 115463 - DNA, 122 bp, Homo sapiens
gagtgacaacggccagagagtacgccttgttgcgtcactccacgaacgacggcggctggccggcaacattattagccgaacgcgccctgaaatctgatacacagttgtgccggcattatctc

SEQ ID NO: 115464 - DNA, 122 bp, Homo sapiens
gagcatggcagggggcccgtgtctgttgcaggcagcgcatgttggctctgagcccgcctccgccgcgctcaaggggttccacggatttcaaacaacgcatgcgtgtaaagcgtgtacagctc

SEQ ID NO: 115465 - DNA, 122 bp, Homo sapiens
atttctcccagtgcctgggacgttatctttcacagaaacagaaggtgctcatttaatattcgttgagagggcccatgtctactgagttcctgtgcaaggtattcaagaatcaacagcaaata

SEQ ID NO: 115466 - DNA, 122 bp, Homo sapiens
aacctaaacaactatcagtgcctggggacattgaaagctccctctagaacacctggacaccgagtgcccgtcactggaaggacgaagaggtaataagtgtggatccacacaataacgtggag

SEQ ID NO: 115467 - DNA, 122 bp, Homo sapiens
gaggtggagaaggaaggaggagcgtggtgggaccctcgccctgccctccccactctggagcgctgcctctcagcccaaccaagtgacagagacgagacaaccacaggaatagcagctgcgga

SEQ ID NO: 115468 - DNA, 122 bp, Homo sapiens
agtggggatgggaatcgagggttgggggcgtggggctgggaacggcagccttccccaacccgcagctgtacatgctccttggctcccgcctcagtgcgcatgtccactgggcgtcttctgct

SEQ ID NO: 115469 - DNA, 122 bp, Homo sapiens
gagccttggcagttgtgcggctgtggactcacacatgtggcaggaggagatgcctgcagtcggcgggccccttgtgcttcccgtttgctgagctgcggtctctccagtcggtgggccccgtg

SEQ ID NO: 115470 - DNA, 122 bp, Homo sapiens
actcctcctccttcccagcgaacatcccttccccgccctgttcccactttttggccccggcgccagaatgtttgagccgaaggggcagaacgcctaaaagccgtgtttgtttatttatttat

SEQ ID NO: 115471 - DNA, 122 bp, Homo sapiens
ccagcttgcagggagcttaggttctgacggcgtcggaggacaacacgctctggacgagcgcggcgcccaagggtcagcggcagcagcgagcagggggcacgggatgcagggaggctcttcgg

SEQ ID NO: 115472 - DNA, 122 bp, Homo sapiens
ccgtctgagtgcagatgcaggtggcttggggctgagtcggggggtccttgctggttgttgcggctgagggggcccctgggctcgggcggggcgcgcagccgccacctgccccagcaggagga

SEQ ID NO: 115473 - DNA, 122 bp, Homo sapiens
aaggggcaaaagaacagatctctcaagccctttaaatcaatagcagtgtcaaaactgagacgtatttatttaaaaagaaaacatgagtttttgcctgactacagaataaaatactaaaattt

SEQ ID NO: 115474 - DNA, 122 bp, Homo sapiens
tggcagtttgcccgcgggtgtgtgaagggagacagtgtggaggccacagggtactcgccacgatgagcagcaccttagctaagatcgcggagatagaagcagaggtaatggacgcagctggc

SEQ ID NO: 115475 - DNA, 122 bp, Homo sapiens
gaagaccagcgtcaggagcacgaaggccgtgttccaggtccagatgaacgggttcacggccgagatacccaggaacatgaagatgatggtctcggcgctgctggccagcatcttcatggtgt

SEQ ID NO: 115476 - DNA, 122 bp, Homo sapiens
aaaaaggaaaaactgcggccgcgatcagagcctgaaagtgtgagaaggcggcgccagcgacgccagtatttatattagggggcgtggcctggtgacatcacagctggccgggcagccgcgcg

SEQ ID NO: 115477 - DNA, 122 bp, Homo sapiens
cttttgtttcctaaagccaggaatacattttaaattgttttccaccaggattaaaggtcacgtaataggttgcagtttaccaaaaaagtgtgcaagtgtcccagagctgatctgtctgttga

SEQ ID NO: 115478 - DNA, 122 bp, Homo sapiens
catcaccacgggtgccgtcctgggcactggggtgatgaccctgagggatgccagtgtgggcgggtgcgtgtgggcgtcccacaggtcgtccgtgtgtgcacgccgtcgcctgccctcccggc

SEQ ID NO: 115479 - DNA, 122 bp, Homo sapiens
cagtctgtgtgcctgtccctgtcgcgtcccagtctgtgtctgagtgtctgtttagctggtcgctgcttttgctgccaagcgggtggctctagctgctgtggagggagaggtaggataggggt

SEQ ID NO: 115480 - DNA, 122 bp, Homo sapiens
cacagccaactgcttctggaccgcctgaaaggcaacctcgcccgccgcggtggtgtggggcgggcatcccttgagactgtgctctggaggcctggagaaacagctttctatcctcagcactg

SEQ ID NO: 115481 - DNA, 122 bp, Homo sapiens
tggttggctggaaaacagtgagaagaggggaaatgggaatgctgtcgcccccttcccccccgcccactccagagtggtgggagaattaaattacagggaggctggagagtctcaatgacttg

SEQ ID NO: 115482 - DNA, 122 bp, Homo sapiens
ctctcctccaaccggccaaaccccgcctggtcccgccgccggtggctgctgctccctcgccgtcttcctgccgagcagccgctggcgtcttcttccactgatctgctcctctccacgtccgg

SEQ ID NO: 115483 - DNA, 122 bp, Homo sapiens
cttactgttattccctacactgttagcttcatagaacaaatcctaactgctgaactacttcgaatatagttgtctaacatcattgtactgttcttagatttgcacattgaccacatctagta

SEQ ID NO: 115484 - DNA, 122 bp, Homo sapiens
gcggtcggggaccagctcagcctcacggaccgggtctcgccccccgccgaggggcagtcacgccctgaatgtcacacacagcccccaggcccgtccgcttaggagactctccttcgggcttt

SEQ ID NO: 115485 - DNA, 122 bp, Homo sapiens
ggaaaagtcttcctgtagcatggtaacaagtcatccagactcaagttggttataacccagcgagaacctgccctcacagatacaggaactgggaatgagaaaagggttttgcttcagcctgg

SEQ ID NO: 115486 - DNA, 122 bp, Homo sapiens
ccttagagaacttttaagaaacttgccatacgactaggaagtggagcagctgcggtttcacgcaggtcatttgacttaggagccgcagcgttcaaccacgtctgactacctccattcttcag

SEQ ID NO: 115487 - DNA, 122 bp, Homo sapiens
ggcaaaagcctcagccaagccaacggcagataaaggaatccgaggctgatcgccaacgaccggaggttaaagacacaggaagagttcagaagttcaggaaaataaaagcagattaccattca

SEQ ID NO: 115488 - DNA, 122 bp, Homo sapiens
tctacatctggcattgatgcctccaagcttttggattgtggtgctctgggaactaacacccggaagtagtcagggagttatagcctcctttccatgttcacaattcaggagtacctgaatgt

SEQ ID NO: 115489 - DNA, 122 bp, Homo sapiens
tggaagtgtgtcatatcctcagggtgtgccaggcagggaggtagaagggtgggtgaggctcgtagacttgcacatggtgattggcagggccccagccacgtgtccatgtgtcatctacagtg

SEQ ID NO: 115490 - DNA, 122 bp, Homo sapiens
aaaatccgggaggtggataggatgcttgggccgagagggctcgaagcgagagcagggacgcgccctgcgaaaagggcgctctttgcgcgccgggaccaggcctttcctcgctgccaaagcgg

SEQ ID NO: 115491 - DNA, 122 bp, Homo sapiens
agtcctaggtttctcttgtcctgataggtctagcttcacacgagcaggattttgcctttccggcggcactaggcttccgcctcaccgcagtggggtttttccagcctaccttgtgcagctgc

SEQ ID NO: 115492 - DNA, 122 bp, Homo sapiens
agtgcgcggaagcagcgcacaagtggcagaaagaggagacagggagcagaggaagggtcgcgctaagagagaggatcaggtgaggtccaagcccgacacagtccctgtgcacactgccggtc

SEQ ID NO: 115493 - DNA, 122 bp, Homo sapiens
caatagatgatctacccagcatgtccaggaatcagattttgttaaagcaatcctgaaacacgtagtgaggaaatgctaacaagatcgtagctgactttgcctaacacttcccaggtttaggc

SEQ ID NO: 115494 - DNA, 122 bp, Homo sapiens
gaacagcctggctgaaaaatcaatgctgactatgaacaaaacctctcctttggggcccggcgagcccaccctggcaaggacgggttccaccgcggtctccaccgcgcagcggcgttggggcg

SEQ ID NO: 115495 - DNA, 122 bp, Homo sapiens
cagctgggagccttgggcccccagctggctgagcctagcgcagtggcaggcggtgaggggcgtgggggcaggccaggagccgagctgaggtgcccaggggctgttgaccgagggacaatgcc

SEQ ID NO: 115496 - DNA, 122 bp, Homo sapiens
tctgccacccccgagacagcaaaaccaacccctcctcttcctcctccttctcggcctactcgatgtgaagatgaagaggatgaacacctttgtgatgatccacttcatgaacagtaaacgtg

SEQ ID NO: 115497 - DNA, 122 bp, Homo sapiens
gctggactcgcggagaagcttgggtacctgagccgcggtcccgggtgacaccctcagtgacgccaggcgcgttccttcctcttcctctctcctctccggccccgccttcccttccctccgcc

SEQ ID NO: 115498 - DNA, 122 bp, Homo sapiens
ttctcttgtgtctcaccagctttccacctttcttactgaggaataatccagagctaattgcggtgctctgatgagggtgagatcccatttttgctgaggcgatgtggcagaaactgtatttt

SEQ ID NO: 115499 - DNA, 122 bp, Homo sapiens
actctcaataaaatggagaatgtctgccctgctcacttcgctgggtcctcggctcctccacgtaaccagcgctgtcaccttggcaagttacttaacgtctccgagcctcagtctcctcctct

SEQ ID NO: 115500 - DNA, 122 bp, Homo sapiens
tctctccaagaatgcttttatacttccacttacacctttggggattttccctattcagctcgcagtgtgcaaacagtatgcaaaaaccatacaggtagcacactgttggagactcacttaaa

SEQ ID NO: 115501 - DNA, 122 bp, Homo sapiens
cggccctggcggcgggagtcctgggggcgccgcccccgagcccggcctcttggacatctgcgggaatcacagtacctggcgtctgtccagcactggccagccggctggggcgcacctcgaac

SEQ ID NO: 115502 - DNA, 122 bp, Homo sapiens
ttcgcaactgaaagtcgctactcgagccttgccaactggggagactatgcccatgatatccgcggcctcggaccccggaccctccaggccctcgcgccccacccccgaccagcctcgggcca

SEQ ID NO: 115503 - DNA, 122 bp, Homo sapiens
gcggtggcgcgcggcgggcgcgagtcatcaattatgcaaggactcgggcggtgcggggggcgggcgcggggagcgctccaagatggcgcccaccgcagtcccgcccgccgcatcctcggcgc

SEQ ID NO: 115504 - DNA, 122 bp, Homo sapiens
gctctgccaggcagttctgaaacgctgtcctttgaagcagggagtttattttggggccaccgcatgaccaacgttgacaagccaaactataagatgttatacatctcagatttcctgtttgg

SEQ ID NO: 115505 - DNA, 122 bp, Homo sapiens
gtggctggggatactgattttactcagaccagcctgcagctctagagtgtgggtagagagcggggagtgggggttgggagagggggaggaaagagagagaggagagaggacgggcttggatg

SEQ ID NO: 115506 - DNA, 122 bp, Homo sapiens
gggccctccaggtgcaacacctgacaacatccatcggcaacttcgtccatgaacacatcacgccggggactcaagcacgttaaactgctccaattggtagctaaacgagagattgcaaaaca

SEQ ID NO: 115507 - DNA, 122 bp, Homo sapiens
cctgtgtcttgtgtcccttcaccactaccagcccggcacgtcctttgcccattctcactccgacactgacctgagatggggctgccccacacccgggcacacacccgggcacgcacctggga

SEQ ID NO: 115508 - DNA, 122 bp, Homo sapiens
tgttcccaggaaaagggcatgataactgcttaagtatccacgtctctcatttaagactttcgaagttccttttctgtgattccatgattaccacacaacctctagttattaacttggcttcc

SEQ ID NO: 115509 - DNA, 122 bp, Homo sapiens
ttgcccaggggacgcccagtctcaaggtcgtcgaccaggaagggccgcgttaagatgctgcgcttcccacaactgttctctaccacctcatggccaggggccgctgcgggctgtgggtctgc

SEQ ID NO: 115510 - DNA, 122 bp, Homo sapiens
ttattactattatttattatttctactattcttttaaaaaattattatcgttacacgcagcggttttaggcactatgaagtgtttattgcctcggggctgggaacctttgcgcccttcttca

SEQ ID NO: 115511 - DNA, 122 bp, Homo sapiens
ccaagtctccagggagctcgcaggactgcgttccttccagaggctccaggggagggttcacgtcctcgcctcttcccgctctggaggccgcgtctcttccccggcggaccgtcctctacctg

SEQ ID NO: 115512 - DNA, 122 bp, Homo sapiens
acatggagacataacacaaaggatagtcagcaaatccatgtcttacattataaatgtaaccgtgaaacagtaaaagaacgaacataactaactccatttttgtttaaggggcctttacccat

SEQ ID NO: 115513 - DNA, 122 bp, Homo sapiens
ccgtaggcatgatgtcaaaactgaacttgtgctggtagtctggggcatagtctggcagctcgggggcctgtttcccggcgcccgccttagagatctgattgcggttcctggggttggtgcag

SEQ ID NO: 115514 - DNA, 122 bp, Homo sapiens
gagtccactcatcaccctttcccccaaacagtcacctccacaagcacaacacaccacacacgcgcacacgttttcttattgccaaaaagggtggagggaaaggacaggaagtttttttaagt

SEQ ID NO: 115515 - DNA, 122 bp, Homo sapiens
cctgtggacaacattgtcttcaatatggctgctggctctgccccgatgcagctccaccttcgtgctaccatccgcatgtgagtggtaaggaggcagaagcatcactgggttcagtctctgcc

SEQ ID NO: 115516 - DNA, 122 bp, Homo sapiens
agcctctgtgcagcagcttgaattgaaccctcccagcaccctcactgttgccgaagggctcgtcagtcacttggttcctctgtctgttcagtggagctgatgatcgctttcatctcacactc

SEQ ID NO: 115517 - DNA, 122 bp, Homo sapiens
ctgcggcgcgcgcggggtgcttgtcccaggctgggtcggggccaggagagaccccgcaggcggaggcaggcgaggggaggaggaggagggtgggggtaggagggggaggtggagagggagga

SEQ ID NO: 115518 - DNA, 122 bp, Homo sapiens
agagaatgagtatagatagtgttgcttcagaagcaaagtgagagggacccaagaggaaggcgaaaatgagagagacagagcaaggtccattgatcaactacttttcctacttggagaatatc

SEQ ID NO: 115519 - DNA, 122 bp, Homo sapiens
cagaacagtccaagcctacacagctttgctcccgaagtgtggcacaggctaaacgacaggcgagaaagaaacaatcgatggcccttattgatgcagtcagaatgctcctgagagtccataac

SEQ ID NO: 115520 - DNA, 122 bp, Homo sapiens
cctattagaaagcgtaacccccgagccaggacttattttgccccaccttctagaaaataccgtgacttcatgttgaaggtgccaagaacaacttcagctctccagtctctgaggaaatgttt

SEQ ID NO: 115521 - DNA, 122 bp, Homo sapiens
cgagggggtgtggctggcggccctgggactagggcgcaggcgagcggaggactgtgtgcccgtgtccgagctggggctgcctctgggcgaaaactctaccgacaggcggcacgcattccgcg

SEQ ID NO: 115522 - DNA, 122 bp, Homo sapiens
attacccaggtgtgtgtgatacacagagcatgtttgctgtgacatcctctagaatgtgaccggtgtgtgtcctgggatgcggtgtgcataatgctgcgtgtggggtgtgctatgtgtgctgt

SEQ ID NO: 115523 - DNA, 122 bp, Homo sapiens
cggtagggcgccacggagaggaaccgctctaggcacgtaaggcctcgtgaggttgcgtcgcgcgcggagcactctgggacttgtagttctggagatggagcgagctgtgccgctcgcggtgc

SEQ ID NO: 115524 - DNA, 122 bp, Homo sapiens
tgacattgtgaaacaggtccaaccatgacactctccagcttagaacctgctggattttcccgcagcccaccaggccctggaggcccagccccacaggaagccaccctctataaacactgccg

SEQ ID NO: 115525 - DNA, 122 bp, Homo sapiens
ctgcgcctgaagtttgggtggaggtcttggtccccaggcccctccgccgtggggaggtgacggcctgtaagtagtaaaaattaagtcaatattagtactaacccatggcgggccgcgcttcc

SEQ ID NO: 115526 - DNA, 122 bp, Homo sapiens
agtatgagttttctctactctgtgaagcttttctgcctctccacgtcaactcctgtagaacgtagcctccctagtactcattttgtactcagccatcatcttgcctattttagggaatctct

SEQ ID NO: 115527 - DNA, 122 bp, Homo sapiens
cggcacctaactcggaacggtcacaggctgagatgatattactgtgtgaagtgcgcagagcggtgttgggcacatggtcatcggaactatgttcgttatttttataagtatctttaagtggg

SEQ ID NO: 115528 - DNA, 122 bp, Homo sapiens
cctgccggccactcagtacaactgatcttgggcaaccctgggctgagaagagcctggaagcggtttcagcaccaagttcctctttacctaaaagggcagactctgtgactggaactcacgga

SEQ ID NO: 115529 - DNA, 122 bp, Homo sapiens
aaaccaaagaccactccgaacaaagtgaggatgtggatgctcttgctgggtccgctgttccgcaggagggaaagaaagggtagctgcactgaccccactgtccccatatacaagggttgggg

SEQ ID NO: 115530 - DNA, 122 bp, Homo sapiens
accctcgccggaggcccgaggcttccctgcagcccgtgggcactcactggagcgggtcggcgtgcttctgcaggaaggagatggctgctggggcattgtaggtaatgtacttatggatgaac

SEQ ID NO: 115531 - DNA, 122 bp, Homo sapiens
gcggggctgagcggggtccgggctgctctcaacccagcgagtcgctcccaccacggggtccggtttctccgtcgtggtctccgaaggtctttgaatggctccaaggttggggaaatgtgggg

SEQ ID NO: 115532 - DNA, 122 bp, Homo sapiens
caccgtgcccagcctgaagcacagttcttaaagcagttcacctcccttgggaactgttagcgatgcagattctcaggccccatccagacctgcagaatcagaaactctgggattgggcctca

SEQ ID NO: 115533 - DNA, 122 bp, Homo sapiens
attcaataagtagtttatggacattccacgggtagatgatagaggtacctacggagctcacggtcaggtaatgtagaaagagaaagaagcattatacaaccaacataaatacaatgcagaat

SEQ ID NO: 115534 - DNA, 122 bp, Homo sapiens
gtccaaaccactcccaccctgatcgcccccttctgctttgaaggcgctgcctacggtttgcgcaggatgtgcaagctgttccgtgcctccgaacctttgtccctgccattccttctgccaga

SEQ ID NO: 115535 - DNA, 122 bp, Homo sapiens
ggcaccttgtaattaggtcactcgtaggtggaggagcgtgtacctaccgggggagtgctgcgcagtgcacctgacttccgcggcacacacccgtccccggacctaggtgtctcgtcgggcgc

SEQ ID NO: 115536 - DNA, 122 bp, Homo sapiens
tttctgaggcagcttcttcgttgccgtttgcctggcggtttgcagagcgcttctcgcatacgctcgcttaatcctgggtgtgtcatagcaacgatcaggaaacttgggttttcgaagcatct

SEQ ID NO: 115537 - DNA, 122 bp, Homo sapiens
gccaaaggtggccattttgactaatgtcaacggtttttcggttttttttgtttttttttgcggtgccctttccggaagtcattcaggatgccatattgactaagggcaagtggtacttcctg

SEQ ID NO: 115538 - DNA, 122 bp, Homo sapiens
gtcagacttttctccccgaggcctcccaactggaaaaagcaggctggctttaaaaagcaacgtgatagtaaaacaagaatttctcaccacaagatctggattcaagttctgggcctgcccct

SEQ ID NO: 115539 - DNA, 122 bp, Homo sapiens
ctgggccgagtttgaggagccgagggcacccaggggcggtgcggccggcagagtgggctccggggacggcccgggctggcgctgagcggccgtcgaggacccacaggctcgtccgctcctgg

SEQ ID NO: 115540 - DNA, 122 bp, Homo sapiens
cccggccggaggcaggccgggactctggtgggtctaggcgcggatcggacccaagcaggtcggcggcggcggcaggagagcggccgggcgtcagctcctcgacccccgtgtcgggctagtcc

SEQ ID NO: 115541 - DNA, 122 bp, Homo sapiens
gagaccgaggctgtggtcgccatggaaacgcggctagaggcggggcctcgactctggtcccgcaccctctacccccacccaccgccccggctagggagccgcgcatgcgcccctcagaccct

SEQ ID NO: 115542 - DNA, 122 bp, Homo sapiens
catccaccactgccagcacctcaataatatctcccacaaagagcggcagttcttctgatacgctagggcagaagtcaaaaatggctcgaaccactgagccagcctccatgttttataacctg

SEQ ID NO: 115543 - DNA, 122 bp, Homo sapiens
tgcatgcaggactgagggagctgcctccaaccctccccactcctgctctccgggggttggcggagaagcttccaagggctgtgcgcaaaggcaggaagtccaagatccttttaatgagttta

SEQ ID NO: 115544 - DNA, 122 bp, Homo sapiens
aggaatgaaaagccagctccgagccttctgtgtgctgagatcgaactccacagtgaggatcgttctgtttggagaggacaccgcgatggacgtcaataaaacgtcaacgcttccagtcaatt

SEQ ID NO: 115545 - DNA, 122 bp, Homo sapiens
ccctggaccgtgtatctggggaagctgtgcccagaggggcaggatccgcgtggttgatgccgagcagcctgggatctccgatgaggcctagcgtctgctcatacccagatgcacgtactgcg

SEQ ID NO: 115546 - DNA, 122 bp, Homo sapiens
aaattatctctataaacagatgacatgatcttatacacggaagaacctaaaaagtacacacgtgcatgcacacacacatacacatacacaatagagctaataagtgaattcagcaaagttgc

SEQ ID NO: 115547 - DNA, 122 bp, Homo sapiens
tctttcaagagcatcttatctgaattactatagtactaaagaatgtctaggctgggcccccgtggctcactcctggaatgctaacactttgggaagctgaggagggaggattgctggaggcc

SEQ ID NO: 115548 - DNA, 122 bp, Homo sapiens
gtgctcggcgtctgctgcagggttccccaacctccgcaccatcgaccacgcggcccgggtcgctttttgctgcgaggagctgccctgtacattgtaggatgtggaacagcttgcctggctcc

SEQ ID NO: 115549 - DNA, 122 bp, Homo sapiens
gctatgaagagagggtactcatgcttgtatgcctgaaaacaaagactgtaaaaaccacaacgttgcacaaagaccatcacgaccttatacaaaacctctgcaaggatgtctgcccagaaact

SEQ ID NO: 115550 - DNA, 122 bp, Homo sapiens
atgtcacagcctgcacctgaaagcgtcacatgggagagaacttgcatcctcaatgaatggcgttccaaaaaagtgcaactgcatcaagcatcagacaagccattctgagctcagtctttgca

SEQ ID NO: 115551 - DNA, 122 bp, Homo sapiens
gctcaaggggcccgatgggatccatgtggtgcacggcagcacgggcacgctgctggccaccgacctcaacagcctgcccgaggaagaccagaagggcctgggccgctcgctggagacgctga

SEQ ID NO: 115552 - DNA, 122 bp, Homo sapiens
tgtccgtggtgctgagaggtggggaggccagcgtggcggcggcgctgggcggaatgtgggcgagacatctccgcaaggcttggcggtccttccccacggccctcatcctctcattgccacca

SEQ ID NO: 115553 - DNA, 122 bp, Homo sapiens
tcgggaggcgggcagaagcctggagacgctccaggggcagtgaaaaatggtggcgttttccggaagatcgagggtgccctctggcgaggcgaggccgccagtgaaggagctcggctggtcgg

SEQ ID NO: 115554 - DNA, 122 bp, Homo sapiens
ccattatctgatgtacctttagccagcgcgtccttatcttgacagtgggcagaacacacacgtttgtaggtgggcttgccagcaaggaatgctgggagagacgggcccagggcaggaggccg

SEQ ID NO: 115555 - DNA, 122 bp, Homo sapiens
aagtgcggtgagcaagtatcagggttcggctgctttggaggcgcagcggttgcggcgggccggcgggcccggggaagcgggcggtggccgctcagagaataccttccttccggcaggagacc

SEQ ID NO: 115556 - DNA, 122 bp, Homo sapiens
tgatcagcttgcagggtcagtgttcagtagcccttttgcttattctctgtgagagcaatgcgcatgagctgcttctagtctgccatcttggcccccctaacctaacccatttttagatgtta

SEQ ID NO: 115557 - DNA, 122 bp, Homo sapiens
tccttagctgcacctgccttgctatattatttgtgcatcccccttctgtggtttctggttcgtttctagcctctccccacaaccacccctttgcttttatctgttctgcgaggcttcccctg

SEQ ID NO: 115558 - DNA, 122 bp, Homo sapiens
cgtaccttgatgctcacatgccctggtttccccaccatgggtatacaagtaagctcaggtcgttctaccaaaacccaaacagtgagtacccaaagccctcatccagccctgctcctgcctct

SEQ ID NO: 115559 - DNA, 122 bp, Homo sapiens
tggccaagagaatggcttttgagtcaggggtggtgaaagtgtggtattgagagaattcttcgcgcttagtgttctctagtttgatggtgcccttgaaatgcatgcctgccttataccttcat

SEQ ID NO: 115560 - DNA, 122 bp, Homo sapiens
gcacccctcctctctcacggcggtctgttccgggtcccgctcctgcacgagcaaccagcgcgacagctcgtccccgccccgtaatctcccggctattcggggcccttcgccgagatttctcc

SEQ ID NO: 115561 - DNA, 122 bp, Homo sapiens
ttctggtttattccagcagcctgtgcggagctatgaagcctgaccacacagtggtgctgacgcccttcaagtgacacggggcagctccacagcgctgctcctggggacagtgtgaaggaggc

SEQ ID NO: 115562 - DNA, 122 bp, Homo sapiens
ccaagccctgtgccggttcccggagctggcgctgcagcgagtgcgcttctgccgcatggacgtggctgttctgagctactgcgtgaggtgctgccctgctggacaggcactgcggctgatca

SEQ ID NO: 115563 - DNA, 122 bp, Homo sapiens
gagggaggcgctgactcagtttccatactccaggaaagcagctcctcgccttgctgagcgcgagagtccctcgcggtcccgacccctctctagccaccagattcccagagaatcctttgaga

SEQ ID NO: 115564 - DNA, 122 bp, Homo sapiens
tctcagagaaaattcactcagagttcagtgtccaggtgacccaagctctgaatgcagtaacgtgcacggggagatgaggatgtcaccatgagcaagcctcccagacagcatccgggagcaac

SEQ ID NO: 115565 - DNA, 122 bp, Homo sapiens
aaggtccgggctcagaacttgggactgccttgggtcaggcctcggctcccccacttgccccgtaccttgggccagcgagcccctcgcccaccccgacccggcttctgttgaaatgcccacct

SEQ ID NO: 115566 - DNA, 122 bp, Homo sapiens
agggagacgcccaccgcccttccattgattggccacgacgggaggaagtcggcctgggtgcggccccccggctcttcgcgcgcagtcccttagggggcgcctggaagcccggcgcatgcgcc

SEQ ID NO: 115567 - DNA, 122 bp, Homo sapiens
tgtggtccaccctgacacactgtctcacctgtgacctcatttctgagagctgcagggaggcgcttcctcagttggactccacttcctctccggggttttctgtgggtgttataagtgactct

SEQ ID NO: 115568 - DNA, 122 bp, Homo sapiens
cctgctcaggtggtgcgtgcccactgcccacttgtgttagaaatcacatcatctcctggccggccatggaatccagcactgtctgtcagctctggggaaagagggggaagggtgggatttgg

SEQ ID NO: 115569 - DNA, 122 bp, Homo sapiens
agagttcattgtctgcctactcctcatcttgaatagtgtttgcttaaggctttgtgctggcgtgaggttgtcctgctgtagacaccaggcccgtcgtcggtgcagagcgcttcctacacagg

SEQ ID NO: 115570 - DNA, 122 bp, Homo sapiens
cgggatgcccgggtcggggagtgcagctttgatctggcaggccggcctgaagaacaaagccggtctcctggtccctcctcggctgtgcccagctgcactcactctgaagctgaatcttggca

SEQ ID NO: 115571 - DNA, 122 bp, Homo sapiens
aactttcctggatccaaacaacagacgttgaccctcctagtgagatcccaggtcacaaaccgtggagcggctccagcctgactggcaagtgtggcttgcaaaacgcggaaaaccgagacacg

SEQ ID NO: 115572 - DNA, 122 bp, Homo sapiens
gtctggggtgggctgtcagcacgtcgtgtggtcaggtgtcaggacaagcgggcgtgagcgcgtggaggtgcatctgcctctgccctggagaacggatgtgctacagctgtgcgcggcgtgat

SEQ ID NO: 115573 - DNA, 122 bp, Homo sapiens
gtttttactctatctactactggggcctggtttctagcaggcctgtaactaagccagatccggcctatgtaatgctgtttgtaatgagaaatctaaacagggaatggcagtgaggcatggca

SEQ ID NO: 115574 - DNA, 122 bp, Homo sapiens
acctgtgcagagggggcagacctgttagatgtctcccaggtcttgagggggttgtatgcacggccatatctttgtcaccggttgcccggtgcgcatcaggacccatgtgctctcaggaagcc

SEQ ID NO: 115575 - DNA, 122 bp, Homo sapiens
ggcgggctcaggcgctggccgctacgccggcaaacaacctaactcccaagcgctcaggaccgaagtgtccctacgccgggcgccaccgcatttatacagcaaagcacgtcgcgcgccgctga

SEQ ID NO: 115576 - DNA, 122 bp, Homo sapiens
aggacgcggctgggacctgggggctctcagggtggggccttgggggatgaggctggggcccgcgggaaaccgggctggggcgaggaggctcgcaggacttcctgccacagaatgtttcgatg

SEQ ID NO: 115577 - DNA, 122 bp, Homo sapiens
ctgtggccccaggtcaggaggagcagctcttccatcagcagcaggcagccagcccagatgcgtagggaagacagctcccacttcgccaggccagagagcgcccgggggcagctctgttccag

SEQ ID NO: 115578 - DNA, 122 bp, Homo sapiens
gaggtggcctcgggaccgaataagcaaggagaaaatacagcttcttgccttggcacttcacgtaggacctgatgctcctggcgggctgtgattgaaagtaggtcttactgcccggccctctg

SEQ ID NO: 115579 - DNA, 122 bp, Homo sapiens
cacgagacctccctgcgaccccgccgggtaagcaccaccgcccgggcacagacgaggcaacggaggcctcgagaagaaaagcagtttcctcagcgtcatctggcaggtaacagagtggggcg

SEQ ID NO: 115580 - DNA, 122 bp, Homo sapiens
cgggaggggggaattgcagtattgccttagattttctagatttggtttggacgcaatattcgtcctgagggagtccctccaaggcctctcggagcgggcagcctctaggcatttgttcaagg

SEQ ID NO: 115581 - DNA, 122 bp, Homo sapiens
ggctgtgtgggccgggctgctaactggggctgtggagcaatctgccagccgagccccttccggagctgtgggttcctctgggtgtggggaagctgccctccacaacctcctcggcctatctt

SEQ ID NO: 115582 - DNA, 122 bp, Homo sapiens
tggaacatgagttgacccgttcattagggctcattaatctttgcagataatcaaaagccacgtcaagtaataagacgttctctggtgaagttgaggagccaatggttagacaagactagtcc

SEQ ID NO: 115583 - DNA, 122 bp, Homo sapiens
gcccaggtttcatattgtttaaacaacttgtgcagttaacgcaattatcacagagtcctgcggggacattcatcctcagcttacgaagatgaccagattaagaaattaaagtaagacaggca

SEQ ID NO: 115584 - DNA, 122 bp, Homo sapiens
ctggaaaaggagacaatacaattccagaaagtggactcatatttctaaggttaagattcccgtttattgcacctagaatagtgctatgcacagagtgggtgcttgagttgtcgttttttttt

SEQ ID NO: 115585 - DNA, 122 bp, Homo sapiens
gaccaacgaccgctcggtcctctgctgctcctgcctggcggttgctaggagccggggaagcgcaggcgcattgggaggggccgcgggcacgccgagcagcgaccactcggccttcccctgct

SEQ ID NO: 115586 - DNA, 122 bp, Homo sapiens
tgtctgcgggcactaggccccacgtgcgggttctctggagtctcccaagctgagcatcaccggacccagacccgtcacagccatgctgagcttacccgtgagtgaccttcccgaggaaggca

SEQ ID NO: 115587 - DNA, 122 bp, Homo sapiens
acctgcagtcctgccaagcccacctcttctcagcaagcggctcttcccgttgctcccctccggctggtctgacagtcactcactctccagggcatttgtgcccaggcagcaggagctgtgaa

SEQ ID NO: 115588 - DNA, 122 bp, Homo sapiens
tttccttatttattttgttatttcattttcgtcaacacggctcggcttggggacaggggtcgggggcaggccggttaccgcagaggtggaggccgcgcggcacctggcctggagagctcacc

SEQ ID NO: 115589 - DNA, 122 bp, Homo sapiens
aaccagacactgaaggagttcaaagtccagtctggggacaagccaagtgaggggcagcggcggcgcacggacctcaccgcgctggtggcccacaacgatgaccccaccgacaagatgtttgt

SEQ ID NO: 115590 - DNA, 122 bp, Homo sapiens
cagcttttcttgccctggaaggttctttgggtactaaccttctgtgtggtagacagagggcggccggggagaggaaggaaactaccaagagagagcagcagcagtcttgcctgtgctcccct

SEQ ID NO: 115591 - DNA, 122 bp, Homo sapiens
tcacccgtcacccagctccaggaagctcggggagggggggagagagagagaccgtccgttcgtttgtctcggagaatgtaagagaaaaaaagtctgcctggtaatccacaaaattcttctag

SEQ ID NO: 115592 - DNA, 122 bp, Homo sapiens
ttgaaggctctgtggtagcgtcgctctcccaggacacagagctgggccttttgggctgcgcgcacattcggtgtgaccccctctgtccctctcctctcgcataggggtcagcgctgcatgag

SEQ ID NO: 115593 - DNA, 122 bp, Homo sapiens
gtgttcctgccttgaggacttgagccagaaacggcatatgggagagccagggacagcacacgggagagccggggagggcacacgggagagccggggagggcacacgggagagccggggacgg

SEQ ID NO: 115594 - DNA, 122 bp, Homo sapiens
cagttccacgtgttagtgacggcgcccccaatgtccccaggtccggacaggccgagatgacgccgagccccctgttgctgctcctgctgccgccgctgctgctgggggccttcccgccggcc

SEQ ID NO: 115595 - DNA, 122 bp, Homo sapiens
gcccagcgcttccagcaccatgccggatccgatggttagagcagacgtcctttcttgttccggatctgaatggtgaagggtgattccttgccctcgaggagaatgctggctgcagggcttgt

SEQ ID NO: 115596 - DNA, 122 bp, Homo sapiens
ctgcgccgccgggagctcagggccggcgggcccgggataacggcgcctccgcggcgaacacgcctgggcactccattcggggctgtttactcccaactctcgcgagactgggcgaccgggcc

SEQ ID NO: 115597 - DNA, 122 bp, Homo sapiens
gccagtgtttactgaggggccgcttccatcacagacctgacagcacattcgagaaaagtgcgaggaaaacaggagttatttataaaaatgtaaagcagaagagaatactgggaccagtggca

SEQ ID NO: 115598 - DNA, 122 bp, Homo sapiens
agtactgaagagggtaagctcatcagaaaacaagctcaaaaagatctataggaagactcccggagttttacgcaagtaataagatgtgtatatgtaggattaaatgcacaaggtcaggcaaa

SEQ ID NO: 115599 - DNA, 122 bp, Homo sapiens
tttgcccaggcaggctctgctttagaaacagccctttgctttgcagaagcgtgccagcatcgtttctcatatggcgtgcccccatctaatgtgtggttcgtgacctggacacccagggagtg

SEQ ID NO: 115600 - DNA, 122 bp, Homo sapiens
tatataggaggagccggctgcgtcacatggcgtcaggggccatgcaaatgagtcctgtaccgggctttgtggcccagttaaaccacatcccctccctgaaccttaggctgggactgtaaaca

SEQ ID NO: 115601 - DNA, 122 bp, Homo sapiens
atgggcgatagcacgtactttacattgcatcacataggaatccacataatacctggttgacgcaacatcagtccaactgaccacaaagcaactaggggtttcagagggagtacacgtaaggg

SEQ ID NO: 115602 - DNA, 122 bp, Homo sapiens
gcctcctcctcctccttactgcccagttcatcgcctgtgaggggtggccagaggggtcctcggacaactcaacaagggaggtacagtgggccatctctgtccccaccctcactgtgtaaccc

SEQ ID NO: 115603 - DNA, 122 bp, Homo sapiens
caccccgcggcagcgccaggcccggggagaaacgtcatccccagggcgagttgcgggcagcggtgccccagggtggtgttaggagccagcagataaacagacgaacagacgtttgagggggt

SEQ ID NO: 115604 - DNA, 122 bp, Homo sapiens
cacgtcccaggtgtgtgtccgaccgtgtgtgtgagtgtgagagaagaaataaaaagcccccgtctcccaaaagccctggcaaaccagcccagctggaaaatcctaaatgcaggctcatcaga

SEQ ID NO: 115605 - DNA, 122 bp, Homo sapiens
gggcaccggtgtgaacccagactccacggccagcaccgtaactggagaccacacaggcaccggtgtgaactcagacgcaacggcaccctcctgggctgctccagccaccaccagaacccgtt

SEQ ID NO: 115606 - DNA, 122 bp, Homo sapiens
gccttcggcctgcagggaaggccctgatggttcagtgctttgcagacggtgcccttcgtccgcggccatctccccacggcgtgcaaggggagaagccggccccgatccccccacccccagct

SEQ ID NO: 115607 - DNA, 122 bp, Homo sapiens
cacgtcagcaggaggtcgcaagtcagcaccggccacgcccggcacagcagccacgccgctcgaaccacagcaggggctactcgccctcccaggccctcttcagagctggcctgagttgaagc

SEQ ID NO: 115608 - DNA, 122 bp, Homo sapiens
ggcagaggggcggaggggcggtccttccggaggttcttaggtccttcacttcctgtttgccggcacttcaaaatccgggtcaaagggtgtcgcttcggtctcttctccccggctgatcccag

SEQ ID NO: 115609 - DNA, 122 bp, Homo sapiens
cgcaactacagctcgccagcggggcacacagacaggcatgcaccaccactacccgtcgcccggatacactgaactggttttgaagcctgaactgcagagatcctaatatagcaacgcaggac

SEQ ID NO: 115610 - DNA, 122 bp, Homo sapiens
ttcccgccaccgccgaccattctgcagctgcagcgccagcagaattccccgatccgcggccgcttccgagcgccgccaaccgcttccgggttcaaaagcctccaagccgaatttcagcgccg

SEQ ID NO: 115611 - DNA, 122 bp, Homo sapiens
ttaaaggttttcctattctcgataaagcctgtgcgcactgtacggggagtgggggtgaagcgtgttctctacataggcaacacagccgcctaagtcacaaagtcagtggtcggccgcttcga

SEQ ID NO: 115612 - DNA, 122 bp, Homo sapiens
aagtatctcaataaagtgagtcacacaaatgttttggtttcctagtgcatataaaagttacgtttacaccatgctatagtttattaagtatacaatagcatcatatccaaaaaaatacctac

SEQ ID NO: 115613 - DNA, 122 bp, Homo sapiens
gggaagaggaagggggggaaggagcattaaatgttacgaaggccatgtaaggttattttccggtttgcagcattacaagcagcagtagggttaagtaacacagaaactgttacgctcttgca

SEQ ID NO: 115614 - DNA, 122 bp, Homo sapiens
cccccttgcctcccttcctgctggcttttagctaattgttcctggctcaagggactgccccgtcgaggccccgcataaatcaccagctttgccgggaaccgcgagcaatcgcgctaatggct

SEQ ID NO: 115615 - DNA, 122 bp, Homo sapiens
cttcctggcctcagcgtggggtggcccggccgcttctggaagacccctggcgctgtcccccgcctccccgggctgtcactgccgactcgggcctgcccatctcccgcaggggcgctcgggcc

SEQ ID NO: 115616 - DNA, 122 bp, Homo sapiens
ccggaagctcttcaactttactgtcgccagggagtcaaaaagcaaagcctccgcagcagacggggcggcagctgcattggccgggcagcctctcatcctggttgagtgcagtttcatctcct

SEQ ID NO: 115617 - DNA, 122 bp, Homo sapiens
cattggactctacccttatttttttctcctggtattttctcttctcattaaaatctctgacgctgctttgtcacagtttccactgacaacagggtctcatgctcattatatgctggctctga

SEQ ID NO: 115618 - DNA, 122 bp, Homo sapiens
gaacctgaagctattctcattgtaccaatgtggtaactgaggaccaaataaattgagtgccggtcgtaagtcatgtggtaactaatgacaatcaggagtatatcccaagcctcctgggtgct

SEQ ID NO: 115619 - DNA, 122 bp, Homo sapiens
ggggggcttggcctgatggtgggcggggccccgcccacagggccgaccccaatacaccagcgactcaaccttgatgccgctgtgtacgtgtggttactgctttcctgacgcccgggcagcgc

SEQ ID NO: 115620 - DNA, 122 bp, Homo sapiens
catgttgcccaggctggtatcgaactccggggctcaagcgatccgcccaccttggtctcccgcaatgctgggattactggcatgagccaatgcagctggccatatattaatattttctttgt

SEQ ID NO: 115621 - DNA, 122 bp, Homo sapiens
cataactacttctgataagggaaaatcgccacaagaaaatgtaatgaaactacattagaacgcaaggcagagaagtatttatactgactggaggtaggctgtgaggaattctcccattggct

SEQ ID NO: 115622 - DNA, 122 bp, Homo sapiens
gcgctgcgcagcggggctgaatgtttcccaagtgtttgaaactggtatttgggttttccacgttggacaagtgcggctcggcggccagcggagcgcgccccttcccgctgcccgctccgctc

SEQ ID NO: 115623 - DNA, 122 bp, Homo sapiens
gcaggaacaacaagaaagtctctcacttcaaaggggcgcccacttggtgacctgtaattacggaatttactgcggggtgaagcgctgtctggggcacacctgccgccctagcgcccccacgc

SEQ ID NO: 115624 - DNA, 122 bp, Homo sapiens
gtcacccagcacactgggggtgtggatgaaagcgtggctatcacacgcccatgagagcatcgaagtcagacatcactctagcaagcggctgccgtcacagaccaacaccacgtgctagcacg

SEQ ID NO: 115625 - DNA, 122 bp, Homo sapiens
tcctcctgccgctcctccctcgggccaattatgaaactctgggcactcttgacctcaccccgttagggcccgggaggggctccctagtataaagttcgcagcaccagacagttgagctcact

SEQ ID NO: 115626 - DNA, 122 bp, Homo sapiens
ctagacagtgggcttggactttgttctgctttctcctcctttagaggctcaccatcgtcccgtaaggcagggatgatttttgtcctactcacaggtgagaaaactaaagctcggagagggta

SEQ ID NO: 115627 - DNA, 122 bp, Homo sapiens
cacttgccagtctacatctactttatatgttcatttattgccttatgcaccagagagaaccgttcgggggctagaagccaagtcttcacgttttctgctgattttccgaacacctaccgccg

SEQ ID NO: 115628 - DNA, 122 bp, Homo sapiens
cagagtactaacagagctgagagaactctagcttttcaatccccaggctgtgatttccaacgtgaaaacaaactcatcttttaaaaaatactggcatttataccttaacactgacaaatctc

SEQ ID NO: 115629 - DNA, 122 bp, Homo sapiens
cctaggcagcacgagggcacttccggcgctgtctgatgacgtttatgcgcccaccggaagcgacgaagtcagacactggcttaatacagaacatcgccccgcttacagggtctcttgcaact

SEQ ID NO: 115630 - DNA, 122 bp, Homo sapiens
gtgacctcaggcaacttgctccgtctctctgggctcggtcgctgtcccagctggcttgagcgttgagcatgtcagtttcctggcacagtcctcggctggtctgagggggcatttggcggaaa

SEQ ID NO: 115631 - DNA, 122 bp, Homo sapiens
ctgtattttctaaacacttggttcctctttcccagtaaaatccctgccacctcttcaaaccgtagtgagtaagcagtccatcagaaagagctaattcttatcaggttccttgaatctagcaa

SEQ ID NO: 115632 - DNA, 122 bp, Homo sapiens
cctccatggtaaataacaagttttagagaatgcttcctcgaaggagttaatcataatgatcgctttccatgcaggtgttttactccctgaagaaatctgatcttattctaactggctagaag

SEQ ID NO: 115633 - DNA, 122 bp, Homo sapiens
tgcgaccagggcgcatctgtgccagtgcgtgtctgcgtgcgtggcctttgggtgactccacgcccgcaactgtctccgactgtgtgggcgcgtgtgtggcaggtacccaggagcaggacagg

SEQ ID NO: 115634 - DNA, 122 bp, Homo sapiens
cacctcccgcgcccctcgccgcgctcccccagcacgcaccaggccccgcccactccgccgcgtgcccagcccgcgtcaccgccgtcctccccaggctccagcgcgccttgcggggccgcgca

SEQ ID NO: 115635 - DNA, 122 bp, Homo sapiens
cagcaagcaccccgtcttcaggccctttgtgcaaagctgaggcttcagggaaccccaaaacgcaatccatgccctcaaggaatttacagtgtctttggaaaaaagcacacatctaggcacac

SEQ ID NO: 115636 - DNA, 122 bp, Homo sapiens
aattccataaagactggacattgtttttcatggtattttgactctttaaaaaaacacacacgcaaacagaaacatggtggagtggctgaaaattggaagcttaaatttccaagttcatgtct

SEQ ID NO: 115637 - DNA, 122 bp, Homo sapiens
catctccctccacgcttgtgggggagtgagtggggaaggggctttgggagaggcggcgcgcgggcactgaggtgcatcgtgagcttcccggacttgacagcatcaaaggaaaatcctggcga

SEQ ID NO: 115638 - DNA, 122 bp, Homo sapiens
ctttgtccccaaggtcacagtgactggctttctgctgccggctgtaaagcacatgcggaccgaaaccccccttcggaagtgtttgaaaactgcaagatttcaccctctccatcaccaagcca

SEQ ID NO: 115639 - DNA, 122 bp, Homo sapiens
agagcgaacggggaaaggccgcggcgcctgcagagcacagtccatgcagtttgcccggggcgcgggcctctcgagtgtgctcaggaagccgtggctcctcggggcgtctgcaggcctcccag

SEQ ID NO: 115640 - DNA, 122 bp, Homo sapiens
cagtgaactacagaatccttgagatcctttgtggaatattcatgcttggcaaatccccctcgggtgtactaatattgctcaaatagagctcaagggatattgagtaaatgctgctacagagg

SEQ ID NO: 115641 - DNA, 122 bp, Homo sapiens
ctcccgatggggtggattcctgacatccagtactgcatgctgttcatggtccaaacgtcacggaggcaagatgacaagtccttcaaaacaggcccttctagggggaccgaataatttccatc

SEQ ID NO: 115642 - DNA, 122 bp, Homo sapiens
tctttgtctagttgaagtctaagtgacctcccccagggttgagaaagaagctgaagttaacggttgatatcctatgtctttcctcagcagccaacagagcagtcagcagagcagccacgatg

SEQ ID NO: 115643 - DNA, 122 bp, Homo sapiens
ctccagaggggatggagaggcgcgactgtgggagctggaaggggcaccacccggcaattgcgggataaagcaaatgctgcacacagagtgtgaaacttaacctggttgagaattttcggcac

SEQ ID NO: 115644 - DNA, 122 bp, Homo sapiens
accaatatttaaacatcagtactagttgtcctgggagaaagggaaaggagttttatgttgcgtgagaggcccatcctgtgtaattggagcagggcacacttgcttcctgttgagttaactca

SEQ ID NO: 115645 - DNA, 122 bp, Homo sapiens
tgctcccctcctgcagggcttgttcccagcaggtgcatcctctagctgggcctggagacccggcgccacgtggcacagcggtgactctacagcgccctcgtgtgcggctctaggtgctccca

SEQ ID NO: 115646 - DNA, 122 bp, Homo sapiens
cgggcgggcagtgccggcgtccgcggctggaatggtgctggctgtgttggtcggtgcctgcgttctgaagcccgagaggagccacaatggagacgccgccgctgcctcccgcgtgagtgagc

SEQ ID NO: 115647 - DNA, 122 bp, Homo sapiens
attcttttcaaatttccctggttgtaagtcatcatggcctgctgtggtccatagggcatacgacctcttaggagatgggttcaacccttcaacctataactatctcaatatagctatagatc

SEQ ID NO: 115648 - DNA, 122 bp, Homo sapiens
ggcggcggcacgggctgcggcagaggtcgaaggagtgggactcaatgcgcaagcgcggtccggctcttattcgcgccgcagcacccggatgaagaaggcggggtttcgggtgcaccaaggaa

SEQ ID NO: 115649 - DNA, 122 bp, Homo sapiens
caggggcccggcgatcccggcagtggcgacgccaagccggccctgcacgcccttttcgaccgtggagatactgcccctgtcagtgtctgctccgggctacttcagtgtttgttcaatgcacg

SEQ ID NO: 115650 - DNA, 122 bp, Homo sapiens
tagctgtaagtttggccttgcacacctgtgaagcagccgtgatgggctcttttggtccgtcgtcacataatgttgagagcagcggatgaagagttaagagaatctgagctctaaacctagtt

SEQ ID NO: 115651 - DNA, 122 bp, Homo sapiens
attaagcacatcccttgccaccctcccaccttaaaagttttcagtatcaaaagaagctagcgcaggccacccgagtccctgaggttggagtcctagcatagctcccctccctcaaagaggga

SEQ ID NO: 115652 - DNA, 122 bp, Homo sapiens
gatgcaaagtcctcccgcgctcctagagaggacccggaagcgcggcgcggtcccggaagacgaggtggtgacacgcttccggcctttgtgactcattgtgtctgtgtcgaggcgtcgggagg

SEQ ID NO: 115653 - DNA, 122 bp, Homo sapiens
cgccgggaactgtgtacgcagctgcggcagtggcaactgaaggtgattgagaacgtcaagcggggccaacacaagaagacgctggagcggctcttccccggcttccggccagcggtggaggc

SEQ ID NO: 115654 - DNA, 122 bp, Homo sapiens
cccgtcttccagaacggcaagctgactgcattctggagaatgacctctgccccagggatgcggtcctggaaggtctgtacatcagctcctccctggaccggcatcttgagggcgtgtcggga

SEQ ID NO: 115655 - DNA, 122 bp, Homo sapiens
agagtgattgccaaagtctcctgggtagccaatgtcagctaaagccttaaacatggctgccgccacaggcaagcaatgtcagtgcaggcctgacacctcccttcctcactccttccaacacc

SEQ ID NO: 115656 - DNA, 122 bp, Homo sapiens
caataccccagggttggctccctaagaccagcctaaactggcagcccagggctgagggcacggccagagctggggccctcgcccacccaccacccacctgcatggggaggggccttggggtg

SEQ ID NO: 115657 - DNA, 122 bp, Homo sapiens
agggcggcgcgtgatggtgccctccgagaagcactgggaccagcaggaaaggctgcctgccggtgcgcaggaaaagggaagagagccggggaattgctttttgacccgtaagggagcgtttc

SEQ ID NO: 115658 - DNA, 122 bp, Homo sapiens
gggggcggagccaggcggagccttcgggccgggggctttgccctggtggggcagcggaggcgggacctgttctccgtacacgtgtgggtggggctggattgtgggcggggctggattgtggg

SEQ ID NO: 115659 - DNA, 122 bp, Homo sapiens
actccacggggcttgaatgatcagacctcaggctgccaggcttcctgtccccagttcctccggctcccgcagagcccacagggacctgcagatctgagtgccctgcccacccccgcccgcct

SEQ ID NO: 115660 - DNA, 122 bp, Homo sapiens
tacaagtaatagcctggtggcaaagctaccactgtcagggcagtctgtgccaacttcagtcgtgacaggaacccgaaggttctgatggcatcaaaacggtaaaacatccagaatttctcagt

SEQ ID NO: 115661 - DNA, 122 bp, Homo sapiens
gcgggcacgacctactggccaaaaggttccagcagtctgctaaggtgccaagcagcgccccggggttgccctgcctggggccaagccccaaggatgcctccctgtgtggctggggtgtcccc

SEQ ID NO: 115662 - DNA, 122 bp, Homo sapiens
attttgttcatatagataaaatggattctgaaagtctctcttaggttgaatgcttataatcgtctcattttatgactcatttgataaacaatatttttgtgtgtgcagattgacgtaggaga

SEQ ID NO: 115663 - DNA, 122 bp, Homo sapiens
cggagagtggagatgaaccatgttcccagcggaggaagaggcatcggtctctagacgtggcgagagcagtttttacattccatggcattgcggtgatttcgaatcatcaagtggttggattc

SEQ ID NO: 115664 - DNA, 122 bp, Homo sapiens
gttcaggggaagaggctctgtgaatgtcaggctgagtcagcgtgtggattgtgcaagacccggaggccagcagggcagagcctgagagcatcgcctgctgctggtgattcgccttgatcttg

SEQ ID NO: 115665 - DNA, 122 bp, Homo sapiens
tgagctaggacggggcacaggcaaccacgttcccacaaacacagggtctggaggtctctccgctggtcacggcctcggaattccgacatgctggactgtggcttgggaaactgactcggttg

SEQ ID NO: 115666 - DNA, 122 bp, Homo sapiens
ggacacgcctctcccaaggtcacccacgtgggggctttgttactcatgcttcccagactgcgtgctgtgtcagagttttcacacctgcctgatgtcctgggggggctcacagaggaccgacc

SEQ ID NO: 115667 - DNA, 122 bp, Homo sapiens
aaaatacccaagcaaaaccctgtctagccagggccccttcttatcctgtctctgtcctctcgccagcttagtgtcaaaccctggtgggctatgattcacctgccccagcccatgaaaattgt

SEQ ID NO: 115668 - DNA, 122 bp, Homo sapiens
gattgatcatttagggcacataattatccctaagccattaccagtcaggaagcaaagtcacgcaaagattgacttcagctaagatgtctcaacccttcagttatattgacatttgggacaag

SEQ ID NO: 115669 - DNA, 122 bp, Homo sapiens
aaggattacacgctgagtgaactctgtccgcgaagccaaggcagcagggagtgaggacaacgcgttccattgttccccacccgccttcccaatgccctgattggcaagaaaatgtctctgag

SEQ ID NO: 115670 - DNA, 122 bp, Homo sapiens
cggggctcctggccgccgttgccagggaaaccgtctgggcgtccctagtatctgagccctcgcgcctgggccactcagctcgacctctctccagcgttagcaataggtggagcgcgggccaa

SEQ ID NO: 115671 - DNA, 122 bp, Homo sapiens
aggtgcccgcccgctcgccctcgcagggcgccgcccggctcgttggcggccgcggcgcggcgcgccccatgcccgtgtgtggccatgtcctatccgcagggctacttgtaccagccgtccgc

SEQ ID NO: 115672 - DNA, 122 bp, Homo sapiens
ttattagtgcttgtactgggggctctttgctttgctcctctgagcctcaattttattttccgtacaatggagaggatgctggaatgagaaaataatggatgtaaagcacagtgcctggcact

SEQ ID NO: 115673 - DNA, 122 bp, Homo sapiens
aaacaaaatccctgagaagccattcgactttttttttttttttttcttttcttcaagtagcgcgctccttggaggatcacagttctgaggttcaggttgtaaaacatttgctccatgttctc

SEQ ID NO: 115674 - DNA, 122 bp, Homo sapiens
cgagcgctgttggcgttgcatgccgaaaatgtaagcagtgcgccctctagggtgcccattcgggatctattttagaccaaggctcttagacaacatgaagatcccaaagatgctttgctgac

SEQ ID NO: 115675 - DNA, 122 bp, Homo sapiens
ggcttaatgggattgtgttcggtccttcaggctctcctttaaaagattccatggcaccaacgagactccaataaaagggcctctctaattgctttctgactttctatgaaactttctaagct

SEQ ID NO: 115676 - DNA, 122 bp, Homo sapiens
actagaatttgagaacagtcagtgtgtgcgacagtcattactccttggagactcccactccgccagccgggcgcccttcgtgcgttcttggtgccacagcggcctccagtggttctctgagg

SEQ ID NO: 115677 - DNA, 122 bp, Homo sapiens
aatcctcacaaaagtccagcctaggaagtactatcaagttgaggctcagagaggtgccggcgctaacccacgttcacacgcggccctttttcaacctcgttgcctcaaaggcggggagctgt

SEQ ID NO: 115678 - DNA, 122 bp, Homo sapiens
tctaagttgggggaaacaccaccactgaaatatagtaccttgaggttttcatcttgagaacgggaagatgaaaattatactagagaggcctgtccccaaaccaaacgccttccctacattct

SEQ ID NO: 115679 - DNA, 122 bp, Homo sapiens
ggcgcgccgccgcccggggctgggcttggggctgcctgtggagaggcggcgggcggaacgcgcgcggccacggccacggccaccgccacggccacggccggcagctcgggtcccgggtcccg

SEQ ID NO: 115680 - DNA, 122 bp, Homo sapiens
ggcttccaaccataaacattcccagagctgcgaatatgtgcccctggccacaggattacacgtaggaagccagcacacgctacgctatcattaccatctcacccatctcccgtggctgacgg

SEQ ID NO: 115681 - DNA, 122 bp, Homo sapiens
ttcccttttctcactgggtcttctgtttgaaaggaggaccagactgtctctccccattcccgtgttgaaggccatccccgaaggcttcgtgtgtgactgatgaggaatcaagcagtgaacgt

SEQ ID NO: 115682 - DNA, 122 bp, Homo sapiens
aaccaaacggttagttaccctgcgttctggctgcgccatacaatgctggcatcctcgtgccggcccagttccctcagcgcttcctcacacagagaggcccccaaggcttgtcaggggagcag

SEQ ID NO: 115683 - DNA, 122 bp, Homo sapiens
ttgcaataataagaatgggctctaggcgccgctgctcaccaatcagggaatgggaagctgcgcgccattgagtccctccctcccccgcctctaccacacaaagcggaatgagatggatactc

SEQ ID NO: 115684 - DNA, 122 bp, Homo sapiens
gttcctataaccctctgtccatacacttctatcatttcatagtgttttgaaattgtaggtcgtccctccccaccttcccctctgccccccaaagaagataaggcccttgaaagtagactcat

SEQ ID NO: 115685 - DNA, 122 bp, Homo sapiens
tgggtgttctcattttgggagccttttttttggaaagacccccacatgtggaaggcagagcgcatactacagacaggggagccaaaagtgagagtcctatgtttaatcagaggagaaagctg

SEQ ID NO: 115686 - DNA, 122 bp, Homo sapiens
cacgacccaggagacacccaagacccaggggatgtgtgacccgggagacacatgtgacatcgccacggagcacagcagagacggaacagctgcaaaggtcacggcgcccacccagagctggt

SEQ ID NO: 115687 - DNA, 122 bp, Homo sapiens
attatttacagccgaagaggacacttcggctttttcggaccttattttgggtctgggaagcgggaggggttgctggcaagaaagtgaattcagttgagtcaatttgcaacgagcacgtttcg

SEQ ID NO: 115688 - DNA, 122 bp, Homo sapiens
gaagggggtgccccaacaaaacaacagtggctccgcctcattgtccaggcacaggcaaaccgcagtagtgagctttggtacttgcatttactttaaaagaaaaacaaatgttgtgagctcaa

SEQ ID NO: 115689 - DNA, 122 bp, Homo sapiens
tccctccgctcccggctgcttggcaccttgtgcctgtgaggattagtgttgacttggacgcgcaggaagcccgaaaccaacccggttgtttggcggaatgatgccagatggcatttctgtgc

SEQ ID NO: 115690 - DNA, 122 bp, Homo sapiens
ggacacaaatccctgcgtctggggctgggcccaggttggagagctcacgggggccaccggcgtgtacctgtgacatggagccctcggacccgggggtgggtgtagagaggaggaggtggagg

SEQ ID NO: 115691 - DNA, 122 bp, Homo sapiens
aacttgggacaaaacactgctttttgattctcctttttcaagagaaaaggttgaactggacgatctctaaggtcttttgaagctttctaattctataatgataagtgctaaacaagaaaatg

SEQ ID NO: 115692 - DNA, 122 bp, Homo sapiens
cggaagcaaggggctggcagagcggtatcgcaagaaatcaaccaatcagaacaatactaccgcgacgcagcgccgtgtgatcccaccctcgtcaagtgcgcgacttctgccgtcacttcctt

SEQ ID NO: 115693 - DNA, 122 bp, Homo sapiens
tacagcttttctgacacagcgggaccacgctcgcggcaccacagctctcgggaggtgacccggagataatggcccagtaggaacactcaccatagcgtctgtcttggtagtctcttgccgga

SEQ ID NO: 115694 - DNA, 122 bp, Homo sapiens
gcgcagacggcggcagtcctgctcagcctctgcccggctccgtactccggccccggcctgcgccctcagaaaggtggggcccgaaccatgagctcctacctggagtacgtgtcatgcagcag

SEQ ID NO: 115695 - DNA, 122 bp, Homo sapiens
aggctgccgcacatgtggttttgaaaccaacctttccccttggccccagcagtgcgttggcgtgtccctggggctggtcccagtgcccgcctggaaatgcccttggtttgggcccctgcctg

SEQ ID NO: 115696 - DNA, 122 bp, Homo sapiens
acacacacacacacacacacacacacccaccaccccgcggctccgcccccgacttccccacggaccgtcacttccggtctcccccaaacctgccaccgacggccacttccgtttccccgata

SEQ ID NO: 115697 - DNA, 122 bp, Homo sapiens
gcgagtgatccagggctgcggggagcgcttgccatgactcagcagacagcgacgaggctgcgactcggcggctgggatcctctcccctccctccccaggcgcccccgcccccgtccgtgcgc

SEQ ID NO: 115698 - DNA, 122 bp, Homo sapiens
tgggtaaggagagtggcaaggcccgcatgtgggtaaggagagctacaaggcccgcatgtgcgtaaggagagctgcaaggccgcatgtgggtaaggagagctgcaaggccccatgtgggtaag

SEQ ID NO: 115699 - DNA, 122 bp, Homo sapiens
ggatcgccagtgggtgcgcgccctcctgtccacaatcccagagcctggggaaaggagcatcgcggccagcccaaggcgtctcgttttgattgcctccaccgagcaacctaggataggggttg

SEQ ID NO: 115700 - DNA, 122 bp, Homo sapiens
ccgccctgcttgacccctctcacctgatggctcccttctccaatcttcaagaaggtgaaacgtcactgtggtccgcagagggcaggccgcgtgtgcggagtcgctgtcatcccttagtggcc

SEQ ID NO: 115701 - DNA, 122 bp, Homo sapiens
tcagaatctctggagactgaagcttggacttccttcctccctaggggccggcaggggctgcgattgctgtaagagtaggtcacgtggcagggcttcctgtatgctgctgctgccgggtgtcc

SEQ ID NO: 115702 - DNA, 122 bp, Homo sapiens
gcagaaggtgatctctgccttcgagacacggagtgtgctgcctcagtctgtgatccctcgcgtttcaatccaattcaaaccatgctgcagccaattcgttcgcgcgtgcgtgtgccatcatt

SEQ ID NO: 115703 - DNA, 122 bp, Homo sapiens
ttgcagaggtcatggatacatgtcaatttcttagtttcatcaattaaaggaaggaatgttcgtgagagagtttttcaaaaggctaatgccttgctttctaagactgttaaagcacaggttta

SEQ ID NO: 115704 - DNA, 122 bp, Homo sapiens
cctgggtggccctcggcggagccccgcggcccttcaccgtcacagggaaagctggatcggcggcaggaaaagcccgcggccaagccgctcctgccctggagggactagaccctttgtctcca

SEQ ID NO: 115705 - DNA, 122 bp, Homo sapiens
caacaccattagagggtaattgatattgtggacttcccaagtaaaaagcacttaaccccccgtggtacatccaagattagtcttaagatcatatgactaaacaaactaggtaaactactctg

SEQ ID NO: 115706 - DNA, 122 bp, Homo sapiens
acgactgggtgatgctggacatgggagataggaaagaggtgaaaatgatccccaagtcctcgttcagcatcaacagcctggtgcccgaggcggtccagaacgacaaccaccacgcgagccac

SEQ ID NO: 115707 - DNA, 122 bp, Homo sapiens
gtctgcggctcaggcccatggctgggccgtgttggtgggagtgccaggcgcttgctggagcgttggtcatgcgtgcgcttcaggatgctcccggggctctgggtggtgacggggaggctggg

SEQ ID NO: 115708 - DNA, 122 bp, Homo sapiens
ccagggaagcggctgagttttggcaacctcccgtgttttcaagagactggagttaggaggcggactggaagtacccacactcaagaaacccagacactggagagggaagtatgttgcggcgt

SEQ ID NO: 115709 - DNA, 122 bp, Homo sapiens
cgttctcactcctcgccgttgctcttcttctatcttcaaagcagaagagattttgaagtccgaaagacctggtttggctctgctactctctgtgccacttgggcaagttgagtcatccctgt

SEQ ID NO: 115710 - DNA, 122 bp, Homo sapiens
ggaccggcttctctgctctcccgttatgggggtcgggggaatgatgggtcaagggtcttccgaagaaagcgagaaaggaacaggcgccttcaaaagcccacttggcgatgggttacagtaag

SEQ ID NO: 115711 - DNA, 122 bp, Homo sapiens
atttttttccctttttctgagacacagtttcactgtcacccagcgtggagtgcagcagtgcgatctcagctaactgcaacctctgcttcctgggttcaagcaattcttgtgcctcagcctcc

SEQ ID NO: 115712 - DNA, 122 bp, Homo sapiens
gtctccgtcccacccaaaccctaaccagagagaacacggcacgttgtgccagacggaggacggatgccagcgagggtccatgtcctcactgccgacaaggctgggaactgggccaagtgaag

SEQ ID NO: 115713 - DNA, 122 bp, Homo sapiens
atttttctgcccagtttcctcctgaagagtggcccctgcgagacgaggacacgccagctacgatccctcgggaagtagagatggaaatcattaggcgcattaacccagacctgaccgtggaa

SEQ ID NO: 115714 - DNA, 122 bp, Homo sapiens
gtcacagcggtccgtggtggagaccaactccagctttccatcgtggtcaatgtcccttttcggttcccgctcgcccgcccgaacactcgcccgcgcttcctctgggagacccctctttgctt

SEQ ID NO: 115715 - DNA, 122 bp, Homo sapiens
gccgagccttgcaccggagggcgggcctcgctggctgttttccctcattgcctggctctgcgcggtagaggtcgcgagtggcgaaggctaggacgcattttgtcgaactgcgaggcgcggct

SEQ ID NO: 115716 - DNA, 122 bp, Homo sapiens
gcttacctcgtactcggaggttcttcagagagcggccgcggccgatcgccgccatattgacgggtttcagtcacaacaccggaaacctcgcccaatcgcgcgagaaccccttcccctccccg

SEQ ID NO: 115717 - DNA, 122 bp, Homo sapiens
cttctcggaggcggcgtcggggcgccctgaggtccctagtcggcctctgggcgccgagcacgttttatttatccccacagaggatgctggaggacaaaagaaatatttggacgtcagagctg

SEQ ID NO: 115718 - DNA, 122 bp, Homo sapiens
ttatgtggcagctggcttcccccacaattcaaacgaggaaactgccagggtttctatgcccggcacagtgccatttatcacaatctcctgattaaagcaagtcacaaaggcagcccagattc

SEQ ID NO: 115719 - DNA, 122 bp, Homo sapiens
acatgcgcccccgtctgacagcacctcttctgtgccctgccagggacttgtgggctcctgcggccgacactcatgaaggccacatcaccagcgacttgcagctctctacctacttagatccc

SEQ ID NO: 115720 - DNA, 122 bp, Homo sapiens
caccactgcttttgtctcattcaagttagtaaaaagagtctccaccctcctttgtgatgtcgacccggttcgttaaccattatctgtggtgagatttccatacagactcatttcctaataag

SEQ ID NO: 115721 - DNA, 122 bp, Homo sapiens
aagtcatagtctctctctttattggggctcaggggacactctcagggtagctgggggccacgtgaaggggggcgttgcggagcggcacagctggaactccgggatgatgttcaggcttgggg

SEQ ID NO: 115722 - DNA, 122 bp, Homo sapiens
cgaaccctgggataagaggacctgctgtgtttccctgcaacgccacgtacctaggtgcgacgcctggggttcaggtgcatcttcccccgccacacccagcccccccaaccgagatagagtct

SEQ ID NO: 115723 - DNA, 122 bp, Homo sapiens
atttcgtgtctcgtttgtaattacatctgtttcattaatccaagaaatgatgcagactaccgcccgctgctgtggttttggaggtttgacaaattcgtgttttttctggtaatggcgctttt

SEQ ID NO: 115724 - DNA, 122 bp, Homo sapiens
ctttacgggatccggagcggaggaaaagggccatttctcttcccttatctgtttatgatgcgatatgttccaaagccgatcacatcagccgctgttatggtgaacggaattcactgtgatgg

SEQ ID NO: 115725 - DNA, 122 bp, Homo sapiens
gggcgcggacctgacccccagcacggacctgacccccagcacggacctgaccccagggcgcggacctgacccccagcacgtacctgatccccgagctcggacctgacccccagcacggacct

SEQ ID NO: 115726 - DNA, 122 bp, Homo sapiens
agtctgggtctcccaatctagtttacctgttaacaaaggaaatactattagcctgatagtcgctcgttctggctgtttcttcaggattactgatttctcagtaatccataaaccatccatgt

SEQ ID NO: 115727 - DNA, 122 bp, Homo sapiens
ccttctctagctaaggagaagaaaaatgtggagaatctagcaatcgcctccaaaagctttcgcttagtgccagtacaatctaagaacaaggaaggggtcagagaagggccatgacagaagga

SEQ ID NO: 115728 - DNA, 122 bp, Homo sapiens
ccgcggctcaggacgactacgctcggcacgtccgggaccctccggccgtggcggttgcagcgccaaaagctcgggcctcagcccctgacgctgtggtgactccgccgcgcctcgccgtcgcc

SEQ ID NO: 115729 - DNA, 122 bp, Homo sapiens
ccagatcagactcctcctctcgtttatcctgttgggggcggaagtgagaaagcccttattcgtattggcttagatttgcaagcggcagttgtctatcaaatctatcaagtcgcccttagcgc

SEQ ID NO: 115730 - DNA, 122 bp, Homo sapiens
tagaagggcgcgtgatccaaatgagtagggatttgtcaggcagggatcagggctgaaccccgtacactgcaccctgaggcccgcaccctgaagcccgcaccccgcacccggcatcctagccg

SEQ ID NO: 115731 - DNA, 122 bp, Homo sapiens
gagaagggcctgaaaatcaacaagacggagttcaatttggcagctggaaccaaagccaaacgcaagcgcagcaggggacagggcagttctcagacttggagcggctgtgctgtgccctgtct

SEQ ID NO: 115732 - DNA, 122 bp, Homo sapiens
ggaggcacctgcagaccaggggacctgcacggacagccccagaggtggacattgaggactcgtaggaggacttgggtctcatacggcgggtggggagcagggccccttcctggctgaggaca

SEQ ID NO: 115733 - DNA, 122 bp, Homo sapiens
ccgctgcgagcccagagtccaagcccagccccggtaccaaagggcagctccgaggggagtcggaccggagcaaacagccacccccggcttcgtcccccacgaagaggaagggcaggagccgt

SEQ ID NO: 115734 - DNA, 122 bp, Homo sapiens
gataagaacagatactacacttgatcttagccaaaaggccgagaagcgatacctttacttcggtcgcctcggcggccttatccttcccatcttccaaccagttatggtaactatccaggcac

SEQ ID NO: 115735 - DNA, 122 bp, Homo sapiens
gtaacagtttttacacataagattcctgattggtcgggcgcggtggctcatgcctgtaatcgcagcactttgggaggccgaggcgggaggatcacgaggtcaggagatcgagaccatcctgg

SEQ ID NO: 115736 - DNA, 122 bp, Homo sapiens
tttccacttagattctggcagcgaagaccagtgattctctgcgggctgtaggggcgggggcgggggtcttttttggtccgagagggtgcggggaagggggcacatccggcgtgaggggggtg

SEQ ID NO: 115737 - DNA, 122 bp, Homo sapiens
tgttcctaaatttcctctgtgagaatatatatgctgttaaaagttaaggggactctgacacggaaagcaaataaacaaaaattattagatggtttacaattgtagtgcccactgtttaattc

SEQ ID NO: 115738 - DNA, 122 bp, Homo sapiens
agtggcccccaaaccccaggcctggtgcgctgcttcctgcagctctgactgagggtcagacgtcagaagggacttccagagctggggtctggctctcatccaaccaggctggctttcagagc

SEQ ID NO: 115739 - DNA, 122 bp, Homo sapiens
aaggcagagtggaaagttaacactgttgaatgacagatcgcaaagttgaaatctgaggcacgatgaagccatggaaaccacatgcaaagagatttgagaatgttttctgggctggggatggg

SEQ ID NO: 115740 - DNA, 122 bp, Homo sapiens
atccactcacctcagcctccccaagtgctgggattacaggcgtgagccactgagcccagccgtgaggactttaaataagaagatgcagataaagcacttagcactgggcctgcagcatagga

SEQ ID NO: 115741 - DNA, 122 bp, Homo sapiens
ggtgttgctttactgatcctttcataagatggctttgtcctctctggacatggcaaatgccgaaaattggctctttgttgatttcttctgtgagttcttcttagggtcccactggggagatt

SEQ ID NO: 115742 - DNA, 122 bp, Homo sapiens
tgcgcctcgggaccgcgaggtgagcagaggctggtcgggaagtttcccggaggctcgccccgggaaccccgccccgccgccctggaagcccctgtctgctcgctggcttacccctaggacgg

SEQ ID NO: 115743 - DNA, 122 bp, Homo sapiens
agaagccctttgagacaggttagcgatgcctgagcaccacccccaccctaggcagggctgcggatcatctgagctcttccctcctggcctcccggtaccccagaagccactccattctgtgt

SEQ ID NO: 115744 - DNA, 122 bp, Homo sapiens
gtgtatccaaaacttaaatatgtggcgtacaagtgtatggtattattggaatggcattcgcgatcctagagtctacagtgttccctgaataaaactaggggtgagcctggcggtaatcctgc

SEQ ID NO: 115745 - DNA, 122 bp, Homo sapiens
ggggccggaatcaagaagcctcttttggggtgggcggggaccgatctagagctcccactgcggggcaccgcctcttttcctcgccggccgcccgctaggaggcgctggggagcttgcagccc

SEQ ID NO: 115746 - DNA, 122 bp, Homo sapiens
ctcggccctgtcgcaggagctaacgcagggggaatccttgcaggtgggagcatttcagagcgcacaagccatggtggccaaacagcggatccggatggctaacgagaagcacagcaaaaaca

SEQ ID NO: 115747 - DNA, 122 bp, Homo sapiens
caggttaaacattttttgccaaagctacttcataggtgatgctgtgaagttcgtatggcacgatgtgctgctgtctcaatattactgatgttgagctgatgactagtggatctttccgctgt

SEQ ID NO: 115748 - DNA, 122 bp, Homo sapiens
acgtggggaccagcattgtgctgtggaggcactcagtggaggggttccgagtgtgacgcgcgtcaggattctttaacccattgatcactaaaactccttttagatgccgatgcgagagtgag

SEQ ID NO: 115749 - DNA, 122 bp, Homo sapiens
cctgccggtgccgggcagtgagggacttggcacccgggccagcggctgcggagggcgtaccgggtcccccagcagtgcccgcccaccggcgctgtgctcaatttctcgccgggccttagctg

SEQ ID NO: 115750 - DNA, 122 bp, Homo sapiens
acatgttgataaatgtatgctctttctgtatttttaagagtaagcttagtcagcagattgcggtgaaaagaacatgggacaggaaggaagttaagagacctgagtattagtctcagcaggta

SEQ ID NO: 115751 - DNA, 122 bp, Homo sapiens
ctcagctagctgataacgacttcatgctgctgctttatttcatttgacaccttccattctcgtatcagctactgcgtgcaaaccaaacctcccaagaatggtgaccctgtcctcttcagttc

SEQ ID NO: 115752 - DNA, 122 bp, Homo sapiens
agacatgagggggcattctagtaacacaggctgaggcgccccattgttggacctggggtgcgaggtccgccatgagctctgagtccggtgcctgccacggtgggagcgccctacgcacctgc

SEQ ID NO: 115753 - DNA, 122 bp, Homo sapiens
attgtatcataaatgtatcagaacaccataagctgtgtcaaacctttaaattctaatttacgtgtgtgaaatgatacattatcaaaataactcgttgacagaatattttaaaatccccaaat

SEQ ID NO: 115754 - DNA, 122 bp, Homo sapiens
ctctgagaagggcgtaagtgggccggctggcctcggaggcccctccttccagctgggccccggcaggatgcacaatcagctcattctttagtgaatgcactgggggcccagcgagcgtttat

SEQ ID NO: 115755 - DNA, 122 bp, Homo sapiens
aggttctctgaagccacccgctgtttctcagcctcctcccggaggctctgcacctcctcccgcagagcagagctgcgttctgcagctctggcactgttgctggctgtctctgcctgcagcag

SEQ ID NO: 115756 - DNA, 122 bp, Homo sapiens
accagtcaggccctttgcttacagaccgggggcgggagtaggggggaaggaaactcccggcgctggcatgacttccccaggactgacaagggcccctaggaacggcttttctcccttgcaaa

SEQ ID NO: 115757 - DNA, 122 bp, Homo sapiens
gaggctgcggaattgccagacagtacttatcagggatacatcttaactagaagcttcttccggcgccgaggcaaccgcctcgccccaccaatgggtcccccagagaccccacccccgctcaa

SEQ ID NO: 115758 - DNA, 122 bp, Homo sapiens
ctatgaccccttcctggcctccgattccccattacctgtttgcgggcttccccgctcaggcgcaccccacacggcttggccatgctgcttcagtcgctagatctctggtctcccggctagtc

SEQ ID NO: 115759 - DNA, 122 bp, Homo sapiens
catgtggccgggcgtggtggcatgtggccgggcgtggtggcgtgtggccgggtgtggtggcgtgtagccaggtttggtggtgtgtagccgggtatggtggtgcacacgtgtggtcctagcta

SEQ ID NO: 115760 - DNA, 122 bp, Homo sapiens
gctggcacacagagctggccgcacccacaggagccgtcacacagcggagctgccctcctccggcaaggacggctgcagttgtgtaataatcctggtggggctcacagcactgcgtggcagga

SEQ ID NO: 115761 - DNA, 122 bp, Homo sapiens
ccagcacctccttcatggtctcgtggcccagcaggttgggcagccgcatgttctggtattcgatgccgtggcacagctgcaggttggcagggatgggcttgcaattgctgcgcttgtaggag

SEQ ID NO: 115762 - DNA, 122 bp, Homo sapiens
atccacctccccccacaccctcaggctgctcttaccctgcttctctgcgctttccacacccgtccccgcccgggtgagctcaccccatgcagctctgctacatgccagccaggcagggcttg

SEQ ID NO: 115763 - DNA, 122 bp, Homo sapiens
gagatgaggactgggaagcccgcttgagtgatgcacatctgtggcttgttacgagagccgcgtgaattaaagcaaggcaggggacaccgccctgccactgctttctaaccttgattttcatc

SEQ ID NO: 115764 - DNA, 122 bp, Homo sapiens
cgtgagggactgatgcccccctccccggggagaggcagcccgtgccctcgctctggcttccgtgcctcccagcccttaccactgccccactctgcggtgggttcttcatcccagaaccggga

SEQ ID NO: 115765 - DNA, 122 bp, Homo sapiens
tcccttctccagggctctctggctccagggcagctgttctgtgagaggagtgtcaggtcccgttacaggaagagcacagatcaggagtctgatgtttctgagccagttctttcacatactag

SEQ ID NO: 115766 - DNA, 122 bp, Homo sapiens
ccgggcagggtgctggctagacactgcccatgcaacccggtgcgccttgtccaccctgtccgccctgcctgccctgcctgccccgtgtgccccacccaccccgtgcaccctgtgcaccccgt

SEQ ID NO: 115767 - DNA, 122 bp, Homo sapiens
tggcctggctaaagtaggctttactgggctcctctctgcctgcatcaccccccggctgggcggttgtctctgaggccaaccttactccctgctgggcaggctggacagctgccctctccgtt

SEQ ID NO: 115768 - DNA, 122 bp, Homo sapiens
ttcctctcaggatgaggtggagaagcttggtccggggccaccggggccaaggggccacagcgcaggcctcccttgccaggggcctttggtcgggtggtggagtttgtggcgggtgcagggga

SEQ ID NO: 115769 - DNA, 122 bp, Homo sapiens
gcggggagtcccagcctgggatctttgcctcatgtccttgggctcctgccctggctggcccgtcccccaccgccatgaggtgtcagattgtgtttccggctgcctcttcccgttgaccccct

SEQ ID NO: 115770 - DNA, 122 bp, Homo sapiens
tctcgccggcggtgttggaacgtggacacgtgcgctttggtaatagggcagcctcccccgcgggcgcagtccccgctgcgagcgcccccggctgctgaggcgggaccgaggacccggagatt

SEQ ID NO: 115771 - DNA, 122 bp, Homo sapiens
gtgtaaggatgcggattacaggatgtaattgccataatgcctggtaatggcaggcccagccgcgggtcagtgtcccattagcagccccacgcgggtgctgataagcttgaacatgcatcaca

SEQ ID NO: 115772 - DNA, 122 bp, Homo sapiens
tgctccagcatgcgtcggtcgagagtgagtgagaatacgtctgtgagcggtcaggtgaaccgggtctgacctgcccaggtaaggtggtggaagaataggaaatggccctgtgaaaaaaaaat

SEQ ID NO: 115773 - DNA, 122 bp, Homo sapiens
aattaaaatctaaataaattgagaaatattccatattcccagaaagcatcagtattgttacgatgtcaattcttcccaactttatctgtagattcaataagatctcaatcaaaatcttagca

SEQ ID NO: 115774 - DNA, 122 bp, Homo sapiens
agtttatgaactcggtgcagtgagacctctagactgacacgtacaacagagatgcagtttcgtctaactggcacctgtcccttccattacttgctgggcctgcttctgtcccatgcagcact

SEQ ID NO: 115775 - DNA, 122 bp, Homo sapiens
ttgggtggaaggagagtgttctctgcctctgaggtccagttttaacatttataagtgcagcgggtcctcctgttgtggcccacaaaccttacttgggaaaatgtcacatttgagcaaccaca

SEQ ID NO: 115776 - DNA, 122 bp, Homo sapiens
ccctcagtgatcagcaggttcctgggcacacggctggctcctgtgcagcacccgcaggctcgggtcctcgcccaaacacaacccaggcactaccgaccgtgctcggcaggaccggccttcac

SEQ ID NO: 115777 - DNA, 122 bp, Homo sapiens
ggcatcacccagctctgtccttcgtgcctcccgggagcccagggagtcggggccaccggacgctggacctgagaacctggacccaggcccggtctgcccgggagttggcaagtgctgagcac

SEQ ID NO: 115778 - DNA, 122 bp, Homo sapiens
aagactaaggatacaatgaagtataacaaacagtcctggctctgattggagtctagttggcgaatcaggccaaacacgataaatgacacttgccagcatagagtgatgtgttttaattgctc

SEQ ID NO: 115779 - DNA, 122 bp, Homo sapiens
cagcgtggctcccaccgcccccggggttgcccacggcggggatcccaccacccctcgggccgcccatggcagggctcccactgcccaccagcgccaagcccttctgctcaggtcgcctgctc

SEQ ID NO: 115780 - DNA, 122 bp, Homo sapiens
cactgaatatttaaagagatccctcggcaaagatggatctgcgcactcctggggtgtgagcggctcgcatctcccagaccccggggaacgtgtacgggagcacgtgtaaatcccgcacccgc

SEQ ID NO: 115781 - DNA, 122 bp, Homo sapiens
caggaaggaaaggcctctctgactaagctaggagtctcttgcatgtcccaagtcagaaggcggaggtgcctaaatgctggattccagctggcacataaatagtgatctaactcgccccccct

SEQ ID NO: 115782 - DNA, 122 bp, Homo sapiens
ggcttcttaataatttcttcttcctcttctctctctcctcttcttttggtcagtgttgtgcgggttaatacaacaaactgtaacaagtgtacctggtatggacttgttgtccgggacgtaca

SEQ ID NO: 115783 - DNA, 122 bp, Homo sapiens
cttctacctttcattcacgaacgctgaggtttctgacatcccctagaatctgctcagacacgccttcactcccaggacagcagaacagagttaagagaactcaagaatatttaggaaaacta

SEQ ID NO: 115784 - DNA, 122 bp, Homo sapiens
ggttcacaagaaggatttaagtggttgctatttcttcagatgtgtcctgaaatcttcccccgtcttgtttcagtacattagcaaattcttgactaggggtgacccatgtaatgtttctcttt

SEQ ID NO: 115785 - DNA, 122 bp, Homo sapiens
ccggcgtgggtcactcaggggtgatggcagtgaggagccaggcgaggggctgctgtcccccgtcccaccatctgctcggcccgcctcaggagccagcagccccttgggtaggaggatgggtg

SEQ ID NO: 115786 - DNA, 122 bp, Homo sapiens
gcaagtgcgccctcaaggccgtggcgagccggggcgcaggacacggcaaggcccctgagccgcccacgcaggtttcccgacgttctcgcagaaaaggtaaagcggcaccccgcccccagttc

SEQ ID NO: 115787 - DNA, 122 bp, Homo sapiens
aggtgcaggcacaaatgtgagacagagataccatttaaagtgatgctgctcggctgggcacggtggctcacgcttgtaatcccagcactatgggaggccgatgcgggcggatcacttgaggc

SEQ ID NO: 115788 - DNA, 122 bp, Homo sapiens
cgaacaggagcaccggattcggctccgggagggccaggcactgtcaggtatggacagctgcggtccacccgtgtaagtgtaaagtctacagagattaaaacaacacctcgagtcctgggaca

SEQ ID NO: 115789 - DNA, 122 bp, Homo sapiens
gttgggggaacttccagacttttccttccctgggtgaccagtgtcgttcgatgataggggcgcctatcccaaccaaacactggaaaaaatcagcaaatctttatgaagttcccatgcatgag

SEQ ID NO: 115790 - DNA, 122 bp, Homo sapiens
gagctgggctgagtcatctgtggaggagaaaagtcacatccagctccttcatgttgctgccgatgtgggattttcctggcttcgtcagccaagcaattggctgcctttgccggaggctttga

SEQ ID NO: 115791 - DNA, 122 bp, Homo sapiens
ggggatcggcgccatcgagggtggagaaaccgcagggaatttcggctgtccgctttggggcgccaaggaagatgttcgtcgcccacaatgtcaaccttgagccaccacggcaccgaccagtc

SEQ ID NO: 115792 - DNA, 122 bp, Homo sapiens
atttccggggctgggttaacgcagcggttccgagctgcgactgcgcagcgtggcccagcgcggtcaaattataatacataaaagttgtcagggcggagagcaagacattactcttctcggat

SEQ ID NO: 115793 - DNA, 122 bp, Homo sapiens
tctgagacgacttttggtgatggtccctagttcttaacttccccccttgaactcctctttcgggtagcctgacttaggagcaacacaggcaacatagcacaggggaaaaaacggttttcttt

SEQ ID NO: 115794 - DNA, 122 bp, Homo sapiens
gggccctggattccagcgcccccaggctcccagctgcctccctgtctctgccccatggtccggcctggagttctggtccctggttgtgtcctgtggccccattctcatgcgccctttgcttc

SEQ ID NO: 115795 - DNA, 122 bp, Homo sapiens
aacaggaaacaagcacattttcactgtggtttcagtctgaggagggctggcatctgctgacgtgacggctagattttcttgtcaatatcgtatttactatcctgatcacatgagcggagaga

SEQ ID NO: 115796 - DNA, 122 bp, Homo sapiens
gggcggggccgggaggctggggcggggcactctgggaaatggagtcccgggggcgcgcagcgtcccgggcacagctgggacttggagtccgcggccgcaaagccgcttgggaagcgcagtct

SEQ ID NO: 115797 - DNA, 122 bp, Homo sapiens
aaggatggaggaaagaatgtccaactgttctgtggaggggccatggctggggccactgaccgagtcctccctagctctgagcagctgcgggagtggcccaagggcttctcgtgaggggtgcc

SEQ ID NO: 115798 - DNA, 122 bp, Homo sapiens
tccagctcatttccaggggtgtctgtggtgcctctagagaaggtgtccctcatggggacgcgtgtgggtcaccttcccctggtcagcgttaggcttcactggaccggacaacagcacagggt

SEQ ID NO: 115799 - DNA, 122 bp, Homo sapiens
ggggcgcaccgcgttctctgcgtagccggagctcccttcgcccgcccgcctgccccgcgccgccacctgcctgcagcgctctcggcccccaccggggggcgcttcagactttggttgcagga

SEQ ID NO: 115800 - DNA, 122 bp, Homo sapiens
caagtttgccaacaccatggagttcgtggaggactacctcaacaatgtagtcagcgaggccgtgccctttgccaacgaggagaagaacaagctcacttttgaggtggctgggggagtgccca

SEQ ID NO: 115801 - DNA, 122 bp, Homo sapiens
gaacaggtcgcaatgagtgaccgcaagagatcatggtgactcctgaaaacgcccaggccccgcctcagtgccccgggctacccctggccccccaggctttgtgctgaagccgagataaagtg

SEQ ID NO: 115802 - DNA, 122 bp, Homo sapiens
gcaccgggcgctgcagcctccatcagtaccgaccctgcagccctggcacccggacagcaccgcataaaccaaagtgtcgtaaggctcaatcgggaggggaaggaggaacctggggggagggg

SEQ ID NO: 115803 - DNA, 122 bp, Homo sapiens
gggatgatagggggttgggggcggtagactcagagagtcacgtggccccagcccctcccccgaccgatcccgaaaaaccagccctgccagtcaacctgccctcacctaggatctggacctag

SEQ ID NO: 115804 - DNA, 122 bp, Homo sapiens
aggggggaaaatacaattgcaaagctgccaaaatatgattaaaccgaagcgttaagactgcggagcctcctatctcctcgtcctgtctcctcaaactcatttccttccacagagcaaactaa

SEQ ID NO: 115805 - DNA, 122 bp, Homo sapiens
tatgtgtttaaataactgcaggcaggttataaatctaatctacttttggattctcagtgacgtgcccccaagctttcctattcatcccacaataacaaatccccttccccggttcttcctag

SEQ ID NO: 115806 - DNA, 122 bp, Homo sapiens
ggcggcggcgtcagggggcggagcctgccgaagcgccctttgtctgcggaggtgagtgcgcgccgggaggaggcggaggcgggaggcggaggcggggggcggaggcggggggcggaggcggg

SEQ ID NO: 115807 - DNA, 122 bp, Homo sapiens
actggggcccaagcccccgtccctgtcatctcctctcccaggtacatctcatgatcactccgtctgctcatgtgctcaaagggtgttaaaagacgtcaaacgactccatcttttatttgaca

SEQ ID NO: 115808 - DNA, 122 bp, Homo sapiens
ctacagcccagttgggaaaacaagacaaacacactacaaaaatagttaaatacaactgggcgcagtggctcctgcctgtaatcccagcactttgggaggccgaggtgggcagattgcctaag

SEQ ID NO: 115809 - DNA, 122 bp, Homo sapiens
cggctgctgtctcgctccagtcagggctggggctcaccctgcgagtccgggagactaaagcgccgcgtaaacacaggaagcaggcgagggacccgagttagaccttgagtagggagggagag

SEQ ID NO: 115810 - DNA, 122 bp, Homo sapiens
tagccaaggagtattctgtaatagatggcgacataacccaccagagcccttcctttgaggcgcctgaatgagagacatttagaaatgtcacagtgacacagaagttaagcacacaaagaatt

SEQ ID NO: 115811 - DNA, 122 bp, Homo sapiens
cacttggggcggagttagcctcgctcagggcgcggctaaggcgcccagatggcctgcgggcgccaccacgtccctggtcccagctcgggagcacatcagaggcttagaggcgagtgggaagg

SEQ ID NO: 115812 - DNA, 122 bp, Homo sapiens
cacggctgacagggcgcacccgagagcgtggtcctggccaggccgcggtagctgagcccgcggccatcatagcagcttgccttggtgtctgaggagaaagggggctccctgggcagccaagg

SEQ ID NO: 115813 - DNA, 122 bp, Homo sapiens
caagctggaaaagggtggaactcatggctgggcagacaggacagttctccagggatctggcggtagatctgtgtctggaacccaggttccctgatgtctgtgtcagggtgccaccccagacc

SEQ ID NO: 115814 - DNA, 122 bp, Homo sapiens
cggaaccgacatcaatgccgtctgtcgggcccatgagaagaaactcctgtcaacaggcgacgactttggcaaagtgcacctcttctcatacccctgctcgcagttcagggtaaaggacttgt

SEQ ID NO: 115815 - DNA, 122 bp, Homo sapiens
cagctggctgcgggccctggcctggccacccggctcacctcatactccagctcatccaagcggtctgcctcctgcgggccgccctccataaactccgccgggtcataatactcatggctgat

SEQ ID NO: 115816 - DNA, 122 bp, Homo sapiens
agctgcctttcccgaccccttcctatttggggggctgtttccctcacttccccgtcgccccggcctcctcccaaagctgcttccagagggaagctgagaagcaagtgcttaaagcctctggc

SEQ ID NO: 115817 - DNA, 122 bp, Homo sapiens
gcagcagaaggtgaaggtgttccgggcggccgacccgctggtgggtgtgttcctgtggggcgtagcccactcggtgagaaccagccctagacccccgcagccctgtccaaacccctcggctc

SEQ ID NO: 115818 - DNA, 122 bp, Homo sapiens
ctataccatttgattccatgggtctctctctttcctcataatgactgagggtaatgtctgcgttagatagctgtagtataaacagcaacatctgtggatgtgcttctcacagtttaaagttg

SEQ ID NO: 115819 - DNA, 122 bp, Homo sapiens
gaggagcgccgggctagttttaatttcctctgttttgcctgcactcacgccccctcctggcgtccccgcatcacctcgctccgccgccgccgtcgccctcagcccgcggccgccgccgtctg

SEQ ID NO: 115820 - DNA, 122 bp, Homo sapiens
agacttccaggcggactcgagaaccacgtggatgctgcgctgggccgtactgggccgtggcgataaccctggtaaagggaaattcgtgtggcagcatttcccccgccccccccccccccgaa

SEQ ID NO: 115821 - DNA, 122 bp, Homo sapiens
ggcctgctcatagctcaccctcccgtgttcccaggaatcccaggagcccgcctcgagggccgtatcctgcttccagaggcatcgtggacagagaaaggaagcccgaggcccatccctggctt

SEQ ID NO: 115822 - DNA, 122 bp, Homo sapiens
tgcatggaacatcggaaacctcctgaaaatgctaaatttgccccgagatgtcccgaagtccggcatatttctctgggcagcctagaggctcaggagcccagcccagcccagcccaccgtgcc

SEQ ID NO: 115823 - DNA, 122 bp, Homo sapiens
ttggtcccaaactatactgtacttcacactcgatttattctccagatggcgagactgtgccgccctgccgcgagggaccacctcttccactggagtgtaaaagtggacggatgttgttttct

SEQ ID NO: 115824 - DNA, 122 bp, Homo sapiens
aattttcagtccggtattcgcagaagtcctgtgatgttttccccttctcggcaatttacacgcgcgcacacacgcgcgggcacaggcatgaatctctatccacgggaccgcttcacgcctcc

SEQ ID NO: 115825 - DNA, 122 bp, Homo sapiens
gttgctcttacctatgaacagtggtgatgtgcgatgaccacagtgacgctcgcgggagaccgggctgggccggcgggcagccagagagcaaggtccaggcacaggggcccctggaggtgggg

SEQ ID NO: 115826 - DNA, 122 bp, Homo sapiens
taccaactaggggcaccagatgctgtcagaagtggtctttgtgcccaagaagaaaacagtcgcctgcacagtcacccaacccataaaacaaggccaatgggctcacaacattccctaccctt

SEQ ID NO: 115827 - DNA, 122 bp, Homo sapiens
acacattgttcaggtgaggcttgagctgtcaattctctatggctttcagtcttgtggctgcgggacttggaaatatatagaatctgcccatgtggctggcaggctgtttccccattgggatg

SEQ ID NO: 115828 - DNA, 122 bp, Homo sapiens
acacagtgcacttgaagggcttgctggagctgtgggtcttcaggtggatcttgaggtggtcgctgcgggagaaggctgcctcgcactcgtggcagtgatacttcttgtcgcccgtatgcagc

SEQ ID NO: 115829 - DNA, 122 bp, Homo sapiens
aaggagtgagtaaggcagaaagcccagcccagaaaaccggcgtctggggatttcagcctccgctccccggtccccagcccggtggctctgtgagaagaagctcaactcggtgcacttgttca

SEQ ID NO: 115830 - DNA, 122 bp, Homo sapiens
acggacaactggtccgggacaagatcccggggaaataaattcatctcgagaggggccgggcgagccagcgcggggaaacgcgagcttttgttttttatgacagccgggctgcgcagctctaa

SEQ ID NO: 115831 - DNA, 122 bp, Homo sapiens
ctgtaagcgcaggaaattcaaactaaaaatatgcctctatccagccgttagaccatctgccggagaagacacgagtagctagaaaaaaaaacgaggcgcccacaatgactgctcttatttga

SEQ ID NO: 115832 - DNA, 122 bp, Homo sapiens
gagttcagtcggctttttaatcagcaagacctttgatccagcaggaatgagtaattagcgcggagccgggagtgggcagttgcaggaggcggaggccgtgctgtgcgggctggcaggaggcg

SEQ ID NO: 115833 - DNA, 122 bp, Homo sapiens
actctcatccacacctgccagaaggggtcagggtgaagccgatggacagcagtgctgacccgcatgcagtggactttccatgaataacacccaaggctgactacagatgtttaggtgggggt

SEQ ID NO: 115834 - DNA, 122 bp, Homo sapiens
tggtaaaagattcaaacttttcttctggattaggaacaagacaagtatactctgtctcttcgcttctattcaatatagtatttgaatttccaagcagaccaattaggaaaaaaaaattaagc

SEQ ID NO: 115835 - DNA, 122 bp, Homo sapiens
gttgggcccaaaacagggactctgcgtcccacccgcggccgcgccgcccccccgcgcccccggccctgcagtcccgaagccccgcgggggtccagaccactgcacctgctgagccagacact

SEQ ID NO: 115836 - DNA, 122 bp, Homo sapiens
ggacggtgtgatcgtgggtctgtctcccttcgcaggtgaggaggtgtacaacggcacatacggagacacctgttatttcgtcaactgctcactgagctgtacgttggagttctataactggt

SEQ ID NO: 115837 - DNA, 122 bp, Homo sapiens
ctcgtagacgctgcagcggagcagagcctctaggcatgccctcatctagagcagctgctgcggaatccggggagcctgcagcactagccgtgcgattccgggcgaggtttttaaactctcac

SEQ ID NO: 115838 - DNA, 122 bp, Homo sapiens
tggaacactgtctgctttagtccgcaccatgttcaaacaagaagagaggagaggagagaacgaactgacttcccagccgagggtgtttcactggacaaggacccgaaaactatcccgccaca

SEQ ID NO: 115839 - DNA, 122 bp, Homo sapiens
actgacttcaaaaatgaagccgcggaccctggcggtgagtgttagagttcttaaaggcggcgtgtctggagtttgttccttctgatgtttggatgtgttcggagtttcttccttctggtggg

SEQ ID NO: 115840 - DNA, 122 bp, Homo sapiens
ttgttgcaaaagcatgttgttagaagagtggaatcaaagacaggcatcacattttacgagcgagttttaccatgatcattcatagaattagtcactgcaaagttctggtctctgggaaaaat

SEQ ID NO: 115841 - DNA, 122 bp, Homo sapiens
ccccggcggtgtcggtggtgcgtgttgccatggcgcctgcctggtggaggaagtgtcccgcggtgcccccggcggtgtcggtggcgcgtgttgccatggcgcctgcctggtggaggaagtgt

SEQ ID NO: 115842 - DNA, 122 bp, Homo sapiens
ggcgcccggcccacagctgtgctgaagcggaggctgctgcagccctcgcgccgggtcaagcgctcgcgccggagacccctcctcccgcccacgccggacagcggcccggaaggcgagagctc

SEQ ID NO: 115843 - DNA, 122 bp, Homo sapiens
tggcgaacccagcaccagcacgggcttcagtagtggacccagttctattgttggcttcagcggtggaccaagcactggtgttggcttctgcagtggaccaagcaccagtggcttcagcggtg

SEQ ID NO: 115844 - DNA, 122 bp, Homo sapiens
ttctcaactccgagcctcggggcccggcttacctcggtcaggaagcccccttcacctacacgcagcggagaagcgcccaagcaacaacgtctgcacccaaacccagtcctcagaaccgcaga

SEQ ID NO: 115845 - DNA, 122 bp, Homo sapiens
gaaagaggaagtcctcctctcagccaagacccagaagccctaagaagtgtccgaaaatagcgaagaagggaaaagcaactcgtcgagggagagccaggaagaaaagtgctccaaaaaagacc

SEQ ID NO: 115846 - DNA, 122 bp, Homo sapiens
ttcctgcttcctggaggctaagttccactaggcattacggtcacactggactggagaggacgagagacacagagagagggaaagatcttaccgtggagttcagaacaatgagcatgacagcc

SEQ ID NO: 115847 - DNA, 122 bp, Homo sapiens
ttcttaaaattgttattctcagaaacttaaaactgttgtaggcaggataagaataccacacgtatggacaaaacattaccaacaacactgtcaaataatgacctatcaacagctgagcttta

SEQ ID NO: 115848 - DNA, 122 bp, Homo sapiens
ggagtgatgctggagcccggggcaaaatgctggggcccgggacacggctgaaagttccgtcgtgctgcttatttttgggctcctaggtgttgcgcacaaccagcgactgctccagctcctgc

SEQ ID NO: 115849 - DNA, 122 bp, Homo sapiens
taagttttcagttctgagaagggaccacccatccttctttttagtccccaactccctggccgagttcacttggtgctagtacatcagagttctaagcatgcctcatagcagaaagctgccct

SEQ ID NO: 115850 - DNA, 122 bp, Homo sapiens
aggatgctccgcggtctcccactcagttctggcctcagagtgagactgcggccgggggctcgggaaagaaggggacgcggctgggcggggcggtgactaaggtgaggggctgctcgcgggat

SEQ ID NO: 115851 - DNA, 122 bp, Homo sapiens
cctttagtacaaaggtataatcagacaggaaggtgtagatttggggctttttgctttctacgtaccacattctacacattgactgtagcttcacagctgtcttaaaatggaaactagaatgt

SEQ ID NO: 115852 - DNA, 122 bp, Homo sapiens
gtatgttctcagggtggcggggagcagcattgtcggtgttgccctaaatacgcttcctcccggggagatgggtggcagggagggggagcacgcagggcagccacttggtaaccgctccaaga

SEQ ID NO: 115853 - DNA, 122 bp, Homo sapiens
cctattttcttacttctctctttaccctgtttctttatcaagtgcagtggtggctgctaccgttcgccaagcgtgcctgtcttctctctcggattggctaaagcactgacagctcggatagc

SEQ ID NO: 115854 - DNA, 122 bp, Homo sapiens
ctttagaaatactatgtagattgaccctggcatctttttgcagctcctgtgctagtcggtcgtttttcagcagaagagcggaaatgggacaggacagaggggttgagcgttgtgccttcatg

SEQ ID NO: 115855 - DNA, 122 bp, Homo sapiens
ccaggcactggaggagcggccccccggggattccaggacctgagctccgggagctggactcgcagcgaccgcggcagagcgagcgggcgccgggaagcgaggagacgcccgcgggaggccca

SEQ ID NO: 115856 - DNA, 122 bp, Homo sapiens
tgggaattaagaatgcccagggtttttcaggggaactgaccaacatgtgtcttcagaaggcggcatccccctcccttttcccttacagcccatacgaaagcgtaccctctggggtgcagcga

SEQ ID NO: 115857 - DNA, 122 bp, Homo sapiens
cggcactgtcttccagggcctcctcatcgtggggcaaatcatcatctgaggagaggtccacggtgtgcagggtttcctccagggatttgttttcatccggaagctcctccttcccttccacg

SEQ ID NO: 115858 - DNA, 122 bp, Homo sapiens
atcttcttgacggccatcgtacgggatcgtgggggtgcaaggcctcagagtctcggcacgcgcgggaacccactggctgctgggcggtgctctctgccctactcaagccaggaacaacgggg

SEQ ID NO: 115859 - DNA, 122 bp, Homo sapiens
ttggagatggctggtggcgcaatacctaccttccaccactagatgacaaacttgcaacagcgtgcttccaacaggacgcccacgtttgacacgttcctgagacgctggagaaaaccgattgc

SEQ ID NO: 115860 - DNA, 122 bp, Homo sapiens
tgaaactgattgagtgtttcaaattatgtacttttgcttggctattagccagatgttcgtcgggaaagctcactgtacatcaaggcctatgatttgtgctgacaataatattacatagttta

SEQ ID NO: 115861 - DNA, 122 bp, Homo sapiens
gaggcggcagggagggtggcgagcggcgcggagggcacatccgtccctcccatgggtacacgctgcacagtctccacgggggaagcgggttgctgtcacattaagtcaattgcatattcctg

SEQ ID NO: 115862 - DNA, 122 bp, Homo sapiens
aacatggtcccctttccttgcccgcacttcttcatgcctggcttcgcacccctgaccagccggggcagccagcagtaccaggccctgagggtgcctgagctcacacagcagatgttcgatgc

SEQ ID NO: 115863 - DNA, 122 bp, Homo sapiens
gggtgaggaagggcggggtggggcacctaccttgaaagggcagtggagtgggctgtagggcgctggctgaaacagagtgaggaagagcattggcccctctgcccacaccatggctccctggt

SEQ ID NO: 115864 - DNA, 122 bp, Homo sapiens
aagacgcggaccttcgcggtgagtgttaaagctcttaaaggcagcgcgtctggaattgtccgttccttccagtgggttcgtggtctccctggctcaaaagtgatgctgcacaccttcgcagt

SEQ ID NO: 115865 - DNA, 122 bp, Homo sapiens
acggcggcaggagaagcaagatgaatgcaggctcagatcctgtggtcatcgtctcggcggcgcggaccatcataggtgagtggccggcgggagccgcgcagagtccgaggcgcctgctgctt

SEQ ID NO: 115866 - DNA, 122 bp, Homo sapiens
atgcggggcggcccggggcgtgcgcctggagtcgcgcggagtgtgggcttccgcgaggggcgcggggcgccgcccgggctttattcgcgactcattagcatctcattacttctggatccctc

SEQ ID NO: 115867 - DNA, 122 bp, Homo sapiens
tctgttccttagcagtgaaagcagtcagcctgtccttcctggttttccgttaaactaagccggtttcaagtttcagctcctccttgaattccaggctgctgagacttccctctagaatcctc

SEQ ID NO: 115868 - DNA, 122 bp, Homo sapiens
aatcatgggcatatatacctctctcccagaccagaatgaaagtaactttagcacaggggtcgtctcttatttgacttcatggttgtattgttcagcacaaagtcatgctccctacaaactta

SEQ ID NO: 115869 - DNA, 122 bp, Homo sapiens
ctcccgaagctcgctgaggtctgacttgttcccgatcagcagctgcacaatgttggagcccgcatacttcctcacatcctcaatccagtgaggcaccgacaggaaggagctcctcttggtga

SEQ ID NO: 115870 - DNA, 122 bp, Homo sapiens
aaaagaccagaaatagtgagcacagagcgactcactaaagcttcagggtcacaaattgagcggcaagatacttgcgagacagaaaaccgaggttatgacggatactttggccctaaataaag

SEQ ID NO: 115871 - DNA, 122 bp, Homo sapiens
cggaaatttgaagagtatccaaagttcagaaaaattataattccatttttgttttaagtgcgtttttcatgaaattatcttcaacttgaagctttccaatggcgcttctctatggactttgt

SEQ ID NO: 115872 - DNA, 122 bp, Homo sapiens
acacacgtgactgctaagcctccggtggccgcctcttgtgcagggtaaggagcctccccccggggagcggcccccacagtgcactgtgctcatccacagctgggcctctggctagccagggt

SEQ ID NO: 115873 - DNA, 122 bp, Homo sapiens
gcctccctctctgtaatcttggtcgcaccacctggatccccacaccagtccagatctgaacggagttcccttagtccccataaacttggtgatttggactagcagccatccatagaaggccc

SEQ ID NO: 115874 - DNA, 122 bp, Homo sapiens
tccagaggacaaaatgcccgtctttccagggtaaacacccatttgccaaacagccagtgacggcaagcaggagtttgcttttttaaaggcgtctgagtaacgatgagaagagcaagaaatga

SEQ ID NO: 115875 - DNA, 122 bp, Homo sapiens
cctccagcgacaaatttggctcctggcaaattggcacttcgggagccgagcccgtctcggcgggcattcgcacacggggagaaagaaatctgtcaatgtctcccaaggcttgcctttgaatc

SEQ ID NO: 115876 - DNA, 122 bp, Homo sapiens
cccccccgccccgctagtgggcctcggatttacggcggctgcatctaactgggagggggccgcacctcgcgtgaaccccgacccttctctgcagggactggggcccagcgccccggaggaag

SEQ ID NO: 115877 - DNA, 122 bp, Homo sapiens
cagctggaagcagggacaaaaattaggaaagtgtctagttattaaccagtcaactggctgcgtggggccaattgtcacagaagtaattgtttttactttgtggattgtttctagagagagca

SEQ ID NO: 115878 - DNA, 122 bp, Homo sapiens
gttagaagctggggaacagtgacttgggccccttgggacaagataacaggcataccaccacggctgcacccactattgtcctaattcaaactctttctctacttctcacaaccctgtattgg

SEQ ID NO: 115879 - DNA, 122 bp, Homo sapiens
ccgccctccgccgtgcgtgactttcctcgtcgcgtccagctccccttttctttgaccttacgtgaccttgggaaaaacctccaggctgctaccccatctgcacatgggagggccgggggtag

SEQ ID NO: 115880 - DNA, 122 bp, Homo sapiens
ctggggaaggacctctgctgggcctgctggattgcaaagagcaagtttaaaagaccccctcggacctcttgacaggccttccacctgaagagtggggataaggaccataggttctttttatt

SEQ ID NO: 115881 - DNA, 122 bp, Homo sapiens
cgccattgcactccagcctgggcaacaagagtgaaactccgggctagatgaggtggctcacgcctgtaatcccagcactttgggaggccaaggtgggcaaatcatgaggtcaggaggtcgag

SEQ ID NO: 115882 - DNA, 122 bp, Homo sapiens
cctctgtttacgctagcaaggaagacgaaaccgttcacacacccggaaggaccctaagagcgacgcagcctcaccctcggccaatccccttccccagaggccccggaagtcacctctgtgca

SEQ ID NO: 115883 - DNA, 122 bp, Homo sapiens
actcaacctcttcaggtatctgctcaaatggaacctcccacaatgggtcccctgggctcccgtggctggagaacagcctcatcactctgtctgcccctgcttcattggccttcagagcactt

SEQ ID NO: 115884 - DNA, 122 bp, Homo sapiens
tatatgatcttgccacacttacaaagctttgctatgagagaggcaacaaaatattcccgacgaaggcttgctgggtgttaaggtgtcatatttagtgccacctaattatcagtaacagtaac

SEQ ID NO: 115885 - DNA, 122 bp, Homo sapiens
atgctgtttgtctcttcctcttcccctttcctcccagcccatttcaataaggctgactaccgccaaccactccgccccagaggcatctgcccccggccgcgcaccctctctccctcaccacg

SEQ ID NO: 115886 - DNA, 122 bp, Homo sapiens
ttaaacacagccatgactctgggtttcagtcaattttgcccctcaggggacatttggcaacgtctagcagcatttttgtttgtcacaaccagggggtgctattggcatctaatgggtagagt

SEQ ID NO: 115887 - DNA, 122 bp, Homo sapiens
gtcccttacaccacccagacttttcctctctcttccagggggaagggtggggcgtcctcccggacccaaggcgcagacaggtaccggaaacttgcaaacgttatgtcagctacacagctgcc

SEQ ID NO: 115888 - DNA, 122 bp, Homo sapiens
caggacccccgccccctcgcgggcgcgggccagccgactcccagggcacaactagggctgcggggtcacttgccccctggctcagaggaactcagacttcgctatccgcggcgtctaggcgt

SEQ ID NO: 115889 - DNA, 122 bp, Homo sapiens
tttccccgagcccctcctctccggccccgcggaccctcctcctttcccgactgcagcctccgccttgcatcctttctggccgctcgggagtgtcccacatgtctgactgccgggacctgctg

SEQ ID NO: 115890 - DNA, 122 bp, Homo sapiens
gaggcggcggggggcggagcgggggccatggccggagaccgcagctcccagcgcgcagcccggcgtctgctctgctgccaccctgagcgcctctaacatcccgggagccccgcggccgttcc

SEQ ID NO: 115891 - DNA, 122 bp, Homo sapiens
atctcacatgaaatatgggtgtgtacattttttccttcactagattggcaagtattccagcgcagggcaaatctcttttttctcccaccaaggaacacaatatcccatacataataggtgtt

SEQ ID NO: 115892 - DNA, 122 bp, Homo sapiens
ctagtaatcactgttgaaaataatcatactagttcacaccgcgcactacagggattccatcgagggattttcccattgaaggcatttatttagctaaaaggacttcatctttaaggcggtaa

SEQ ID NO: 115893 - DNA, 122 bp, Homo sapiens
ggactctcactctggcttttccttcggcgggtccgcgggagacccaccgtggcggggaagcgagggtgtggagccacttgtgcagatatttgagagaatggctttgtggtctagtgccagga

SEQ ID NO: 115894 - DNA, 122 bp, Homo sapiens
gaggaagaaacctcaggcggagcgtctgggaagcagcgcagtatcccaggctcaggcctgcgtggacggtgtgccggtgagtctccccaaaagtcgtgcccttgcgatctccaggacaggtc

SEQ ID NO: 115895 - DNA, 122 bp, Homo sapiens
ggaaataaagaatattaatttaatttgaatgcttacccaaccctatacgctaagacacaacgttaggttttttcaaagaaccatactttgtaactgaaagattatttttgagcttttactta

SEQ ID NO: 115896 - DNA, 122 bp, Homo sapiens
aagaatcgggaggaaactgggtgaaaggctgcgaggcttgaggcgggtcccggacgaacgcggccctgcccctcgccggagcctctcgggagaagtgcgacaccgccgctgattgagaggct

SEQ ID NO: 115897 - DNA, 122 bp, Homo sapiens
gaaaggagccaggggttagcagtcaccgttcatatagtccagtgcagatcagcccaagggcgagcccatttgtttgtgcttctctctcagcattttccaccacagcggatgcagctcttcac

SEQ ID NO: 115898 - DNA, 122 bp, Homo sapiens
caaaggcctaaaccaaggtagtgccagtggagatggagaggagcagacatacttgagatacgcttcagaggcacgtggaagggatgagcaacacagtattgttggcaggaaaggaaatgagg

SEQ ID NO: 115899 - DNA, 122 bp, Homo sapiens
tggaggaggagctcaagggactgaagctccgcgggccgtggccacaagcgacagtgctggcgcccgacgtgccagaagccctggctgccgcctggaaagaggccacgtgggcagcggtgggc

SEQ ID NO: 115900 - DNA, 122 bp, Homo sapiens
ctgtggagaggaagagtaaggcgggctctgcagggcagtgggccgggaccatgagagaggcgggtcagtctgggctccaagctcagcctctcggattccccgggacccacggcttataatgc

SEQ ID NO: 115901 - DNA, 122 bp, Homo sapiens
gacccaaacggagagggagtgtgacgggggcgcgcgcctcccaactttcttcccacctcccggctctcaccgcggcggtttgagatccaagcctgtaattctcacgtccggaggtgagaagg

SEQ ID NO: 115902 - DNA, 122 bp, Homo sapiens
ttgtgcagaaaataatcacttttatgttcccatctagtaactgcatcccagggctgggagcggtccaggtattccgccgtcaagagctccctgtgtccacttcggatgtggttgctatcgac

SEQ ID NO: 115903 - DNA, 122 bp, Homo sapiens
tttttaaaaatagaaaagccaccaatctccagggcctcgggtaagaagtcgctccaaaatcgccagcaccacagcaactcaataggcttctatttccatccaccaaggccaggacactcgta

SEQ ID NO: 115904 - DNA, 122 bp, Homo sapiens
tggttttttttgagacagtctccatctgtcacccaggctgtagtgccaatggcacaatctcggctcaccgcaacctccgcctcctgggcttaagcaattctcctgcctcagcctcccaagta

SEQ ID NO: 115905 - DNA, 122 bp, Homo sapiens
gagaggctgcccagcagttgctaggcagtcctgggccaggtcgtggttccgccacttactcgctgtgcgacctcttgtgcctcactgtaacatgggacaacggtagtcccaacctcatggtg

SEQ ID NO: 115906 - DNA, 122 bp, Homo sapiens
ccaatgctgtcctcgcctagtgggggccggcgtcggtggggagctgactgagtccgaggccgtcgagtgaaaccagggggcagccagagagctccatgctctcggcgtcgacgccggatgag

SEQ ID NO: 115907 - DNA, 122 bp, Homo sapiens
ctatcgctgcatattctcccagccacccccggcggagacagtgaccaactgcgcggatggcgggatgctccgtgtcttaaccggggtcctgggctgcctgcaggccttgaaagtgctgaaaa

SEQ ID NO: 115908 - DNA, 122 bp, Homo sapiens
caaaacggagtaaagcccggagatcgggtgatctggcagcccaggcaagatcgaggaccgcgactaggaaaggagacagcaggagagcagttagacgtccacttagaacggattcactgcgc

SEQ ID NO: 115909 - DNA, 122 bp, Homo sapiens
ccattctgggaggctctgggaagccactgaggacttcagagaagagaaaggcaatcacagcggggcaccaggaaatttatccgtgtgcaaggccaaactaacaaagcagggagcaactggaa

SEQ ID NO: 115910 - DNA, 122 bp, Homo sapiens
tcctgccctgtgccggtggtgggctgggggctaaggcgctttggacctcaggtgggaggccgggacagagcggccccctcgaggctggtacagccgggcccccgtgaccgcccggctaatcc

SEQ ID NO: 115911 - DNA, 122 bp, Homo sapiens
gtttttcatctagcattccaattaaaattaaaagtgtcaagtcacaattatgttcacttccgtatgtgttcccattcaagatttaaatgacgaaaaaaaaagttggaatcaaagtttttgca

SEQ ID NO: 115912 - DNA, 122 bp, Homo sapiens
gaatttgttaaaacgccaaatctcaggccttacccagacttactgaatcaatatctgcatcgcaacaagatcccctggtaattcctatgcacataaaatttggaaggcacaactctcaactg

SEQ ID NO: 115913 - DNA, 122 bp, Homo sapiens
tagggcctccgggacacaggaacacgcattgtgcacacccagccccctccccgtgccctccgccacacccacatcacccccacctggtcgcgtccgtgccagagacaaaccagttaggtggc

SEQ ID NO: 115914 - DNA, 122 bp, Homo sapiens
cggctcgggtgaggacctgacaattccccgtcaggatggcagatgacggctaaaattacccggaatcaatattctcaccgggtgtcccgggctgataagctccgccaagacaatgttgacta

SEQ ID NO: 115915 - DNA, 122 bp, Homo sapiens
ctcacacgctcatcctttgctcatcctttgcatgttctggcctcccagaaaatcacagagcggttcttccgcaacccagcgaagcccgcggaggaggacgtggcagagcgcgtgtttctggt

SEQ ID NO: 115916 - DNA, 122 bp, Homo sapiens
ctagtttaccagagacgaaggtaaagtcccgtctcctgcagttgttgacgttcagtaggtcgtcggttaagaaaagtggctccctggttgaccccagctggatagaggctaattttgatcca

SEQ ID NO: 115917 - DNA, 122 bp, Homo sapiens
gccgcgccccgccccgcccctctcccgaagccccgccccggcgcgggaccaccccctccgcggcctcagctccggtcctggccccgccccccgcgcccccgcccccgcccccgcccccgccc

SEQ ID NO: 115918 - DNA, 122 bp, Homo sapiens
gtcaatccccgccagcccatgctgtgttaagaactgagccccatctctctcccgcatggccgtggtccctgctcctgcggcggtggtcctgaatcacacctgcctccgcattgaacaactat

SEQ ID NO: 115919 - DNA, 122 bp, Homo sapiens
gggtcccagtgggggtacagagggggcaggttcaggtggatactgcaaacgttaagtttgcgtgcatctcagctgagggacctcatgcttaggaaaccccagtcttttataagggttgcaag

SEQ ID NO: 115920 - DNA, 122 bp, Homo sapiens
ctctccacctccttgcttaaaagcctcttctgatgggtaagtgcttccacttgcgatcgccgccttgccgcatcccctcagcctgtggcactcaaactgtgggggcactttctgctctctgg

SEQ ID NO: 115921 - DNA, 122 bp, Homo sapiens
tgagcggccctaggtcccctgggtccctctgacgggcaggtgacgcagccaatgggttctcgcctctccgccccgctcattcgctggcgctcgctttctctgtctgagggtcggactccacg

SEQ ID NO: 115922 - DNA, 122 bp, Homo sapiens
cggcggcgggcgcgcgtcccgtccaggtccggagtaaccgccgccgccgccgccaaagctcgccaacatggcggacctggaggctgtgctggccgatgtcagttacctgatggccatggaga

SEQ ID NO: 115923 - DNA, 122 bp, Homo sapiens
caactctgtcctcgcagccgtccctgagagggcgctgttcccaaatcgaagccccagaggcggagactgagacaccggcactctcccactggactgggtcagcatccctctccccgcgcggc

SEQ ID NO: 115924 - DNA, 122 bp, Homo sapiens
tgtttgggtcatggcaagcaggctggagccagggtacaaggggagagaagaagctggagacgtgacagtgatcagttcatggggggccttgtataccaggctaagggtgccaggaaatggct

SEQ ID NO: 115925 - DNA, 122 bp, Homo sapiens
tgaatccgggaggcggaggttgcattgggccgaaaccgcgactctgcactccagtctgggcgacagaatgagaccccgtctcaaaaaaaaaatcggcaatcggtgaggcggggattattacc

SEQ ID NO: 115926 - DNA, 122 bp, Homo sapiens
tgttccgctggcacatccgcgcaggtgcggctctgagtgctggctcggggttacagacctcggcatccggctgcaggggcagacagagacctcctctgctagggcgtgcggtaggcatcgta

SEQ ID NO: 115927 - DNA, 122 bp, Homo sapiens
gaactgctaagtctgtcagaggaataggtgaacaacaaaaatttgagtccttcgccaatccggttactgttgggtaggccttcagcatacttttgtccaatcagcttcagactctcactata

SEQ ID NO: 115928 - DNA, 122 bp, Homo sapiens
cccgcggcgggaagcggctccatttacaagtgtaaaggcgaggcgcgaggtgggggggcccgggggtgtcagataccgcggcccgcggaggggccagggtggggccgccaagtgccctgcgg

SEQ ID NO: 115929 - DNA, 122 bp, Homo sapiens
cccaggccctgggagacagggcagagtgctagagctagactgtctccaccccttcagtagcgctagctctggttgtgttgctaagagccccaaagacaaagaagtcacagcagaagcccaac

SEQ ID NO: 115930 - DNA, 122 bp, Homo sapiens
gcgtccatcagcattgtaaacacgtactagtgtatatacttcaaaattaaagaatgcacacgcagaaccgggagcctgaattcatattctgagcagactcgcttctcgcatttattgattta

SEQ ID NO: 115931 - DNA, 122 bp, Homo sapiens
aggaaggagtggaatgggacttgggggatctgggggcgtcccgggcgcgcccccagattccgggctcctcaccgcctcctacgcgccgccactgccgctaccgccgccatcttgtgcagagt

SEQ ID NO: 115932 - DNA, 122 bp, Homo sapiens
tggcgtaattcctgtcggggcgtgtcttctcccggaaatggtctaagccccagctcctggcggagcgagctagcctgcgaatttcagcatgagtgtactgctgaggtcaggtttggggccgt

SEQ ID NO: 115933 - DNA, 122 bp, Homo sapiens
ggaggcggttgcctcgctgggcgcagcaattcaaccgccgcgcgccggatgctaagaccgcgatttccccggatgctagggcggtgatttcccccgtgacaggccccgccccggccccgccc

SEQ ID NO: 115934 - DNA, 122 bp, Homo sapiens
acctgaatgagcatccatggtgtcccatgaggccacagctctgacaccttgatttcagctcgatgagatgctgaacagagaactcactttacccatgcctgggcttctgatccacagcaatt

SEQ ID NO: 115935 - DNA, 122 bp, Homo sapiens
ttcatatattctaaatccagctagtcttctataaaaagttgaatgggagcttttttctcccgtaaagtaatttcatttgtcgggattgttcaggattgctgtgttagttcccaaaacctcca

SEQ ID NO: 115936 - DNA, 122 bp, Homo sapiens
acacgccagggctccacccggatcctggcgccactgcgggagggcctgcccttggctcagcgtcagagtttgtcctctggggcccaacgcagggagcctggccacatgggaggggtgtggtc

SEQ ID NO: 115937 - DNA, 122 bp, Homo sapiens
ctccccagctgaggtggggacctgtacttgtacagagcccctgggcacgtgtggccggaccgtgagggctgcaggctcggagtccagctgtcagggaccccggcgaagcaaaagctggtttt

SEQ ID NO: 115938 - DNA, 122 bp, Homo sapiens
aggactcttgagcagtgctgtggagctggagcagaatgggcacgaggtatcgggaaaagacggaatattaaagcgaagaactggattgggggaaggcgtattattggcctatatctagggtc

SEQ ID NO: 115939 - DNA, 122 bp, Homo sapiens
ttgtgcctgaagcatggaaggagctgaacaatgaggatctcaaatactctagtgccatttcgccatcacaatacctaaaacacatctgattctattggttatcttgattttcagccattacc

SEQ ID NO: 115940 - DNA, 122 bp, Homo sapiens
gtcctattggtttgagccataaagatagctcaagctggtaccaagcacccataggagattcgtgaaggtcaggggcacctccactcagaatccctttgtggttaccaaaatatgaaccccaa

SEQ ID NO: 115941 - DNA, 122 bp, Homo sapiens
aggcccctgcagggagattggcaggcctgggctcaggctgcagccaaatgtcagccagctcgctccaaccagggcaggagaggactctcacccaatagacaggtgaggtcagcaggtccctc

SEQ ID NO: 115942 - DNA, 122 bp, Homo sapiens
aaggtcagcgcgatgcacctaggcgacgccagagggtgcgcaaggcctactagagaaggccgagaccgaagactgttacttcaatacacatgcattcgtgcctccagcctgtattcattctg

SEQ ID NO: 115943 - DNA, 122 bp, Homo sapiens
taactcttggggccaaaccttaaaaccatttgctgatgtaaagggatgtaaattatttggcgttggcagtggtgccattatgccttttcatttcatgttgttgaaatactgtctctcagctg

SEQ ID NO: 115944 - DNA, 122 bp, Homo sapiens
aagttacttcacctccctaatcctgactttcctaatttgcaaaagttttccttttaggatcgtttgtggttattaaatgaaataatgtacagaaagcatctggaatgttaaggaccgaatac

SEQ ID NO: 115945 - DNA, 122 bp, Homo sapiens
gatggattaaattggcaacacttacccactctccttttagagctaacttcaggggactgtcgtgtcttatgctaactaccacggctgctgtcttcactgtggtaccttgagccctggaccgt

SEQ ID NO: 115946 - DNA, 122 bp, Homo sapiens
ggcctgctactatagccattcttcatcacagggtttaggctctataccaggtgcagccggcggagataattgagtacgtaatactcctcatctcagcttaatcatcagggggagcttccact

SEQ ID NO: 115947 - DNA, 122 bp, Homo sapiens
cgggatctcccggtctccgccacagacccgggggtcccctgctcctgcactgaagacgcgcgcggcctccgttgcttatccagatccccggccagaactctgccccggcaccgaacaccggg

SEQ ID NO: 115948 - DNA, 122 bp, Homo sapiens
cttccctggggggagagagcatcaagagcatacatctagcaccctctccctcccagcaggcgcgcaacacacacctggaccgctgggcggcggcagcccccttagtgcggcagcctagcgtt

SEQ ID NO: 115949 - DNA, 122 bp, Homo sapiens
ttaccgatcggactaagttccaggtacctggactggggctggtgcggggaggttggatcccgagtcgcacaggtggcgtggagaactgtggtttaaatatggccaggggactcgcctcctct

SEQ ID NO: 115950 - DNA, 122 bp, Homo sapiens
cgagatatagcagcagggaataaaacagtgggaacagtagatcagcctcatattgcaaatcggcggcacacaccctggagtcgtttgtttcccatgagcacgttgtctaagtactacgataa

SEQ ID NO: 115951 - DNA, 122 bp, Homo sapiens
catatccgtagcctccgaagccagagccatatccatagcctccaaagccagagccatatccgtagcctccatagccacagccagaacccagtctgcggaagctgccacatccacagccatag

SEQ ID NO: 115952 - DNA, 122 bp, Homo sapiens
ctaattgcgagcgcggcctcatttgcataggccgccggagtccgctggagcccggccaatcggcgcggccctccgctaatggccatgcattattcaccagcctaattgctcagccccatgcg

SEQ ID NO: 115953 - DNA, 122 bp, Homo sapiens
ctttgtgacctttgaaaaattcagcattttccatttgtttaagggagcaaaagatcagcccgccctttaggaatgagctattattcacaatgagggaaatagcagtcatattgagagttgca

SEQ ID NO: 115954 - DNA, 122 bp, Homo sapiens
ggtgccaggtaggccggcgtgcccaccactgagcggcggaacgacttctcgccgatgatgcgagcaaagccaaagtcacacagcttcacctgcagagggcaagggatggaggctccaccagg

SEQ ID NO: 115955 - DNA, 122 bp, Homo sapiens
agaaaaggaacacatatcactcatttttgcatacagtagaattaatggtaacacttcatgcggctgaaagatggggcctttatctgccaaagaataatgcactactgatcttttgatttcta

SEQ ID NO: 115956 - DNA, 122 bp, Homo sapiens
atacagtttctagtccatggcctcctctgggacccacactatgccaggaagctcctgccacggagagtcagaccataaagaagtttgctgacacctcagggcacagcaggagggtggaggct

SEQ ID NO: 115957 - DNA, 122 bp, Homo sapiens
gctcctccacctccctaccacggtccccaccaagaaacaggtgtccggggtcccagcaagcgcccagggccagagcctggagtagttgcctgtctcggaccccggcatttgaatattttcac

SEQ ID NO: 115958 - DNA, 122 bp, Homo sapiens
cggtttgatctgtctgctcttagaattaagttcctagctcccaggcagcacagctggatccggctgggaagtttgtgtgttagtttgttttgaggacgtgactgtgtcgttatatttttgct

SEQ ID NO: 115959 - DNA, 122 bp, Homo sapiens
aagcgcggaggcgggggtgctgcgcgcttgggagcacgtgggggaacacgcagggactgccggcgcgaatggcttcgaacgcatgcgccccacccgacatttcacagtcgccatgacgaccg

SEQ ID NO: 115960 - DNA, 122 bp, Homo sapiens
ccttggagcccgagagtgtggagcactaggagcctctgcactccgagaagggacagccaccgcgcagggaaaggggcgcggagggtatggagcccggtcatggggtaacttgctttaaccct

SEQ ID NO: 115961 - DNA, 122 bp, Homo sapiens
gccccacccgtcctgaggacctccgaacctgcagggggcgatgaaagtaggcttgcgctccgcttgtagctgcttccgggtcagaggtcagacggtctagcgctgcgtgggccatggtgcag

SEQ ID NO: 115962 - DNA, 122 bp, Homo sapiens
tctggatacactattcacactatgatttgcacacaattcacatgctattcatactaccatcgctgctactattcacagtactggccacatactagttacactcctatgcacatgctatttat

SEQ ID NO: 115963 - DNA, 122 bp, Homo sapiens
ggaaaatgtcctggggccagtttcaggtttaggagcttgtgggtagcgtggtttcccacacgctgcctggcttcctactctcccccgcaggggctgcctctcctcccaccccggaaggccgg

SEQ ID NO: 115964 - DNA, 122 bp, Homo sapiens
agtgcaggactgagctgtagccagaggcccatctgccttgtaaatcaccctcctcccacccgccctgcctgccatgggggcctgtggtcactgcttctgcccaaggaggctgaagcaggaag

SEQ ID NO: 115965 - DNA, 122 bp, Homo sapiens
gaggggcagagacacaccccactaatgtttgggtccctgatgcaaaggcagagacaggtgcggggagggggtcctttttctccgaagcgagaggtgaagtcaccaactgctgggtcagaggc

SEQ ID NO: 115966 - DNA, 122 bp, Homo sapiens
ggccggaagcggagggagcgctgcttccggagtccgccgggctgatttgcatagagtgtccgggccgccccgcccaggtcgtaaaccagtgccgacggccctgcggttgcgcgaggccatcc

SEQ ID NO: 115967 - DNA, 122 bp, Homo sapiens
gactatggagagccgacccagcccctcaggaaccctcatccttcaaagacagcctcatttcggactaaactcattagagttcttaaggcagtttgtccaattaaagcttcagaggtaacact

SEQ ID NO: 115968 - DNA, 122 bp, Homo sapiens
gagcaggacgtgtcgagctacctgtgcaaagccccgagcgtggggtctctccttcaaacgcgagatacttactgcctggtagctgtcctcatcaaacagggctgctcttttcagatcaaagg

SEQ ID NO: 115969 - DNA, 122 bp, Homo sapiens
gagcaaaccctccaccatgtcatgctaataacagcagacctaggaactgaccctatgccacgccgtctggacccgcatacagtcatagtgtccaggtggctttgtgagtcacccagaccctc

SEQ ID NO: 115970 - DNA, 122 bp, Homo sapiens
tggtcatggtggcggcgacgatggcattgagacgtaggcactgggcgcaggatgcagcggcgcgcgggctttgctcggttcggggatcgttctcgcctcttcttcctccaaattttgtgaac

SEQ ID NO: 115971 - DNA, 122 bp, Homo sapiens
ccttgccaggctccactgccacccagaacatggcctccctgtcctggtctgggttctcctcgagttgtatttccatggcagccacaatgggcagcagccagggtgagtcaggccaggcaaga

SEQ ID NO: 115972 - DNA, 122 bp, Homo sapiens
tgcgggttccgggccacatggatgggcaaggccgggcagggccgactgtcgccggctgcgcgcccgttaccccgaatcgaagcccgtcatccccgcggggcacctctccatgcccggtgcgc

SEQ ID NO: 115973 - DNA, 122 bp, Homo sapiens
gcaataaaggcaccccctcttacaggactgttaggattaaatgagctaaatcacagtgtccgaacacttcagtacttcgtacataattacttgctcaagaaatgttagctattattgggtca

SEQ ID NO: 115974 - DNA, 122 bp, Homo sapiens
catgcacactcattccacaggccccactggccctgtcacactcacacggcacgcacttggcgctgcctgctgtctgccttccacctgggggtacaagaggtcacccaagggggcaggcgtgc

SEQ ID NO: 115975 - DNA, 122 bp, Homo sapiens
tcaaccaggagtttcccattacaaatcttaaacttgactcaatgtgaacgtccaacgaatcgctttttcaaaagtcgctcattttttttcaaactaaacacctaactgagaagtaaaaaaat

SEQ ID NO: 115976 - DNA, 122 bp, Homo sapiens
aattgcttgctagaaattaaaattactaagagttaaacttaggccaggtgcagtggctcacgcctggattcccagcactttgggaggcagaggcaggtggatcacttggggtcaggagttcg

SEQ ID NO: 115977 - DNA, 122 bp, Homo sapiens
tgccagtatgaacacatgttatcaacacagcagtcacttggtatcaagtggaactgatagcgccatctcggaggctgtcttcagagaagctcatggacttgttctcagggcagttcgtacaa

SEQ ID NO: 115978 - DNA, 122 bp, Homo sapiens
gggttggtctctgcaatctcagtaaacatctggccgcagggcctggcaggaagctgacctcgtgggcaccacgcggctggcagctgtggccggtctataaatacattctaaacgcggaccag

SEQ ID NO: 115979 - DNA, 122 bp, Homo sapiens
ataaataataaactgactgagacatgaaagagtaccctgaagaaactatagatatgagtacggtgactcactggtttgaagaacagaaagtttctctgtgatgctccacaatgttttccttt

SEQ ID NO: 115980 - DNA, 122 bp, Homo sapiens
caggtaatgccacactatatagttcagaggattacctcagcttacaaacagcaaatgagacgcaaatgtgagccataattcacatttctaagcagttggagccctgatatggcactggggtt

SEQ ID NO: 115981 - DNA, 122 bp, Homo sapiens
gagagaggcggtgggagtgaaggcctcctcaagggctggctcaactccagggcaaacctccggaggaggagctaggtaagggaggtcagttgatcaccctctgaggagctccccatgcttga

SEQ ID NO: 115982 - DNA, 122 bp, Homo sapiens
ctcttcccgccatttccttgggctggaggctcctcctccagaataacagaattttcctgccggcacgttagcgcaaggacgcctgcgcactcttccctcccggttcgcggtcgggaggctcc

SEQ ID NO: 115983 - DNA, 122 bp, Homo sapiens
tcctggcgctaagatggaaacttctccagcagccaagtctgagtcttggccagcggcccccggcctcccagaacctctgccctggagtctccacccaagaacagatcactccctttgggagc

SEQ ID NO: 115984 - DNA, 122 bp, Homo sapiens
aaggatgtatagaatctaagtagatgtaggtgctggggatgaggggctattccctctatgcgtaaactcagaggtgggaaatgagtggggcacacccactagaggaagataagcgtgatcat

SEQ ID NO: 115985 - DNA, 122 bp, Homo sapiens
aattcccagtccctctcccttgctttccccacctactcctctatgtgactggcacagtgccgggcagtgctaaacacagtgattactgactggtgttagaagaatgatgtccccaacacttc

SEQ ID NO: 115986 - DNA, 122 bp, Homo sapiens
ggtagacactaaatgctaaatgatttacttatatgaatcttctttaaatccttacaccagcgctttgatgtattgtttgttattattcatattttacaagtgaggaaactgaggcagtagga

SEQ ID NO: 115987 - DNA, 122 bp, Homo sapiens
ggcccagtgaagactgacgtgcagcctgtattggcagaatgaatgaataaatactacacacgcatattttgaattgaaataagttgtcagggtgcagcagagaataacagaaatagaattgc

SEQ ID NO: 115988 - DNA, 122 bp, Homo sapiens
cttcctctcccggggcgaggcagcgcaggcctggcctggcggagggcctaggcgcgggtccgctcaggttgctgtcaacgggaggcaccgtcgttcggagcgctgggactgcgagcaacatt

SEQ ID NO: 115989 - DNA, 122 bp, Homo sapiens
aagaacgggaggaatttgggagccgcggcaggtagaggtgcctcggacctgcaccaccctcgcttcttcccagggaggtcaccgccagctggtgtgtgctggtcactgcggcctggctggcc

SEQ ID NO: 115990 - DNA, 122 bp, Homo sapiens
ccccgctgtcgggaactgagagcaccctttcccagacttccggtcttgactcattgctgacgggaaagctccggacctctgcgagccgtggggcggggcgcggcgagaggaggggcggggct

SEQ ID NO: 115991 - DNA, 122 bp, Homo sapiens
atccaggggtgggttacgagaacaagagcctgcccagtctgaaagggatgcaggaaggggcggtgtgtactagaaggaaggaagctatcatcatttattaaaactcttcttggaggatggcc

SEQ ID NO: 115992 - DNA, 122 bp, Homo sapiens
gaatttccaccactccaggggcagaatgcagaaagaagagaaaagtagcggggggcctggcgcagctgctaatgcggtgcagaaactctttgagctgccaccctggcagggccggccttggg

SEQ ID NO: 115993 - DNA, 122 bp, Homo sapiens
taggcttgcaggcaggtttgagttctactggaaacttcacgcagggcacctttccctctgcgcatgtttctttagctacttgaaagaacactaggtgacctccagttccatcacctgcaatc

SEQ ID NO: 115994 - DNA, 122 bp, Homo sapiens
aaacgcttcctcaaaatttcctaggttcgaagccctcctcgctgccacaaccaagtcctgcgtgtaaagtggctgagccttggtctcgggcgtgtttcttttgtttgtttttttgtttgttt

SEQ ID NO: 115995 - DNA, 122 bp, Homo sapiens
ccgggctggcccagagggagccatattgtacacatttgtacacagacacttaaataaaaccgccggcctggctacagagcgcctctttggctgacgggagaagcggctgggttgggtgctgg

SEQ ID NO: 115996 - DNA, 122 bp, Homo sapiens
agtgggggtggcaggaggtcgccaaagtgttgtaaccttgcagtgacaaggtgacatttgcgttttcatcagggtagtgacaaggtcagggttgtgctttttcaaaatcacatgaattgtga

SEQ ID NO: 115997 - DNA, 122 bp, Homo sapiens
cacgtgaagggggcccaccacccactttgggagctgaaggcagagactcgggagccctcccggctcagactccccctacgctgggtgtgggttatattcagaggcccacacccacactgggg

SEQ ID NO: 115998 - DNA, 122 bp, Homo sapiens
gtgacgacttccttgttttgttctatccatcttggtttccatagccaagggcagagcaaacggcatatatcttagggtggaagatggataaataattctgtcacacgtgccctggcctctgg

SEQ ID NO: 115999 - DNA, 122 bp, Homo sapiens
ggacctgaactccgccttcgccgatgatcagcaacggctggggatgagacgccagctctgcgtgtgctggcctcccgagcagtggtcagatccagagacagagtgtctgaagtaagctaccc

SEQ ID NO: 116000 - DNA, 122 bp, Homo sapiens
acgcctttctggcctcgtttcagacacagcccgtttgctgtccctctggtagcactcggccgccacctcgtggccattgtgatttattgtctgatcgggttttctgttttacaaaattttct

SEQ ID NO: 116001 - DNA, 122 bp, Homo sapiens
tggccccacggacagcaggacccggacaccctgtgggacctggcctcaaactcaccaaatcgctcatggtttttaaaactctgatggggagggtgtcggggacaccggggcaaaacaagaaa

SEQ ID NO: 116002 - DNA, 122 bp, Homo sapiens
cccaccagaaggaagaaactccaaacacatccgagcaccagaaggaacaaactccggacacgccgcctttaagaactgtgacactcagcgcgagggtctgcggcttcattcttgaagttagt

SEQ ID NO: 116003 - DNA, 122 bp, Homo sapiens
gacttgggtcctgcaatatttttattatgccaggcgaaatccaattcccagttctgactacggtatccagcaacaactaagtcattctatgtcctggtgcaagtcattggaagaccctgagg

SEQ ID NO: 116004 - DNA, 122 bp, Homo sapiens
agggaccccggaattcatggcccccgagatgtacgaggaaaagtacgatgaggccgtggacgtgtacgcgttcggcatgtgcatgctggagatggccacctctgagtacccgtactccgagt

SEQ ID NO: 116005 - DNA, 122 bp, Homo sapiens
ttctgcacctgggcccaaagctgcacgcgacggcaccgctgggcaacaaaaatgactctgcggtccccagcgcctgcactctcctaagttaaggtttgaggaagttaaatggggcctaagca

SEQ ID NO: 116006 - DNA, 122 bp, Homo sapiens
agctagaagcagataatagttaacgctttctctctaccagatctgaacaacgtgagccgccggcccatctgaggattaaaaggagccataacaaagagtgttaacccttcgcagtcttccag

SEQ ID NO: 116007 - DNA, 122 bp, Homo sapiens
ggcttcagtccctctggtggaccccggaacctacactctccccgctcgcctaccccagcccgctcctctcagccgctggaggactcttcagggcaaggctccagagccatcctctccagcct

SEQ ID NO: 116008 - DNA, 122 bp, Homo sapiens
aggagaaaagaagagagaatggggtccgaggcctctgtcacgctctctctcgaggcgcggcggtgagaccgcagggatttcctgagcagcaagtcgtgtgccccttggcacgctttatctgc

SEQ ID NO: 116009 - DNA, 122 bp, Homo sapiens
cgcgtgttgaccgggatgctggctgggacctcggccaggtctctccgtgtgcagatcacccggctggcctggttgctgcaggagcaggccacggggcaggaggtggccggcggggagccccc

SEQ ID NO: 116010 - DNA, 122 bp, Homo sapiens
tagcacccggaaataattgccaccgccatcttttggtgcagaaggtgacgggaaacaggccgcagacctgaacttccaaccgtatgtaggcgagaagccggtgccgatactcccactatccc

SEQ ID NO: 116011 - DNA, 122 bp, Homo sapiens
atggaggcctttagtgttttggttgagtctagccctaaacatatgggcaatagaagtggacgtcttcatggtgttatttgaaagcaatggaaccagtccttgttcctgcatgaacttgcagg

SEQ ID NO: 116012 - DNA, 122 bp, Homo sapiens
caaagaaagttggggccctccttctcactcttcagaccccagggtgtccagcttgggtttcgttcggccgagctccttgaccccccgcgcccgggaggggattggcctctcagcgaatcgcc

SEQ ID NO: 116013 - DNA, 122 bp, Homo sapiens
caaactgccgacttcaggtgacccgcccgcctcggcctcccaaagtgctgggattacaggcgtgagggaccacgcccggccaggaattgctttttaatgaccctaaggagagcctccctcat

SEQ ID NO: 116014 - DNA, 122 bp, Homo sapiens
tgatggcggtctgactcgcaaaacaccttgggagatataatcccagaaagtgacggcgcgcgcctctgggtattataggagttgtagtttcaggagggtgcatgtgggctgtcaggagcgag

SEQ ID NO: 116015 - DNA, 122 bp, Homo sapiens
cctcaggacacctggtctcaggctggcggtggctggggttggcctgagtgctgaggaggacgggcccgggctgccggggcaggctggacctgacgtccatctcaggacagacatgtagggca

SEQ ID NO: 116016 - DNA, 122 bp, Homo sapiens
cgtggcaaggcggaggaccagaggtgatcccaggactgtgggccccgggccctgacgcctcggagcacaccctgtcctgagccagcccgatatattggaagctcgggagctcgcgagctggg

SEQ ID NO: 116017 - DNA, 122 bp, Homo sapiens
ctctccatgccgtgtggtggctcctgtctgtagtcactgggacccttccagtcacggtttcggtggctgcgttttgctaccttttgttatttgctgccgttttctcgtagagtgctcatgat

SEQ ID NO: 116018 - DNA, 122 bp, Homo sapiens
cgggttggcctggacatcctctgagcagcgattggcccttgccctgtttctgtgaatgaacgcggtcgctcttggaaagagcccccaccaccttgcagatgtgctggggtagggtgggggcg

SEQ ID NO: 116019 - DNA, 122 bp, Homo sapiens
gtccctttcagtgcccaagcctgtgtgtgcaacttcctgccagtgaggaaactctcagctcgagaatcagccctggttctcctttccccgatctggcctcacaggaggagttggcggggagc

SEQ ID NO: 116020 - DNA, 122 bp, Homo sapiens
agatcactgctttctcttgggtctcctgggattgctttccgctcggtatagtgaaacagacgggcccattgcccagagttagtgccgtttcttggtctgtccttgttcagagttactggtgg

SEQ ID NO: 116021 - DNA, 122 bp, Homo sapiens
tgagacgccacggctgctgtttctggtgctgcatccgccagggattgtggcgatggaggccgaggctctttgtatgttttagctgctggtgtcgttttgacaacctgacttgacgggttttg

SEQ ID NO: 116022 - DNA, 122 bp, Homo sapiens
atcaatgtctctcagtggcaggcagttctgtcatgaaagcagatgggcagataaacaggtcgtccccttgtggccttgcctgtacttcttgttttgcatacacttctgcgcatttgcacagc

SEQ ID NO: 116023 - DNA, 122 bp, Homo sapiens
tcctccccttccctacatctagccgccgcgctttcccgctcccgcagcagcagcctcccgcgtcgctgtcgctgttgcctccgccacctcctccgccgccgcgcgcccctcggagttccgcg

SEQ ID NO: 116024 - DNA, 122 bp, Homo sapiens
tgttcactgctccatgctgagcctgagccccaggggttggggatttgagggtctcctgcccggaggaaccttcagaaaggagagccaccaggagcaagggcaacaactgagactctcaaaag

SEQ ID NO: 116025 - DNA, 122 bp, Homo sapiens
acagacctggcatgcagcagctgtgtcataaatgcatgtggaccaggtgaatggctccatcgctaaccatgtgcccaaggtaactcagtctctccgggcctcagtctcctcatctgttaaat

SEQ ID NO: 116026 - DNA, 122 bp, Homo sapiens
ttcaaatttccctggaacctctgttgtcttttgctgcctctagaaaccctcttgtgagcacgcctgaatttggaggatcacgtcacaagctctcaatagccacttgaactcatggccttaaa

SEQ ID NO: 116027 - DNA, 122 bp, Homo sapiens
ccttgcagaaagaaaatctagcttctaagtttatttgccaagtatgtattgagtgcctttcgtgtaccaggcactgttttagactctgtggatacaaccgtaaataaaacaaaaacccggca

SEQ ID NO: 116028 - DNA, 122 bp, Homo sapiens
ctgattggcttaaaaagatctttattgtcttgcaattctggaggctgaattccaagatcacggtgtcagcaggactggcgccttctgagggctctgagggagagtctgctccatgcctctct

SEQ ID NO: 116029 - DNA, 122 bp, Homo sapiens
gctcgcggcagcgaaagcaaaatccgatctctctcccgggggagcaaaatggacgaacggcgaccccccaggcaggggcgctgggtgccttgggaatccgaggaatcccttctctttgccag

SEQ ID NO: 116030 - DNA, 122 bp, Homo sapiens
ctgattcgtggatgggctggagagggccgcgtcctgattcgtggatgggcaggtgagggccgtgttctgattcgtggatgggctggagagggccacgtcctgattcgtggatgggctggaga

SEQ ID NO: 116031 - DNA, 122 bp, Homo sapiens
ttcattctcctttcttgggaacccacggctgggggaagtttctcaggcagcctgggtgggcggtggatggggagtcgtgggccgagaggaaccgggcccgggaagcgccgtcgtcgtcgtcg

SEQ ID NO: 116032 - DNA, 122 bp, Homo sapiens
agtcatgactttcaaatgtttctacattgattttgttttgataagttttttagaaatgagcgaaacacttaatgtacacttaagattcgaagaaagaggtaccggggcttttgtggggaaca

SEQ ID NO: 116033 - DNA, 122 bp, Homo sapiens
gcggcctctacctcaacagtgggccctccacgcccacctcttgcctcgccgtggcctcctcgggccaggctcccaccttggggcggcccccgcaggcccagctcctgcctcacggccctccg

SEQ ID NO: 116034 - DNA, 122 bp, Homo sapiens
caccaagcctggccaacactgggtgtttttaagacctgctgtaaaggtggctcagttccccgggttctgagcaggttcacagcagatgcctagtgagatagcgggtcagtcgagcagtgtcc

SEQ ID NO: 116035 - DNA, 122 bp, Homo sapiens
cccaaaaggcaactcattattattccaataacaccacctttgtttagtctgataggggtacggtttctgtcactagccaacctagcgatgattattacattatttaaattaaacacccattt

SEQ ID NO: 116036 - DNA, 122 bp, Homo sapiens
tccaccaggtctgtgcccgtcttgcagtgttagggcttccaaggagcagtctgttcactccgggaggcgagcctggagctctaaggcctttgaaaacagctgttcttttttgtagagtccac

SEQ ID NO: 116037 - DNA, 122 bp, Homo sapiens
tgtcagacaaaggctgttgctgtcattaagagttgttcttagagggtggccaatcagacacggtgagtcaggtggtcccaaggaaagagaaagaaaatgccacccacccactctgcgaaggc

SEQ ID NO: 116038 - DNA, 122 bp, Homo sapiens
ctatgagagcacaagaacaattaaattgaccctcacaaacactatggttggtgccaggaacgtggcctggtgaggaggacagtgtcacatcctccctgcccactcctgtttccacgcgtgca

SEQ ID NO: 116039 - DNA, 122 bp, Homo sapiens
accctcgtctgagaggccgcgaggtttcggcctgagatcccgtgaaggcgagaaatctcgcgatttctcgggagaggaatcggttaggagaagggggattcctcactcagctgtgcgctctg

SEQ ID NO: 116040 - DNA, 122 bp, Homo sapiens
cgcaggcgcagacggcctctgcgcccgcatgcctgtgggcttcgccgaccggggcgcctgcggcggcgactgctctaccaaagcctcactcaaagcctgaagtcggggttagaggaggagga

SEQ ID NO: 116041 - DNA, 122 bp, Homo sapiens
gcaggaggctgagaggggcgagcccacggggctggccgggagaggaccctcgagcgcgagcgagtggcctcgaggcagacgaggagcaacccccaaaccccgagccccaggccaccgagcgc

SEQ ID NO: 116042 - DNA, 122 bp, Homo sapiens
caatcagtattctaagtgtggccgagtgacagtgggcatagatttataacaaggaagtgacgtgcttatcaccatagatttgcaagtaaactgcatgtatttaattgtattgaattgagttc

SEQ ID NO: 116043 - DNA, 122 bp, Homo sapiens
cctcctggtggttctgaagttaaactctccgcccctcaacttctcacggggaaacagaagcggctactctaagcatggatgaatacctgtaaggcgtttaccacagtgccaggcacaaagca

SEQ ID NO: 116044 - DNA, 122 bp, Homo sapiens
tccggtgcaacgttctgggacacgctcctggactgggtgggcttctgcacactcacccagcgcacctccaatccccgggagcgctcggcaccgcccacttctctgcgagtggctgcaagttg

SEQ ID NO: 116045 - DNA, 122 bp, Homo sapiens
gccggagccatctcggagctcacggagagccgcctgaggagcggcacaggtaggagggaccgggcaggtgggctcggcaggccatcagtcctggccgcatggaagcacttcagtgacccatg

SEQ ID NO: 116046 - DNA, 122 bp, Homo sapiens
aggttccatctctgtcaaatgaggatgcacagcggcagtctacgggaatccaacattttacggcccaatcttatacattaggctccccattttatttactgttaaatcctaactcattgaca

SEQ ID NO: 116047 - DNA, 122 bp, Homo sapiens
cgagctgtgggggagggtgccctggtcagactgtgtccttgggggctgggcggtcgcacccgggagcttcgccaatgtgctagtttgaatgaactcccaatgcaaaaatggcaaacagaggc

SEQ ID NO: 116048 - DNA, 122 bp, Homo sapiens
tatttcttcttttcactgggaacaactgaatgtctctttctggcagtaatggcttatgatcgatacctggccatctgccacccactgcagtaccctgccatcatgactgtaaggttctgtgg

SEQ ID NO: 116049 - DNA, 122 bp, Homo sapiens
aggcgcggaacgggcgagggccaggaggccccagcaaagcctgcagaggtttatcccgcccgttacgaggcccaaggccatcgcccggtgaagcggggtgggccctgggcgcggccgctacg

SEQ ID NO: 116050 - DNA, 122 bp, Homo sapiens
cctcgtctgtgtcctccctgtagtgtggagaggacatggatggactctgcgtttatgccccggcaggcacgcaccataggggctgtgccttggagcttggaatagggattcctccaacagca

SEQ ID NO: 116051 - DNA, 122 bp, Homo sapiens
acttatttttcaagacaagtaattctgccaatgatgacatctgcgacaaagcttagggcccgcgggctccccatgcgcctcgtggagagcaaccacgtctgttcggaagccagcggcccttc

SEQ ID NO: 116052 - DNA, 122 bp, Homo sapiens
ttttcttggcggtggtccagtctggaggactctccttatggacccaagacgggtgccaggcgctccagggactccagatggaaatatggagatggaaatggtttcacggttcccaagggaag

SEQ ID NO: 116053 - DNA, 122 bp, Homo sapiens
caacatggggctcaccaagcagtacctacgctatgttgctagtgcggtctttggcgttatcggcagccaaaaaggtaatattgtctttgtgacacttcgtggtgagaaaggacgttatgtgg

SEQ ID NO: 116054 - DNA, 122 bp, Homo sapiens
gagctgatactgaagtacaaaaatatcaagaggctggagccctgaaggacgacagtgctccgacctaggtgtggtgtccaaaagaatgctgcattataaccaccagggaaatgataaaaagt

SEQ ID NO: 116055 - DNA, 122 bp, Homo sapiens
atctgtccctctgcacagctggctcagcgagactgccgtgtcccgcttgtgggcaagtgacgcgtctggggagagtgatccagaaatgtcaactttgcttctcgtggctgcagatggtaatc

SEQ ID NO: 116056 - DNA, 122 bp, Homo sapiens
aattcaaaccagaacccttatgtgtaacctctaagcaatcctcagctggaagtcaagagacgtgtgttccatttcggattcggtcacaactacatgaccttgggcaaattgctcaacctccc

SEQ ID NO: 116057 - DNA, 122 bp, Homo sapiens
gggttttggggccctaagatgcccgcccttatgtgccgcaggcctccgcttctgcaaccccggctgggacgccttccagggcgcctgctacaagcacttttccacacgaaggagctgggagg

SEQ ID NO: 116058 - DNA, 122 bp, Homo sapiens
caccggccccacgtagctttgtattcctgcaggcaagcaccggaagcaccccggcggccgcggtaatgctggtggtctgcatcaccaccggatcaacttcgacaaatagtaagtgtccttgg

SEQ ID NO: 116059 - DNA, 122 bp, Homo sapiens
gacttaatctggaaagttacattctcattttttccctttaggagttaatacattttgtttcggctaaggtatttcagattggtcactactgtagaaataaggtaaaccaggtatcaggaaag

SEQ ID NO: 116060 - DNA, 122 bp, Homo sapiens
ttatactgctagggagagtcctcagggaaccttgcagaatgctatttttaacctcctccccggccatccttcctgccttacctttgcactaatccacttggtactcacctggcagagaggag

SEQ ID NO: 116061 - DNA, 122 bp, Homo sapiens
ccgcgagggcagctcctcatgccacagtcgtcaccagtgtagcctgggtcacacacgcagcgcccaccctcacagcgtcccctctggctgcaacctcgagggcaggagcgctggctgcagtc

SEQ ID NO: 116062 - DNA, 122 bp, Homo sapiens
gtgtaatcttgcagcacagatgcagacaccttaaggggctctgagttgtgacgaggcccccggagagagtgcgagaagctgccccctgcggtatcacatgcccttctgtttagagcggctgc

SEQ ID NO: 116063 - DNA, 122 bp, Homo sapiens
tggagcgccatccggtgccctggcctgtgatccatgggtacccatgagccctggagggcccggccctaattcctggcctgacgtcctcccaagcctacagggatcttgggcagtggcatttc

SEQ ID NO: 116064 - DNA, 122 bp, Homo sapiens
gcctacacttgggcgaacacaccactgctgtttgcagtatcccgagacaggcccggcaggcgtgagctaagaggcctcgggcccgaacttgggatttgaggctctctcacatcgccggtccc

SEQ ID NO: 116065 - DNA, 122 bp, Homo sapiens
gacagccttttctagaagatacagactgtgactcagagaaaggcattctgatgtcttctgcgagactcctgaatcacagcaggatgggcacagggctgggggagaagaaataaatacttaat

SEQ ID NO: 116066 - DNA, 122 bp, Homo sapiens
caaactcctgacctcaggtgatccgcctgcctctgcctcccacagtactgggattacaggcgtgagccactgtgcctggccatggcaggaaattttgatgggcatctacttacctgcaagtg

SEQ ID NO: 116067 - DNA, 122 bp, Homo sapiens
gctggtagatttcataaggtgtgtttgtcaatgttaaccatttatatcccgggcacacctcggaaataggttggatcaacttacatatgtttgttacttcaggcacatcctgggaatagatt

SEQ ID NO: 116068 - DNA, 122 bp, Homo sapiens
cacggatgaagtgtccgtttgcagggctggtttaggcccagagggtggcgagcaggccggcgcccacaccgccagcccgggagccccacggggtgacggccacggccgagacctcaattttg

SEQ ID NO: 116069 - DNA, 122 bp, Homo sapiens
gagagaagttgctgtgcgtccagcctattattaatactttaccctccataagatgaccaacgcctaggcctactgaccttgtttttgcctctcctcctcctcctcatttttttttgttttat

SEQ ID NO: 116070 - DNA, 122 bp, Homo sapiens
ctaatggtctgggggaacccgttggggccaagaccaaaatctacaacctgcagtctcttccgcctcccacgcttcagaagcgggaacctccgctgggccagttcttccgcgtccgggcaccc

SEQ ID NO: 116071 - DNA, 122 bp, Homo sapiens
tgcaaaacacgccagtctagctctccattttcctggagtaaataattttaataccatgaccgcaattctataacagccttgtcagaaagaacctgtgacttactcatttgatttctgaaatc

SEQ ID NO: 116072 - DNA, 122 bp, Homo sapiens
ttcttccccgggtctccgaagccgctaggcgagcgcaagtgggccatggctggcgggaggcgggattacagccagctctttggccgcggccccggtcggctctcgcgagcgcgagcctctgt

SEQ ID NO: 116073 - DNA, 122 bp, Homo sapiens
agttctgcttctcggatggggagcccgggcacttgcgtattcctgtctgtaaaatgggcacgtaggccgcggcccctcgttgcggggactgatagggaaacgcgcatctgcccctggcgcag

SEQ ID NO: 116074 - DNA, 122 bp, Homo sapiens
gttccttggcctagttatctatgcgcacgcgcaaaagtcttcggcagcacttgtagttcccgttttcagacagtaagggcgcataggggcccggcgtggggaggtttggggcgcgcccggcc

SEQ ID NO: 116075 - DNA, 122 bp, Homo sapiens
ggtgggaggctcgggcacgtccagatttagggggcagtgggagccagttgggacggtgctcggctcgggtgggatcgcgccggctccgggtcctgctggagtgaggtgactgggctcccgcc

SEQ ID NO: 116076 - DNA, 122 bp, Homo sapiens
ttggccaggtgcttgcccaggcaggtccggacaccgccaccgaacgggaggtaatggaagcggccatccttgtcctcgctccgcgcctggctgaagcgatcggggtcgaacacgttcacgtc

SEQ ID NO: 116077 - DNA, 122 bp, Homo sapiens
gcaggggaggccctaggggcggggcttggcgggggtggggtcttggagggtcgcaggtcgcggcgctggggatggtgggagcctgcgcagctggctgggcggtctctttctctctctccttt

SEQ ID NO: 116078 - DNA, 122 bp, Homo sapiens
gtacaagagaactggagcatctctggctccttccataatcgaagggcttccagcgtagggcgtagggggagaggcccgaagccctggagacagcgcccgagggatggaggccgcgctcggct

SEQ ID NO: 116079 - DNA, 122 bp, Homo sapiens
aaaggactttgaatctctatagatggcaattcaggggaaaggcaaataaatggtgaaggccggttagtaaaggtgttatctccaggctgaaagtctaaagatatttccagtgggtaaacttt

SEQ ID NO: 116080 - DNA, 122 bp, Homo sapiens
cggtgctgttgaaaagagtgtatgcggagctccagggatggcggcaggcagcctccgccccgcacaagggtgctgggagacatctgtccctccccacctgcccctgttcccagctgcccccc

SEQ ID NO: 116081 - DNA, 122 bp, Homo sapiens
ggacagcgaggcctcagtttccccattcgcaccaatgagctcccggtcaacaccccgtcacgcctcagtttcccgaatgttcccagagggctgagttcccgatctctctcccgcgtgggcat

SEQ ID NO: 116082 - DNA, 122 bp, Homo sapiens
agccagaacatttcaggccgagggctccagctgcagacacggcctagtacacttctccaccggagggtctgtagtctctgggtgaggccctttgacgctcctagaagtagctgacgggcaga

SEQ ID NO: 116083 - DNA, 122 bp, Homo sapiens
ggggtcttgccccgacctcccttctgatccagcaggctgttcctcaccaataccacatggcgtgattaccctgcatgtcatcagggttcaagcagagtagccgagccggtgggggctgtgat

SEQ ID NO: 116084 - DNA, 122 bp, Homo sapiens
tcccagacctcgagcttgaacatgtttccgatgatgatgtgcatgggctggcccacctgccgactgtcgtcaatgactgtccgctcctcatcacatttcatggtgcggaaatgaaagatcac

SEQ ID NO: 116085 - DNA, 122 bp, Homo sapiens
gggcggtgggcggagaggccaatggcgcggcgggagggggcgtgtcccgggtgcccctggcgccggcgctgggaatccccgtgcggtcagtggcgtttccgctcgggcagcgggctgagtga

SEQ ID NO: 116086 - DNA, 122 bp, Homo sapiens
ccactgctggcggacttgaaccgagagtgagtgtcttatgtaagacatttcttgcagagtcgtggcgaggaagcgcggactagggcgcgcttgctgctctccaacaacgtctggacccgggg

SEQ ID NO: 116087 - DNA, 122 bp, Homo sapiens
tcccctcctttcccccttccctcctcccccttcagaggaggctgccaggcctcctgccagcgcgacccctatcccggcccctatcccagatggggacactgagcgcagagagggcgggcttg

SEQ ID NO: 116088 - DNA, 122 bp, Homo sapiens
gaggagctggttcatctctgagccagggtgaccctgacgcagccatctggttgggagattcgctgggatcgatgactcagaaaagcgacctgtcctcctcatctgggtccctgagcttgtct

SEQ ID NO: 116089 - DNA, 122 bp, Homo sapiens
aggttcccaacaggaggcgggcctgatgaagggctggtgggcgtgttcccgcccaaggtccgtgttggcccgcgcggtggctgggaggccctccccacgcccaactgcgggtataaagaggc

SEQ ID NO: 116090 - DNA, 122 bp, Homo sapiens
gacagcagaatttgtagcaggcaaactcgggtttaagtcccagctctgccactttttaaccgtgtgaccctaatcgcatatctctctgtgccttcatgtcctcacctgcaaacggataacag

SEQ ID NO: 116091 - DNA, 122 bp, Homo sapiens
agctctgcagcctcacccacaggaagctcgggttgggggcaggcgaagagggaggtgccacgctgggctccccgccctgcaccggcactgaccccgctgtaccacggccctcttgcggacag

SEQ ID NO: 116092 - DNA, 122 bp, Homo sapiens
accacaaaccaagccggggctctaccgagctttcacttgtcaacaagttctcgcagcctgcgaagtccaggacagatcccaaaggggagaatgtccccaaagaaaggcaagagagaagaaca

SEQ ID NO: 116093 - DNA, 122 bp, Homo sapiens
gggtgaacaaaagaaaatcaacaaaatcgagtatgaaaacaagcaactgtgtcagaaaatcgcaaatgcccatcgcggccctgccaaggtggattgctggaatgaatatttttccaagaggt

SEQ ID NO: 116094 - DNA, 122 bp, Homo sapiens
cagtactcccgggccctctgttggggcctccccttcctctccagggtggagtcgaggaggcggggctgcgggcctccttatctctagagccggccctggctctctggcgcggggccccttag

SEQ ID NO: 116095 - DNA, 122 bp, Homo sapiens
aattgtacatcttaggatgttagggaagctttctttgttccatgcaaaacaaacactgaccgtccacttcttggacttgagaaatgttgaaagtttctttacaaatggatgtctagggcagg

SEQ ID NO: 116096 - DNA, 122 bp, Homo sapiens
tctgctttcacaaacatttagaaatgaaaactcatgtgcttttccccaaaaaccaagttccgtatgatgatcaaaaaataccccattaattttatggagttagttgcactgagcaactttaa

SEQ ID NO: 116097 - DNA, 122 bp, Homo sapiens
ccagcctgggccctctggaggcgtctcccggcagtactgagccacgtggcgtggactgcacggggtcggtgacttcaaaagccccacttagatcctctgcacttaccccctgcagagcaccg

SEQ ID NO: 116098 - DNA, 122 bp, Homo sapiens
gtgcggaagatctgtctatcttctcggcggcgcagagcccaaggtagaaaccgatggaggcggtgcactagataacatcaaagccccgggcaggggccagaaaggggggcacaggcagcccg

SEQ ID NO: 116099 - DNA, 122 bp, Homo sapiens
tggctatcgatgggcagtcacccaggccatcatccaggcaggactgactgagcaagctctcggcagggccccatcatttggggcagctcatggacctcggtagactggcaagtggtcttgcc

SEQ ID NO: 116100 - DNA, 122 bp, Homo sapiens
tactagacctccctcccttttcaactgctcaggctcagtaagcttttaaactttctatttcgttacagtacaaacaactctacaagcaggcctcctgcttctcccctcaggctatgcagaat

SEQ ID NO: 116101 - DNA, 122 bp, Homo sapiens
gtctgtcgtcattacgtacttgtatcgcgtaaggggcctgcgtattgcgtcatgagtgcgcgacgcacgtaaggctaaagcagccaatcgtggagcagcttggctgcttgtcataaatggag

SEQ ID NO: 116102 - DNA, 122 bp, Homo sapiens
cctacactcctccttctcaaagctgcacacacctggggcctccaggggattgggggctgccgtgtgtgttatatcatgattagagctttcacttcctgctccctgctgttgggaaccaggct

SEQ ID NO: 116103 - DNA, 122 bp, Homo sapiens
gtccctttcctaagcattaagacccagatatctctgacctagagccattaatattaaccacgtggtgtagaactgactcctccaaagagatgggaagagtgtttgctggtgagctggatgtg

SEQ ID NO: 116104 - DNA, 122 bp, Homo sapiens
gtggaggctgcggatatggccagagccaaggcccttctgggcggccccggggaggaggtgcgtggctgggtggcctggggagactgggtggaggggaggctcaggatgggctctctggatcg

SEQ ID NO: 116105 - DNA, 122 bp, Homo sapiens
tatttctaagaagccctggaaatgagacattcaggcagagggtgcctacaagaatttatacgagtcagacattcatgtcactagttgcagacccaggacctgaaggcaatgccaacttttcc

SEQ ID NO: 116106 - DNA, 122 bp, Homo sapiens
ttcggttctgtttatgtgctggattacgtgtattgatttgcatatgttgaaccagccttgcgtcccagggatgaagctcagtgagggcttttttaaagctgtggttaactgttactcctaag

SEQ ID NO: 116107 - DNA, 122 bp, Homo sapiens
ggtgtggacgtggagtttgcttttatttatcctgcttgggacttggccttgatcctgacgcgtcctgttattcagcgattttggaaaattcccagccactgcctcccccgactctgtttctc

SEQ ID NO: 116108 - DNA, 122 bp, Homo sapiens
gctggagccctgtccatgtagcccacactcccgctcctcgagtacaagggtgggtcaaggcgttcacccttcctcactgaggaactggtcatgacggtgacctgctgggcttggggacagcc

SEQ ID NO: 116109 - DNA, 122 bp, Homo sapiens
ggaggggctgaggctcatttctctactcacctgtctccgaatccgtcgtggtgtttcaagcgagtcaagattccagatcgcgccccaggctggactcggaattactgccccgcgggtctgca

SEQ ID NO: 116110 - DNA, 122 bp, Homo sapiens
cctcctgcagtctgggtttctgggcacgtggcctgcgcgtggcgccattgtggagtgtcccgcgcccatgtccttcgtgccttccaagcgcccagaggccaacggtcccccagccatgggcg

SEQ ID NO: 116111 - DNA, 122 bp, Homo sapiens
ggtaggagtacaaacactgggtgtaaaaagcagatgcaccccagttggtgtgcaagcccccgtttgcaggtaattaattcacagtgtggcggcgccttttcaagccccctctgcaagccgcg

SEQ ID NO: 116112 - DNA, 122 bp, Homo sapiens
cgggagacggcggcttgggagctggctgtgctgcaggtgttgggtcgggtcgggtcgggacgggcgggagaggacgagacgggtcgggataggttggggcggggcggggcggcactagactc

SEQ ID NO: 116113 - DNA, 122 bp, Homo sapiens
tcactgtgggtccccaggatgtccaactccatgcagtgcaggatgagctcagggagaggacgagagttgtccagagcactcctggtcctgatttgggagaactgtcctgcaggcggatgggc

SEQ ID NO: 116114 - DNA, 122 bp, Homo sapiens
cctcaagcaatcctctcgccttttcctcctaaagtgctgggattacaggcatgagccatccgtgcctggccttagtttatatatgagcacatctgtttgaattatgtctggcacatgaatgt

SEQ ID NO: 116115 - DNA, 122 bp, Homo sapiens
cgagtgacagggggcaggtggagctgagcccagagagatgtcagggctcctggccatcatcggaaggactgtggtttgactgtgggtgaggtggaccccatggggagtttgagggtctcttc

SEQ ID NO: 116116 - DNA, 122 bp, Homo sapiens
tcctagctcatggcttgcaaggtgcttaatcatgctgagcctcattttctcctgtgacctcgcttggcctaccccacaggactgcgatgacagccgaagcgacggtgagaaggcccttcaca

SEQ ID NO: 116117 - DNA, 122 bp, Homo sapiens
cttccctggccacaaacccgccgaggcccccctctctacccggcgcgcctaccacaggcgcgacacctgtcaagccttgggacaccgaaaccgtacctgggaacagcaaacacaccacagac

SEQ ID NO: 116118 - DNA, 122 bp, Homo sapiens
ccaggctcctgggagtcggccaggcacccagacagaggcaggtccagcgctgctctctggcgccccctgctgtgcagtgagctgcccccgcgggactcttgccaaggccccccatctgccag

SEQ ID NO: 116119 - DNA, 122 bp, Homo sapiens
aagttcatgtcatggtagatccattgggtccccaaatccatcctctggttatatacaaagcggcaatgctgagattcaaattcagggcctccaacatagaggctgggctcttactcatgaaa

SEQ ID NO: 116120 - DNA, 122 bp, Homo sapiens
taaacaccgaagaagtgataaagttcagaaactaccctctgccatccctaatgaagtcaccgattcggcaggaattatcaacgatgtgaagagtgaggggacctggacaggaacaggcctct

SEQ ID NO: 116121 - DNA, 122 bp, Homo sapiens
tcgaggcatccgtgactatccacaaaccaaccggagaaacctcagcttcctccgcacccccgaggagcctgcggatttaaaatgaagcccgcaaacctcacagaaggtgtcaggcaaagacg

SEQ ID NO: 116122 - DNA, 122 bp, Homo sapiens
ttctgagacataaagtcaatatagaagagaacctcccctctcactgtttattctctgctacgattgtaaatgtctcccagctttctgccatttccaaagcatttacttttgttcagaaaaaa

SEQ ID NO: 116123 - DNA, 122 bp, Homo sapiens
ttgtcccatcatgctctgtctccagtatctttaagagaatataatagggtccctcaaaaccgtgaataaaaataaatatattcctatgatacatggtcaacaggtgttcaatcactgatttc

SEQ ID NO: 116124 - DNA, 122 bp, Homo sapiens
gtctttaaaaaaaaaaaaaaaaaagaatgaatgtcttttgagctgaaatgatggtcttcgcgtcttcatgaggaatctagttggggacagggacgagaaaagctctaagaaatttggggcag

SEQ ID NO: 116125 - DNA, 122 bp, Homo sapiens
cttcactcctgagccagcgagaccacgaacccaccagaagaaaaaaactccgcaaacatccgaacatcagaaagaacaaactccagagcgccaccttaagagctgaccgcgagagtccgcga

SEQ ID NO: 116126 - DNA, 122 bp, Homo sapiens
ttctttagccttggaggtgaccagagagaggttgtgtcccttaatcttcagctaggtccccgcagagacctctgcccctaagacccccagctcttcttctggcctcagaagttagcgctatg

SEQ ID NO: 116127 - DNA, 122 bp, Homo sapiens
agagtctgaagataatcccaactagtcaagtcatcagcattggccgactcacaaccccggcgggtaccgactcacacccccggcggggaccgactcacacccccagcgggcaccatcttaca

SEQ ID NO: 116128 - DNA, 122 bp, Homo sapiens
tctgttgatcagtttgcacagaactaccccatttttcagcgaggactttaaaaactcctccggatcacagatggtctttttaggggactctaaaactcccaaagatataagccatgtcacga

SEQ ID NO: 116129 - DNA, 122 bp, Homo sapiens
cacagccccctcccctcagggtgtggacggagacctctgacttaaccactggatgtggctcgtaattaaagcagtgaatgcttgagtgctggctggtgggccagcagctgccacctggcccc

SEQ ID NO: 116130 - DNA, 122 bp, Homo sapiens
gagtggcagccggagggcccagggcaggtgctgcctgtcaggacctcagcctgtatgtgccgggggatgttcgtgcccaacagaggccacttgtctctgggccggggaggcaccgggtggcc

SEQ ID NO: 116131 - DNA, 122 bp, Homo sapiens
gggacagtctcacaggtggtgtccggactctggagatggggtgggaaaaggcaaggaatgcggggagaccaccagttctgatgccacgccatacaacactccaccccgctggacgtcggaga

SEQ ID NO: 116132 - DNA, 122 bp, Homo sapiens
cactcggtggtgtctgggagccagacgcaggctttcaaagagctgggtggccgcggagggcgtgggaggagaggaggcctggaggagaggagtgggggggtcccagggtggggggaggcgtg

SEQ ID NO: 116133 - DNA, 122 bp, Homo sapiens
ctgctggagagtgttttccctctgggtttccttctccttggctcccagggaatcctctggcggtgcctccgggaggctggtagccggggaagcaggcacgtgaatccaccgggctgccccac

SEQ ID NO: 116134 - DNA, 122 bp, Homo sapiens
gtatctcatccccttaattcacccgggtctgttttctttgtccttaatttcctgaacatgcgcaaaccctagagtctcttctgaagcttggtcatgtgactgaaacgtttttatacagcctt

SEQ ID NO: 116135 - DNA, 122 bp, Homo sapiens
actgcccttcagcctcttcacaggggcatttgcaagagaaggagtttttcttttcaccagcgtcattcggaattgccaggacaaggtgataataaaaagcagacggctttgagtaattttat

SEQ ID NO: 116136 - DNA, 122 bp, Homo sapiens
gtcttgggattgggaccatctgcttcagcctggtcttgggggatgtatcagcagagtggccggctcaatgatctcttcagaaccctccacctccttgaccactatgcttccctggcttcctc

SEQ ID NO: 116137 - DNA, 122 bp, Homo sapiens
aggttcttgcctcagaaaaccttccagtctctgagctctaaggagatcaccagccggctccgccagtggtgaggaaccgaggcacagggagagaagaggcccttggtcttcgcggctgtgga

SEQ ID NO: 116138 - DNA, 122 bp, Homo sapiens
agggaaaagtgggacagccaatgagaattcaggggggctgtcttcagccaatgggcagggcggccgggaggccgggctgggcggccgaggcggaccctaccgcagtgtttgcacaggacccg

SEQ ID NO: 116139 - DNA, 122 bp, Homo sapiens
gtggaaggtgcactggtctttccacatcgccaccaggcgttttgaagcgtgctgctgacacgctactcagatgcttctggaagccaaacaataagaaaaagccccattgtttcccttgctgg

SEQ ID NO: 116140 - DNA, 122 bp, Homo sapiens
attggcaggtgagaatgagaaaatgccgtgtgtgctgctacagtttgaagggagggtgaccgaagaggctgccatggtggggctggacggcactactgcaacaaagcaaacacggtcagcac

SEQ ID NO: 116141 - DNA, 122 bp, Homo sapiens
atagtatccttcggactctcataggagggtagctgatcttctgtgaggtctgcatacctgcgatccttactgatgttgctgtagaaaggatggtcgggctccatcggaggtggtgggacatc

SEQ ID NO: 116142 - DNA, 122 bp, Homo sapiens
tgtacaacctcttaagtgtggagccctcggaattcacaacactccccaaatcgcttcctgcgcaggcgcggagtcggaagggagtcggaaagcagaccccggtgccccctaataaagccccc

SEQ ID NO: 116143 - DNA, 122 bp, Homo sapiens
gaggagaaggtttgcttgaaccaggttgagaaaataattttctaagggcaccgactttctcgaaagaaaacccgcgggccgcacgcctgctcctcgcggcgggaggggcggcccgagacccc

SEQ ID NO: 116144 - DNA, 122 bp, Homo sapiens
gaggatggggagctgctgtgccccgggggtggcggggggtaaggtgggcccttccccaaacggctctggggcatggagaggtacagaacgtcctccgggttcagagtttccaagtgcgtgcg

SEQ ID NO: 116145 - DNA, 122 bp, Homo sapiens
gttgttgatttactcagtcacattcctactagaagtctacttttatattttaaaataactcgttttgactgctgtttatttatatttcattctttatcactaagcctaaataaagtcaaaca

SEQ ID NO: 116146 - DNA, 122 bp, Homo sapiens
gaagaggctgtctaccctcgtctgcccgccccagccccctcctgccttggcccgcgcccccgcccactccactctgagcgcacgacagcgggcaaaacaacacgtgaccacagcctcacgcg

SEQ ID NO: 116147 - DNA, 122 bp, Homo sapiens
cacccacaggtgacgtgaggggcgcctaggaggcgggggaggcacggggccgggaaggctcgggggtcccagagctctcagtatgcaccatgcccgggcagcctggttagtcagggtcactg

SEQ ID NO: 116148 - DNA, 122 bp, Homo sapiens
ctccccagcaggcctcggccgggcctgccacctcttcgcccaactccaaccccggcctcccgaccccaccctcacagagccagcagcctctcaggcccgaggcctcccctgtccccagcgcg

SEQ ID NO: 116149 - DNA, 122 bp, Homo sapiens
caagtccaatgatctgttaaagaggtacagagaatctgcatttttaacaagttcctcaggcggttcttttgtgtgctgaaagtttgagactgactaattatggcacagggatccacagaggg

SEQ ID NO: 116150 - DNA, 122 bp, Homo sapiens
tgccgcctccgcccccactgcgcaaggctttctgggaaatgtagtctcgcctctttggggcggggcttgggaaggaagtgagacctatttccgtcgcaaaagctgacgacttcggtctgcgc

SEQ ID NO: 116151 - DNA, 122 bp, Homo sapiens
actttggctataagatgtgtgccagggtctacctgaacggggacgggatggggaaggggacgcacttgtcgctgttttttgtcatcatgcgtggagaatatgatgccctgcttccttggccg

SEQ ID NO: 116152 - DNA, 122 bp, Homo sapiens
gctctctgctccctaagaggccagaggcagcccctggatcctaggctggtgatgggggtccggccccctatggtgggagaagctggggcagtttcccactggttggtctagccacatctgag

SEQ ID NO: 116153 - DNA, 122 bp, Homo sapiens
gctgtggccaccactccgcaggtgctgagcaaaaggtattcttcctgaatacctgagagtcgcgttgagctccacataaggaagacggatttagggttcggctctcactcgaaaccattctc

SEQ ID NO: 116154 - DNA, 122 bp, Homo sapiens
tccgcattctagagggcggcggggcgggcgcagggacctggctgggcgaaggcaggaccgcgagtgcggaggctgcgggcccaggggccaccaccaaggctgtgaagaatggaaaggcttgg

SEQ ID NO: 116155 - DNA, 122 bp, Homo sapiens
gcccctaatggccgaagcttttgttctgcattcagtggctgcatgtgatgggcaggaagccgcagtctccctttgttccatggccttattcagcaatttagatccatcataaaaatcaaata

SEQ ID NO: 116156 - DNA, 122 bp, Homo sapiens
acgcgtcacagtgatgctgtgtcttccccattatggcaacagggctataggcatggagggcgggggtggagggggtgtgaaaagccccaggcagcgtcaggggttgtgctcctgctcctgtt

SEQ ID NO: 116157 - DNA, 122 bp, Homo sapiens
caggcagactttgacacaatctggccggcgcagcctccctggccactgtctagatggcctcggggagcacccctggccctaccaaatactgaagtgctttcctggggaagacagaaggcagg

SEQ ID NO: 116158 - DNA, 122 bp, Homo sapiens
gcatctgtattcacatgttagatattagacattgtgtgatgctacaatttttcaaactatcggtagcagcctacatatagcaaatgaaggaaatagaatgcactgggtgatgggtggggact

SEQ ID NO: 116159 - DNA, 122 bp, Homo sapiens
ggtcacatctttggatcaagggataaactttgtacttgcagtgctatctagaaattttcccgcaggttatttagcccctgttgctccctctcccgacctgcacaccaggacagctcctaggg

SEQ ID NO: 116160 - DNA, 122 bp, Homo sapiens
tatctgcctctttccctttgttgcacttcccagtgggatgtccacacatgctgttcctctcgcatgaaaccctacacctgctaccctttacctggacaattcagttcatccttcaactattc

SEQ ID NO: 116161 - DNA, 122 bp, Homo sapiens
ggaactccacccagcccctccccaccctctgggaaaagccagtcgccacacacaggcacacgcaggccccggcgccgcgccctaaggagagcagcacccacagccaattgccatggcaaccc

SEQ ID NO: 116162 - DNA, 122 bp, Homo sapiens
gcggagcggtggcggcggccccgctcaggagaccaccagattcccctcttcccgcggcctcgccatggcgacccacggacagacttgcgcgcgtccaatgtgtattcctccatcatatgctg

SEQ ID NO: 116163 - DNA, 122 bp, Homo sapiens
gcaactgcagccctaaatcctaggtccagctttttcttatagaatactttccagagtttacgtagttttcaatttatttaaacacagcattcagtctttatagaaataaaaatggtaacatc

SEQ ID NO: 116164 - DNA, 122 bp, Homo sapiens
atcctctcccagggtgcagagccacctaaaaatatggctccaagtctgcatcctcagctccgaaacttgccaataacacctgcagaatgcagggcggagagggagccacggctggaccagaa

SEQ ID NO: 116165 - DNA, 122 bp, Homo sapiens
atggatgaacactgtcaggtcagagcaggagggaggggctgtcttctccactgtggccagcggagggcaggagaggtaaccagcggccttcagttccactgtcctcaccttggtccggctcc

SEQ ID NO: 116166 - DNA, 122 bp, Homo sapiens
gtcgccgacggctatccgagggaggagcaccgcctctcctcttggttccgtcccttcgtacgtaaaccccgcccctcagaaggactccggcgtgtcataggcgaaggcctctgggaaggtgg

SEQ ID NO: 116167 - DNA, 122 bp, Homo sapiens
aaattctctgttctcaaggaaattttcccttctcgggtttcctgaggttgaaatccagcgcgcacgtcattaatcattcactgaggtcggtccctcagtcaatggcaggtctgggtaagcta

SEQ ID NO: 116168 - DNA, 122 bp, Homo sapiens
ggaaaacctctctgcacgcttccgggagccaactgaatgaagccgtgttgcccgagtgtgcgcacagagagccttgggtttttagggttatttcgagagtgtaatcactagtaacaggacaa

SEQ ID NO: 116169 - DNA, 122 bp, Homo sapiens
gaatcagatcgctaaaatttgatgtgtcgtcagtgtggatcctactcagtagtgtcacaacgaggctgaaaatcatattaagtgcttttaggacagaaacgtaaactgctcaggtaaaataa

SEQ ID NO: 116170 - DNA, 122 bp, Homo sapiens
tctaccaaactacttaccaggctgaattagaatcttctttcacttgtctgtctctgccatcgaactcaaggacagggacagtcttcatctctgtctttccggtgtccaatgcctaatacata

SEQ ID NO: 116171 - DNA, 122 bp, Homo sapiens
acgctggacctcgtgcctgtccgtcaggctcatggaacattctcgacaaggcctgggagccgggggccagggcgtgggcatcctgagggggtgccgtctgtggtggacacgcaggactcttg

SEQ ID NO: 116172 - DNA, 122 bp, Homo sapiens
gcgcctccctgcgccctccctgccccgcccgccgcggccgcccattggctgctggggaggcgcgtggccccgccccacccggccgcactcccgtgaagtgctcccgctaggtgctcccgcca

SEQ ID NO: 116173 - DNA, 122 bp, Homo sapiens
aacgtcatctttctcttgccctctcaactctttaagactgatttatgctcttaattctgtcgcttctctgttctacctcctagaatttagtcatcagcagcattctttcaccttttatcatc

SEQ ID NO: 116174 - DNA, 122 bp, Homo sapiens
cctaatctaatttactaactagaaacatttggggactttaaagtgtggggcagagggtaacgggtgaagaacaactaccagctattccaatggggaggaaataatttggtcgaactaataat

SEQ ID NO: 116175 - DNA, 122 bp, Homo sapiens
ctgcccgcacgtgaggggcagggccgcaggctcaagcctagagccggtttctgttagcagcggtgtttggctgttttatcaggcatttccagcagtgaggagacagccagaagcaagctttt

SEQ ID NO: 116176 - DNA, 122 bp, Homo sapiens
tctgaaagccatgactacactgagctcaataatataagtggagttaaaaataattaaagacgtcaatagctgtcatgaagatgcccaatattgtgtaaagtagtttgcatcctaaacacacg

SEQ ID NO: 116177 - DNA, 122 bp, Homo sapiens
gtgtttgaggtcggccagtgtggaggcaacagtgccccctactggacagtctgcagagtccgagggtctccggcaccttggcccggttgagctgccgggacctggctgatccttctggagga

SEQ ID NO: 116178 - DNA, 122 bp, Homo sapiens
atgttctggaacaagggcaggcaagtcctccctgtctcaccacccgggctgtgtgcagtgcgggtgcagccatgcctggagctgagactggcagtcttgtcctgcaccccgaggggcttctc

SEQ ID NO: 116179 - DNA, 122 bp, Homo sapiens
ggaagaaaataaccatattcaaggagctacatcttcttgtgggtgtacatttccattatacgtatgctcgtcccaaaaatgacacatacataaatatatgtaatgaatcacatatatttaca

SEQ ID NO: 116180 - DNA, 122 bp, Homo sapiens
gacctgagcctgctgtccccacagtgtcctcagcctgcgggggctgcgtggaggtggactcggagaccgaggccgtgtatgggatgaccttcaaaattctttgcatctcctgcaagcgccgc

SEQ ID NO: 116181 - DNA, 122 bp, Homo sapiens
actttctccttgtctcttgaatttatcttagacataaatgaaaatagaggtaactcaaagcgtctaacccacagtgacaattgctgctctgtttttagagccgggattttgttcgtggactt

SEQ ID NO: 116182 - DNA, 122 bp, Homo sapiens
caggctgtgaacaggaagagggcagggtgagcacccgctgccctagcctggggaggcacgcgtgcccagctggatgcaaatgtttgctcagggacaactgtcgcaactgctcttctcccttc

SEQ ID NO: 116183 - DNA, 122 bp, Homo sapiens
ccccgggaagggctgggactcccaggattcaaagagctgctgggctgggctgtggggggccgggtcctgggctgggagtggattctcggtgcttccccccagcggctgccacagtggcaacc

SEQ ID NO: 116184 - DNA, 122 bp, Homo sapiens
tgatattaccgcccgtattgcacgagttgtaaaacctcttcgatattttgcctacaatcccgaggggagaggacgatactactcccaatatcgaaggtgtacacccccctgtgactattccc

SEQ ID NO: 116185 - DNA, 122 bp, Homo sapiens
gagcccgatcctggatctaggcaaaatggacttactgtcaggggtgccagcagacacaagcggttttggatgctctcgccgagtagctaacaaaacccacccctcttactaaggcaaaactt

SEQ ID NO: 116186 - DNA, 122 bp, Homo sapiens
gtgctggaaaagcagcgagccagcgttggtgtggtgggcggagctcccagtcgcatggagcggtgttcatggatgcaacagaccctggcttctggagtcctctgtgagtgagggaccaatca

SEQ ID NO: 116187 - DNA, 122 bp, Homo sapiens
ccggcaggaactttctaagaaactcggctgaaatgcggtttccagcggggtgtttgtgagcggcgtgcccagggacgcctgggattggggacattgtctctgcattgtgctcagctcccact

SEQ ID NO: 116188 - DNA, 122 bp, Homo sapiens
acacatcctttgcctttgattagcatcttaaagttgcttagcgtgccgcttaagtcccagcgtctcagctggcggtggtttggagaggcttaaaactgcattcatgaagtttggaggaaaga

SEQ ID NO: 116189 - DNA, 122 bp, Homo sapiens
tgaggcccaattagccagagccgctgcaatctcggtgggtggggcccttgaggttccagccggctgggccacattccagccccactgggcgggaagtagagggtggagaagggggaagtggt

SEQ ID NO: 116190 - DNA, 122 bp, Homo sapiens
atgataaagttgatttttttaacttaactgattggaaaaattgttaggcaaaaatttatgcgattattctttcaccaatcatgaagtgtggtatccaaagttgatgatatgtagcttgctac

SEQ ID NO: 116191 - DNA, 122 bp, Homo sapiens
aactcctgagggctcaaattatcctcctgcctcggcctctcaatgtgctgggattacaggcgtgagccaccgccccctgccagtatttcatagggttttgtgtggttcaatgataccttaca

SEQ ID NO: 116192 - DNA, 122 bp, Homo sapiens
ggaagttaacagggcatgttcagcgaagttttataaagaacagaccaggagcctggaagacgcaagagctcgagtatcgagtgcccaacacgtttcagcactgcttttggtgcaagcgttag

SEQ ID NO: 116193 - DNA, 122 bp, Homo sapiens
ctgtttttataagccaagtatctatgagaagaaagagatcataaaacacccatgtgaacacgaggatgcagcctccttatctaatccttaaatctgtgtgggaaacctgcctctttgtgaaa

SEQ ID NO: 116194 - DNA, 122 bp, Homo sapiens
tggtccccatgttgagcagcgccgggcgttccgcttcggcatcgcgcgtgtaagcgcgcacggctctgtccgtgcgccctcaggcccctggagaggtacccagctgcagcccctttcttgct

SEQ ID NO: 116195 - DNA, 122 bp, Homo sapiens
attgagatttaatcccagatgtaaactgaggacacaggccatccccaatttcccactcttcgtgctgttcacttatacccttccctgcatagagctgcctctacctccctccagccctgaca

SEQ ID NO: 116196 - DNA, 122 bp, Homo sapiens
tattccgagttctaggtcacctcaagccctccccgctgtccctagagctctcccactgttcgttaggaaccaaagcaaaatgtataaggctgctttcctcaccgccaagagactccgcagaa

SEQ ID NO: 116197 - DNA, 122 bp, Homo sapiens
ccagattcaagtccccacacccacacagcctctgtcaatgaggacatacgtacttagggccgttttgaggattacatgagaacgtctgtaaagcccagtacttgacaagtgcctgagagata

SEQ ID NO: 116198 - DNA, 122 bp, Homo sapiens
cacttgttgagagaaagaaagaaaggaaggagagagtgcagcagagggacagaggaagaacggatgagaaaacaggcatcctaacatttggtaatgaagcctgggacgctggggattctcct

SEQ ID NO: 116199 - DNA, 122 bp, Homo sapiens
catgatccacccacctcggcctcccaaagtgctgggattacaggcatgagccaccgcgcccggcccagggttcatattaagaaccaagttctgggagacactgaggcccccaggggttctgg

SEQ ID NO: 116200 - DNA, 122 bp, Homo sapiens
tttccaccagggggcgctaggacgccacgacctttcactatgtgcaccagggggcgctgccgcccgccttggccatcccgggctgggaagtccgacccttcgattaagccccgcctgattgg

SEQ ID NO: 116201 - DNA, 122 bp, Homo sapiens
tgcattatctacaatcctcactataagccagcatttagaaattatgaacttcagactgggcgcagtggctcacgcctgtaatcccagcactctgggaggccaaggcaggcaattcacgaggt

SEQ ID NO: 116202 - DNA, 122 bp, Homo sapiens
tcagcgcttcccaagtgcccagctgggtgggggcgagggcagaggcgttccccgcagccccgcctttgttccccagaccccctaccttcctcccaaacccccgtaccccacagacctgctcg

SEQ ID NO: 116203 - DNA, 122 bp, Homo sapiens
cttcttcatagcacagggtgtgtacagccccaccgtgatatgatccttaatattccaaggcggagaggatgatcttactcccaataccgcagaaagtgtacacaaccccagtgatatggttc

SEQ ID NO: 116204 - DNA, 122 bp, Homo sapiens
agggggctcccctcaggagccgggggaggcagcccctgggaaccagagggcactgctccccgcccagggcgccaacacctcctcaactggccgtgcagcggagagagggtgccaggacggag

SEQ ID NO: 116205 - DNA, 122 bp, Homo sapiens
tactccgggaacacacagggtggcacaagtacacagtagccagtgtgacccagaggctcccggaggcccctgccggcttcctccaccagcgcctgcctcggcccctcctctgcccccgccag

SEQ ID NO: 116206 - DNA, 122 bp, Homo sapiens
caagcctttctgtgtcccttagaacggcccctgaggctgcagcgctcccccgtcctcaaacgcaggccaaaactcgaggcacctccatccccaagcctaggtaagagggggtccaggccagc

SEQ ID NO: 116207 - DNA, 122 bp, Homo sapiens
ctccccggagccccagcggcccctcgcctgtgagctggaccctctccccacctgcgcgcacgccccctacccctgaccccaccctcgccctgtgagtgggcacctgctcacctgggcaagcg

SEQ ID NO: 116208 - DNA, 122 bp, Homo sapiens
cagctcaaacgcacctgaactaaatcccagagggctgagtgctgctgtaccactccctcccgctcttacttggttttcccaaaaacacattccccaggtcgaggtggtggagctgacccagc

SEQ ID NO: 116209 - DNA, 122 bp, Homo sapiens
cgccggaggtagggggctggcagggctgtcctggcgtggtcttctccgtttccttcctagcgattcctctcgagcttcctctccccctggccgcccctcgtctctcttctcttgggcgcatt

SEQ ID NO: 116210 - DNA, 122 bp, Homo sapiens
ggcacaacccgccctgtgaaatctgagcggagcaaacaggctgtgaaggcgttggcagaacgcagacgaggctgcgaaggtccagcggcagccacgcccccctcaccgtgcgaccagcggag

SEQ ID NO: 116211 - DNA, 122 bp, Homo sapiens
gggccggccacacctccagccctgtgatgggcacccaccaccaccaccatcccagtgggccggccacacctccagccctgtgacgggcactcaggaccaccaagggcactcaggtgcagatg

SEQ ID NO: 116212 - DNA, 122 bp, Homo sapiens
cggcgcaggggcgggacttccgctcaagtcagacttccgggcgaggcggtgaggggcttccggttggggtggcagggtggtggatctgtcggtcccgttttcccgtcgcacgtggtggccac

SEQ ID NO: 116213 - DNA, 122 bp, Homo sapiens
tcctgaacagggtgaagtggttgaggcggcgggtcttcaccctaactgtagcagaggcaccgtccacgcgtgtgggagatagtttttccctttgtacagccgggcagagctcagcactcaca

SEQ ID NO: 116214 - DNA, 122 bp, Homo sapiens
gacagccccgagagccagctgagtttggagacggggctgtgtggccatcccggctgcccgcggggctcttgctcaccctcgtcacctctggcatctccccggcagcacttagcagcccagtg

SEQ ID NO: 116215 - DNA, 122 bp, Homo sapiens
tgggccaggcgggaggccaggaggccgggggtgtcaggccccgccgccgacacacccacgcgagccggaaacaaccaggagcactattcccggccgggtgggtccagcagccgcgggcttcg

SEQ ID NO: 116216 - DNA, 122 bp, Homo sapiens
gggttggggcctgaggcaaggtgagaattagcccccagactgggcatctgccccctggtgcgggcccccatttttttttatcccgatcccttcaccctggattctgaatccccttccacccc

SEQ ID NO: 116217 - DNA, 122 bp, Homo sapiens
ggacccagacccgagcgtcgcaagaaggcccgttggagtctcgcgcaactgggcaggacgcgacttctgacgaagtgacaatggtctatgcatatattaagtgaatatttgagaatttaaat

SEQ ID NO: 116218 - DNA, 122 bp, Homo sapiens
acagctgcttttggggcaaaggccctggggatcattttcgagcagtgggcagtctctcagcgagaccctaagggaaggagtgagacctgggaggagcaggcattgctcacacggcccatccc

SEQ ID NO: 116219 - DNA, 122 bp, Homo sapiens
ggccatctgtaacagtgcggggggacgtggggtggtccctgggtgtcgcggcgcagagcccggtcagatgcgtgccattagtggagacaagctctgcatggagctggtggcctaatggggac

SEQ ID NO: 116220 - DNA, 122 bp, Homo sapiens
tgctgcgggaatgacgaggccagggggagcctgagtaagtgggcaagggctccctcgacccggcctgggcgggcaccagtgggtgggccagcggggccgccctcccgccccactcactcacc

SEQ ID NO: 116221 - DNA, 122 bp, Homo sapiens
atatgtgcaccatttcttctgcagctcttgacttggatgatccttctcagtgtgatcccacgagtgtttggtgatgatctgatagtagaaagggcagagcgatttaactttgtgcacatctt

SEQ ID NO: 116222 - DNA, 122 bp, Homo sapiens
ccaggccaccatggtgcagaaggccaagcggcggagcgccgcccccctgcacagcgagtacgtcccaccctgccacgtgccctgggtgccaaggccagaccctgccctctctgggccttgat

SEQ ID NO: 116223 - DNA, 122 bp, Homo sapiens
cgtcccgtggttgtgcttggaagccccccgagggtgcgcgcgcgtgggtatgagtgcgtgcgtgtgcctgggtgtgcgtgtgtgtaagtgtgcacgtgtgtgtgtgagagtgcgcgcgggga

SEQ ID NO: 116224 - DNA, 122 bp, Homo sapiens
caacatgcacatgaatcctcattaaatttgcatttcaattagctcctgagagctgcagaacgtgtttcaaatattccttcatcacatcactctcaatccagcctacctacctctttgactcc

SEQ ID NO: 116225 - DNA, 122 bp, Homo sapiens
gagagagaggctcacacctgtctcccccaaccctgcttctgaatgcaccaaattcatgcacgtgatggcacgtgtacaggcagcccccaaacccaccccaactctgggccggccctgtcctc

SEQ ID NO: 116226 - DNA, 122 bp, Homo sapiens
tctgttaactggccaccatccttgtctcctcgcgctgccggtcgctgcagaacccctgcgcggagggactgccagttcccaggaaggtgcaggacagctggagcctcttcttctctgggcag

SEQ ID NO: 116227 - DNA, 122 bp, Homo sapiens
gcctgtgggagggaagcactccggcttccacttgaaaagctttcattttgttccagtacccgagggaacatgagcctctctggaatgtacttgctgccctcttcctttggcttaggtgtgtg

SEQ ID NO: 116228 - DNA, 122 bp, Homo sapiens
gtcgcaagcgcgccgccggcgtccaatcaggacctgcgttccgggagccaatagcagcttcgagagccgctcacctagagcggactacacttcccgtcacgccccgccgcctggggctgggc

SEQ ID NO: 116229 - DNA, 122 bp, Homo sapiens
taatcctggccaagcctgtcttcctgaataattatgtcaacacgcttgggtgcctgtgcccgacagaaattttaccaaccttgagaactagactatatccctgaagccaggactgccatggg

SEQ ID NO: 116230 - DNA, 122 bp, Homo sapiens
ggtcctgactgcacagcctgcggaatgccgcccgggccagccgaggcctggaagaggggccgtcacaagctttctggtggatgtgtggccccagcgagctctcgacgtctcccctgcccgcc

SEQ ID NO: 116231 - DNA, 122 bp, Homo sapiens
atgctttagaattatgccttttaaaatgaaagtagagttccagggtcaggaggcgttgaccgggggacagagagactgcgggtcaaatgtgaggccataaactgtcaagatgacacacggtg

SEQ ID NO: 116232 - DNA, 122 bp, Homo sapiens
tagctgtcagaaaagtacctggcacacaggtgctttgtaatcaccggagtttactgtttccgagacctaaccatatttggctccgttgacttcttcgtactcagaactctgcctttccttag

SEQ ID NO: 116233 - DNA, 122 bp, Homo sapiens
cccctcctcccgtgacggcttcgggcctgtcccccatcctggaaagccccgtggcccccgcgagctccaccccttgttccgcccggtgccttgaggggatccagccccgcgtgggctcccgc

SEQ ID NO: 116234 - DNA, 122 bp, Homo sapiens
acaatttttaatgagaaggatgtgtctcacaatgatgtaaaatgttggaaacagcataaacggtggccaatatgggaatgtttgaaaatgtaaacttcttttataaatggagtattttgtaa

SEQ ID NO: 116235 - DNA, 122 bp, Homo sapiens
gtggtgggcacctgtagtcccacctactcgggaggccgaagcaagacaatggcttgaacccgggaggcggagcttgcagcaagcagagatcacgtgactgcactccagcctgggcgacagag

SEQ ID NO: 116236 - DNA, 122 bp, Homo sapiens
ctccctagttgctgcttttcctccacagtgtgacgtttccaaaggggaaggggtggggaacgcagttctctgactggtcaagacaacttccagggttcaagaggacaggatccctaggttca

SEQ ID NO: 116237 - DNA, 122 bp, Homo sapiens
catttgtctacatggaacaaatcaaaagacagaattgagtgggactccattagctggtgacgagggggcaaacccacagcaggatgagtgatgtgcccctgcctgtgaggggactccctcgg

SEQ ID NO: 116238 - DNA, 122 bp, Homo sapiens
ctgccctgccctcctcctcggcacaggtgtctggaggctggggagactgtttgaacagtgcggctcagcttggctgcactaagtgctatgctgtgagtgcaaacaggccggccacccccacc

SEQ ID NO: 116239 - DNA, 122 bp, Homo sapiens
tttagggaatgtgttaggcagcaatcgggcaagcatgagctgtagcccaacccttccctccgtgggaaaattcaagttaggacgcaatgcgaggcctcttaaatctttaagatcctcgggtc

SEQ ID NO: 116240 - DNA, 122 bp, Homo sapiens
atccaaaacaatttggtggtactgaaaatcttacggagagttaaaaataatactaatcctcgcccggctgaactggaattcttgcagttacaaagttaaaatttcaagtaaacactgtattt

SEQ ID NO: 116241 - DNA, 122 bp, Homo sapiens
gggcaggtagagaggaaggcagcctggcagagcgaggcacacgggtcagtcggagctctgcggtggccgccagaggggagggggccacggggaggagcggagggaagagcccggggaaaggt

SEQ ID NO: 116242 - DNA, 122 bp, Homo sapiens
aggaggcttggcgcctgatgctgcagtctcaatgcacatggagaaaacctcacatcctcacgctggcctgggagcctgcaggatgtctcctgccggcactgcaacctcatctgtcctccttg

SEQ ID NO: 116243 - DNA, 122 bp, Homo sapiens
ccaccttctccctctcctcctggaattgagctgtctctggaaaggctgaaagtgatgtcccgccacagagagaagggtttttccccaggcattccaggaccgggaacccaaccgcggccgcg

SEQ ID NO: 116244 - DNA, 122 bp, Homo sapiens
aaagagacggtttgggaattgctctgaggatgctatgcaagtcactaataaaggaagacacggacagatgaacttaaaagagaagctttagctgccaaagattgggaaagggaaaggacaaa

SEQ ID NO: 116245 - DNA, 122 bp, Homo sapiens
gatgggagccgtgtgcacgtcgggagctgggagtgagcgtgagttccgtgcccaggcccgcgactcggtccacgaggacagcgctccgggtcgacggggtcctggagccgcgctcggggagg

SEQ ID NO: 116246 - DNA, 122 bp, Homo sapiens
aaggctttgggcatcgaaaggggtagccattgtcatcaaagaaccttcggaaggtgaattcgtaaaatgcgtgctcaggatgcttgttattgggcgaggtgagtgtgtcccaggccttggtg

SEQ ID NO: 116247 - DNA, 122 bp, Homo sapiens
tccttcgttattgcccagccggcttttaggtaagccgttctgcacgcttccttccacgctcgttgggacatcgtaggcatattctctcaggactgtgagtcggcttgcccggtgtcctttac

SEQ ID NO: 116248 - DNA, 122 bp, Homo sapiens
tctttctttctctctccaggtcaccgcaagcagtggggtaacgtgcacaggaaggggtaacgtgcacagaaaggttacgtcctgggcagtgggaagcagtggggtaacgtgcacaggaaggg

SEQ ID NO: 116249 - DNA, 122 bp, Homo sapiens
ccttctacaaatgccagtgcatatgtcttcgctttcctctgcatctctctccatagctggcgtttgatcacctcttagattcctccgcattcctctccatgcagtggaggaacgggcaagct

SEQ ID NO: 116250 - DNA, 122 bp, Homo sapiens
gtaaaaccacagcctgtcagctaatgtgctgctgtgactggatctcttgaagtcatgattcgtgtatctcactaaatgcttttcatgtaagtaatccacaattgctaacactgatagcacaa

SEQ ID NO: 116251 - DNA, 122 bp, Homo sapiens
gtctgtgctgctcacggtagctgcatcagcttcacgctgtccgcccttcgccacccaccgcgcctgctgctcaggaatgttccaagcaacttggtggtaacagaagctgagaacagcccaga

SEQ ID NO: 116252 - DNA, 122 bp, Homo sapiens
acccgcgaaaacagagagggaagagagccggctggggccgagttcccgtggccaccaccgcggtccagattcctccctcggaggctccctcgcgcctcacgcagctcgtggtgcggggttcg

SEQ ID NO: 116253 - DNA, 122 bp, Homo sapiens
tagagggaggggacaggggtaggtgacaggcagcctgggcctcaggcttttgaaactggacgccagagccttgtggggccacgggcaagcctcgggtctatgactgccgcctgagctccgct

SEQ ID NO: 116254 - DNA, 122 bp, Homo sapiens
ccctatggaaggcactacacatcgccccgaaggctcggcgcaggagagactcaactttcccgccaccaacgccattcaccaactgcgcagactctacggccagtcaaacccgcccacccgcg

SEQ ID NO: 116255 - DNA, 122 bp, Homo sapiens
aggcctgaggatggaggctccagagcctgaggtagcgaaccctggggacctgagtgatctcgttttgtgagagagcctggcccctccccagagccagctgcagaatggacctggccagagag

SEQ ID NO: 116256 - DNA, 122 bp, Homo sapiens
caaagacagcaggagccgtgcctcgaaaaggctgagatgtctgagaaataaagttgtacgcggatttacgcctgggcaggttgaaatgcgtgtgccatgacagatccggaagcttgtctact

SEQ ID NO: 116257 - DNA, 122 bp, Homo sapiens
ctcttggaataacaagttccactggttagtcatagtccataaatcacctcttcactaacacgacagcattcaggggaggcaatgagactagggggaaggagctcaggctctgtttatagatg

SEQ ID NO: 116258 - DNA, 122 bp, Homo sapiens
agacgccttctccacgcgctatacttatacggaccaatgggtgcgccctgtggggagtgccgccccctgtccacgagcctcctcttctcgccagccaatggaagcggtctgcctagccctcg

SEQ ID NO: 116259 - DNA, 122 bp, Homo sapiens
tttttcacctgggacccgcagctgctctgatgaggagcctgctctgcgcacggcctggggcggtttcccgcagcaccatttctgccgctgccgggaaaagacgcagagcaaaggcacctttg

SEQ ID NO: 116260 - DNA, 122 bp, Homo sapiens
agcgcaccagcatctcccaaaaacgcggctctcgagcccttggaggctgctgtctcatatcgcagtccccagcccctgtgactactgaaattttaccaaacgaataatattacaaaaaataa

SEQ ID NO: 116261 - DNA, 122 bp, Homo sapiens
ttgtgccactgcactccaacctgggcgacagagcgagactccgtctccaaaacaaacaaacgaacaaaaggaaagttgattagaagacctattttcaaaatctatctcagccacttattagt

SEQ ID NO: 116262 - DNA, 122 bp, Homo sapiens
agagggctggatcagatggaaattcagggggtaaggggatatccgcgcgcagcccacccccgcccccacgggaccctggagcctccatcccagttcccaccacgcacccgccccacaaatcc

SEQ ID NO: 116263 - DNA, 122 bp, Homo sapiens
tccaaacaaccctgccatagcagcccatcagtcctctgagacaggtgaggaaactgaggtcgcaggagggcacccagaaggtccaggcagagcccccaggcccccacacctccccccgtggc

SEQ ID NO: 116264 - DNA, 122 bp, Homo sapiens
atctccacaaatgtagaaaagaaaaaaaaggtgtattattctgtaagcatcgaaccagaccggaatgggtgttacaggcaatccactaatgagattgcaaagagagacaaaaatctcacatt

SEQ ID NO: 116265 - DNA, 122 bp, Homo sapiens
ttgggcagaaagagggaggtttttaaggcattcaggaatatttaagtggggagaatcctgcggaagaatgggaggggacaagaagaactttcagctaacaaggctcctagggcaccctggaa

SEQ ID NO: 116266 - DNA, 122 bp, Homo sapiens
acagaaattcatggacaggaagcagggacatcttaacaataacatgagtggaactattaacgtggcctgggaccagcaaatggtggatttctcaacagtaaccgacagagaaagctgactca

SEQ ID NO: 116267 - DNA, 122 bp, Homo sapiens
gctgaggccgttaacgcctaggcagggcgcgaggcatcctcccgccgccgccccgcgggccgcctgccctttgttttggagccgtagcccggcccagacgccgttaacagccttggagcgcg

SEQ ID NO: 116268 - DNA, 122 bp, Homo sapiens
gtgcatctctaggaggattctgggaagtgtggcagaagcagcaatggtccctccagggaacggaagccgttgaacgtgaacatttggagtttcctcttttgtgctgattcctgaggactagg

SEQ ID NO: 116269 - DNA, 122 bp, Homo sapiens
cttagtttgacagggacagggatggacgaattacggtggcggagctgcgggaggcggtaccggctctgctcggggagccgctggcgggtcctgagctggacgagatgctccgagaagtggac

SEQ ID NO: 116270 - DNA, 122 bp, Homo sapiens
cgcgggggcggcggggtgctggggcgcgggccccgggggtgatgcagacctgggggactgcgcagggctcgggcacaggctcagcgcgcggtggccgcggaggccatgcaggagggcgcggg

SEQ ID NO: 116271 - DNA, 122 bp, Homo sapiens
cccagccatgcagaactgcaagtcaattaagctttttctccttataaattacccagtctccggtatgtctttatggcagtgtgaaaatgtactaatacaggcaagttacttaactctctaca

SEQ ID NO: 116272 - DNA, 122 bp, Homo sapiens
gtaatccccacaccgcttcctcctggaagtcaggctggccgggagctcccgtatccaggacggttggtcgcctctggcctggcagggatcctagtgtctcgggacctcccggtgacgcgcct

SEQ ID NO: 116273 - DNA, 122 bp, Homo sapiens
ccactcaaaatgcagaattcagcggcctcaaaagtcccgcctcttccaagccccgcccaccgcagtccatctttaggccccgccccaattcggctcagcccgccccagcgtagaggcaccac

SEQ ID NO: 116274 - DNA, 122 bp, Homo sapiens
gggtgggcttcattgaatcaactgaagtcctacatggaacatatctcggcccctgcggagcgcgacccaccccccagaagcggttccactgcccacttccggtcctgtcacagactcagcga

SEQ ID NO: 116275 - DNA, 122 bp, Homo sapiens
tctgccttcatcatcacatcacatgctcaggcactggctcctcgtgggtccttctaataacgactgttgtgattacatcaggcccagctggctaatctgggataatctcttgacgtcaagat

SEQ ID NO: 116276 - DNA, 122 bp, Homo sapiens
aatgaattaatcaacagacaatgtagaaaataacagagaaaagaagggccaatcctggatcgatgatgactactggtagcatgagtcatatacagtgaatacatgtctggaactctgaggtc

SEQ ID NO: 116277 - DNA, 122 bp, Homo sapiens
gctgctttccacacatcttcggtgcggtgcccgttcacgctttcctccacaatggtcccacgcagctccagttttgtgaaccactcggctccgtgtaactggtcaaacagttccggaatcat

SEQ ID NO: 116278 - DNA, 122 bp, Homo sapiens
ggggatagaaacctttgtgggagcagttgtaatggaacacaaatggtggctttatttgtgcggtgagctcaagggagatggcatgagcttgtcctcaagcatggtctttcccctctgttggt

SEQ ID NO: 116279 - DNA, 122 bp, Homo sapiens
cgatctagggggatgtccaggctgccggcggagcagagccgataacccccctctcctgcgcgttcccctgagacttggcctccgcaacctgtcccagccgcggagcaaactgctctgcggcc

SEQ ID NO: 116280 - DNA, 122 bp, Homo sapiens
gtttcccgggtaacgggagggcaaggagcggctgcagcggcagcggccgcggctgagaagcgcgggccggagtgcagtgcgagaccggctggaggaggcggctccgcgaagccggtgtgggc

SEQ ID NO: 116281 - DNA, 122 bp, Homo sapiens
aatggacgtgcggcattgagagggcgggtcttccggtagtgaaggcctggtgaacggctgcgcgacagaggacacttccttttgcgggtggcggcgaacgcggagagcacgccatgaaggcc

SEQ ID NO: 116282 - DNA, 122 bp, Homo sapiens
gagaccctcgacccagccgaatacaacatatctctggaaacccagcgggtgcaagccgagcggttggccataagagcccggctgaaacgagagtacctgcttcagtacaatgatcccaaccg

SEQ ID NO: 116283 - DNA, 122 bp, Homo sapiens
tgaaaaggcaggatccttgacagctcccactcccacccttcttctgttgaaccagaggtgcgtgcagccacacacagctctccttggagccattctcctcactcaaatcccaataaaatagt

SEQ ID NO: 116284 - DNA, 122 bp, Homo sapiens
caggcagagaggaggcggaggcaggggcagggccgcggcgcgctgggaggcaggcgcaagcggcggccgcccctgggctgggctccgaggccggggcgggggcgggggctggccgcgcgtcg

SEQ ID NO: 116285 - DNA, 122 bp, Homo sapiens
ggcaggtgctggggccacaagacagatacgaatggaactttgtactcttcggggacggtacggggggcgggcaagaaacaataaacaagccggcaaagaaagcgccacaaaattccaggtgg

SEQ ID NO: 116286 - DNA, 122 bp, Homo sapiens
cgacaaaacgccttccttgcttcaaagcccttttgcgtctctttcctgccagaggtgccgcgaggtggcatcactcccatttcacaggtcccagagacgctgtgcaaaaaatcacacagcaa

SEQ ID NO: 116287 - DNA, 122 bp, Homo sapiens
tccgcgacggaaccggaaccacagctagctgcctctgggaccgcccccgtgagtgcactgcgtcggcgcgaggcaggcgtccaactccaccccgccgcctcccacaccttggcgccggtgct

SEQ ID NO: 116288 - DNA, 122 bp, Homo sapiens
gcacgtgccaccacgcctggctaattttttttttttttttttttgtagttttagtagagacggggtttcaccatattggccagactggacacaaactcctgggctcaagtgatctgcctgcc

SEQ ID NO: 116289 - DNA, 122 bp, Homo sapiens
cgcgatgcccgagcaggtcagggacgcggctgactcctggaggcctgcagaggcaggcaccggagggcgtgggccggggctggggaggagagccagaaatctcagagcagggcaggttctgt

SEQ ID NO: 116290 - DNA, 122 bp, Homo sapiens
ggcaaaggtacaagagccagtgagccactcatgtaactgcttttaagttcttttctcacccgccccccaccatgtttgctgccatcccattggccacagcaagtcacatggccgagcccagc

SEQ ID NO: 116291 - DNA, 122 bp, Homo sapiens
tttcagaaccctttcaagcggttcttaaacaaaaaagtctagtccgatgcccattagcgccgcccccatcccacctcttacctcccaccgagcccagcgggtgggcaggaggggcctgattt

SEQ ID NO: 116292 - DNA, 122 bp, Homo sapiens
gtgatcttctctggaatgttccttgttttcaccctggccggggccctgttcctccatcaacgaaggaaatatagatcaagtaagagacagaacacaggcctccggtcctgcccctgcaccac

SEQ ID NO: 116293 - DNA, 122 bp, Homo sapiens
tggtgtaacagagggaacactggactaagaatcagaagtcctgagatttagcttcagctccgccaccccctggcgagttaccttcactgaggctgttttcctgatccatgaagttgggcagg

SEQ ID NO: 116294 - DNA, 122 bp, Homo sapiens
aaaagtctccctggaagagacaggtgctgctttctgatgtagtaaaatcaagtggatccacgtcgggagatgcacacgagtcccgggcacccaatcggcccttgggtgcacactgtgtgctg

SEQ ID NO: 116295 - DNA, 122 bp, Homo sapiens
tcctcgtccatacatgcatccatccatccctgcatgcgtacatgcatgcaatacaaatcccgggacgccggcacggagagctgcgcctcgcccttgctgcgggctgagagcgggtacccccc

SEQ ID NO: 116296 - DNA, 122 bp, Homo sapiens
gccgggagttgcgcggagaaggagcgctcaacacagcctcagcggttcactacgcaagcgcgaccaacggcttcccgggaagcagccaaaaacgcttggccgcctaccacgtccgcgcgctg

SEQ ID NO: 116297 - DNA, 122 bp, Homo sapiens
tgcctctcctttcctagtagtgagctctctactgttaggtctcaccccaggcaccagggccggcagccacagggatctcttccagcggggcacaagattcatccccacatgtggatgatccg

SEQ ID NO: 116298 - DNA, 122 bp, Homo sapiens
aaaagaaactcaacttagcaacagaattccaaaatgaaagtacaaacctttcaaggcatacgatcaggaggcaaaatgttcaagctgaggtaggaaatgaaagccctcaaccctctcactta

SEQ ID NO: 116299 - DNA, 122 bp, Homo sapiens
ggccattgatcacaaggcctttccacctaatggcttttcctatacaagtagttcacatctcgaacatttccaggcttagagcaaacagaatatggctgagaaattctgagcaaggcagaagg

SEQ ID NO: 116300 - DNA, 122 bp, Homo sapiens
gccaccacgcctggcctcaatttcttataacctggaatgcctacctgtccactttatctccggatagtttttcaagatagaaataacctgaatgccctcttatgattaaagtgatatacaat

SEQ ID NO: 116301 - DNA, 122 bp, Homo sapiens
gagtaaagcaatttggaggaggtgaattctgtgtatttattgcctcttgttgtcatataacgtgcttcattgtaggtttatataatttaatttttggcaatggctgtgtttaacaacatcga

SEQ ID NO: 116302 - DNA, 122 bp, Homo sapiens
tgccgctgtcagcggacagtgggggacccctccacgagttaccagatacctggtttccagcggtgctgctttgggtcccatctccagggaaaagaactgctcacgccaggctgcacttccac

SEQ ID NO: 116303 - DNA, 122 bp, Homo sapiens
acatccccttccatctcgttctagtttccagttaaacacagaacccagactctgctctaacgtcacgggctggcactgcgggggaggaagccgcggccagatgggggaggggaaggcttgaa

SEQ ID NO: 116304 - DNA, 122 bp, Homo sapiens
acgcgggcccgagccctgggcgggagtgcggccccgggtcccgcggcctcggcgcccgcgcgcctcccccactgcccacccccggcctccgggcccgccccccgcaggggtcggcgcagcct

SEQ ID NO: 116305 - DNA, 122 bp, Homo sapiens
ggcccagcgctaccagcgggtttgtgtagggccccgcccatctcatctacatgtttcaggcggccccggaccccacccatcggcgaagatctcccgcggccaggcaccctgcgaggccaggc

SEQ ID NO: 116306 - DNA, 122 bp, Homo sapiens
gcaatgccggcaagggacgcttgtagcaggaacggggcagcctcccttactcaaacaagacgcggactgcctgaggccggcagctcagagaacaaaaggcaagtgtgagggggacggggtca

SEQ ID NO: 116307 - DNA, 122 bp, Homo sapiens
tttcaattgccactaactcttggacagtttattacacacttgacatttctttatccaattcggttagtttggtgaataagatttcaaaaaatcacttactcgaaaatcgtgatatttaacat

SEQ ID NO: 116308 - DNA, 122 bp, Homo sapiens
gtagctctgagcttcaggcactaacctccaattctcacaggcaggtgggaagggaggccccgggcatggtgaaaatcagaaaaccacggctgtgtggagcacaggccctctcctagcaccaa

SEQ ID NO: 116309 - DNA, 122 bp, Homo sapiens
gtggtgagctggcagggatgataggtgagagtacacagtgtactttttctagttacgtttcgcctcatcactgctataggggcctttctaaacgcctgccacaccaggagagagacctacag

SEQ ID NO: 116310 - DNA, 122 bp, Homo sapiens
ttccccatacaattttaggccaggcttttttcactgctccaaaatgttcattcatcaacacgtaggtaattaacctccacttcagttcagcatgaccataaacaaggggatgtgattaccag

SEQ ID NO: 116311 - DNA, 122 bp, Homo sapiens
gcgggcacgatggccgtaaaggcagggactccacctcaccaggccttccttgggctcaggcgcttccggggaggaagaggaggtggccccagacggagaggagggcagcgcggggccggagg

SEQ ID NO: 116312 - DNA, 122 bp, Homo sapiens
gtcctcatctcacactccctctcctctgagctccccctgggagacttacagacaccccgacgcttggcaaggccataggatgtttttgtttggtttggtttggtttttctgagacagtctca

SEQ ID NO: 116313 - DNA, 122 bp, Homo sapiens
ggcgccggctcttgcggccgagcagagttgcggcgtgggaaagagccgctaggagcagaccgcgccgccgccggagccgcgcctgcccaggcccggggagggaggaggcgggcgtcagggtg

SEQ ID NO: 116314 - DNA, 122 bp, Homo sapiens
cccacacacagcagcgagacacaaacggctcgtccctcctggtgctccacacacagcagccggacagacggctgatccctcctcgtgctcccacatgcagcagccagacacagacggctcat

SEQ ID NO: 116315 - DNA, 122 bp, Homo sapiens
agaccccgactcgttaccatactcattcatcagaaaactcttcattttgtgtacaaataacgttttgagggtaatcattgctctagaaatgaagaattatacatcgtatttattgcactttt

SEQ ID NO: 116316 - DNA, 122 bp, Homo sapiens
gcgggcctcagaccgccgcccggaaggcgaggggcgcactacaactcccagcaggcaccgcgccaatcccgagatgggatttccacggtgtcccgtagttggcaaactgtaagcagacgcgt

SEQ ID NO: 116317 - DNA, 122 bp, Homo sapiens
agacaggagccgcgctggcccgggtgggaggggtctggtgcaagtagggcgtgaggggcccggcacagggcagggctccccaagcagccccgcccctctcagcctcatggcaacggctcccc

SEQ ID NO: 116318 - DNA, 122 bp, Homo sapiens
gggcgctcccaagcctgggtgggtggggggcgcaggctcacggacggcgacggggggtgccggagcgcacagacaccccagagaagcacccagagccggggaccgggaccgcagacgcgcag

SEQ ID NO: 116319 - DNA, 122 bp, Homo sapiens
ttttttttaaatatacggtgtctattttgctcaccactctatgcccggtgcctggaagtgcgactggcacatagtaggtgttgcatagtttcagaatgaactttttaggaatcaaaattcta

SEQ ID NO: 116320 - DNA, 122 bp, Homo sapiens
cacattctggtcagaaagtccgctagcttcataacatttcccccaaacctaattcaaaaccgatgatagctgttgaagacaactgcagggcccagagttgatggtccaggatctattcagga

SEQ ID NO: 116321 - DNA, 122 bp, Homo sapiens
agcaaggcccccgacaggtgagcagcagccaggccaggtgcatggcagggtgtgtggtggcgcgcgtgcggagcgggtgtctttgtggtttcaaatcagtttgtgatgtgttctgtgtggcg

SEQ ID NO: 116322 - DNA, 122 bp, Homo sapiens
cgatgagaactgtaaactctttccaaaagagcccagtgtgtggtcattgccgcgacgtgccggctggtggcaccgagcagcctgggcccagagcggttgtcgggccgacagatccgggcggg

SEQ ID NO: 116323 - DNA, 122 bp, Homo sapiens
cctgtcctctcccaggaagttctctcctcacctgtgagcaggacccccttccaggtgatgcgctgtgtgcagggaggggctgagaggggccccatggtctctgctgcttgtgtgttctcctc

SEQ ID NO: 116324 - DNA, 122 bp, Homo sapiens
catagaaattgtatgaaaatcatagcaactaaaacatggctgagctgaggccctaaatgtcgccctgattacccacgcactgatttcaccatcagttaaagcactaacgaatacataagtgc

SEQ ID NO: 116325 - DNA, 122 bp, Homo sapiens
ctagagatctgtccaggaactacctagggtagaactgaatgaacgcagtgatgccaaacccgatcaccctgttcttgttccttctactaccccactcagcctattcaggcatattcagctcc

SEQ ID NO: 116326 - DNA, 122 bp, Homo sapiens
ctggaagggtcagtgtgataccgtgcacccacgcttactcaccgaggagctctcggattccgtggggcttgacgggtcagtgtgataccgtgcacccacacttactcactgaggagctctct

SEQ ID NO: 116327 - DNA, 122 bp, Homo sapiens
agagaaaaaacacttttattgaaacgatccaaccagcggcggcggagaaaagcgaccggccgcgggagcttaccccacccccgcctgagcggctcgccgggggcagcgcgacccctgccggc

SEQ ID NO: 116328 - DNA, 122 bp, Homo sapiens
gctttctttgtctcagtttgccttctcagcaagcctaacacaattgattatcctttctctcgcctctgtctccaactgctcctaattcctgatccttcctaatggcacttcaacatattgta

SEQ ID NO: 116329 - DNA, 122 bp, Homo sapiens
ccagcgcggccgcctggccctcgagctcgccgaagatgtccccggcgcagcgcgacaggtcggccagctgcgccagcaggcagcccagggcatgcgagctgacctgctccagcgagcggaag

SEQ ID NO: 116330 - DNA, 122 bp, Homo sapiens
aaaacgtcaccagcaggaggaagctatggaaacatgactgctaaatgtaacatggtatcccggatgggaatcctgcaacattaggggaaaactgaaggaatctgaaaaaaactatagacttt

SEQ ID NO: 116331 - DNA, 122 bp, Homo sapiens
gtttgtgatttagtgattccgattgtcgtgcgaggccatggagtaggtgcctggctgctccgtgtatttttgaatgaaggcatgtgaggagccccagcatcacaaggggccacataaaaacc

SEQ ID NO: 116332 - DNA, 122 bp, Homo sapiens
aggaaaattcctgtattttacagcttagttttcctggcccttcagaaaaataagagacaccggaacaacctgatatgatggtacctagaaggagtaagatcttccttatgctcaaccctatc

SEQ ID NO: 116333 - DNA, 122 bp, Homo sapiens
gctcctgacaggggacaagcagctgaattcctgaaggaggaagaggacagcacagcctctcgccccactgatgcctcaggatctatgaaaagcaagagcagtatggcagtgctcccaaccct

SEQ ID NO: 116334 - DNA, 122 bp, Homo sapiens
attttaaacaaatgagaatttacaagacgtgtgactttctaactctactttatcatacgtcggcaacctctttccatctagaagggctagatgtgacaaatgttttctattaaaaggttggg

SEQ ID NO: 116335 - DNA, 122 bp, Homo sapiens
ctcctttaagatgtggagcaaactgaataatgaagagcacaatgagctgagggaagtggacggcaccgctaagaagaatggcggcaccctctactacatggcgcccgagcacctgaatgacg

SEQ ID NO: 116336 - DNA, 122 bp, Homo sapiens
gaccagccgactggccaaggtgaaggatacacatctctcatggcttccagggtggacgcccgcagaatgtctcggatgccgatgacattctcatggcggaagcgcagcaggatctggatctc

SEQ ID NO: 116337 - DNA, 122 bp, Homo sapiens
atcctccttttccaggatcatggtgtagaccaagagtacctgcagtcacgccaggaatgacgtccattcttacctcacccatctgtttttgcacaatttgcatttagatgtagcaaactaaa

SEQ ID NO: 116338 - DNA, 122 bp, Homo sapiens
gggggtaaaatactttgatttccttcaaggtctgccatctgttatgtgatgctataccagcgtcaagttggaaactcagccacattatactgggataattttagaaatgatttagtgagatt

SEQ ID NO: 116339 - DNA, 122 bp, Homo sapiens
gctctggaaggcgggggccgccagccgctgcccacagagaactcgcactttttcgctgcgcgattcagaaccacgccgggtctgatgccatccggcgaattatgtaaccagggacaccgctc

SEQ ID NO: 116340 - DNA, 122 bp, Homo sapiens
actcggccacggcgcctcccgccggtccttgccatctgaaggccgggaggagtggggagtcggcgcttgcaaagatacactcaagactgcagacagtaaatcaattttatttgtgttcacag

SEQ ID NO: 116341 - DNA, 122 bp, Homo sapiens
gcccgcatgggggaggggcactggccggatccctgggcagtgagctcaggagggctggggcgtcccagtcagggagctggttcccgggagggtcctcgctgcttgtgtggccctggtgacga

SEQ ID NO: 116342 - DNA, 122 bp, Homo sapiens
tcctggacccattccattaaactacattataaaccttgttgccttcacccttcagcctcccgctccaggcacatcccaccttacctctcacttggctgatttgaccttctctttcacccaca

SEQ ID NO: 116343 - DNA, 122 bp, Homo sapiens
ctgcgtgtgctgacgctggtgccacagtggaaatgacctgtgtgctgaggacatgcggcccgcagggccccacagctgcgctctctccaaggcccaagtttgggaaattgatcacaatcaat

SEQ ID NO: 116344 - DNA, 122 bp, Homo sapiens
tgagccaccacgaccagcctgcttttactatcttaatgtctattttcatttggcagctagcgtgtttctatgaaaatggaagttaaatcatgtcagccttctgttcgaaaccttccagtggt

SEQ ID NO: 116345 - DNA, 122 bp, Homo sapiens
caccttgcttgacacacttgagccggagggggtccttgcagtgtttgatcacggccagcacgtccctgatggtgagccccgccacgggggtctcgttcacctccagcagcagctcctccgac

SEQ ID NO: 116346 - DNA, 122 bp, Homo sapiens
gcgggcacaggggcaggtgcagcaatgagggtgtcagagaagactcggggccctgcttcccggagaacacgtgtttcagtcagcctgtgagtcgccgcctatttgcctttaggatgctagtc

SEQ ID NO: 116347 - DNA, 122 bp, Homo sapiens
catggtctgatgatgacgcccattggagatttgctgagcagaaataaggctctcagaagccgctgttgggaaggggatgaagacgaagctgagtttgaagagcagcctgaatgctctcaccc

SEQ ID NO: 116348 - DNA, 122 bp, Homo sapiens
ctacaggcatgtgccaccacgcctggctaatttttgtatttaatagagatggggtttcaccgtattggtcaggctggaagatagctttctatcattaatttctagtttaatcctgttgtagt

SEQ ID NO: 116349 - DNA, 122 bp, Homo sapiens
gcggtgcatgtcacgtgatcgcgccggcttaccttggtgcccatatttgattagggcacccgggttccgccgtcctgctctccttagtcggatttggggggttaactactgcacggagccct

SEQ ID NO: 116350 - DNA, 122 bp, Homo sapiens
ttttttttttgagaaggagtcctgctcagtctcctaggctggagtatagtggtgtaatctcggctcactgcaacctctgtctcccgggttcaagtgattctcctgagtagctgggattacag

SEQ ID NO: 116351 - DNA, 122 bp, Homo sapiens
ggccgtggcgcaggctcggccgcctgaagctcctctcgcctccgggaggacgtccaaggtcgtttcttaaagcatccctattgcgcagaaggaacagtggggttcacttttctcgctaatgt

SEQ ID NO: 116352 - DNA, 122 bp, Homo sapiens
tctaatggctgacagagagagacgggctgagtaaatacccatatttctggtttacaaaagcgggttgatgatacccacttttagagattagaaacataaaagctggtaaaataaagagttta

SEQ ID NO: 116353 - DNA, 122 bp, Homo sapiens
gtttgcagccggcatagcggaggcgcgcgtggggtgggcacgcattggggtccgtggaggcgagaggctgtgtgtgcgccggcccgcggggtcgcggaggctgcggtgatactaggcgggag

SEQ ID NO: 116354 - DNA, 122 bp, Homo sapiens
ggagaagggcgggctcgctccggtctccaccctgtgggctcccggcgcctgcgcgtcccacgcccttgctgctgagtcctgcacgtgcggaagcgaactctttgtgaagtcggtgtgaagga

SEQ ID NO: 116355 - DNA, 122 bp, Homo sapiens
ccccagcgccagtgtctccatccacgtccttcactcgtcaacctttcctggcccaggctgcggtgtcccagcgccaggctccgccccgcccttggctgccggccaatcgccgccgactgaga

SEQ ID NO: 116356 - DNA, 122 bp, Homo sapiens
aagacacagcacgggctctggtccagactgcggggtgcggcctcgttcaggagacgccaccgctctggggcctcatcctaaagtgggcccaccagtaaccccagtcgtatagggctgtagtg

SEQ ID NO: 116357 - DNA, 122 bp, Homo sapiens
cagctgctctgacttaaaactcaagccctcaggggatgccttagagttggggtggggggtcggggggtggatggagaaggtcggagggaagagtaggagggaggggtgagaaaggggaaaaa

SEQ ID NO: 116358 - DNA, 122 bp, Homo sapiens
gccccggcggagacgcacttcccaggctctcagagaaaatcagccggcgagccgaggggacgcgcggggggcgcgcgggtcccggccgggctcagggacgtccccgcctgccgcgctgccct

SEQ ID NO: 116359 - DNA, 122 bp, Homo sapiens
gggttacccggccctcgataaggaaacactccggccatatccggagaatctggggagcggcgggatagaaaaattcactaaccacaggcccgggcccacaagaagcgcagcagaaaggcgtc

SEQ ID NO: 116360 - DNA, 122 bp, Homo sapiens
ctgcaggcgctgcagattttggtgtatcctggggtgggaggctccggctctgtcagctgccgctgccctctcggaggtatccgcggctttagcctagggaaggaggggagggatgggagaga

SEQ ID NO: 116361 - DNA, 122 bp, Homo sapiens
gcctagaggtgctcattcatttaacagagcttccttaggttgatgctggaggcagaatcccggctgtcaaggggtgttcagttaaggggagcaacagaggacatgaaaaattgctatgacta

SEQ ID NO: 116362 - DNA, 122 bp, Homo sapiens
cgaaacatgaatgcacttgtgggtctgcgagcgaagctggtgatgttctctgccaggcagcggctccctggtctccttccaaggttgggcagacatcgcctgcctggagctgggccagaggc

SEQ ID NO: 116363 - DNA, 122 bp, Homo sapiens
ctcacccagaaacggcaggagcccagacttgctgattcaccaagaaacggctttgtgtaccggaggcgctgttggtcgggacgctatcatgtatgcacacggagctctgcaaatgtgatggc

SEQ ID NO: 116364 - DNA, 122 bp, Homo sapiens
tctgactcgatggctgtacgtggttacggactgtctgccctgatagaatctcagcttcaacgcatcagaggagactgacttgaccaatggtggggatgagtcgcctgagaaatgacagactg

SEQ ID NO: 116365 - DNA, 122 bp, Homo sapiens
tagtgaaaatagaataagttattgttttatgcaaatgttatttgatatagtagaagctaacgttcaggtaaattatttttaacagcagaggtggtctttcttgagcccttcatccacacggc

SEQ ID NO: 116366 - DNA, 122 bp, Homo sapiens
ggttccaggaccccatggacaccaaatccaggcacactcacgccccacaagtggacctgccgaacctgcgtgtacagagtcggccctccgacacacgtttcacatggcaggaacactgtatt

SEQ ID NO: 116367 - DNA, 122 bp, Homo sapiens
atttactagaaaatcctggaagggccttggcagctcaggaaggagcccagcagagagcaccgcagggggggcccggagaagcggccaaggaccagcgctccctgcgcatgcgccaggctctg

SEQ ID NO: 116368 - DNA, 122 bp, Homo sapiens
ccctgggttttcactgcgcgtgcgcgaggttcttccgctcgcgggagactgggccgctggcgcctctcagtgcccactgatggggcccagggcttgggcttgcttccccaaggatcaacagc

SEQ ID NO: 116369 - DNA, 122 bp, Homo sapiens
ggacaggtcgccgtgagaccagttgtcgtgctgcagcacgtactgcagccagaagggcagcgagcagatgtagaagaggtcggccaccgtcaggttgcacaggtacacgcccagctcgttcc

SEQ ID NO: 116370 - DNA, 122 bp, Homo sapiens
ttccggggctcaggtccattgacttaggtctagggctccatacatttcacccagagactccggagcctggcaggcagacctgttctgacaccgaacttccaaagtcatgggccttgattggg

SEQ ID NO: 116371 - DNA, 122 bp, Homo sapiens
gcgaagacgcagagacatgcacatgagtgttcacagcacattcttcgtgacagctgagaacgggaacaagccccagctccgtgaacggaaccacagataaactaaatgtgatcgagccacac

SEQ ID NO: 116372 - DNA, 122 bp, Homo sapiens
gagacagacacaaaagggatcatgtatttttgaggattttacctgttgacgtctgatgaccggccgtaggtccagggttcccgctgggtttaatcccctcgaagagtaaacctgccgctctg

SEQ ID NO: 116373 - DNA, 122 bp, Homo sapiens
gccccccagcgcgggcgccttgaagccggccggaccctgcagcgcgtaggggaacagcgacgtcttcatctcggccatgttgtgcagcgcggccagcggggcactgctcagcacgaacgcgc

SEQ ID NO: 116374 - DNA, 122 bp, Homo sapiens
cccggcgcgggagaagccgcgcccagccgggctggtagcccagcggggggcgcggcagggcgaggagcagcccgcgctgctcccgcccctcgggtgccagcaccgcccctgctgcggcgggt

SEQ ID NO: 116375 - DNA, 122 bp, Homo sapiens
tgcaagttctcagagtttctcggggcagtttttctttttccattcgcggttttccggccacggtcagggtggctgtgcacttagttacttggctgaaacgttctcacttctctcttccccgg

SEQ ID NO: 116376 - DNA, 122 bp, Homo sapiens
ggggtaagatggcggcggcagtccgggccgcggggctcgggcctattggggtgggcggggcggagttgggtcgctagttgtcccggggtcctccccacaagccacgggtcctagagggcttc

SEQ ID NO: 116377 - DNA, 122 bp, Homo sapiens
cctggcatggagccccccgtgctgtggccgccctgagcagcagcggctagcggctggctacggtgacggctccctgcgcatcttcagcgtctcccgcacggccatggagctcaagatgcacc

SEQ ID NO: 116378 - DNA, 122 bp, Homo sapiens
tggaatggaatcaagcattccaggacataaacatctgaatgagtgctgttcccttcaaagcgatagccttggggagttacatgcttaatctaataatagcatcactgctccaaaaactacgc

SEQ ID NO: 116379 - DNA, 122 bp, Homo sapiens
aaaggagggcgtttctttaacagttgctactcctgcaatgcaaacacgaggaataaacggcgtcggaacacgtcgactgcctggtttctcaaccgggaaaatggccgaactgacagtaatga

SEQ ID NO: 116380 - DNA, 122 bp, Homo sapiens
ggggctcgcccctccctcctcctcctccagcgtcctgcagctgccgcgcctgggtgtagtcggggcggagccagcatccaggccaggagagtaccccagcccctggagcctgggacaccttc

SEQ ID NO: 116381 - DNA, 122 bp, Homo sapiens
gcagactttggagtcagacagatctgggttgaattctggttccacaatttctgagctaaacgatttggggaaagctacttaacatctctgagcctcagttttctcctcatgaaggtgctgtg

SEQ ID NO: 116382 - DNA, 122 bp, Homo sapiens
tgttcagtcctcacctgggaatgagattgaaactaaattatagcaatgacgaaggggccacgggctccccactgggttaggaaacctgggattctgcaccttctgcaggaagctgtgaagtc

SEQ ID NO: 116383 - DNA, 122 bp, Homo sapiens
caggaatcccatattcacccttcatatatgtgccaagggctcctttttggaaatatgcaccgcttacatacctacacacacacatacaccctacacacacacacacacacacagactttata

SEQ ID NO: 116384 - DNA, 122 bp, Homo sapiens
cgtaggtcgttcccttctgccgagcagctggcctccgagacaagaggcctgcacagacctcggccagggctcaccgcgggcgcaccccaccccggccctcagcaaagtcagagagaggcctt

SEQ ID NO: 116385 - DNA, 122 bp, Homo sapiens
gtgcagggggcacttcttcaaggcattcggggctgggccgcatagggccatgggggtgggcggggactctacagtcggaggctcaagagtgggaggagcgtgagggccccgcagtggaggct

SEQ ID NO: 116386 - DNA, 122 bp, Homo sapiens
ataattccaacaccttgggaggccaaggctggcagatggcctgagcccagaagaccagcccggacaacatagtgaggccccctcaccaatctctacaaaaaaataaaaaaattagccaggtg

SEQ ID NO: 116387 - DNA, 122 bp, Homo sapiens
tttgtggaattgggtgtgtttggcactggaaacaccgtgttgccacacgatttaccttaccgaggtttttacaaaggagaagcagcaggagaaaagtctgtactaaaacattcttgggcccc

SEQ ID NO: 116388 - DNA, 122 bp, Homo sapiens
ggtacccattccaaaagcgtggatgggcaaaagtccagccctcctcctcctgtcttgaagcgagtccctagacatagctcgatctatgtaaaatggaattcacattccctgtatttcaaggc

SEQ ID NO: 116389 - DNA, 122 bp, Homo sapiens
ggattacaggcaagagccactgcgcctggccggggaactgtttttgatgggtggggtccccggctgtggttggtagtgtgggggcgtggccgagggtgtggcctgagggagtgagctaaccg

SEQ ID NO: 116390 - DNA, 122 bp, Homo sapiens
atggctggaacattaggggatttgtagaaaaatgtcaggatgttgggagtgtctttccaacggcctcagtaaggtccaacaagcaagagacacactctggttgaaaggagcccatctgaaag

SEQ ID NO: 116391 - DNA, 122 bp, Homo sapiens
cagtccgcggtcctcacccgcgccgggcggtagtagtagctgtgctctttggggtccaggcgccgcggcgggatgtagctgaaggcggactgcgccgagacgggcggcggcctgggcttgcc

SEQ ID NO: 116392 - DNA, 122 bp, Homo sapiens
gacaatggagctatcggcaaagttgctgccgccgaaagcctctcctgtccccatccacctcggtgagagccgagagtgttttctttctggaatactgattagcccaacatgcatctgttcgc

SEQ ID NO: 116393 - DNA, 122 bp, Homo sapiens
aaactaattttagctcagaagtactaaaaatgaaacccacctgcccagggctttacgagtcgtgtgtgtgtgtgtgtgtgtgtgtgtgtgtgcacgcgcacgcgtgcgcgtcctgagaactc

SEQ ID NO: 116394 - DNA, 122 bp, Homo sapiens
gaaccacatctataaacacttttgattggatttgctttagaaatctcagaccgattgttccgaaatgacactccttgatataagggggaatggagtcaggtgtaggtttggagacaaagact

SEQ ID NO: 116395 - DNA, 122 bp, Homo sapiens
cacaagcgccgggagctgtgggcacgtgaggagggcgagcgggtcctaggtgcgtagacccgtgggtggggggcggagcggaccggtggaggtgggcagagaccggcggcaagtcgacccac

SEQ ID NO: 116396 - DNA, 122 bp, Homo sapiens
tctttaccgtacatttacagaccatttagcaatttctccaagtgcttactcccgttccctcggtgacatccttgccctgtgctggggagggcagagaaaggctgactctcccaagcctggcc

SEQ ID NO: 116397 - DNA, 122 bp, Homo sapiens
tcaggccctgcaagatacccccctgctgagccatcacatttgtagggggcaacatgatgtcggagaccagggccaggtctatgttccatcctcatcagcctggaggaaggtgacaggagtaa

SEQ ID NO: 116398 - DNA, 122 bp, Homo sapiens
gccgccccgccccatgtttggcctccccgcccacctctccccgcccctcggcatccgccccgcccacctcggtcagccccgcccctcggcgggcttaccctgtccgctccgcccctcgctgg

SEQ ID NO: 116399 - DNA, 122 bp, Homo sapiens
gaattgttttttacccccaggtctgtttacgtaagccaaggatcctggccaccagacaaccggcatggcatgccgtccccagtcaaaacataaaaaaaacaggccgggcatggtggctcaca

SEQ ID NO: 116400 - DNA, 122 bp, Homo sapiens
gggtcggcgatgctccacagagcagttggtcttgcacctaagaacaccttatgtgtaattcgccaaggttaagcagggcccctctcagaatttcaccttggcccctccttcatggccatggt

SEQ ID NO: 116401 - DNA, 122 bp, Homo sapiens
aatctccagagggggagatgatattacgcacaatatgataaaaagactgtgagtccaccgcggatcctaagagccaggggggcaagaggggctggctctttctttactccccgcatcgcggg

SEQ ID NO: 116402 - DNA, 122 bp, Homo sapiens
tctgtccagttcaaggcccctctgtagccctgagtggcctcatgtcctagcccttgccctcgcgatgtaagaatcaagagttcagggaggaaaaccattgaacgttgttgcagattctttgc

SEQ ID NO: 116403 - DNA, 122 bp, Homo sapiens
tcactgcctggggcctgcagtgctggccggctgatccgagtgcggggcccaccaagcccgcgcccacccggaacttgcgctggcctgcgagtgccacacgcggccccatttcccgcccgcgc

SEQ ID NO: 116404 - DNA, 122 bp, Homo sapiens
gcggggccgtacgtgtcgctgaaggtgaggggcaggggcctccgcgtcgcctcctcgaagcgcttgcacagaaggctgacaaactcggtcttgaagacgctctccaggaagctgtcggcggc

SEQ ID NO: 116405 - DNA, 122 bp, Homo sapiens
atgtgcttattcaagaaaataattatctcaattttcttgtactctaacctaaaatgtcttcgccttcacgacttaaaaaaacaaaacaaaaaaccagaaaaaaaaaaagaaacgccaaagct

SEQ ID NO: 116406 - DNA, 122 bp, Homo sapiens
cgacatctggaaaggatgaatagacaagaagtagctatgggaggagagggaaatcggattcgcgtggaggaaggtaccgttctattccacacacacacagctttaagcatttagtaggagga

SEQ ID NO: 116407 - DNA, 122 bp, Homo sapiens
ttctgcagcatgttgctgggtacaggttgtgcagtgcactttgcaaattgctgctttagccgaagtgtttgtggacagctacttttaatttcctccatatttgtttacactcgccccccttg

SEQ ID NO: 116408 - DNA, 122 bp, Homo sapiens
taattggattttaatgaaacgaatgggagtgctgaagccgtttgccaccctggcctgcatcggggccccgcaattaagccgattatgttttgagagtcaagctgtctgactcctcgcgtccc

SEQ ID NO: 116409 - DNA, 122 bp, Homo sapiens
ctggccaatcaggcggctctcgtggaggcagctagcgcgaggctggggagcgctgagccgcgcgtcgtgccctgcgctgcccagactagcgaacaatacaggtacgtctcgcaccgcccgct

SEQ ID NO: 116410 - DNA, 122 bp, Homo sapiens
gccaagggagctggatgaaaccttggatagtttcataggagccaagggtacctatggctacgagaagagcctgccctgtgacttataataggaatgtgaagaagactgaaaaatactgctaa

SEQ ID NO: 116411 - DNA, 122 bp, Homo sapiens
atgggtgtggcagtggatgtgtcgtctgaccgtaggttctctggtcgagcaagtctcctgcgctatgggaagctgaggaggtgctttctttctttctgtctctgtctctctttctttacgtc

SEQ ID NO: 116412 - DNA, 122 bp, Homo sapiens
ccctccctcacatagtggggccgagtatccaacccccctaggcgctgggggtcagtgcttcggacgctctgaacattcatctccaggatcagttcaaaccgtggccatagcaaggcaagcac

SEQ ID NO: 116413 - DNA, 122 bp, Homo sapiens
gtagctgcctgggtgacagccacccatttgtctatgttttctttcctattctaaagtaaacgattagaagtggcctcatagagtcttaggaagaaacagtaagccctgtgccacccggggtc

SEQ ID NO: 116414 - DNA, 122 bp, Homo sapiens
ctgtctgccacgctgctccgtctctcctctctgactgtctgagagaactacacagacgagcgcaccaaaaggctgtcaggtctcagtaaatattaattgcgcattttttttttttttttttt

SEQ ID NO: 116415 - DNA, 122 bp, Homo sapiens
ctgggagttgtagtcccgccacgcggcctcacctgccggcgcggaggagggcgaggagggcggaggctgggagcccacagaactctgctgctgcggacctggccagtaatgttagctgcaaa

SEQ ID NO: 116416 - DNA, 122 bp, Homo sapiens
ctgtcatgaggcggtgtgtggaggcataggagtaggccagccagcggaacacgtggtcgtcgggggtgggggtgtgttcctgcgtcttccagggggaccgcaccaggtcgtaggggtacgcc

SEQ ID NO: 116417 - DNA, 122 bp, Homo sapiens
gcgtggctcgggaggttggttgggggggcacacaggaacactccctaaggaagtgtgatccgagaggttggggtgggggcttgcacgcttaggacgaggggggcctccggaggttgggaaga

SEQ ID NO: 116418 - DNA, 122 bp, Homo sapiens
tgtgcccagccagaagatgtactggttttagagtgacatctctgtaattgatgaacatcacgtgaggtccttagatgtaaagcgagtaaaatggctgatgaacagccagtcttagggcatat

SEQ ID NO: 116419 - DNA, 122 bp, Homo sapiens
caggccgcggacgcgatgctggttgctgcggctcgggcggcggggctggcggggatgtgacgggcggcccttcgtctcaccttccgtcctcgggcccgcaggtcgcagggcggcctgcagct

SEQ ID NO: 116420 - DNA, 122 bp, Homo sapiens
cgtgtgttccgaaggcgggcgtgggggcactagtgcaggggtactaggcgtgtgtgtgcacggatgtcagagtcaggctctgtgcaaatgcgggcacacatgaccttgacctgcagatctgg

SEQ ID NO: 116421 - DNA, 122 bp, Homo sapiens
aggtaactcctaaattcatatattcatgctcaaaccttcttccaacattcagtcgtaagtcgaattgcctgtgacagagatactttgtggttctgtagacatttcaaactaaccatcctgag

SEQ ID NO: 116422 - DNA, 122 bp, Homo sapiens
aggaacatggaaatgctgattaatagatccaaatatagtgctggcgtggccgccaggaggcgcagccaagtcgcggctgctcttcctggttcccagaggcccagacttgcacttaggagcca

SEQ ID NO: 116423 - DNA, 122 bp, Homo sapiens
acggggcggggcgccaacagctcaggacttgggttgcaggctggttcttgcaccaaccagcggggcggcctcgggcctcagtttccccatcccgcccacgaagggaggcgattgcgagcgct

SEQ ID NO: 116424 - DNA, 122 bp, Homo sapiens
gggcagaagcccgagggggcgggcggggggggggaagggacgagcccacaggcagcatcccgacacctcacacttcctgcctcaatgcacagaagaaagtgttctgaaggcgacgcccccag

SEQ ID NO: 116425 - DNA, 122 bp, Homo sapiens
gtgccagacagtgggcgcaggacagtgggtccagcgcaccgtgcgtgagccgaagcagggcgaggcattgcctcactcgggaagcgcaaggggtcggggagttccctttcctagtcaaagaa

SEQ ID NO: 116426 - DNA, 122 bp, Homo sapiens
ttgagaactggtacggagggagtcgagccgggctcacttaagggctacgacttaacgggccgcgtcactcaatggcgcggacacgcctctttgcccgggcagaggcatgtacagcgcatgcc

SEQ ID NO: 116427 - DNA, 122 bp, Homo sapiens
gcctctttaaatatttcatagagcttggctttcttcatcaacaagggtcaatgagagctacgaagtattccctaggactgagggagagctcccaaagaggaaataagccttccctagccccc

SEQ ID NO: 116428 - DNA, 122 bp, Homo sapiens
aaactttaacggaatttcataaaaaatgcattcaggcagctgcatcctcgtggcccccgccgcagcctggaccttgggaaccagcagcccagagccaggaagccccagcattcagggcccag

SEQ ID NO: 116429 - DNA, 122 bp, Homo sapiens
gtcgtgaggatcggtgagtccttgttcagagcctcgcccggtgcaggaagcactggccaccgggagtgacctcttgctaacccagggatgtcccatctctcgctgccttgtgaacacctgct

SEQ ID NO: 116430 - DNA, 122 bp, Homo sapiens
caccctcagctgctggtagatttcataaggtgtgtttgtcaatgttaaccatttatatcccgggcacacctcggaaataggttggatcaacttacatatgtttgttacttcaggcacatcct

SEQ ID NO: 116431 - DNA, 122 bp, Homo sapiens
gcggtcctgcctcgggcgacattcgcgcacgcacacgaacttccagccccgacattttcgcgggaaacctgtgtctgtcttgagtatgagtgtgatttgttttccgatcagcgtccgagcta

SEQ ID NO: 116432 - DNA, 122 bp, Homo sapiens
gcccaggctcttcttaggctctggacccaaagctccgagagcaggagaggcttaggggttcgaagtcacaaccagcaacatgtctataagccaggttcagtcatgttcccaaggacctggga

SEQ ID NO: 116433 - DNA, 122 bp, Homo sapiens
ggagatttgtttgcaagtcactgtaccaccatcgctattttatcaccttactccagtgcacgtggagatcacagtccacagtcacatgatgttgaggaagaaaaggatagttgaggacagga

SEQ ID NO: 116434 - DNA, 122 bp, Homo sapiens
gcgtgcaggctggttgccttggtgacggtggttgggctcggggtgtcccggtgtgccctgcgccgaagaagagcgggcgacaaaggtgcgggatggcatggattctgcaactctccccagcc

SEQ ID NO: 116435 - DNA, 122 bp, Homo sapiens
ggtctgcatccttcgtggccatcaactcttccaagtcaaaaacaattgcacgttaccatccgagtgcaagtgcctgctcagaggatcccaggcaaggagccaagagtgcccacttcatgagc

SEQ ID NO: 116436 - DNA, 122 bp, Homo sapiens
ggatcacccactgcagggcgggccccgtgaggcgggtgatgaggaacgtcaccttcagggcgtcgttggagaacgtgttctcgtccacgaacatgtaggagctcgtctgcacgatgaactcc

SEQ ID NO: 116437 - DNA, 122 bp, Homo sapiens
cgcagctcccggtacccgctggctgcgcaggagctaggcgggaggcgaggtgagggtcgccgctcgctcactcctcgctcctgtttttggggggggggggcaaaggcggggtctctttttgc

SEQ ID NO: 116438 - DNA, 122 bp, Homo sapiens
tgggaagaaaaaggaagtcctgcacaggcccacgtgctcgcgccaacccctacgccccagcgcgccttctccacccacgcacgggcctcggacgcatttccagccccggcgttggttgtgga

SEQ ID NO: 116439 - DNA, 122 bp, Homo sapiens
tagcgggaagacccctcgtgacccgtgacgccgtgggctgggggaccacgggagtcttagcgctgtgtcctccccggtgccgccacggtgcagtgctcgttttctcaggctgcgtggcccag

SEQ ID NO: 116440 - DNA, 122 bp, Homo sapiens
ctgttgcttattggcccaccgattccatggggaggaacttggctgggcctaaactcaatccgtggtctggtacaggtttcagggcaaagcggccatgcgttccgggggccgcgggcgacccc

SEQ ID NO: 116441 - DNA, 122 bp, Homo sapiens
tctaagaaagataaatctcacattataacaatacacaagaaatgtgtagatccaaagtaacgttgttctgaaatttatgccaggtttctgtttattgtttctaggaaaggacaaagacctac

SEQ ID NO: 116442 - DNA, 122 bp, Homo sapiens
ctgaaatgtctggcttataaagacgatctgtgacagaatgagacggagccatcatggccacggctgacatccaggctcagttctgaggggtgatggttctatgggacaggcactatttcagc

SEQ ID NO: 116443 - DNA, 122 bp, Homo sapiens
ggtggggtcatcatcttattaaagacaactatctcctccacatatgtgatttgggtgcttcgtgcttggttacagcaagaattagggtgattaaggttgattttggccatgaatcccatcag

SEQ ID NO: 116444 - DNA, 122 bp, Homo sapiens
ttactgaggaagggcatcaaaagtaaactgcagccccaaagaaaggtagcacccaaaactcggatgggagtgggagtggccaaccatcaaagaacaaaagggagcttgctttctgtttggag

SEQ ID NO: 116445 - DNA, 122 bp, Homo sapiens
gccgtgccggctactcaacacgccttcctgagagcacagaacatccacagccctatacagcgcgccatccagagagctccggactcccagctcggcgcaggggcgggacttccgctcaagtc

SEQ ID NO: 116446 - DNA, 122 bp, Homo sapiens
atagtatgatgggtgatgatgaagatgcgtgtagggacaccgagaccactgaagccatggcgccagacatcctagccaagaaattagctgctgctgaaggcttggagccaaagtaccggatt

SEQ ID NO: 116447 - DNA, 122 bp, Homo sapiens
aaggaggcttaggcgaccgtgaccgtgttatctgggtggttggaagcagctttccccacacgccgcctttaacagcatttggattcgcgaagctgtgcacacgtcatttttatcgcaaaaat

SEQ ID NO: 116448 - DNA, 122 bp, Homo sapiens
cgcagaggggctcatgggtggcgcctgcttgtctctgggcttgcaccagcgggtacagaccggaaacctgggctggctctcactgggtttattggagcacctaggcttagaacctcggattt

SEQ ID NO: 116449 - DNA, 122 bp, Homo sapiens
gaggattaaagcagcaagtaaatgaggcgagtgtgcaaaatgactcctttctgaaccaaacggcatgctccgtgctggggaaatgagatgcacatttaaatctcatccatccaccgcctgcg

SEQ ID NO: 116450 - DNA, 122 bp, Homo sapiens
aaatatttgaaacaccctgtgggttagatctgtagctggataaagccccctaggacttcacgttgcaactcagcattcctgaattgctctccatggcttctcacaggctgggggtcaggagg

SEQ ID NO: 116451 - DNA, 122 bp, Homo sapiens
gggcgggggggcggggagtcgtcttgaatctggcttgtgttcaatgaccagtgttgaccacggcagagcagcacaagcgggaggtgctgacggtccctgggcgcagcggctggacgctggcg

SEQ ID NO: 116452 - DNA, 122 bp, Homo sapiens
cccacgcacccaccgggactccgattcttcccagtcgccgaggatggtgtcatggcgccccgaaccctgcttctgctgctctcgggggccctggtcctgacccagacctgggcaggtgagtg

SEQ ID NO: 116453 - DNA, 122 bp, Homo sapiens
catgctgttcagcttccaccttccttagccagctgagaggacaaaactggttcctagagacgggatacaggagtggagtagggacaaagatcttgaaaagaatgtctaagaaaaagattgct

SEQ ID NO: 116454 - DNA, 122 bp, Homo sapiens
gccttcgagtcgtccggggccgccattacaatccacctccatccgcttggaaatggccttcgtcccggcctatgactggtcccagcgggcagtacagaccccctagaagcccctggagctcc

SEQ ID NO: 116455 - DNA, 122 bp, Homo sapiens
aaggagcagagtcctttgtactgaccaagatgagcaacatctacatccaggagcctcccacgaatgggaaggtgagagcctcatctagggaacttggggtcctgggatccccaaagtgagat

SEQ ID NO: 116456 - DNA, 122 bp, Homo sapiens
ttttatttggtgtggtttggctttggtttttgttcttggttttggtctttgcctatgtgtcggttttctcaaaatgtgtaagtatttcctttgagtagagcagtcatccacagtcactagtg

SEQ ID NO: 116457 - DNA, 122 bp, Homo sapiens
agggaaattaacatttaaagcattatgaatcaccactgccaggtgctgatgaaaatgcagcgcgcctggagtcgcgggcgttgctggcgggggtggaaaacggggctgccatttggaagaca

SEQ ID NO: 116458 - DNA, 122 bp, Homo sapiens
tcctttccgtggccggggccatgctaactgggtgattccagctgtgccccgggcggcgggcgccggaaggagtggtgggcggtgggcccctatccggccagggtccccgccaccactccctg

SEQ ID NO: 116459 - DNA, 122 bp, Homo sapiens
agaaaggaaagcctgcagagtccctgcagcccaggctgtggcttgttcttacaaacttgacgttaacactaccctgttcatattattccccttctactccctacccagctcctttctgactg

SEQ ID NO: 116460 - DNA, 122 bp, Homo sapiens
tgactgtgtacctactgtgttcctatttgtttattttggcggttgaaaaaagaatttgaacgttccctgtatcttggggatgctagcagactaacctttggttttcctttgaaaacaggcac

SEQ ID NO: 116461 - DNA, 122 bp, Homo sapiens
agccttacacatcccgggactcacacgggtaaagtctccatatcctatgctccattgtagcgctgcaggcattaaccttagtcctaatggttagagtcgtccctgttagcaaaacgactctg

SEQ ID NO: 116462 - DNA, 122 bp, Homo sapiens
catccccgtgcgcacgtgttcgctgtgctagccccgtgcgagctgagctgccgttagagtcggtagattacagcgaagctgcagtcagcagctcgtctgcctggccctgcacaccgtgagac

SEQ ID NO: 116463 - DNA, 122 bp, Homo sapiens
ccagccgaccccacccaccccgctccgtcgggcagagaccgcggggatcactgagttcaacgacctcacttccagatggggagactgaggcagagagagccggagagctttgagagtggtcg

SEQ ID NO: 116464 - DNA, 122 bp, Homo sapiens
ccaggtccagccactgccccttcccgcctactcagcacctgcttgtctcatatggctgctcgggttctgctgtcagagcagaagctaaggacccgccaactcccttcgttgcttcttgcagg

SEQ ID NO: 116465 - DNA, 122 bp, Homo sapiens
tcaccttgtctaggtggcacgttccttaaaagcgaaaggaccaggagtttcttcctgcctcgtctcttccggatccctcctgcaccgcccacagcctgcagatttgagcgccatctccaggc

SEQ ID NO: 116466 - DNA, 122 bp, Homo sapiens
actcaccacagccgctggcccggatgctaagcccctcattgccggggcggcagagcgggccggctgctcccagtacgctgcgtgccaaaaccacgcccacccggaactccagctggcccgca

SEQ ID NO: 116467 - DNA, 122 bp, Homo sapiens
ggccagcgaaaaatgtggaagggccgtacccgcactctcctagcactgggtgtgaggcagcgtcgtttccccttcgcgctcttcgaatgtcaagtgcaccagcttccaatccctcctctggg

SEQ ID NO: 116468 - DNA, 122 bp, Homo sapiens
tgttgagcccaacattaactctttagctgctgggtcgtgaagctgtcctggggaggggtccgggtggcagtgggacactcagagggcctggggcagccactgtactaacacatgcttaagga

SEQ ID NO: 116469 - DNA, 122 bp, Homo sapiens
aataaacgcggaagctcggcactctcgaaggccacttgctactgcacaccactctccacacgagatgtgtggttcccgggctgagttctgtgagtcaggatgcagagctcctgagcaggaca

SEQ ID NO: 116470 - DNA, 122 bp, Homo sapiens
gggatcgaagtgacggaccgtgaaggcgcgagagtcaggtctgagggtcgggggcagagccgcccgcgaggccggcctggggatagcgatgctcgggttccccccgggtcgcccgcagctcc

SEQ ID NO: 116471 - DNA, 122 bp, Homo sapiens
cagccaagctgcctagaggcaatcttaaaatgggactggctaggactgtgacaaagacaccgtccacatgcctactaggtcagtcacctacaaagctggcgaatgaggaaaagagggaaggc

SEQ ID NO: 116472 - DNA, 122 bp, Homo sapiens
gcccaggcggtgcgactcagggatggtgtaggagacacgcccactgttgttggtcaccagcgtatccaggtagagccactcgcctgagggcggctgggtcatgatgtgcacatccacctggg

SEQ ID NO: 116473 - DNA, 122 bp, Homo sapiens
aagcagtagggaaggacagcccctgatgagtgagggcgcaggggtgggccgccacagccccggtccggcagggagaaaaggctcttaccgaaatcttccacgagcagggtgaagaggcctgg

SEQ ID NO: 116474 - DNA, 122 bp, Homo sapiens
agctcaggcaaccagcctgctttggcctcccaaagtgctgggattacaggtgtgagccaccgcacctggcctaatctggactgattttaaggctcgttgcttgtggtcatcctgggattatg

SEQ ID NO: 116475 - DNA, 122 bp, Homo sapiens
acaggctccaccctgatccttcttccgcggtgtggatccttctcccgcaatctccgtgcgcggcccgagtcagtacccgcagcctcccgacgcacccgctggctccaagcctccctacccca

SEQ ID NO: 116476 - DNA, 122 bp, Homo sapiens
aggagcccggccaccatcgcagccaccgggtgattgatttgagcaccgtgtctctatagacggacaggaatgacagctggtgggtgggactgacaatggtgcagaagaacgacatcctggga

SEQ ID NO: 116477 - DNA, 122 bp, Homo sapiens
cgcctggtaggagagcctgtgctgggtgccaagatggagacagcggctaccttgctacggcgggacatcgtatttgcggccagcctctacacccagtgaatgccccatgtaaaaacatgatg

SEQ ID NO: 116478 - DNA, 122 bp, Homo sapiens
tcccttccttcctgtccccgcgtaggccgcagggctccgtgcccagggcccagtcagccccgcccatccagtggctgggcccgggatgtccccagaagccctgaggagtgcggcgcgatggg

SEQ ID NO: 116479 - DNA, 122 bp, Homo sapiens
cgggacccgcagacttcagacgcaatttccctaccctttaagaaagggccctttcatatacgtatgaaagaaaccgcaaagctttctctgaagcacgtcgctttggcatttcctccctggga

SEQ ID NO: 116480 - DNA, 122 bp, Homo sapiens
ctgggacccaggctgcgtgcaggcaggttcggaggagcgcagcgatccgctctgtgtcctcgcgccggttgcagtaaatgataatggaatcgaggttttgaaaacgtttgccttgcagcagc

SEQ ID NO: 116481 - DNA, 122 bp, Homo sapiens
aagcaagcagagccagatgttggcgttggtaatgatctgcagagcctaacacacatgtggcggcagtcagggaaatgcatgacagctgtctgaagccatgggaacctgatttctcttggcta

SEQ ID NO: 116482 - DNA, 122 bp, Homo sapiens
cagagggggcgggcaggcggtgatcttttgatcctggacgccttgatctcaataccagcccggcccgggagaggctatccggggatcgctgggtgcctgggttcctgcctcccaaccgcgga

SEQ ID NO: 116483 - DNA, 122 bp, Homo sapiens
gcaggacctgccccggcgttggggtgtggggtcccctggcctggagcgggctcgtcctggcgggcctggatccaagcacagtctcagcttttggagccagcagcagccgggccgaattcagt

SEQ ID NO: 116484 - DNA, 122 bp, Homo sapiens
ttcacgcgttcgttctttcagctcacgcgttcgttctttcagctcagcctgcattgcgcgcgttccctgctggctctgcagtgaacgactgaggtggggctcatcgtcttgctccttcctca

SEQ ID NO: 116485 - DNA, 122 bp, Homo sapiens
ctttcagaaacacgcatgcagaagctcagtcaatccacctgcagtgcacgggggacagctcgcatttcggtatgctaagaatagtccgggttgcgctaagagcccgaatgcgaagggtatgg

SEQ ID NO: 116486 - DNA, 122 bp, Homo sapiens
gtgagagatggtgcggtgcctgttcttggccctgcagagagctgtgggcggttgttaaggcgaccgttcgtgacgtagcgccgtcaggccgagcagcccccaggcgattggctagacaatcg

SEQ ID NO: 116487 - DNA, 122 bp, Homo sapiens
tcttgagtctgatatccatagaaagttccatgtctatgctagaggaataaatcacccatacgaaccttctattccccagggcaaccaaacttcataaactggtttccaggtcctcaaagcag

SEQ ID NO: 116488 - DNA, 122 bp, Homo sapiens
tggctgagatctgctgatcccctcctcactccactgcaaccacccagagccatggctccccgaggctgcatcgtaggtaaggaggacaggaccccattcccacctgagcccatctccaatct

SEQ ID NO: 116489 - DNA, 122 bp, Homo sapiens
ccggggcaggagccgtgcgcctgtggaaaggggcgctctcagcagtctattaatcacggccgcccgcccggcgctgccgccactgccgggtgccactgcgcccgcgcgccccctccgatgtg

SEQ ID NO: 116490 - DNA, 122 bp, Homo sapiens
cgcaagcccagcctcagatccttcccattggtgcacggtcttgccaattactgctacactcggcaggttctccaatcaaacacgccctgtcgggcaggcagtcgtcccagccaatcctgaaa

SEQ ID NO: 116491 - DNA, 122 bp, Homo sapiens
tctttgcgagtggggagggggctgctctcggggacagccacaggcggagcaagagctgggcggctgggcaactgcgctcctgcccaggtggcctcccgtctgggtgataccgagccgcgcac

SEQ ID NO: 116492 - DNA, 122 bp, Homo sapiens
gcgctgcagtggcagaaccgacacggcgggaggcgctagaggacccggggtggactcggacgtggggtcagggaacctggcatttattcctgcccggactgcccactcatgctgcggagtgt

SEQ ID NO: 116493 - DNA, 122 bp, Homo sapiens
aaactggtcctatgcacccaggacggctcctgagccgcggaggcgtggggtgaccgcagccgtctcttaggtgtctgccactaaagagttcctcatgcaaacacacatggcccgcggtgccc

SEQ ID NO: 116494 - DNA, 122 bp, Homo sapiens
agggagaagcctccactctgaatggggcccagcaccgagatgtcatgtgctgggatgcttcgcacccaggttctcacagtcagggagctggacatcccaagatcctgtctttctgatgctga

SEQ ID NO: 116495 - DNA, 122 bp, Homo sapiens
gtgcaggagatgcaccggcttgtgtgagccggtagggcaggacgggcgtggaagggtccacgtctttagtatgcatgcttagatctagcgttcctgttgatggagtaatggttctcgcattg

SEQ ID NO: 116496 - DNA, 122 bp, Homo sapiens
cacccttcccgatctggacgaagcccagcaggatgatcagggccagggccaggagcttggcggcggcaaaggcatcctggacccgggtggcggccttcacgctgtagcagttcacggccgtg

SEQ ID NO: 116497 - DNA, 122 bp, Homo sapiens
cggctccgcgagaagaggcggcagcgagggctggaggacccgggctacggggctccggggcgtctggcctgggtgggactgagcccatccagggactgggactccggggttctggtgtaggt

SEQ ID NO: 116498 - DNA, 122 bp, Homo sapiens
aaaaggcttttagagcgggaaagaaatgaaagcacacttggaagagacccaagcgggcaccgagatcgagtgccccatttatccttgatcctaagactttctgggccagcccctttcccatg

SEQ ID NO: 116499 - DNA, 122 bp, Homo sapiens
tagcccagccagaaaaaccagcggttggccttgcctgggtgtgcccagtccaggtttgtacgagaggtgtgggcaggtaggctggcgtatctggaccccactgggcacctcagctggggaca

SEQ ID NO: 116500 - DNA, 122 bp, Homo sapiens
ccagaatacaatgactcgggtctccaggctaggttgggcgggggttgaggggaggaccgacggatacaggatctgtaaaagtcattctgaaattcaaggcgagggtaaagggaagataaaaa

SEQ ID NO: 116501 - DNA, 122 bp, Homo sapiens
aacggtcgccggccgatgctctctgcgacggaaagaaagccgccggacccacttccggtgcgttttacaatgaactccgggcactcgagtcgctccccggaaactatagttctgcttccacc

SEQ ID NO: 116502 - DNA, 122 bp, Homo sapiens
cactgtggagcttatgccattgtcccaagatcctccacctgggccagtaatggctagccccgtaaacaaagtccccttttgctggaactgccaccactagcttcccccccttctcctagcct

SEQ ID NO: 116503 - DNA, 122 bp, Homo sapiens
cttgtgcctttagctgtggcccaaggttgagggcatctgtaaaggtatcccctctccaggcgcttggctcctcaaagacaggaggaggggttaaaatttagggcttgcaaagtcaagtgccc

SEQ ID NO: 116504 - DNA, 122 bp, Homo sapiens
taggtgtaccccgggacccagcacccaggtgtagagtgaacacaggtgtaccccgggacccggcacccacgcatagagtgaacataggtgtaccctgtgacccagcacccaggcgtagagtg

SEQ ID NO: 116505 - DNA, 122 bp, Homo sapiens
gaggaataactatagcttcagggataatatagctttaaggaaacttttggcagatgtggacgtcgtaacatctgggcagtgttaacagaatcccggaggccgggacagaccaggagccactc

SEQ ID NO: 116506 - DNA, 122 bp, Homo sapiens
ggagagcgggcgggtcacaaggacctggacagaggcagaactgaggccagcagccagctccgccgctgagtccagccctctgcgcagccgccctgagctggcgtcccgagatagccgcttcc

SEQ ID NO: 116507 - DNA, 122 bp, Homo sapiens
gtagctgactcaacacttttcagcctgcattttcattctaatcaggttaatgtgaatccccgttctttgcctgtttcttaaatatcaatattttctgatgatcttcctcatttagtttccca

SEQ ID NO: 116508 - DNA, 122 bp, Homo sapiens
ttacataaaattaacatttattggtgatcactaggtgccaacattatgcgaagaactttacgtggacatcccatttaattctcagaagccgatcacaaggtaggtattatctccatttgcat

SEQ ID NO: 116509 - DNA, 122 bp, Homo sapiens
tgtgggtgtggcagacattctggcctgtccagttcgaagacaatgacccatgattgaccacggcactcttgcctcagtctctaagtcactgtctcctggggccccctcattcatgccttttc

SEQ ID NO: 116510 - DNA, 122 bp, Homo sapiens
aagccaggaaggaaggaagcaaaccccagcagtgctgtacctggagggcgatgaatgagtcgcagaggctccctttctgagctgggattaggagttgataatggtcttgcaagtgcagttct

SEQ ID NO: 116511 - DNA, 122 bp, Homo sapiens
gcgcccggtgccgaggagggtgcagtcccttggggctggggtctctgtgccaccagagggcgagaggggcgcccagcggggcaggggtctcgggcgcggggcgaacccggagacgcgcgggg

SEQ ID NO: 116512 - DNA, 122 bp, Homo sapiens
ggaagcccttggcctgtggcgtggtggcgtcgggggtgggcatggctcagtgtggaggtccgggctccgtctccacagccctggcccagcagcctcttataagctgagctgacgtcaaagcc

SEQ ID NO: 116513 - DNA, 122 bp, Homo sapiens
ggatttcaagaagatgccgctacctgggaagcccctgggactttttaacagaaacttacccgattggagcatgacttaaagagaccagaaagggaagtacctactttatggttggcacaatg

SEQ ID NO: 116514 - DNA, 122 bp, Homo sapiens
tggcccgggacagaaacagttgcgttgcgcatgttgtgagaccccagtgaccaggaaccccggggagaagtctcctccatgagtcatgatagccgcaggcagctgcgaaggagggggacgtg

SEQ ID NO: 116515 - DNA, 122 bp, Homo sapiens
catagcttgtacacacacacacacacacacacacacacatttctgtctctcctccctccccggtttctggattcagtaggagcctgagaatttgcattttaacaaattcctaagtgatgatg

SEQ ID NO: 116516 - DNA, 122 bp, Homo sapiens
tcaatagagttgttcttgattctaagatgcaatcaattgccaggtgcaccagtaatctatcgaacatcttttcagggaaaaagaaattctgccacactaaatgcacacattgactgcaagta

SEQ ID NO: 116517 - DNA, 122 bp, Homo sapiens
gggttattttgttttttcttttgagtctttcaggagttcagttagttgacatttgttaatcgcattatatgaaaggaaaatctcgttatgatttcagttgacctgcagggagcgttagtggt

SEQ ID NO: 116518 - DNA, 122 bp, Homo sapiens
ctacggctgggaacctgagcggtgctttgatgtggtcctcgtcaactggggcaaggtggccgacctggccatctgcaatgaccagttggtgagagagccatggcacccaccgccccccactc

SEQ ID NO: 116519 - DNA, 122 bp, Homo sapiens
tgctgtcattcccacgcctcaccctgttttgcaacttcttgtttatgagcctggaagccacgaagtggtgggaaatacgagattcaaatatctggtggccgtgtgacgtgagtaaattactc

SEQ ID NO: 116520 - DNA, 122 bp, Homo sapiens
aaaaaattatttgcttctacatagtctctggaaagagacacaagacactggcaagactatcgcttacaaagagcagaagtgagtggctggagcaaaaatgagtgaccagggaactggggtag

SEQ ID NO: 116521 - DNA, 122 bp, Homo sapiens
gacatagtccgccgctttccgcaccaacgcgcccgccatggctgtgccgacaccagaccccgagtggtccctgcctctgctgccgcttcccagagccaatgacaccccggccaaccccccgg

SEQ ID NO: 116522 - DNA, 122 bp, Homo sapiens
ctgcagagggcggccctaacgtccccgcccccgcgtgcgcgcccccgcgcccgttcattccggcctccgcgcgccgccggctcccctcgcgcccacccccagcacacctcggcggcggcgag

SEQ ID NO: 116523 - DNA, 122 bp, Homo sapiens
agaggggaaaaacgccggccgtccccgcccccctagtggaggcctcttaaagaaacaggacgccattcccctgcgggctacagggtctgaaggaaggtaatttcccagctaacccaagaggc

SEQ ID NO: 116524 - DNA, 122 bp, Homo sapiens
cgccccacaacactgagaaccaaccaatcagggggagggaggggccgggctcgctcagtccgattgggcggcgtccgcacagtcacacagcgctcaggccacacccactccgccgccgctgg

SEQ ID NO: 116525 - DNA, 122 bp, Homo sapiens
ctatgtttttgcaagccctgtgctggaccggatgtgaggtgaaggaggagtcaaggataacgcccaggtttctggtttgagcactgaggaatccagcagatgatggtgccatttactgaggt

SEQ ID NO: 116526 - DNA, 122 bp, Homo sapiens
tctcttcccaaggtacagaggcggaacggcgcggtgccctcgggtcccaagagagaagggcgccaagctcagagccagttctgtggaagggtaggggaaggcctgaccccgggggcaatgtg

SEQ ID NO: 116527 - DNA, 122 bp, Homo sapiens
tttccatttgattccctgcctctttctattcggactggaatgccgggccaggctccggggcgcgccgctgcggcagccgcacctcgcaggtcccccggccgaccccgacgcggaagcggcgg

SEQ ID NO: 116528 - DNA, 122 bp, Homo sapiens
ctggcctcctccctgcgcctcctgcgggccgactgcctcagcacgggcatggagctgctccggcggatccaggagaggctgcttgccatcctgcagcattctgcccaggtactgcccggccc

SEQ ID NO: 116529 - DNA, 122 bp, Homo sapiens
gtcagacacaaacaaacaagctaggtgctaattaataaagatacgagttttggccgggtgcggtggctcacgcctgtaatcccagcactttgggaggccgaggcgggcgaatcacgaggtca

SEQ ID NO: 116530 - DNA, 122 bp, Homo sapiens
aggagacagtaaaccggggacacacctgcggaagagctcttcagggattaggaaaggctacgtccttgtcactgctgtgtgtccccagatggacaactcctcaattgtctggaggtcggggg

SEQ ID NO: 116531 - DNA, 122 bp, Homo sapiens
aggaccccatggaaggatctggagttcctacacaaagtggggtgaacctgtgccaagttccgatgggcgcaggagggcgcggaggctctaggcggcggaaaggtggggtgcggaggacgggg

SEQ ID NO: 116532 - DNA, 122 bp, Homo sapiens
acccacggagggatgcgaggcgggcaggagtcagcccgttggagacctgggcgagggagacgccgagagctaggctcagtgggagggggcgggcgtagaggctgaggcaccgcccagagctc

SEQ ID NO: 116533 - DNA, 122 bp, Homo sapiens
aatgcacgtgtgcaaatacacacacacacagcatccctagaagctgcagcccaatgcacgcgtgcacacacacacgcacacacacacagcatccctagaagctgcagcccaatgcacgcgtg

SEQ ID NO: 116534 - DNA, 122 bp, Homo sapiens
actgggtgatgtcagagcttcaggagtggcagcaaaaataccttctgtattgtgtcaactcggctggccttaaaaaaacacttttggatttcagttaatgcttctactatttttttctttaa

SEQ ID NO: 116535 - DNA, 122 bp, Homo sapiens
gccctggcacttgggaaacccgggctgagacaaggtccggtcacgtgaccaaagagttgccgtttctttggcctctctagccagccggtcctcccagtgtctcgttttcccagcatctttca

SEQ ID NO: 116536 - DNA, 122 bp, Homo sapiens
aggacgactctctccccggttcccgggctgacaatgggtggggacaggcccatctggtgccgcccggccttggacacctgccccctcgttcttctccccggcgggcttcaggcacgaaggcc

SEQ ID NO: 116537 - DNA, 122 bp, Homo sapiens
accctcagcccatgtccgctgcctcagtggatacagttgaacgctttattgccatctattcgattgcaggcatcgccgtcatcttccaggaacaatcagttgcttcacataactctatagaa

SEQ ID NO: 116538 - DNA, 122 bp, Homo sapiens
cccagtatgaaaagcctaaagtatgatgatggtggtagaaatgcaaaggaggggaagagacgtgaaaaacattctgagataattatattgaacatgatagacttttgcattcacagtgtatt

SEQ ID NO: 116539 - DNA, 122 bp, Homo sapiens
aatcctttaacaagctccggggctgggccctcattagggataattacttaatcagtaggacgggagggaatgcgctcccccagccctcggggagtacacctcggggggagcgagtgccccga

SEQ ID NO: 116540 - DNA, 122 bp, Homo sapiens
ggcggcggcagcgggtcctaagaggacggctgccacagcctcatggagtacgcgtggggtcgagcagcgctgccatgcttttctggggcgtcagcatcctggtgatctgtttcatcctctcc

SEQ ID NO: 116541 - DNA, 122 bp, Homo sapiens
gagtgtgtcccctggccacttgccttctcactcgaacagactgtggatgcagcacttgctcgtgggtaattgtggatctgactttccaaaagtacaagtatgtggccactttaatcactgag

SEQ ID NO: 116542 - DNA, 122 bp, Homo sapiens
ccagagccggcccccatcgccacaggaagtcgccccagccctgcggagctgagaccgtcccgcatgggatgggtctgagggccccagactcacaggcaacagaagagaggcaacgcccactc

SEQ ID NO: 116543 - DNA, 122 bp, Homo sapiens
ttctccttccttctcttccaacaagtaccgtttaccttaggaacctggggttcctctttccgtttcttccatttgaaaagcattaaaatgtggcatcatgcataatggaaagcatatggatt

SEQ ID NO: 116544 - DNA, 122 bp, Homo sapiens
ttaaggccaattttttttagctaggatactgcatgggtggttatgttttagctaggataccgcatgggtggttcatgatatcatgaaaaaagcatgttcttaaagcaatttaagtgacagta

SEQ ID NO: 116545 - DNA, 122 bp, Homo sapiens
acgcagaggaagtggagccctgtcttcggtcacaccattgatggaggacagatggacagccgtatggccagtcacctctcctcttaaacctttggagagtggtcctttgtcctctgctggac

SEQ ID NO: 116546 - DNA, 122 bp, Homo sapiens
ttttcctaatgcttaattcagcttgggggcagaaatgctggggtgagacacggccaggtccgccccgttcctccagggaactcccctctccgccctccctctccgtctcctcttgcccacct

SEQ ID NO: 116547 - DNA, 122 bp, Homo sapiens
gggtttcaccatgttagccaggatggtctccatctcctgacctcgtgatccgccctcctccgcctcccaacgtgctgggatttcaggcgtgagccagcatgcccgacatggatgacttttaa

SEQ ID NO: 116548 - DNA, 122 bp, Homo sapiens
ggcactcttgcctcaggcagcctcaccaggaaaggcggaggcacattgatgagggccccccgggagtccatgatgctgatggcctccagcccgtgccgctgcccaacttcatagtcattttg

SEQ ID NO: 116549 - DNA, 122 bp, Homo sapiens
gagcggcctggtggggaggagctaagccgcttgctgctggatgacctggtgccgacctctcggctggagcttctgtttggcatgaccccgtgtctcctggctctgcaggccgcccgccgctc

SEQ ID NO: 116550 - DNA, 122 bp, Homo sapiens
cattcatgagggtagagccctcatgacccaatcacctcttaaaggccccatctctcaatacggccacattggggattcagtttcaacatgagttttataaaggacaaacattctaaccatag

SEQ ID NO: 116551 - DNA, 122 bp, Homo sapiens
catagaacatcacatatgtctttgtcatttaaaacaatcaacgtttccagtgtaaaaatacgtgggcttattgcatctaccccacggatggtttatctttttctttccatcagacttgccgc

SEQ ID NO: 116552 - DNA, 122 bp, Homo sapiens
gctcgatgcagaccagatgccgccgtccaggatttctgccgcagccactttcatacagcacgagtgcttccagaaatctgaagctgggaagagggttaaccagttttgtggcatccccaagc

SEQ ID NO: 116553 - DNA, 122 bp, Homo sapiens
aagtgctggcgcaggctgccgggagggagagctgtgtgtgtttccgtgtctttttgtgggcgtgtgtatgcctgcgcgtttctgtatgtgtctctcccggcggctgttctgcttcctcagca

SEQ ID NO: 116554 - DNA, 122 bp, Homo sapiens
caaaggcacgtctggcctccacaaggtgacggcttttcagcctccgactcgaacttgagtcgtccacagcactaggccgccgccagcccgggcgagctgcctagggaccgcggacgccgcag

SEQ ID NO: 116555 - DNA, 122 bp, Homo sapiens
aaagctgtacagcttgaccaacagcctcaggtagatatcccggctcttgggctccttgcgcggaacgttttttggtccttgttggggcggatgtcaactcccatgatggcgcctcctgctcg

SEQ ID NO: 116556 - DNA, 122 bp, Homo sapiens
gtgcttactttttatctctgtgtgtctatcaacatccactgtagatgctaccctctttctcggaatcttttttgatttatttgaattttgactttatcttaaggacaccagggagccattca

SEQ ID NO: 116557 - DNA, 122 bp, Homo sapiens
agtcttttgtatgcatcaaatgtagaggcatttttttactccagagcttaaatttcagcacgttttactaatttgggccttttccaaaggcccttagaagggccatagtaacaatatgttca

SEQ ID NO: 116558 - DNA, 122 bp, Homo sapiens
ctgctgtggcctccgccctaggtggggcctgcaccctctctccagcccccatctttcagtcgtcttgtcacagggaatgctaggaattcatgcctttgggacaagagtccttcaggtactag

SEQ ID NO: 116559 - DNA, 122 bp, Homo sapiens
gtgtgctcagaaaaatattgctgctgctcttgaggcggctgcagcgtttttcagaagagccgcggccataatcacaaggcgtccgcctcccggcccgggagcccatcagttattatctgcag

SEQ ID NO: 116560 - DNA, 122 bp, Homo sapiens
ttatggcctctgtgtgccaggcactagctggaggggctggggctagagcccctgataacccggtcatgccctagctttcctgggacacacattgtggtaaggggagactaaaaaaattaagt

SEQ ID NO: 116561 - DNA, 122 bp, Homo sapiens
cctgcctgtctgccttccactggggtttttcaatctgtgcctatatttatcgcccaaagccgctgggataatggcaaggccagaaatagccttgaagacattcacgtgaagatgacgggcag

SEQ ID NO: 116562 - DNA, 122 bp, Homo sapiens
agtcagcatgacagggaggccttttcacttgcagggcagcactgtggggtcgggaggggccgccctgactgcctcagtgtcccctgctgtagaatagggtagcgggtagcagggagggcgcc

SEQ ID NO: 116563 - DNA, 122 bp, Homo sapiens
cggggctcgggcgcacgtcttgcctcgactaaggagtggcgagctctgccagggcagcggcgccaccgagcaatccaaacacttagcgggattccccagccctggccggccccgcccccgga

SEQ ID NO: 116564 - DNA, 122 bp, Homo sapiens
ccccgctctgcctgctgcactctcacctccccttcgccgttccggctccagcctgggaatcgcgggcccaggtgaaggctcctgttcccacactcttgagtgggctctgaggggactccacg

SEQ ID NO: 116565 - DNA, 122 bp, Homo sapiens
cagaaatgagagggacaaaaggaagcagagaacagagcccaggctgttagaagatcctcgcggccagacctgggaggctgaaaggctgagagaccgaaaggctgaaccctccgccgcgctcg

SEQ ID NO: 116566 - DNA, 122 bp, Homo sapiens
tccaggcgaaaataggcagccctctgtgatgacagaattgacaactattttttgggggggcgggggttggacttccgagtccctcgggacggaggcgcaggggagcaggaggggtgccccgt

SEQ ID NO: 116567 - DNA, 122 bp, Homo sapiens
tcccacaactctatcagcaaacccttctggaggcgcagcccacacctgcattccaaagaacgcaaatcccttccctgcccgatgaaaggcccctcccacagtgagtcacagaaactgcagcc

SEQ ID NO: 116568 - DNA, 122 bp, Homo sapiens
cacaggagaagccaacaccggctgggccaagagcaactcgtgggaacgaagcagccagcacggggctccacgtgcgctgattcccagagctcgtcagggcggccggcggagcatccttggag

SEQ ID NO: 116569 - DNA, 122 bp, Homo sapiens
tacggtgtccgggaaggtccatgattgttccacataaagtcagaagggaggaaaggcgcacgcgcattggggacttgactctggaaagcgtccagaccaaggtcagcggagagtaggcatgt

SEQ ID NO: 116570 - DNA, 122 bp, Homo sapiens
tgcaggtgtgagccactgcatccggccattataaaataacatgtgtttgcattgctggaacgggagtgtgctggggcagaggtagataaaaatacactgcagagcctggactgctgttctcc

SEQ ID NO: 116571 - DNA, 122 bp, Homo sapiens
cccacgccttgcctggagctggtctacagactgtggtctgcagattgtggactgaaagtccgcgattctagctcttgaagaagcccctacagagatcatggagaggttgcaacctcagagtt

SEQ ID NO: 116572 - DNA, 122 bp, Homo sapiens
acctttttggcactagggacccgtttcctggaagacaatttttccacggacaaggtagtgcgaatggtttcaggttgaaactgttccccctcacatcatcaggcattagattctcataagca

SEQ ID NO: 116573 - DNA, 122 bp, Homo sapiens
atgttcagtcctagaggaagggaagatgtataagccaaaaggagtttacagttttataaacggtgtgcaaaggcttgcttagatagaatgcactaatggtatacttgtttttcccaggtcag

SEQ ID NO: 116574 - DNA, 122 bp, Homo sapiens
gtgcgtcgcctgggcccgttcctggtcttctcccccaggtgagctgggtaaaggggttctcgggaagccgaagagccggagactcctaaggaggctcttaacttcattatgaatgagaccca

SEQ ID NO: 116575 - DNA, 122 bp, Homo sapiens
tttccagccaatacgtccacctcctttctaaacacacacacgtctatgtttaaaacatgacgcgccacctgcaaacacggtgccacagcctcagggagacgccgctcatccactctgcgcct

SEQ ID NO: 116576 - DNA, 122 bp, Homo sapiens
tcccgtgtgtgctgtgtgccccgtgtgtgcacatgtgcgccccgtgtgtgctgtgtgacccgtgtgcttgtgtgtaccgtgtgtgagccatgtgctgcgtgtgctgtatgctgtgtgctccg

SEQ ID NO: 116577 - DNA, 122 bp, Homo sapiens
gaaaaaaagtaattttttaaaaaacataataaatcctcaattgtccccactgaaagggctcgagtcttttttaaattccaaagtgaatttatgttctgtaatttgcattacagccaagcgat

SEQ ID NO: 116578 - DNA, 122 bp, Homo sapiens
aaaaccacttcggggttaatcagtgaaatatttttcccttcgttgcataccagatacccccggtgttgcacgactatttttattctgctaatttatgacaagtgttaaacagaacaaggaat

SEQ ID NO: 116579 - DNA, 122 bp, Homo sapiens
aaaaggcagggtgtgctcgcagactgtgctataaactgcaatttctatttggggtcctcacggagaagaacaccaggaaagacagacaggaccagtgccatgggccagctttgctgctttcc

SEQ ID NO: 116580 - DNA, 122 bp, Homo sapiens
caatttgctgaggtcacaaagcctgtctgatttccatgtttattccctgtccctgggcttcggttttctcatttgcacaataatacctttggaccaagtcagggatcagcagactctttctt

SEQ ID NO: 116581 - DNA, 122 bp, Homo sapiens
atagagcggtgcttgcacacactgacaggagtccaagaatgtgcactgagggagcgtttccgcacagatctgcgtgttccttaccactcacacatgtgcacacacatatccatgtgtgtgtg

SEQ ID NO: 116582 - DNA, 122 bp, Homo sapiens
acggggcggccgggcagagacgctcctcacctcccagacggggtctcggccgggcagaggcgctcctcacatcccagatggggcggaggggcagaggcgctccccacatctcagacgatggg

SEQ ID NO: 116583 - DNA, 122 bp, Homo sapiens
gagtggaacatgtgagtgctctaggctgttcaaaaaatagaagaatgggtttggagtagacgtagtggattttagcaggcaggtggaggggtaatgttttctaagtaaggcaaatggtgtca

SEQ ID NO: 116584 - DNA, 122 bp, Homo sapiens
acttccagttgggccagtgaacccctcattaagctgtttttaaagcacgaatttaagagccgcaagggtgaagggtcacagggagcatttaattcacaatggctggcgggaggtgctgccgc

SEQ ID NO: 116585 - DNA, 122 bp, Homo sapiens
ccaggcaggtgtcatcccagaataacttttacacagggtgactaagcgagttagtgactgcgcggaaaacgggcttccaaggttcacaaggctcgtgctgcggctccgggagttatgtcaca

SEQ ID NO: 116586 - DNA, 122 bp, Homo sapiens
tggaagccagtcactaagtctagctacacgcacctggagaggggaattaagcttcaccttcgggaaggaggagactatactcatattatcagcaattcttctgtaaagatgtgtctcttctg

SEQ ID NO: 116587 - DNA, 122 bp, Homo sapiens
gccccgggaggccgggccgttacctgccgccgccccgctctctgccgcccacgccgcctccgagggcacggcccccgcctcagcgctctccgcctcgtccggtacctccagctccatggccg

SEQ ID NO: 116588 - DNA, 122 bp, Homo sapiens
gtgggaaatgtcacctgattcacactgaacttttgaaagctccccacccccaaggagccgcgcacaccctcgctcgcggccgccctcccacagccccacacactgggagaccgcccaccgca

SEQ ID NO: 116589 - DNA, 122 bp, Homo sapiens
ccaggagtcgcccggactggaaggcagtgcgagcactgggacacagcctccgagctcgagcgtgacgggaagttggggcaatttgttagttatccgccgccaccaagacgcggcacggcgcc

SEQ ID NO: 116590 - DNA, 122 bp, Homo sapiens
cattgtcaaatattttggtaacttccaattttagttattttatacaatcttgcaaagggccgtgttcagcgctccacggaattgcagggctgggggacactccattcctgcgtcctagagag

SEQ ID NO: 116591 - DNA, 122 bp, Homo sapiens
tgatctggaaaactgcctgtcctctgtgaaaattaccagcttcaggggctatgacttctacggtcttaaggtatctttcaaactgttaactatggggtttgactttttcttttcgttttttg

SEQ ID NO: 116592 - DNA, 122 bp, Homo sapiens
ccacggtttccagctagtctgtttccagctttcctctgctcgtggtccacatgaactcaccgtgaagaccatctgtgcttgacacatccacccatgagcagcgtgtttccagtgctcatttt

SEQ ID NO: 116593 - DNA, 122 bp, Homo sapiens
aaccaacccttggcgaggcgacgcggagccggtagtctagcctatctgcagagcagtgctcgcccaggagaggccacagaaggggcgtgcacccgcgagagcgcgcagggcattgcctcggt

SEQ ID NO: 116594 - DNA, 122 bp, Homo sapiens
gtgtccatcaccgtcgtcctcctagcagtcatcattggcgtcacagtggttggataatgtcgcacattgttggtgagatgttgtgggctgccccctggcctgccccagccctggccccagcc

SEQ ID NO: 116595 - DNA, 122 bp, Homo sapiens
ggcaccttacccatggccacagagctagtaagtggaacagctgcaaccaggattcaaactcgcggctccagaggccacaggcttaaccacggaatcctagcccgcccgcacatccctccatc

SEQ ID NO: 116596 - DNA, 122 bp, Homo sapiens
cgtgtcaaggccggtgggaggtctccggggtccggcacacataggcgcctctccgagcctcggtttccccacctgtgaaactgggtcatcccattgccaacctgatggggcttctgggagga

SEQ ID NO: 116597 - DNA, 122 bp, Homo sapiens
tttgagaggacacacccccttacttatcccagtccgtgaggctggcgagagtgaccccggcgtttcagatcaggaaactgagaccctgggataatttcccaggcccagggtctcatgacagc

SEQ ID NO: 116598 - DNA, 122 bp, Homo sapiens
ggagcgtcacagctgggccactggcccggcccccagcccaaccgagtgtggggacacctccggtggagaatgaagaaccaaagtacctcaaagcttggcgtgtctgccagagctggagcagc

SEQ ID NO: 116599 - DNA, 122 bp, Homo sapiens
agaggacagaggaggggcagtgcttccagtgggtgttcttggtcctcccggctcaaagggcgtctaggttccagggatttccaggcaccacatgtgctcctgggctcctcagcagcctcgaa

SEQ ID NO: 116600 - DNA, 122 bp, Homo sapiens
gagacggaccgaggaagccactttggtgaaacaaaaagaaaagcatttgtttatttagaacgggcaaaatgatacgtttcagtgggtgttttctttgtactttgatctttttgtactgatat

SEQ ID NO: 116601 - DNA, 122 bp, Homo sapiens
aatgctcaggccctgcccacccctaattctgaaaaactgacaaagaacttgtaatgtgatcgcttctttttgctttatcagacggtggaaaataaaacagaaagtggggaaccgtcctgaac

SEQ ID NO: 116602 - DNA, 122 bp, Homo sapiens
ttgtgtgagcctatcagagttgctgcaaacctgacccctgctcagtaaagcacttgcaaccgtctgttatgctgtgacacatggcccctccccctgccaggagctttggacctaatccaagc

SEQ ID NO: 116603 - DNA, 122 bp, Homo sapiens
cctccttccagtgagaaggggcccactctctctttctctctggtgggcctccccttctgacgccagtaactgactcgtctcctgggctagtgctggaggtggcctccttcccagaagagctg

SEQ ID NO: 116604 - DNA, 122 bp, Homo sapiens
tatgtgcacggggccgcccgcctggacctggagaagggacctacggacgcctggaagctgcgacgccctgcactgctcccgcctccaccagcgcctcccactgatgtcgtggtcccgggcct

SEQ ID NO: 116605 - DNA, 122 bp, Homo sapiens
cgctctcaccaagacgagtacgtccttaactcacttccttttccttggttatttggtgctcggtccttagtgaatggtttccgctaggcaaaagcaatcgagccatcgtaacatacttgtgc

SEQ ID NO: 116606 - DNA, 122 bp, Homo sapiens
ccttccagcagttgcaaagccaaaagctagctcaaatgcctctttggtggacacagagcacgaacaccacccttgcccagcactgcagaaggccccgagccagaaacactcagacaccagga

SEQ ID NO: 116607 - DNA, 122 bp, Homo sapiens
ccgcagggctccggtcgtgtcgctgtcggaccgcagaacgccgggacgcatttccgagctcgggcccgacccaacccgctgccattctagctacctagtggagccgcggagagactcttgaa

SEQ ID NO: 116608 - DNA, 122 bp, Homo sapiens
gaaagtgaacaaaacctgctttctcgttctgggaggatccagtgacattgtgagtgaagacgcaaacaggttttgactcctgcatggccgatgacctttttctgtaggcttaccagaaaagt

SEQ ID NO: 116609 - DNA, 122 bp, Homo sapiens
ctgaacacggtgttgagactcagaatattcactcccaggctcagtaggtcagagaagccccgacgggccagaggcccccgaatttgtctccgggccgtgcccctcctggcgccgagctccca

SEQ ID NO: 116610 - DNA, 122 bp, Homo sapiens
gaagcatgagtagagcaggattttattgggcaaaaaggaaaaaaagaaaactcagcaaatcgagatggagtcttgctcacagattgaatcccaggccaccacaaaggaactgaagagatcgg

SEQ ID NO: 116611 - DNA, 122 bp, Homo sapiens
ggagcaagatggggacccctccaggccaagggaggcaaggccatggagggccagtgaccccggcctggatgctgcggactcagacgggctccaagcagggtacagccccaacgcgtcagtgt

SEQ ID NO: 116612 - DNA, 122 bp, Homo sapiens
ggtagcaactcatattctttgtgggactaaagtttgtccttgccaatggtcaacagttatcgtggggagagaggagaggagagggacatattctctcccagcctttcacctgctaggcctat

SEQ ID NO: 116613 - DNA, 122 bp, Homo sapiens
ggaaacagaagtagtagcgttcatcttcctgcagggcgagccaatgagcgcgcagagccgcgcgggcccgggaggcaggatgtgtaggcggcgagtcctcctgcatctcgctaccgagccag

SEQ ID NO: 116614 - DNA, 122 bp, Homo sapiens
ttcagtgggacagcagctgtctgggagacagcctcgggccggagccagcagaaacacggccgcagcactgtcctcaccttctagacagggaggtcagacttccccggaagaggctatttctc

SEQ ID NO: 116615 - DNA, 122 bp, Homo sapiens
actctggactcctactgttatttatccaggcactgttccccaactggcccagagaactaacggaagcctggattcactgtccccttcctaatgtgcagaatggcctggtttcctaaggacaa

SEQ ID NO: 116616 - DNA, 122 bp, Homo sapiens
ctctattaaatcaaagtaaaattcttgagtctgatgttaactgtcctccacctactagagcgccccccatctccatctactaatatagcctttcgtttgaagccatgctctgcaccaactca

SEQ ID NO: 116617 - DNA, 122 bp, Homo sapiens
tggcggtaggaggactcagggggcggcctctgccgccggggtggaagcgatcgattgggtcgctggcagagtctagcacagcgcccggcacatagtaggctcttaattcattcggcattaag

SEQ ID NO: 116618 - DNA, 122 bp, Homo sapiens
gggagctcgtctccaggcgcccatcagtcttcccctcactcgacgctaccttggcggccgcgcccatgctgtccccgctccaactagcagtcaggaggggccgcgggcagcgctcgagacgc

SEQ ID NO: 116619 - DNA, 122 bp, Homo sapiens
gagggctgcatctctgaagccacttgccctgatcctcctatgggactcagaacagtaaagcgtcactttaaggagccagtgtccaacagcggacgggaggccgcggggataggaccagggac

SEQ ID NO: 116620 - DNA, 122 bp, Homo sapiens
ggtagggcacgcgcacctggatggtggtctgtccgggaaggttgggcgggccctgggcggcgccgggcagacccccggccttgctgcgcgtggcgcggatgatggagaagtgttcggccgcc

SEQ ID NO: 116621 - DNA, 122 bp, Homo sapiens
agctggaaaatgtgcatcttgggggcccacccctgcctttcccttctgttaaggttctcccgtggaagctgaagcttgcagtatgcacagctgctaaggcggagataactcttcccacaata

SEQ ID NO: 116622 - DNA, 122 bp, Homo sapiens
ttaattcagtcagtgtttaaatctcttctgcctcctacccactatgtagttatctagagtcgacttttacctcaatcttaacatttggcagaggaatggggaaaaacaaacacattgtttcc

SEQ ID NO: 116623 - DNA, 122 bp, Homo sapiens
tcctagaccccatggcgaaaaatgcttgcggctttcctgttcttcaaagggcatcagacacgactatcgctcagcatgaaggagatacatagggctaagtgggaagacggcgcaatgcaaaa

SEQ ID NO: 116624 - DNA, 122 bp, Homo sapiens
atagcccattgcctctgagaatctgccttttcctaagacaactgtttgggttacctctcccgatttcgtattctggccaccaaaataaaaattttcaatagtaacaaaattaggtgtccttt

SEQ ID NO: 116625 - DNA, 122 bp, Homo sapiens
gggtcttcttgagtgccctctctcctccagggaccctcctgcctacccgggcagtgggcacgcagatccctcagtgacgggggaagcaggttcctaggagtcctgagtgggagcaagaggcc

SEQ ID NO: 116626 - DNA, 122 bp, Homo sapiens
gggctcctcctgcctgtcagctcctgacctccgtgatggtggctgcggctggctggcctccgcagggcccgggagcgccttgctctccgcttcgtccccatctctccgcaggcggatcaagc

SEQ ID NO: 116627 - DNA, 122 bp, Homo sapiens
ccagcgtgcccctagcccaaaaccacggcggatggcagcggattatccagccccgaacgccgcaaagcgagctcaccatgatggcgcctcctgctcggccaggtccggaaagagagaacggg

SEQ ID NO: 116628 - DNA, 122 bp, Homo sapiens
tctcgcttcacagccaagatcaccagctgggagtggccaaggtcaccagctgggagtggccgacccagcgccaggcgccgtcccgcagcgctgtccccgtccccgcaggccagcaggctgca

SEQ ID NO: 116629 - DNA, 122 bp, Homo sapiens
aggagaccacgcctttgaggtcagctctatgaataccctttcatcatccattagagcagccgggctttctaattatgctccttttcactgttctggtattgctggagtcagtgtttttaaag

SEQ ID NO: 116630 - DNA, 122 bp, Homo sapiens
agcccatgagcacacaccgtggtgtgtgaccgagagaggtatagagatgtctgcaagacgcgaggaagagaataattcacatctgtgctgccgcttcccagacagcgccggctgacatttta

SEQ ID NO: 116631 - DNA, 122 bp, Homo sapiens
atgctatgccatctgcagaaaggcggaagaacagcttgggctctgacttctgtggttcaacgacaaaaggaaggctaaaatgagacaggttataacctgctttaaacttgacagctttctaa

SEQ ID NO: 116632 - DNA, 122 bp, Homo sapiens
ctctgagggggggagcagcagactcggctgccagctctactggtgtcttggcaagggcagcgccgaggggcgctcctggtccagctctcctggctcagggggttccttgcctaggcgctggc

SEQ ID NO: 116633 - DNA, 122 bp, Homo sapiens
gggtaggaccctccgagccaggtgccggatataatctcgtggtgcgcctttttttaagcccgtcggaaaagcgcagtattcgggtgggagtgacctgattttccaggtgccgtctgtcaccc

SEQ ID NO: 116634 - DNA, 122 bp, Homo sapiens
aaggcgtgctcacaggggagtcatttccatctctagaaattagccagccctggcaggggccgtatctctctggccaacaaggccccaagatggcaaaacatcacaaactatagaaaataaaa

SEQ ID NO: 116635 - DNA, 122 bp, Homo sapiens
cacgcccgttgcctgtgcccgcactgcgtcagcctacagacaggctcccacatggacccccggggcaactcggagctgctctaccacaaccagactgtcttctaccggcggccatgccatgg

SEQ ID NO: 116636 - DNA, 122 bp, Homo sapiens
tgaacacagatattcatcgcgattctgtctgcaatagcaagactggagaggtgagtccttcggagactgggattatggaatcttcctaccacggaacccatgaaacggctaaaaatagcgag

SEQ ID NO: 116637 - DNA, 122 bp, Homo sapiens
gtcaggagcagggacgggtcctggcagacacaatgtgaacagagcacctcaggtcttgcccgccctggacagggcagctctcaggcgcagaacaccctccccacaccaaaggcacaggagct

SEQ ID NO: 116638 - DNA, 122 bp, Homo sapiens
tcttactcagtaacaaatgagagatttatcatctctagaacttaaaaggtacaattccagcgcagaagtgctaaagattaagtcaagtttataaaactctaccactgaaatgcagtcacttc

SEQ ID NO: 116639 - DNA, 122 bp, Homo sapiens
gccgccttaaccccattcccagctgtaattaattacccttaatggtttcacgcctccctccggagcactgggatccgcatggctcctgacaccagtcggtgtgcgataaatatttgtgggat

SEQ ID NO: 116640 - DNA, 122 bp, Homo sapiens
ggggggcaggacagagaaagagaagtcgcccttttcctcccagcaagtggagggagaaggcgaaaaactgctgcagtcgccatcctcccagcacccctagccaaactgctgagtggcgcgtc

SEQ ID NO: 116641 - DNA, 122 bp, Homo sapiens
taaatgaaggagtagacatttgtatgagaagctgggcttggtgtgtatgttctcaagcagcgacagcattgcctgggccatccgtagacctccatgtgggcccttcctcatcacagtcccca

SEQ ID NO: 116642 - DNA, 122 bp, Homo sapiens
aggccccaggagtcagttttagtttccaccctgtcccaaggcaggggacagaaagaaccacgcctttatacacaaacatcctggacagatcaaagtagagtcatagattttatttaattaaa

SEQ ID NO: 116643 - DNA, 122 bp, Homo sapiens
cacagaagcctccctgcatcacttctatacattttcatctcattccgttctttcttgcaccgtgaagcctggggtacacacatgctcctgtgacagatttatttatggttctgcccagcact

SEQ ID NO: 116644 - DNA, 122 bp, Homo sapiens
ttctccccggggggcagtgggtgcaggctgaggggcattctcggttcccctgtgctcttccggggtcctcctcggggggctcgttacccctcacccctgcaacgagtgctggcccctccctg

SEQ ID NO: 116645 - DNA, 122 bp, Homo sapiens
cccgctcggggctcctttagaacgcggcaaacagaggacttagcaacgcgagcgcctgggcggcgcccctcctcagagatgcgagaggcgctggcctgagcgcctccggccacctccttcta

SEQ ID NO: 116646 - DNA, 122 bp, Homo sapiens
actgggacaggaaacccgaactaacaggggcttaaacatgatagacatttattctctctgcgtagtgaagtccagagggaagtagtccaggctcgatatggtggctctgctgttcaggattc

SEQ ID NO: 116647 - DNA, 122 bp, Homo sapiens
gcaaaggatctgtcgctggccaagcaggtccctggctaaggcactgctagggacagctcgcggcggttcgggggttaattctcggcagccctccgtcacccggtgccccacccccgccctgc

SEQ ID NO: 116648 - DNA, 122 bp, Homo sapiens
gccggggccccgcactcacaatacactcgcggatcctctcgtggaatagctgttctcgcacggatagcacttcgtagtcaggtgcttccatactctgctcagcatgactgaagccgaggtgc

SEQ ID NO: 116649 - DNA, 122 bp, Homo sapiens
aaaacaagtcgtaatgagaaatggaaagatctaggataaggaagcaccatgatatgcaaacgaaaaaaaagcactgagtagaagtagcagaaaaatactaagcttcatggggacagaaagtt

SEQ ID NO: 116650 - DNA, 122 bp, Homo sapiens
aggaataatgtgggaggccggattgaagtctgggccaggaacaatggtaattgtgggagacgcaacaaagagtgagtatagctggaggagccggggagcagaaagtatatgtgtcaggtgtg

SEQ ID NO: 116651 - DNA, 122 bp, Homo sapiens
ctatttgctgaccatgcagctttagccaatgacaaaagtgttattggtaagaacctaccacgtgccgggcactaaggcttttccgtccctttactgccttcatttcacagccgtctagtgaa

SEQ ID NO: 116652 - DNA, 122 bp, Homo sapiens
tccagcctgggtgacagagtaacactctgtctcaaatttaaggccgagtgcagtggctcacgcctgtaatgccagcactttgggaggccaaggtgggaggattgcctgagtccaggagtttg

SEQ ID NO: 116653 - DNA, 122 bp, Homo sapiens
gtcacaaggcgcccctgagctgtggctcctggctcccgacccgggccccggcccacctgccgccagccctgggcaaggcatccccacgccaggtggaatttagggcaggatgggggtgctgg

SEQ ID NO: 116654 - DNA, 122 bp, Homo sapiens
caactcagtaatctttttccaaactggcccatgaggtcagagacagtatctccattgtaacgtggccgggcggtgtcaacacaaacgcccccaccctcccctggacgcgcgtaacccgctcc

SEQ ID NO: 116655 - DNA, 122 bp, Homo sapiens
taagtttcacagcatgaaagagcaaacagaaagcatgcaatccctataggcaggtagtcacgtgtctcactgaaaaagagagaatggggctagatgagaatcatatgaatttagtcctctct

SEQ ID NO: 116656 - DNA, 122 bp, Homo sapiens
aatcctgagtgagacacacagaaaggcagaaaaaggcagaaagatgctgagggacagagacgcagaccacaagaatgacagaagaaggagacagagagagagagggagtgagaaagatactg

SEQ ID NO: 116657 - DNA, 122 bp, Homo sapiens
tttagccacgattctgtgtgtgttaagttatttggggtctttgtatacatagtttctctgcggaatctacattggacttgaatttctatagtgatagtaaattcttaactttgtgttctgac

SEQ ID NO: 116658 - DNA, 122 bp, Homo sapiens
ttaagttttcaatttgaagccattttctaattctgtctcattcaggagcagttagagcgccggtgttttgctgaattcccagcgtgcttttcatgagctccctcagaaagccaacaaaagag

SEQ ID NO: 116659 - DNA, 122 bp, Homo sapiens
gtcattttcccctctgggctctgggcatacaattgctttagggtcttcctcataggaagccgtgagtaacagcaggaacatccattatccacactttgcaaatgcctttcccttctagtatc

SEQ ID NO: 116660 - DNA, 122 bp, Homo sapiens
ggaggaacctcgcaggcccccgttccctcagactttgattctgagccaccgtgagagcgccgaactccctggtagctccctgaaagactagcttgtcttgatttctttcaaggacgataagt

SEQ ID NO: 116661 - DNA, 122 bp, Homo sapiens
gtggacggctctcgtgtgtttatagctgggtccctcgcttgggagctgcctccgggtgggcggcctctccagcctgtttgagtgctccacccggagcaggaagagggccgtgtgctctgggc

SEQ ID NO: 116662 - DNA, 122 bp, Homo sapiens
cgggtacatcatcgtgttcgtcgtggctctcattgggaacgtcctgggtgagtctcctcccgggcagccctcctaggggctatcaccccctctccgccccgggctgagaaggctctaaagag

SEQ ID NO: 116663 - DNA, 122 bp, Homo sapiens
ctccctctgcgacttaaagaagcagattatggggagagagaagctgaaagctgccgactgcgacctgcagatcaccaatgcgcagacgaaagaaggtaagggccgcttggtcttaagatatt

SEQ ID NO: 116664 - DNA, 122 bp, Homo sapiens
gggacgggtgggtagacagaggaggtggctccttcaacttccctcctccattctgcaaaccggggagctcaggcggagcggcggagggcagggcggcgaaggtcaggaggccaggcccccca

SEQ ID NO: 116665 - DNA, 122 bp, Homo sapiens
ccaaatttctatcagtaggatgatggttacataaatcatgctactgacattccatgactacgcagtggttaaaaggaatgagacagatctatatgtattgatatggaaaggtccccacaaca

SEQ ID NO: 116666 - DNA, 122 bp, Homo sapiens
gggtcccgggctcggcggcggtggcggcggcgtcagcgagggagggcccgccccccgcaccgcccccacccgggcccctgaagcgcggggcttccccggcctcccccgcctcccgcgcggcc

SEQ ID NO: 116667 - DNA, 122 bp, Homo sapiens
cctaagcaagaggaagtgcccctctcaacctgtgcgggctgctgcgtcccaggactgagacgcaggccagccccggcccctagccctcaggccttctttcttatccaaataaatgtttctta

SEQ ID NO: 116668 - DNA, 122 bp, Homo sapiens
ggagctgggcgcggaaacaggggatcccccagagagcgcccagcccagcctggggctggacgcgtacaaaaggcgacttgttctttctcgggatgcctgcgccttctcaaacatacctacag

SEQ ID NO: 116669 - DNA, 122 bp, Homo sapiens
tttgttttccgcttgctacgaattgggcaagttctgcgccttgaaactgaactagtggctcgggcagcagcaacagagtgttaggttttcgtaggtggcaggagactctgtaaatgactatg

SEQ ID NO: 116670 - DNA, 122 bp, Homo sapiens
ccgtggccgtggccaggtgtaccggagcggcacccaggagcccgccctagcacccgctcccgctcccacctcgtctgcgcccacccgctctgggcagctgctcccaagggagcccctcgccc

SEQ ID NO: 116671 - DNA, 122 bp, Homo sapiens
gctcctcagcgtcctccagcgcggcaggcggatgctcgcgtcggaggcgcgcaggctgggcggcaggcagtcccgccacactctcctgggaagcacccgcacgggcagatcgtgcaccacgc

SEQ ID NO: 116672 - DNA, 122 bp, Homo sapiens
aaaagagaaagacctgtggtccagcagtaagaataatattggtttcatttcctcccctgccgcactctgatgggtagagaacacctgtcttcgcaaccagtatcgctgcagcaacgggaact

SEQ ID NO: 116673 - DNA, 122 bp, Homo sapiens
caagtttgggaaccgcaggcatggaaagaaaaaagttcacagacactattcagaacttttcgtgagtgtgtttattaactcttactccccacgggcaaggctgggttttggtgagggaaaga

SEQ ID NO: 116674 - DNA, 122 bp, Homo sapiens
agcacagaacaggttggggtggcaggggaatttggggcaccctggggaaacttccagggacggctccggccaagagaaggcaacccacctgtgcaaaggctggaaaaggaggtgagggaagc

SEQ ID NO: 116675 - DNA, 122 bp, Homo sapiens
attccacaggcacaaaaatccacagccaggaatttgctacctcctctgagtcaggcagggcgtgggggtggggtgcacaatcccattagtagagaatgcccagtgggtttagtctttgagag

SEQ ID NO: 116676 - DNA, 122 bp, Homo sapiens
cttacacttttagtttgaaattctcccatgaagcactcaaggtcctttctgatttgacatcggccagatttccctgatgtaaccttccctccagaaatgttctgattctggtagatagaact

SEQ ID NO: 116677 - DNA, 122 bp, Homo sapiens
tcataagaggaacgaggtttatttgtcaggttgggtgccccaaagagcgaaccgagagtgcgctgtgataatgcacggggcaactctttcttgcacaaactctcatcttagtagtttccgtt

SEQ ID NO: 116678 - DNA, 122 bp, Homo sapiens
aacatcactatgttgcccaggctggtcttgaactcctggcctcaaaccatcctatagattcgacctccgaaagtgctggggttacaggcatagccactgtgcccagctggaacaatctttat

SEQ ID NO: 116679 - DNA, 122 bp, Homo sapiens
tctctccctatcgccacccccctggctgccctcccctcctccttcctcagtgtgactccacgctggaaggtgacacattcccaagaggcctcttggacttttgtgaccctgagactacgtgg

SEQ ID NO: 116680 - DNA, 122 bp, Homo sapiens
taaaggtaggtttttgttacctaccaccaaaaagcatacctaatagatacaggaagctgacgcagtggttcggttgagaggcatgtagacctgacagatccacaatgtccattcgtgaactc

SEQ ID NO: 116681 - DNA, 122 bp, Homo sapiens
gagcagagactcttgggagctcatgggtttgcacacttctctccggctcagcacagcccccgcagcagcccctggaccccggatctttggtccagaatgaattcatccctgccagccggacg

SEQ ID NO: 116682 - DNA, 122 bp, Homo sapiens
atgagagagccacaggcaatctttttaggggctaggtatgaaaacggcttacatcacttccgctcaccttccattggctcctacctaactgcaagggaagctggtaaacatagacttcctgt

SEQ ID NO: 116683 - DNA, 122 bp, Homo sapiens
caggggcagctccgggaggccctggatcagggctgcagccatcagcccaaggcccaggggcgcgccgcagggcacaaagggggccggcaaactctgatgcctctccccttcaccccaggcca

SEQ ID NO: 116684 - DNA, 122 bp, Homo sapiens
accacttgtgatactatgtaccatattaaagggaaagggcagactacatgatggagtctgcgctgtgaactcataagaattaagaatgcagaaggccgggtgcaatagctcactcctgtaat

SEQ ID NO: 116685 - DNA, 122 bp, Homo sapiens
aagaattccagtaaagagctgatcatggttctcactccttgaataccaggaacaccatctcgtatcacataatgagacagggagacattctggtcctcatctcacagatgaaaaatgtcaag

SEQ ID NO: 116686 - DNA, 122 bp, Homo sapiens
aattttcccttttttagtcttattctttcaggagtgcacaatggagttttccaggggctccgtgacatatagtgacttcattgctctgatattcatatgtaggggatttattattgctattt

SEQ ID NO: 116687 - DNA, 122 bp, Homo sapiens
gactcacgcgatcctcctgcctcagccttccaaactgttgggattacaggtgtgagccatcgtggctggctagcaatctgtatttcaacaagccctctggtgagtctgatgtgcgcctgaat

SEQ ID NO: 116688 - DNA, 122 bp, Homo sapiens
ccggccccaccgcaagccctgcccctcccacccacgcgtgcccgggccccgcccccgttgcgcgcagccccgccccctatcgcgtgctcaagccccgccctggcggcccccggccccatccc

SEQ ID NO: 116689 - DNA, 122 bp, Homo sapiens
gaacacccaggctcagaggcatggcaggagctggctgtcagggcccttatcagcaggccccgcctctcctccagtttcagctcagttagccctggaaggggaaagaccttgctgggggcaga

SEQ ID NO: 116690 - DNA, 122 bp, Homo sapiens
tacacttttttcagagcaaaaatacatatatgttggtgtgggtggggatgtcccggagtacgtgggggcgagggtgcctgcgtgcctcctgatctgcaaggatctatctagtgtgtgtgcct

SEQ ID NO: 116691 - DNA, 122 bp, Homo sapiens
ccttatctacctcatcctgtcctcagcaacatttctcttttccagatcgggaaacctgcacggccgctcaggacttctcgatgactgcaccttagagaccagagtgcaggttagcggggctc

SEQ ID NO: 116692 - DNA, 122 bp, Homo sapiens
agaagagaaagccatcaaattgaagtcaagaagctcaagtctagatgtgggactgataaacgttaaatgaagggtctaaggtcctacaggtctcagctataaatgagaatgtgcaagccaca

SEQ ID NO: 116693 - DNA, 122 bp, Homo sapiens
cgagctgccatcatccaccgcctttgtctggaagcgcagggcctcacacgcgggatccatcggaagcccgagcattgtcaagctctgctgctgcacctgggtcagcaaggtgggctctgcca

SEQ ID NO: 116694 - DNA, 122 bp, Homo sapiens
cgccctgcgtgacttacattggagaaacatgtcttctgtctcttgttacccattacccagcgtcggaagccctaggatacgggctgtgtgccggacttttgtgggggctcttagggcacaga

SEQ ID NO: 116695 - DNA, 122 bp, Homo sapiens
cattctcatcccagacacgaacaatgactgtagtgctcacattttgcaagaatccgtcctcggggatccaagcaaacactctaaaattatatgtttgggtggattcatagtcaaactgtcgc

SEQ ID NO: 116696 - DNA, 122 bp, Homo sapiens
gggcgggaagcagaggggcttgcgaacgcggactgggcagagcgcttgatgacctcctagcgacgcgcgggaggggaggggagagacaaaaaggggagggggagtggagcggcgtggaggtt

SEQ ID NO: 116697 - DNA, 122 bp, Homo sapiens
ataattatcattctattctctacctccatgagatcaacatttttacctcccatatatgagcgaaaatatgcaatgttcatcttactgtgcttggctaattttacataatgacttccagtttt

SEQ ID NO: 116698 - DNA, 122 bp, Homo sapiens
aaacttgttctaagagtgattaatgtacctggatgtatcactggggtgagccacgggaaccggctagagaagtgcctgatgcaagttcattagaatccagactgcaagttttttagaattca

SEQ ID NO: 116699 - DNA, 122 bp, Homo sapiens
tacagttggggaagggtggggcgtctgctgccctaacccgcgaagcgctttctcaggccccgcccccggtccgacccggacgaccctctgagtcctccacaacgaagtcgtctgcctagaag

SEQ ID NO: 116700 - DNA, 122 bp, Homo sapiens
tactcgggaggctgaggcaggagaatcgcctgaacccgggaggcagaggttgcagtgagccgagttggcgccactgcactctgctctgggagacagagcaagactccgtctcaaaaaaaaaa

SEQ ID NO: 116701 - DNA, 122 bp, Homo sapiens
gtacagcctggcactaccctggggggaggagagttaatcaggctgacaaggaagacaagacgcagcacagctgaaatgcaccctcacccactgtgaagccttgaactgcaaaccccgtcacc

SEQ ID NO: 116702 - DNA, 122 bp, Homo sapiens
gtgttaaggctcagacaccagagcatcacagcatggcaggggtgggctgagagtgttcagcgtgactagagcatggatgctgatgatgtgagcagggctcacaccagtcactcctgtgagcc

SEQ ID NO: 116703 - DNA, 122 bp, Homo sapiens
cagcgctattaatgatgaggctccctctttttcttctctagaaggggtgcctttggttttcgggaatggggtggggcaccgtgcgccgaggctgacatttggcgcaggtggtggggatgcga

SEQ ID NO: 116704 - DNA, 122 bp, Homo sapiens
tctcaggcctcacggggactcctacccggctggggtcaaaggaggagctgctctggtcgccgctgccccaggagcctgagctgggccggtcctcaagacctgcaggcaggacagagagagtt

SEQ ID NO: 116705 - DNA, 122 bp, Homo sapiens
ccattgctatagagatattcttgggagacctataatcattaaagagcaggaggacggaggcgactcgttggaggcttatcattatccacagctcctgaactatgctgaccaggcctaatttt

SEQ ID NO: 116706 - DNA, 122 bp, Homo sapiens
atttgcctcacagccaggccctggttctttaggagactcaaaaatctcagggtagccgggcgcggtggctcacgcctgtaatcccagcactttgggaggccgaggcgggcggatcacgaggt

SEQ ID NO: 116707 - DNA, 122 bp, Homo sapiens
agggcctgcggccgggcaaggtcgcgcctccacaccgtttccccgcccgggtgccggctccgggtctccagcctaaaggccctggggaccgctgacctcctgctctctgttccagggaggct

SEQ ID NO: 116708 - DNA, 122 bp, Homo sapiens
ctgtatctgtgcacagcgggctcagctcttcctgcagtgtgctggctggtggccaggcctcgttttcaatgttcacagctaaattggatccagatgttgctgaggaatctgatattaaacaa

SEQ ID NO: 116709 - DNA, 122 bp, Homo sapiens
gcccacgcacccaccttgttctccttgacgtagagagccagcatttcctctcgcccataacggtagtcagccagcttgtatttgggcatggcaggggacgggggtggggaggccacgctgcc

SEQ ID NO: 116710 - DNA, 122 bp, Homo sapiens
caaggacgctgaggctgtggaagtccacgtacttactgactcgcagcgcctgtgagtgggcgggaaggagcgtctgcccctcagtcgtggtccggctccttctctcacagacgtggaccttt

SEQ ID NO: 116711 - DNA, 122 bp, Homo sapiens
acagagaggcccccaaggcttgtcaggggagcagcagatcccaggacagtgaccctgggacggagccctgcagtcatgcctcgggcccctgcgtaacctccactgtctccagcccaggtctc

SEQ ID NO: 116712 - DNA, 122 bp, Homo sapiens
cagagagctgaaagtattaaaaaataatacctgctctgtaccaggccccagggtggatgtcgggggggcatctgtaccaggccccagggtggatgctggggcacctgctctgtaccaggccc

SEQ ID NO: 116713 - DNA, 122 bp, Homo sapiens
ccgccgccgccggcccggacatggccgccaacatgtacagggtcggaggtaaggccgcaccgcctttatgcccggccccgacccgcccgcagcccccacccgccgccgctgccgcctccccc

SEQ ID NO: 116714 - DNA, 122 bp, Homo sapiens
agctgaagcagcctctccccttcagacctcagagagcatttgtctgaccgtgagttccgccgcagcctggcctgtctttcgccctagttagtctttaagctcctgaatgcccgccgcacgcc

SEQ ID NO: 116715 - DNA, 122 bp, Homo sapiens
acttaggttcccagcttctggccctgccaggctctgcagtagcccaagcccaccgctgcccggtttcttctcagagagcaagccctcgcccttcgtgagcgccaaatccccgcgctcggccc

SEQ ID NO: 116716 - DNA, 122 bp, Homo sapiens
cctcgggacggccactcgtctgcgaggccccgacaaagagcgcggaacctgagcctctggcgaagatcctatttcgagcccgacgtcctgctacagtctgcaataagcgctctccgtccagc

SEQ ID NO: 116717 - DNA, 122 bp, Homo sapiens
gggcctttttcagagagacccaatgcccagaaggctagatgcgtggggaggagccacatacgagaaactgcctccctgcttcgggtcagaacaagccccaggaagaaagtatttcaaacaac

SEQ ID NO: 116718 - DNA, 122 bp, Homo sapiens
cacctttggcttttacagaggcttctgctgtgaacatttgtgtacaaggttttttgagggcggatgttttcatatctcttgagtgtttacctgggagggaattgctgggtcatatggtaact

SEQ ID NO: 116719 - DNA, 122 bp, Homo sapiens
gagccggcaggagcggggtgcaaactcacctggccggagcggggcacgggggtgcgggggcgccgctgcccttcagcaggagccgacaaactttcgcgggcgcccggcgggcatcgctcggt

SEQ ID NO: 116720 - DNA, 122 bp, Homo sapiens
gcagccgggagcggcgggcgcaggtgttactggttgcgtcgggtcacgtgggcgcgcaggcgcagcgcggtgcagcccgttcgctcacacaaagcccagacgcggagaaaatggcggcaggg

SEQ ID NO: 116721 - DNA, 122 bp, Homo sapiens
aaaaaatcagggaggaggtggcaagccacaccccacggtgcccgcgaacttccccggcagcggactgtagcccaggcagacgccgtcgagatgcagggcccaccgctcctgaccgccgccca

SEQ ID NO: 116722 - DNA, 122 bp, Homo sapiens
catcccggccaacaccgtgctcctgaagctcgatgccaacaagatctcccacctcccggacggggccttccagcacctgcaccggctcagggagctggatctgtctcacaacgccatcgagg

SEQ ID NO: 116723 - DNA, 122 bp, Homo sapiens
tctctggctgtgatgtggaaggataaggacgtgattggacaggcagggatggttcagtaacgagctaggactttattgtgaagggataaaggggaagcttttaacattttaatcatgggact

SEQ ID NO: 116724 - DNA, 122 bp, Homo sapiens
tagagtgccgtattccgtgatcccgccacagctgctcttccaggcctcttgcctgcagggcgttcatccccaccaccatgctgctcaacatgcttacacgtgtctcctggcgccctctgcaa

SEQ ID NO: 116725 - DNA, 122 bp, Homo sapiens
tctgccccgcccctaaggcaatttacctctaagctccgcctttttaagacccggcaacatcgcttctcaagaccctctccttccccccgggcgccgagaaggcccatccaccgtgggcccgc

SEQ ID NO: 116726 - DNA, 122 bp, Homo sapiens
ccaaacatctgcagaagtgtcgcctcgaagtcccgcaggagctcatggctctgccctgagcggcgtcctcccgcgtggccctgaatctcggcgacttttttcttccccgtctcaggtatcaa

SEQ ID NO: 116727 - DNA, 122 bp, Homo sapiens
aggcgggagtgagtcaactgacaagcgctggggacagtggcgtccttgtcttgcctttgtcgctcccgccccgctcttccctggctgggctggcggaggccttgctgatgaacctgactgag

SEQ ID NO: 116728 - DNA, 122 bp, Homo sapiens
aaagactccatcctactcctccccccacctctggaattccacctcccttgttgcgcccatcgctatggtgacgggcgctctcagtacactgtctctacaggccaggaaagagttgtgtgtct

SEQ ID NO: 116729 - DNA, 122 bp, Homo sapiens
agccaggtgagggccctggtgggtgcagccggatgtgggccctgagcctccagtgctggccggaacagcctgacgcagccgggtctcctgcaggcacagagaaggtgctgcaggcacaggag

SEQ ID NO: 116730 - DNA, 122 bp, Homo sapiens
ttctctgttattgctttcaagatggtctgtttgtcattggtgtagactggttgattataacgtctctcagtgtggacttctaaaattcttgctgcttaaaatgtatcaagtttgttggatga

SEQ ID NO: 116731 - DNA, 122 bp, Homo sapiens
ttatccccctcggttggcaacatgaaatgccaactcatgatttaaataaaccactggcaacgaagggcctggctggctgcaagtcagttctccaaatcagttctattcaagtatccttgcta

SEQ ID NO: 116732 - DNA, 122 bp, Homo sapiens
gtatcctgtgaaaaggaaacttactaggctaaagtaaaataattgctgtttactgtaggtcgagtgccaagcacagacagtaatattcaaatcaacaatgactggatccttgctagctcctt

SEQ ID NO: 116733 - DNA, 122 bp, Homo sapiens
gtgccctcggggctccgagcgcgccgcagccgccccggtgccgccgcgcagctgccgcctcggccacccagagccggtccagccgctctccgcctgccgccacggcccagccggcccagccc

SEQ ID NO: 116734 - DNA, 122 bp, Homo sapiens
cccagtgaaccccgggcttgtgctgggggcgggttgtgacgggattgggatccctggcctcgggaggcgagtggggcagcagagccggccccccagcggttcccttcatctcccctcgcccc

SEQ ID NO: 116735 - DNA, 122 bp, Homo sapiens
caaagggggcgggggccgatccggccccgagcccgccccgagccagccccgagcccaggccgggccccgccccgcccaggagccgccaatcgaaagccctaatgagcagtgggggcgggact

SEQ ID NO: 116736 - DNA, 122 bp, Homo sapiens
tggaagctctaccacaatggcaatcacccagttactataaagcaggtttcaaaaacatgccgccaagtgaaacaatgttcctactgtctgccatcctatgctgccttcaaatgtttattgta

SEQ ID NO: 116737 - DNA, 122 bp, Homo sapiens
ggctcggcctgcgggactccagctgcccctgcctggagggagggaagggagaagagaatacgaattaattacgaaggaaacccaggtgtgaaaggcacccgccgcggagctgggcgtgcagc

SEQ ID NO: 116738 - DNA, 122 bp, Homo sapiens
agacttcgtctcaaaaaagaaacaagaaaagacaacgaaaataactccacactgtgggagcggctgagcatagcggctcaagagccccgttacagattttttgggggggttaaataccctct

SEQ ID NO: 116739 - DNA, 122 bp, Homo sapiens
ggccggtgggtcgcttgagcccacgagttctagaccagcttgggcaacatagggagaccccggtctctacaaaaaattagctgcttctgctggtgcacacgtgtcgtcgcagctacctaaga

SEQ ID NO: 116740 - DNA, 122 bp, Homo sapiens
gcactacggatacagaaaggacgaggaacaggtttaaaggggagttgaagcagaggggcacgaaatcacctggcaggtcacctctccgaaggaaaaacatttcaagctccctcccatccccc

SEQ ID NO: 116741 - DNA, 122 bp, Homo sapiens
tgggctggggaggggggtgtcccttcccagcacgccctgcagggctgtgcgttctggtgtcgggttagactagcaggcggggcgggggggttggggcggcggggcgggggagactagggctt

SEQ ID NO: 116742 - DNA, 122 bp, Homo sapiens
tgttgtatatgaaggaaatgagagcaaaggtcgtagctgagtgcacgttgaaagaaagcgcggccatcaaccagatccttgggcggagggtaggtgacgcccttctcagggagaagcggggg

SEQ ID NO: 116743 - DNA, 122 bp, Homo sapiens
aaacacacacgcacatgggcacatgcatgcaggcacacaaaaacaagcccatacaccagacgaaaaaatacagatgcaggtacacacacatggacatggacatgtgtgtgcctgtgcccata

SEQ ID NO: 116744 - DNA, 122 bp, Homo sapiens
ggtaatccagggttgggggtctccggcgtgtctttcgggtcgcgtcccgcctgggtgccccggggattcccatgcagaaatggagggtgcccccagcagaggggaaaactctggcgtgggaa

SEQ ID NO: 116745 - DNA, 122 bp, Homo sapiens
gccgggtcccctgctgcccgggcctcagccccggctctgacatttacacactgcagccgccggcaccctcggagacagcctgaagttcagggccgagggccctcctcatggtacggtgcggg

SEQ ID NO: 116746 - DNA, 122 bp, Homo sapiens
ttgaaaagcgcttgcgcaggacggctacggtacgggggtgggagggcttcggagcacgcgcgcggaggcgggacttgggaagcgctcgcgagatcttcagggtctatatataagcgcgggga

SEQ ID NO: 116747 - DNA, 122 bp, Homo sapiens
gtggccgcgttatatgacattccatgttatgtgacattccggtgtgccggcgtgtggccgcgcatcacaggatggacacctgggctgttcccatgtaatgtggctatcacgactgatacggt

SEQ ID NO: 116748 - DNA, 122 bp, Homo sapiens
tatgataattcttctcgaccccggtatgcccctctacctcttcggcatccccaggcatctcggattgcttctgtacgatggagaacattgggttttgccaccgccgctcctctccctcagta

SEQ ID NO: 116749 - DNA, 122 bp, Homo sapiens
caatgttgcctcaaggctgaaagcctgttgattttcttgtcttgactagtaccattaaaacgatgtgaggatttcacgaaagtaagcgaacaagaaatgaaagacctaagagaaacacacac

SEQ ID NO: 116750 - DNA, 122 bp, Homo sapiens
cagcagcggggctgagctggtgcggccgcagggtttgcagagctccgggggggtggggggcgggaaacgctctccccacacgtaaccccactaaagccacaagcagcagggcacgcgctgca

SEQ ID NO: 116751 - DNA, 122 bp, Homo sapiens
aaggcccgcctctccccatcaccaactaatcagttgactctttcaaaaaagggggcgtcccggaagctctaccgaccagtaagagacctgggtgctgagcacgtgaatcaacagatgcggat

SEQ ID NO: 116752 - DNA, 122 bp, Homo sapiens
gggccaggcccaccttgagggccgggagctgggccggaggccagggcggccagggtagtgcgctgggcgaggcaggggaggagtaggggagagtgggcgtgggggccctgggggcccgggga

SEQ ID NO: 116753 - DNA, 122 bp, Homo sapiens
gtcatccagctacggcctggacggtccccagaacccgacggccctgccccagcctttctccggcaagagagcttcactaaggagccagccagtggtcccccagcgcccggcaagccccccca

SEQ ID NO: 116754 - DNA, 122 bp, Homo sapiens
gagaccctctctggcagcgagctgacggcgaaacttgagcctgcctttctctctgggctgcgctgtgcccagccactcatcagggcaaagtttttcgaggtttttgacaactccatgaaacg

SEQ ID NO: 116755 - DNA, 122 bp, Homo sapiens
caggggagaacgtccatgtttgtgcgagtcacaaaggcgcccgttccaggggtcccagaacgcccgggcgtggggctgggggtgtggcgcagcgaggccgcgcagcaagcagtcctcccggc

SEQ ID NO: 116756 - DNA, 122 bp, Homo sapiens
cggctctgtggcccgggctccaaggcgggggccgcccacgacggccaccggcagggacagcgggggcaaatttcccagagcggtaagccggccccagccagccccacggcagggatggcttc

SEQ ID NO: 116757 - DNA, 122 bp, Homo sapiens
tctgcatcgtcgcctgcaacgagtgcagacggcgcacagaggccaccacactgccaggcacgccgggagatgtagtccaggcctctgctcggacaggtctctctccggagcaaaggatctga

SEQ ID NO: 116758 - DNA, 122 bp, Homo sapiens
gcatgccttggagaacagacttggaacagtgagtgacattgcctgggttttgaaggactgcgagttagctttttaagagagggaagagtatcccaggcagaagaaagggtaagctcaagagc

SEQ ID NO: 116759 - DNA, 122 bp, Homo sapiens
ttcaggctgctgagaccctgccaagggttaggtttatttaccccacgaacattcgcccagcgtccactgagcgggccctgcctcactgcctcccagcgcttgccgggcccgctcgctgatcg

SEQ ID NO: 116760 - DNA, 122 bp, Homo sapiens
tccctttctacttccacagcagtactccatttccaaaagatgctggtcagaaagttgtgtcgtgtgtgtgtgtatgtgtgtgtgtgtgtgtgtgtttgtgtgtgtgtgttgggctatgccaa

SEQ ID NO: 116761 - DNA, 122 bp, Homo sapiens
gaggccggggtgcggggcgcgggtgcaggtggaaatcgccagcaagctcctccccgcccgcgcgctccctccgacctgcagggctgtgccaatcccgaggcctcagcttccctgaggagcca

SEQ ID NO: 116762 - DNA, 122 bp, Homo sapiens
gcacgggcgattgaacgtacgtaccagagaaggtgtccagcgcagtgggccggtagcgcgcggggtacccattgcaggtgtagctgacgatgaggctgctcttgcccacggcgccgtcgccc

SEQ ID NO: 116763 - DNA, 122 bp, Homo sapiens
cttgtcgctgaaagccggccaggcgcactgtcggcgctcagagctggtggccgcctcctgcgcttcctgattcccagccgcgctcgctcggagagcagtgcccgctatctcctggcccggga

SEQ ID NO: 116764 - DNA, 122 bp, Homo sapiens
aggcagaggccagggccggtgtgcgacggccatcatggttccaaccacaagtggggcggacgctgccccaccggtctccggccagcagctttgagggcatgtgtccaggagacgtcatcggg

SEQ ID NO: 116765 - DNA, 122 bp, Homo sapiens
caggaaaccgccggactacaacgtggcccttcagagatcgcggatggtcgcacgatcctccgacacagctgggccttcatccgtacagcagccacatgggcatcccaccagcagcaggcctg

SEQ ID NO: 116766 - DNA, 122 bp, Homo sapiens
tgtgatgtcatgcacatacctgtagccagttcctgcagccaagtgcatgcataacactagcgctagccctatagatgcctgccccaggcacttagcaatgaacctggaggcactgctaagga

SEQ ID NO: 116767 - DNA, 122 bp, Homo sapiens
gccgcccgaggccacaccctctcctggtcctctttcccttttcctgcgggggaagcgccgcgtttcctgtgctgggaggatgagttgatcttgttcgtgtatcttaagtggggcttttcaaa

SEQ ID NO: 116768 - DNA, 122 bp, Homo sapiens
ttccccctgggtgtctgtcttcctttcctaggtctgccaggtggtttagtccatgctactcgtggcttagtccatgccactcgtggcttgtgccccaccctgcccggggccctcttcatgac

SEQ ID NO: 116769 - DNA, 122 bp, Homo sapiens
gtacttacagaagcgagaacaaagacagttgatcagtcttttacatttatctatactacacgttccacatccctgggaaaccatgtttctgtaccaaccttataactttgcagctgccctag

SEQ ID NO: 116770 - DNA, 122 bp, Homo sapiens
ggttttgcactattgcctggtactttttaaaggttttgaagtagagatgttcaataccaccgtgtatttgcccaagaagtcatttgttctctgaagaagctggcaaaagaaaagttgaagga

SEQ ID NO: 116771 - DNA, 122 bp, Homo sapiens
gaaaggcagagattgcggggggcggtagtttaggccaggggaccccaaaaccgggggatccgcactcacctacctgctcgatctcccggcagcgccgacctagtgcctggtactttctgcga

SEQ ID NO: 116772 - DNA, 122 bp, Homo sapiens
cccttcttttatctttcctgggtctccgtttcggcctctatgaaataacacgcaggcctccgtccatgcggctcgtagaaggcgggcggcaggccccgcgccaccggccagcagctcgggac

SEQ ID NO: 116773 - DNA, 122 bp, Homo sapiens
ggcccatgaagacaagccagagccctgcccctgcccgccaccgaggacctgcaccccttccgggaagggctgctcaagttacggaatgctgtcaccacagctgcggatgacagcacctttgg

SEQ ID NO: 116774 - DNA, 122 bp, Homo sapiens
tgattagccagctggaagggagggccgttgattaaaggtagaatcttccactgcagtcagcgacctcttcagcttggtccacacaggcaaagcagagtggaaaatgctgagtcaaagtggcc

SEQ ID NO: 116775 - DNA, 122 bp, Homo sapiens
caagatgttggagagctgcagatgaacagatgaacaagacacagctgcttttctcaactccgtctctcaggagagagacatgaacaccactatcatcagatgctaaaagtgccataatcaat

SEQ ID NO: 116776 - DNA, 122 bp, Homo sapiens
aaggccgtcgttcgaggggcggggcctggccctccacgccccgcccaagacctgaacttgcggaaccccggctggcagccagcatgtccccgcaccttttcatctgtccgctgacgctgccc

SEQ ID NO: 116777 - DNA, 122 bp, Homo sapiens
ggaatgctcctgtctcgcttttatgtgcagtaatatcctctactgccataggcctcaaagcggtccaaatctcccctttcagattctaccaaaagtgtgtttccaaacggccccatcaaaga

SEQ ID NO: 116778 - DNA, 122 bp, Homo sapiens
gaagtctcccctggccaggggccacagtgttcacagggccaggcagctcatgtgggtgagcgtctaggtggggcctgcagtgaaccagggccagagtctccatctgcagagggcaattgccc

SEQ ID NO: 116779 - DNA, 122 bp, Homo sapiens
tgctttcacgtagtctgtaggtaccaagataaaaacattcaattccaaatatggtttccccggttatgtattaccaacaacatcctgactatctattacaagaccttatatgtgcaatttaa

SEQ ID NO: 116780 - DNA, 122 bp, Homo sapiens
tagcccacttttgaagagctataatggtttacagattcttcatgttgagcttaaatcccacgggtcccagttctgttttctggccttacctaaagtacaagtttttcttgttttgtgtgtgt

SEQ ID NO: 116781 - DNA, 122 bp, Homo sapiens
tgagccctttttctccctactcttagcctggccctgcgccctgcgcccggggctggcccacggtaaacacagctttgctaacttgtttggctaaggaaatcacagaggtcccggtataagtc

SEQ ID NO: 116782 - DNA, 122 bp, Homo sapiens
tcagtaggggactggataactgtagtccatccagacagcacaagaaaggctctgtcatgccgtgaaaagacgtgagcaagtttaacagcattctgcgaagtgacaggtgccggctgaaaagg

SEQ ID NO: 116783 - DNA, 122 bp, Homo sapiens
agtcatctctctttggggacatcccacaggtccagaactgccagacggtagtggggtggccggctaggctgtggggagcatggagatttatctgcaaaggaggacctggacaaatgttcccc

SEQ ID NO: 116784 - DNA, 122 bp, Homo sapiens
atccccagaactgctgtcccctcaagaacacacgtcccctacgtgggaggccgcgaccagcgactccgcccacttctcccagccggctgttacgtaactgcaacgacagccagtcagacgcg

SEQ ID NO: 116785 - DNA, 122 bp, Homo sapiens
cgcatgggggcggggcggggaaaccggttcaaaccggagtggggtttgccgaggaggtggcgggggagggagcgagagcggggtcttcccgaggttcccactccggcccccgccgttgcctt

SEQ ID NO: 116786 - DNA, 122 bp, Homo sapiens
caaatagcccccaaaggctagcgggccctggcctccttgtattaaaagctagagctcaatcgtgccattgcactccagcctgggcaacaagagcaaaactccatctcaaaaaaaaaaaaagc

SEQ ID NO: 116787 - DNA, 122 bp, Homo sapiens
acaagcgcacagtactcggtgtaatcaggggcatttttagcgagatacctgggatgaaaacgggtgaccacctgaatcagagagcagctccggcgcaccctctgccccgacccgcgctcccc

SEQ ID NO: 116788 - DNA, 122 bp, Homo sapiens
tgcagcttccgggagcgggccggcggctggggagcaccaggagccgggcgaagaggggcacggcctcgcatagggggactccggaaaaacgcagccccaacagcgccagacgccctgcctgg

SEQ ID NO: 116789 - DNA, 122 bp, Homo sapiens
gctgggagggcggggtgggtggctggaggtaaggaggcgcacagcaggggtaagcgccgccgtcgcacactttgcacgccgcccagggctacaccactcaccgaaaattgggaggcaggtct

SEQ ID NO: 116790 - DNA, 122 bp, Homo sapiens
gagggaggggaagagaggggaagggaggaagaagtgccggcttcctcggctccgccctcgcggaccgattcctagactcgcccactccttgtaaactacgcggacttggtctttcacccttc

SEQ ID NO: 116791 - DNA, 122 bp, Homo sapiens
caggccgggcgctggatcctgcccgctcttgtgccctcctgagcatgggtgtggccaggccgggcaggggcacaacgttggcattgataaagcacctgctgggtgggtagggtgggataggg

SEQ ID NO: 116792 - DNA, 122 bp, Homo sapiens
gcccctggggagaagcagccccccacccaggcctgtgtcccagaagtcggcatctgtggtcgcagtggcctttcctttgcagctgcgccactggccctgtctctctggacaccgcggttaac

SEQ ID NO: 116793 - DNA, 122 bp, Homo sapiens
tctttaccccgctgagacagtgggagagcctgaagcagaatcctggtattcaccacgctgcgtccgaccagcgcgccccatcctcagcccctctcacgcctgcatgcttgtctcagtttctg

SEQ ID NO: 116794 - DNA, 122 bp, Homo sapiens
gtagcaatggcacggtcacagtgtgtgtggctcctggacatgcggccagggagcggtggccggcagcaggtcccagggctggagcagcaggcgccagcgacatggcagtggttgagttgtag

SEQ ID NO: 116795 - DNA, 122 bp, Homo sapiens
ccaggggagccgggggagcccggggagccggggaagccgaagcagccgggagcgccagggcgggggtggcacggcctcgcgtcttacccgactcgatgagaggcaccgggcgtcgggcggac

SEQ ID NO: 116796 - DNA, 122 bp, Homo sapiens
ttgggagcagctggaggaggggaggccagtgagcaagtatcagcttgggaaatagggtttcggctgaacaaagttcactgctgttttctgagaaagcagaacctagtggagccaccctagag

SEQ ID NO: 116797 - DNA, 122 bp, Homo sapiens
ctagatggagaggggaaaggtcaggggagccgggaggtatcagcagcagaaaggacggcccggcacttgcggcacttgaacagcaatagatgcagttcacgtaattggcttcctttgatcag

SEQ ID NO: 116798 - DNA, 122 bp, Homo sapiens
ttacactctccagaaggtaaatcggtcttataaatcagtcgtcgctgacagttcactatgcgcagcgcgatcgcccggggttggcgagctgagctgagggtgggtgtttgccaagtcgccgg

SEQ ID NO: 116799 - DNA, 122 bp, Homo sapiens
atgtccagaagggaaaggatgttattactcccgacattgaaggggttgtacccctcgacacgccaggatattgttcctaatatccggggaggagagggtaacattgtacccaatatcgcagg

SEQ ID NO: 116800 - DNA, 122 bp, Homo sapiens
ggcctgggaggggggcggccaaggggccgagctggatgccccgcggggcacctgggcacgcggcgggttccttaaggcacgtcttttgtgtcagagtttgcagctgcggctccgcccagccc

SEQ ID NO: 116801 - DNA, 122 bp, Homo sapiens
gaaagggttgatgtgatgtcccctgtatgtccgcctgtgctaggcccaataaggccaggccgggtaaccgccacaatcctcactggcttcattcgagttcttctgttcttctctgctccacc

SEQ ID NO: 116802 - DNA, 122 bp, Homo sapiens
gggatgctttaggagagtgaccctttcagttcagagctatgccactgagttctgatcaggcgcaaaacggtttttgaaaacggagcaagaaatcttcccagcgatgattacaaatagcttgt

SEQ ID NO: 116803 - DNA, 122 bp, Homo sapiens
tttaggccgaactggttttgctgcgtctctctctcctctttggtaaatcgcggagatgcacggcgcacttcgggagtctgggcagggatggggccccctgggctcggccggagagtaattca

SEQ ID NO: 116804 - DNA, 122 bp, Homo sapiens
gacaaacgctcagtccaggatctctgcaggttcctacacgggagccggagagcgcctgcgcgtcggagcctctttgttgctggggcgctggggtccagctgcgcgtgcgcagtaggccggca

SEQ ID NO: 116805 - DNA, 122 bp, Homo sapiens
ctagcctggcaccgctccgggagcgtcttccccggaatgtcaggcaggagacggttaggccgtctgggtgtgtgcctggccctctgggagcagtggtttcatcctgtttcccatgagaaaga

SEQ ID NO: 116806 - DNA, 122 bp, Homo sapiens
caggaagggtgcggggcggtgcccaccgctggcctcccccgcgtctgggctgcgggcggtcgcagcggtcacccagcgccttctgtgtgccatcaggcactggcccggtctcccgtttgcag

SEQ ID NO: 116807 - DNA, 122 bp, Homo sapiens
ccgccgggggaagacccaggccaatgccgccccccaccgcccccagcagtgggacctcagcgctgccctgctgtgaagacaggtgactctgcacgttttaagcaatgtctagggacgccccg

SEQ ID NO: 116808 - DNA, 122 bp, Homo sapiens
gtccccaagtagttatccctcccccggaagactgaagtccctggggcgggtaggagcgcacgctaggagtagtatgaataaagtgttttcttggaggtcatgggcaagtctctggacagggt

SEQ ID NO: 116809 - DNA, 122 bp, Homo sapiens
cgttgcccagccgccagtcctcctgctcgggttttgtaagcaggagagggatgctttttacgtcttcttaaagtacggttaagtgcccttgcttgaagtagttgctggcaacaagaacgtag

SEQ ID NO: 116810 - DNA, 122 bp, Homo sapiens
tccgcctgcgatgatttatactcacaggacaaggatgcggtttgtcaaacagtactgctacggaggagcagcagagaaagggagagggtttgagagggagcaaaagaaaatggtaggcgcgc

SEQ ID NO: 116811 - DNA, 122 bp, Homo sapiens
cggcggcggccttggatggaccgtagtctcggggactgcggggccggaggaggtcgtgggcgcgcggtggcggcgcaggcggccgggctagcaggtcccgcgggcccctgtccccgcagccg

SEQ ID NO: 116812 - DNA, 122 bp, Homo sapiens
caaaaaaagaatgccagttgcgagggtgagggtcccacaccgcaggagatggcacaagtccggccaagaacggagggggccgcggccggtgcggagcggcctagagcggcgggagggcggac

SEQ ID NO: 116813 - DNA, 122 bp, Homo sapiens
gcaaattttgtgatcttactgcttaaattcaccttggagcaatctgccactgtgcagctccgtctcagcctctctcccctctgcattccttctcccactcaggccttgctcaagccatctcc

SEQ ID NO: 116814 - DNA, 122 bp, Homo sapiens
cattgatagttggtttacttgtttccctctttattatctgtctccgttctcattaggatgcgtgctctcttgggaccattggcttattcacacagtcttctgtctacagaagattgttgggt

SEQ ID NO: 116815 - DNA, 122 bp, Homo sapiens
gttgccagggccctggcagattatgctgcaggatctgtttcttgaagaagccgctctcagcgtgggtggcgcgctgcagagactctgggctcctgccagatgagggagccccggcggaggcc

SEQ ID NO: 116816 - DNA, 122 bp, Homo sapiens
agccgggaagaagagccggtgttctctctgttcctcgctagcagcttgggacattagcgccgagatgtgccccatatctgagctgccttcagctccttggaaacggatccaggtttttccta

SEQ ID NO: 116817 - DNA, 122 bp, Homo sapiens
tgcctggggccagcgctccttgctggcccctcaggggctgggcagggcctgaggacagagcggaggggacagggtgatttcagggccagcccagattccatgtttcccagtgaggcttggat

SEQ ID NO: 116818 - DNA, 122 bp, Homo sapiens
attctagggtcacatgttgcgttgtgataaaatatgcttgtgaaaagcacatgcttcgctcgcctaacagaacacgtgagagtatcacaggccctgaggagagtctcctgggggccaccacg

SEQ ID NO: 116819 - DNA, 122 bp, Homo sapiens
gaagtttggggtgatgaatgacctagttaggactagtatttggagatgcccttccagccccggggacggggagggacacgccgggcaggcaggctgcgggcgggactgttgtcagctggagc

SEQ ID NO: 116820 - DNA, 122 bp, Homo sapiens
cacaaaaattcagtccagtgtgatgagttgttagtttgcatccaggagaaaatcctctttcggatatcctcagtttgttctgcagaactctggctttggcaggtctgagacttcccatggac

SEQ ID NO: 116821 - DNA, 122 bp, Homo sapiens
ttcatcactctctccaccacggcgccaggttcaagggcaaacaccactacaaagaagccacgatcagggtcctcaaagacttcccagattcatgtgggaaaatggcagacaaacaagcaggc

SEQ ID NO: 116822 - DNA, 122 bp, Homo sapiens
cctccccttcttccctctctgctccagatgcctcccagagttggaatgagcctggggacacggagcacggggtcagacctcctcccctgcccgctggccgtggccgcagccggagccgcagc

SEQ ID NO: 116823 - DNA, 122 bp, Homo sapiens
acagctccagggacactccttgctcaagacgctggggttagacgtgctccggctacacagcggagtgtcagggggccaagaatatccctctcctttttcttccctcctgctggctttggttg

SEQ ID NO: 116824 - DNA, 122 bp, Homo sapiens
aaaacattaaagaacatgaaagaatgagtcccttgtatccatcaaccaacagcagtgatacgaactcacgaagtctcgtctgagctatgctcaacccttttccttccacatttcagtttttc

SEQ ID NO: 116825 - DNA, 122 bp, Homo sapiens
gcgtgctaccggagttggcctgaaaccagtcctcgctttgttttctggctcctcctctcccgcctctcccgctgtctccgccctgttctattttccctaagaatgtctgaactgggagggat

SEQ ID NO: 116826 - DNA, 122 bp, Homo sapiens
ttgcgggccaactagagttccgcgtgggtttggcaggccccgcagttggagcggcctggccggctctgccggccccgggcagaggggcttagcacccggaccaacagctgcggagtgtgcgc

SEQ ID NO: 116827 - DNA, 122 bp, Homo sapiens
acacaataactgcccttaaggaactgctggttatgtaggagctagcgacaggtcagcagccgcccataacatacctgtcattgccaggccacccctgcctctctcccgccgcagccctaggt

SEQ ID NO: 116828 - DNA, 122 bp, Homo sapiens
tctgcgcccccgcacgcacgcacccacgtactcgcgcacgcgcgcgccggccccgcccaccgccccgctgtggcccctttggaccgcacgagccaccgtccgcacagccccgccccgcacgg

SEQ ID NO: 116829 - DNA, 122 bp, Homo sapiens
caggacggagcattttagatcatgggtgcagccgtactatccatggggagctggaaaacccggctccctcctggccctggtctccaaccagcctctgcctcactctgagctgtagagtgggg

SEQ ID NO: 116830 - DNA, 122 bp, Homo sapiens
tctgtttcctggtgccctggggcgcagggtgtcccgcggttgcaagactgaattctgcaccgcccggaggccaggatgggcgcgcggatggcagccccaactgtctccgcgcccctaggcct

SEQ ID NO: 116831 - DNA, 122 bp, Homo sapiens
aaccatccaacactcagaatcaacaacgtaaaatcaactcagtaggagtatcttggcagtcgtaggtcacgggcacaattgctcaaggcctcgtgcgtccgatgccctgtgtgtgcaaaagt

SEQ ID NO: 116832 - DNA, 122 bp, Homo sapiens
ctgctcgggagaaaagtgcaggtagtccccggggcccctctgcttgccactgcccgagggcgaggcgccactgaggtccttatcagaatagaaacacgaggccccgtactcgtaggacgccc

SEQ ID NO: 116833 - DNA, 122 bp, Homo sapiens
tcaggttataaatgaccctgtctcctttatgcgtgtgtgctctcgtggcaagactactagcgagcggcaacctttctgcagaaagtaaactagccttgctaagagctcctttgtctcagtgt

SEQ ID NO: 116834 - DNA, 122 bp, Homo sapiens
gaactgccttatagatctcagggttttttcttctggtttcgcttccgcctcctgaccccacgtggaggtaggcacctcaggctgagggtggggagcaggggttgctgattttctctacgtgc

SEQ ID NO: 116835 - DNA, 122 bp, Homo sapiens
cctcatctaaaatggggatgattatctaccttgtgtctcaaaaaggacacataggccgggcgcggtggctcacgcctgtaatcccagcactttgggaggctgaatgggtggatcacctgagg

SEQ ID NO: 116836 - DNA, 122 bp, Homo sapiens
agactgaagccggtaaagatcccgcatgtagtccggaatgacggcactcttgctaggctgcgggcggcggcgcagcccaaacatctgcagaagtgtcgcctcgaagtcccgcaggagctcat

SEQ ID NO: 116837 - DNA, 122 bp, Homo sapiens
gcaatgaataaagacagtcccagccttcgccctaagggagcaggagcacctgcgatgccccgttcccaagtcctcagggcgaatccgccaaatgtgcgagctgggcagcccacccctttcag

SEQ ID NO: 116838 - DNA, 122 bp, Homo sapiens
ccttaacaggcgggataatggtaaagtccaaggcgctagaactgtcctaaagaatattagcgcccaaagtgggcatgacattagcaagcacggggccatggtgaaaacagctcaagctatat

SEQ ID NO: 116839 - DNA, 122 bp, Homo sapiens
agggtaccacctcgatgagggagcaccgggcactgggctacgaggaacagggcaccgcctcgaagagggagcaccgggcactgggctacgaggaacagggcaacgcctcgaagagggagcac

SEQ ID NO: 116840 - DNA, 122 bp, Homo sapiens
gaagcgctccatgaatggtagttattattacatcacatatgagcactgatcaaaggctagcggcaattaccaccatagctgagagctgagggcttaagggaaactgaattcagccaacattt

SEQ ID NO: 116841 - DNA, 122 bp, Homo sapiens
cctgaggacggtggtttccttctggtcggtgtcatgcactcagagcccaggccaattgcacgctggatgtccctgatttgaagactatggatgccctccccttcccacccagagagagtctt

SEQ ID NO: 116842 - DNA, 122 bp, Homo sapiens
actggccacctcttgggaccatgctgtgccaataccaaaccgaagatgctgcgttggtggcgtctctgcctcttgggtcaactctgcagtctggctggggggttgggcccaccaggaaaggc

SEQ ID NO: 116843 - DNA, 122 bp, Homo sapiens
agcaggaaaaagcttggaactcagtcttccaatggcgaaagggaacgtgctcctgctgggcgggacggcggacggctggcggcggcgcggcctccaattctcgccaacgcgccccgcacccc

SEQ ID NO: 116844 - DNA, 122 bp, Homo sapiens
acctgcgggtgcccgggcctccctgccgcaggctgcggaccggcggactccgacagaagacgggggagtcctggccgcaaggctgaggtttgctgatggtcttctttcaccccaaaagcagc

SEQ ID NO: 116845 - DNA, 122 bp, Homo sapiens
gcgcggccggagcagatccggtgtttgcggaatcaggaggggcgggctggggcgggccctcggcgctgcaggagctgcccagaaacttttccctgctctcaccgggcgggggagagaagccc

SEQ ID NO: 116846 - DNA, 122 bp, Homo sapiens
tgttggaggcaggcaggcagcccaggagctgggcacggcctgagagggtgcaggtggcatcgtgggagcgggtccacgcccggttgtcagcgtggagcccatgtaaggagtggccgtggctg

SEQ ID NO: 116847 - DNA, 122 bp, Homo sapiens
ctgggcctggccctgccagcgcgcacagctgcagcagctccgcgtccccgcgagcgatggcgctccccaggggctccttgtctgggggcccagtgacccagcctcccggcagcagcggagcc

SEQ ID NO: 116848 - DNA, 122 bp, Homo sapiens
tattggctctctaaccctgggacagataggacagtcctccgggaaacagaacagcttgtccgtgtactcaggaagctcatgtgggatacacggtggccacactcctactggaaagcttttct

SEQ ID NO: 116849 - DNA, 122 bp, Homo sapiens
ttccaaaaggacttctctatatgcctgacactattctaggcatgttacttatatcatcctcgttcctaacaactctctgacaaagtagatattattcctactttgcatataggagaggttca

SEQ ID NO: 116850 - DNA, 122 bp, Homo sapiens
ggtcctgtcctcctccgggaactggcgatttgggaaggcagagacattcccagaatccgccggagtcctgaaaacacccacgccctttgtcccagcaatcctgagaaaggccacactgataa

SEQ ID NO: 116851 - DNA, 122 bp, Homo sapiens
ccaggacggctctaacgaaacgtggaaaatttcacacccgccaggacggctctaacgaaacgtggaaaatggcggcaccactgtcacttctctcacgcccaggagcgttcatttgtgtcctc

SEQ ID NO: 116852 - DNA, 122 bp, Homo sapiens
ccttagtcctcagtcctagatcctagggtgggcgggtggggtcacagcctctgttctcaccgcttgtgcaccggagggaagggaggagaactgcatcccgtggtggccctggcagatggggt

SEQ ID NO: 116853 - DNA, 122 bp, Homo sapiens
ccccgggagagaaggagggctccggggaatctcgcacattccaggcaaaggctcccgggccgcagcctctgtgccacacccttggcccgggccaggtgtgcgccctcctcgctgcgaggggg

SEQ ID NO: 116854 - DNA, 122 bp, Homo sapiens
gaggcacaagggaaggtgggctccggatcgggggccgccacataccgtggacgccagagccggcctgcttcagcatgggcttgtccatcttcttggcatagaaggccgcataccacacgcgc

SEQ ID NO: 116855 - DNA, 122 bp, Homo sapiens
ccagcaaccaccagtcaggctccggccttggctcaaacgtcatttcctcaagaaagccctcgtggaggcccaggccaggtgaagcctcctgattagacactcaggcagacccacatactgtt

SEQ ID NO: 116856 - DNA, 122 bp, Homo sapiens
cagagagggaggggagcagaatgcgggctccggacttgcactggctggtccttgggatctcgaaaagctgctcctgccccggtgcgtcctcagctacagcgtgggcaacctgagccccagag

SEQ ID NO: 116857 - DNA, 122 bp, Homo sapiens
gcagacacgtcccagaagctgaaagaaagagcctcgactgcatcagttggtgcgcgtgggcgctgacagtccagaacagcccggtcacggagcagccctggagatgcaggcccaaccccacc

SEQ ID NO: 116858 - DNA, 122 bp, Homo sapiens
gctgaggaccttccagggccgcacgctgcggatcgtgcgcgagcactacctgcggccctgcgtgccctgccacagcccgctctgcccgcagcccgccgcctgcagccacggtcagggccggg

SEQ ID NO: 116859 - DNA, 122 bp, Homo sapiens
catttgtaaaactgcgcagactgaagggccgtgacatgaacaaccaaagaaatgtcagcgcggggacggggccgccagcccgccggggggcgtagggagcagccggggcacaccctagcccc

SEQ ID NO: 116860 - DNA, 122 bp, Homo sapiens
cagaatgaacttgagtccagcaggctcccagagccagagagcttctgcacctgcaaagcccggctccctgcttcagactgaaggtggggacctgaagagaatgcatacaggcacctcagact

SEQ ID NO: 116861 - DNA, 122 bp, Homo sapiens
ggatgggctggttcaccgtcctgaaaggacggcagacagctggtgcttcatcggtgatcacgttcattggtcccattttggccgaagggagggcggagggaggagaacgggtgagccacatt

SEQ ID NO: 116862 - DNA, 122 bp, Homo sapiens
gtctagagatcgcccacgtgagggcgcgggcggcggagcgggcgtgtgtgggggcgacggcgtccgggaggctcccagggcccctccccaggacccgcagctctgaaaggagagctactggc

SEQ ID NO: 116863 - DNA, 122 bp, Homo sapiens
acagaggcatctgaccacatcatacccctgtctaaacctttgccccagtgtccttaggatcgattccaaactccaggctaatggtttgcacatcccaccctatgataaatgaaaagcaggct

SEQ ID NO: 116864 - DNA, 122 bp, Homo sapiens
tcgggctccaggccccttccgcagttcacctgtcccgggccccccacccagcaggagtgccgcctgcctcccgcacggccggcctccgtgtcccagacagggtttgcctccagggtcccctc

SEQ ID NO: 116865 - DNA, 122 bp, Homo sapiens
catcgacattcggaatgtctgtgtgttcctggcccctctcttctcctccttcaccaccatcgtcacgtaccaccttaccaaagagctcaaggtgaaggatttggggtgacaggaggcttggg

SEQ ID NO: 116866 - DNA, 122 bp, Homo sapiens
ccacacactttcctcggtctcctacgtctttactcgccttcaaataggcacccgcttccccggagaaaccagcttgactcttgcttaccgcccaccccactgtgaacatcagggtggttctc

SEQ ID NO: 116867 - DNA, 122 bp, Homo sapiens
gcctactgtctccttcccactgtcctttctccaggccctcagatggcacattagggtgggcgtgctgcgggtgggtatcccacctccagcccacagtgctcagttgtactttttattaagct

SEQ ID NO: 116868 - DNA, 122 bp, Homo sapiens
gccccagcgccgtctttcttgctcccctcccgcccttggagctcccccggctgcccccaacgtctgggagaccccctcggcgccccctccctaggtgagccccacctctgccgccgcggagc

SEQ ID NO: 116869 - DNA, 122 bp, Homo sapiens
tggagattgcagcttgctaactagatggcgcactgttatttggtgttctctgctgcgtagcgcaggagtataaactgagcatgtagctgcttgcgaggtgttcttcaacatttacaacaaag

SEQ ID NO: 116870 - DNA, 122 bp, Homo sapiens
cgcggtttccggatgggtgcgggatgggcaggcccgggctcggcatgggcggcccaggctcggctggcctgcactccgcgaggcaggcctgtgcctgctgggcttgatcagaggttgggtcc

SEQ ID NO: 116871 - DNA, 122 bp, Homo sapiens
agaaatggtcttattgattgtatgcatgcacgtatttgctgatgtatacccctgaacagacgtgacacatacccagagaaggggcacagacacctgcacactcagggccacacctgcactag

SEQ ID NO: 116872 - DNA, 122 bp, Homo sapiens
ctgggggaaatataaagataaataagtcataatctgtatcctacaggagcctctgctgctcgcatgtataattcaaggcagatgtgctaagtcttaaaagaggaggaagtgtttatccccga

SEQ ID NO: 116873 - DNA, 122 bp, Homo sapiens
agggcggggttgggctgggcgcccgcgcgcgttttcaagcctgcggcccggagttcactgcgaggactgagatcacccgttaccccgccctggtctacaagtgtttgctgatatagaaacgg

SEQ ID NO: 116874 - DNA, 122 bp, Homo sapiens
ttccagctaagctgtgcattgcaagtttacacgtggatctacagtttcatctgaaacagccgaggaagtcatggtttgtatatctctggcaataaattaatagagcagtaaactcacacagt

SEQ ID NO: 116875 - DNA, 122 bp, Homo sapiens
cagtcctgcttcaacgtaatttaggtccttcagcatctaaacaacaataactactatctccggttttcagtggcccaccacaactccccatactcctccatcctcatcaaaaaacattacat

SEQ ID NO: 116876 - DNA, 122 bp, Homo sapiens
aggattctgcaagtccagcttcacagactggctttcccagacgctccgaagcccgcaccacgaacagaataaaggagagacgagagatcgcaactagatttgagaatcctcgttcttttccc

SEQ ID NO: 116877 - DNA, 122 bp, Homo sapiens
aagctatcaagaggccatgccctaaaggggtggggcttcaagagacaccgcccccctccccgccgagcatcagcagctatatctgtggaccagactggctcattccagaccctaggagtgag

SEQ ID NO: 116878 - DNA, 122 bp, Homo sapiens
tatccttacattgcacacagcccattatctaaattcctgccaaagacaaaaaagggggcacgtaagctgggatgctccctagttgctgggttgctctacagtaaacgaggagtaattgacaa

SEQ ID NO: 116879 - DNA, 122 bp, Homo sapiens
ccaggatatcagctcagatttcaaatgctagggatcttaagctttaattatctgtgtaaacgtctattaaaatttaagaatctggccaggcacggtgggctcatcgtgtaatcccagcactt

SEQ ID NO: 116880 - DNA, 122 bp, Homo sapiens
tcttacaggcccgggagaggtcgaggctggagcccctcggcgcctctaagacaaaggcagcggtggctgcagccggagcctagcactccggcagcgtcgcgccgcgccgcgccgcgccctgg

SEQ ID NO: 116881 - DNA, 122 bp, Homo sapiens
tcgacccggcagaggcggctagtccacaaccataacaaagctcttcccaaaatggctgcccggcccacaaggtccaggaggggcagagcgggtggaggaggaggagcgaccagcagcacggc

SEQ ID NO: 116882 - DNA, 122 bp, Homo sapiens
accgagcgagggggtgggtgggactcacagcctaccaaataacagtcccagaaaccgaaacgaaatcgaggtggaattctgaaaacacggctcaccagaaagaggggtggagaaggagcgcg

SEQ ID NO: 116883 - DNA, 122 bp, Homo sapiens
cagtctttttttttttttttttttttttggagaattgggtggaagcagtggacacatacacgaggttcagatatgacttcctgggacccacagaacccagcaggactctgggggagaacttt

SEQ ID NO: 116884 - DNA, 122 bp, Homo sapiens
tgccacaaagagaccgttctagaattaaagttaactcagacttgattttcctaggtcactcgctactttgtgtcaggaaaatgaagatactattgttttaaaattaaaaaaaaaaggggggg

SEQ ID NO: 116885 - DNA, 122 bp, Homo sapiens
cgcacaaggatgtttctgtgtacaggtgtgcacacgcagcccacacagaatggacatgtgcgtgtgtgcacaatgcactcacacaaagctcacagggatgtgagtacacagctctcaagggg

SEQ ID NO: 116886 - DNA, 122 bp, Homo sapiens
tttaccttccgtacgtgcaggattcaaagatggctgcctccagtatccgtgacgagaggacgcgaacttactacctcccagtcgtccgtgctccgtacacctgcaacttcagaccttcctcg

SEQ ID NO: 116887 - DNA, 122 bp, Homo sapiens
ctctgaaacaggggcgacaactcctccttgctatgagggtagctgtgaggcctccatgagcgagcggtcgtgaatgatcctagctggcaccgggttctacacacgttccgttctcttcaccc

SEQ ID NO: 116888 - DNA, 122 bp, Homo sapiens
cgccctcgggagagaagcgtcgctgtttttctgggagaggccctgcgccgtgctcttcgtcggatattgggggtcccaagggcggtcgcttgcgacagtcgggtgccgggataagtgcgggc

SEQ ID NO: 116889 - DNA, 122 bp, Homo sapiens
gttccccgacccgcctcgccgcctgccgggctctgtggaccccgcgcccggggccgcgcacgccccctccgcccgccgggaccctgggtccgcgcaccccgcgcccccttccctcccggcgg

SEQ ID NO: 116890 - DNA, 122 bp, Homo sapiens
cccctaccctcctgagtggcaagacatttcaagtcagaattactggggtctggttgggcgcggtggctcatgcctgtaatcccagcactttaggcggctgagatgggtggatcacttgaggc

SEQ ID NO: 116891 - DNA, 122 bp, Homo sapiens
ataaacctcctagcataccaccgtcccgttacctcgagatgttcacctacatgaaagctccgtgaactttgtcatttggcagtttcattatgtaggtatgagtggttgtttacatctttggc

SEQ ID NO: 116892 - DNA, 122 bp, Homo sapiens
tcgacccgccccgagtgggtttggagttgtaggtgctgtctcggatgcagggcgagcacccgcgagcgggtaaccagtcccgtgagagctgcaggtccccagccccgttttacagataggga

SEQ ID NO: 116893 - DNA, 122 bp, Homo sapiens
gccccgcgtcctggcctcgtccttaacccccgggttgccttcactcaggctgggaatccacgattgatttcctactacggaagcgggtggcgttcccagcctgctttcggagcagcacgggt

SEQ ID NO: 116894 - DNA, 122 bp, Homo sapiens
tatatcacacagattcactggtgactttgccaccttttccatccctttgaagttctgcatcgccggtgggaggacgttggtcagagcaagcagagtgtggaggcagaagcagagagcggagg

SEQ ID NO: 116895 - DNA, 122 bp, Homo sapiens
cagctgccccccgcaccagctgccgccggccacagatctcagcaaacccgccgccgagctcgtcaaccacacgtcaccccgcctacttcccgacagcctccgggcgccgtcacctgcagcgc

SEQ ID NO: 116896 - DNA, 122 bp, Homo sapiens
cagcggacagagggaggattgtcggtgtgtgaattgctaccctgggatccggacccagagcggcagccgcgcccctccgccccccgcgcgaccccgggtccgaggcacgctcccagcggagc

SEQ ID NO: 116897 - DNA, 122 bp, Homo sapiens
agcgggggacttcctgaatacagtcattaagcgggggacttcctgaatacagtcattaagcgggggactttctgtgtcgctcatcaaggctgatgctcaggctttagcctgcactgctaggg

SEQ ID NO: 116898 - DNA, 122 bp, Homo sapiens
tgtgtactcatcaagaaaaatggatagtccagcatgcagacatggaaatgccctcttcaccgtccttcctttcctaagaaattctgggttctaggccaggtgcagtggctcacacctgcaat

SEQ ID NO: 116899 - DNA, 122 bp, Homo sapiens
ctggggagaggcctgtttgccagcatagggtggcggcggccggagtcgtctcaggccggtcggctcaagtctcaggggctggaactctgcctaagaggaagccaaggcccagcggccaggcc

SEQ ID NO: 116900 - DNA, 122 bp, Homo sapiens
cagctcttctgtccttctcatcacccacagcgtggctagcagggggtcgtgtttccggggcggcatgtttcacctcatttgtgttacaggtcttttggtcctgccgccccacaccggtccac

SEQ ID NO: 116901 - DNA, 122 bp, Homo sapiens
gcgggcggggcgcgggtctggaatggcctggggaccagtccacctcgaggcagggtcaggcgccagggagtttggagacccggcagagtcaccccgcaaccgtcccgttgccttgggtcggg

SEQ ID NO: 116902 - DNA, 122 bp, Homo sapiens
ccgccatgagcgcccgcagcgccccccgccagcgccgcctccctcctcgccccggccccgcggccttcccagcccgacccctccgcggccccgcgacaaagcggcacccggggctcccaact

SEQ ID NO: 116903 - DNA, 122 bp, Homo sapiens
atttcccttgaactgttctttatttagttctccatcacttgcctaatcagagaaaagaagcggacatggccacagcctttccagtacagaggagagaacatcccagacactttcatatcttc

SEQ ID NO: 116904 - DNA, 122 bp, Homo sapiens
gcccaggcctgcctaggccggcctccctccctccgcaggtcctggggctcctccgggtggcgctcttgaaatccatcgtcaccttccaagcggccctcgcgcgactgcagccagccccggcg

SEQ ID NO: 116905 - DNA, 122 bp, Homo sapiens
cagcggtctaggaattcaagttcagtgcctaccgaagacaaaggcgccccgagggagtggcggtgcgaccccagggcgtgggcccggccgcggagcccacactgcccggctgacccggtggt

SEQ ID NO: 116906 - DNA, 122 bp, Homo sapiens
ggtgagaattttcccggcgcagatttgctttacatcagatttaaaagaccccaaataccgcgtcccatcccttcctctgccctctcagcttcctccactactgcctcaatggctgacccctt

SEQ ID NO: 116907 - DNA, 122 bp, Homo sapiens
gacttctttcacctgcgtcgttctcgaggttcatccgtgccgtagcgtgagccagggctgcgttccaccttatggctgaatcatactccaccccatggacggaccacgtcgtgtttaaccat

SEQ ID NO: 116908 - DNA, 122 bp, Homo sapiens
aataaaagggaataactgcccttattcactaaacttctcagcaggaactcaaattaagtacgggataggaaagagtaggcagcaaaaaaaactaaagcccgtgtgaactgcattcttagaag

SEQ ID NO: 116909 - DNA, 122 bp, Homo sapiens
gcagccgggtggggaggcccgggaatcgcagggggtcggggctggcgccggggtgctcggcggccccaggtcagcaccgcacgcgcgagacctttcccggagcgagaggagcgcacaggcgg

SEQ ID NO: 116910 - DNA, 122 bp, Homo sapiens
gctgtccccgctcccttctgcaggccccttcccttccagacaggaaaccagccccgattccgagccagctgcagcctagcgcccccgcctccacgccaggcccacggagtcacacttcactc

SEQ ID NO: 116911 - DNA, 122 bp, Homo sapiens
cacgcgcgcctccgtgcccactccccccacctcccacaccctggtcccctcatccgcccccggtgctggccccctggattgctgcaagtcccgcccgggccccccggccccgttgcaccccc

SEQ ID NO: 116912 - DNA, 122 bp, Homo sapiens
ctgaagccccctggccgcagtgggacagctttgtgctcggacaggcaggctagcagtcgccgtcccggagccccctggccgcagtgggacagctttgtgctcggacgggcaggctggcagtt

SEQ ID NO: 116913 - DNA, 122 bp, Homo sapiens
ccagtccctcttcctcccgtggcttaggacccccatcgcggattctaagatccttaggaccgacctggaggactgtgggtattaggtgtccaagaagaaaattcagatctgccgacgaccgc

SEQ ID NO: 116914 - DNA, 122 bp, Homo sapiens
gcttaattaaatctaattgctttgacagtgtttcattagaatttccattgtgtacctaagcgtgttgtaaggtcagatttggtgtgtgtttcatcatgttccacctttagagagatatagaa

SEQ ID NO: 116915 - DNA, 122 bp, Homo sapiens
gctcaaagaggaaaggcagttcgtgaccgtctggggacagcccctcagggtgcagaggtccgtgaagacgcagacatagtctccacccggagtcgggcgagtcctccaacccagcttcctcc

SEQ ID NO: 116916 - DNA, 122 bp, Homo sapiens
tgggcggccagaggctgggatctgcgaagttgaacccagaactaggagtggggcttcccccgccttccggtgaggggagggtgaggagctggagggaggggcgggagagaggcaaggggtgg

SEQ ID NO: 116917 - DNA, 122 bp, Homo sapiens
aggggttcaggttacagggtcccctcccctccccctctccagccagagccagcccttccccgccccggtgaccctcatggccagtggctctgtgctcatgggcctctggcccctccccaacc

SEQ ID NO: 116918 - DNA, 122 bp, Homo sapiens
cgccccgccccgaccaacccgcggggattttggcctcaactgaaaatgaaaccgggtaaacgcgcctggggctctcgccggtcgagggtctgggcgggtcccgcggcctcagggaggcggat

SEQ ID NO: 116919 - DNA, 122 bp, Homo sapiens
gcctcgaccaccagaacaacgccgccagcgtccagcagcagtgaggggcacaagctgcctcgaccaccagaacaatgccgccagcgtccagcagcaacgaggggcacaagctgcctcgacca

SEQ ID NO: 116920 - DNA, 122 bp, Homo sapiens
cccgtctgggatgtgaggagcgcctctgcccggccacgaccccgtctgggaggtgaggagcgtctctgcccggccaccccgtctaagaagtgaggagaccctccgcccggcagccgccccat

SEQ ID NO: 116921 - DNA, 122 bp, Homo sapiens
aaccgagctgcagcctccagtttcagaatagtgccttccataaaatctgtgggagttttccgtttatgttgcttgtttttaaacaatcttcttggaaaagaattcagtgctgttaatggatt

SEQ ID NO: 116922 - DNA, 122 bp, Homo sapiens
aaagtatttcttgattttatattttaccagtcgggactgggaaacaattgcctcttctaacgatgtaaatccctggatttataggttttctctattccatttcattcctgattgcaaacagg

SEQ ID NO: 116923 - DNA, 122 bp, Homo sapiens
ccgcgtgcggcggcggctcagtagcagcagcagcaacagtgcggccaggaggccgaggagcgcggcccaagccatcgcggggctggcggggctggcggggctggcggggctggcggcctggc

SEQ ID NO: 116924 - DNA, 122 bp, Homo sapiens
ttgctgggaaggacggaggccgaggaacacgatcaaaatatgtacgttcttggccgggcgcggcagctcacgcctgtaatcccagcactttgggaggccgaggtgggtggaccacctgaggt

SEQ ID NO: 116925 - DNA, 122 bp, Homo sapiens
tttcccccacgaaatatgcggtatcagaggaatgtccgttcacagctgggaaagcttggacgggctgcattcgcacgctccacacccctgggtctctgctgaatcctgccttagtgtctgct

SEQ ID NO: 116926 - DNA, 122 bp, Homo sapiens
gtgagatccaaacacttggctaaataataaacatcgattagacgtacacctaagagtggccgggcgcggtggctcacgcctgtaatcccagcactttgggaggccgaggcgggcggatcccg

SEQ ID NO: 116927 - DNA, 122 bp, Homo sapiens
ctcccaaccctacccccaccccctggaacctaacggcctgcagaagccaggaattctccccggactcctggagtacatcgccagggcatctaatcagtctgttttccatggtgttttcgtat

SEQ ID NO: 116928 - DNA, 122 bp, Homo sapiens
tgggtggtcagggacgcggtttaagctgagacttgaaagatgatggagtagttgaccaggcggtcagaggaacttggaagcgctatgattcgggatcccacagagagagattcaagggcacc

SEQ ID NO: 116929 - DNA, 122 bp, Homo sapiens
gtatgtctgccaaagaccccccagtgcagaggatgatgaatgaagatcctcgagccagcccggtgggaaagtttcgtcgcctacaaaagcgagggaaagggaagggaagttgggggtagggg

SEQ ID NO: 116930 - DNA, 122 bp, Homo sapiens
ccggagcattgggctgagccgccctttccaagctcacttctgggactgagtttcctcaaccggaacacacccatgaagatggatgatcatcccctagcccttctcagcaggaacctcatgcg

SEQ ID NO: 116931 - DNA, 122 bp, Homo sapiens
aggctgaggcaggaggatcccttgagcccaggagtttgaggctgcactgagccatcatggcgccagtgggctccagcatgggtgacaaagtgagacactgtctcaaaaaaaaacaaaaacaa

SEQ ID NO: 116932 - DNA, 122 bp, Homo sapiens
ctctgaaggatttattttttaatctgcgaactaaaggatgagtccaaattaacctagaaacgatggaaatcgtatcctaaaatgtgggatgcaccccatttgggaaaaatgaatggctctaa

SEQ ID NO: 116933 - DNA, 122 bp, Homo sapiens
ccgcttacatgtcacctctggagaggccatgtctgaccacatcagccagaccaccctgttcgttgctatcgttgcactctattggttcttattagatacttaccacaattcctaattctatg

SEQ ID NO: 116934 - DNA, 122 bp, Homo sapiens
ttaaccctgaaggatgtggcccctgctgctgtgtggttccgctactggctagggttagaccgcacaggctaaactaattctgaccggctaatttaaaaggagtgatggggtgagtgctttgg

SEQ ID NO: 116935 - DNA, 122 bp, Homo sapiens
tacactcatgtggcgccagaattccaggagggctctgaagtcacaggcgcaaactcaccccgattccctggtctccggttcagtcggaccggggtgttcccgaagaatccgcgttgctgacg

SEQ ID NO: 116936 - DNA, 122 bp, Homo sapiens
agttattttaatccttaaaacagagagcagggcacatgttctcaggacctcttgagactgcgcctcgggggcggggtggtggtggaaaaaagacagaaaacaaagaaaaaggctaaagggag

SEQ ID NO: 116937 - DNA, 122 bp, Homo sapiens
ggctgcctctgcgggggtgaggtagggttgggggtgccgaggccggaggaaacgccccagcgggtggagtgtccgacctgttgactgtctacagggaagggcacagccacccaacagcaccc

SEQ ID NO: 116938 - DNA, 122 bp, Homo sapiens
cgagttatcggtgtatacgctgacggtcatcaccctggagcgctggtatgccatcaccttcgccatgcgcctggaccggaagatccgcctcaggcacgcatgtgccatcatggttgggggct

SEQ ID NO: 116939 - DNA, 122 bp, Homo sapiens
tgccgcaaggggcctggactgcaggcctgacctgctccctgctccgtgtctgtcctaggacgtcccctcccgctccccgatggtggcgtggacatggttatttatctctgctccttcttgcc

SEQ ID NO: 116940 - DNA, 122 bp, Homo sapiens
gtcccacatgtcccagggaatcccaggtctgccctgagcttcctgtgtccttgggaaagtcggttaatctctgggcctcactgtcctcatcgctgagcttggggacttgtaacagatgattt

SEQ ID NO: 116941 - DNA, 122 bp, Homo sapiens
cggtgtgatgcacgaggcccgggtactcgaaggtgtccagcaggaccttggcggcgccctcgcagctgaggccccacagtttcctgaacgtctcccagcgctcccgctgtgcgcccaggtcc

SEQ ID NO: 116942 - DNA, 122 bp, Homo sapiens
ttcccttttaattaaagagctgcactccagctctccagtcataaaaggacagcagccaaccgctgtgggctgaatttggggctgcctttgagtcagcctgagctgatgtgttttctggaatg

SEQ ID NO: 116943 - DNA, 122 bp, Homo sapiens
ttccgtccgagcagctccagctggggctgggggtggcaagggaatcccccatttcctggtcgtcgagggtttcctggacctgggagccccgagtccctttctctcttcctgcaggcaagccc

SEQ ID NO: 116944 - DNA, 122 bp, Homo sapiens
tggctgtccccaaaagaataacaaggtgggggttggggcagagcttggtctatcttttcccgtatcagtgggcagcttacgtatcaaaaacttaaccgagacttgtaaattattagacatca

SEQ ID NO: 116945 - DNA, 122 bp, Homo sapiens
aggccagactacaggggaaaaaaatgtgcagaaaccagcaaccatattctccgaattcatcgcatgcttggagatccccaggtaaaaagttagcaaaacataccttgttcaaaacaactggc

SEQ ID NO: 116946 - DNA, 122 bp, Homo sapiens
cgctgctgtgggcgggcattggggcggggcgataccgggggcccactgtctggggaggggcgcgcgcgagcccagggccaacggacgcgcgggcggcgcgggcggcgcgggggcgctggggc

SEQ ID NO: 116947 - DNA, 122 bp, Homo sapiens
ggggtgggggtctcactatgttgctcaggctcaacacaactgttgcactatgggctcaagcgatctgcccgcctcagcctcccaaagtgctgggattacaggcatgagccaccgcgcttggc

SEQ ID NO: 116948 - DNA, 122 bp, Homo sapiens
catcagtggggggtgctgcgtatcccctttcactggggtggcttcttcactgaggagagtcgcgcctcagaggaactgaggtcctgcctgtgttcgacctggtggggggcactaagagcccc

SEQ ID NO: 116949 - DNA, 122 bp, Homo sapiens
gaaatgaagcactgataggatgtagctgcaccctgaaaatatttgacaagtaaaagaagccggacaccaaaggtcacaaactgcatgaccccatctatatgcaatatccgctacagccaaat

SEQ ID NO: 116950 - DNA, 122 bp, Homo sapiens
cgctcaaagccaagccgcatgtgaagcggcccatgaacgcattcatggtgtgggcgcaggcggcgcgccgcaagctggccgaccagtacccgcacctgcacaacgccgagctcagcaagacg

SEQ ID NO: 116951 - DNA, 122 bp, Homo sapiens
ccagtattcgtacctctatgtggaggaccggaaggaggttctgggtcagtttctgctgtacgggcacatcctcactccggaagaaattgaagaccatgtggaagatggcatcccagagaacc

SEQ ID NO: 116952 - DNA, 122 bp, Homo sapiens
cgaggactggccgaggggcgcgccccgtccgctgccacccgcgggaggagcctcggaaggcggcgcaccgcgccgcacactcagtccaagaacccgcctcgcgtcactgtcgccgtcagggc

SEQ ID NO: 116953 - DNA, 122 bp, Homo sapiens
tcctgtcggaagacggttgggcggcagacacaaaaggaggcagagaccccaccgcagcctcgggtcctgttcctcaggccaggacgccccactccgggagaccatatggaagaccggtggcc

SEQ ID NO: 116954 - DNA, 122 bp, Homo sapiens
gtcagtcacaccgttgccaccaaggtcccctgggtcggctgaggcttgggatccaggcagcggtggaaggtcgggctgctcaaggccggtatctaagcttctgccctgggacccagtggtga

SEQ ID NO: 116955 - DNA, 122 bp, Homo sapiens
cagagaacagagttcagccagcaccggctaacatcaccactcaatgtgcagacgtgggaacgacgtgtgagcagaaaacggcaggacttttagctcgtcatgactggtcatccaggccaagc

SEQ ID NO: 116956 - DNA, 122 bp, Homo sapiens
tgaaaacgtgagtagtccaccttgtagtggctcttctcctcgaagaccacaggctcaaagcggtggccccacaggatctcgctggccaggtaggagctgcgggcctgggtggtcatggccgt

SEQ ID NO: 116957 - DNA, 122 bp, Homo sapiens
atgccagttacggtgatgaatattgaaatagctacgtcctggttggatgggtgagttgctcgtggcaaaccattcccagtaccagaaaccatcctaggatcacctgctaccatgatggctta

SEQ ID NO: 116958 - DNA, 122 bp, Homo sapiens
gccagtcccgggtggggcccccgaacatggtggcggggcctgggtgggacagaggcggggcgcgaggcggagagaccttgccctttagaacaggcaaagggcggggccgggaccagacctgt

SEQ ID NO: 116959 - DNA, 122 bp, Homo sapiens
ggcctctccagctgcgcccgcgacgactcccgcgcacggaacggaaccactgggccgcagcgaccacaggggagttcttcgccggccgcaggttcaaagcgatctgcaatgagcgcctttag

SEQ ID NO: 116960 - DNA, 122 bp, Homo sapiens
cacactgtgcaacccccttcagtgctcacagcccacaggtaaggggactgggcaatggttcgaggctgccatttgctatggcatgggtacactatgagaggcccacagagaaggacccacca

SEQ ID NO: 116961 - DNA, 122 bp, Homo sapiens
gggacgcggcgtgtccccctgctccaccttcagcccttcttctccgcgggctagtgtcgccggattccctcagccagaagttgacttaaagaggccacgatcccggtgccagcttgcgcaat

SEQ ID NO: 116962 - DNA, 122 bp, Homo sapiens
tttatgaagaagttcttattttggaagaacttcttgctcatgagtataaagcacattcttcgttttaaaagtaggcaagctggcactggaaacattcgcttccatggcatccagtggccaag

SEQ ID NO: 116963 - DNA, 122 bp, Homo sapiens
taagttcaggttttaggtaattagacaatcaactctgcacataaggcatccagtcagttgcgaggtatgagttattagtggttcaataaaggccattaggattaatttaatatttcttacca

SEQ ID NO: 116964 - DNA, 122 bp, Homo sapiens
cgtgatccccctgcctcggcctcccaaagtgctgggattacaggcgtgagccaccgtgcccggcctacacatagattttcaatccatattagaaaggctaacaagggccatattatgtgtag

SEQ ID NO: 116965 - DNA, 122 bp, Homo sapiens
aaactgtttcaaccaagaggaacccagggagccctaaaacaactaaatgtaatgtggtgtcgtagttgggatcctcgaacagaaaaaggatattagataaaacccaaggtaatctgaatgaa

SEQ ID NO: 116966 - DNA, 122 bp, Homo sapiens
tgcacagtcattagatggtctgctaaaaaggcctgctagactttcgactaattacatcatcggatcatcatacagttaaaatcagttgcagggcactcatacacaactaaatccctgtgtct

SEQ ID NO: 116967 - DNA, 122 bp, Homo sapiens
ctgttaacctctcaaagatctgtagactagcttatattatctcattatccgagttctccccgctttcatctttgcctcctatatcccagtttcttcaccactgtagtatccacagtgccacc

SEQ ID NO: 116968 - DNA, 122 bp, Homo sapiens
ggtcggcgttccttttctcacttaaaggtgaggtgtcgagacgcgcccctggacagacaacgcccgaaggtccaggccactacgaagtccacggaggggcagctttcccctacgtgtaggcc

SEQ ID NO: 116969 - DNA, 122 bp, Homo sapiens
cgctgaggcagctgtgggcccggagggcctcggcgaagctgagatagaagaagccatcctcggacatcacgtctcccagaagctgcacggccggccggctcaggttcccctccccgagaaga

SEQ ID NO: 116970 - DNA, 122 bp, Homo sapiens
cttggagaatttccccagctccaatgtaaacagaacaggcaggggccctgattcacgggccgctggggccagggttgggggttgggggtgcccacagggcttggctagtggggttttggggg

SEQ ID NO: 116971 - DNA, 122 bp, Homo sapiens
gagcagtcacgggagtgtggccttcacttttggccagagacagagccaactcctagaaagcggagggagacagtgtcccaacctaatcaatggctcccatgaacgccagggaaaaaaaggga

SEQ ID NO: 116972 - DNA, 122 bp, Homo sapiens
aagaccatggaggtgacttcagtatccatagagctggaaaagaacttcagcaattttccccgacagtactttgccctaaggaaaatccttaaacagctaattggtgagttgttcccaaaagg

SEQ ID NO: 116973 - DNA, 122 bp, Homo sapiens
ggcccaggacggtccggatgtagccgtactcagctggggcgccgggggctgccatggggccggtgggggcgaccgagctgctcgcctgcctctggactcgcgggcgaagccgccacggagct

SEQ ID NO: 116974 - DNA, 122 bp, Homo sapiens
tgacctgagggctggggcagtgcaggcagctggcatttcagagccattgggatcctcaggcgacattttctcatcttccggagatggtggctttgaacattaaggcctcattaattctacct

SEQ ID NO: 116975 - DNA, 122 bp, Homo sapiens
aagaccgaactatgaccaccctatcttcaactggtccagaatagggctttgcaaaaattacgttctttctttctccgttaaccctgattggagaaacctgcccagatcttggctggtttgga

SEQ ID NO: 116976 - DNA, 122 bp, Homo sapiens
gaaacttggggcggagcttcgctgcctttcaggttttatgtacgctggcggccgccaggccgttcccggaagttgatggccttacagtcgtagaactgattggctgatcatgaccatgcagt

SEQ ID NO: 116977 - DNA, 122 bp, Homo sapiens
cctgtctctaaccctagtctggatggttttgtttctgtcccactttacagataggtacaacgaggctcagagaggtgaagttccttctaaggggccgtagagagtggagagtcgatcgctgt

SEQ ID NO: 116978 - DNA, 122 bp, Homo sapiens
accactgaaaacgtaagacattccttgcccctaaaacccaggagttccaaggtgaagccccgggtcagaggtgagcagagcgcggagggtccctggaggctgggcctgcaccccttggtggc

SEQ ID NO: 116979 - DNA, 122 bp, Homo sapiens
ccctccacccatcagtcgttggccaatggtcaggccacaaaagctggagttaggatcgtccgcctgggaagcaggacttttgctgagatgccaagagcacccgctgcaaagtttctccagag

SEQ ID NO: 116980 - DNA, 122 bp, Homo sapiens
agctttgtttcagcataggcggaagcctccactccagggcttggggtgggctcgggaggccgcccgccgtcggcctgactcacagcgagctcggcgctccctcttgtggcttctgtgttccc

SEQ ID NO: 116981 - DNA, 122 bp, Homo sapiens
gtgtctgggagctttgggagtgtccagggttcactcctttggtgaactttgacattggctcgtctctgagtcacctgaaggccaaagcccatgggcctgcggggccagacacatggcagcag

SEQ ID NO: 116982 - DNA, 122 bp, Homo sapiens
gaatgaaggctttatagggctcctcagggaggccccccagccccaaactcaccacctggccgtggacacctgtgtcagcatgtgggacctggttctctccatcgccttgtctgtggggtgca

SEQ ID NO: 116983 - DNA, 122 bp, Homo sapiens
caaggtctgttaagaacaagggccaagcttctagaccaccatccaattgcttcaggggaccggtcaaggggctgccctgactgagcctccggctcgagctaaatcatggtagaagttcctac

SEQ ID NO: 116984 - DNA, 122 bp, Homo sapiens
ctagccctattagttcatgcaaaatatgtttgttaaaagagcctggcacctctgttgccacgtgatctctgcacacagcagttcctcttccccttctgccataagtggaagcagcctgaggc

SEQ ID NO: 116985 - DNA, 122 bp, Homo sapiens
tcaagcccgcacaggcggtggcagggagccgaaggggccgagcgcagccttgcatccgtccgcaggcgggcccggcgccgcgcctcctggcggcgggcgggaccgtccaggacgccgccccg

SEQ ID NO: 116986 - DNA, 122 bp, Homo sapiens
gtgggggcagtatggcagtatggaagacctagaaagggacaaggagagctacaataacagcggtctaaatatatcctaggatgaaaaggtgaggaaggaaacaggcgcagaagtgttataag

SEQ ID NO: 116987 - DNA, 122 bp, Homo sapiens
tcgcgctgccgggtcctgaagggcccgcctgcagcccagcagttcgcgttcgcctacccgcgcgcgacctacctactcacgcggccagccgcggactccaggccagctctgtcttgttgctg

SEQ ID NO: 116988 - DNA, 122 bp, Homo sapiens
cttagctcagctggagcgagcggcaatcgcaagcccagcagcagcagggggtggagagaccgtagcacaatgaatgcagtggggcttttgcaatgacatcatccctctgtccaaacgtcccc

SEQ ID NO: 116989 - DNA, 122 bp, Homo sapiens
cggggactgcgattatgatgtgatagtcattctcatcattgttacctaagacattagccccggcaaccacagagagatattttccagctggttttgaggaagtgagctgccatgtactaggc

SEQ ID NO: 116990 - DNA, 122 bp, Homo sapiens
ccggtccacccggatatggacccgcccggcctgacaggctcacacgcacactccctctctcggtcttccgcacacgatgctgcgccagacgctcctacacagtaacctggaaattatcaccg

SEQ ID NO: 116991 - DNA, 122 bp, Homo sapiens
ggctctcgtggaggcagctagcgcgaggctggggagcgctgagccgcgcgtcgtgccctgcgctgcccagactagcgaacaatacaggtacgtctcgcaccgcccgctcccgccgccgccgc

SEQ ID NO: 116992 - DNA, 122 bp, Homo sapiens
atcatagctcactgcagccttgacctcctgggctcaaacaatcctcctgcctcagtctcccgggtaggtgggactacaggtgcacaccgccacacctagctaatttttaaattttttctaga

SEQ ID NO: 116993 - DNA, 122 bp, Homo sapiens
ggtgcgggatataatctcgtggtgtgccatgttttaagcccgtcggaaaagcgcagtactcgggtgggagtgtcccgattttccaggtgcgtccatcacccctttctttgactcagaaaggg

SEQ ID NO: 116994 - DNA, 122 bp, Homo sapiens
tgagccaccacacccagctgacattgggcatttatggtacaaaacctccctcaggtacaacggctccaaaagagccagtttccagcattgaattcatcgtggacttacccatgtgtggttct

SEQ ID NO: 116995 - DNA, 122 bp, Homo sapiens
gaaaggcggaagctttaccagctctaacacccaaagagcgacgggcttttacgcagcccgcgggccccaattccctgttacttaaggcagttcagcttgtcctgcagttcacggtcaaacat

SEQ ID NO: 116996 - DNA, 122 bp, Homo sapiens
gagcttcaaagttcccctctgtctgtggggctcctgatcacaccatctgcctggatgcctcgtccgcattcacccttcagactgcccccagggcctccatcccaggacatgcctcccctgcc

SEQ ID NO: 116997 - DNA, 122 bp, Homo sapiens
cttatcggccttctgcggtctgggcctgagctttgtggtctggcggggccttggccaggccgtccccacttcctaccacgctcccgccttcgcccctggctctagtctttcctttgacctaa

SEQ ID NO: 116998 - DNA, 122 bp, Homo sapiens
gacactctactttagtattgcccagggggtgctcaacaatcaccaatccccaaggaatcacgagaaagcccaaacttttttgacgccactcccagcctcttccttgtgaaggctttctcaga

SEQ ID NO: 116999 - DNA, 122 bp, Homo sapiens
tacccataaatacagtgtgattgggagaattaaatggtgttttaggtagatagatatagacgtatatagtagctaatagagaacttgaaccattgtgagctgttatttctcttccatttcct

SEQ ID NO: 117000 - DNA, 122 bp, Homo sapiens
ccccggggaaatggggcttgcagcaccggctcggagagcaccacgggcttcctctggcctcgggaaaacatgactttcaaaaattgagtctccacttagcaccgcttcctgtccaggcgact

SEQ ID NO: 117001 - DNA, 122 bp, Homo sapiens
gtatttggggaaataaatactgtctgatggagtagatagctttttcatattttgtatctgcgaatgcatattatcagctgagctgacatgactatgcaattataaagaagtataaagcacag

SEQ ID NO: 117002 - DNA, 122 bp, Homo sapiens
aaattagccgggtgtggtggcacgcccctgtaattgcagctacgctggaggctgaggtggcggaattggttgaaccccggaggtggaggctgcagtgagctgagattgtgccactgcactcc

SEQ ID NO: 117003 - DNA, 122 bp, Homo sapiens
tcatgcccgtgtgtgcagggttgttgcccagggtggggatctggttgtgattgcggggaacgctgtacagcgcctcggcgatgtccgccgctcgcttcaagatgatctcctgcagcaggagc

SEQ ID NO: 117004 - DNA, 122 bp, Homo sapiens
tcgagcatcttcgagacacccgcgccaagtctggtcccgggggtggctgccgtcgggccccgcctgcgctcctggctcctgtccttgccccgacgcctctgccaaccagcacctcccttttc

SEQ ID NO: 117005 - DNA, 122 bp, Homo sapiens
acgtccaaggcagtccctggcagcctgcagtatttgggcctgagaagggtgaggctggcacgattcctccccaagccttcatgggggcttttctgcaagtttaagctagggcccagcaagac

SEQ ID NO: 117006 - DNA, 122 bp, Homo sapiens
aatggtcccttggttactaagcaacaagttctcaacctgtaaaattccacaagacagccccgtgaacttggcgtagacagagatgggacttcagggaaaacgaacgggtgtgagacacagcc

SEQ ID NO: 117007 - DNA, 122 bp, Homo sapiens
cagtgaggcctggagagaccaggtggcaggaagggccctgctggggccagagcaagggcacggaaggcaggtctcatggagcagggaccgtggaggggacatgggggacacattagggatgg

SEQ ID NO: 117008 - DNA, 122 bp, Homo sapiens
cccatacaagcactcctgatattgggacccattagtctgtgctcagctctgggatgggagcgccctctggtggctgtggctggaaataaccagaggtccttcttccgggagtctgatgctaa

SEQ ID NO: 117009 - DNA, 122 bp, Homo sapiens
tcaggggatgcctgtcggcccgcgaccgactcggagtactgggactagctgcccgcacagcgcagctgtctctggcctggccccactgctcccccgccacgcctctcggcctccgtccgtcc

SEQ ID NO: 117010 - DNA, 122 bp, Homo sapiens
cacctgggccgacgagaccaaggaggtcatcacggataacctgcccggctccatccgcgccgtggtcaacatctttctggtggccaaggcgctgttgtcctatcctctgccattctttgccg

SEQ ID NO: 117011 - DNA, 122 bp, Homo sapiens
ccatcccagaggccggctgtggggcttgtggaaagggtgtctgcagaccctggggctccacggccccacttcaggccacacagccaaagtcacggggcctgctgaggagcacccaagcatca

SEQ ID NO: 117012 - DNA, 122 bp, Homo sapiens
ccgggaagcggggagtatggtgggggtcctggccatggcggctgcagctgctccgcctcccgtgaaggactgcgagattgaggtgaggttgagtcgaggatctgttgagttccttcctctat

SEQ ID NO: 117013 - DNA, 122 bp, Homo sapiens
cagaggacgaaagctttgccaggtaataatgcctgggctgttctgatccggattaatgcccgttgcgtggccgcaggtgctagacttgggaaggcttccttcccacaggttctgaaaagtgc

SEQ ID NO: 117014 - DNA, 122 bp, Homo sapiens
tactgcgcatgcgtgccgtgggcccgggaggagtttgccggggaggagtgggtttggaatcggggttaaaggaaagagatccagatgtcgcacgtgacctaagtgagactgggcgagataaa

SEQ ID NO: 117015 - DNA, 122 bp, Homo sapiens
gacggaagcgaaagaaactcgagcgacgggggttgagttccgggggaggttgagttcctgcggtcaaaggcgccgtccgcccagccacgcccaggggccctgttggctctctagggttctcc

SEQ ID NO: 117016 - DNA, 122 bp, Homo sapiens
cggcaagagcgtgttcctttgctctgctgcccttgtggaatcaatgggaagttccttggccgttctcggcctccactcccgcagctgatagggggtgcaacgcggctgcttccctgtctggg

SEQ ID NO: 117017 - DNA, 122 bp, Homo sapiens
aagaaaaaataaagtttgagattaatccccctaccatactccagatatcatgtacatgagcggcagagtgttaggaagttggagaggctaggatctctagtttggaaaaaatagagttttaa

SEQ ID NO: 117018 - DNA, 122 bp, Homo sapiens
aggcgctgggttttttttcctaagcgctttttgggggtgcttatgagctctggaagaggccgggaaattgaccctggcagcagtcagtgggtgtatctagctctacgggaatgttgaaactt

SEQ ID NO: 117019 - DNA, 122 bp, Homo sapiens
cgcaagggaactagatgtcgcttccttttgcccagaaaatagtagttaatattctgccaccggtgcttccacctggagggaagggaaatcgggaagacgggattggggcaagtgtcccttcc

SEQ ID NO: 117020 - DNA, 122 bp, Homo sapiens
agtcaattgcccctttgacagttttggtctctgtaggtcttaaacatccaaagctgggtgcgtaagcctagacaaggtgatatgtcctactcatttcaaagataatgctttaataacctttg

SEQ ID NO: 117021 - DNA, 122 bp, Homo sapiens
tctgaagagaatttcctttctctgccctcccctttctttgcttgtctgggcacagcctggcgctgctgtgtgatgagttggtgccaggtgttcagaggccacccctccccagtggctggcct

SEQ ID NO: 117022 - DNA, 122 bp, Homo sapiens
tggctgaagcggccacgggctttctggagcagctcaagtcctgcatagtttggtcttggacgtatctgtggaccgtgtggttcttcatcgtgctattcctggtctacatcctgcgggtgcct

SEQ ID NO: 117023 - DNA, 122 bp, Homo sapiens
tctcacgcgcgcaccgccgcggggcggcccaggtagccgggggatacgcggccggcagggcggaggcacttttaaaggcgattatggtgccgtctgactcgacgcttagtttcccctgagga

SEQ ID NO: 117024 - DNA, 122 bp, Homo sapiens
gctggagggggaccggcgatcagggaaaccttactcctcgcaggcttcaacctgctggggcgtgtttacgtccgcaaagtccgataatatattttgtccccacttcttaggagctgattctt

SEQ ID NO: 117025 - DNA, 122 bp, Homo sapiens
tataattcaaatataaagtattcaggggataaacatttaagaatttttttttaggggttgcgttgctctctggtagaggcgtgcaggtgttagccacaccctctgagctgggatgagctgtg

SEQ ID NO: 117026 - DNA, 122 bp, Homo sapiens
attgtagtaaaactagttaacactttggccatgaaactcaaagatacttgaaaaacctctcgatagcactttgagtcacttaattctgacaaatattaatatgtcatccatgcttgcccagt

SEQ ID NO: 117027 - DNA, 122 bp, Homo sapiens
ggtccccatgcgcttctcagatgtgaaagccccttgctggcctccacagaccctcacagacggcctcacaggccaacacccagcggctgcactgcccatggtcactatctctgcagcccgcg

SEQ ID NO: 117028 - DNA, 122 bp, Homo sapiens
gccgcggaggtcgcccaggtgggtggcagcctgcgctgcgggcgccccgactgatcctggcgcctcccacctcggggctccagcccgggcctcgccgtgcgccccagccaatctccggccgc

SEQ ID NO: 117029 - DNA, 122 bp, Homo sapiens
gcaatgaaaaaagtgcctagagcatcagtagagcacggcgctgaaagttttagagatcgtcgccccctcgccccttgcagctctatcccctccattctctatagctgattcctcagcctatt

SEQ ID NO: 117030 - DNA, 122 bp, Homo sapiens
aaaaagccgcggtggcctgggccaaaagccatggcggcaaaaagccgcaaaaagccggggcggcagggcaagaagccacggcgggaaaaacctgcggcggcgggggcgaaaagcagtaaaaa

SEQ ID NO: 117031 - DNA, 122 bp, Homo sapiens
ccagccccgatcctgcttctgcaaggcctcccctcccatggtggcgctttggtgccagagcgcgtcggcgtggctccctagcgtctgcctctgcagctgcttggcccccagccgcctcctcc

SEQ ID NO: 117032 - DNA, 122 bp, Homo sapiens
gcgaaatggctgtggcttcgtaccggtgactcgcgtcttggagattttaacactcctcaacgtccccaagggtgagggggtccaagggtggcgactatcccaaaaggcggggactcttcggg

SEQ ID NO: 117033 - DNA, 122 bp, Homo sapiens
ggacttccatcggtgccgttcactgctggatcccggcacccgcacagcgctggcccctggcggagcctcaaggacccttgttgaatgaatgaatgaaagcacccacctcacgtcattgccgc

SEQ ID NO: 117034 - DNA, 122 bp, Homo sapiens
gaacttaagagcactcatacttttgagtgacacatgcaccccaagggaattccagataaacgacttcaggtataatgttatccctttcctcctggctgttatacatgggaaagtcccttttt

SEQ ID NO: 117035 - DNA, 122 bp, Homo sapiens
agagcaggaaagagcccgacccacctcctcggttcttccagggaaccccttctcggagggcgccctgggcctccgcgccatattcctggtcccccgctcccggtgactccggctccctgggt

SEQ ID NO: 117036 - DNA, 122 bp, Homo sapiens
ttgggtactcgagcttgaactcagtgtttgcagcatgagtggcagatgtttagcaatgttcgctaaaggatctggggttacctttgcctcggtaaggtcagcaaaaggccttttatttgtac

SEQ ID NO: 117037 - DNA, 122 bp, Homo sapiens
gttgtccccaccgtgttccctgctgcagtgagtcccatgcaggggtggtgtcttctcttacgtgggcaggtgcatctgggacaatcagcaaccattctcttctcagaggaaagaggagaggt

SEQ ID NO: 117038 - DNA, 122 bp, Homo sapiens
cggccacggcgcctcccgccggtccttgccatctgaaggccgggaggagtggggagtcggcgcttgcaaagatacactcaagactgcagacagtaaatcaattttatttgtgttcacagaac

SEQ ID NO: 117039 - DNA, 122 bp, Homo sapiens
cctcagcgaccctgaagagtcagctaagctctctgcgggctaaggagacggtgaaggaaccgggactaactggggtaggggttagaaggcagcccgcgagtgggctacgaggggagctgggc

SEQ ID NO: 117040 - DNA, 122 bp, Homo sapiens
agggctcaggaggaaacgcgggctcctatatccccagctacacatcgtggtacccttcagcgcaccaagaagctatgcagcaaccccaacttatgtgaggttgcccgcccgtctccttcttg

SEQ ID NO: 117041 - DNA, 122 bp, Homo sapiens
cagataaaatctaggtttaaattcttactctgccacctggtagttctgtgatattaggcacgtgatgtgaatgctctcaatctgttatttggcttctatgtcaggaactgtgctaggtgttt

SEQ ID NO: 117042 - DNA, 122 bp, Homo sapiens
gattcggtccgggacaccaggactctgcttggaggcctgctgttgcctaaaaaccccaagcgcgggcctcttcaaggccccaggttcgagatccgaaccctccagtaatgtcctcagactcc

SEQ ID NO: 117043 - DNA, 122 bp, Homo sapiens
ctggagatccagaaattggtcaccgaattagaaagtcagctgcaaaggagcaaagacacacgtggggccccgagagagcttgcagaagctgagtcggtgggcagggtggagctcggcacagg

SEQ ID NO: 117044 - DNA, 122 bp, Homo sapiens
tcaccctagctggacctggtaagcttgtgctggggaacgctaactccagcattaagcgctcgccgcctcggtcctgaggagggcagtgacgggtacggccgctcactcccagctcggcgcta

SEQ ID NO: 117045 - DNA, 122 bp, Homo sapiens
ttttaatagagaaggtttttacttactgaaggttgaagattttgtatgtgtttcccatctcgcagcattgacatgtaattgtagggattttaaaggacatggtattactttcaattgcatca

SEQ ID NO: 117046 - DNA, 122 bp, Homo sapiens
tgcactgtgaagctctcaccaaccccgtagttgtgtctgcagtaggtgtccaccgcggcgcgcctgtcttccaggaagtccttctggctgttccagtactcagcgtcaggccgccccagctc

SEQ ID NO: 117047 - DNA, 122 bp, Homo sapiens
ggttttgacaaatgtctgatggtgtatccaccactgtggtgtcgcacagaatcgtgtccccgtgtatccaccaccgtggtgtggcacataatcgtgttatatgactggaattagtatgtagc

SEQ ID NO: 117048 - DNA, 122 bp, Homo sapiens
catgccatggccgcctgccggcgcctggttgaagatgggatgcatgcccttggtgccatgcgtgcccttggggaggctgccagcttctctaatgcctcatcagccagtgctcctgcctacag

SEQ ID NO: 117049 - DNA, 122 bp, Homo sapiens
gggcggggaccggtctcgccccgccgcgctcgggctccctccccggcggcccctcctcggcgaacagcctttcggcgcggggggctgttaaaccagacaccccaggccacactcctctcgtt

SEQ ID NO: 117050 - DNA, 122 bp, Homo sapiens
aagagagcgaccaagaggccgaacgcctcggagaagagcttgtggccattgtggagtccccgctgggccctgtggggcttagagctgcgggcgacggcagaggcggcgctggcagcggcaac

SEQ ID NO: 117051 - DNA, 122 bp, Homo sapiens
gacgctttgcatgcactggctcattcagccttagagtagccttaggtttgggactgttctcgttgccttggtgcagatggggtagctgaggtgtgatgtggctgaggtgctcactcggggtc

SEQ ID NO: 117052 - DNA, 122 bp, Homo sapiens
tacccagggaacctaaagtgctgcttggtgtaggtgggagatgattaatctctccgtgcacgataaaaagacagagctgccacccggaattagtctgtttatgtagaatgaggacagcccca

SEQ ID NO: 117053 - DNA, 122 bp, Homo sapiens
cgaccaccttgtggagttaaactccgtaaccagggagcaccacttccgctgacgtcattacggcgacacgtggatccaagatggcgacggcgatggtgagtgaaggagactccgggagcggg

SEQ ID NO: 117054 - DNA, 122 bp, Homo sapiens
ttttcaaacgttatttgtggctttatgcataacttactttgactttatcagtcaatgcatcgcagtatgggaatgatttagccctctgtggaaatgcagtggctttttagaacaattaagca

SEQ ID NO: 117055 - DNA, 122 bp, Homo sapiens
tcctcccgctgaagggagtaaatccaggcaggtctggggctgccgggcgggcacctggggcggaggagcctcgaggctgtggtcctgcagcaccacctgggggcggcgagaagagtagccgc

SEQ ID NO: 117056 - DNA, 122 bp, Homo sapiens
ctgcaagggcatgttgtgagagaaccaagcgcactgtgtcctcagggcagcaagaacagacgtgggtccccatctgaagtggggggcagcccaggaggccttcctggagttggtcttcctga

SEQ ID NO: 117057 - DNA, 122 bp, Homo sapiens
acagcccagcgacctcgccccgccctcccgcagccggccccgccctcccgcagccggccccgccctcccgctcgcggccccgcccccaggagcttggccctccgccaaccacaccgtctggc

SEQ ID NO: 117058 - DNA, 122 bp, Homo sapiens
ctgagctgctctgtgaagaatgaaccggttttcaccaggcaggccaggagtgggatagggcgaggcatccaagaaacagcaagaggcaggcagagctcagcacacgtttttccagactgtga

SEQ ID NO: 117059 - DNA, 122 bp, Homo sapiens
ctgccctcccccgctgtccggagcacagtcccgggagggcggatgtcccctgggaagatgcgcgaggagagcgactgggaggcagctagcagcacctgcgtgtgggcaacacgacccgaggc

SEQ ID NO: 117060 - DNA, 122 bp, Homo sapiens
cagcgcctcgcagcgcctcccgcccgcggcccctcctccgctgcgggctcccgccttccccgccccttgcagccgcctcccggcctccgcaggtttccgaggttcccaccccgcccccgcgc

SEQ ID NO: 117061 - DNA, 122 bp, Homo sapiens
cgctgtgcccgccctcgccccgccccgcgccacccggagccccgccccctccgggaaccccgccctgcaccgccgcgtacccgggtctccaagccaacccagctccccaagccccgggaccc

SEQ ID NO: 117062 - DNA, 122 bp, Homo sapiens
cggggagccacagcagtaccagagcgcgcagtaaagcacagcattccaagttgttataaacgccctgagcccgaggccctggacacgccccccggcgcccattggcctgctcgacggcggcg

SEQ ID NO: 117063 - DNA, 122 bp, Homo sapiens
ctccggctccagcacgtccaggggagacatttcaggaggtgtgggcagcccgtacgggtacgtgtccacactgctcggggtgccgccgccgccaccaccagccggcccctcgtggtagcagc

SEQ ID NO: 117064 - DNA, 122 bp, Homo sapiens
ccaatgctcaaccccatcatctatagcctgaggaacaaggaggtgatgggggccctgacacgagtgagtcagagaatctgctctgggaaaatgtagaaacattttctacctaaggtctcagg

SEQ ID NO: 117065 - DNA, 122 bp, Homo sapiens
ggtgcacaataagagagacagatcctgctgccaggggtgacctggctacgacatctaccccgtggatgacactggcctctgttccacatgtcagccatcctcttcagtggctgcgggcatgc

SEQ ID NO: 117066 - DNA, 122 bp, Homo sapiens
tcatcacagtcctcgggagtgggttctgtcattcccagttataggagaggacgctgtggccgtgcagatagagagcctgctgctcacggttcctcagtaggggaagagaagggtgcacctgg

SEQ ID NO: 117067 - DNA, 122 bp, Homo sapiens
atgggtctgcaggaccatgggaggctgaagaaacaagctagacagccctgagctaacccacgtttagtgattaataacacactggttacaaaagggtggttgttctatttaagaatgagtaa

SEQ ID NO: 117068 - DNA, 122 bp, Homo sapiens
agacaacgtagccacttcatactgggaacctcgtcggggaaaccaaggtacagcagtcaccgaaatggtgagcagaggaacggactccaactctgccctttcatttcaaggctctcggccta

SEQ ID NO: 117069 - DNA, 122 bp, Homo sapiens
tgccagcgactttcaaccagatggatggccctccggggacacagtgctgctgactgtgtgcgcatttatttgacagtagccaggaagtggccattctttggtgccaagttgtttcttgcaaa

SEQ ID NO: 117070 - DNA, 122 bp, Homo sapiens
gattatttcggactgtgactcattctagcaatgagtaatgtctaccaagaatcaatgagccggcgcggtggcgcgcgcctctggtcccagcactttgggaggccgagatgggaggaccacct

SEQ ID NO: 117071 - DNA, 122 bp, Homo sapiens
tcactcacgtatactttatttctcagttaaacctcccttcactaggagaaataactctaacgctgaaagaccccagaaaatatgcactcatgatagcctgtacttatgagggttgtcaatta

SEQ ID NO: 117072 - DNA, 122 bp, Homo sapiens
ggccatgctgcccgagacgcagtcgcactcccccgtcctcgttgccaaacccggagccgccgggaatgccctgaggagccagaggcacaagacccagattgccgccccgcccccaatcgagg

SEQ ID NO: 117073 - DNA, 122 bp, Homo sapiens
aaggttcgtcccagccctgggtctgggccaggaaggccggggtagcccctcagtcttccccgccactggcgcgtctccctgctccaccatcctaacccggttcccccacccccacccccaca

SEQ ID NO: 117074 - DNA, 122 bp, Homo sapiens
aaatgttcacgtccttcctcctgctgcaggctcaaacccgcagacagctcctcccctactcggtatgaaggttcagtctggaatttctgcagcgtgaggttctccaaaggacagggagaccc

SEQ ID NO: 117075 - DNA, 122 bp, Homo sapiens
cctgcacgcgcagtacggctcccccacctacttctatgccttctatcatcactgccaaagcgaaatgaagcccagctgggcagattcggcccatggcgatgaagtcccctatgtcttcggca

SEQ ID NO: 117076 - DNA, 122 bp, Homo sapiens
ccaataaaaactgctctctgggactccaactatgaagagtttggagctctgtttagtattcgaacgaagggagggctggagaaagagggtggttgtgatagtgaaaatcgctgctgcttaga

SEQ ID NO: 117077 - DNA, 122 bp, Homo sapiens
atatttcgagtgctcagagtctaggctccattcacacatcagaaaagcagcaagaaatcacgtggtttcaacacttcccactaggagagaggctcctcctggccattttcagcttccatttt

SEQ ID NO: 117078 - DNA, 122 bp, Homo sapiens
taatttgttttgacccagaatctgatgcaacaacacacatggtgtttgattgtcatgtctcgtggttgtcatgtctctttattctcctttaattgggaacagttcttccatctttcttcgtc

SEQ ID NO: 117079 - DNA, 122 bp, Homo sapiens
ggaattaggaagaggaatctgggccggtaacctgaatatccaggtcagtttaacttctcacgtcaaagaaaatactgctttactataagcaatgagaggtccaagattcagtttctaccata

SEQ ID NO: 117080 - DNA, 122 bp, Homo sapiens
acggaggggaaccgcagagccagaagagcacggagcagcaactcgcagcccaattggtgacgctgcaggtgcttgagcgggaccctgaggtctttagtaggggcggagcagcagcgtgagcg

SEQ ID NO: 117081 - DNA, 122 bp, Homo sapiens
actgtattgccatggtctgaaaccaagccctcagcaacttcagggtctccctgtgtaccccgtttgacttaccttcttcctcctactttcttctaggtttgttctttgtgattaatttgttc

SEQ ID NO: 117082 - DNA, 122 bp, Homo sapiens
cccgggctgcacggggaagcgccgggtggggtgggccctcgtccatctggagttcccacccgcagggaaagggcggcctgaggagggggccacccggcagcagcagtcgccctgcccccgtc

SEQ ID NO: 117083 - DNA, 122 bp, Homo sapiens
gaaaccattttaaaaactttaatttccttacctgatactaataccagtatgatttttagacggaaaaactaagagtaagatttaaaccaaagatagaggtgttcctgaaatgtgaatttgtt

SEQ ID NO: 117084 - DNA, 122 bp, Homo sapiens
cagcctggccaacatggtgaaaccccatctcctaaaattacaaaaattagctgggcgtggcggcacacacctgtaatcccagctaagtcggcaggctgaggaacgagaattgcttgaaccca

SEQ ID NO: 117085 - DNA, 122 bp, Homo sapiens
gtggggaacctgggatttagccatgggacctgtggaagggttttgggtcggggtcctgaccgtctagtctgggttctcaaagatggttgggacagtgggcaggcttgcaaagaccgaagagg

SEQ ID NO: 117086 - DNA, 122 bp, Homo sapiens
taaaaacacgctggtgattcaagacaggaaatcagaatcctttaggatttcgatgcttaccgtgtggtccatggatcagcagcagcagcagcaccagcaatgggagcatgttggaaatgcag

SEQ ID NO: 117087 - DNA, 122 bp, Homo sapiens
agcattgcttctgctcgtgaagtgaactccctctgatgccattgccagcaacctcgacaccggaagcctaagccagcacaggtgggcaggcaacccaggacgtaggaaaaggggccagtggt

SEQ ID NO: 117088 - DNA, 122 bp, Homo sapiens
cttttctgcaacagctttgcaaggaggtcatatcttgcaggctcctggcctgggagggagcgctcaggcctgcagtggggcagagggacgtctgttttgtccttccacttcaagctcctgga

SEQ ID NO: 117089 - DNA, 122 bp, Homo sapiens
gcagggatggctgttgtttaaccacattgctctagggagccagtgcttccacctggagcacgatcagaatcacctgggaggcttattcaaatgcaaattgccgggggcctcactcccagagt

SEQ ID NO: 117090 - DNA, 122 bp, Homo sapiens
tgattctcttgcgagggtctttgagagttgcggtgttagccaatagcgtaagatagcgcacgcgcagtgctttccagtgcggtgaatatttgcgtttagctttattcttgtgcttgttttaa

SEQ ID NO: 117091 - DNA, 122 bp, Homo sapiens
ctagtgccctggtcgagacggttctatccttttgcaaagaagccggaaagagctgggtcccgggggcgggggacagactgagaggccaagcaggccagtcgtgacgacagccaggcccttag

SEQ ID NO: 117092 - DNA, 122 bp, Homo sapiens
gcaaaagcggaccgtttttatgtccagggtgaggctcttatctggcgcccctgacgtattcgcagtagtgtcattgttaagaagaaagtgtattcaggccacccagtttgtgtagcgagaag

SEQ ID NO: 117093 - DNA, 122 bp, Homo sapiens
gcacttcagcctgagcaacaaagaccctgtttcaaaaaaaaaaaaaaaaatcagctaccacgcagaaaaccaaatgtttattgcagcccatctggagcttcagagccatagaactagagctg

SEQ ID NO: 117094 - DNA, 122 bp, Homo sapiens
agctggaagtgattcacacaaaaccaaggcataaaatgaaattggatccatcaccagtcccgcagcaattttctccagccctatttgatgggaaaactctttccattttccttttaaatctg

SEQ ID NO: 117095 - DNA, 122 bp, Homo sapiens
ccgctccacacctgagctgccgccaagctaactcaatccgagccggcgcatttgagaaggcgcctgtgagggtcgctcctcagccgccgcgctcccactccgcgtccccactccgcgccgcc

SEQ ID NO: 117096 - DNA, 122 bp, Homo sapiens
attccaggagtaaataaagcttgaaatccgccgtcgccaccaccgtttctttacaaaaggcggggaactcaagctccttaaccaagaaaccagaggcgaagtgacaaagtccaggtggctca

SEQ ID NO: 117097 - DNA, 122 bp, Homo sapiens
atgccccgaggaacggcccctgcaaaagagcagcatgatccgcaggctggtggctggcaccgctccacccaacaaggagattagtatcctaatctccgcggcactaatgatttaggtgctgc

SEQ ID NO: 117098 - DNA, 122 bp, Homo sapiens
acacggcaccctcacccatactgtcatcaataaagagctttgctatgttctgaaaaggcgcgtgccgcgattccatcacacaggctgccgcgtccagaggatggcagggggcgaggcgaggc

SEQ ID NO: 117099 - DNA, 122 bp, Homo sapiens
gagctcctggggtcaggggaaggttgggtggccagagatgctgcctctaccctaagtcagcgtcacccatgctattcccagcagctgcatttctccactctgtaattacaaatgaaactggg

SEQ ID NO: 117100 - DNA, 122 bp, Homo sapiens
ggaagactcacccatctgagtagggaataaatataggataaattgttggcagaaagctttcgatcggatgaattttctctgagcgaaaagccaagctttctctaagtcatttttacccacat

SEQ ID NO: 117101 - DNA, 122 bp, Homo sapiens
cggagggagccggagcctggcctagggctggaactcccgggtccgcgcgaggtacggggacggggacagccagatccccaggcccgaggttccccgtcccacgcacactccttcccccttac

SEQ ID NO: 117102 - DNA, 122 bp, Homo sapiens
ataaaatgggaatagtaattataatagcctacgcttaccaagcacatgtgatctatgccccgtgcttgagcattttatatgcttttaatcatccctggaagtatgaaccatgattatttcca

SEQ ID NO: 117103 - DNA, 122 bp, Homo sapiens
aatgagtaacagggagggtcctgtactctcagaatctcccaactcggggtcagggggaagcggtaagtggaatgccccccgcccccccacccccgcctctttctcacctcctggtcccgacc

SEQ ID NO: 117104 - DNA, 122 bp, Homo sapiens
gccgggcaccgtctgccgcccgcctctgcgtgcaagcctggccgggacccaggcgcagctcgctcttcttgagtgtcttgtcttgctcactcagcccgcccgcgcggccgcccgaccccgcg

SEQ ID NO: 117105 - DNA, 122 bp, Homo sapiens
ccgtccagcattttccagagcttcctgcagggctgcggcagatgtagaggccggcatcgccgcgcccaacaaagaagacggcatctcggaaatcgtagacaccagggtccagaaaaagtcaa

SEQ ID NO: 117106 - DNA, 122 bp, Homo sapiens
gctttttcgatgctcacttacggcccccagcagagagcacctcagcaggtgctccaagaacgatgttgccttggaaaggtagcgaggccctgaaacacagagaataagggcaaagtctgggc

SEQ ID NO: 117107 - DNA, 122 bp, Homo sapiens
gtgatggggcgatgacagtcgcgagcgggcaccagggggcaaggctgaggagcgctgagtcgccagacccagagagccacccacctggagggacgtgccgccacccgcgccgccggagctcc

SEQ ID NO: 117108 - DNA, 122 bp, Homo sapiens
caccagggaggagggggctatgaggtcatgcgcgcccaatcccgggccgcacaggcctcgcgctgctgctccccggcccccgccccaacttccagccccgtgcgggctggtgtgcgccgcag

SEQ ID NO: 117109 - DNA, 122 bp, Homo sapiens
gggtcgagaccttgactctggccgtgacgccgccacggtactgctcagcccctctgccctcggtttcttatctgacctgtaattgtgaagagctcacctttgctgacatcttgaggcccacg

SEQ ID NO: 117110 - DNA, 122 bp, Homo sapiens
gatccttgccatctgagacctctggtgcaggaagttggcctgccctgagaggctctgaggcgctcacttcacacttgggaggatccaggccggggcaccatctctgctgagtattcgctctg

SEQ ID NO: 117111 - DNA, 122 bp, Homo sapiens
agccaagcacaggctggtggtgcttgtcaaggacaatggcgagcctcctcgctcggccaccgccacgctgcacgtgctcctggtggacggcttctcccagccctacctgcctctcccggagg

SEQ ID NO: 117112 - DNA, 122 bp, Homo sapiens
ttggtaatggttatcaaagctactgtttattaagcgttttctctgcaccagggaggtagtcgaaggtgctatcttacttctgaagatgctgaggcttgaagacattgattaacttaccaaga

SEQ ID NO: 117113 - DNA, 122 bp, Homo sapiens
cctcggccagtaccctccctgggaccttgcccaagttcaaagcggaggccagtgagcaggcggcaagggggcggcaagggggcgcccgggccatcccgaacccgttccccgccttctgcgcc

SEQ ID NO: 117114 - DNA, 122 bp, Homo sapiens
gccacggccactgtgctggtgtcacttgtggagagtggacaggcgccaaaggcctcctcacgggcgttggtgggcgctgtgggtcccgatgctgcgctggtggatgtcaacgtatacctgat

SEQ ID NO: 117115 - DNA, 122 bp, Homo sapiens
ggtcgaggtgctaactgtgcatcttggcatctcccctcggccacagggttggaagcccagcgaggctagaggccagtcccaaagtttccaggcatcagggctgcagcccaggagcctcaagg

SEQ ID NO: 117116 - DNA, 122 bp, Homo sapiens
agggagcgtgggaacacgtgagcctctctgcacagggaggtcccaggactgacaccgacacggaatctcctcaccttccacgggtccctcgggtccccaaatccaaactcacgccgggaagt

SEQ ID NO: 117117 - DNA, 122 bp, Homo sapiens
ggtggcctggaaggcgtgcaggagcagggtggtgtaggcactgtgaggcgagtgtccgggcgtactcagcttattggctacagcaaggaactcggcctgcacttccactgggttcagcagca

SEQ ID NO: 117118 - DNA, 122 bp, Homo sapiens
cacaacccatctgaacccagacactcccttttattaattccggggctttagataaactctcggccaattgctaatcagaaaatctttgaattcacctttgacacggaagcccttcttcgtcc

SEQ ID NO: 117119 - DNA, 122 bp, Homo sapiens
acccgcgcgccgaaggccaggcctgggcggagcgcacagcgctgggcgctggggaggctgcgccgcagcacccggttggtcaggaccaagtgggcccgaggcggacgtgagaagggtcgggc

SEQ ID NO: 117120 - DNA, 122 bp, Homo sapiens
gcttccctgcgatctgcaccgccagcccagtcaccgggggctattcttggctactgcccacgcaagctgtcaagtctctcatgagccctcgaaacccaactcagcaccggccacaacagcca

SEQ ID NO: 117121 - DNA, 122 bp, Homo sapiens
gaccccggcccaccgagctgctggggtgggggctccagcctaacttcggggcgaggggtgcgggccggggcggtgggctctgctgcagagcgggccgtaccccaacggaggccccacccccg

SEQ ID NO: 117122 - DNA, 122 bp, Homo sapiens
ctggcttgggcatccaatcaccgctctgtttgtacccttgcaggtaccctgtgagcctgtcgtcggacctggagtggcggcctgaccggtgccaggacgccagcgaggtacagcgcgacccg

SEQ ID NO: 117123 - DNA, 122 bp, Homo sapiens
agtaaggcctagggaggggccctgaaactaccaggacctgaggagaagcaggattctcagcgtgatttcacaccaccctaagccgccgggaatacttgctgctcattatctctctattggag

SEQ ID NO: 117124 - DNA, 122 bp, Homo sapiens
cgaggcacgcagggtcgaaaggactcgtccagggtcgcaggagccgaccacacagggaggcgcagcgcccccggcgggaacagtcagcgggtccagcctggcggactcccgggccgggctgc

SEQ ID NO: 117125 - DNA, 122 bp, Homo sapiens
agatttgctgggaggtgggcagtttgctcctattttaagcagcttgggagctttgcctaccggtgtcctctgctgccctctgtggccacaacatcagtgtctctaaagacacccctctgaat

SEQ ID NO: 117126 - DNA, 122 bp, Homo sapiens
tcctgacagaactgccgcctgcttgtgtggctgagatgctgacctaggtatcaggctggtcgcgccggaacccagcacccacgctgagtctttctgagctccactctgctcctgttagatat

SEQ ID NO: 117127 - DNA, 122 bp, Homo sapiens
agaaggcgtatgtcacagtggtcccataaaatcataatggcacctagattcctgccacctcgaggcgtcagagccactgcaacgtctagcacaacgcatgaccatttccaccttcagatgtg

SEQ ID NO: 117128 - DNA, 122 bp, Homo sapiens
agtggtctaagtcaatggagctgcctatggttgtgctacatacatggattcctggccaagcgggtgagtagggtcacctgggcagggctgcatctgctcagaggcagggagtctttttctgc

SEQ ID NO: 117129 - DNA, 122 bp, Homo sapiens
aaacatctgagaaagacccatttgtccacccttgcatgcttgccatttaattccctcactcgctgcaaaggcaaaggggtaaccaagagcactggcatggttcacagaaaggtacagcagct

SEQ ID NO: 117130 - DNA, 122 bp, Homo sapiens
gaagtggtggtgggggggacaaaagacaaaaaaatccaccagagctttgtatttttgttacgtactgtttctttgataattgatgtgataaggaaaaaagtcctatttttatactcccaaca

SEQ ID NO: 117131 - DNA, 122 bp, Homo sapiens
tttaaacccagcaacaggcctgggtcccccgtgcactgctgacctctcgcgcaggctgtgcggggagacctttgtggtcggagcacaccaagcctccagcgtcctccccagtgtttagcatg

SEQ ID NO: 117132 - DNA, 122 bp, Homo sapiens
ccggcacctccggagtctgaggcgggcagatcactcgcggtcaggagctggagaccagtccggccaacacggtgaaaccccgtctccaccaaaaaatacaaaaaccagtcaggcgtggcggc

SEQ ID NO: 117133 - DNA, 122 bp, Homo sapiens
gccttctctctgcctctgcccctggcgtggggccggcttggggagggggaggtccctctgcggacattcgctgtgtcccctgatcccaagtggcccctggggacccagggaggaatgcaggg

SEQ ID NO: 117134 - DNA, 122 bp, Homo sapiens
cgtgtcggcttggctgcaacacctattgaccaatgttcaagcctattggtaaaggtactccgggctcgcgcgctctgattggctggcctgaagtacaacgcctcctccccttgaggcacggg

SEQ ID NO: 117135 - DNA, 122 bp, Homo sapiens
gaggccggggatggacaccagacagggcacccacatggcgtccttcctgttgaccaagagcgtgtcaggcttgttgatgaatggctgctcaaagtctatggagagggagcaagctgttgggg

SEQ ID NO: 117136 - DNA, 122 bp, Homo sapiens
cacactcttggggtccgcacgtttctctaattcagctgtaacactcgccgctgcagtccacggcttcattccttgaagccggtgagaccaggaacacttccatcgagaaaaaaacctttgat

SEQ ID NO: 117137 - DNA, 122 bp, Homo sapiens
taacccatgatgtggtacagcagacacgagcagggtggtatgaccttgaaggctcacatccgggtcacacaaccattccgtgcctcagctttctcatctgtgaaagggggctgatcactgta

SEQ ID NO: 117138 - DNA, 122 bp, Homo sapiens
aaagccttcctcccgagaaccacccctcccactccactgcaactggttctcaaacagagacggctttggtaccccataggacatctgccaatgcccagagacatttttggttgccacactgg

SEQ ID NO: 117139 - DNA, 122 bp, Homo sapiens
tttgagcctgtgatctggcttaccctcccagatgtcattggccaatttgataaacaaattcgattatctccatgccaaagaggaagcagtgcctcaaggcaagcctgaagcagcgctgccat

SEQ ID NO: 117140 - DNA, 122 bp, Homo sapiens
acgtcagcgcccggtggggatttttgcttagttgatcctggcccaagcctcttgtgcaatcgatggctcaggttggctgcgcggggagcggccagaggctcgctggcgcgcacgccgcggag

SEQ ID NO: 117141 - DNA, 122 bp, Homo sapiens
ctgccatggatggcggggacccgcctctaagcggcaccacccatatctggatccgagttacggatgccaatgataatgctcccgtgtttagccaggaggtatacagggttagcctccaagaa

SEQ ID NO: 117142 - DNA, 122 bp, Homo sapiens
ttcgggggtcagacacctcacttccggcggcgcggggcgcggcgtgggtcgtaccaagtgcgtcctgccctggctcgcactgcgccctacgtgggcccatagcaatggtgtcaccaccgtat

SEQ ID NO: 117143 - DNA, 122 bp, Homo sapiens
ttgtttactcagcccacctctctcaactcctaacaggagggagtgcgtaagtgaacacagcggtaactggagtcagaagcactggaaccggctggctgtttcggtgcctgcaggatcaaact

SEQ ID NO: 117144 - DNA, 122 bp, Homo sapiens
aggctgagcttgagaaaggcggcaagaccctgagaagaaatggcggcacgaaaagtgttgcggaggctgtggagttcccagtcccgccatgctgtaggcgttgaaaaatgatctcctcgcac

SEQ ID NO: 117145 - DNA, 122 bp, Homo sapiens
tctctgctgctgaggatgtggctgccgggcggaggtcgtccactcccctgggcctttctccgcgagccctcccacgccgcccgctcctctcccggggcgaagggcggggacgaggcgcgccg

SEQ ID NO: 117146 - DNA, 122 bp, Homo sapiens
ttaccgctacagaaaagtaaggtaaatgaccccgcattcacggagggtgactgtgcaaagcgtgaacatgcgccgagtttatgaagcgggtgtcggagccagcgctgcttctcgctgacccg

SEQ ID NO: 117147 - DNA, 122 bp, Homo sapiens
cattttctttatccagtctattactgatgggcatttgagttgaatccatatctttgctatcgcaaatagtgctgcaatgaacatacgcatacaaacattatgcatgccatctttgtaaaata

SEQ ID NO: 117148 - DNA, 122 bp, Homo sapiens
ggcaaaacctttgctagcaaagcgccttttgtgccgggctgtggctcgctatcgacatctcgtccgttaccaaggctgggtttcctactgatttccctcctcctctgctttcacaggctcgc

SEQ ID NO: 117149 - DNA, 122 bp, Homo sapiens
tccaggggttggacagacgtgaagagctctgggtaagatgtccttcctcccgggagcggtcgtttgggagtgctccgtgggttaagcaaacgcaagctgtaagtgatgactgtggtcgaggg

SEQ ID NO: 117150 - DNA, 122 bp, Homo sapiens
gccgaggaggggctcagccgtctaccctgtctccagcggaggagcttctgagaccaggagcgggggccgtcgggtgagcattcccctggaacacgaaggagcaaacctgcccggctgcattc

SEQ ID NO: 117151 - DNA, 122 bp, Homo sapiens
aggctgaggcaggagaattgcttgaactcgggaggcggaagttgcggtgagccaagatcacgccactgaactccagcctcagtgacagagactccacctcaagaaaaaaaaaaaaaaaagtc

SEQ ID NO: 117152 - DNA, 122 bp, Homo sapiens
gaaggtctcaggcttctctgtgggaagcatagctggggatccacacaactctgtctttctcgcctcctccatttcttcttgtacaaatggcagtgccagccacctggggatctctagcaatc

SEQ ID NO: 117153 - DNA, 122 bp, Homo sapiens
ggggggtggcggtggtggggactttgaaggtcgagtcgataaagcccagctctgtgcttccgccccctcccacacactcgagacccccacaggttccttcttaggggtcctcgctctgctcc

SEQ ID NO: 117154 - DNA, 122 bp, Homo sapiens
cctccagggcctggacctattactagtttcctggagcctggaccagatctaggtagaggacggcagcaaggcagaagaaaagatggaagttagtgcagcagcatggtcactaacctgagcat

SEQ ID NO: 117155 - DNA, 122 bp, Homo sapiens
accgtgcccctatccccggaacattcgaggtataggaccaaaggccttccctggctcgggcgtgcgtgtctcgtgacaggtcgggctgctagaggggcctttttaccccttggatggcctct

SEQ ID NO: 117156 - DNA, 122 bp, Homo sapiens
aggtctccactgagagccttctcaaagccaataggcttcctttgtctcttcagcatccttcggcagcactccatttccagatacggatatctctttcagtgatctttttttttttttttttg

SEQ ID NO: 117157 - DNA, 122 bp, Homo sapiens
gcagcggaggttttcctggtttcggaccccagcggccggatggtgaaatcctccctgcagcggatcctcaatagccactgcttcgccagagagaaggaaggggataaacccagcgccaccat

SEQ ID NO: 117158 - DNA, 122 bp, Homo sapiens
tgccggcagcggtgtccctcttgccaccggcggaccccctgcgccaggcgaaccggctcccgatcagggtcctgaagatgctgagcgctcacaccggtcacctcctgcacccggagtacctg

SEQ ID NO: 117159 - DNA, 122 bp, Homo sapiens
gccgccccctcagttctttctgctggcgggcgggatgggggcgctgagcctcggggacggcgcgagcgggggcccgggcgcctagacaatagttgatgcccaaggacggggccacctccgcc

SEQ ID NO: 117160 - DNA, 122 bp, Homo sapiens
tctacactaagaaattaggtaattcaatggcaatagtaattttagctgcagtttaaggaacgtttacagctttgaaacaggaaatggaaaacaataagtaagaaactataaaataaattgag

SEQ ID NO: 117161 - DNA, 122 bp, Homo sapiens
ccatggagtaccaggccctgcagcgtgcctacgctttgttgcaggagcaggttggagggacgctggacgcagagcgagaagttaaggtctacgtgacttccaccgcgcgttccggcccccct

SEQ ID NO: 117162 - DNA, 122 bp, Homo sapiens
taaagtgcagctcatttttctctcgccccttggcctgatcccaccttcctggcttggcctcggcctgaccagcagcccctggtgtcagcacactccccctgtacatctcatggctctgggct

SEQ ID NO: 117163 - DNA, 122 bp, Homo sapiens
catgtgtgactgttcacttacctgcccttaatctcacttccagaaaaggtaaaattgctccgctcccagaaggtgccagcaaggagctcgctcctgggttggttcagggttgtgtctcaatg

SEQ ID NO: 117164 - DNA, 122 bp, Homo sapiens
aagcacttgctctgtgccatgtcctgtactgggcgctagggttataaagatgatcacggccgggcacggtggcttacgcctgtaatcctagcagtttgggaagccaagtcgggtggatcact

SEQ ID NO: 117165 - DNA, 122 bp, Homo sapiens
gttgatgtcaaagttcagttcaatgttacagaaacctattgcctgtgtgcagcccgtgggcggacaggagtccgtgggcggacaggagtctgtggaaccagagctgtcctctgagcgctaca

SEQ ID NO: 117166 - DNA, 122 bp, Homo sapiens
aaggctgtgagacagctgggggtgatgggacacagggcgggcccttcctggtgcctggggcggccaggtccccttgtcccccctgtgtcagggctcccgtgcttcctcgcccttctctccta

SEQ ID NO: 117167 - DNA, 122 bp, Homo sapiens
ttgagatccttaagttaattacatctgcaaaggtcccttttccaaatcagatcatgtccacgggctccaggtgaacacattatccgaggccactagctgaccccctgcagcctcacatggga

SEQ ID NO: 117168 - DNA, 122 bp, Homo sapiens
ggcaaagctaatgtgatttgtgaccaactttgtttctatttccgaaggctttgcccttttcggtgacacaggctgttgctattccaagcagcctatcacaggcagggggagggccgtgagtc

SEQ ID NO: 117169 - DNA, 122 bp, Homo sapiens
cgcagccaatcagaggctcgccctggactccgtcccgggctggggggcgtggctggagggcgtggccgggcggtacccgcggcgtctctgcgctgccgcctttgcttgcgcggctgtgtagg

SEQ ID NO: 117170 - DNA, 122 bp, Homo sapiens
cagccggcgtacgtacccagagcgaacagggcgagctgtccagccgaggggaccattttacgggcgggcgggcagcaggctctccagcctcctgccctacctgcggtgcccgagtggcggag

SEQ ID NO: 117171 - DNA, 122 bp, Homo sapiens
tttcagataagttcacccaaaaccccatgaggggcctgggccatcccctgagacatctgccgctgccacagcctccatctgccatcagtcccggggagaacagcaagagcaggttcccccca

SEQ ID NO: 117172 - DNA, 122 bp, Homo sapiens
cgaagaccgccttaagttttccactttgatgaactcgatcatccccggggatgaagaacccgccggcccagccggagccccgtcacgtgacccggcggccgcggggagctctgtgcgcaggc

SEQ ID NO: 117173 - DNA, 122 bp, Homo sapiens
tgtctgccggccactgcgctacatagccattatgcaccccaggttctgtgcgtctctggccggtggagcatggctcagcggcctcatcacctccctaattcagtgctccctcactgtgcagc

SEQ ID NO: 117174 - DNA, 122 bp, Homo sapiens
aggcagtgctgttttctggctggccctacatgccgctaccgtactccaccagcaccctcccgcctgcgcagcactgccccctgccaggcgggggcactgtatttccctagctcccctgccag

SEQ ID NO: 117175 - DNA, 122 bp, Homo sapiens
aggccacgtcgggcttggtgtaggagagcagcttctgcagcgtggccccagacgcctgctcgggcggtggccggccgctcccagggaagccctcagcctcggtggccgcccctggctccagg

SEQ ID NO: 117176 - DNA, 122 bp, Homo sapiens
ctgcgtccacagtataagggagtcaaactagttcctccaacaagccctagggaatctactcggatccagcttgctcttggaaacactgtggtgcccagcctcccgtgagcatagccttgaca

SEQ ID NO: 117177 - DNA, 122 bp, Homo sapiens
tccttcacggtgcccgacatcgacaacgtcacagtgctagactacgatgcccgcgagcagcgtgtgtactggtctgacgtgcggacacaggccatcaagcgggccttcatcaacggcacagg

SEQ ID NO: 117178 - DNA, 122 bp, Homo sapiens
cgaaacaacaaagcttccacactgacgaagaagaccctaagtggcttgctactgctggttcgggtagcctgcttttattcgcttatctggccccacccacgtcctgctgattggtccatttt

SEQ ID NO: 117179 - DNA, 122 bp, Homo sapiens
gggtgccacgtgcgcagctgccgactggtgcttcccgaacgtgaatgttcacaagcctcccggtgtttggggtacttaaaatgcagccaacttctggcctccccatggttctgactcagtca

SEQ ID NO: 117180 - DNA, 122 bp, Homo sapiens
cgaggacccactcttctattcctttgcggaggcacggacacacggtgtggcccgaaacagcggcaggagagtgagacccgggctccgaccgcggtggtaagggggcggcgggccataggggc

SEQ ID NO: 117181 - DNA, 122 bp, Homo sapiens
ggtgggtaattaatgagggccgggcgctgattggctgcagcgtcgtggccgggggcagggcggcggggtaggttgttcctgaggtgggaggcggtacccgtggctgagaagaaggaggcctg

SEQ ID NO: 117182 - DNA, 122 bp, Homo sapiens
aaccccctgataaatcggttcagaaccagtctggctgggaggcccgagggctgacagcagcggagcggccccggccggggtctcacggactctcggggtctggccgacacggccgctcccgt

SEQ ID NO: 117183 - DNA, 122 bp, Homo sapiens
ctgcagccactgccatcaacatacagaaatcaactgtgtttccacatcttagcaacaaaccgtggactacaaactattcaaaaataccatttataatagcattagaacacataaaatactta

SEQ ID NO: 117184 - DNA, 122 bp, Homo sapiens
aatctcttgaaagttctctccttcgtcacagggtcttcctcaagcttgtagtcgttcattcgctcacagactttctccaaaagatccgttaggaacgcctccgactgagctagggggatcta

SEQ ID NO: 117185 - DNA, 122 bp, Homo sapiens
gcagccctgggaccctccccgccctgccgacttacccggggcttggcctcgatgttctcccgcagcagccactcctcactgagtgtgtagcgggccttgcctgtgatggcgtcgatggagcc

SEQ ID NO: 117186 - DNA, 122 bp, Homo sapiens
atagccctaaaaatacagacagccacgggctaagtgtctccgggcttccctgcaagatcacgcagggtggtatctgggcctgcgctcgctacctctttcatcccatgcagccagatgagaat

SEQ ID NO: 117187 - DNA, 122 bp, Homo sapiens
accgaaatgggggtggggtgggggtagcattaagaagcccagaagctcagcgggtcctcccgacctcccgcacccagagcctgggtgacactgaagcgctccgaacactgtggcgtctcagt

SEQ ID NO: 117188 - DNA, 122 bp, Homo sapiens
gcccgaggcaggagctggcggcgggagggcagacagacagccgagtgggcagacaggtggcgggcgcgcgagcggctcgggcgggtgccgaagctcgagagagagcagagccggagcggcgc

SEQ ID NO: 117189 - DNA, 122 bp, Homo sapiens
cacctcctcactcagcactgggtctgggagctcccgaaggctgtggaggccagggcagggcgggggcactgagcccaggaggctctccaggcacttagtcccagagggaggcagctgggtgg

SEQ ID NO: 117190 - DNA, 122 bp, Homo sapiens
ttgcaagagaaattaacaattacattttatgacatgtctttctagttgtttctccttcaccgacagagggatcatgtaacatttctaggtttggtttttctgtttgtaacctatgtgttata

SEQ ID NO: 117191 - DNA, 122 bp, Homo sapiens
ccacggcaacttgacgagctaggccacgggccacatccccactaatctgattggttctgacgattattcaaacccagatagtccccgcccccttgccacggaggctaacgattggtcagtgt

SEQ ID NO: 117192 - DNA, 122 bp, Homo sapiens
gacgctgcggagggagggactcccgggctcgccaaacagcggggcctcgggcaagagcgtcgccagcgcgtcctcattctgcgattactgtcaggggaccatccatcagcgccgcccgggac

SEQ ID NO: 117193 - DNA, 122 bp, Homo sapiens
gacgtacggaatgaagcaggatttaagacagacgacaacaatgggttgggggttggtttgcgagatactactctcttactcagttggtatggctccaaaaggcctggaaagatgccaggaat

SEQ ID NO: 117194 - DNA, 122 bp, Homo sapiens
tcctcacttctcagacggggtggccgggcagagaagctcctcacatcccagacgggggggcggggcagaggcgctccccacatctcagacgatgggcggccgggcagagacgctcctcactt

SEQ ID NO: 117195 - DNA, 122 bp, Homo sapiens
cgcggcttaccgcctctctccgcctagtgccaggtgctaataaagttgttgtttcaaatgcggccaggaacatcgcgagcggggaccaatcagagagtagctttgcctctataacggcgcga

SEQ ID NO: 117196 - DNA, 122 bp, Homo sapiens
ttttggccatagtgctaatggatttacactgattttgcaccttccacagtctcaccttctcgtgttaggctattttctacttgctcctcaagctatgggccatttctatccctgctttcagc

SEQ ID NO: 117197 - DNA, 122 bp, Homo sapiens
ataaagcccttcctatgaaaactgtcccccaaatcacattacttggtcgtcctcgaggaacgattttgaatgaaaagcacataaagtgctgtagcatggagacgagagacaaataactatgc

SEQ ID NO: 117198 - DNA, 122 bp, Homo sapiens
tgggggcactgtggaaagcacaggaagtgagctcagtgcgtgccttccccattgtcctggcgttccatgcaggctgggagacgcgggtgacagcctcacaccacccctgttcccagaagagg

SEQ ID NO: 117199 - DNA, 122 bp, Homo sapiens
ataatatactaataaaggatttgctctccctccacccagtggtacaggttagaacatggccgtgccttaatcagtgggttcccacctgtgtgtctgaataaaccagggctgccagtcctaga

SEQ ID NO: 117200 - DNA, 122 bp, Homo sapiens
ctcgacaaaaccccctcgtgggtcccccaccgcgccttccttctgtccaccgttggactgcgtccctgtgcttcccccgagacccccagccgcagagccagccacggctccgcgggtcttcc

SEQ ID NO: 117201 - DNA, 122 bp, Homo sapiens
tctcagccctttgatgaattatgtttgttatccagaagcctatccctatcaattagattacgcttttaaaaagttacaagaaatcaaaatattataattcttttagttcggcggacttcatg

SEQ ID NO: 117202 - DNA, 122 bp, Homo sapiens
gtcggccatggctggcgcgcagcccggcaggtgcatggggagcgccgggaggcgggagggcgctttggagacggagaggagaggctcgaagccgggtcttcccgagtgcggcggtgcaaccc

SEQ ID NO: 117203 - DNA, 122 bp, Homo sapiens
caaggactcagtagccacagcacagccctggttgatgactagagcttcttctaaaatcctcgtaacccaaccaaacaaaccaaataaacctgcaagcgacaatatctccccagggtatggaa

SEQ ID NO: 117204 - DNA, 122 bp, Homo sapiens
ccattggccacgccacgctcggcactgccagccggatcattcagacggcacagaccaccccggtccagacggtgaccatagtacaacaggcacctctaggtcaacaccagctaccaataaaa

SEQ ID NO: 117205 - DNA, 122 bp, Homo sapiens
aaaatattttgcatagtgcctagcacaaagtaagtctttactttgtgggtctttccaggacggcctagatagaacacctactatgtgctgggagtcacaagggacactgagagtgggtccta

SEQ ID NO: 117206 - DNA, 122 bp, Homo sapiens
tgagggacggcttgcgataccctgggactgcggggtagaaagcgcagttctaggggaggtcggggtcagaggtgaagctcgtggggagggcgagacccgggcgcaggtgctcacaggcgagg

SEQ ID NO: 117207 - DNA, 122 bp, Homo sapiens
gcggggatggggggaggttcaaaaccaaggctagagagcaaggtcagaccaccatgagcacgaggttagacatctggaaggacttcctggcaatccaggactgtcttcggggaggagagaga

SEQ ID NO: 117208 - DNA, 122 bp, Homo sapiens
gattatcagttgccagcagcccttctcttggctccttgacacgagctccatataaggcagcgatctccatagaaacgtgtcagtttcaatagtagtgtcaaagttcactatatacagacatt

SEQ ID NO: 117209 - DNA, 122 bp, Homo sapiens
ccagacggcctgaattctaatcccggcccagacggcctgaattctaatcccgactccagacggcctgaattctaatcctgactccagacggcctgaattctaatcccgccccagacggcctg

SEQ ID NO: 117210 - DNA, 122 bp, Homo sapiens
agtaactggctccagctgttgcagtgtggccaagacaaacactgctgtctttcccatgcccgacttggcctggcacaggacatccattcccagaatggcctgagggatgcactcatgctgga

SEQ ID NO: 117211 - DNA, 122 bp, Homo sapiens
ggtactctttgttcatcattccataaagatatcacaagcagggccaggcacagtgtctcacgcctgtaatcctaacactttgggaggccaaggcgggtggatcatgaggtcaggagttcaag

SEQ ID NO: 117212 - DNA, 122 bp, Homo sapiens
cagcgggcatccccgtgggagtgtgggcggcgctgagcacgagcacctggggctcctcgacgcagtgtggacggaccactcgcgcacagtattgatccacgttagccagcacagcagtgtgc

SEQ ID NO: 117213 - DNA, 122 bp, Homo sapiens
agaaaagaaaaaaaaattagacacgagcaaaagcaattaaagtatttattctccaatattcgcatttctgcatttgtcagcagctgtggaactgtcacaagatatgctgatttggttgtggt

SEQ ID NO: 117214 - DNA, 122 bp, Homo sapiens
gttgcgggcgcaggggcaggaatgggcttacctgcttcccgccaccggggctgggcggggcgctgcggggaggaggagccgggcacaacctgtggacggccgcggccggcggacacacagca

SEQ ID NO: 117215 - DNA, 122 bp, Homo sapiens
caccagggagtcgagaggtaacctgcagccggagtcaggagcaaagcttccttggtgggacgtactccaggagggaacggggcggtcgagttccaaccaagccctgcccttcggggcgcctg

SEQ ID NO: 117216 - DNA, 122 bp, Homo sapiens
tttacacttccagaagtcaaatcctttctaggactcccccttgcttcacccggaagtgttcggtgacccctccacccaattaatgaaaacaaagcaaagggcccgagcgggcctccgacagc

SEQ ID NO: 117217 - DNA, 122 bp, Homo sapiens
ggttgagaagaatcctccaaggccagagagcactttacagtttccagagggccaccacctcgtgccttatccaacctcactgcagaacggtggagtggaggtgccagctctccactggcaca

SEQ ID NO: 117218 - DNA, 122 bp, Homo sapiens
agtgcctgacggccgggacagagactgcagagaagcagcaacgggcccaggagcgccaagcgtggcccgcagccaccagaggctggagagaggcctgggaaggattctccgtgagagactag

SEQ ID NO: 117219 - DNA, 122 bp, Homo sapiens
gagaggaagctggactcccgtgggggcctggggcgcagcgagggctgtggcgtcgggggccgggagaagaagagtaggggagcccaaagtagcccaggagtctttagcggaggaacctgggc

SEQ ID NO: 117220 - DNA, 122 bp, Homo sapiens
ttttatggctgagtgattattccaccgtgcgcgtagaccgcgtcctttttgcccatccaccgccgatggccgtttgggctgtctccacctttcggctgctgtcacgtccatgcagaaggtct

SEQ ID NO: 117221 - DNA, 122 bp, Homo sapiens
ataaatacttcttctctaaaagttgttttgcttttccaaatacaacacagtaagaattttcgccattaaatttatttcataggagacagagaaaggggcagttatgaagacatttgtttgat

SEQ ID NO: 117222 - DNA, 122 bp, Homo sapiens
ttcgcagaagtcctgtgatgttttccccttctcggcaatttacacgcgcgcacacacgcgcgggcacaggcatgaatctctatccacgggaccgcttcacgcctccccaggagagagacagg

SEQ ID NO: 117223 - DNA, 122 bp, Homo sapiens
tctcacatagctcaagttggacatttcttaaaggccaactaactttcaaagtactaaccacggttcccaggaattatcataaaatttattatatgtaaagctcaagttgaaaacttgtcata

SEQ ID NO: 117224 - DNA, 122 bp, Homo sapiens
caaagtcattcttctcagactgccttctaaaagcccaaacagcgaaatcaagagtaaaagcgccaagacggtgacccgggtctaggggattcccccctggaggccagtcacctcggcgcctt

SEQ ID NO: 117225 - DNA, 122 bp, Homo sapiens
cacagcacgagccaccgcgcctggctgctcttctcattttgaaacaagactgcttcagctcgctgctcttgtgtgtgagggcgtgggaagggccactgtgaccgcaggcccttgctgtcacg

SEQ ID NO: 117226 - DNA, 122 bp, Homo sapiens
cgtgtttccgccgcaaaggccggcggcgtgcgggcccgggaggagggggcgggctcggaacgtttccttcacctgctcggccgcctggggtgtttgtaggtccccgctggcccccagcccta

SEQ ID NO: 117227 - DNA, 122 bp, Homo sapiens
ccggggccacgggggtgggtttgggagagtggagcgccctcttctcccctggcctgcagccgcctgtctgccgcagtgtttggagacttcctgtggcgtggagacgggctcgggaacgcggc

SEQ ID NO: 117228 - DNA, 122 bp, Homo sapiens
ctcaccccgtgtatcttttccttgtgctgatttcgctctgcatctttttgctgcaatcaacggtagctgtgagcgcaactatatggcaagtcctgcgggccctcctcccgcggaatcactga

SEQ ID NO: 117229 - DNA, 122 bp, Homo sapiens
gtggagcagaagccgggaggggaaaagtgagcgatgacgcctgcgtattgtggctttttacgccatctttccacgcccaaaaagggaggtgcttttccttggcgtatttactttcgccaatg

SEQ ID NO: 117230 - DNA, 122 bp, Homo sapiens
acaagcagaggcctccttaagctctaaaatgtgattcttcacatgactcaactgtgactccggcatctgggtagggctcgcacctcccccattcccatgcccagggctgcactgttcacaga

SEQ ID NO: 117231 - DNA, 122 bp, Homo sapiens
catagcaggaggatgaggtctgaaagcaagcaaggcaaaccgagaacgaggtccctgggccgtgtcccacggtgacccattcctgtgtggagcccggggtgggcataggaggcagcaagacc

SEQ ID NO: 117232 - DNA, 122 bp, Homo sapiens
gcatatgatcgagctgtggccatcagccgcccacttcactacacaacaattatgagtccacggtcttgtatctggcttattgctgggtcttgggtgattggaaatgccaatgccctccccca

SEQ ID NO: 117233 - DNA, 122 bp, Homo sapiens
tctcctgcctccaccaagacctgccctgtctgtggtcacttcaagtcttctgatgggctgcgctcagatcttgagaaatggccaccctggggtaaaagggaccatgaatcaggaggtccaga

SEQ ID NO: 117234 - DNA, 122 bp, Homo sapiens
cactgaagcaggagctgtcaccaggtataatcagccagcactcaccgggacatgaaggaacgcctttgcttctgtcttcctcatggtatttccctccaggggcaggcgctcaatcttcccag

SEQ ID NO: 117235 - DNA, 122 bp, Homo sapiens
ggggctcttgacgtacagggagacttccagatatggtacacagatgtcacattgctagaacgtctctagacggcaacgaaacattaaagcctaacctgaggtaatccctcaccggcagtgaa

SEQ ID NO: 117236 - DNA, 122 bp, Homo sapiens
caagaaagaagaaagaaagaagaaaacggctcccccgtacagagggagcggggctccaaacggacaaaccccgtgtgcgcggaaagtagtcctttatattgggaggctggaggaggcagtgt

SEQ ID NO: 117237 - DNA, 122 bp, Homo sapiens
agggggctgagggacagggtgggggtttcacctgagcctgccggggctgctcctccctcccgccgcggcctcccagccccgcgccttcccactgcctccggaccacatcgggcttcgctgcg

SEQ ID NO: 117238 - DNA, 122 bp, Homo sapiens
gcacaagccccgaagaatcctgtgcggtggcgacggtgatggagagaggccaccagagggcgcagaagagcagcaaggctgccccctccaaggccggcgactcggccacctgggccgccaag

SEQ ID NO: 117239 - DNA, 122 bp, Homo sapiens
ccaaggctcacattgcttcacggagtagcggcccggggaaggagcacgcgagcggttccccggggttgcatctcacacccgggagggagggaccctactattttcaggccccgaatcctcca

SEQ ID NO: 117240 - DNA, 122 bp, Homo sapiens
cccaccttcagtggcaacttgtccctgagctgctcctaatgtcccaccaagactggttgccgtcaaggtcttctagctcctctcctccttgctcctcactctttctaaagacaagcccaagg

SEQ ID NO: 117241 - DNA, 122 bp, Homo sapiens
gtctgcaattccgatctgttttgctctgctcgttcgaattgttctggttccatcttcccacgcctgggggtctggctttgtgtgcgaagacccctttcctgcagtctaggcgtggacggggg

SEQ ID NO: 117242 - DNA, 122 bp, Homo sapiens
gggaaaaggagaagggaaaaaaagaaaagaaaagaaagaaggagaggcggagggatagcgcgtaatggacaagaaaacggagcaatggggaggggcagtcactgggacctcgcctataggat

SEQ ID NO: 117243 - DNA, 122 bp, Homo sapiens
caataccagggacctaagtccgggtggggagcggcccctcagcgccccagacccctgccacggtgccggtgacgggccacgcccaaaatatcaggaaaagcgtctcagtcctccttgtgggc

SEQ ID NO: 117244 - DNA, 122 bp, Homo sapiens
tgcggggagccggaggcgcagcgatcccagcggagggagcggcgtgggggcagcgagcaccgcgcgcgcgcccgtcgccgccgccggagcctcggggcgcgtgcgcgcggcgggggcggggc

SEQ ID NO: 117245 - DNA, 122 bp, Homo sapiens
ttcaagcgatccacccaccgaggcctccgaaagtactgggattacaggcgtgagtcaccgcgcccagcctgaattgtgttttataagtaatgtctctgcttagagacagttgggacttcagg

SEQ ID NO: 117246 - DNA, 122 bp, Homo sapiens
cgatcagatttactccctgctgaattcaccccccagtcaggccggttttccttgtttcaccgtgttctctgaatacactgaattactccgagcatctatagttggcaatgccctgcgcattt

SEQ ID NO: 117247 - DNA, 122 bp, Homo sapiens
aggcgctggcggcctacctctttgcacacaatcacctcttctacctgatggagctggccacggccctgctgctgctgctgctctccctgtgcgaggcccccgccgtccccgcactccggctt

SEQ ID NO: 117248 - DNA, 122 bp, Homo sapiens
atcttggctcactgcaacctctgcctcctgggttcaagtgattctcttgcctcagtctcccgagtagtggaaattacaggtgtgtgctaccacatcttgctagttttgtatttttagcagag

SEQ ID NO: 117249 - DNA, 122 bp, Homo sapiens
ccctgcctccggctgggtttctgggcagaggccgaggcttagctcgttatcctcgcctcgcgttgctgcaaaagccgcagcaagtgcagctgcaggctggcggctgggaaccggcccgagca

SEQ ID NO: 117250 - DNA, 122 bp, Homo sapiens
gggaaagggagagcgcctaaccttagacttcaggcaagggttaacattggtgggggtgctcgcttctttagacttccagttaaaagtcagacccatcactcttggcacctggggatgtaaca

SEQ ID NO: 117251 - DNA, 122 bp, Homo sapiens
gttgactctgaaggcttaaaaaagtgagacgggctgcgggaggaagagagacgggaacaacgcaccaacccaggagcatcgggggtccctgcctactttacgtgtctttctgtgttagcaga

SEQ ID NO: 117252 - DNA, 122 bp, Homo sapiens
ggaaaccaactcagttcaaactaaatgcatcttgtgcatgggccagatcctcatctgccccgtttacttacataacacatactagtcaatcgaaaatagtgatcctctgccctctacctgcc

SEQ ID NO: 117253 - DNA, 122 bp, Homo sapiens
ggggaaagggcagagggtctcccagggagctacacagatgtcctcagggacagcaacacacgccgcctttcccccattcttccaggacaagctgccctcagaagtccctccaacacaccccc

SEQ ID NO: 117254 - DNA, 122 bp, Homo sapiens
gagtcagctcccccagcacccagacgcccacctgcccaggtgcagaggcccttgcaggagcgagggtatgagacaggaggccctgacaccaagacgtcactgtcaccatgcctggcccgcac

SEQ ID NO: 117255 - DNA, 122 bp, Homo sapiens
tgcccgtgcccatggcatctggagcccacccacacaagatttcaactcaccttgaaatctcgtttcagtgacgttgaccttccctgagagatcccggcggcaatcactgaacctgagtggat

SEQ ID NO: 117256 - DNA, 122 bp, Homo sapiens
tgttcagggcttcaggaattcctcctccttatttcctcagctggaagtgcacccagaatgcgctgggcttcctcctctgcacttagaagggtaaagagccactgtcactgaggaaggattca

SEQ ID NO: 117257 - DNA, 122 bp, Homo sapiens
gtagcgaggatgcgggtgaagaaaacctaagggccccaaattcaacataagcgaggtttgcgggctgtcagcaaggtacagacctacttcaaatcggggcgcagagcgttgggggtggggga

SEQ ID NO: 117258 - DNA, 122 bp, Homo sapiens
aatgaatgaatgcagatcatcaaaagatctgggtctttctgacagatgtatgacaaactgcgagacagtaatccccaaacacttctctcatcctaaaaataaaccatttacatcaggttggc

SEQ ID NO: 117259 - DNA, 122 bp, Homo sapiens
atacactggtgtgacaggaacgagtcaggagtgatttcaatagctgatggcaaacggatacgactatctaaaaagttacttttagcaacaaacaaggaaatcatggaatctaacgaaaaaga

SEQ ID NO: 117260 - DNA, 122 bp, Homo sapiens
tccagccgacactcgggagctgaaacactgtgaggcctttttatagctcggctcttcgctcgctggcaggcgaaagagagctccagccccgcttctcccactttaacccgcttcctcccagc

SEQ ID NO: 117261 - DNA, 122 bp, Homo sapiens
gaaaatctcttgaacccggcggaggttgcggtgagctcagatgctcagattgcgccattgcgctctagcctgggcaacgagagaaactccgtctcaaaaaaaaaaaatagttgtaaaagcag

SEQ ID NO: 117262 - DNA, 122 bp, Homo sapiens
tgaatcgcaatctgcattttaacaagaaccttggatgcatgttaagagttcgagaaacaccgttctattgcgcttaacccgacacacctaagccctcctcaatcttctccactgagctgggc

SEQ ID NO: 117263 - DNA, 122 bp, Homo sapiens
aagtacaaaattaatagtacaaaacgaattaaggcaaggcctcagaattggatctgagtgcgatccgagagctccaggggctcacctatacagtaccagttataaagcatggagacaggcct

SEQ ID NO: 117264 - DNA, 122 bp, Homo sapiens
tctaaaaaataaaaataaataaatgatttcaaatatcacagtgttctcagccagggatttcgcaaagtatagctgccatgccaaatctggccaccatgtactaatgtaaacacagttccatg

SEQ ID NO: 117265 - DNA, 122 bp, Homo sapiens
atttcattccacagccaatcccagtctgactaatcacagcatcacagttaatactcacagcgtccttggagaaatgaccattgtccacagtgtccattggtaccagtggcttctcaagcctt

SEQ ID NO: 117266 - DNA, 122 bp, Homo sapiens
tgacaacaacaataactggttaacccttacagtgctatgttctaggcactctgtgtacttcgcgtatattaatacctaatgatccacattataattctataaggtaagtactattactatct

SEQ ID NO: 117267 - DNA, 122 bp, Homo sapiens
ggctcacggttcttctctctgcatttcagccaggcccccatatgctgggtttgcaggtcacgaccacccatgacggctgtgctgcgtggggtgcagttccccgtgggcgccgagggtggtgt

SEQ ID NO: 117268 - DNA, 122 bp, Homo sapiens
cgctgcggcaagcccaccacccagctagggagggccgtaccatgatgttgcccatggggccgctctcgccctcgccgtaggtggagatgatgacgttcacgttctccacgatgcgctggaaa

SEQ ID NO: 117269 - DNA, 122 bp, Homo sapiens
agaacaggaagttaagtgggaactggactttgggggccaccaaaacgaggcctggagaaacgtcaccatatttcctcccctcctgcctaatgggaatatcagttacactgaaaaatttaact

SEQ ID NO: 117270 - DNA, 122 bp, Homo sapiens
ttggcccccagctgcggtgccagaggctcggtccccggggcgtggtgggctagggcgggtcgtctcgacttagagccccaggcctggatccaggtagggagggcctgggagataaggcccag

SEQ ID NO: 117271 - DNA, 122 bp, Homo sapiens
gacaagcccacccaaggcttcacgggctctgctgggccggacccgagtctctgactccctcgagggccctgctgtaaggtcctggtctccacacaaaacggagcagagccaggcagcaccat

SEQ ID NO: 117272 - DNA, 122 bp, Homo sapiens
gagtgaattggtgttgagaaaaggggaattgctgaggagcagttgagtattatttcagaacgagtgactaagaagatgatgctgtttttaccacagatggtgaatacaaattgggttgtgag

SEQ ID NO: 117273 - DNA, 122 bp, Homo sapiens
ccggggcccgctctccttcgcgcatcggggtccccagcggcgtacgcacgggttggacaccgggcttcagcttctggtgctcagaagggcccaagaactccggaggaaattgggcttagctg

SEQ ID NO: 117274 - DNA, 122 bp, Homo sapiens
ttgggggcctttaaaaggaaccggaagtgtcgtgagctaagacagtcgcgcggggaccatcgagaacaaggagtgctgtttcgaagtagcggctagaggggccccctgcctccgcccccgcc

SEQ ID NO: 117275 - DNA, 122 bp, Homo sapiens
gcctctacccaatgctttcgtgatgctgctgctgatctatttgggaagttggctggctggcgaggcagagcctctcctcaaagcctggctcccacggaaaatatgctcagtgcagccgcgtg

SEQ ID NO: 117276 - DNA, 122 bp, Homo sapiens
gaacaactgactttagaaagtaatctcaaaagaaaccatctgggccaatggtattcaaaccgtgtttggtggaagcttaagagattttttgttttcgttttttttttttttgtgctccttgg

SEQ ID NO: 117277 - DNA, 122 bp, Homo sapiens
gtgtgcctgtctgcctcccccatggacactggacagtgacaggtcgtggtgggtgttcagcgtcctatgaacacgagttaaggaagagcctccagtcacctgcctgcaacccaggccagctc

SEQ ID NO: 117278 - DNA, 122 bp, Homo sapiens
agaaagacttacctttctcggaggcacgaaccaagcagcctagaagacaaatgcgctgctcggagagactgccgcggcaaccaactggacaccccaagagctcactcctccgcggttttata

SEQ ID NO: 117279 - DNA, 122 bp, Homo sapiens
gcaggctccgcccccagtgggcccaaggtaggcggggccaagtcggccggtgggtgggcgcggcctgttgagaacgcagtggggccgcgagcggcaaaaaacaggcttgggaaaggcgaagc

SEQ ID NO: 117280 - DNA, 122 bp, Homo sapiens
cgctgggcgcggtggcccggcctgggggacccacgtggcttctgcagtggagcagcgagtcggtgccggtttgcagagccctttagaaacgcagggctcaggagctaaggttttgtcttagg

SEQ ID NO: 117281 - DNA, 122 bp, Homo sapiens
cccccgcggcgccctctcccaccgccccgcccgggcgcccgcttcctcccgctccctgcgcgcccccctcccggccgccagccaactgcgtgcccccagggccggcaagaagccacatgccc

SEQ ID NO: 117282 - DNA, 122 bp, Homo sapiens
tggttgggggcggtcggcgtaactcagggaacactggtcaggctgctccccaaacgattacggtgttatttctccggtagaaattttgcttggtgtatggcacttccggacccataagatga

SEQ ID NO: 117283 - DNA, 122 bp, Homo sapiens
gcccttaacatggggcaggcacatcgacagttatcaatcagtgccactggtgttattatgcggcagcctgggaggagcggagggagagggcctcaggagtgctggtgcattctcaactggaa

SEQ ID NO: 117284 - DNA, 122 bp, Homo sapiens
ctcctcgcgggccgctccggccgccgctcgccgcccccgcgccgccctaccttgcggatccgcttcttctcgatgctctccaccgcgaagacgtgctcgccaacagctggcagctccatggc

SEQ ID NO: 117285 - DNA, 122 bp, Homo sapiens
gttagatggccgaggcattaacttgcacttctatcagactctaaagtggttgagcatggccgggtgcagtggctcttgcctgtaatcccagcactttgggaagccgaggtgggcggatcacc

SEQ ID NO: 117286 - DNA, 122 bp, Homo sapiens
aatatcacagaaggggtgtacactttctgcgatactgggagtcatagcattgtcttcttccgtgaatattaggagcaatttcaccgggtggatgtacacccactgctctattgggagtgacg

SEQ ID NO: 117287 - DNA, 122 bp, Homo sapiens
ttttcttcttcactcctcgcttggtggctcccagccagaggccggcagtggtgggaggctcgctctgggtgcacagacgctgccttcagacaccgcatgctcgtgcgaggcctgcagtgagc

SEQ ID NO: 117288 - DNA, 122 bp, Homo sapiens
gcgcagagtgcgcctcctgtgacagaggtcgacccctaagcccgggccgagggcaaagggcgcggattaaagtcctggaaactcagcaatctgcagcttccaaatggatatgagaagtgaga

SEQ ID NO: 117289 - DNA, 122 bp, Homo sapiens
tccatgggacttaatgaagagcagaaagaatttcaaaaagtggcctttgactttgctgcccgagagatggctccaaatatggcagagtgggaccagaaggtaggcgtttttcttgtgcttag

SEQ ID NO: 117290 - DNA, 122 bp, Homo sapiens
atactagtccttgtctatttctggtagagccgcaacatcccactcgcagagagcagggggcgtggcccacatgagccagaacctatagggagggaggttggggcgccagccccgccccccca

SEQ ID NO: 117291 - DNA, 122 bp, Homo sapiens
ctttgctattgtaaatagtaccacagtaaacatgggggtgccagtatccctttgatgtatcgatttccttacctttggataaatacccagtggtggtattgctggatcacacagatctattt

SEQ ID NO: 117292 - DNA, 122 bp, Homo sapiens
tccagaactgtaagaaaataaatttctggtgtttaagtcacccagtctgtggtacttttacgtcagccctagcaaatgaatgcagtggtccagggttctgaagatatttcaaaaaggcttag

SEQ ID NO: 117293 - DNA, 122 bp, Homo sapiens
ttggtcccagacgcgcagaaggaagcggcctgaatcttacccagtcctcgacgcgcccagcgtcttgactgcagaggacgaagcggccgcatctcccgacaaacaacgtgtgaagcagcggt

SEQ ID NO: 117294 - DNA, 122 bp, Homo sapiens
taagttttaaaaggtcacttggacctattgccctttcaaagaactgtttttaaaaggattcgggaatggcaagcaaatttatgggaatattcaagaaatttcacatagtgagcattttttga

SEQ ID NO: 117295 - DNA, 122 bp, Homo sapiens
cagcgtctacactgggtccgggaaccgtgtgcgtgcagcgtctacactgggtccgggaaccgtgtgggggtgcagcgtctacactgggtccgggaaccgtatgggtgcagcatctacactgg

SEQ ID NO: 117296 - DNA, 122 bp, Homo sapiens
gccgaggaggcggtggctgtggcggacgcagcagcaccccagctagggacagggctccgccgcgcccccttgctggccccatggaggcggcagcggcggcggcggcggcggcagcggcagcg

SEQ ID NO: 117297 - DNA, 122 bp, Homo sapiens
gggagcccggaggggcggggcctgggggcggggcctaggcggggaggggcggggtccggccgagccccaggctggcagttccgctacacgtgctgtttgtcccttgatctgcttttatgctt

SEQ ID NO: 117298 - DNA, 122 bp, Homo sapiens
cgcagccctcctcagtgacgacggcgggtttggcttcatccccttccatgaagatgagcgcggctccctctcctttgtgttggatctggggccctggggagagctgggcacacggctggtgt

SEQ ID NO: 117299 - DNA, 122 bp, Homo sapiens
acgtggaagagccagtgtctttctgagggcccgtgcaggccagtgctggcgtggaagagccggtgtcctcccgagggcccgtgcaggccagcgctgacgtggaagagccggtgtcctcccga

SEQ ID NO: 117300 - DNA, 122 bp, Homo sapiens
gagcactactgtaacttccaagggagcgctgggagcagcgggatcgggttttccggcacccgggcctgggtggcagggaagaatgtgccgggatccgcctcagggatctttgaatctcttta

SEQ ID NO: 117301 - DNA, 122 bp, Homo sapiens
cagcaacagccgggaaagggtaattttgccgtcaggcactaatcgctggcatgactccagcggtcttagaaatctttcctgaaagctctcctttttttcttttatcccatataacagatgaa

SEQ ID NO: 117302 - DNA, 122 bp, Homo sapiens
tgcacatgactgtcaagaaagtcagtcaattctccatctgcaatgccagaattgtgacagcgaaagccatttgtccagaaaggtctatcacctcaggccagcaatgggatgtaggcgtggag

SEQ ID NO: 117303 - DNA, 122 bp, Homo sapiens
acagggttcaacacgtggtatttttcgagcacagaactgcacttcctccccaggctggggcgccggcaggagctccgggtggtgggagcgcctccacctcttacccacggaaggagctcagc

SEQ ID NO: 117304 - DNA, 122 bp, Homo sapiens
ctctctgtatctgaggaaagggggattggttccaggatcccccatagataccaaattctgcggatgctcaactcctttgtataaaatggcatagtagctgggtgcggtggctcacgcctgta

SEQ ID NO: 117305 - DNA, 122 bp, Homo sapiens
gactgccatgttctgggtctactgaaaatagctgcctggcctgggaggcccagttcagtccgggtgtgggtcccgcttcacctccagagcagcggcagccggtaagggtagaagcggccttt

SEQ ID NO: 117306 - DNA, 122 bp, Homo sapiens
gccgaggaacgcggagggcgccgaatcagagcctgcggggcttgacagcttctcttgcggcgtccaaggtgggcgtaatgtccaacaaaaaggtcggaaaatggggatcgattccgaacacc

SEQ ID NO: 117307 - DNA, 122 bp, Homo sapiens
gcctggctgttttgcctgcacaggcatttcgtgattgactggttaattctcaaatgtaaacggaacaagagctcgggaccgccaggctggagggagttcaaagcacaggagaaggactatta

SEQ ID NO: 117308 - DNA, 122 bp, Homo sapiens
ggacgttgcgctcagtgaagtgagccagtcacagaagcagactgcgtgattcctctaacacgagggaccagaacagtcgcttcttagaagtactgtatgaggtactcagaggtactgcgtga

SEQ ID NO: 117309 - DNA, 122 bp, Homo sapiens
ctagcatcagaaaatgcacgattgaggattgaaaacgagggtgaaggaggaccagggaagcgcgaggagagaggcaaaataagggactgccaggaaagcaggaaaggcaactcagttgaaag

SEQ ID NO: 117310 - DNA, 122 bp, Homo sapiens
aggcgcccgctaccacgcctggctaattaatactgtcattttattttcacttttggcaaccgggtgcaattaaaggagagaaagaaaacaaagtgataagtgtaagataatgtacacacatg

SEQ ID NO: 117311 - DNA, 122 bp, Homo sapiens
ggggaggggaatcctgcacccactaaaatctggttgtctgtcctggtaacagtgaccaggcggtgctctccggccgggccaacgcgcggggcctgcttgatgctaatgtctacgatttctgg

SEQ ID NO: 117312 - DNA, 122 bp, Homo sapiens
gtgttggctggagggggtccgggaggggcgggatccttctgccaggacgatgggtggacacgccagttttgccgttagcggggaaccaaagagcagcccattgtgagaagtagggagaggcc

SEQ ID NO: 117313 - DNA, 122 bp, Homo sapiens
tcatagggctcagaggcggaagcggaagcacattctgtcacgcaattggagttgctgaggcgacgcaacaagtgtgcctcccccctccatggagatccccgccccatcagagaatgttgcat

SEQ ID NO: 117314 - DNA, 122 bp, Homo sapiens
ggccattagtacaatcagtcaggaaattctgcttaagtgcacatttctccccaggagagtcgggtcactgcactgggaggaagcccgcctgccaagggctgtgtctggaacctgttcatcgc

SEQ ID NO: 117315 - DNA, 122 bp, Homo sapiens
tacattttcttttctttgcttttaattttgtcagttattctgcacattatgaacgttatgcggtgtagactagattctgttacattcttccaaagattgttttgcttgtttttgcttgcttg

SEQ ID NO: 117316 - DNA, 122 bp, Homo sapiens
ctgtcagacccggggccttgcctgcctgatggtcttcagggaggaggcgacccagacccccgtccagcacgtggcacagccccaggagcagtaaagacctggctgtgggcccaggaccctgc

SEQ ID NO: 117317 - DNA, 122 bp, Homo sapiens
ccccgtctgggaaaagggctgccaaagactctaacggctctaaagtcagacggagaaccccgatccccggactggcccggacggagaccaccgtggggatccggatccgccaccctcctccc

SEQ ID NO: 117318 - DNA, 122 bp, Homo sapiens
gtctcaaataatgattaaaatatgccatgctaataaacaaggttatctagaatgcaacctcggtgctttaaaaacagatagaataaacctcatcaataagcattttcctaaatatctctttg

SEQ ID NO: 117319 - DNA, 122 bp, Homo sapiens
gacgcgccatcccccttcccgcaggagcccgccgcctctgtttacacacagaggaggtgtcgtctccagtctagacaagggcgctaataacgcccataaaaggcggcctctccagagatgct

SEQ ID NO: 117320 - DNA, 122 bp, Homo sapiens
ggaatggaggtgaagattcggagaagtagccagcagggacaaccacttcaaggaggggtgcgtaaaagggaggaggaagtggagcagaagctgaagagggtgtagggtcaaggaagagtttg

SEQ ID NO: 117321 - DNA, 122 bp, Homo sapiens
gctcctgcttgccctttggctggtagtccttgtgcagtacccaactggtccacagggtggcggtacctcctgagaacagcttctgcctgaggctgggttctgggaatggatgggctggggca

SEQ ID NO: 117322 - DNA, 122 bp, Homo sapiens
gtgtccactttccaaagtcctgattttcctcatttttgggcatgaataatgtgcatggatcgatgatgacttccatatatacattccttggaaagctgaacaaaatgagtgaaaactctata

SEQ ID NO: 117323 - DNA, 122 bp, Homo sapiens
ggcctcatggccacccctgccaagctgaaccgtcaggatgccatgttagtggatgagctccgggaccggctgtttcggcaagtgaggaggattgggctggacctggcagctctcaacatgca

SEQ ID NO: 117324 - DNA, 122 bp, Homo sapiens
tccatcatgggattttgcaggactggaagtccttgagtagttctagttaaagagtctatccgcagaatggctgaaggacttgatgccgttttgagcctaattttctgtaacctcctctgagt

SEQ ID NO: 117325 - DNA, 122 bp, Homo sapiens
agccccgaccgcaggctcacctcacgcagggttccagcgcggcagcccaggtcctggtggcgctgctccttgagagaagcctgggcggcagaaaggcccttgcacgatccccgcgccacagc

SEQ ID NO: 117326 - DNA, 122 bp, Homo sapiens
agatgaccaggccagtgagggtggggccctaaaaaacctgtggccatgggagggtgtgcccgagcctggggtctcctcctcacgggggccctggccaccagctgggtgtgcacttgcagccc

SEQ ID NO: 117327 - DNA, 122 bp, Homo sapiens
cccacccctgcccccattctgccattctggtggtagtgaagagtgagaacttctgccctacgctgggcgtttggggagctgtgctaggtcacagtctgtcattccacactttggggcttttc

SEQ ID NO: 117328 - DNA, 122 bp, Homo sapiens
cccggcccgcgggtgagaaggttgcgacgggaggtgggtggaactcgccagcgccgggaccgcggattggctgcctcggctttctcttttccccgtgggctccggcgtgaggcgctgaagcg

SEQ ID NO: 117329 - DNA, 122 bp, Homo sapiens
gctgggtaggatcgctgcaggcctcccgcctctgtgctccggtatagtctcggagatgcccgttgacgaagaagacatacagatggttgaatagaacccattcttttgtataagccaaaaac

SEQ ID NO: 117330 - DNA, 122 bp, Homo sapiens
cggagccccaaggcgggccagatctcagggccggatggggctgtggagctgtgccttagacgggggggaaggactccctgccccaggccggcaccgcacagtccctgggtagaaaattgagt

SEQ ID NO: 117331 - DNA, 122 bp, Homo sapiens
aggagggcaggcattaaaaataatcgctttgtggaggagataagtgcaaagcaggcagcgcgtaattaacacaaaaaggcagaatgacccggacaaacgaacataaatccgtggtacctatg

SEQ ID NO: 117332 - DNA, 122 bp, Homo sapiens
cactcccactgtcctaggccgaggctatgctgcacttgcagagatggtcttcccgctcctcgcctgcccacctcacagcgcggccccgggcaccatccctggccccggccccggccccggct

SEQ ID NO: 117333 - DNA, 122 bp, Homo sapiens
tggaaagaaagaatgaatgcagactacgggcggtgaatagaggtctcggatgccagcaggcgtcccaacccagcaggaactggctcaattctcagaagaaagcgatcggccccgaggcagga

SEQ ID NO: 117334 - DNA, 122 bp, Homo sapiens
aataccggagacacagggacaaacgcaatggtggctgcccagggaactggatggggggggcggtatgccacaggataccttgatgccagcctcactcaagggcccaggcctgggggcccatc

SEQ ID NO: 117335 - DNA, 122 bp, Homo sapiens
cccggccggccagcatgactttcctggaggtgaaccgcctggagctggcggccgccgaggcgccgggcgcgggtctggggcgcgcgggcagcgcgggcttcctgcgcggcgcggcgttgtgg

SEQ ID NO: 117336 - DNA, 122 bp, Homo sapiens
acaacgccgccgctgctgtgccattttttggcggcgggtctgtgctacgcgctgccgagccggctccccatgccaggtgagtgcccgccctgcccgcccaggcgtcctcagagcgtgctact

SEQ ID NO: 117337 - DNA, 122 bp, Homo sapiens
ataccaaagaaaagaactgagctgcctccttcatattttttccattgaggattaatttaccgtgctttttcattttctctacatcctgcaaaagtttttttctctcctaagaaacaaactat

SEQ ID NO: 117338 - DNA, 122 bp, Homo sapiens
ttttgatttcatttccctactggtgagtgattctgaacgcctttctgtgtgctctttcgccgttaggacatcttctttggagaaatattcagctcctatgcccattattatttggattattt

SEQ ID NO: 117339 - DNA, 122 bp, Homo sapiens
agaaaggctggttgcaggcagaaccagatggttgcagtccacacggggaagcaaattggccgtgacatttcagccatgtgaggtttatttaggattagctaagaattctcagccttgactcc

SEQ ID NO: 117340 - DNA, 122 bp, Homo sapiens
agagcgcctcagctctgacagtgaaaccacccaagcgcacggagactcggcccacttaggcgccactcagagatttctctagctgtctgggcatttgtgtcaaccagaactctccctttgca

SEQ ID NO: 117341 - DNA, 122 bp, Homo sapiens
tgccttgcatgggggcatatccaagacatacaatagaggttgacaagtaaagtcatttggcgtgggcttcaagcgtataagggaccacaaattttagctaccgtttagtggtaaatttaagg

SEQ ID NO: 117342 - DNA, 122 bp, Homo sapiens
acgtcccagccttctcccccggccagaagcgaccgcagcggagggagtgggcataggggtcgcactggacgcagacagggagctgggagaaccgggcgacccggggccgcttcccgtggggc

SEQ ID NO: 117343 - DNA, 122 bp, Homo sapiens
gtgaagcgtccccatggctccgcaggaggccaagcctcagggctcaagggaagctgggcccgcgacgcgggggcgcgggggccggcccgtggcgcgtgggcttggtcgggctgcctggggag

SEQ ID NO: 117344 - DNA, 122 bp, Homo sapiens
ggaggcctcaaagtggggaggaggaggagggtgggataaagaggaaaggagcgtggaggacgtgtggttactcaaagaacagctaagaattttgcaatcggcctgagcggggcggtggtggg

SEQ ID NO: 117345 - DNA, 122 bp, Homo sapiens
cgagggccaggtgctgcggcaggcactggagaaacggccgagacactgagtgtggggccccggaattcagaccatgtcaaaggctttgggatagaaacagtggtgtgctgggtcagcagcag

SEQ ID NO: 117346 - DNA, 122 bp, Homo sapiens
tgggacattgtgaggacccacagctgtgacacattgtgtgcaacagttgccagagtgtgtcgtttagagtcgtgtcaagtcctgataaacatttggattctgagatatttgcggggtcacag

SEQ ID NO: 117347 - DNA, 122 bp, Homo sapiens
aagcgcggcggggcgggggcgggggtgtgtcgggttttataacccgcagggcggccgcggcgcaggagaaggggcagagccgagcaccgcgcaccgcgtcatgggggccgcctcgggccgcc

SEQ ID NO: 117348 - DNA, 122 bp, Homo sapiens
ctcctcaatcgaaaataaaatactcaaatggacctgcccctgtagtataaaccaatacaccggtcttgtaaactggaaatgaagacttccttccaaggacaaatcagagaaaaagtacttga

SEQ ID NO: 117349 - DNA, 122 bp, Homo sapiens
ctggctgggaggggaggctccgcagcggccggaagcgcttctgggaacagaggtggcctccggcccttttctcaaaagtccgaccccagcgggaggttggggcggctgcggttttccgggca

SEQ ID NO: 117350 - DNA, 122 bp, Homo sapiens
ctgccagttcccagctgggtggccgtgacctccctgagccctgctaagagcacccatgcacggcaatggcggaaaataaacgagacggggctgtgagacatctccccggcccacggcactca

SEQ ID NO: 117351 - DNA, 122 bp, Homo sapiens
tgcgtggtggtgccccgggcggcggcaaaggagacagacttcggatgggaggtgagcgatcgcgcctgagtatgattgatcacggccatttatcttgtgttcaatctatttataaagccggg

SEQ ID NO: 117352 - DNA, 122 bp, Homo sapiens
tgctctagcagctgaatttaaaatacttgctacagaacactgcttcttctgggcagggaacgctgctgcttaacccttccatgctcgttccctgtggggacacagcgtgttggccagctgca

SEQ ID NO: 117353 - DNA, 122 bp, Homo sapiens
tcagtacccagcggaacaggaccataacctaaagaaatgagctttttccggagcaaagagcggccccgatttcaaagtagaaaaaataaactgcttgggggtggaagatggcgaggggcggg

SEQ ID NO: 117354 - DNA, 122 bp, Homo sapiens
tctgggaggggtcttccagctggagaagggtgaccgactcagcgctgagatcaatcggcccgactatctcgactttgccgagtctgggcaggtctactttgggatcattgccctgtgaggag

SEQ ID NO: 117355 - DNA, 122 bp, Homo sapiens
agaccaaaagaaacggcgccttgtcaaccgaacgaattgaaaaaagcttcctgccgcgatcgggcattaaaagaaaaaaaccacagacataagatggagtgaataaaaaaagaatttatata

SEQ ID NO: 117356 - DNA, 122 bp, Homo sapiens
agggagaggggcaaggaaccaccggtggagggagggatcggttggagggagggatccggccgggacctgccctcgcagtttccgcaggttacgtacgtcccaggcatggaacccgactccct

SEQ ID NO: 117357 - DNA, 122 bp, Homo sapiens
gcgccgagccggtggtgagtcccccaaacaagtctatctttaccaagcctatgggagccccgccccaaacgcaccgaacctcctctgagtcctgctcatcttcctctgactccgagtcgccc

SEQ ID NO: 117358 - DNA, 122 bp, Homo sapiens
aagagcccatcgccccagttcccaggagttccgccagttagactttttcccccatggcctcgctaaggctagttcctcgtcacgtgacgtgacaggcttggtcacgtgacataccagctcct

SEQ ID NO: 117359 - DNA, 122 bp, Homo sapiens
tgatgatgatgatattgcccccctcccagggctcttgggagaaccaagtgagattaaccacgtccactcaaggctctctagctcttggcctccatgactggttttctctgtgtctgtgcagt

SEQ ID NO: 117360 - DNA, 122 bp, Homo sapiens
gccaaattctggaaaagctgctgcccttggtggccggggtgggtgccgggcaggcccaggcggagcccagctggtggtgagtgagcaggtgtctgggctccaagccttctgggagctggtgg

SEQ ID NO: 117361 - DNA, 122 bp, Homo sapiens
acacgccgctccgccagccgacgaccttgtttttgtagcaggcgatttcgaagcgcttcccggcacgcttcatccgtaccacggccacattggttaggcggatctggttggtgggggtgaag

SEQ ID NO: 117362 - DNA, 122 bp, Homo sapiens
atgcttacacccaccctcttttcccagtccctagatgacactgagctccggctgttgggacggacgcactcggcctgcgatgctctgcggacgctggcagaggcccggcgcctctttcccgg

SEQ ID NO: 117363 - DNA, 122 bp, Homo sapiens
gaaggcacagtcactgggctgcagcagagtagagggagctgtcccagctgggaggctggccggggtttaataccctccacaaagagcagctttgagggggacggcatctggcggcttgaaag

SEQ ID NO: 117364 - DNA, 122 bp, Homo sapiens
tttcactatctggggtctccttttttcccctttgtgaatgaatatgatgattacacttgccgtgtgaagttgttgacaacttataagagaaaatacctgtaaagcacatacattaattataa

SEQ ID NO: 117365 - DNA, 122 bp, Homo sapiens
catcagggaacacatgaagtgtgtgtgtgtaccacagcgtgtggcctccgtcggggaacacgtgaagtgcgtgtgtgtaccacagtgtgtggcctccatctgggaacacgtgaagtatgtgt

SEQ ID NO: 117366 - DNA, 122 bp, Homo sapiens
gacttgagaaaaggcagagttctcaggtcctaggaagctggggcacgctggcgtgacaagcgtcccggagaaagccaagccctcggggagctggggaccgcagcagggctgcagtcacatcc

SEQ ID NO: 117367 - DNA, 122 bp, Homo sapiens
cagcatggcggcgggggcggctgaggcagctgtagcggccgtggaggaggtcggctcagccgggcagtttgaggagctgctgcgcctcaaagccaagtaagcggggcggcgagcggtaggag

SEQ ID NO: 117368 - DNA, 122 bp, Homo sapiens
tcccagctcggctaatggtggaagcggcggccgggcagcaagcgagctggggggcaggcgcggggcccagcgcaacccagcgctgctccgcagacagcagacaccacagtgatcaccctcgg

SEQ ID NO: 117369 - DNA, 122 bp, Homo sapiens
acagtctctgtgcagtgcaggcagcccccaccgaatccaggtacagtgctcagtcacaaccgtagggagagtggtcaaatcggagcgggggcgggggccgtgagtcaggctgaaaagaagaa

SEQ ID NO: 117370 - DNA, 122 bp, Homo sapiens
ccccggacccaattggcggaagcggggccggttgtgtgcgcgcgcacaaatgcccggatgcgccgcgacgacccgcgcgctcccctcgggcggtagggggcgcgcaccgaggcaccgcggcg

SEQ ID NO: 117371 - DNA, 122 bp, Homo sapiens
tcaccgggtgaggaccggggcggagggtgttaagttacagggcaggagcccgggtccctccgcgggcaggaaggggagggcccatcggggctaggggaaccccggcgcagacctggggtggg

SEQ ID NO: 117372 - DNA, 122 bp, Homo sapiens
actgtgattccctgaagaaaatgattaccagaggcactcgtgtgaatcttcagacaccaacgtgtacttagtgaagatctcaaaagttgacttcaaagaagaatctggtggtggtattggca

SEQ ID NO: 117373 - DNA, 122 bp, Homo sapiens
acagggtcacggccgggcagaggcgctcctcacatcccagacagggcggccgggcagaggcgctcctcaagtcccagacagggcggcggcgctccccacatctcagacgatgggcagccggg

SEQ ID NO: 117374 - DNA, 122 bp, Homo sapiens
tggcgtccagcgaaatgcctcccccaccccacccagtggttgggcctgtggggtagaaaacgaactgggggattgggattcactggtgtactcaacagatgcatacgaggcccctgttgcag

SEQ ID NO: 117375 - DNA, 122 bp, Homo sapiens
gttgctcactcctcccccatcgacccactccccggcatcttccctctcaccaaatgctgccggtggttctaacctcacagtctggacagccagctgatggccccagaggttcctggtcagaa

SEQ ID NO: 117376 - DNA, 122 bp, Homo sapiens
accagaagttgattctgcgaaactcctcgggggttcggtcccctccttccctcccccggccgctgccttcggactggagccgcgcgctctgttacaccctgaagccacctcgtggggacttc

SEQ ID NO: 117377 - DNA, 122 bp, Homo sapiens
gggggcgcgcgccccagagacgtgaactgtcgttgcagagattgcgggcggctgagacgccgcctgcctggcacctaggagcgcagcggagccccgacaccgccgccgccgccatggagtcc

SEQ ID NO: 117378 - DNA, 122 bp, Homo sapiens
cgcttctttcctcgctcagctccttggtggcgttgtccgcgtgcccctccacagcggggccggcgctctaggctgcagcgggccgttcacacagcctcatcatctcgctggtttccggtgct

SEQ ID NO: 117379 - DNA, 122 bp, Homo sapiens
tttaggtatgggaggaggcgaggagtaagaaaggtgaatggactctgcattaccacttgccgatcgctagatgttaccatgttacagtggaaggaatgcaaacaataatttttcccattttt

SEQ ID NO: 117380 - DNA, 122 bp, Homo sapiens
ccacaccgccgatgaggttgtcccagaactcctgcaagttctccgactctggcagcttcccggacatgccggcaatcaccacctcctccatggctgctctgcagggcgggcggtgtgagtgc

SEQ ID NO: 117381 - DNA, 122 bp, Homo sapiens
ttatcgctcacgtccgctgctgcctcggttaggggcagctcccggcctctctttacggcacggaaccactgaaacacgacagtgtcgcaaagattcgccgaagacactcctttccttacgtg

SEQ ID NO: 117382 - DNA, 122 bp, Homo sapiens
cacacgacaattgtaaataaattgaccaagtccacagcaagacaacagcaaaaactcaagcgacacacttcagaaagcagcttacagatgggaagctgtggtgtggctctgtatccagagaa

SEQ ID NO: 117383 - DNA, 122 bp, Homo sapiens
gccgctcgcccgtgttgtgtgtccccggtgtcaccgagcgtgttgtgtgtccgtgcggcgcggcgctgtgtggctccctcgcgcccaccacgctggcccccgggccccggctcgcccttccc

SEQ ID NO: 117384 - DNA, 122 bp, Homo sapiens
ggctgactgagttcacagctgccagggcctgtgtcccttgactcaccctctcctgttggacggcatttgatgtcgaaagggtgcctccatttcagctgctcacttccttccctcctccctct

SEQ ID NO: 117385 - DNA, 122 bp, Homo sapiens
ttgtcataaaatggctgaaattcccaagcaaaaggactggacatttgtgataaagaccaacgctaataaagcttatacatttatctttataaaaatgactaaagtattttagtcttggaagg

SEQ ID NO: 117386 - DNA, 122 bp, Homo sapiens
atccctaaactcacttgtgtggtgaagcagggctggaggcttctagagccctagggagggcgcagcctttgactttcggacagacctggttagaagcctcactgctttgctgccagctgata

SEQ ID NO: 117387 - DNA, 122 bp, Homo sapiens
cacttcgacaatgaccgttcttgaaaacttttgatacttttctcctgattttcctatttccgactcatctttctcagtctcttttggtgaattctttttctctactatcttttaaataaata

SEQ ID NO: 117388 - DNA, 122 bp, Homo sapiens
ctcgcctgccagctcgggaacccaggtgggtttgtgtggccatgaggaggtggccagtgccggtgtctctcactccctagagcaggtagcaccaggtgtaggcttctgggtttcccagaaca

SEQ ID NO: 117389 - DNA, 122 bp, Homo sapiens
cgcggcttaggctttatacaccttgccagccaatgaccgcgccgtctcctttccggtcggcgatccgaccaatccaagaaggttggtgcaatcttcggctctactcggctgttttcgctgat

SEQ ID NO: 117390 - DNA, 122 bp, Homo sapiens
agctgagggctgctccgctgaacattagaacttaaccctcaccggcgaccttgtagataacgtctataagtcaccatggtaacggtcgcttcagttgtttttcaggaacctggggcaactcc

SEQ ID NO: 117391 - DNA, 122 bp, Homo sapiens
atcctctcaaaagtggaagccaagtgtttggcgcctgccttgtggaactctggttgcacccggggtccacgtgaagaagagagacaatcatgaagaaaatctccctcagatattgacctcat

SEQ ID NO: 117392 - DNA, 122 bp, Homo sapiens
taccatttgcgcatttacaaatggatttcattcagttttccaaaattttaaaaaattgaacgttgtttcaacaatattttcaaaagtaaaattgtgtaatttgggttggactgaagctttct

SEQ ID NO: 117393 - DNA, 122 bp, Homo sapiens
tggggttggggccactgttgcccaggtgtgggagggcagtggctttgggaggtacagggacgatgtgtcaaacagcgtcgcctctcccagtgcgatggttctcctttgcctccgtctctttc

SEQ ID NO: 117394 - DNA, 122 bp, Homo sapiens
cctcccgtggctctatgcatggcctgccactgatgaatcaaattcttaagaacctacgaccgtctgatacccttgaggagagcaccctcatagaatctccagcatcaggcctcagttttccc

SEQ ID NO: 117395 - DNA, 122 bp, Homo sapiens
gcaccgagggcgcgtcctcctcccgcgcgcacggaaccgagggcacatcctcctcccgcgcgcacggaacactctccaggatggatgtggggccactacacaaatcaatacatttcacaaaa

SEQ ID NO: 117396 - DNA, 122 bp, Homo sapiens
ggtacggatggttttagaatggcccttgtttcctcttgggcttgcctagagtgggcagagcgaggtctgggtgctgattcccagggtccctgagggctggctgcattccagccacagctcaa

SEQ ID NO: 117397 - DNA, 122 bp, Homo sapiens
cccgcaggagcgtagagagcgcgggactagagtgcagagctccgggacgtggatcggagccggcgcgatgggcggagagcaggaggaggagcggttcgacggcatgttgctggccatggctc

SEQ ID NO: 117398 - DNA, 122 bp, Homo sapiens
cccatacttcctacctccttagttctccttgccaccgaattatcctgacatatgtacttacgcgtttggttatttggggcctccatcacattaaactttatgtttgatgacattatggaatt

SEQ ID NO: 117399 - DNA, 122 bp, Homo sapiens
gaagaaatatcatgtaaaaggagcctggccctgccttgtgtggtcacaaagagcagaactcggtccacacattggatacacaggaagacatattgactcaatattaagaaacttctgggcat

SEQ ID NO: 117400 - DNA, 122 bp, Homo sapiens
ccgtccagagttgctccgagcctatctgctcagtcctagcgattcctgtggggcttgggacgcgcggttcaagcaccccggaccatatggatgcagcacccatgggttctcgctccaatgct

SEQ ID NO: 117401 - DNA, 122 bp, Homo sapiens
ctgggtgagaggcaggcgacacccctgagttggtcacaccagccttccaaggagctaacccgacctgacagtcacttcagcctggccaggcccccaggcagtgtgccaaaaagcggacgggg

SEQ ID NO: 117402 - DNA, 122 bp, Homo sapiens
ggaccggggctcaggaggcggggacgcgcctgaaaacagggcgggagcctttccaacccccgcgggctgcgatgcagcagaaaactcggccgcctgcaccggggattctccagaaacacagg

SEQ ID NO: 117403 - DNA, 122 bp, Homo sapiens
gcggcgcaggagctggagccggagaacctagtgtgcttagcggtcgcccgctgggttcctcgcgcgcctggccgcccctcccctagcaacggcccggccccgccccgccggtccccgcggca

SEQ ID NO: 117404 - DNA, 122 bp, Homo sapiens
tattataaggcaagggggctgaagtgtgggactcagaggatgcagatggaggaggacagtcgtgccatggggagcatcctgtgtgcatcagatgcagtttaattgctgagagtccacaatac

SEQ ID NO: 117405 - DNA, 122 bp, Homo sapiens
tctttcctctctcccaacacatcgtgtggaggagttcattgcttcccctacctctcctctcgtaacccttgactcccacctgagagagccatttttctgggaatccgtgtatctctcccacc

SEQ ID NO: 117406 - DNA, 122 bp, Homo sapiens
cagatgccccctcgaggccgggaagcgccaacgcatctgaaacatcccaacgacgaagggcgggggacatttcaaccagtttgatgtttatgaggaacgcttacaagatcgcttcttgtagg

SEQ ID NO: 117407 - DNA, 122 bp, Homo sapiens
accttcctggtggccgcaaccaccccttgccccatgcccaggctcggtgccccccgcccccgccggccagcccagggactaaggaggcatttggccaggtgctaggcaccaggcaaatgggc

SEQ ID NO: 117408 - DNA, 122 bp, Homo sapiens
cacggccgtggccatggagatggcggcccctagtctagggcgtacaggagaccgtgcgcccgcccgccaccgcagttcaaaggcaggaaggccccaggaggaccctgctgggtctgcctcaa

SEQ ID NO: 117409 - DNA, 122 bp, Homo sapiens
ccaaacccctcactggtttaggaatttaacactaccgagcaacggccccagaaggcaaggcgattgttaggaggaattaaacaggctagtgctggacccagccatccagtcctggcttacac

SEQ ID NO: 117410 - DNA, 122 bp, Homo sapiens
ctgccctgggggacaggttgaccaggtttgtactgccctgtggggacttagcatcccgttcgttctccctgcccctttagcgcggcttgctgaggaagggcccgcttttctctcaccctgtt

SEQ ID NO: 117411 - DNA, 122 bp, Homo sapiens
cagcgctcagcagttaaccaggcaactcgcgcgcagacgccaaggctgggacgcagaaggcgtgtttggccgcccagccgccccgcctcccccacttctcccgcctctcccgcctctcccgc

SEQ ID NO: 117412 - DNA, 122 bp, Homo sapiens
gcctctgtcccaccctccgtcctacgcgggcgcggtgctgaactgcaaaggcaaagctcccggtggaaatggcctgcccgctattctgcgccctctctgacaggccctgaacagaagtgtgg

SEQ ID NO: 117413 - DNA, 122 bp, Homo sapiens
tctcgattgaactagtaaactccacatggagagggaaaatgtctgatgtccccaactgctcgattatgagtcaaactgtagcaagggtgtgtcaaacagcatattctcttcattgagactga

SEQ ID NO: 117414 - DNA, 122 bp, Homo sapiens
gacaatggccctcggtgatttatggagaaccatgctaaggagagctatttacaggttcaccgcttgtcaacctgcaaaggtattaaagttccacaagcagtcagtgattgttggccaatgac

SEQ ID NO: 117415 - DNA, 122 bp, Homo sapiens
acgagtcaagacatcacacagtaagtgacatgctgcagggtcacagatttctctaggtgtcggattaacaggaagttaaatcaaacaaggagtgtgaggagggaggcggggcagtgggagaa

SEQ ID NO: 117416 - DNA, 122 bp, Homo sapiens
ggcctcagggcctgaaggcaatgtgcgaaacctgcagaagcggcaggcgccagggccaggcgcggcgggaggctgtggccctgaggccggggggtgccgggaaaataagcaaaagaggagaa

SEQ ID NO: 117417 - DNA, 122 bp, Homo sapiens
cacctccggctggatgttgagccgggtgggagcccaaacagcagggggcccacaggaggccggcccaggcagcctcgcgtccacttaccaggccaggcccaggcacgtccccagcgacagca

SEQ ID NO: 117418 - DNA, 122 bp, Homo sapiens
gggccaggacgggggctcagggcagtcagaagggatctgctccgtctcagggctggtggtcgcacttccccatgcccggcaggagccccgagtggtgcaggaagggctccccgatacgaggg

SEQ ID NO: 117419 - DNA, 122 bp, Homo sapiens
tttcaagctgtctttgtggctttggtgggatggtctctcgttttaattggatgagcacgtcgtctcccgtcacagatgctgaagctctcctcttcggcatatagcagtgcagcccctgggag

SEQ ID NO: 117420 - DNA, 122 bp, Homo sapiens
gacggctgctagatccccggctgagcccaggctcaaaggctccaggcgaagttgcagctgcgggttctctccgccccctccgccggcagagccagagccggggctggggccgcgagggggcg

SEQ ID NO: 117421 - DNA, 122 bp, Homo sapiens
aataaagaaaattctctaaacagaaaggaaatgaaaaaagatctcggataatccaggaatcgtggataatgaggaaggcaggatgacaggaggaggaaaaatatgtataaacacaacagatt

SEQ ID NO: 117422 - DNA, 122 bp, Homo sapiens
ttggaatgccatgtgtggctgcttagttctgtctgatcccttctggttaacaatgagccccgcctccagcccaggcatctggctcatttcctgtatctcctatttctctggacatgtggtgt

SEQ ID NO: 117423 - DNA, 122 bp, Homo sapiens
tgaaagaacctggatggtgtgagaggaacaaagcaggaggcccttcccagtgggaagcagcggacacatggcctccaccatacttccccgtacccctggaggcctctgtgagttgtccagtg

SEQ ID NO: 117424 - DNA, 122 bp, Homo sapiens
gggggagcggctgcgaaccaatgagggcaagagaggacgcggctgcgactgcccccagcccggcctcacatcactcagggacagagggacagagacagggacagagagagagagagaaagag

SEQ ID NO: 117425 - DNA, 122 bp, Homo sapiens
aaattcatgagtgaattataagcaaatcctctcaaatattccatagttgttctgttgtcccggagtgatctatcatatagctaatcaattcctccctacaattctgaccactttgaattttt

SEQ ID NO: 117426 - DNA, 122 bp, Homo sapiens
gtacaagataaatattctctgtatcccaaaaaacccacacaaagaaacacacactactctcggcccaagcagggaaagaaagaaaaatcccgttttgactcctgaggcttaactgggattcc

SEQ ID NO: 117427 - DNA, 122 bp, Homo sapiens
gctctaattctctaacgtcccagggctatggacgggctcccttggcggccagttttgttgcgcgtagggaggcgttaggcgtgaaggtcttgagagggggtggagtcgaagtgggtaggact

SEQ ID NO: 117428 - DNA, 122 bp, Homo sapiens
ccgccctccggcccgccgccggccttcggggccgtagcggcgcgcagggcccgcagagaccgagacctgcgcactacaactcccaggaggcctcgcgaccagaccgccgaggggccactaga

SEQ ID NO: 117429 - DNA, 122 bp, Homo sapiens
gtctccttgaattgatgaggatgctcctgggagggatgcgtgactatgtggtgttgcacccggggctgcaaacgtctccgtgcagcccccagagagaggcccatgggctcagaccaggcttt

SEQ ID NO: 117430 - DNA, 122 bp, Homo sapiens
ggccggggcagaggtgggggttcatgacagtagcgccccctctgggagatgccccaaactcggagagcgcccagaggcggagagcaggagaggagggcacgtgacccccaccccggggacca

SEQ ID NO: 117431 - DNA, 122 bp, Homo sapiens
ttgactgtctctctggttctctgtgagtcttgccatcgcgttccttctgcacacgtggaacgcagcatttcgggttgtttatttatccaggcgggctttgaggttacggaatatttttaaac

SEQ ID NO: 117432 - DNA, 122 bp, Homo sapiens
tggacaagcccccggggctgctgatgacccatgccctctgacctcaggggaggggcgggccgacgacaggcctttctagaagggccctacaagcggcttcagggagtctgggaaccaaagca

SEQ ID NO: 117433 - DNA, 122 bp, Homo sapiens
tgcatatatcacatgtatgtgtctcacagctgcatacaccacaggtatgtgtctcacacacgcctgcatatatcacatgtatgtgtatctcacacgcctgcatatgtcacatgtatgtgtat

SEQ ID NO: 117434 - DNA, 122 bp, Homo sapiens
aggtgtcgccgggctggcgcggttatttatgactgcgtggttgggctgggggttcggggccggggagcagccgggatccgccgcctcttccatgatcttcccgggccgaaccacgggaccgc

SEQ ID NO: 117435 - DNA, 122 bp, Homo sapiens
atgtgaagcgggtgctaggaagggctggggtcacaggcattccttagaggaaagaaagggcgtgaggctagagtaggcattggagacctaggggttagtgaataaactgtggggcacttagg

SEQ ID NO: 117436 - DNA, 122 bp, Homo sapiens
gggtcagtgcatcaatccccatgtctgcttacaactctgcctaggatccctgcattaacccggccctcaggcattctgcctggtggcttgactttagacactccccttccattcctcaccag

SEQ ID NO: 117437 - DNA, 122 bp, Homo sapiens
tacagagctggcccatcaccccatgaacttggtgagtgacgtggctgctcactgccatggcgatggggatgttacgggtgggtggaagtgagagaagaggcaaataagtcatgagagacgaa

SEQ ID NO: 117438 - DNA, 122 bp, Homo sapiens
cgatctgggtcgaggggcgagatggcgccttcctctcagggcagaggatcacgcgggttgcgggaggtgtagcgcaggcggcggctgcgggcctgggccgcactgaccctcttctctgcaca

SEQ ID NO: 117439 - DNA, 122 bp, Homo sapiens
ggatggacacgtctgagggcagcatgctgtgtgacgcaaggcggtccagcagctcctcagcggcatctgcgagggcagctgaagctgcatctctggagacacctacataaagtcagttttgc

SEQ ID NO: 117440 - DNA, 122 bp, Homo sapiens
aaggaattttgccaggtaggaatatgccctccacttcctgccactgcaccatggtgagatcgtccatttttcaaaagaagctgaaatacagattttttttaaaaagtgaatttttccaagtt

SEQ ID NO: 117441 - DNA, 122 bp, Homo sapiens
cccaggctggtcttgaactcctagactcaggcgatccgccctccttggcctcccaaagtgcggagattacaggcatgagccacctcgcctggctgagattatttcttgtcacagaaaagaag

SEQ ID NO: 117442 - DNA, 122 bp, Homo sapiens
cgtctcgtaccgattccttcagggcgaaaagcgtggggccgtgcggagggagtagcggcgcggccccagcatgcacctggcctgagggttgttcccggcaagcactggggcagtgggcagtg

SEQ ID NO: 117443 - DNA, 122 bp, Homo sapiens
ggggacggcggagggaagggcggctatgaggcttcgccttcttctctttgtcaggagatgcgcctcagacgggcggcgaagggctcgggccgcgcgggagcgagttctggagccccggcggg

SEQ ID NO: 117444 - DNA, 122 bp, Homo sapiens
tgcagtacagtcttttgcaactgttccactttgtcaccacagcacaggagcagccatggacgctacgtaagaaaatgagtatgggagtgtttcaattaaaattatgtatggacatggaaact

SEQ ID NO: 117445 - DNA, 122 bp, Homo sapiens
cccagggatgcgagggaggcaggcccagcccgtcctgggttcgctccccattgaacctttcggacagccaagtatctgctacctgatcccagggggaaacccacactgggagagggccctct

SEQ ID NO: 117446 - DNA, 122 bp, Homo sapiens
ggatgctcctgggaggtagggtggctgcccaaagcgatgggaagattcagttctggaatccggcctccgcgctgcccccatagccttgagaggactgcaggctccacaggcttcagctacct

SEQ ID NO: 117447 - DNA, 122 bp, Homo sapiens
gctgatgttggctcagacagtaccaattcgacgtttctccaagggcggacagcgggtcggcgagagtcgataatgggttccagcagattggacgccgttcagatctaactcgagcctggcgc

SEQ ID NO: 117448 - DNA, 122 bp, Homo sapiens
atgaggcacagaggctggaggatttgggggctgatcgaggaatacaggaccaggagagggcggtagcacgcagtgagctttattctggtggcacttggacaggttttcacggagggcttgac

SEQ ID NO: 117449 - DNA, 122 bp, Homo sapiens
cccgggcgtaacgggccacgagaagtagggggtggggcgccgcttaggtttgggaagacacgaagcggctcctcgggcttccagcgtccacttcctacggcaagcaggaggagacaagcgcc

SEQ ID NO: 117450 - DNA, 122 bp, Homo sapiens
tttcttgggtgtagacagtgactgggcccaggcctcttccggctccagtaccccccggggcgattctggcaactcagccagaggaagcctggccctcgcctcccagcgttccccccgccccc

SEQ ID NO: 117451 - DNA, 122 bp, Homo sapiens
aagctcacacctgtgtccaggccatgcctctgctccgggccctgaggcccagggagccgccgcctgtgcccctcagctggcttgcttggggccccagccgtctggaaaatggttgccctcac

SEQ ID NO: 117452 - DNA, 122 bp, Homo sapiens
atgcatggaaaaaacacactattggtttttcgccttggaaacagcaatcccaaataatgtcggctttaaaaaaaaaaagttaccgcttttttagagtccttctctgtaatattggatttttt

SEQ ID NO: 117453 - DNA, 122 bp, Homo sapiens
caaatctccaggtctgtctgcaaaaagaagaatttggtcctgccagttcagtaaacaccccggcctttcttattgccgtgcagcagacttacatgaaggagcaagaaaacaattccactgtg

SEQ ID NO: 117454 - DNA, 122 bp, Homo sapiens
gccagcctctcgcggcccgcttttttcccacaatactcctcgtcctgggggccggagccgcggaacgagccacagagaaaaaggttattggttggcagttcagccaatgagcgggcctgtta

SEQ ID NO: 117455 - DNA, 122 bp, Homo sapiens
catgaggttaagggtggaactgtagtgcccacagactgtgcagcggtacatgagggcccccgagtgtgtctttaggtggcacttgatggtcgagcggcctcgaaagaacttgtggcacacct

SEQ ID NO: 117456 - DNA, 122 bp, Homo sapiens
agaatcagcaggtgtcacagatcacgctggcctaggatttcagagactcggtcccaaccccgctgtgtctccgggctgggattagatggggtgtttgtgctccaggcctccagtgctcgttg

SEQ ID NO: 117457 - DNA, 122 bp, Homo sapiens
aaatgtctagctgggccagccatggtggctcacatttgtaatcccaatactttgggaggccgaggtggacagatcactggagtccagaaatttgagaccaacctgtgcaacatggcaaaact

SEQ ID NO: 117458 - DNA, 122 bp, Homo sapiens
ctgatggaacacgtgggacccgagcgggcagggtttttgggggtgaggtgtctgtggtttcggctggctgggtttgagtatgctccgtcatcccgcaacccccgtggtgacagggtgggagt

SEQ ID NO: 117459 - DNA, 122 bp, Homo sapiens
tcctactccctctgcgctgctcctgcgcgctccctagaatcttctagaagcgtggctgttcgtgctgttgcctgcctccctgcgcatacattctcatattcttaactaggaaccagctccct

SEQ ID NO: 117460 - DNA, 122 bp, Homo sapiens
cctcgagcaaggattccggcgtggcgtctagggagtccttgctgcagcccgaggtgcgtacgcccccggttggaatgagcccccaggttttgaaaaaatccatgtctgctgggagcgaaggg

SEQ ID NO: 117461 - DNA, 122 bp, Homo sapiens
caaacaaagaagatgatgaaattgctgaagaagaagcagaagaactaagtatttcggaaacgtgagtattttgaaccatcctttacattgtaagctggaattgcccaatcatgtgtgtgtac

SEQ ID NO: 117462 - DNA, 122 bp, Homo sapiens
tggggagtattttaaccctctgtttctccagctccctgcgcggcggaggcgcagctgaatcgtttgctggttcgcttaataacttagccctagcagtcatcacttattaaagcgccgaggac

SEQ ID NO: 117463 - DNA, 122 bp, Homo sapiens
ctgctagcctgtgaggaaaaagctgtttgtcttagagcttctcccagaatggtttcaaaacggaacttccaggcctttctggagggcagatgcaattggtggtttggggtatgaacagctaa

SEQ ID NO: 117464 - DNA, 122 bp, Homo sapiens
gggcaagggggcaccttcctcacctggagtccggatggagtggaccagcctggtcagcggcggatgctctgcagcaggacacacgggcagggacgtccccaggggagcagtgccaggcgagt

SEQ ID NO: 117465 - DNA, 122 bp, Homo sapiens
ctgggactccaggaaagccttagctgttgacagggggtgggcaggccccggggtgtggggcgcaggtcaggatctcggggcacgcggaacgccaaagggcgggagtagcaggtaatctcagg

SEQ ID NO: 117466 - DNA, 122 bp, Homo sapiens
ccacatggttcaggcttgtctcccagccaccagccctgccctgccccacttccaggccatcgctcacaccgaactccaaagggatctttgtagggcccagctcccatgccccatttccacca

SEQ ID NO: 117467 - DNA, 122 bp, Homo sapiens
ttcccctgggcgagtggccagcggctgcgatccgctaggaggcacaagttacagcagccgcgcaggcggtcccggcacctgctcctgaagcgcgggacgctacgggaatcgagggaacggag

SEQ ID NO: 117468 - DNA, 122 bp, Homo sapiens
tttcttaatccagtctatcattgttggacattttctttttgatagtcgaattcccttcaacgtctagcacagtgccttgcacatttacccactcaaaaaaaatttcgtaaggaattaataaa

SEQ ID NO: 117469 - DNA, 122 bp, Homo sapiens
ctggctttacactggtagccgccttcccctctgcagccgaaaccaacttccggtctcctccgggaagaagccaccgactctgtccttgattggctgtaagagctgtcctttaacgaaattct

SEQ ID NO: 117470 - DNA, 122 bp, Homo sapiens
cggccttcctcactcgatgattgtcagggctgagaacccagcacaggtctgtgatgcccacgaggctgtgcggctcagggccaggtcggttttgagtcacgtgcttactgtgtgtcggaaca

SEQ ID NO: 117471 - DNA, 122 bp, Homo sapiens
tccacaggccaggaacacatacatagaagatcaaagtccaagaagacaacatgaaaactgcgtcgaatgttcaaatacgcagggcagaaagtctaatgacatgtaagaatctaccctaaaat

SEQ ID NO: 117472 - DNA, 122 bp, Homo sapiens
ctgcaacagccctggatgtctgactgctctgccgagagccacactgggagcccaatgtgccggggaaatgcttacactttcttaaagaggttcctgtaggtgatgatcttcagcttctccag

SEQ ID NO: 117473 - DNA, 122 bp, Homo sapiens
taagtgcaggtcaaaaacatgctgcaggggaagcagaaattaagtggggtaggggagaggcgaagaaggacctagttttaaaccgtgaggaggattggtactagaagatgaaaatgaggatt

SEQ ID NO: 117474 - DNA, 122 bp, Homo sapiens
aatctttctcagtgctgtggactggccctagctccctcttctgcaaccctgaagcagaagcggcacctgagaacacctcttgggctgcttacctggatctgcagcttggtgtctgagagaga

SEQ ID NO: 117475 - DNA, 122 bp, Homo sapiens
cttggagttgctacattagcatgagcattaacctagagaccaactgggagagcacactgccggattttgacttagcacatatgtcagatttcatacaatgccctatagtcctgctcttgccc

SEQ ID NO: 117476 - DNA, 122 bp, Homo sapiens
cgtctcaatggatacattctccgggccagccaatgagcgtgctgcggaaggggctgttgccgtggggacgggccggctggaacaggttgtgttgatgaattgttaatgagtttgtcattcac

SEQ ID NO: 117477 - DNA, 122 bp, Homo sapiens
gagacgatcaaagagcaatgggaggagctgagacaggaggggagccgggggcctgtgctgcgggtctgagctcatttccactaaaagctcctaaaagggccgacatggattggggtggggac

SEQ ID NO: 117478 - DNA, 122 bp, Homo sapiens
tgctgtacattttacacaatctctttttgtctacttactttcttaatacgcatccttgaccgctcctcactaacagtgaaaagaacaatgcttccaaaacggtcacgtcctcgctttttaca

SEQ ID NO: 117479 - DNA, 122 bp, Homo sapiens
gggcccctgggccccgggtctgtacaatacggtttgctataaaactcaaaatcttccagccggggctgcggagttcgtgtgtgtatctgcggggtccctacctacagatgagtgggctcacc

SEQ ID NO: 117480 - DNA, 122 bp, Homo sapiens
cggggaagcctcacgaacgggacagctccaggctccctctctccctcactccccgggttccgcccccacctccagagaaatcccagacggcagagaaggcaggggggagggggcgacccaga

SEQ ID NO: 117481 - DNA, 122 bp, Homo sapiens
gtgaaaggcgggatttctttgttcggcccagtagtccctgaatccagtgtagaaagtctccggttttcccgtgaaatgtgggatcttccgcaggtctccatatctctaggcctcagttttct

SEQ ID NO: 117482 - DNA, 122 bp, Homo sapiens
attaaaacagcatactgatcactttatacttctgctagcccccaggggagctgctgggggcggcatgtgagtgccctcccgaagggtacagattcatgcattgagcaattcgtgttctttat

SEQ ID NO: 117483 - DNA, 122 bp, Homo sapiens
agccttgaacgccggctccctttcttcctccctccaagtggctctggggctgttgatttccgcagagcttgggttggggtaggggctcagcctcaccagctttcagcagctggtctaggcca

SEQ ID NO: 117484 - DNA, 122 bp, Homo sapiens
cgcaaggcgaatgtgagaggagacctgtacggaagccatcgacaagagtttcacactacacgttttggggtcgtgtttttccaagcaaacccgagtgatctttagggaaagccaaatacact

SEQ ID NO: 117485 - DNA, 122 bp, Homo sapiens
ctttgttcagttttgaattccaaggagttatcatcctgctggcctcgaatagggtgttaacgaatccactgaaaaggaatgtttttaaaaagagtctttattccaaccagcagtttgccaac

SEQ ID NO: 117486 - DNA, 122 bp, Homo sapiens
tctgtgcagtgggcggtgatgggctgatacgcggccgctggccaaccgctgcagtggctacggcctatcagacccacacaggctgagctatcacccgcggggaagccaaggaggctctgtgg

SEQ ID NO: 117487 - DNA, 122 bp, Homo sapiens
taggttagataatcaacataagtcctcatcagcagagctgagtaattcactcatattacacggaatgtcataatttggaaaaagatatatatatatatatatattcattctataccaatata

SEQ ID NO: 117488 - DNA, 122 bp, Homo sapiens
agattttggttgagatggctgtcatagggcactgtcatagaacacccaagatctcccagacgtaatggggggagagcgctaataagacactattgtactatatgaggacaaggaaagggagc

SEQ ID NO: 117489 - DNA, 122 bp, Homo sapiens
ctcagcagtcttgacaagcgcgttatcaagtgcaggggagcggaggctgcccggggagcgcgggcgggggagggcggcgggggcgccgcggcgcgggagggaggcgggaggcgggaggcggc

SEQ ID NO: 117490 - DNA, 122 bp, Homo sapiens
gcagtgggctccactgcactacatagtacactacagcctagaactcttggcctcaagcagcgtcctcccatctgagcctcccaggtggctgggactgcagacacgtgctaccacgcctggcc

SEQ ID NO: 117491 - DNA, 122 bp, Homo sapiens
tgaaatcaagatttagatttccccacattcacagaactggttggcagtagagctgagattcgaaaacttttagagtctttctagctccaataatgtggttctacccaccatgccctctatac

SEQ ID NO: 117492 - DNA, 122 bp, Homo sapiens
aagtgagccagtcacagaagcagactgcgtgattcctctaacacgagggaccagaacagtcgcttcttagaagtactgtatgaggtactcagaggtactgcgtgaggtactcagaggtactg

SEQ ID NO: 117493 - DNA, 122 bp, Homo sapiens
atgttacttcatcaaaccttatcctgcgaggcaggagtgctaatgtattcccattttgaacgcgagaaaactgaggttcagaaaggggtaaaagtcactggccaaagttaatggtggtaaaa

SEQ ID NO: 117494 - DNA, 122 bp, Homo sapiens
tcctcagggctacctcctcccctcccagccccggcgtccgcacctcgcggcggggccgcgcgtcagtggaccaagcacgagaggaagcgccgacctccagctccctgcgctctgccccgccg

SEQ ID NO: 117495 - DNA, 122 bp, Homo sapiens
cgggctggaaggcagggcatcagctatggaacaacctgggcaggatcccacctcagacgacgtcatggactcgttcctggaaaagttccagagccagccttaccgtggcggctttcatgagg

SEQ ID NO: 117496 - DNA, 122 bp, Homo sapiens
tcctcaggatatcaatgaatagttcatgagtttagtgagcaaaggtcaacctccatcaggcgcatgcgtcccttccttttcccatggaggaagagacgcctcttttccttccgctttgcttg

SEQ ID NO: 117497 - DNA, 122 bp, Homo sapiens
tctccaaagtgcagtctttttatttacatttttaactgatcatcagcagagcggggacggcggtgtcagggaagcgaagggctttcatttgctcccgaggcagcaataaccatccatgcatc

SEQ ID NO: 117498 - DNA, 122 bp, Homo sapiens
catccaacgttaggaggagccaccgccttttttagaacaactgtgcaggctctaaagcctcggaaaacctgagaggcgcatcttgctggctacggttgaaacccgtgcattgggtgattccg

SEQ ID NO: 117499 - DNA, 122 bp, Homo sapiens
gcccagttaagagacaaaatttcccagatgtccttgtgaatacatatggtcctgtgactacgttctcacacttgagatgtgagcagaattgattgggaaactttattttttaaaaaatatgc

SEQ ID NO: 117500 - DNA, 122 bp, Homo sapiens
tgtctgtttcctgtttcagcaaggctgctgtgcaaaaagaaagacggtaccaagaagggacgtgttaatggggcccagacctatggattgaaagcgtgtgctttacccatctgctgtcttgc

SEQ ID NO: 117501 - DNA, 122 bp, Homo sapiens
gtccgcggcggctgctgaggacctggggagacccagcctgtaggatccgcagctgcggtgcgcggccggcagtggcgctcgggcttcgtccccgggggcggggcttcgtccaggcgcgcagg

SEQ ID NO: 117502 - DNA, 122 bp, Homo sapiens
agggggtttccagtagaaagctgggtaacactaaccttcgcgaggaacacgtatttcatccgagcttgggtcctaaagcacaaacctaaaggtaatcaatcactgcctcttccccaaagcag

SEQ ID NO: 117503 - DNA, 122 bp, Homo sapiens
tttcagacataacaacagagaaacgcaagatgtaataaccagcgaaaagcatgaaacacccgggcggcctcggggccttatatagggtagggcgcgctgtgattggtgcatcacctaggcac

SEQ ID NO: 117504 - DNA, 122 bp, Homo sapiens
gccaagccagccaccacacaattcgatcctggcccggcttttccctaagaccgtccccgccgctcccctgtcctggtgctttaagggagagccgtatttaacacgtggctggtctcctattt

SEQ ID NO: 117505 - DNA, 122 bp, Homo sapiens
tctcaacactgagcctgatgaagagtcaagactacctggaaatcgccacaggtgagcccacggaaggtgtgtgcttctctgaacaggattgagaagctcactgggccaaagatatagcagga

SEQ ID NO: 117506 - DNA, 122 bp, Homo sapiens
atgcttgaagagctattactcattagcaaagggaagatctcacatcttgacttcaaggcccggaaaatccaagtattaactctgagtccttgctgtggattccaagcctggtaaagttaaag

SEQ ID NO: 117507 - DNA, 122 bp, Homo sapiens
accctcaaaggtgttgggtgttggggcctttgggagtgactagaattgagtgagggcacgcgggtgtagtcccccctgccctgttggatcagtgtcctgatagccagtccccacggcgagcc

SEQ ID NO: 117508 - DNA, 122 bp, Homo sapiens
caaggaaagtagcagatcattacccaagtatttttataattccttgtcctatgcttccaccggtacactgcaaattccacccaaccatgattaagggaaaagaaacaaagatagcatacctt

SEQ ID NO: 117509 - DNA, 122 bp, Homo sapiens
cgctcgcgccgcggaagagcggggaccccgagaagctcgcgaagaaccccaagaacccggcgcgggaggcgctccccgaaaagttcctaacagacaaggagcgcaagaagctcgagaagaag

SEQ ID NO: 117510 - DNA, 122 bp, Homo sapiens
cgggggccgcagccgcatgccccgcgcgcagctccggctcacggcgcccgcgctggcccgcgccccgccgccaccatccgtcccgcagcactcacggccgagtcccgggaccgcggctgccc

SEQ ID NO: 117511 - DNA, 122 bp, Homo sapiens
cagggcagttggctgccgctgtggtctgaatgctgtgtccctgcaaattcatatgaaatccgaacccccaaggtcattatattaggaggtgggggcctttgagaggtgattagggattagtg

SEQ ID NO: 117512 - DNA, 122 bp, Homo sapiens
ttggaatccaaaagcctcttctcagatatttctttcatctggaagccatcaaatcctgatcgattccttcaacagatgttcttttaccttttcatcctatcattatgagctttacctcctgt

SEQ ID NO: 117513 - DNA, 122 bp, Homo sapiens
atcgaatagagatgctttaacgcgtggagtcagcggacacccaccgggaccccagcaccgcggagcccctgccctggggcttgggcacaacctcttgggggcaatgatgggtcaccacgcac

SEQ ID NO: 117514 - DNA, 122 bp, Homo sapiens
tcctgggcactccggcagcccagagggagctcctacccccgaccaagcccagcaggtgcccggcgccctgtgcagggcccaccgagcccacacccactgaaaacccgcggtggcccccgagc

SEQ ID NO: 117515 - DNA, 122 bp, Homo sapiens
ggaagtcgggcacacacaggtggagatgcagggggcagccagcgggccgcgcgtgaacaccgaggggaggaagcttccacggagcagcttcagcttcagggacagccctggcggacgcgggg

SEQ ID NO: 117516 - DNA, 122 bp, Homo sapiens
gcagctgacgtcccaccgcctgacttaggcgcagtgacgccgtccgaccctagggtgtgccgctgctggtgacaaggacaggttctggggttgccactgctgctgccacgttcgaataccag

SEQ ID NO: 117517 - DNA, 122 bp, Homo sapiens
agagaaagacagtcctttcaaggactttgaaacgagcagcttttagccaagacatactaacgtgatggcgcatttccttgcatcagtattgtgttataacagacttggccatcttatcagaa

SEQ ID NO: 117518 - DNA, 122 bp, Homo sapiens
gcccgccctggaagaggcagtcaccccggaagaacaacttagtctgccccggaatctgaacgccgtcgaccatagagatgagacattctaggaaaagcggcggaggtcggctaagaacgtgt

SEQ ID NO: 117519 - DNA, 122 bp, Homo sapiens
ggcctagaaaataagtcctgatctgtgtgcctgggctaggtctattaagagtcagacagacggcataatgaaagccagggtgcagccctaataggaaatccaatgttctgtgtattcccttc

SEQ ID NO: 117520 - DNA, 122 bp, Homo sapiens
ggccctggtgcattgcaggatggacaatggggaggcctgcttcatcctcagcagcaggaacgaggtggaccgcacggctgcagtgagtgaggctgaggccctgcccaggcgggaggggcacc

SEQ ID NO: 117521 - DNA, 122 bp, Homo sapiens
tgcaaaccacaatatcctttgttggagtagacgtgtatacagttgcacatgaggtaacaccgaccaccaaaataacacataacatttgttctcacagctgtatccttcagggctgacttgcc

SEQ ID NO: 117522 - DNA, 122 bp, Homo sapiens
ctaaaaatgggattgtccaaccaaagaagtaagatgaaggataaagaacccctacattttcggctgagaaattggccatctaattagctatacagtttcctgttgtgacttggggtgcagat

SEQ ID NO: 117523 - DNA, 122 bp, Homo sapiens
gccgggcacagcagcgagaagcgcacacaaagagacagcccggccagcgggagcaggctccgcccgaccgctccgagactccagaccaccccccgcccgggcacacgcaccagacacacaca

SEQ ID NO: 117524 - DNA, 122 bp, Homo sapiens
ataaggttacagccctcccaagggcagaagatcactgctgttttacccatctggtgcctccggacatgtagactcactcatgaaaccgaaaactgttttatttgtgaattctctgtatctcc

SEQ ID NO: 117525 - DNA, 122 bp, Homo sapiens
ccttgggatacgtgttgggggtattttcttctcagtggccagcagagggcacccatgctccgatctttgctgcctctgtctgaagttcagggagccaagaaagtggagggaacctagcagcc

SEQ ID NO: 117526 - DNA, 122 bp, Homo sapiens
tccaaatcccgccgttccttagggcctcggggaatgggatgagaatgaagagacagcggccgagacagtggctcctgatcactccccgggaacagcctctcaactgcgccatcactgatggc

SEQ ID NO: 117527 - DNA, 122 bp, Homo sapiens
tgaaaatcattaaggttgagagttgggattatgaattctggaattgcgatttctggtaaacggaagtctggcagggtgattctcgctagaggaatgtcctccaccttcagatccctgagata

SEQ ID NO: 117528 - DNA, 122 bp, Homo sapiens
ttaactaactgaatccttaacaaccattctaagaggcagatattattatcccactttatgcgtgagggcccagaaccctggcaagggcggcacactcagtacgctcttcaagcatctgggca

SEQ ID NO: 117529 - DNA, 122 bp, Homo sapiens
tccgggcggtccgcgggtcccgagcggactgggactctggagacgtgcccccaaccccaccgccattcaccctgtcattgcaggggagagaacagaataaagacgggtacattttccatctc

SEQ ID NO: 117530 - DNA, 122 bp, Homo sapiens
tatagagaaagaatctttccttacttctctcagcttttgcagctcggaaattccttgacccggggccgcatcgctctaatctctacccccaccttcacgtggcatcctcctgtgtctcttca

SEQ ID NO: 117531 - DNA, 122 bp, Homo sapiens
aataagtaaataaagagagaacgcccagggattttttcagagcagaaagccggtccccagcgtgacgcggaagccaggttgcctcctcaagtgactcttcccttacatttggaggtgaaggc

SEQ ID NO: 117532 - DNA, 122 bp, Homo sapiens
tggatttggaggcaaacccttgccagatcctctccacgccgcttctcccccctctcccgccggtgcccggggtttttgcatctgcctgaggtatgggtttggaacaccttgggggagtttcc

SEQ ID NO: 117533 - DNA, 122 bp, Homo sapiens
tgcgccgtggctccctgtagcggatgtggatggtggagccatcctgcttcaccagcagcacggggtagagtcgtgcataagcctggcggtgcacacgagtgagtgaggccctgctgctgtca

SEQ ID NO: 117534 - DNA, 122 bp, Homo sapiens
gcggtccgccgcactgagggcggggctttggcagctgagcagttccgctcagggttccgtcgcttaaaaagtggcaaaatgccgtttgtaagtaaccggacgcaccacttggacttctgagt

SEQ ID NO: 117535 - DNA, 122 bp, Homo sapiens
cattttggaaagtggaatgattaaataacatgggtcactatttgtgaaatctcagaattgcgtgtaaactgatacagtattgcaatttattatgtaacttaacctgcggcatgggatgctgg

SEQ ID NO: 117536 - DNA, 122 bp, Homo sapiens
tcctgatagacgagttcactcctgagattaataccatcactccacatagctccagctggccgtggcaactcaatggcttgtgtcaattttgccatggctcccctctccctctcttccattta

SEQ ID NO: 117537 - DNA, 122 bp, Homo sapiens
tacttgggagactgaggcgccagaatcgcttgaatccgggaggagggggttgtagtgagccgagatcaccccactgcactcccacctaggtgacagggcaagactctgtctcaaaataataa

SEQ ID NO: 117538 - DNA, 122 bp, Homo sapiens
cgtgcacacacatcacacacaaggggcagcccaaagctgcagacacacatactcatgcagcgacacacgtacatacacacgcacacacaccacacacaagcacacacacatatacacgcaca

SEQ ID NO: 117539 - DNA, 122 bp, Homo sapiens
aggggagacctgagtaggagcacacagatccacagatcatctgctggtcactagaataagcggaccaaggagcatactcgcagatatgagcaatcagctgaatggaatttgaggaatattgt

SEQ ID NO: 117540 - DNA, 122 bp, Homo sapiens
accacttggtcagaaacttccaaacgcagtgccctgttctgccggtgtgtacagcctcagcgcaccaggagaccctagagtggtttccatctcacagagaatcagacagggccacagccccc

SEQ ID NO: 117541 - DNA, 122 bp, Homo sapiens
gcctggccgctgcgcccccacagtgagcgagcagggcgcgggctgcgggagtggggggcacgcagggcaccccgcgagcggcctcgcgaccaggtactggcgggaacgcgcctagccccgcg

SEQ ID NO: 117542 - DNA, 122 bp, Homo sapiens
gtgagctgtgtattgcagagacacaggtgagccgcaatttcctcccagttaggaggtcaacgctaagacccttgctctctttccgtcgaacatgagatgccaatttctttctgggcagagga

SEQ ID NO: 117543 - DNA, 122 bp, Homo sapiens
tccttcctccttcctgactcagcctggataacgggctcctccagaccatgtagaaactgccgggaaaagtctcgctgcgccctgcgactccttcagtccccggcctgggggcagagcctgct

SEQ ID NO: 117544 - DNA, 122 bp, Homo sapiens
atagaggcccacattcaggaatctttctttgagcctgcagatcctacctacccaagctaccgtgtatcctttgctctctatctatgatggagaaaaaagggattgtgcagtaattgctgcat

SEQ ID NO: 117545 - DNA, 122 bp, Homo sapiens
gcggggatagccctgcattggcatagctggggcatttctgcctctcctgcctctttccatcggctgtgatggggcctgaaacatgagcaatggaccagccagtgtttacccagcgattacgg

SEQ ID NO: 117546 - DNA, 122 bp, Homo sapiens
catttatttctccagaacctaattgagttttgctgtgtccatattgtctatttaccaggccgcctcggatgtacattcgtaaacaggcaggcagagcctccaagtcgacttaacgagctgtg

SEQ ID NO: 117547 - DNA, 122 bp, Homo sapiens
attagttctagtggcctcttcatgttccccaagtgcatcatgcaggctccctgccagccacggcctgagcaccggctgctggctgccccctctgtgcttctctcagacagcactgtattcgg

SEQ ID NO: 117548 - DNA, 122 bp, Homo sapiens
ccagctggcaggtgtcgtccttcagcgagaccaaggcccaccagattctgcagcagaagccggcgcagtacctacgcttcaaccagcagcagctctcccgcatctacccctcctcctaccgt

SEQ ID NO: 117549 - DNA, 122 bp, Homo sapiens
cgccgcagccgcccaccggactggtagtagtagagcacggcgtcgaagctgggccggtgccggtcgaagaaatactcgcggcgcgcgtcgtcgtagaagcggccgcggcgcgctgggtcccc

SEQ ID NO: 117550 - DNA, 122 bp, Homo sapiens
actctgagtgtacccctaaaagttccaagaaggaggagctggctgcaagagatcccctggcgttgttgaactcccagaaggcaagtacctgcccacatatccacgtcctcaggggcccctct

SEQ ID NO: 117551 - DNA, 122 bp, Homo sapiens
cctgcctgcgagagcctcggacccgttccaggggaccgtccccgcgcccgcccaccggcccggctccacccgccgctccccggcagagccccgggaccccctaattggctgcgggcgctccc

SEQ ID NO: 117552 - DNA, 122 bp, Homo sapiens
ggaccgctgtcctccaacagcgcagggcagagcggctggcgccgccggagcgcggagccacgaccctccctggccgcctttgtctactggccgtgcggcccggaaccgccactctccagggc

SEQ ID NO: 117553 - DNA, 122 bp, Homo sapiens
gaagagtgaggggagggagaggggcccagagggtgacctggaggagggctctggaagtcacgtcaggttggctcttcaggttcatttccatagttccctgcggcctctgccttggggagtta

SEQ ID NO: 117554 - DNA, 122 bp, Homo sapiens
ggggccggtgtcagcaaaggaggcacaagagtctcagctgctcgacctggtcctgcccgccgtgggcccagagaaccgtgggagcaatgtctaccatttgggctgactctctgctttctgtg

SEQ ID NO: 117555 - DNA, 122 bp, Homo sapiens
tcctaaaatattttcatgagtttgtgctgggtaggcctaagggaaacatgctcagtaaatcgaaaaatctcggattacacataaaccaccggccccggcaggttagacttggtggacacggg

SEQ ID NO: 117556 - DNA, 122 bp, Homo sapiens
aaacgcaaagcctcttctgtatcaattactccgttcttgcctgggctccacacaggccagcgcgcgctcagctcggtgcatgcggctgggccctgcgagccacgcttctgcggccccgctgg

SEQ ID NO: 117557 - DNA, 122 bp, Homo sapiens
gtcgaaggagagtggacggtgaaggtgcctggaaacggccagagaaaagacctaggcggtcgatgttgcggtggaggacactgtgcagcacagccagatggggtccaccctcacctccaccc

SEQ ID NO: 117558 - DNA, 122 bp, Homo sapiens
cgaccacgtccctccctcagccggtccccgatactgagcaccttagaggcagccactcttcgcaggcctggttacctgtcttgcaccatgtgcatctcctcctgtgcatggaggaggaaacc

SEQ ID NO: 117559 - DNA, 122 bp, Homo sapiens
cgaactgtggaacttggggtggagtgtggggcgtggactggagaccttaaacccgtacttcgccactgaagggaggggtgatatgctccgccccgcccacttagccccgccccctcccacag

SEQ ID NO: 117560 - DNA, 122 bp, Homo sapiens
acatggtggacagcccctttcagggcagctggcagggcaacatggttggatggcagctggcggggaaggcagaggcagaggagggttttggttttggtgttggttcctggaggagggcttca

SEQ ID NO: 117561 - DNA, 122 bp, Homo sapiens
tctgttccttggttaaaacagcattgcacttttaacagagcggccacctttttccacatacgataggacaggttttggatatatggagtattaactgaaaagagcactatatatttcatagt

SEQ ID NO: 117562 - DNA, 122 bp, Homo sapiens
gggagtagtatataggattttttaggagcataagagaaaatagagagttagaaaagggaacgaagctgaagaaagccatgtgattctcctggattttcccaaaaatgctctaaatggctcac

SEQ ID NO: 117563 - DNA, 122 bp, Homo sapiens
tatgaagcggttggcaccactgaagtgaccgaatgaggtgagagaccttggcctgggaaccgactcttccggaggagatgggggttgggggaaggaggaagaaaggaagcaagtataaaagg

SEQ ID NO: 117564 - DNA, 122 bp, Homo sapiens
tatgaactgctctgcaatcacagggtacaaatatcatcacatctctttgactaccgtgtccgctgctatatccttaatgttttaaatagtgcctggcacatagtgaatgctcaataattatt

SEQ ID NO: 117565 - DNA, 122 bp, Homo sapiens
tcagttccccacacaaaccatgtcatttctgcctctgtgttgttgcttacgctggtctctcggcacgcaggcctccccctcccgctttctgcccaatgcttgcataattactttccattctt

SEQ ID NO: 117566 - DNA, 122 bp, Homo sapiens
acctgaagtgatccgcctgcctcagcctcccaatgtactggggttacaggcatgagccaccgcgcccggtggcttttgctttttaaggtggacagaaacaccttgcagctgtgcttcgttgc

SEQ ID NO: 117567 - DNA, 122 bp, Homo sapiens
ggttgccagcaatgggaattggggggtttgttcttgtatctagtgggtataggctaggaacgccgcccagtatcctacagtgcacaggacaccccaagcccccccaaattagctggcccaaa

SEQ ID NO: 117568 - DNA, 122 bp, Homo sapiens
cctgagcgtgagcctgagcgcgcacggggcgcgtgctcgccaagagctggcgcagatttccgaagtgccacgaaacagccgccgcagcaatcaccgctaagacccagacttccaggcgcttt

SEQ ID NO: 117569 - DNA, 122 bp, Homo sapiens
catttaggacagcacagcagctctcctgtattcttcagggccctgtagtgatggtagcttcgaaatcagcacatggcttccagtgttgctcaggatgtctgcatcccaggcactagaaggga

SEQ ID NO: 117570 - DNA, 122 bp, Homo sapiens
aagttccaggatccttcttatctccctttcccccatagtctggcttagtctctttgtttccgggcgtaaaagcactgggattaatatgttttccaggctgagggaaaacacaggaatgtgat

SEQ ID NO: 117571 - DNA, 122 bp, Homo sapiens
ttccttttctgaatctttctcatacacaaaacagtcagctactattctaattccagtggccgtgaaacaagaatgaactgtttcatatccattcaactctgatcattcttataatagaaaag

SEQ ID NO: 117572 - DNA, 122 bp, Homo sapiens
gcaagtatggagaaatcctgtggacatatggtggaaccaatggttgagcagtcttcattgcgtgaaagagtttctctcgagtttctcagacccacagtggatgttgcataaataagagaaat

SEQ ID NO: 117573 - DNA, 122 bp, Homo sapiens
ccaagcacattcattagtttctttaaggaggagactgggtggcgtaagggaccacagagccgaatgttgcagactgactcattgcattctccatatactattgcagacctcagggtgaatga

SEQ ID NO: 117574 - DNA, 122 bp, Homo sapiens
cctcaaccaaaatgtcaaatgaacaccgtccttaaataagaacatgaatttgacctttaccggatgtctttattctttaacattctttaaagatacacacttggaaaagttagtacttatga

SEQ ID NO: 117575 - DNA, 122 bp, Homo sapiens
caaaaaaaaggaaagcttttgtttttctgttttgcagttttgttttaacttgggtgatgccgatctgggcaactgtttttgtatagccagtgaaagtgtctaagctgtgtgtagattttgta

SEQ ID NO: 117576 - DNA, 122 bp, Homo sapiens
tgagcctgtgtgtgagcttgtgtgtgaatgtgtgcgtgcctgtgtgtgaatgtgtgtgcccgtgtgagcctatgtgagcctgcatgtgaatgtgtatgcctgtgtgtgaatgcatgtgcttg

SEQ ID NO: 117577 - DNA, 122 bp, Homo sapiens
acccttgtgataactaaatgacataacatttgggaaggtactttgctattggtaatataccgtacatgtgtacctcaattaaacaaatattattattaccataatgaataccacaggtttgt

SEQ ID NO: 117578 - DNA, 122 bp, Homo sapiens
ataaatatttttttataaaaatgaaccccttgtctatgattttggattttttttcaagatcgtatgtatcaaaaggattacaagaggctaatgccataatcagccatatgaccttgggtaaa

SEQ ID NO: 117579 - DNA, 122 bp, Homo sapiens
tttacaacttaagaattgtggtttttttttttctttacaagcatgcatcatactagtgtccgttttacaatatatttgtttgttttttgagatggggatcttgctatgtttcccagtctgga

SEQ ID NO: 117580 - DNA, 122 bp, Homo sapiens
cggctgctgttagtaacgacgtcaggagtgctcttcgtgccaggagtgctcttcgtgccccgtctccggggtgtcctggggagcagacactagtgtgttctcctcattgccgatggggactc

SEQ ID NO: 117581 - DNA, 122 bp, Homo sapiens
gccttggctggacccgcattgccccctagtgccgcgcggagtcagggcgccgggctcccccgcctgatgtcaccgccgtgcagtcagcccagaagcggctcattgaaagcagaccctcttcg

SEQ ID NO: 117582 - DNA, 122 bp, Homo sapiens
tatttagtaaagtcaaacagcacgaaccctactactctgcaaagctgctgcaggaactggcggaacgaggtcacgaaggaaaccttgccggaaaggaaattgcagcagtgcctgtgtgcgtg

SEQ ID NO: 117583 - DNA, 122 bp, Homo sapiens
cgtgcaccctggaaacgaagcttaacttttctgagctactgccccagataaagaaagtttcgggtcgcggacgccggctgaccgccgctttcccccagcctctctcaaaagcgcctgggaag

SEQ ID NO: 117584 - DNA, 122 bp, Homo sapiens
agctaagaaaacgtgccagacaaagctttaagcagagcttcccaactggatgccgtgaaacgaatgacagggatgcagatacagcatgggtcttcccagccctccaagtgcaagggcttctg

SEQ ID NO: 117585 - DNA, 122 bp, Homo sapiens
gcccactttttccttgcttggaggcggcaaaaagcactttagcattcttcgggctgtttgcgcctctttctctaacagggccaggggagtggaagagcggccggcaggaaggtttctttgtc

SEQ ID NO: 117586 - DNA, 122 bp, Homo sapiens
gcagggagcatgcctgccggtagttgagggcactagttgaagaagctaaggtcccctccccgccttgggcacctcggcctgcgtcattgcgctctgcctggctgcggccgctgtggccaaca

SEQ ID NO: 117587 - DNA, 122 bp, Homo sapiens
gccctgattgggtcatattatccaatcagagttgttttgcacagtggctctcatccaatccgaacatgccttacaggatatctagttaaataagtcattataaatagttgctccgtgggctt

SEQ ID NO: 117588 - DNA, 122 bp, Homo sapiens
atgcaaaatttacaacatactaaacaaatcacttcaaaaggatgatcatttttcctgtgtcggtgatatcttcactcacctgtgaggacagtctttacagatcttctgatcagagtagatgc

SEQ ID NO: 117589 - DNA, 122 bp, Homo sapiens
aagggtggaggagaagggcttgagggattcttgcgtttcctctagaaaagcgggacttgccgctaagggtgaaggagaaggggttgaggggttcttgcctctcttctagaaaagcagagaag

SEQ ID NO: 117590 - DNA, 122 bp, Homo sapiens
tggtctgtgcctgacatgtttgagaaaccacaggaagagggagggtagtagctgatgaggcgacagaggttttggaggcactagaagacaggtttgggcctggtgttatggctcatgtctgt

SEQ ID NO: 117591 - DNA, 122 bp, Homo sapiens
gggaagtggctgcagcccccgatgccgctcagggaccctcccgaggggaaggaacctttgcgaggaggagggatctgggcatttagctgtttgcccctaatgccttgcctgagatcgaatca

SEQ ID NO: 117592 - DNA, 122 bp, Homo sapiens
gaatttgcactaactaagtcgaatttgcagttaggaagccttcctgggttcctgggacagcgccgagtgctgcgagcaaaggccgagcccgctgccagaggctcgcgccgctcgcagcacag

SEQ ID NO: 117593 - DNA, 122 bp, Homo sapiens
cacctcacagagtagacaccgaggtggggacatttgttctgtgccctcgtgcaatgccaccgtcagacactctgcaaagtcagtgaagggaaatgaagccagaaaactctgtgccaggaatt

SEQ ID NO: 117594 - DNA, 122 bp, Homo sapiens
gaaaaaaggggaggggcgagggagaggatttgcgcgtgcgcaaaagtagttgatggaaatcggccgttgggatgctgtctaagcttggatacctgagtaataacggacaacagataaagctc

SEQ ID NO: 117595 - DNA, 122 bp, Homo sapiens
tctcacaggctgttctgaagacagcatccaggggaatcctttgaaaacgggtgaagggcacggctcatgagaatccttacttaggctctttcttttctctaatattgattttagttcagatc

SEQ ID NO: 117596 - DNA, 122 bp, Homo sapiens
atgttgttataacaagagattaggacacaaagaaggagagagagagacggcagacctgtgcgtgcacagagggatgaccgtgtgaggaaacagggagatgacgtccatctgcaaacccacga

SEQ ID NO: 117597 - DNA, 122 bp, Homo sapiens
gatgtttcatgccaaacaacctggcaaaaaagaatacacccttcaagagtcccattctaacggaatcattggtctgaaaggggctgtagaaagcgtctgtcttaataatctcattttacaca

SEQ ID NO: 117598 - DNA, 122 bp, Homo sapiens
aagggcgctgcgaccacccccgtcccgggcctcagcccctctgctgcagaccctcgggatcgtcgctggtaggagctctgtcccccgtgtctgtgtccaggacccccgaagcgccgcgccta

SEQ ID NO: 117599 - DNA, 122 bp, Homo sapiens
ggtgtctgctgggccgaggggcgcaggccactgtgccgcgggggcggaagcggtgaggcgcgctggcttctcacatgacttccctccagggcccagctgatgctgccgggaaaggaccgcag

SEQ ID NO: 117600 - DNA, 122 bp, Homo sapiens
cttggcttcttcccatggttacatcttacataaccacagtgccaaatctaagccaggaaacgtgtgcagctacaatgtgagcacagcagtcccttggtatccacggcgattggttccaggac

SEQ ID NO: 117601 - DNA, 122 bp, Homo sapiens
gaccgggcggtgcagggctcactcggctggcgtcccgggggatgggccaccaggagtctccgctggcccgggcgccggcgggaggtgcagcttatgtaaagaggttatgtaaagggctcagc

SEQ ID NO: 117602 - DNA, 122 bp, Homo sapiens
gtcccggagccgcttggccgcctcagtcaataccccggcttccggtcccgcccgctagcgcgtgatcgttgtcaaccaatgggaaggcgtaaccgtacacgcaagcacgtgatgcggggaaa

SEQ ID NO: 117603 - DNA, 122 bp, Homo sapiens
aggggggcggggcttgggagttggggcggggcccgggtgaggggcggggcctcggggcgtcgcggacgtcctggcggcctactgcgtgggagggagtcctgggccgcgccccgcgaggccgg

SEQ ID NO: 117604 - DNA, 122 bp, Homo sapiens
tgaaagtgagccaggacttagtttgtgctggcaccaaggaaatgcctttttccccagagccggcaactaaactataagaggtaagcagttctcagaggagacagaaggcaacagctctacca

SEQ ID NO: 117605 - DNA, 122 bp, Homo sapiens
ggcctcaggcctcgacgccctgggacccttccggggtggggcgtgctgtcccagggctcacggccattcatgaagttctggaacctgcctacctgagggcctttataagagtcgctggctgg

SEQ ID NO: 117606 - DNA, 122 bp, Homo sapiens
tctgaagagaaaatgcctcctggagagagggagagacagtttcccatattataaatgtaacggaggattttcatcagtgggagtaccagggtgaacacctgttcttcagtaggttcctaggc

SEQ ID NO: 117607 - DNA, 122 bp, Homo sapiens
cgctagcgcaggcattcgcgtaggccaatggagagccggcggaggcggggcgccgcgctccggaacccccagcggggccgaacttaactactgaattgctggagttggttcgtgggccgggg

SEQ ID NO: 117608 - DNA, 122 bp, Homo sapiens
tgccggccctctctgttgtcccacttggcacggactgggctaccgccacggtttgacttccgccaccagcaaccaagggaaccagatcccaagggaaccagcacccctgggcgctcgcggcc

SEQ ID NO: 117609 - DNA, 122 bp, Homo sapiens
aggcaggtcctgccttttatccttccattgctttccttcttccttccctttccctttcagcggggtggcttcagtttttaaggaggctattggtccccatggcaacttagacacatcagaga

SEQ ID NO: 117610 - DNA, 122 bp, Homo sapiens
gcaggcgcacttcctgaagctgaaggtcagcatagacaaagggcctcagaatcgcgcaggcgcaattgtgccctggttcgccaagatgtcgttcccaaagtataagccgtcgagcctgcgca

SEQ ID NO: 117611 - DNA, 122 bp, Homo sapiens
gaatgctacactaagggggactgcgttcaaatgggcagtctttgctggaaacctcgcctccgcgcgccttccctcgctcggattcaggcgcttttacgttaagggttgaatttttgtgtcaa

SEQ ID NO: 117612 - DNA, 122 bp, Homo sapiens
gtggaaatctggggttggcccaacacttgtgcccccagtctgtaggaaccccaggggtctcggggctggagggtggactacagtcctgcccagagcaactgccggcatttgggctaacactg

SEQ ID NO: 117613 - DNA, 122 bp, Homo sapiens
agccgtgacagcggggggcaaaaagccgcggcgggtaaaacgccgtggcgggtaaaaagccgcggcgacaaaaagccgcggcgggcaaaaagccacagcggcggtggggcaaaaagcagcgg

SEQ ID NO: 117614 - DNA, 122 bp, Homo sapiens
ccttggacctccaccaaggaggcagcctcaagttcccagacagtaaaatgggaaaacgctcggcttcttctggagcagaaacaagagctgctagataagggtggtttctttgccctcctaga

SEQ ID NO: 117615 - DNA, 122 bp, Homo sapiens
tagcacccgggccagcagctgcggaaggtgtgctgggtcgcccagcactgccggcccatgcgcgacacgcttgaattctcgctgggcctcagccacctccctgcatggcagggctcgggacc

SEQ ID NO: 117616 - DNA, 122 bp, Homo sapiens
tgacccaaagctgcctgaagcgctgctcggtgtgcacttgaaaatcagcgaaatgctgagcgttgcttcttccctctctccagggctttgatgagaaaacgtgctgctttgtgcgggcgcat

SEQ ID NO: 117617 - DNA, 122 bp, Homo sapiens
gttctcttccgcgtgggggagcggcgggcggaagaggtctggggctgggcaccggggacacgcgcccagctcccctggcctccctggggggagtggccggtttcagtgcttccccaggtgaa

SEQ ID NO: 117618 - DNA, 122 bp, Homo sapiens
gtcagggagaagccgcttttggttgcaggagggcacctctttgaaaattactcaccttcccgccctccactgggagtaaagcgagctgtgcccagcttctccccgcgctcacggaagcaggt

SEQ ID NO: 117619 - DNA, 122 bp, Homo sapiens
ggccgaggtgggaggcagccggcacttggctccagcttggtcctcgcgactccccaaaaccgtatataaatatatctcttataaaagccgagaggaagcaaatcagattccaggctgctgcc

SEQ ID NO: 117620 - DNA, 122 bp, Homo sapiens
gttcgccagaggttacttctgcaaagtaggaagaaacgagcaatacgatggtaatctttgcgcctttgctaagatcttttgtaggttccttatgtcttactagccacttgttgaagtcctgc

SEQ ID NO: 117621 - DNA, 122 bp, Homo sapiens
gttggttaaagggaaaggcgagacttagggcgagaccgagcggggctaattgaggcgacccggggaggggcgggaccgcggactggatttcgacttccaaattcccacgaggtataggagtc

SEQ ID NO: 117622 - DNA, 122 bp, Homo sapiens
cagcgtctctaggctgcactgcctgctgggataccggaggactcaaatgccacctctctccgccctagaggatgagccgcggctcgggggtgggaggcgagaggaagaagaggtggggctgg

SEQ ID NO: 117623 - DNA, 122 bp, Homo sapiens
gcaacctctgcctcctgggctcaagcaattttcccatctcagtctcctgaatagcagtcacgtgccaccacacccagctaatttttgtatttttagtagagacagagtttcaccatgttgcc

SEQ ID NO: 117624 - DNA, 122 bp, Homo sapiens
aggaacctcaagtatttcacagaatgatgccaaggagcgcagtttctacaccatccctcccgatcagaccacatctattccaatctcagtctcaaactcttcccctttttcaactcacatta

SEQ ID NO: 117625 - DNA, 122 bp, Homo sapiens
gcgcggaaagttccggcagaacaggcagttttcaaagtttctcaaaagacggcgaaggagcgcttcggctctcaccagcaaacacacacacacaacacgctcgaaagtgctcagggaaaagt

SEQ ID NO: 117626 - DNA, 122 bp, Homo sapiens
agattaaaatgctgtgcgacctgcaaagaaacaatgtgaagtgtatacctagagccgctgcgcttcgcaggcgcgggggggattggcagcatctccttcagaaattactgtgaaagaggagg

SEQ ID NO: 117627 - DNA, 122 bp, Homo sapiens
tgttgctcgggggttcggacgccttgctaaggctggcacgcagcggaccttgagtagctgcgctgtgtactgaacgtgtgcacagcttctccaggcaaatgtgcaagcggaaagacctcatc

SEQ ID NO: 117628 - DNA, 122 bp, Homo sapiens
tcccagcagggccaaggccacaggctgggtcccagggccccagggtagaggccacagcgacgagcactgtggagagaaccggaaactgctgccgtgtcacccagcactcgctctggtggaac

SEQ ID NO: 117629 - DNA, 122 bp, Homo sapiens
gttccaaagcgcagacccaagtgggacattcgctacattgttggcattccacgggcgtcacgtgaccccgcctcccgcgtcactctcggccgcataccagtccgggcggggcgcctgcggcc

SEQ ID NO: 117630 - DNA, 122 bp, Homo sapiens
gcctcagaaaccgagctggcctactgctgtccggagaaaccaaaggcactttccgtcctccgtggctgcctctaatagtggcatgggggtggggttctgatccacacactagccacatggcc

SEQ ID NO: 117631 - DNA, 122 bp, Homo sapiens
cgtttccctacctattctctcgtagggacacccgtcctcagctctgcccactgtccctgacgttttcagaaacgttaaaatactagtgttcggaggcttctagcgaagagggagatgttttg

SEQ ID NO: 117632 - DNA, 122 bp, Homo sapiens
gcgcagacattgcacctacccaccctctggctctccctcactgggagacaggataggaaccgcaccgacctcgcagagttcttctgagtactgaattcttaatgtgtgcaaagtgcttagca

SEQ ID NO: 117633 - DNA, 122 bp, Homo sapiens
gtctctgcggctcccttccattctgagaggaccgtgcccccttatttttgacctctaagccgtgggtaaaacaagaaccctaaggaatcgcctggcagtccagctgtctgtgtggatgccga

SEQ ID NO: 117634 - DNA, 122 bp, Homo sapiens
ggctccatgccactgttggccatgcagtcttacttgtcctgacccagaagttctgcctgtcggctgtctacagagattgaccagcagatggtctactgctgttttcaaggctttttgctgaa

SEQ ID NO: 117635 - DNA, 122 bp, Homo sapiens
cgcatccaaggtcacttgtgctcgcagctccacctggagccgttgccactgctgctgctgcgcttccagtcagggtgggccgctggcctcccactgggcgtcagtttggctcccaggccctg

SEQ ID NO: 117636 - DNA, 122 bp, Homo sapiens
caaacccttcatccagataaggggtaacggacagggaccgcaaaaggagtacttaaaacccggaaaactttgtaactgagccccttcagcctcttgctcaggcccactcccaccctgcgtag

SEQ ID NO: 117637 - DNA, 122 bp, Homo sapiens
tgctggtgactcattcaagtctccctgcaaaccaattcattaaacctgcttcatctgggacgtgctgagagtggaggtatatttcaaaagcggtttggcagcaacgctgcaattaaacaagg

SEQ ID NO: 117638 - DNA, 122 bp, Homo sapiens
gcctggtagcctgggggctccgagacagacctataggctgaggctggtaccccctctgcccgaatacgcctcgggctggccgctgcagagctttcaggggtggccaggtccccaggcctact

SEQ ID NO: 117639 - DNA, 122 bp, Homo sapiens
tgggcgcggctcggggagctgcgctttgcggactggaggtggcgaccgtgcgagcagagacgcccctcaccatgggccaagagccctgaccctaacaatgggaaagggccagggcccttgtt

SEQ ID NO: 117640 - DNA, 122 bp, Homo sapiens
gcgggcgtgcgcgagtgagctcaggtgtgagcgccggggagcgagcgggcgggagaacgacgcgcgcgcgtggggcgccggggccgcgcgagccgggtgagtgccactgccgttaagggggc

SEQ ID NO: 117641 - DNA, 122 bp, Homo sapiens
cagcttgcccatttggtgcagggagatagtccagcccaccctgaaattcactgtgttctgcggatgagttaactgaagggctgtgtttcaggagtggcacagaaaggacctgaatgaaagga

SEQ ID NO: 117642 - DNA, 122 bp, Homo sapiens
cttcagagtcctgactctccattattcatttgatctgcaggatctggcacatctcccagccgtagtagagtttataagctcaattgtcagccaccttgtaagatcgaagagtatcggcctat

SEQ ID NO: 117643 - DNA, 122 bp, Homo sapiens
caccattctcagattcgacgtctaactcaggagacgctgaccttcgaatcgaagggaattcggagagtcttggtataagccggctggttcaccgctgttaatgccagccgagagggaaaaaa

SEQ ID NO: 117644 - DNA, 122 bp, Homo sapiens
caaagagctgctgctgccgctggaggtggttgggagtgtcgatgggtaccaggcgggctccgccctccgccgggcggcacaccagcagccagccttcctgcagcccgcagtcgcccaggtgc

SEQ ID NO: 117645 - DNA, 122 bp, Homo sapiens
gtccacttcgaggaggacttccacaagctcagagaactccagaccacaggtgcgtgtggtcggtgggtggtccgggttctggcgggtggagtacgctgggctggccgggcagggcccccata

SEQ ID NO: 117646 - DNA, 122 bp, Homo sapiens
acccccactattttttcttcctgtccctcatcgtgccgccctaactctggctcccggttccgtttttgacagtaacggcacagccaacaagatgaacggagctttggatcactcagaccaac

SEQ ID NO: 117647 - DNA, 122 bp, Homo sapiens
gacctcggggccgccctgcggtctgtgattggttctcgagtgcaatgctccgccctggggcggggctggagggaccaaaggctacgtgcgcgccttgcgcttcccccagctcctctgactgg

SEQ ID NO: 117648 - DNA, 122 bp, Homo sapiens
cgttattccgtttctatatcagtaaacacttgtcattttccgtagaccagggcggggtgacgggtgatcccagtcctcgcagtgaactctggggcgcagaattcaaaacgcttgcggtcgcc

SEQ ID NO: 117649 - DNA, 122 bp, Homo sapiens
cagaaactggctctggggaagcaattgattcgtctactgccagcagcccggagttgcctacgcggactggaaaggaagggagaagggagagagagagagagagagagagagagagagagaga

SEQ ID NO: 117650 - DNA, 122 bp, Homo sapiens
gcaatggaggagggtccccagcactgtgttgccatggagtggacagtggggctgaagacccgtgtagcccgaggcagcatttttgacttgaatgttcatatgtaccactggggatcttggta

SEQ ID NO: 117651 - DNA, 122 bp, Homo sapiens
gcacattgtaagggaagggaggctcagacggagggcccattgggcgcagggggcccaagccgtgggacccccgaggagggcagctgagccagctgctccgggctggccagggcgcgcagcag

SEQ ID NO: 117652 - DNA, 122 bp, Homo sapiens
atccttcctcggactccaactcccgccgtgccttgcgctgagatccctgcggcaaagaaccgggctgtgtccaaagtgttctctggaagttgtagttcctgtattggtgaggcaaggaggag

SEQ ID NO: 117653 - DNA, 122 bp, Homo sapiens
ggctactcagcagtgtacagtgtgacttgtgtagtcatacatccccactttaacaaccctcgcttctctcttcatttttgcaccctcctaccccttcccattgtgattcttgttttaatcgg

SEQ ID NO: 117654 - DNA, 122 bp, Homo sapiens
cgggagatcggcgcttgctgcggcgctctgaccctcgctgcttccagccgagcccagtcccgagccgccgccgcctccgccgccgcctccgccgcctccaccacctcagagccggacgcccg

SEQ ID NO: 117655 - DNA, 122 bp, Homo sapiens
ttcctttctctaagacaaacctaagtaaaagcctgagctttgagtcctatgctcagcacacgggaaggagatgttaataattaaaataaagttgatatcctgtctttagggagttcccttga

SEQ ID NO: 117656 - DNA, 122 bp, Homo sapiens
gtttttgaaagccatcctgtgtattgctaagttcttgtattattttaacatagagtttaacgttaatatttgggaaagagttagtgcattggacctcaaccctgactggacatgagaatcac

SEQ ID NO: 117657 - DNA, 122 bp, Homo sapiens
taccagacctcctacccgctgcctgaccccaggcagttccactgcatctctgtgggtaagcggggccgccgcgcagagggaccgggcagaggtgatccgaagcaggatggagagccagagat

SEQ ID NO: 117658 - DNA, 122 bp, Homo sapiens
gctcatctgtagctagagaaccttcattaggcttccagaggcccagttccccgccccttacgccaaagcccctgccacctgctgccacctgcaaaggggtggatgctgggaggaggaggagg

SEQ ID NO: 117659 - DNA, 122 bp, Homo sapiens
gtttttagtgcttggcacttggtgtggggaatcaggctgcagaagttcccggagcatccacgttcctggcactctgcccagtgcttggtaggctggaaggtgggtttgggcatttctttccc

SEQ ID NO: 117660 - DNA, 122 bp, Homo sapiens
ccttaagtgtggcccaggaatgatgtacataccagggaaagaaaggacagcagtcacctccgacaatgctccgttctatggaatattgattaactgcattttggctggagacacccaagtga

SEQ ID NO: 117661 - DNA, 122 bp, Homo sapiens
agaatcaagcaccctccaaatatatggccaagcagccttggaggcacctaatgagtccaacgcagtcttcccatgtgtctcagaggctgctgtctgtagtgacagaggtgatagaatatggt

SEQ ID NO: 117662 - DNA, 122 bp, Homo sapiens
gcgtcggcaggaggcgggaccagggcgtgggcggggtcaagtccgggaagccgcaggaggcggactcaggcgcagcacccagcagtgagcacggcgtcgtgcggtcgggacctggacttctg

SEQ ID NO: 117663 - DNA, 122 bp, Homo sapiens
acctcaggtgatccgcccatctcggcctcccaaagtgttgagattacaggcgtgagccaccgcgcccggccgctagcgtgttatcttttctaagcatcagtttccttatctgcaacaccagg

SEQ ID NO: 117664 - DNA, 122 bp, Homo sapiens
acgcccactggggtccacaagcgcatgctgaacacaccagtgatcatggtggtaggccctcgctgccctccgggttgaggctgcaggaggcaaacacaagtcttctgcgggcgccggggctc

SEQ ID NO: 117665 - DNA, 122 bp, Homo sapiens
tcggccgaaactttcccaagccagggtgtgcggagcttccctgtactgcagccaaggtgacgtgtgacttggatttgagtggagttgggcttagccttagtctcattcaatctccattatta

SEQ ID NO: 117666 - DNA, 122 bp, Homo sapiens
ggggcagggccggggagctggggacggggtggtctttagggtggcggcttcccccgaccccggacccgggaaccggccgccggcgcggggcgcgatctgcactgccggtcccacaggagtta

SEQ ID NO: 117667 - DNA, 122 bp, Homo sapiens
tctctcgggcgtcccggtcctgctctgggggtgcggggagtgctcgtgcctcctgtggggcgccccgctctccctcctgccgctggccagcgggctcggccggcccacgctcctctgtccgt

SEQ ID NO: 117668 - DNA, 122 bp, Homo sapiens
ttgaaaacctcactcaatctttgaggtctgacagggtgtcacatgaacagttcaaagcaacggttaaaacaacaacaaaaaacccccactagatttgaaacaaaagctatcttgattatggt

SEQ ID NO: 117669 - DNA, 122 bp, Homo sapiens
ggccgacgtgggccggctgagccctgaggttaaggcccggtcacagtcagggaccctggacggggaaagtgctgcctggtcggcctcgggcgaagacagtcggggccagcccgagggtccct

SEQ ID NO: 117670 - DNA, 122 bp, Homo sapiens
cggccgaggaatcaaaaagacaaccataatgccattttcaaacctaaagtaatagtgatacggagacggggaaatgaatgatacctcgctctgacctttgaccataagccctaactctggat

SEQ ID NO: 117671 - DNA, 122 bp, Homo sapiens
tacctcccaaatgggacggctcgtgattagcgtggagcccgtgaagtggtagctgtgccgcggcctcattgttttattccagttagaaccgcctccagctttgacttttccagcagccaagt

SEQ ID NO: 117672 - DNA, 122 bp, Homo sapiens
actcctctgtgactcacatgctccattgtcctgtcacatttcacttacaaaacacaagctcgaagataacatgcttaggaatttcaagacagccacaacagaacatcaaaccaaatgaggga

SEQ ID NO: 117673 - DNA, 122 bp, Homo sapiens
ggaaaagggagagagacgggattaaaaaaaaaaaaaaaaaaaacttccgggtctcatgaccgggaagggagaaaaacaaaagggagacgagacacaactctaagggaaggatgtgtgtgcgt

SEQ ID NO: 117674 - DNA, 122 bp, Homo sapiens
aagcccatcaggccactaaccggctatgtgattgctggggattaccgcccatccccgcaccgctccctggggacggcaaaccctccacccggaacagatgactgagaaaataaacgtttggg

SEQ ID NO: 117675 - DNA, 122 bp, Homo sapiens
ttctgaaaagcacgcggccctggcctgcgcaccacccagtctgaaggcgacgcccctgcacgaaggagtcaggcctaggggctcgggacccagggcgacactcaattttctaacaggagcca

SEQ ID NO: 117676 - DNA, 122 bp, Homo sapiens
acacaaaattagagcccccagtaaaaacagccagcttctagcatgcgtgtaagcatttcacggactctctggcctgtatttttattcctgtttaaaaataagaaaacaggcacagagagggt

SEQ ID NO: 117677 - DNA, 122 bp, Homo sapiens
tgtccctccatagctgcgcctggccatcccccctccctgctctcttacctccacatctgacggtctgcagagtcctgggtgtggcccctggactccccgttggctccttagactgtccctgt

SEQ ID NO: 117678 - DNA, 122 bp, Homo sapiens
caggttcaaggaaatgcttggaaatttgagaaccagagcattggcctgggctgtggctctcggcagggagagacggccgcccagagcagcgagtggccaggaagtgtatcctagccccccac

SEQ ID NO: 117679 - DNA, 122 bp, Homo sapiens
tctcctctgtttctgtgctggcgcgcggacgccttgggaactagaggcgggcagcctcggcgaagcccaccctgttgttgtcacggtcaaacacagtgtagtagcggccgatgaagacgtcg

SEQ ID NO: 117680 - DNA, 122 bp, Homo sapiens
cttactgtgctaagacagcaaggcccggcggaggtggcaatggcagacctggtttctcggcggagtcccagtgggaggcccggtgtccaaaatcctcaactagattgggcatgccgtttatc

SEQ ID NO: 117681 - DNA, 122 bp, Homo sapiens
aggcacagggccatgggcatgctggtgaccgggcacagcttctccagcctggagccttcccgtccttggtgccgtcctgcacccgcagtctgtgccggggagctcagcgccctgccactccg

SEQ ID NO: 117682 - DNA, 122 bp, Homo sapiens
aaagagaaagaaaaccaaaagaagtcccgctacagtgacctgcaacgcgcgcacgctcgccgcggcggtcacttatagagcctgcctggaaggcacgcctctttattcaaaatggcccgcct

SEQ ID NO: 117683 - DNA, 122 bp, Homo sapiens
cggcattgcatagtcctttgtgactgacacgtggttccaacgctcatcggtgctgcagcacgcataggtgcctccctgtttttcatggctaagtaatattccaaggtgtggctgttcattct

SEQ ID NO: 117684 - DNA, 122 bp, Homo sapiens
tttccctgggaagaactcgaagaagttggatgtctgatcttcaccttggatttgtggtctcggcccgcgggcgactcaccccacccaccaggatcccacgaagccgggccggctcagcccgc

SEQ ID NO: 117685 - DNA, 122 bp, Homo sapiens
ctttccacacagccggaaaaagtaataaacttaagaacctcaccccagcatttctctctccgaagcgggcgcgggttgcagcacgcgccattttatagtgcgcgccgctcgcaaggccggtc

SEQ ID NO: 117686 - DNA, 122 bp, Homo sapiens
gccctctgggctgtcaccttcactgtggctcatttggttccctcctaagtcagaccccttcggcggcctcccaggctgggtctgcggccatcaccctgtgccccccctcccaccccctatgc

SEQ ID NO: 117687 - DNA, 122 bp, Homo sapiens
acccccggaggaggggtcgggaggacaggggagggggcagcacataccagcttggtccagcgcacgatgtcctcccaagagaaatgcttgctggggaacttctccttaaactgcttctcggc

SEQ ID NO: 117688 - DNA, 122 bp, Homo sapiens
gaatagcgttgcgcgcatgcgccttgacgagtgagccgggtgagggggctccctaagtagcggaaggggtagatgaaaatggaaggggcgggcgcgctaggcctagtcctggctgggctccc

SEQ ID NO: 117689 - DNA, 122 bp, Homo sapiens
catccccctctccttccctcggtattacgatacacatcgcaggggggcgggcgacccctacgatgcggggagaaaaatcaccccccacccctgatattacgagccacatcgcaggggggtgg

SEQ ID NO: 117690 - DNA, 122 bp, Homo sapiens
gacggggtttcgccatgttggccaggctggtctcgaactcctgacctcaggtgatccacccgtgaggtcaatgaccatagccaacattgagctctaatgggctttttgttaaaggctggata

SEQ ID NO: 117691 - DNA, 122 bp, Homo sapiens
tgtgttgatacgctccaaatattcattaccaggtacacacaggtactcaggctcgctccacgagactgttaatttcactagttgagggaattttaatctccgagattgacctctttcagaaa

SEQ ID NO: 117692 - DNA, 122 bp, Homo sapiens
cccttattgttgctgtgcttgttgcttttgtgggtccttcctactccactacagagagttcgtggcatccctagaattactccctgagccttaggtcctgtggttttctctgctttaggaga

SEQ ID NO: 117693 - DNA, 122 bp, Homo sapiens
gccatgaaccagtgtcctgttcatttcattcagcacggcaagctcgttcggaaacaaagtcgaaagctgcgagtaagtgacacccgacacatttacgctggtgaagtccagtaactgtttaa

SEQ ID NO: 117694 - DNA, 122 bp, Homo sapiens
agtttagggaataattacaacatgcatcatgtttcaattctattcttactttattcctttcgttgagtcctggactttgtttataacaatactaactgcatatttcactcacacacacacac

SEQ ID NO: 117695 - DNA, 122 bp, Homo sapiens
tacttgcctgctcttccattggtcgtgggtcacacgacgtgaactggggcggtggcagcacgccaggcctctgacgtcccagggctcaagcgcggaggacatgtggaactccactccaaaag

SEQ ID NO: 117696 - DNA, 122 bp, Homo sapiens
caggcaccatgaagagcaagcctcactttctggcctctgtcttcagggaggatatgcgagcgggtgtgggagagggaaggagctttcatttgtgaaaacctctgtttttcctaatggcacct

SEQ ID NO: 117697 - DNA, 122 bp, Homo sapiens
gtttaagtacttccaacacttttgctctgcatactcatggtgcaaacgaggtgggaagggcggaatccctggcctagctctgcgagagtggggtttcaggtcaaagcaggtctggcagctct

SEQ ID NO: 117698 - DNA, 122 bp, Homo sapiens
aaacactgtttactttcggagtatttgcttgtttctgcacattcccacccagcttcagtgcggtgtccttgaacagtgattacaactgtggggttgtggtttctccttctgtctgcaggaaa

SEQ ID NO: 117699 - DNA, 122 bp, Homo sapiens
cgcatctatttttaggcctgacttaagttgtttgaaagccagtcgtacccttcgccttggcgtaggtaacacttctccgtatatggtggtgtgtgagataactcgtttattctttatctcat

SEQ ID NO: 117700 - DNA, 122 bp, Homo sapiens
caggagctggactactccaaggacatggctcggtttccagggtccccagagctgggacgccgccgggaaaccatggtcctggaggggagggagttatttgagggggtgcttgtccctgcctc

SEQ ID NO: 117701 - DNA, 122 bp, Homo sapiens
cgttcagccctgactggtgggcgctcggctgcctcctgtacgagatgatcgcaggccagtcgcccttccagcagaggaagaagaagatcaagcgggaggaggtggagcggctggtgaaggag

SEQ ID NO: 117702 - DNA, 122 bp, Homo sapiens
cacttccatgggccctgggattgggatcaggcctgaactcaactttcccagtggagtggccgccctgggggctgagggccttccccagggagcctgagtgatgaatccgggagaagcaggtg

SEQ ID NO: 117703 - DNA, 122 bp, Homo sapiens
atttattatatactttatatggccccacagaaatcatctttgactaatatattactagagcgacatatgactatattacaagctaaaagaaaaaaacaacacagggtcaataaactatctgg

SEQ ID NO: 117704 - DNA, 122 bp, Homo sapiens
tgcttgctacccaccatctctttgccacagaccagctgtgtccccattcattcccacctccgctattgctttttcaatccacacatgccagaaccagaatggagaatggtagagaagggaaa

SEQ ID NO: 117705 - DNA, 122 bp, Homo sapiens
acaacaactacaatacttaccagacagcacagtcaacctccagcaaaagacctctaatcacgagggtatctgtggggcaagtgatacaagaatggggagggatatgggaatagctagagctg

SEQ ID NO: 117706 - DNA, 122 bp, Homo sapiens
ctatgattggtggtgcagggtgaatgtcacatttagatttcagcatttgaggcttccagccgtactggcagaactgagaggccttgctcatgcgacttgaaacttaagcgctgtttccagac

SEQ ID NO: 117707 - DNA, 122 bp, Homo sapiens
cgtcctcctccgcgcgcaccagtggggctgcggggaagggtatccagtcttgccccggggcgtgtctccaggtacctccatcagcacaggcccctgtccccgccccacccccacagccagcc

SEQ ID NO: 117708 - DNA, 122 bp, Homo sapiens
tggaaccctcctacagtcacagagacagaaagtgccccgagggcgtcgctctggtcctggcggagatggtctctgatggtctgccttgatgacttatggggacacctgtcgggggttctgct

SEQ ID NO: 117709 - DNA, 122 bp, Homo sapiens
acaaacctgacttgccagagccacagccatcacagttgagcttcaattcagagctcagtgcgactcctgcctgatcaatttgtcatccctctaaatggaaactaattacttcccagggaaag

SEQ ID NO: 117710 - DNA, 122 bp, Homo sapiens
ggaggttgcatgagggtcagctcgtggtttcagtaaggaggggcgggcgggggaggcggacgaaggggagtgaaaagcaatggaaaattttaaaagatacccccgtccaccttctaattgtt

SEQ ID NO: 117711 - DNA, 122 bp, Homo sapiens
agggatggggagatgggaccccaagaaccccaactaggacccgtactcagggtcctgagccgggcgctgtgttccaggaccatgtaccgcgttatgtggcgggaggtgaggcgggaggttca

SEQ ID NO: 117712 - DNA, 122 bp, Homo sapiens
gggggccgaacgcaaagggctgggctgggctgggggcgcctgagcgggtcagaggttccccgccctgctgggacaccggggtccggggcttctctttccattcccaggcatcgattcttggg

SEQ ID NO: 117713 - DNA, 122 bp, Homo sapiens
ccacgttccggcgaccccttcatccgcagcagccagcgctggaagaaaggaacgcgccggcggccccaggtccccggtcccggcttcccccagtccggggtcccctcgtcccggcccccggc

SEQ ID NO: 117714 - DNA, 122 bp, Homo sapiens
catcatgactatgcgtctagcacaagacggtgacgatcgcaaacatgtcatgatagttgccgaaggtgctgtggacaaacatcactcccttccctccacgttagagacaagatgggaaagag

SEQ ID NO: 117715 - DNA, 122 bp, Homo sapiens
ggtgatttttcttctcccttctctcttctaatcaggtaggaaaaatatgtctcagaatcccgaacagagtacccctgatgtcttcttggccaggataatgagattgttgttatggtctccag

SEQ ID NO: 117716 - DNA, 122 bp, Homo sapiens
cacgtcaaaactaaacccaaattaattggcgaaattgggactcaacacctccaggagccacgcagcagaaagccccaacacactttaaattagcttacctcatcatatttgaggaaagcaga

SEQ ID NO: 117717 - DNA, 122 bp, Homo sapiens
gtacttcccgctagctcagattcacttcgtcagtggcgagcgactcatcactgacccggccggcgagatggggcgagtccaggacttcctgggcattaagagattcatcacggacaagcact

SEQ ID NO: 117718 - DNA, 122 bp, Homo sapiens
atgtcagggttccgggcggcgttgacggcaggggacaaggacgggagcgcatgcagcaggcgctctccctgcgttccggctggggcccggctacacgaggctcccctctggctcctggcacc

SEQ ID NO: 117719 - DNA, 122 bp, Homo sapiens
agctcggccccgcccacgccctccgctcccacccgcggggtcagcgggatccgcagccatcgcttgcttatgccaccaccccggccctgtgaaacgggtgtgcgcctctcagctctccgagc

SEQ ID NO: 117720 - DNA, 122 bp, Homo sapiens
ggctcgcaggccggcgatttggggacgggcgaggctgggccgtcaggaccacagagggcacgtgggagggaggaagggaggcttccttgggagtgaaggatgccccgtgtcttcctgagcga

SEQ ID NO: 117721 - DNA, 122 bp, Homo sapiens
taggaatagaggatatggtgttcaaggtgggtgtttttctccgcctcgattgaagagcttcgcgctctttggattaacagccaggtcattcacaattcagtgttcagtttttctattggggt

SEQ ID NO: 117722 - DNA, 122 bp, Homo sapiens
tcatgggcgtagtagttctcaggtcggcgggctgtggaggtgatcagagtgggagtcaggcgggctaggccggacccggagggaggggctcgggctccgggaggcagctgcggctccgactg

SEQ ID NO: 117723 - DNA, 122 bp, Homo sapiens
atggagagacagacgctggctgagtgcgtcctaggctgggttccagggtggtcccaggagcgccggcagtgagcagttcagggctgtgggtgcggggcttggtccagcaggcaggagcagcc

SEQ ID NO: 117724 - DNA, 122 bp, Homo sapiens
tacagtattttaaaacaaagggctggcaagaaattacatattctgaataggtcattctggcggccattagagcaggtaagaaactgaaggcaagaccagttgccaggctacggaaataattg

SEQ ID NO: 117725 - DNA, 122 bp, Homo sapiens
gccggcctatggcgcggggcgcggcgcggggggcgggcctggcgggcggggccggtgcggcgcaaggtttggcgaaggttacagctggagctaggagtgacaggcccacagtcatccgtgcg

SEQ ID NO: 117726 - DNA, 122 bp, Homo sapiens
gcacggcctgaggttatgctggtggtggagggatacatctctccttgccacaaggctcctcggcggcccctcccacaggtggccaccctgatcgaccgctttgtgaagggaaggggccagct

SEQ ID NO: 117727 - DNA, 122 bp, Homo sapiens
taggctgccctgcccttttcttccttcgctgtctgagctttcttgaagggaaccaagggtcgtagatcccccagggctgggcccttctgaaaggctccatggtctctggagagcagtcaggt

SEQ ID NO: 117728 - DNA, 122 bp, Homo sapiens
cattaccatgtgtccagtaagtgggtaaaagcagattagaatacaggtctgcctccaaatcgactccaaaatctgtcttctccacaagtattgccttgggaggtgttcattttacttctaat

SEQ ID NO: 117729 - DNA, 122 bp, Homo sapiens
tgtgcctgggagatgttactctttccccttgctgtggggctggatattttctaaccagaccgtgttgtacctccagttttgtagagagagtctcgagtctcatggtttatttaaaatgtttt

SEQ ID NO: 117730 - DNA, 122 bp, Homo sapiens
ctgtaaggcagagatacaccatgtcacactggggaagccactggggacagccaggccagacgggggacatgcagaaagtgcaaagaacacggctaagtgtgctggggtcttgggatggggag

SEQ ID NO: 117731 - DNA, 122 bp, Homo sapiens
tctggatgatactaacacctgactttgtagattgagtaaagcagattatccttcctaatccggacgggactcatgcagtggttcccctgctgaatatcctattccaaatcctggatttgcaa

SEQ ID NO: 117732 - DNA, 122 bp, Homo sapiens
atcatcgatgccaccaagtgtggcaacctggccagattcatcaaccactgctgcacggtgcgccaggggccagccggggcaggagttgggggtcggtgggggtggccacggctcacacgccc

SEQ ID NO: 117733 - DNA, 122 bp, Homo sapiens
accagtaggcctggtcttccccacccagcgtctccccgttctctgggacaatgtggtccacgtgattctcaagctgaggctcgctgggccgcccacgccctgttggggtctttccgagcgag

SEQ ID NO: 117734 - DNA, 122 bp, Homo sapiens
cacatcccccagaatgctgggaattgagtgaatctgacccaggtgccttctggataaaggcggaccacatccttccagaatgctgggaactgggtgaatctgacgccagtgccttccagatc

SEQ ID NO: 117735 - DNA, 122 bp, Homo sapiens
tggccaagtttgtctatcaatggagcacacgcgagccgggcggaagagcacgccaatggccgctccatcaactctggcagttgtgtacattacgccttttgatctcagaggatgctgtattt

SEQ ID NO: 117736 - DNA, 122 bp, Homo sapiens
gaatagcaaagtaattaaaaccattttcagaaagtgaactactttcttaaaacagcatgccgaaagtggtccagagttcaagattttgaaaacaaaaacaaagttggtacttgaattcacag

SEQ ID NO: 117737 - DNA, 122 bp, Homo sapiens
ccaactgggtccgaccgcttccgtccgctggcgccgggtcccccagacgtctgcggcgagcgttggaactgaccatcaacctgggatttctaaggaataacagataactctggtcagcagca

SEQ ID NO: 117738 - DNA, 122 bp, Homo sapiens
ccttttatcatttactgaacttagcctcctcaagactttttttcccatctgcccaaattgcgaagctgagccaaaaaaatttttttttaagtattgattttcttacctgttaaagataatgc

SEQ ID NO: 117739 - DNA, 122 bp, Homo sapiens
tcacatgtgccagtcagtctccacgagtctccttgggcatgcgcctcagtgacccctatacgttccccagtcagacgccctccacccacactagcaccatatttatatttattatcttgtta

SEQ ID NO: 117740 - DNA, 122 bp, Homo sapiens
gtggaaacaccatcaggaaattgcgaagaaattctgcggcgggtgcaggatgcccaccctcgggggagcccagctggcatttaatgatgatacagcgtctaaggctgacctcaaggattccc

SEQ ID NO: 117741 - DNA, 122 bp, Homo sapiens
gtgtgtgtgtgtgagagagagagagagagagagagagagattgtgtgtgtgtgtcaagctcggtattaaataggtcaaagagcaacatctggcttctaaacccaccctcaggcctctccacc

SEQ ID NO: 117742 - DNA, 122 bp, Homo sapiens
catctacaactagaaccacagaaaggactcccctgcccactggaagcatccatacaaccacgtccccaaccccagtatttactactctcaaaacagcagtgacttccacttcccccatcact

SEQ ID NO: 117743 - DNA, 122 bp, Homo sapiens
cgcgcccgttgggcactgggggacgcgggcgcgtcaggtgaagactgggggccgcaggcgcgctaggtaggtgcggggtgcagcgggcgcgtcaggtgaagacttggcgccgcaggcgcgtt

SEQ ID NO: 117744 - DNA, 122 bp, Homo sapiens
aaaaagctgtgtgtctgagaggtgagggcgtgggctttggggccctaaacttgcttgggacgcccgggagggcccccgtggaagcggcgtttcagtggagccctgaagatgggtttctattt

SEQ ID NO: 117745 - DNA, 122 bp, Homo sapiens
tcaacgagcggggcgtggagggcgacttcctcattagggacagcgagtcctcggtaagtgcgctgcgcccacagctccggctgcaggcagtaaatgcgccttgcgcggtgggtctgtgtgcc

SEQ ID NO: 117746 - DNA, 122 bp, Homo sapiens
gccccgaaatgccacttttatggcgctgtttgtctccctgttctgggttctcaatggggccgaacaaaacagcagcgcggagctggctagacgtctgggcttaattgttttatggtttaaat

SEQ ID NO: 117747 - DNA, 122 bp, Homo sapiens
cgctctctccctctcaccctcacaccgggagcgacgcacaccccacccgcccctcagcttcgcaggcccggccccttaaagagacacacacgggccaccgatctgccgccagtcggcgtgcc

SEQ ID NO: 117748 - DNA, 122 bp, Homo sapiens
gctgggtggcgacgagtcggcctcggcgttgatcagcaccaggtgtgtgcgaacagtggccgcggcggggtggagccttggtgagccccgcccccccgcgcggccccgcccccgcgcgtctc

SEQ ID NO: 117749 - DNA, 122 bp, Homo sapiens
tacaaggcagaggctaaaagctgccagtctcccttagcgcagcctgtaatcctattaaaacggattatttcattgtcctgggctatcagatcttgctaagaactcatttaggtcaacctttt

SEQ ID NO: 117750 - DNA, 122 bp, Homo sapiens
cgcaccgccagccactatcatgtccactcccggggtcaattcgtccgcctccttgagccccgaccggctgaacagcccagtgaccatcccggcggtgatgttcatcttcggggtggtgggca

SEQ ID NO: 117751 - DNA, 122 bp, Homo sapiens
ctagcagttctgcagggctcgcagtctcctgcagggttttgtccgcaccgccgaatctcgcgcccagcctccctcaagagccgccgtttgaatctgcgcacgcggccctgaacctcattggc

SEQ ID NO: 117752 - DNA, 122 bp, Homo sapiens
aggcagtgacactgagcgggcgcagggggccgagtcggagaccgtgccggagttcgggagcggcaacagagtgggcatagacactccgagcagcctcgccgtcgtctctgcgttcctgttga

SEQ ID NO: 117753 - DNA, 122 bp, Homo sapiens
gtcggttgttgtcaagatggcggctgcagggttgctgccgccccatctgctattgcccggcgaggtcgccgctgcctcagctgccatcgccgctacaggcaccagtgccgctgcgcgggagc

SEQ ID NO: 117754 - DNA, 122 bp, Homo sapiens
gcagcaggaatcaatgctgccagcagagagggcagctctgactgaagagtgaaatgctggcggtgacctttcttgtcacagcaggaaggtcaaatagtggagattctgctgctggaagggac

SEQ ID NO: 117755 - DNA, 122 bp, Homo sapiens
gccctgcccgctccctagcccgagggccgcggacccaccctgccctgcaggtgtggcgggcgccaggtccctccagggactcggacagcacgcgatttttccaggatttccgactaccaaat

SEQ ID NO: 117756 - DNA, 122 bp, Homo sapiens
gacttcttttcactttactgttcattggcaagctccatcatgcctagttagctgaattgacgctcactctgggcttttcttatatccatagcacaatcaggatttgtccagtgctgttacca

SEQ ID NO: 117757 - DNA, 122 bp, Homo sapiens
ctcagagacatgaattagggcggcaagaccctggaggtgaagagagccgagtatggattccgagttggacacaaagagacgggacagaggtcagagctcttgtccctggaggagttgtttgg

SEQ ID NO: 117758 - DNA, 122 bp, Homo sapiens
agaaccgtctccatggatctgactcagcagtggtcccaagcacaggtctggggcggctcccgggagatgtgtgcccgctcacccaccctcccgagaccgtcctgcagttcaatcacgctctg

SEQ ID NO: 117759 - DNA, 122 bp, Homo sapiens
tctcctcactgcgcagagacactgtcttcatgcaggtcacatgctcccactcctgcagctcgatcctgtgggggccaggggcctcaggatgctgcctggaggccttgggcagaccccacccc

SEQ ID NO: 117760 - DNA, 122 bp, Homo sapiens
gctatggcgcggcgctgctgcgggcctggctggtgctgggggtggcgcctgacgattggccggcaccacgtgcccggcccactctccacagccggcaccgagagctgggtgagttcccatac

SEQ ID NO: 117761 - DNA, 122 bp, Homo sapiens
cttccaggaccatgtggcgccagcacagctgtttccagctgtctcttctttgctgctcaacgcctggccccggggtcagctttccccttagtccatctgcagctaattcttagcaaaaatcc

SEQ ID NO: 117762 - DNA, 122 bp, Homo sapiens
agagcggagagcgaagctctggagacgacccccagaggagattggccaagtgcggatgtgcgagtcctccctgcccgaggcgcaaactgtctcactccaaagggcgtccggagggttctgcg

SEQ ID NO: 117763 - DNA, 122 bp, Homo sapiens
gttttttttttttttttaaggtctagggtaacacggggcttttaagtgcctctccgctgccgcctggtggtccagcccgggccgttgcagtgcagccacacggggagggacacggcgcgccg

SEQ ID NO: 117764 - DNA, 122 bp, Homo sapiens
tcccctcctcgattttcatctttcacggattgaggaaacaacctgtgaacggcccaaagccggctagacccaacctaaccatccgttttagcgggtctcttttctcacacaggccgaccgcc

SEQ ID NO: 117765 - DNA, 122 bp, Homo sapiens
cacccaggccgcctgccggctccgcgcctccatggcaacggccgcgcccccgggccaggccgctaggatgagaagaaaccccagaagcgaagcgactctcctcaccggcatcttggccccct

SEQ ID NO: 117766 - DNA, 122 bp, Homo sapiens
tgtcacggggctgggagcctggggaaacatctccagaccttccaaatcccgggccttgctcgctcatctcatcgttacctcttgcccatctcccaccttgcccttggaataagggatctccg

SEQ ID NO: 117767 - DNA, 122 bp, Homo sapiens
gaggccctaactgcactggacagaggttactgcaggcagaatgctcagtgccactggggccgttaggaagcaaccagaaatgagatgagaagatggagtgaatggtctatccataggttggg

SEQ ID NO: 117768 - DNA, 122 bp, Homo sapiens
caggtccccgtcctgtgggggctcacatggagaggatcggggccacgctgtccagagaggcgatgaggatgccagtctcgcagatgaggactgtcagcagcagcgcccacgtgggctccccg

SEQ ID NO: 117769 - DNA, 122 bp, Homo sapiens
tcagtgtcctcaggaatgtttccctttggcgctgacagcagtgtcccagccggaaggctgcgcacatccactccagcccagacggtgcgtcgctgagactcgctcattgaaaacatccctta

SEQ ID NO: 117770 - DNA, 122 bp, Homo sapiens
gcgcgacctgaggccgccagggaggctgggtggcgagggcggggcggctgccgacttagccggcctgactggtcgggcttccggggtcccgctgctccctaggccccttgccccgattcagg

SEQ ID NO: 117771 - DNA, 122 bp, Homo sapiens
gcttctccaacacatgtattttttctgtaaagcacatcagacttctcgcactttggaacacgaggcagcacttcagcattgtgcttggaggggttttttgtttgtttttgaaatggagtctt

SEQ ID NO: 117772 - DNA, 122 bp, Homo sapiens
tccccgacaatccagctgaccagctgaccgctttctgtcttctctccctaggatagctgccgcccgggagaggtgacccgggcgccctgctagggtgaaggcccctgccctcggcccgggat

SEQ ID NO: 117773 - DNA, 122 bp, Homo sapiens
taccaccggcatctctctgtgtgtggaatttacttgcaattcaactggagagcaagacctcgtcctgttttaccctggcgattcagttgctaaaattctcacacatgagtttgatctgagcc

SEQ ID NO: 117774 - DNA, 122 bp, Homo sapiens
ttttttgtccagaagtaacccagagcgagcaagtccctgtgggtgaggaccacgcatgcccggttggcgctgatgtgtgggaaaacgacaaatggtgcaagccacacgggtcacgtgcgtct

SEQ ID NO: 117775 - DNA, 122 bp, Homo sapiens
aagtatatcttcatccagaacctcataatgaccttagaccccaaggtctttcttggaaatcggttctttacagatataattagttaaggatcttgagatgagatcatcttcgggcaggtggg

SEQ ID NO: 117776 - DNA, 122 bp, Homo sapiens
cctcacgtctgagctgtttcctgagtcacacaatgtcctggacaccctagtaatggggggcggaggaagagtggaggaacactaggggggatgaaggaggggccttctgtccctgacaaccc

SEQ ID NO: 117777 - DNA, 122 bp, Homo sapiens
atcccaaatgcagagatcagttaatccgtcagctaataagttcatagtggcaccatatggcgcagggccactccacactgggacaaggacagaactgtttacacaggcatgctgctttctca

SEQ ID NO: 117778 - DNA, 122 bp, Homo sapiens
gtcggggcggggtagggctcgccatgtcaggtggttgggcatctcgtggtctgacagcctcgcttttggatgtgggtcttgaacacacgtccacgcgaccttcccaggaggcccatgcccct

SEQ ID NO: 117779 - DNA, 122 bp, Homo sapiens
acactgagcacagcccctccgcgcacacgcggttatcgataaacgcagacgtgacacgttcgtgggttctgtttccctggagggcagctgggactggtgtgaattctcccgtctcaccccac

SEQ ID NO: 117780 - DNA, 122 bp, Homo sapiens
cgcttgttctaccggaggtatgctagcagcacagtcgatttcctttgcagctccctaatccggggtttccattctcagtggagaatggataatcccaggggaccagctaaagactcttttct

SEQ ID NO: 117781 - DNA, 122 bp, Homo sapiens
tcagctttgccaaaccatcaagatacactttgcaggcactggtcagagtgcgtgccccgacgcacacggcaatgcctttgagacattttatgttattatttttgtttgtttaagcacagccc

SEQ ID NO: 117782 - DNA, 122 bp, Homo sapiens
gtcggagctgagactggcgtgcgttgagacaggctgatggacggggcggggcctcagtgacggagggggcggggatcctggggcagggaccggcggagcctcccgggaggggcggggcctca

SEQ ID NO: 117783 - DNA, 122 bp, Homo sapiens
attgtcctggaccaaatgacttcgctggggccgtagagaatgggaagggtggacgcctcccggcaaaccgtctgcatttgcataacactcatggcagtgactcagtggttactgtggggact

SEQ ID NO: 117784 - DNA, 122 bp, Homo sapiens
ggaaacctggtcaagttttgaaaggcagatgccaagtaaatgaggtttccaagtgcccctcgcctccaggtatggaaacatttttcatcatgattgtgttctgtggcaggcctcagctggga

SEQ ID NO: 117785 - DNA, 122 bp, Homo sapiens
tgaactgaaccaattcacactgaggcctgcacggtggggcttctggaagcagcactcttgcggaggctgcgaccaggacccagttggaggcgcctgggtgtagcgcctaggcagggagaagc

SEQ ID NO: 117786 - DNA, 122 bp, Homo sapiens
cgggtgggccgggatcttgcgtggagccccagtttgtatgttgggtccccaaggtgcagacgctctgtccagttcaaggcccctctgtagccctgagtggcctcatgtcctagcccttgccc

SEQ ID NO: 117787 - DNA, 122 bp, Homo sapiens
tccccatgtctgccactggccatgaggtcgaagttgacatttatcgctctcttcttccaccgctcattgcataatcccgttgacctctgccagcacctggctgtttggaaatcgttacctgg

SEQ ID NO: 117788 - DNA, 122 bp, Homo sapiens
caccgacacccggcaggtcagctccctgccttcgattggctcactgccccatcagtcagacgcaccgagattcgggtcggtgggaggggaaggcgtcggaggaggtggagagggagtgggat

SEQ ID NO: 117789 - DNA, 122 bp, Homo sapiens
gacacctacctcaacagaaacaatgctaacctgaatgaatagatcccaggacattcttttcgtaaacccagtccagcctacattctttatttcatgttttgccaaacaccattacattagag

SEQ ID NO: 117790 - DNA, 122 bp, Homo sapiens
attgaggtaccatatgcccagtttcttcctagaatctattctcactgcgttcaccgtttgcgtcccagcactcccttcgtctgatttgtagcactccctgtacctgccccggctgcgttgca

SEQ ID NO: 117791 - DNA, 122 bp, Homo sapiens
tcagtgagctccttttattcttttcttccagaatggaagcctgatcttttgtcttatttacgacggcctcctctgccccacttaacaggcgagcatccaggagacaaatggaaggtctcaaa

SEQ ID NO: 117792 - DNA, 122 bp, Homo sapiens
ccgccccgcccttggctgccggccaatcgccgccgactgagaggcgactattggaggaagcgggatgggcggtgcccgcgccgggccgctaggggtgcggggttggggaggaggccgctagt

SEQ ID NO: 117793 - DNA, 122 bp, Homo sapiens
cctcgcgccagtccgctgggctgcagggactgcggcgcctgagggagtcgctgacgggcacgctgactggaggctggcggacaggcgacagcgacctgcggcaggtgagctgtccgcgccct

SEQ ID NO: 117794 - DNA, 122 bp, Homo sapiens
cagtatcactattggcattcctgagccactggctcagaatttcagtacattatctgcccgcgggacacacctcagaggaaaggggatgaagcgtggtccatgaccatggcaccccctggtct

SEQ ID NO: 117795 - DNA, 122 bp, Homo sapiens
tctagtcataagggaaaatccttcgggctgtgaccgaagcaacaaaggcaaaaacgcggacgttggttatgaagggtgtggtctccctggtggagtacgtcggtgggttgggatggggagcg

SEQ ID NO: 117796 - DNA, 122 bp, Homo sapiens
agccaccgagtcagcacagcccacggggccagaaggcacggccgttccctctggccggctcgcagtggacgatggatcacctgcctgcggggcacacacaggagtcccctctccatcccacg

SEQ ID NO: 117797 - DNA, 122 bp, Homo sapiens
acgacggacgcccacaaaatacgtcaccaagccgaagcaatcaatcgctcagaaggaatccggctcggagctctactgagcctgcctgtgctaatttgggccgagctggcgcctcacggcca

SEQ ID NO: 117798 - DNA, 122 bp, Homo sapiens
tcgggtctaggcggcctcatactagagcgcaactcctcaaaagacaaacttgaacgaaagcgctaccgagctggggcatgcacctgtccctggcgcggtcggctgcggctgtggccattcac

SEQ ID NO: 117799 - DNA, 122 bp, Homo sapiens
ccgtggagcttgcactcaaatccacctcctgacaatcagccccgactgcaccaggacgcccgtgatctgagaaccggcacagcttcctgtctggcctttgtaacaggcattcggcgagccac

SEQ ID NO: 117800 - DNA, 122 bp, Homo sapiens
agcatcggtgactctgccaggctacatatgtgtgtgcgtgtctgcatatatatacacacacgtgtatacgcacacacagagccacacatcactcaacgacagggacacgttctgagaaatac

SEQ ID NO: 117801 - DNA, 122 bp, Homo sapiens
gcagagtgagcgacaatgtaacattctgcacggtctgagccatggcagcgttcagaatcccgccaacacggaagtcccgccgacctaccgctactcttcgccaagactgggcacgcgcgggc

SEQ ID NO: 117802 - DNA, 122 bp, Homo sapiens
gatgggcgtcactactgctaccctcatttcacctgcgctgtggacactgagaacatccgccgtgtgttcaacgactgccgtgacatcattcagcgcatgcaccttcgtcagtacgagctgct

SEQ ID NO: 117803 - DNA, 122 bp, Homo sapiens
ccccctccaccactacccatccccctccccggaaagcagcaacccatccgctgccgccggcggcagcagcgcgaagccatccacagacttccacaacctggccagggagctggaaaactccc

SEQ ID NO: 117804 - DNA, 122 bp, Homo sapiens
aaagggggacaaatcagaaggaataggggctgggacccagagccaggggtacagaggaatcgcaaactaaaaggaggtgaagagttgagacaatataaaggggaagaggtagccctgctggg

SEQ ID NO: 117805 - DNA, 122 bp, Homo sapiens
ctgggatgaagcggggcctccaggggtgggcggggccgaggcggggcctgttctccactccgcctctcacccagcaggattttgttttccaggtttgggagtatttgtgactatttcttgtc

SEQ ID NO: 117806 - DNA, 122 bp, Homo sapiens
taaaaattttctaacttgggttcaatatttgtagtgaagtatctgttttcatttttttcacgttataaataaaaatactatgctggccgggcgcggtggctcacacctgtaatcccagcact

SEQ ID NO: 117807 - DNA, 122 bp, Homo sapiens
tcattattttttaaaggaggcagattggagcgtagagtacactgaagggagtcgggaggccgggtgtaggcactggattcttgcacctaattctccgagcctcggtttccttatttgtaaaa

SEQ ID NO: 117808 - DNA, 122 bp, Homo sapiens
atctcaggcaatctgcctgcctcggcctctcaaagtgctaggattacaggcgtgagccaccgggcctggcccaattcttaaaaggctgtctctgtttggttgttaagccatggtgctcagtg

SEQ ID NO: 117809 - DNA, 122 bp, Homo sapiens
tgacggccctgcgcgaggtagtctctgagcctgagcgtgagcctgagcgcgcacggggcgcgtgctcgccaagagctggcgcagatttccgaagtgccacgaaacagccgccgcagcaatca

SEQ ID NO: 117810 - DNA, 122 bp, Homo sapiens
aagccatggaaaccacatgcaaagagatttgagaatgttttctgggctggggatggggttcgggtcttcgcaaaccctctgtggatgtgtgtgtatgtctgtgtgacaagcacgtccacagc

SEQ ID NO: 117811 - DNA, 122 bp, Homo sapiens
agcaggtcctggaattgcagttaagattcttccggtcctcccaatccacctttcccgagacgctcgagttcacttacttaagcgtcagccttccccaagatggcgttatctttgtcgccaac

SEQ ID NO: 117812 - DNA, 122 bp, Homo sapiens
gagcagagacatgctggaaacactggctgtgtctccctgagataaccagcccccggttttcgggggtggtaattcagcttttccgtctttaggtggtgcttctagaccacataaggcagccc

SEQ ID NO: 117813 - DNA, 122 bp, Homo sapiens
cctgaacttgaatgtaggacagatgccgtcaagtttaagtttttccaagtatctttcagtcggtttgtgcctctgggaaatgttgtgtgaggtatttaacactctggcctcaccaatccacc

SEQ ID NO: 117814 - DNA, 122 bp, Homo sapiens
aagagcacaaggatggaaagcctattttagagtggcaaggcggcatcctttaaccctccgcgccgtacaccaccctttgtgttgtgcactgtttgagacaggatttgtactcctcctgatct

SEQ ID NO: 117815 - DNA, 122 bp, Homo sapiens
tttgggtttgcctgtatgagaaagtgggattgggccagaaggatatgggcaaagaagggccgccatactgagaggccaagctgctctgtgagatgggaggcaaaggacaacatcccctgtga

SEQ ID NO: 117816 - DNA, 122 bp, Homo sapiens
tggagcttaggttccagcaataagcaaaacatgccctgcagcgaaaggcttctgggctgccggcgacattttcccaacgttcacaaccgggttccttccggacgcccgtctctagggacgca

SEQ ID NO: 117817 - DNA, 122 bp, Homo sapiens
cagagccctagcggacagttttcaggtggcagtaatgctcatttcctggaacagatggttcgtggcccttgaagcgctgcgatctgtaaagctagttctctgcaaggtttgcttagtgtctg

SEQ ID NO: 117818 - DNA, 122 bp, Homo sapiens
gctgcctccagccctggcggactcttgcgctggactcccgccctcgggccacagcctgggcgatcagccaggacgctggccattgaggatgcaggcccaaaaggggcgccttcagcctcaca

SEQ ID NO: 117819 - DNA, 122 bp, Homo sapiens
agtggtgggcccagggtcggccgggcctactcccagggcaggcgggatttccgcgcctcgcggctgccacatcctgaccatgaatcagccacagttgggaaaataaacttcaacttcgggtc

SEQ ID NO: 117820 - DNA, 122 bp, Homo sapiens
ctgtgggtcgagacgacagcacaaaccacctcctcctgtggagggtgtgaccctgtctgccgtggcccaggactcgcccgcccacctgccttcagcctgcttgcctctccctagcccacacg

SEQ ID NO: 117821 - DNA, 122 bp, Homo sapiens
tatgacctccatccggttccggcttgggcagccagaccggacttgcaggctcttggaggtcgcatcctgtccttcccccggcaggtagagtgactacaagtcccgggatgcgcagcgctcgg

SEQ ID NO: 117822 - DNA, 122 bp, Homo sapiens
gaagttcttcgaaagagcctatcatttacatagctatatacactgctgattttcaagtttcggctttgaaaatacctatgcaacaagtattagatgtggatgttgattgatgtgttcttgaa

SEQ ID NO: 117823 - DNA, 122 bp, Homo sapiens
gtcagcccccgccgggccggggccatgcaggagagccagaccaagagcatgttcgtgtcccgggccctggagaagatcctagccgacaaggaggtgaagcggccccagcactcccagctgcg

SEQ ID NO: 117824 - DNA, 122 bp, Homo sapiens
cccatcagtccacctgggagcacgtgaagccagccttcttcaatgtcacaggaagttctgcgatctccctcgtccccaacgcccccatcgcgacaggtccaccaagctggctggcacgaggc

SEQ ID NO: 117825 - DNA, 122 bp, Homo sapiens
ctccgccgcccgggtcatgtggaccctcgtgggtcggggctgggggtgcgcacgcgctctcgcgccacgagccactggggccgcgcttctggtggccccggggccccggtccgcgccgaccc

SEQ ID NO: 117826 - DNA, 122 bp, Homo sapiens
cctgaagcgacctgccacaccttccaccctccagactagagatctgcaaggggcttataccgcacctgctctctgagctaagctgagaaaacagaagccacagatggtgacgagggtacctc

SEQ ID NO: 117827 - DNA, 122 bp, Homo sapiens
gtccagcggtggaggggacccaaaactcccccaggtgcaggcggccgggaggtgggaacacggagctttggcaccctgggccagcagcccctgacctccccgcggtcatagcgctctctgag

SEQ ID NO: 117828 - DNA, 122 bp, Homo sapiens
tctcccgggaagggaagggaaaggggaaggaggggaaagaagactcctaccactcgtcgccgcctcagacggatcctttgccccgcccaccgctgctacgcaacccggcggaagctcgtcac

SEQ ID NO: 117829 - DNA, 122 bp, Homo sapiens
caaaaccccctttataaaatgattcattcaatatgacactctcatttctcctgaagggttcgtttgtacttttagagccccaaacgcattccttctttggaaatttctttacaccctttact

SEQ ID NO: 117830 - DNA, 122 bp, Homo sapiens
ccagcgtcctgcagccctcggcatcaggtgctctgacttggagcaactgtcgtagttaagcgcctcttctgcctggcagctgcgctcattgcctcctaattatacgctctggggcctccctt

SEQ ID NO: 117831 - DNA, 122 bp, Homo sapiens
tctcattgttcaattcccatctatgagtgagaacatgcggtggttgtttttctgtccttgcgatagtttgctgagaatgatggtttccaatttcatccatgtccctacaaaggacatgaact

SEQ ID NO: 117832 - DNA, 122 bp, Homo sapiens
aaccacgggctggccctctgggaagccaagatgaagcagctggcggagagggcacgggcacggcaggaggaggctgcccggctgggcctgggccagcaggaggccaagctctacgggaagaa

SEQ ID NO: 117833 - DNA, 122 bp, Homo sapiens
tggcatggtgcaaagagtgttcctctgctctgggagagggagggcacagcaactgtgaggcgttgaacagagtgccaccttgttatagcagaaaggaaaagcagaccaaattcagctgacac

SEQ ID NO: 117834 - DNA, 122 bp, Homo sapiens
gaagctgtatctgttttcactgtgtgtgtctgtgtgtgtgtgcacacgagtgagcacgcacgtgtgttgtatgtatctgttcattttcagaccaaactggaggggaaaaaacctacaagaag

SEQ ID NO: 117835 - DNA, 122 bp, Homo sapiens
ctggaatccaggaaatcagatgtgctagagcttggtgggggtgcctttggctgaactccccgcaagcagagcctgagcaaaagtttaggcatgaacagtgcgtaaggaagtgaaatcacagg

SEQ ID NO: 117836 - DNA, 122 bp, Homo sapiens
gcactctggaccttcctgctaaatcattcgttcattcaacaaatagctattgaagccaggcgcagtggctcacacctgcaatcctagcactttggaacggcgaggtgggtggatcacttgag

SEQ ID NO: 117837 - DNA, 122 bp, Homo sapiens
aatcttccttttgcaccatttcttgaattttactttcttccttccagtgctaactctgcccgtcctactctcgcagcaagcacatatgtaacacacccacacacatacacacaagactctat

SEQ ID NO: 117838 - DNA, 122 bp, Homo sapiens
cgggacccgggagggctcagagcaggtccactcgctcgcgtggcgctcgtggtggacgcccgaatttgcgcccagtgctctctgcgaagccaagaagcagcaggagaaatgttcccgggagg

SEQ ID NO: 117839 - DNA, 122 bp, Homo sapiens
cttcagtatgatatatggaagatttaaacaccattcattctttgtttttccacaaaggaccgtcctccttctaatatttggaagaaaatagatcaatccagggactataaaaatggcaatca

SEQ ID NO: 117840 - DNA, 122 bp, Homo sapiens
ctgaggcactcatgacttcagagccggtgtgggcatgaaattcaaacccgcttacagggccgggcacagtggctcacacctgtgatcccagcgctgtgggaggccaaggtgggaggatcatt

SEQ ID NO: 117841 - DNA, 122 bp, Homo sapiens
ggcggcaaagggggccaagccagagccagcaccagctccacctccacccggggccaaacccgaggaagacaagaaggacggtaaggagccatcggacaaacctcaaaaggcggtgcaggacc

SEQ ID NO: 117842 - DNA, 122 bp, Homo sapiens
aggctcgggctgcgcggaagcccaccacggggggacttgggcatggcaggatgcaggtcccgagccttgccccgcagggaggcgctgaggcccggcgagaattcgagcatggcgcgggcagg

SEQ ID NO: 117843 - DNA, 122 bp, Homo sapiens
tttttcaggagctgaaaattgagtcgttatagaaatattaggacatattttcaatcatttcggtgcccgaagggaggcaagagctcagttttatattgagacattacgccggctgaaggcag

SEQ ID NO: 117844 - DNA, 122 bp, Homo sapiens
gagtccaaaatggcggctctcaggctggcgcgctccgtgctgctggggctttgaggtggtcgccgggggtccgggggaccctttccccgccgcggaagccctagaggatgaatcggggaccc

SEQ ID NO: 117845 - DNA, 122 bp, Homo sapiens
caggtgcgcggtaccccctccccggccagccccacgctcgggcgggtggcccgttcgccgcgctcaccgtccaggagtcccaggcagagccacagtcgcaggcacagcgcggcgccccgctg

SEQ ID NO: 117846 - DNA, 122 bp, Homo sapiens
gcgctttggggagaagggagggggactgggctcatttggaggagcaaaagacagccctcgcggaaaaagaaagaaaaatcagcaaaatcgccttagcagttcaaccaaaggtcaacagcagc

SEQ ID NO: 117847 - DNA, 122 bp, Homo sapiens
tctccttagaggaaagtccgagagccatttgcagcttttctttccagtcctcactgtttccgagtgagttaaaaaaaaatccctctaaatagatctaaatagaaattgcaatagttgggggt

SEQ ID NO: 117848 - DNA, 122 bp, Homo sapiens
caggatctgtcacagggagcaccctaagacagagtgggtgccacctaacccccgctctcacgccccaaatgagggttggcaaaagagagggacttcgaagcacagaaaagggggcgtgtgcc

SEQ ID NO: 117849 - DNA, 122 bp, Homo sapiens
tccctgatgggatcctgtccaggggattcctggatttagtgagaggttgaaccaggtgcccggaggcatcttctgactcaggttgtccaacgatgcaggtcttccttaaagtgtcaggtgcg

SEQ ID NO: 117850 - DNA, 122 bp, Homo sapiens
ccgccggccacttgatgatgtcgctcaaactagatacggggtctctctagtcaaggagggcgggcagacagaggcgcccggcttgtgggtatccagccccacgtaggggaagggctcataga

SEQ ID NO: 117851 - DNA, 122 bp, Homo sapiens
aaaaagccaacttcaaaaggttatatgctgtatgattcgatttatgtaacattcatggaacgagaaagtgatagaaaacagagcagtgtttgccagggcttatggttgacgggaaggtagat

SEQ ID NO: 117852 - DNA, 122 bp, Homo sapiens
tggattcattatatctcaagcatttatagtactgacaacacctaatcaatgttgtcacaacgaaagtagaaaacatttgtatggcccatctcctttattatcttgctctagaaaacaatgtt

SEQ ID NO: 117853 - DNA, 122 bp, Homo sapiens
ggtgcctttgtgaaactactatttacacacaagatggcaatccctcaagggaggtggggacgtcagtttctgaagggtacaggaaagcctagagagtgttggttacttcctttgaaatcaga

SEQ ID NO: 117854 - DNA, 122 bp, Homo sapiens
accactctgggaagtgggaagacaaaagtttctctaaatcgccacttccagcctgccatgcgactgcagcttttaatagtaactactgcgctctgatgaaaaagattgttgtttccgtaacg

SEQ ID NO: 117855 - DNA, 122 bp, Homo sapiens
gcgagctagacgcccagccggacctcagaggctccaagagcggggttggcgggtgtggcccggcagcagagggtttttggaatgcagggtgtggccctctaccacggcaaaaaagaaatgag

SEQ ID NO: 117856 - DNA, 122 bp, Homo sapiens
caaccgaatttcacacacctgtcacctaggacgcggccgggaaggcctcccttcgatccgcgttctccccattttggggtgtagcttggattcctgagcccagttttagtgcgtggccgacc

SEQ ID NO: 117857 - DNA, 122 bp, Homo sapiens
ggtcagggtgagaaaaggctccctggctggcgaggctggcttcctgaatgagcgggtaggcgtgcagaaacttgatgccctgttctaatcgaaccgggtcgatgagctgaggcgccatcttc

SEQ ID NO: 117858 - DNA, 122 bp, Homo sapiens
attaaatatagcttaattctggacacaaacagttcccaccatgaagagagagtaggtgaccggaaaggagtgcgtcttaagcgcgttcgctgaatttgcaccacccaatccagccccgccgc

SEQ ID NO: 117859 - DNA, 122 bp, Homo sapiens
cccctccccccctcaacccccccaaccacaccgtttgggtttggcagtgtctggaggcatcgttggctgtcacaactgggggagggggttgctactggcatctaatgggtagaggccaagga

SEQ ID NO: 117860 - DNA, 122 bp, Homo sapiens
tggtggacgccggcggagtcaagctggagtccaccatcgtggtcagcggcctggaggatgcggccgcagtggacttccagttttccaagggagccgtgtactggacagacgtgagcgaggag

SEQ ID NO: 117861 - DNA, 122 bp, Homo sapiens
cgctgagggcggagggggcgagcgggaccccgagtccggagaaaggcccgggtagacagacggagaccgagcgaggccggccgggagggcctgacgcacggggaaggccgaagccgccgggc

SEQ ID NO: 117862 - DNA, 122 bp, Homo sapiens
ccagtaataaacacagatagcattttgaggtatttcctcttggttcttctcttattatatcgtatagaaatattaaaatctatatgaaataaactgaccatgatatcctaagcattgtccta

SEQ ID NO: 117863 - DNA, 122 bp, Homo sapiens
tctgtggtaggggccagacagttggagccagttggtactagaccctagcactaggctgggcgttggagcatcggtctctggcactgaggtttggagatgctgagtgagttctgggggtcagc

SEQ ID NO: 117864 - DNA, 122 bp, Homo sapiens
cgactgctgaaatccaacttgagctggctggtggtccctggatcctagagcccttcacttcgggttactccctctttcttgcctctatttcttagttggaagaaataaactcacaaattatg

SEQ ID NO: 117865 - DNA, 122 bp, Homo sapiens
ggccgaggcaacatgggcggccccgtgtccccaggccataccacgtcgctgacgccataccgatcctggcaagaaaggtgaccttgtaccagcccggtgtccagccctccggaaacgtatat

SEQ ID NO: 117866 - DNA, 122 bp, Homo sapiens
gactggggttggtcctgaagagaccacctggccaaccaagccgaggcaggctcagagcgccgcggggagcgcaaagccgcgcgcgcctctgagctccgggcagccgctgttcctcccggcgg

SEQ ID NO: 117867 - DNA, 122 bp, Homo sapiens
ccccgttactgtgctgaacctctcgcgggggcagcggctttaggcccctggaggtggggccgggcgctcatgtgctttgggaccatcactggcgtccagcccacagagcacccccgggggag

SEQ ID NO: 117868 - DNA, 122 bp, Homo sapiens
ggattccgagggcagggtggggcggaatcgggagggatgcggacccggtggaacgcactgcgcagacggcgccggcgcccgcacacagctgttgactagtcttccagctctcccctggaagt

SEQ ID NO: 117869 - DNA, 122 bp, Homo sapiens
tgcaagagctgatttattcatttatttatttactttggttgaggtggagtctcactctgtcgccaggttggagtgcattagcacaatcttggctcactgcaccctccgcctcccgggataaa

SEQ ID NO: 117870 - DNA, 122 bp, Homo sapiens
ggcttcctttctttgtagccacctcaggggaagcaacagatcgtcactcggtgttctcaccgaaagcacgtaatcgccggtgtaactcatgttggctggggggcctcccggcgcgcgcggag

SEQ ID NO: 117871 - DNA, 122 bp, Homo sapiens
acaacttatggatcaactggagtcaagtggggactgggcagaggtgtgactgatggaaatcggtgactaatttatgtcacatgccacctataacactggcacgtgggttagtgtggggattt

SEQ ID NO: 117872 - DNA, 122 bp, Homo sapiens
tgatattatctggaccacactggtgattgctctctgcataaatatcctgctttccctatgcgcacaaagtgttttctttctaatcttatgtaaatggtgatatctcacaggaatgttgactg

SEQ ID NO: 117873 - DNA, 122 bp, Homo sapiens
ctatttctgatccaccaaaatagcaactttatatgtccaacccaatttgtacaggattcacgagttgagggagggtctaaaatagtttctgagtggaagccctgcttttctgggttgaatat

SEQ ID NO: 117874 - DNA, 122 bp, Homo sapiens
gagaggcggcgcctgccctaccaaaggtgcggagttcctgcgcctccggaggaggctctgcgcagggccgcccggggcagcgtccctggggtccacccctcatcggggtgaccgcgggcctg

SEQ ID NO: 117875 - DNA, 122 bp, Homo sapiens
gttctgaatatgagacagtgtaaagaatgggcaggtctcatgtcaggaaatggaaggtcccgaggtttaaaactcaaatgaccatgagaactgtggtagatacaggaggaagaggaaatcaa

SEQ ID NO: 117876 - DNA, 122 bp, Homo sapiens
cgatccagagctgtgttgattcccgaggaggaggctgtcgtaggtgtctagccccctcagcgagagacgtttctccccaggacctggaaaggggaaagactgtgccagctgccggtctagct

SEQ ID NO: 117877 - DNA, 122 bp, Homo sapiens
atcatctctaggagtagttgtggaagttaaaatatcttgcagcctcaaggtacgtgacttcggggcagtaggcaccatagaaaagcaagcgaggcagtggcaggtcattactgaactgtgcc

SEQ ID NO: 117878 - DNA, 122 bp, Homo sapiens
cgggcgcaagaagggcccttggagcctccctgtccgtttgctgagcaggcccagggcaggcggggcttctctggatgttatttagcagcagccctggctgccgctgggctgagggtcctagg

SEQ ID NO: 117879 - DNA, 122 bp, Homo sapiens
cccaagcgcgggggagggagtgtaaatagagcgaaggctgctctgtgtcagccccgtcaccgccgggcggcccgcgcggagtctgagggagatggaagttgagcaagagcagcggcgcagaa

SEQ ID NO: 117880 - DNA, 122 bp, Homo sapiens
ggtgatatgcaaacacttttttttttttttttttttaccaaggacttgagcatttgtggacgtgggtcccctggaggggccctggaaccaatcaggactataaaatccttttaaggttttaa

SEQ ID NO: 117881 - DNA, 122 bp, Homo sapiens
attttaattacaatttcctattgaaggactataccttcctgacctttccccacagtgattcggcacataaaacaggtgctgaactgtagcagttgttttactccatcctgtaggttagagaa

SEQ ID NO: 117882 - DNA, 122 bp, Homo sapiens
gtagtattaatagccctacactagtagtagtaataaagtggtatcgctattgattctatccgtctacctacctacctgtctggataggagggcataggatttgactgtaagattgggcttag

SEQ ID NO: 117883 - DNA, 122 bp, Homo sapiens
gaagaagaaggcatggcatttcaaccctctcctcctacccggccgggctgggctcccacacgcctcggaagagaagagcgaggcagccgctcaggaatttccccttaaaggagactcaggcg

SEQ ID NO: 117884 - DNA, 122 bp, Homo sapiens
gaggggaaaacgtatggggctggggtcgctctggaggccggggactcggactcgggtagccgcggaggcctttctcaccatcgcgccaaactctcttcgctacagcagctgccgacaccgcc

SEQ ID NO: 117885 - DNA, 122 bp, Homo sapiens
cgtagccttcatgggtattctggatggtcgaccaggaaacccccttcagaacctgcaacacgtcaatctcaaggcgccccgactcctctccgcgcctgagtacgggcccaagctgaaactca

SEQ ID NO: 117886 - DNA, 122 bp, Homo sapiens
cctagactgagtcataaaaagtgtcttggcttctgcctgtacatcttggcatgctcatttcggggccacagctaccatgctgtgggaaaaagcccaccaataccttagcctgtagcctttgc

SEQ ID NO: 117887 - DNA, 122 bp, Homo sapiens
caccctggcgctcaccgccggatggtctgtgccgcccacttcctcttggctgccttcctccggcccagtgttccacgccaccacgactggatgcagatggctgtcgtggagaccacagatgg

SEQ ID NO: 117888 - DNA, 122 bp, Homo sapiens
ctgggtggcgcaggtgggagaagagtctgagagcccggggagacttcagggccagaggctcgcccagccccagcacatggtagtatacctaagagagggagaagagcttagaaatggagtca

SEQ ID NO: 117889 - DNA, 122 bp, Homo sapiens
ccccgccacccccatgggcgcctcagtcatatgacagaaattagtcacttcaaacggccacggcgcgcggggcggggcgcgaggcaaggccggcactcattggctggaggggggccgcatca

SEQ ID NO: 117890 - DNA, 122 bp, Homo sapiens
cggctctgaccacagcacagagtcgttgctaccgataacaaggcagacccatgacctggacgcccgttggaatgtcatcagccattctatcgtgtgtctctcgacctaaactcgctgagtgg

SEQ ID NO: 117891 - DNA, 122 bp, Homo sapiens
ctcggaactctccgtcctccaagccaagtccgatgctcccacatcgtcgagtttcttcaccggcttgaaatcacctgcccccgagcaatttcagagccgggaggattttcgaactgcctggc

SEQ ID NO: 117892 - DNA, 122 bp, Homo sapiens
agataacggttccacggaggcccaaggcgaaacggaaggatcctcatgtacaaaactgagcggaatggagctgtgagcacgcatcaggtgctgtttcaggcctggcacgtagtagaggtcag

SEQ ID NO: 117893 - DNA, 122 bp, Homo sapiens
tctcatcatgaactgaccattgaaaatgccctcagccactacaaggtaagcctgggtcaccgcagccaggccctgcctccacctcgctgaggtgctgcatcctacatgttcatcatgcctgg

SEQ ID NO: 117894 - DNA, 122 bp, Homo sapiens
tatacccgggcacacgtgtgtgtgcctgtctctgtgtgtgcgcgcgcatgtgacaccgcgcggactgctccgcgctgctacctcccccatgtgcacggccgccccctggggcccgggattgg

SEQ ID NO: 117895 - DNA, 122 bp, Homo sapiens
ggagaggcggacaggagggcggcggagagcgctgggccggttgtctccagcgcgcactatcgcgggcgcgtagtagatgtcgctgttgtccgtgcttacccggccggccggccaggctctgg

SEQ ID NO: 117896 - DNA, 122 bp, Homo sapiens
cagaaaggaaaattagatcctgacctgttttccccagaaccccgaatcctggtgatggatcgtgggtttttttttctttttcttttttcctgttgatttcccactcttacttcgtacagtgt

SEQ ID NO: 117897 - DNA, 122 bp, Homo sapiens
aaaattgggatcttaacaaagaaaagcttgcaacagatgcatgactactgctcaaatcatcgctgaggcacttagagacccagaaaagatcttatgtttggcttgcagtgtttctaagagca

SEQ ID NO: 117898 - DNA, 122 bp, Homo sapiens
gttagcagggcccacccccttttgttctgccctggcttcctctgagaggctcccaggggccgctgccccagatccaccagccccggtagccccaaacactgtttgaggtgctagggtggagg

SEQ ID NO: 117899 - DNA, 122 bp, Homo sapiens
attatcttaattttctcgtctttgaacatcactcacgtttgcactacccagtcagtggaacgagtgggtcataattaaggttcagattctagcttccaacgtccaagctggctggagtggca

SEQ ID NO: 117900 - DNA, 122 bp, Homo sapiens
atctcccccaccatagccaggacaagccacctagagggtgaacttgattccatctctctccggcttccagctcacctgtccctggctcatcctgtcccacaggctgagaaaaagaggagaag

SEQ ID NO: 117901 - DNA, 122 bp, Homo sapiens
gctggacgcgccgcgccgctgcaaggccctttccggaaaggtgtcggggttgcaggtcagcgccccattttttgtccaggagagactcgctggcaccttggctggaccaggctgggcgcagt

SEQ ID NO: 117902 - DNA, 122 bp, Homo sapiens
tctagaaagtttgcgaagagatggcaaaggtgtttgaaagctatcaggaaaccatcctcgcgtaaaacgaagcagcgctacagaagtgggctgccatgggaatcgggaggcccaggttccac

SEQ ID NO: 117903 - DNA, 122 bp, Homo sapiens
atggaagccagttgctttgcggtagaggggggccagggctcaggggaggcctctgcttctcggagccaaagaaaactctacaggagatgctatgggcttgggacaggggaccagtttcccgc

SEQ ID NO: 117904 - DNA, 122 bp, Homo sapiens
gctggcgtctgggccgggctgggaagagtgatcgctccagccgcgtggcagtaacattcccgcacatttaacaacaattagtctgtgccgacgccatggtaggctttcgtgtatgaaaattt

SEQ ID NO: 117905 - DNA, 122 bp, Homo sapiens
catttatgcaattcagaggaagatgcctcaacaggattagtcagcagcaaagtcctctgacgcagcttctgtgatctagttaaaaataggaaagaggatgttttgcataagtcatcaccatt

SEQ ID NO: 117906 - DNA, 122 bp, Homo sapiens
aaaactatctttttaatctcttatttcttcatcacctagtaccatttggtgctcaatcaacgtttactgagcggaagaaaacggaaataagacattttcctcaaggagcagaaatcattaca

SEQ ID NO: 117907 - DNA, 122 bp, Homo sapiens
acgcatgcgcgccgcggccccacccctgcgccgtgccccgccccgcgcctcctgtcggcgcgtgcgcattgacttacccgtgccgcgcggacgcactactgtcatttgccgccaaaaccccg

SEQ ID NO: 117908 - DNA, 122 bp, Homo sapiens
tctttagagagcatcatctatatgccaggtattatgcaggctatacaaaaattaggaagacgtgatctttatttttaagttacttatttgttgttggaggcaacagagataaatgaattgtg

SEQ ID NO: 117909 - DNA, 122 bp, Homo sapiens
gtaagaagagacacaagaaagcttacctcctttctctctgatctctgccatgtgaggatacgagaaaacatctgtttgcaaatcaagaagagtgcctcatcaaatactaagatactagatct

SEQ ID NO: 117910 - DNA, 122 bp, Homo sapiens
gagcgcggtcactgcaggctggacgcgtcaggcagcccagagtgagggtgaagtgggggccgcgcaggttccagtcattgtgtctcctggtgttttgcgttctccacaatgaagtgaatatg

SEQ ID NO: 117911 - DNA, 122 bp, Homo sapiens
ctgattaatacagacctgcctgaggctgtagataaagaactcttgtttgccaaggctgggcgcggtggcacgcctgtaatcccagcactttgggaggccaaggggcaaggatcacttgaggt

SEQ ID NO: 117912 - DNA, 122 bp, Homo sapiens
atatcacctcctgcccgacacacccatcggacgtcgcctgggagggaaaaaaaaaaaaaacgttccagccgagcaggtccttccactcgctgcagccagcagatcctcagtgggcggcccag

SEQ ID NO: 117913 - DNA, 122 bp, Homo sapiens
gcagccattcagagactccttctcccttgctgcttcccactggagaaactggaaagtcaacgactctcacagcttctcccacagctacggggtggccaagtaacttcattctgcccaatgag

SEQ ID NO: 117914 - DNA, 122 bp, Homo sapiens
cgccccttccctgcggcggggaggctgacaaggctccgctctatctctagcgcctcggagcgctctccggctttgctgtctagcccggcggcagcgcgatctcttaggcactttcaccgcct

SEQ ID NO: 117915 - DNA, 122 bp, Homo sapiens
caagagacttaatccggtcttgagctgaacgttaaccggctgaaaggagcacctgtccttcgccaggagcgcagcctcaaccggcgcctgagtgcgggaagacgtctatccccctacagctc

SEQ ID NO: 117916 - DNA, 122 bp, Homo sapiens
aaatgctgtgctgggtaaaattaattaccataaacttctagcgctttctcttccatgatccggggctgccgggcagctcccggctcagagaggccggagagccacaggactctgctcagcgt

SEQ ID NO: 117917 - DNA, 122 bp, Homo sapiens
aatgatggcagccccactgccgcaggctaataccaagtagctgactgaagctgagcactgcgtaagggccactggattatgatgtagcttttaaataacaagaaacataggccatgcgctct

SEQ ID NO: 117918 - DNA, 122 bp, Homo sapiens
ctccccaaggcctgccataaccacaggggtcagagttggttgtgatgcctacaggataaacgtcactgaaaccctgtgtccacatcagtccctgggcttgcaaccaagagatggaagctccc

SEQ ID NO: 117919 - DNA, 122 bp, Homo sapiens
gtcagtttcctgggagcaggggtgtgtctgttctcagagaagggtttaagccgactcccacgtacgccctggaggccataagagcatctcagaggcacgcaggacctccagcgtgtgcacga

SEQ ID NO: 117920 - DNA, 122 bp, Homo sapiens
tattgttctgttttgtctctttgggatctgtaggactgtaggtaaccgtactcctgaaaacgatagaaagcaggcaatctcaacccccacggacaggaaatgcgtaaaagtcctctgcagaa

SEQ ID NO: 117921 - DNA, 122 bp, Homo sapiens
ggggcggtgaggccaggtcctcgcgtgcctttgtccagggcgcaggggggcgagggtcttcggtggtggagtccgcggagcggcaggacaggggtcctccagtgccatattccagagcacgg

SEQ ID NO: 117922 - DNA, 122 bp, Homo sapiens
ataaatgcctctgcatggcggcctcgtcactaggaattacccaaaccagtcaaatggcctcgatccctggggttcagaggccttttcttaaacacaaaaacccttaagctctttgctgctca

SEQ ID NO: 117923 - DNA, 122 bp, Homo sapiens
gagagtttagaatgccgtggatatcatggaaatggcaccgatggggagagcttagaatgccgtggatatcacggaagtggcaccgacggggagagtttaaaacaccgtggatatcatggaaa

SEQ ID NO: 117924 - DNA, 122 bp, Homo sapiens
ctcggtgggttccttagttttcttcacccgggcctcacaacgatcccatacgtccttcagcgtcctcccagaatccagcactttcagtatgtatagtaggagattggacacctgactagtgt

SEQ ID NO: 117925 - DNA, 122 bp, Homo sapiens
gatgttgcctaaaaccgtcgacaaacgctatgtttgagaagggaggctacgctggggcgccggaggagacaggcccttaagaaccttccagagatgccttaactgggctaacagctcgccgc

SEQ ID NO: 117926 - DNA, 122 bp, Homo sapiens
acagtctttttttctcagataattctaatgcgtttcagatgtattattctcatctgaccccgtcagaagacagctgagaggccagcctggcgccacctctggacgcaggttgtgctgagtca

SEQ ID NO: 117927 - DNA, 122 bp, Homo sapiens
aaggggaatgcagataaactcttcttcttcagatctccggggtgaaatgaatgcacctgacgcccgcgtggcattagaagctccgcgaactcagtgaggccatgctggacagaggctggaac

SEQ ID NO: 117928 - DNA, 122 bp, Homo sapiens
ctctaaatgctaaggacgccctggccaaatggctttgatttcacaccactgctcactgctcgccacattctcatccaccatgacgcagtaagagaattttattactagtgttattcatttaa

SEQ ID NO: 117929 - DNA, 122 bp, Homo sapiens
tgtttgagaatctctgccccaggtttcaaatctaagctcctcaggcagctggcctgaccccgggccaaacctgttcttgcctctaagctccacatgcaccgttccctccacccacagcgcgc

SEQ ID NO: 117930 - DNA, 122 bp, Homo sapiens
aaaaagttgcttgaaatccttcaacatgatcctgattctatcttagacacgttaacttctcggaggctgatttctgaggaagagtatgagactctggagaatgttacagatctcctgaagaa

SEQ ID NO: 117931 - DNA, 122 bp, Homo sapiens
aaagtaaaactgtgctaagatctgttgtttgtgtccaagagagcctctgggactacgcttcgcatccaggctcaccaggctggggattccgggtccggccatccaaagcaaatctactcagt

SEQ ID NO: 117932 - DNA, 122 bp, Homo sapiens
agccctgcctccttcttgaaaaggaaccctgaaagcgccctgcctgtgagagctccttagcgaccggtgaggttgggcatggtttgcaataagtactcattttcttgagtttacagtaatgc

SEQ ID NO: 117933 - DNA, 122 bp, Homo sapiens
cgctctttgcgcgccgggaccaggcctttcctcgctgccaaagcggcctcgcgcggggcgcggagctgcttcgtgttccttctttgggtgctatgtttgtgtgttgttttttcgctcaggag

SEQ ID NO: 117934 - DNA, 122 bp, Homo sapiens
ttttgcaggagcgttggcagaatcagtggctaacaggcagtgcacaccccagaccgtacacgcacacgctcacctggcagagatgccccgagatgcctgtttcactgaatccatctcatgtg

SEQ ID NO: 117935 - DNA, 122 bp, Homo sapiens
gtcctgctactcgcccccttcattccccttcattcatgcctcattcttccgcctcccagccgcctcaactggccaaagggaagtggaggccctgccacctgtagggagggtcccctggggct

SEQ ID NO: 117936 - DNA, 122 bp, Homo sapiens
tgatccagccactgacacccccaagcacttacatgctggaaaggcgcagccccaagaccccgtacaccatggtcagagcagccttgtgccgattgccccaaacagcccaggacacaggacaa

SEQ ID NO: 117937 - DNA, 122 bp, Homo sapiens
ccgcaggggggagtgtggttaggttcatgatcgtgacaacttgtgtccagctcttgggaacgtgttggactcaggccaaaagtaaaatcgccgggaggtggaattgagagagtatgctgcac

SEQ ID NO: 117938 - DNA, 122 bp, Homo sapiens
tcatcctctccaccttatccccgggtctcaggactcgagcattgacacaccttaactcctcgtcaaaaagcggagtggctttaacagatgtttgcatccataaacaggcttgcttcaggtgc

SEQ ID NO: 117939 - DNA, 122 bp, Homo sapiens
aaaggttctttgacttgcttaagtgcttcccagatgtgtccaacatgggcggaggcacatcgtgaggtcctggagtgtgcctgtgattcagcacctgttccctttttggaggacttatttgc

SEQ ID NO: 117940 - DNA, 122 bp, Homo sapiens
gctggcgaggatgtggccacaggagtgtgcacccagcactgctggaggcacagggtggcgcggccacttggaagacagcgtggcagtttcctacaaacctaagcaggccatgaccagaaaac

SEQ ID NO: 117941 - DNA, 122 bp, Homo sapiens
ggtcaggccagtccgtcctgtggctgtttctgccaggactcgcccgagtgtgtgtgtgcgcgtgtatgtcagagacccaccctgctcccctgcaaccgaggtaggtggaaggcagttgcagg

SEQ ID NO: 117942 - DNA, 122 bp, Homo sapiens
tctttgacttccacctgggggcctcgcctcctgagggcctccagctcactctggtagctccggagctgctcctcggcaccccggtactttcgctcctgctccacaagctccaggcggaggtt

SEQ ID NO: 117943 - DNA, 122 bp, Homo sapiens
acacagccacctagttacagcccagcctgctcttgtctgcagcaatttttctcaaaggtgcggcttcatgcatatctattaccaagcacacgtagacaagacggtgttcggaaagcacagcc

SEQ ID NO: 117944 - DNA, 122 bp, Homo sapiens
tcacccgcaggccctgccatcctcggcttggccgctgctgcccgcgcgcctgtggcggagcgagcctgcctccagggcagcctcaccgcctggatcctgggcaggagacctcccaggtaata

SEQ ID NO: 117945 - DNA, 122 bp, Homo sapiens
actatgaatcaaatgttatctttttctggatgcgctacccacttgtcccatttatgcaaacgtccatctctgctccccgtgacctgagatgccacctttgtcatgcactaagcttccctgtg

SEQ ID NO: 117946 - DNA, 122 bp, Homo sapiens
aggacagccataatcaagaaaaacttcaattaacattaaagattgcacttgtaccaaactcgcacttaaagcacagatgtagaaggattgtttcaaagtgttgttaagaaacattaaacttg

SEQ ID NO: 117947 - DNA, 122 bp, Homo sapiens
cctcggacgcccagcagttattcacactcagggcctgaagtggagctgctgcgagctcctcggacgcccagcagttattcacactcagggcctgaagtggagctgctgcgatctcctcggac

SEQ ID NO: 117948 - DNA, 122 bp, Homo sapiens
actacagccaatcagaatcgaggccgggctttggcgggaggtgggaacgctgtggccattcggatttggcgcgagcgcggctggagtttgctgctgccgctgtgcagtttgttcaggggctt

SEQ ID NO: 117949 - DNA, 122 bp, Homo sapiens
acacctgacgaaaatctcatgaaaatgcacctctttcttttttatatcacacagcaacctcgagaattttgagaacaatttagtaagaaaatgtatccagatttttaaatcccagattaaaa

SEQ ID NO: 117950 - DNA, 122 bp, Homo sapiens
actttctgttcccaattgctcgggtggattaatttacagtggggagctcagagtcgcccacggcacctgttttcccctctgaggggccagcttccagcttggagggtgtttcaggaggggtc

SEQ ID NO: 117951 - DNA, 122 bp, Homo sapiens
tgcttctctctacaagcttgtttgaagccaagttaaagcaatggatagaagacggcagcgcgggtgtcagacctgccaatttccaactgcacaccaaatccccgaacatatgcttgaggccc

SEQ ID NO: 117952 - DNA, 122 bp, Homo sapiens
tctcgtcaggaggcgcctttctgccttccccagcgggaggaggcgattgtgatgcccacgcgaagggtaaaggtggcggttatgtaggactgcgaagactatgcaaaatgcgatacggtttc

SEQ ID NO: 117953 - DNA, 122 bp, Homo sapiens
tgaagagtgtccttccgtttctaaggtcttctcaatctcagcaatagagcttcccagcagcgttcaagacacatcatttatacacaggcacaggggccttcctgaaatgggtgcatttttac

SEQ ID NO: 117954 - DNA, 122 bp, Homo sapiens
atggaaactgtacttttgaagcccaaaggtttaaagttgtcaaaatattgagtctgatttcgtgatggaatatgcctctttggtgaagtatcttttctatccagggtagtagggcttgagta

SEQ ID NO: 117955 - DNA, 122 bp, Homo sapiens
cttctctcctctctccactgtgcctgcaaacctgctccagcaaaggatgagatacattctcgcagggcagggtgtctggtgaacagaagagtccaacacaaaggtcgcaaaccggtgggcat

SEQ ID NO: 117956 - DNA, 122 bp, Homo sapiens
tgggcggattcctcccacaccttcacactggcctgcctccaactcatacagatctcggagcggtcggtacttcattcataggtccctgttcaggcagcagttctgtgggctgtggccctctc

SEQ ID NO: 117957 - DNA, 122 bp, Homo sapiens
aaactaagacttacgtccagatttctagttttaagcccttgttctttcatacacaccatacggtcacataaaatgacttttaaaatgctggccgactattctaaagtagacagaaaattatc

SEQ ID NO: 117958 - DNA, 122 bp, Homo sapiens
cgggacgcgcggcagggactttgcaaactctgcaaaagtcccgagtagaccgcagaggctcgcggccgcgggtaggctccctcagatccccgtagatctcagtagatccggcgtgtattccc

SEQ ID NO: 117959 - DNA, 122 bp, Homo sapiens
tcagagagaaatgaaacggggccgggatccagtgtagagagagctttggctggctggcggcgcgcaaggccggactgcacaggtggcaggggcgtggttgtcaaataatcaaaatgatcagg

SEQ ID NO: 117960 - DNA, 122 bp, Homo sapiens
caccagccgcttgtgtgcggatcacaggaacccacggcttacggaggcgagtgggctgatcggacttgccctaagcttacccccagggctagcattgccattccatagtcaccttgtgaggc

SEQ ID NO: 117961 - DNA, 122 bp, Homo sapiens
ccccggtcttaagagatcctgtgtccagagggggccttaggtaagtgcgactttggaccacgatacacagacagagctttgaacgtggcttttcctagctggagagacaggaatgttatagt

SEQ ID NO: 117962 - DNA, 122 bp, Homo sapiens
cgagaattgatcattttccaggtggcgtctcggctcctcttctgagaaattatagatccacggggagaaagtccacacccagaaagacccacgatccgtttactcagcagaaaacgcagact

SEQ ID NO: 117963 - DNA, 122 bp, Homo sapiens
cattctttaataggcaaatctacagggggagtaacagaagtcattgtaaaaggctagaggcggagaatgagtatgaccacaaagtgtcaccagggaatatgtttgggaaggggagaagtgat

SEQ ID NO: 117964 - DNA, 122 bp, Homo sapiens
gattagggaggaccgggctggagctttcaatgcgagcccatcacagatcagaaacaggcccgggatgaaaagggaaagaaccgtctcctgagaagcaggcgatgaaggactctgttttatgt

SEQ ID NO: 117965 - DNA, 122 bp, Homo sapiens
catcaatggctcgtaaaactgtccactaaaaggcttagaggctgtgtgcgcccaaatttacgacgacataattggatcataggaacaaaacgtgtataaaaggcaatattcaatttttgggg

SEQ ID NO: 117966 - DNA, 122 bp, Homo sapiens
ttgcctgccggcggtgggacctcaaccctctctctgttaaatgggaaccacggtgatccccgcagactgttggcggggatggacagagttgattatggtacgcgtttcgcggcagtggctct

SEQ ID NO: 117967 - DNA, 122 bp, Homo sapiens
aaagacaggggcagggagagctattaggaagctccttggatggcccagacatgaggtcatcggggctggaaatactgcgtgacaatgggagatggcagggtaaggaaagaacatatgcaaga

SEQ ID NO: 117968 - DNA, 122 bp, Homo sapiens
gcgcatgcctgcagaaaacctacggccgcgaggggtcgggcctcctcctgctcctactcccgagaggctccggcaatgagaataggccccgcccccccgcgcagccaagtctacggaccaag

SEQ ID NO: 117969 - DNA, 122 bp, Homo sapiens
cggaaggcggcgggtccggccagccagggagaccagccaagcgctgtgtttttccaggtccgcgcgggccaggggaaccctgcgtgtttgcttggtgggagtggtttactgggaaagtagac

SEQ ID NO: 117970 - DNA, 122 bp, Homo sapiens
acaagagacaaaagagtatacttggaagaaggggtcagggggcaccttgcctctagtggacgaaggccctgagctgtacacagccctctgtatttattaggcaaaagagatggtgagaaggg

SEQ ID NO: 117971 - DNA, 122 bp, Homo sapiens
cgtcagccacggtcccctccgaggtctgagcgtcagccacggtcccctccgaggtctgagcgtcagccacggtcccctccgaggtctgagcgtcagccacgtccccgcccagaggtccgacc

SEQ ID NO: 117972 - DNA, 122 bp, Homo sapiens
acacacaagcgaacctccggggagggagccagtatcgggtcctaacgcagggaagcgctccgctttctgagagggacgcgccagcggagggacagccagggcccggcctctcctgctcctgc

SEQ ID NO: 117973 - DNA, 122 bp, Homo sapiens
gctaacaaaggccgccgggaggtgggggcttctccagccgctccagcggcgggcgggcggcggaagggttaactgcaccaccaactcccgcgcgcatcccggcccctacccccgccgtcgct

SEQ ID NO: 117974 - DNA, 122 bp, Homo sapiens
tttgtgaaacctctgacaaggggcctgacacccaactcaatacaagtcagttatcttcctcgcattccctcccaccccctgccggaactgagatggggcccacggcgggctgcgcagggcag

SEQ ID NO: 117975 - DNA, 122 bp, Homo sapiens
ctcacctgcttgagtcgggagatgagcacggtcttgactccggtgatgtctaagttccgccgcttcagctcggacttcagatcgatgacccgcagatcggtgatctttttaccttccgcctg

SEQ ID NO: 117976 - DNA, 122 bp, Homo sapiens
tgggggggctggggccgccccttccgcagggaccccgacccctgttggcatccgcctgtccgtttgaggccgaagcccctctacgtacccccattgcccgcccaaacaccgctcggccgcgt

SEQ ID NO: 117977 - DNA, 122 bp, Homo sapiens
tggaactaggctagggcatgtttcttgccctttaaaatgtgttgtcttcgggagacaggacgtagaagatagttgcagcacagggtgataggctggcgaaagttatacaaaagcaggaacca

SEQ ID NO: 117978 - DNA, 122 bp, Homo sapiens
ttaatgacaacactccccaattccagttagaggaactggagtttaaaatgaatgaaataacgactccaggtaccagagtctcattgccttttgggcaagaccttgatgtgggtatgaactca

SEQ ID NO: 117979 - DNA, 122 bp, Homo sapiens
caccatctgctttctgtgtgtgtggatttggcggccccagccgctggtgtagtggaaccacgtggcgtttgcccttccgtggatggcttgtctctccaagccaatgtccttggatccgccta

SEQ ID NO: 117980 - DNA, 122 bp, Homo sapiens
ctacgagccgcatcccgggccacagcttcagtggagctgactttggccctggttacatggcgctggcagccagagccctgggcccgccagttggtgagcgccagaggcaggcgctggagggt

SEQ ID NO: 117981 - DNA, 122 bp, Homo sapiens
gaaggtcctcatccctgggaccgaagtcgccccaccctgggcccctcaccgaggccgaggcgcctccactcacctggtactgcatggcctgcttcccgacatccatgtccaggcctgcagcc

SEQ ID NO: 117982 - DNA, 122 bp, Homo sapiens
tgtctgcccagagcagctctgaaggtggcccagtgcagaacaggatctctgaaggcagagcgggacacccattctggggatggaaagagggaagaccgttgaggccatttcccaggtggagg

SEQ ID NO: 117983 - DNA, 122 bp, Homo sapiens
gtcgcagcaggtggtgccctgcaagctggagccggaccggttctgtggcggggggcgtgacgcgcttttcgtggcggcgggctgcaaggtggaggcgttcgcggtggccggccaggagctgt

SEQ ID NO: 117984 - DNA, 122 bp, Homo sapiens
gccacgagctcagaaacatcctaatgaaaaataaatgtatttacagggagacgtcaaagccgccaggaccagtcaaagtaatatgcctgcgaccggcacatggacttttatttcttctccct

SEQ ID NO: 117985 - DNA, 122 bp, Homo sapiens
attgccgcacgttgcgcaccagcttccgttccgacagctctcgggggccgcggtagcccacgaagggttgctggcttaccaccttggtcagcagcagccccggctcccctggggtaggagca

SEQ ID NO: 117986 - DNA, 122 bp, Homo sapiens
gcatcgcccatgcagcggcgacaggcacagctcttgcccgagagcctctccttgctgaggcgctgcaggccggcatagccgggcaccagcttcacccggtgcgtcccatccagggcccctga

SEQ ID NO: 117987 - DNA, 122 bp, Homo sapiens
tctggaaaagtgtttttctacgtgaaaatcattggtgtagtcgattcttctatgttcgtccgagtaacggctatcctagtacttctcggacactgtcatctcggtttttcttctaaccctct

SEQ ID NO: 117988 - DNA, 122 bp, Homo sapiens
gggaactcaaggcctgattggttcctcctaagcaggatgcgatctggttggcagggcaaccggccttcagttagtgccttcagtgggtgctttcagttggtggcattcggttgcctttcctg

SEQ ID NO: 117989 - DNA, 122 bp, Homo sapiens
tcgtaagcgtgcactataccctgggcacacacacacacacacacacacacacacacaccccgggtccccagtctcaggtggatgaatcctcaggcggaggcgaccttctcccgggccgacac

SEQ ID NO: 117990 - DNA, 122 bp, Homo sapiens
ggggggggaatgcagattgaatatagccaagccccatggtagccggactggatctccaagcgcctgcctccatggaagccaagagccctgataccccagccaggggctttcctctctatact

SEQ ID NO: 117991 - DNA, 122 bp, Homo sapiens
tccctgcacgcttctccaggtcaggggctgctcttgtcttctctgtccccctcggcgccccgctcagcgtctggcacagagtgggtgctcaataaatacccgttgaatgtaacgcatttcaa

SEQ ID NO: 117992 - DNA, 122 bp, Homo sapiens
ttcacccactggggacacaggcccccagcccggccccagagggaccttgttggttgagcacgtgcttccctgcagagggctggagggagtgaaagggcttccggctccagctgtggctgggt

SEQ ID NO: 117993 - DNA, 122 bp, Homo sapiens
ccactcggggcagctgccttcaaatggagccaagattggagccagccaaatgaaccacagcgacgaatcggtatcaaagggaaaggtagaggaaatcctatctcgggaacccagggatcagc

SEQ ID NO: 117994 - DNA, 122 bp, Homo sapiens
gggaggcggcagggctggcattgcagtgcgggccgtgcgggctgcgcgggcgcggggaggcgcgggcggcaaactgcgggcacccggcaccccgcagccagtaccgggcggaggcgtcagag

SEQ ID NO: 117995 - DNA, 122 bp, Homo sapiens
cctaggtttccacgagcgcgagggccgcccctactgccgccgggacttcctgcagctgttcgccccgcgctgccagggctgccagggccccatcctggataactacatctcggcgctcagcg

SEQ ID NO: 117996 - DNA, 122 bp, Homo sapiens
ggtgtctgcatccctgaaggtttcggagacaggcccttgatggcagtggacagctgcccccgcctgttaccgccagcccagagagcagctgcctgagcgcctgcgggtccccttcctaccct

SEQ ID NO: 117997 - DNA, 122 bp, Homo sapiens
ctgctcacagggagagcagcgaatctaaagacatggccactgacgcgcatccccttaaaccgcagcggctagggtccaggatggcaaggaattagcggctttcctttaatccggaagcaggg

SEQ ID NO: 117998 - DNA, 122 bp, Homo sapiens
cccgtgagccgagcgggacccgggacaagcgcgggacgccgcggggaacggacgggaacgcgcgtggccgccccacagcgggccttcgacacctcctgacacgtcctgcgggtgcccggtcc

SEQ ID NO: 117999 - DNA, 122 bp, Homo sapiens
cgctcggcgcctcctcctcctctcccgcgaagccccctcccctgagggcaccccctcccccggaacgccccctcacctgaccatgccgtacgcgccctcgccgatgtactgcaactgcgtgt

SEQ ID NO: 118000 - DNA, 122 bp, Homo sapiens
actttccggagtagccaagcagagccttcggccagttcccttgtggggccaggccctgcccgggagcacaggcaggagaacagctgcctccccgcctgccccagggccttggtgtcagggcc

SEQ ID NO: 118001 - DNA, 122 bp, Homo sapiens
caaccacccacggaggcaagaaactgcagaaagtaaagggaaagggagcccagtgccgggcggcgctgagcagctcccccagcggccaccgtcgccaacatccctgcgtaggggtttgtatc

SEQ ID NO: 118002 - DNA, 122 bp, Homo sapiens
ctggaaccgaaggccgggccttttacgtaacgtccacggctcggaagtctgcactgcggccgggccccgccctggacccccggcgcccccccagccccgtccgcctgacccggcccaccccg

SEQ ID NO: 118003 - DNA, 122 bp, Homo sapiens
tcacgtctctctctccctctttgcattttaggtaacaaataaggatgcaactaaaatcagcgtaagtgtggagcccagcgcgggccgcgggagaccccttctggccgcctcgggtcccgcag

SEQ ID NO: 118004 - DNA, 122 bp, Homo sapiens
ctccagactcagctggtcatcttctaatagggcatgatggcgctagttcctgcaggcagacgtacttcctctaggatgaatcccactgcccatttttgggcatctatggatatacctgagaa

SEQ ID NO: 118005 - DNA, 122 bp, Homo sapiens
tatctctactgaagatgagacagcatagagattaccacctccaccacccccaaacacacgcgtgcatgcacacagacacacacacacacacagacacacacacacacacacagagcacactt

SEQ ID NO: 118006 - DNA, 122 bp, Homo sapiens
acgggttcacagacctcgctgcaggtggctcctgcccattctcaggaaaggcagtagccacggccccagctcaggttcttgcagggagtttacatcagtaactcctcaccttgaggagacac

SEQ ID NO: 118007 - DNA, 122 bp, Homo sapiens
caaggtggcgtgcactgcgtatttatagctctatccacagaggactcctgacacatgctacgggctcccgcagccgctttattaaatggaataaataacaccgtgcaagacggcaaaacttc

SEQ ID NO: 118008 - DNA, 122 bp, Homo sapiens
tggggggcggggtggggacggggggctccgccttctcagctcttgcggcgagttggggttcgggcgctgaggcagagacgccaccctaagtcccatcagtcctggggatcggaccagtggac

SEQ ID NO: 118009 - DNA, 122 bp, Homo sapiens
cctccaagccagactggacgcgaaggaaaccggaacctgtctgcctacggtgcctgtttccggaagcagcttgagtccggacaccaacgacggggacgctgggaagccgacttccggcgccc

SEQ ID NO: 118010 - DNA, 122 bp, Homo sapiens
aaggtgatcgagagggccaccctgctccttgaggccccaaccacatgagtggtgccagcccggctccccaaggcccagctgatgtcacctaggcagagcagagcggggctgagcgcaggcag

SEQ ID NO: 118011 - DNA, 122 bp, Homo sapiens
attaatctcctaagcatcccttatggccttggccttgcaaagccaggcctctgccatgctcgggggaagggatgcagcaggcttcctgggcagaaggatccagctcttggcctcctttctct

SEQ ID NO: 118012 - DNA, 122 bp, Homo sapiens
gatagtcttttcctgtgtcttagcgttgcatgatgggagaaatagtctactttccggtagcggtgccagggcagtggcctaatacggaactccatttcccggcgtgcctcgcggaggccgct

SEQ ID NO: 118013 - DNA, 122 bp, Homo sapiens
ccaccccttctacccgggccaggttgggggaggaactcgaggcagggactcttggacacgcgaggccgggctaaagcgaattctgacccctcgatctcttgaaagtctgcgacctccattct

SEQ ID NO: 118014 - DNA, 122 bp, Homo sapiens
gcccaccgggtagaccggcacgtaagcagtgcaaggctgcagctgcagggggtatccgggcgctacgtagccccccagcggcagcgtgcccacagtccccgcgtgcgtgggcaccacgaagc

SEQ ID NO: 118015 - DNA, 122 bp, Homo sapiens
agccattgcttgtgcgtcttcgcggagagagaggggggagatgccccggcgctccttacccggctggataagaccctttggggaacttgctgcttcgcaagtcttacttgtgaggacccgga

SEQ ID NO: 118016 - DNA, 122 bp, Homo sapiens
ccccgcggcgtgggtgtgagaaactgccccgcggcgtgtgtgtgagaaactgccccttggcgtgtgtgtgagaaactgccccttggcgtgtgtgtgagaaactgccccgcggcgtgtgtgtg

SEQ ID NO: 118017 - DNA, 122 bp, Homo sapiens
atagtgagacacccatctctacaaaaaattcagaaagccaggtttggtggtgcacacctgcggtcccagctactagggaggtcaaggtaggaggatcacttgagcccaggaggtcaaggctg

SEQ ID NO: 118018 - DNA, 122 bp, Homo sapiens
tccccgcccccgactccgccctcagctccgacctcgactccgcccccaggcccacctcagcgcgccccgactccgacccgactctgccctcagcccgacctcgactccgcccacaggaccac

SEQ ID NO: 118019 - DNA, 122 bp, Homo sapiens
cagatctggcgttttccaagctccccctgctttgtggagctctgagcgctggctccaggccggctttcaggaaggccgactgcctcaatcgtggttgctgcctccgctcggcctgaggtgat

SEQ ID NO: 118020 - DNA, 122 bp, Homo sapiens
agcattaacatttaaaaagactagcagaggaggtcgcggcgccggaggccccagaaggctcgaaggcgccgcgggctggggtcggtggcttagggagcccgtccggccatggtggccgcggg

SEQ ID NO: 118021 - DNA, 122 bp, Homo sapiens
tccccagcaccacctgcagtccaggcccagcctccttgctgctgcacttagaggagcagccgcagaccagacatccgggtccctctcatccaacccacctgcctcacatcctcaggattcaa

SEQ ID NO: 118022 - DNA, 122 bp, Homo sapiens
tcacccctcccaacaacccacggcctgggagtgtcgattctgcgccactaactcattgatcgccttgcccgggttaattaattaattaggggcagccatggagcacagtgggctggggccaa

SEQ ID NO: 118023 - DNA, 122 bp, Homo sapiens
cttgaattaccaggcagtcacattcttgtttttgttttttggcgtaaaacatgaacattccgagcctctacttatttagttatgtcatgtgtcctatttgtacttgtgtaccacagataatt

SEQ ID NO: 118024 - DNA, 122 bp, Homo sapiens
cgcaggctgcggtccatccagggtggcagagaggaagccagcacgcccaccgggcagggtcgggacaggaatcctctcagacacgaaagccccaggttaagaggaggggctgcctggaggag

SEQ ID NO: 118025 - DNA, 122 bp, Homo sapiens
ttgcccaagctctcaccagaacagcaggttggcagcgacgaagccgagcaggctccgcagcggcctcttccagctcagcagctcgtcggcgcggcagcccagccacagcaccggctccccga

SEQ ID NO: 118026 - DNA, 122 bp, Homo sapiens
cggccggttcgcgcaggcgcagttggtggacctggtcgcgctgtgccgggtgtgacactacggtaggtgtaggttaggatgtgtcttctggtcgtggtctactagttggggccgagggaaga

SEQ ID NO: 118027 - DNA, 122 bp, Homo sapiens
tctttgcaacttttctgcacaactacaactattctaaaataaaaggcgtttctttttaaacgggaatcctcaacagcgcctctctcatggggttgcaagaaatcaatgagatagtacagacc

SEQ ID NO: 118028 - DNA, 122 bp, Homo sapiens
cccccgacgacctcacctctggctccccccaaactcgggctccccgcccttcccaattcgcgttctctctgcagagcaaccccaaactttccaggtgcccccttggcctccgctctgaaggc

SEQ ID NO: 118029 - DNA, 122 bp, Homo sapiens
tgatgatgacgtcagtggcctccttgcaggtgaaacggacggtgctggagcccttaaaaacgtacaggcccctgtcattgggggtgaggtacggtctcagcgtcacccggtaggaatcgggt

SEQ ID NO: 118030 - DNA, 122 bp, Homo sapiens
cgagctgtgctgcccgcttcctccagggcctcaagggtccaggatgctgcttccttaaaacgagtgattttcctccagaaatccagttctctctctccagggttccagtcattcctggtgtt

SEQ ID NO: 118031 - DNA, 122 bp, Homo sapiens
cagcttcacgtgggtccgcttgcgctgccacttctcccttggctttgagggggtgaacaccgacacttccttgccatccagctccaagatgctggagttgtcatgcctcatgacctgggaag

SEQ ID NO: 118032 - DNA, 122 bp, Homo sapiens
ctggacccaccctggccaccctggcccttccggctgccggctggggacgcgggcgtggtgcggcaggcctgccttgattgtgtcgatgggagatgattttcaaggtgaaatttctagttcac

SEQ ID NO: 118033 - DNA, 122 bp, Homo sapiens
ttccccctctaaccctttaatcatctctttaaaaaaatcaatcaacaaatatttattgaacgtttccttgtaggctttaaaatccacccataggctgctctgtgactcttaaggatttctgc

SEQ ID NO: 118034 - DNA, 122 bp, Homo sapiens
ttaaaataagctgatatttaattatctttttagttgtttatgggatgcgccctccatgcccgctctgaaaccctttcttcactctgaagtcttctacttttgcacttttttttgcaaaacct

SEQ ID NO: 118035 - DNA, 122 bp, Homo sapiens
ggtgagcaagcgcggaggccgagcttcttgcaaacggactccaaggggcaacgaccttcgcgcgtcaccaaagtgactgcgtgggtgcccacgagcccggctcccgcaacccacgggcggcc

SEQ ID NO: 118036 - DNA, 122 bp, Homo sapiens
acgctgccaacattgcagtctgcagttgaggtaaggccatgagcaaacagtccacgtaaacgagaacaaggtatgaagccgaagatttgagaagatgacgaggtgcggcctgattttcttag

SEQ ID NO: 118037 - DNA, 122 bp, Homo sapiens
tgtgtaaatgcatgtccgcaggtgtacacgtgagtgattcagcctggggttcacaatgagcgtggcacccgtagtgcaatgaaaaggacatttttatgcagatacgtgattcattttcacct

SEQ ID NO: 118038 - DNA, 122 bp, Homo sapiens
tcggcatccaatggaagtctccgaaaaaaaaaaaaaaaaacaagggctcaaggtacgcggcggaaggttgtcgccactccagcaaatccctagtgtttgtttaaagtagaaagtcgtctcag

SEQ ID NO: 118039 - DNA, 122 bp, Homo sapiens
gtgcactaatggctctaagtgagcactccaggtaccctaatgtccctaagtgagctctcccggcaccccgatgtccctaagtgagacctcccggcaccccgatgtccctaagtgagccctcc

SEQ ID NO: 118040 - DNA, 122 bp, Homo sapiens
agctggtcttcggcgatgtcgaggacgacgaggacacgctgctgcggcgtctgcggggtccgtgggttcaaggacatgaagacttgggagactcagaagcggagaatgaagcaaaaggtaat

SEQ ID NO: 118041 - DNA, 122 bp, Homo sapiens
ggtctgactcagccaaaccacaccaactcttagtctacttctcaggcgtctgacctcagccgtacagctggccaaagacacctaccttagagccatttattaacttgcttgccatgccttaa

SEQ ID NO: 118042 - DNA, 122 bp, Homo sapiens
tctgcacacgctcaggcggtgacacgttgcagacatcgctgtgcttcagaaagagctgggcggcaagattcacacaagtaagcatgttgcagactccccagcacacgccctctctggcttgt

SEQ ID NO: 118043 - DNA, 122 bp, Homo sapiens
gcctgtcctccactgcgggctctggaggtaatggaagggtctgccgccagtgctggcgaccgtcttccccagccagagcctgcctgggccgcacagccgtggcttgactgtcagcagctcct

SEQ ID NO: 118044 - DNA, 122 bp, Homo sapiens
ttttcagggaaccacaaaagacaaataggccagaataatctaagtccaagggagccctcccggccacttacaaacagggtcttccattttcaagggtcttttcaaacggatgttggcaggga

SEQ ID NO: 118045 - DNA, 122 bp, Homo sapiens
acacttttgaattgtacagcctcttggttgaagatctacgtcctcaaagtgcgggcttgccgtggagtaacacagatcccctctggcaactcgtctgggacgaagggcgtttttgcttagtg

SEQ ID NO: 118046 - DNA, 122 bp, Homo sapiens
cccacctgttccttctgcacctcagagaagggtcgtcacctccatttatccctgtgtggacgccacagccctggcaccaagtggccggctccgtcaagggaaagcggggaaggacagaaggc

SEQ ID NO: 118047 - DNA, 122 bp, Homo sapiens
agcaccataagggagccttggcagaactttctcctggttatatggattgggaaaatacgacgttttctgatttgctgcactctccatccctaaaagatttaaaatatcctcaacactgagcc

SEQ ID NO: 118048 - DNA, 122 bp, Homo sapiens
cggcgggcgtccagcctgggaggcgctggttcaacctgtggctcctcccagggtcagccgcgcgtggtgaatcgtttctgcaggtcccttccatttcttactttcctttcctttctttctct

SEQ ID NO: 118049 - DNA, 122 bp, Homo sapiens
aaatgacttcagtgaagtatgtctcttcccaggatttttcagcttgaaattaagatgtgacgaagctgggaaaatgcaagcccaggaaatgctggcagctgtagttcagccaggctcagtgg

SEQ ID NO: 118050 - DNA, 122 bp, Homo sapiens
ccccagcgacacaaacaagggcgaggcacactctctgactacaaaaagggcgcgcggccgcgtggcaggtcaaagcccacatcggtaggaggttccacaaagctctgattttccaagttctc

SEQ ID NO: 118051 - DNA, 122 bp, Homo sapiens
aactcggacgccagatcccgcctgaaccctgaccagtccggacctcgactgggccccgaccgtggcccagactggccccagagccggcccccgcctggagcccgccctgccctcctccctgc

SEQ ID NO: 118052 - DNA, 122 bp, Homo sapiens
ggcctctggcctagcttgttgggttgggtagcagcgcccgtacctccagccctgctctggcggtggttgtccaggctctgcagagcgcagcagggcttttcattaaaggtatttatatttgt

SEQ ID NO: 118053 - DNA, 122 bp, Homo sapiens
cagacagagaaacttgtcataatcactgctgtatcttcaacacctgtccagtgctttgcacgcgcagagtatctaaccaagtattgagagggaataactttatctcactgacagtgaggagc

SEQ ID NO: 118054 - DNA, 122 bp, Homo sapiens
gccctccccacctgaggcccagccgagcggccgctgtccgcgcagtgtcgcagtggaccccgagccccgtgctgaactccttaggcgtcttaggaacatactcagttcgcacgcagctatgg

SEQ ID NO: 118055 - DNA, 122 bp, Homo sapiens
ccatggtccgtggtgtggccctgggtaggcgcctggccaagtcaccagacaccaggccttcgggatccccgcatccaccaatggggtactgacccacaggcgccgggcagggcggcctccag

SEQ ID NO: 118056 - DNA, 122 bp, Homo sapiens
agtaaaatccaggatccaagtgaatggcttcctggccttgctgagaggctggacttgccccggtttccccacaccctgcctccggtacaatcgatagcctgctgtgcaggggcggccgcacc

SEQ ID NO: 118057 - DNA, 122 bp, Homo sapiens
ttgagccagaaggtgccctgaacactcggtggccccagcccccacgtaacagcacgtgctcgggtcccacattcggtcagacgcccctctccactggcatctgcccggtggaggcgccactg

SEQ ID NO: 118058 - DNA, 122 bp, Homo sapiens
gggcgcgggcccgagccaagggaccctggccgcgccgctctgcgctcagccttcctctcgcgtcttcattgcgcctgggcccgggtgggcatgcctcgcccactccagctgcaagaaccgca

SEQ ID NO: 118059 - DNA, 122 bp, Homo sapiens
aggggtcagggagttccctttctgagtcaaagaaaggggtgacggacgcacctggaaaatcgggtcactcccacccaaatactgcgcttttctgaccagcttaaaaaaggcgcaccacgtga

SEQ ID NO: 118060 - DNA, 122 bp, Homo sapiens
gccaggagaacgcgggcgccgggagggtgccgagagcgagacctgccgaggtgcagggcgcgggaggtgcttttctcgccgctgcttgtttttaagtgtatttggcctctctcaggcttgcc

SEQ ID NO: 118061 - DNA, 122 bp, Homo sapiens
cctgcacctctgtcattggcagattcctgtgttgccaggggattacactggccattggaacgcttgcctgagtgtaatgtaagtatggcctggagtgacggagtgacaagatgcctatccag

SEQ ID NO: 118062 - DNA, 122 bp, Homo sapiens
cctttctgagtcaaagaaaggggtgacggacggcacctggaaaatcgggtcactcccacccgaataccctgcttttctgacgggcttaaaaaatggtgcagcacgagactatatcccgcacc

SEQ ID NO: 118063 - DNA, 122 bp, Homo sapiens
atccttggcacccccaaaatctaccataaacaaagctagtaaatgaaacccaccttattccgaaatcaaacccccaagggtatcaaagaagataaaagaaaaaaaaagaacccatccaaagt

SEQ ID NO: 118064 - DNA, 122 bp, Homo sapiens
tcgggagtggtgagcccatcggggggtgttctgtagtgtgggtgtatgggatgtccggttcgccgccccaccacccccctcccaccgccccgcgctgctccctccctcccacaagccgggtc

SEQ ID NO: 118065 - DNA, 122 bp, Homo sapiens
atatgcaaacgattcgaagttcagctccctttcaaggcacctcttttccttctcaagttgcgaggaaaagctggccccagctcatgtcattgagaaaggggcctttcgtcccggtgccccac

SEQ ID NO: 118066 - DNA, 122 bp, Homo sapiens
tgccgaggtagaggggacgtgaggcgggggtgggatttcctcacagctttgcacctccagcgagtcaacacaaaatcaaaatgtaggccaggcggccagacgcagtggctcacacctgtaat

SEQ ID NO: 118067 - DNA, 122 bp, Homo sapiens
gcggcttgtcagcagatgcaggggcgaggaagcgggtttttcctgcgtggccgctggccgcgggggaaccgctgggagccctgcccccggcctgcggcggccctagacgctgcaccgcgtcg

SEQ ID NO: 118068 - DNA, 122 bp, Homo sapiens
ggcccctcttcaaacgtctgtgcgcttcccttgtgccccgccctggcacacagccgcccccgcggagcccagggatcccagcccggcagtcctccgtcagctgcttctgtttggatggcggg

SEQ ID NO: 118069 - DNA, 122 bp, Homo sapiens
agcctttactcatactattaggcacactttccccttagagccccctaagtttttcccagacgaatctttataatttctttccaaagataccaaataaacttcagtgttttcatctaattctc

SEQ ID NO: 118070 - DNA, 122 bp, Homo sapiens
ggcacggcgccaccaggcacccccgatacgcagcgtgttgtgaagtgcccttgtgagcagcgggggatagggaacagaaaaccagctgtcagcgacagcgaggtggtgccccagagagggct

SEQ ID NO: 118071 - DNA, 122 bp, Homo sapiens
caggacttccccggagggctgcggcgtacaggctggcgcagaacgaaccttggcctgggccgtatctccggctcccagcctcagcgcggccctcccgagttaaggtgggcccggcccgcgcc

SEQ ID NO: 118072 - DNA, 122 bp, Homo sapiens
cggctcgagctggtctaggcggggcgggcccgagggggtgtggcaggaggtgggcgggcccgggtggggggggggggggcgtggaaggaggggcgggcccgagcaggagggggcgggcccga

SEQ ID NO: 118073 - DNA, 122 bp, Homo sapiens
ggcagggaaatgggccgagtcctgcatcatccaccgagtgggggctgtggataggtgcggcgctgcttccctggagggaaacgctccatcttgcgggccgaagcgcgagtgctgctctgtga

SEQ ID NO: 118074 - DNA, 122 bp, Homo sapiens
aggacaggcacaacggccacttcccggcttaacctgggcagagagacgagagccacttcccggctttaacctgggcagagagatgagagttctgtaatttttgaagattgaattcagtctga

SEQ ID NO: 118075 - DNA, 122 bp, Homo sapiens
agtgttagaatgtatagagttgttcttcagtggtggaatggtatagagttctcaaaatgtcgtcaggtacccttggggatccctaagacatgggggatccacaagatcaaaactaatttcat

SEQ ID NO: 118076 - DNA, 122 bp, Homo sapiens
aggccaggacgccccactccgggagaccatatggaagaccggtggccagcactttggatgcggttgaagacagatgtgcttttcgcgtaagtgctttgagcgcagagtttcccttcaagccc

SEQ ID NO: 118077 - DNA, 122 bp, Homo sapiens
gctgcggcgctcggctctctccgtgccccggcccgggggctctttccgaaggccgaattccgcagatctctgccgggccccgcccctatgggcaaggaccaatggtctctctctgggcgggg

SEQ ID NO: 118078 - DNA, 122 bp, Homo sapiens
agaggacagacggatgctggagcagagccgggggacaggtgggtggtgggcatcccctggcggatgcagctatgctgcctccctttccttggttttgtaggactaaagggcccgggcactct

SEQ ID NO: 118079 - DNA, 122 bp, Homo sapiens
atagccaaactgatttgcttcatcagtggctgtttgcgctttgcaatgggaggagtcagtcgctgtggcacagacagcatggcctcgaaagcctaaagtatttcagcccctctgctggaagt

SEQ ID NO: 118080 - DNA, 122 bp, Homo sapiens
caatcaggggccccgtgtggggagggcgtatgctctcggcgggctagagcgccgctaaaacgcgctcttcgttctacttggaggacttgttccagccagcgtgagtgcgcgagtgtaaggag

SEQ ID NO: 118081 - DNA, 122 bp, Homo sapiens
tctggggcaaataccaaacttgaatcaagcactacttatccatacagctgcgaaggattgcggtttcagggcctcagatgatagatttaagtaaagtctgtaactggatggagtttaggaaa

SEQ ID NO: 118082 - DNA, 122 bp, Homo sapiens
attgcctgaagttagcatgttgggttctggctctgtctcttgcttcaacagtgtttagaacgaacagaccagggggatccctcttccagcctgtgatcgcctcccatctccttttcacttga

SEQ ID NO: 118083 - DNA, 122 bp, Homo sapiens
cgctccccctcctccttctctgctgggctcaatttccagcccagatcagaacccttggggcgcctgctgaggggagcgcggcctggtgcggggggcggccgcgggctcccggggctgtcagg

SEQ ID NO: 118084 - DNA, 122 bp, Homo sapiens
cacctcaagcccagacaggtagaggcagcctcagtgggccccgggcaggcctggttcctacgctggggttgccttcctgggatcacctcaggcctgccccaacctggggacaacacagggct

SEQ ID NO: 118085 - DNA, 122 bp, Homo sapiens
tgcagctagccaagcaggacatggctcagcagctgcgtgagtacaggaactggccctggacgcctacaggaagctgctggagggcgaggagagctggctggagtctgggatgcagaacatga

SEQ ID NO: 118086 - DNA, 122 bp, Homo sapiens
tcttatgctggctctcctattgcctggatcccatgtgtccccttttttggttttctccatcgtttttgtttctcatttcatctgtgttcctaagggaacatggaaagtaaaatctgaaagcc

SEQ ID NO: 118087 - DNA, 122 bp, Homo sapiens
aaagaggctctgcagtaagggacagggaagcttccagagcttctgagcctccagggccctcggtagtgatgccctaagttgcagaagctttaaaagctctctgttgtgacaccagacactga

SEQ ID NO: 118088 - DNA, 122 bp, Homo sapiens
gggcttgacagcgggccgggcagcccattggtcttaaggccagagtccccacgttggccacgtttgccatacaagagaatgagggatgaagaggaggaactagaggatctgtaggccgagtc

SEQ ID NO: 118089 - DNA, 122 bp, Homo sapiens
cccgtgataataaatacagtagcatgctggttaaatagcaccggctctgatcccacaccccgggttcgaatccaggctttaccacttagtagctgggagagttatttaactcctatttaagt

SEQ ID NO: 118090 - DNA, 122 bp, Homo sapiens
aggtcagcctaaacttgagagccacacagaacaaattatattctctctttcacatgataccgcttccaaatattcaggaagttttcacatttatactccatgactattaattgcttctgtag

SEQ ID NO: 118091 - DNA, 122 bp, Homo sapiens
cagccctctttcagcacccgtccccgccgcgacctccccgttcttcctccgggtctggggcgcagattcctgggctgcaactccggagtagttgaaaggcaggaaggcgtgtgggcgggtag

SEQ ID NO: 118092 - DNA, 122 bp, Homo sapiens
gtgctgcacaaaatcatcaataagagggaaatagatactctggggttccaacaattttcccgtttcccctgacaattccagttgcatggtaaattgttggaactggaggtgacaaaattaaa

SEQ ID NO: 118093 - DNA, 122 bp, Homo sapiens
tcactggggcctgacccacaaataccatgatgtctctttgcttttatgtaatgagttctccgttggcttctgcctggtccaagactgatttgcctcagcctaacattgtgtagtgaaggcct

SEQ ID NO: 118094 - DNA, 122 bp, Homo sapiens
ctgctctgcggcgactgtccggctcgtgagctccgcgtggatccggcgctgggccccctacgctctggggacctggggttgtgtttccggcaaaggatgttttccgagaaggcctgggagcg

SEQ ID NO: 118095 - DNA, 122 bp, Homo sapiens
cagtcatgagccctgagcactgcctgcctgcctgcctgcctgcctgccgtgcgttctgcacgggttaacagatgcagttattatgcccatttaacacgagggaaactgaggcccagagaggt

SEQ ID NO: 118096 - DNA, 122 bp, Homo sapiens
ggaaaagtaagaagtagggaaagcaatatggctgaagacaagtgtgttcagtgaggggatcgttgtctcgggaatcctgggaaccaagttctcactgtggacccactcactgggcaagtcac

SEQ ID NO: 118097 - DNA, 122 bp, Homo sapiens
aatagagcagtggaaatagccagggcagagcaagagagagaggagagacaaagacactgacggagagccagaaacgaaaacacagattgaaggacagaaagataaatagagaaacagacaaa

SEQ ID NO: 118098 - DNA, 122 bp, Homo sapiens
acgcaggctctgctgatttgatagtcgggccgaggccgtggaccaattagagtccggccccgctccagcccccaccaacactgccccctcgccccaggctgacagctgttcttgttcaagtg

SEQ ID NO: 118099 - DNA, 122 bp, Homo sapiens
tgaaagatacatcctggcagctccatactaagctttattaacatccaagtaactgtgtgacgtccctgtttggttttggggaaactggactgacagcctcagttctattgccttggtcagat

SEQ ID NO: 118100 - DNA, 122 bp, Homo sapiens
aagacaaattgactggagaataaccacagccagaagatgaccttggggaatggggggaaacgattttaaaaatattgaccttgcttcatgcttttgaaaggaattttataaatgccagttag

SEQ ID NO: 118101 - DNA, 122 bp, Homo sapiens
gcaggtgtgccacgccgcacctccaggtcccgcggacaccacaggctctgcaagcccagccgcccgggtcacgtaagccccaccccgccgctcctcgtcaagtcccacccggacccgccctc

SEQ ID NO: 118102 - DNA, 122 bp, Homo sapiens
cccgatagcggccggaatcagctggggctattctggggcactttctctcagctctgggctcgcgactgtgagacctcgggtgaggtctctgttgccccggaggtgttctgcgtgctgtccgt

SEQ ID NO: 118103 - DNA, 122 bp, Homo sapiens
ggggtcaggacctggaagaggcttccaggtgaggcttggggtggagcctggtgacgaaagcgttaagcccaaactcggtccctggaggattagaggatgatctttaagtccccagctgtcag

SEQ ID NO: 118104 - DNA, 122 bp, Homo sapiens
cgggagcagcccgcccgccatcacccccaccccccggcgcggtggccctcggagggggtgcggagaggcaattgagttgtagccattttcttattgttgtctttgaagcccctggaagccgc

SEQ ID NO: 118105 - DNA, 122 bp, Homo sapiens
ccggtagtacctatgccagggacaaagtgcactttaatagtcaatacacaggttgcttaccgggttcttgttttttttgtcaatagtcttctttcatttcaagttcccaaagtcttgggaac

SEQ ID NO: 118106 - DNA, 122 bp, Homo sapiens
gccaggcactcctcctccgggatgagcgctgcctggggggcaagggctttgctgtggccccgcggtgggccaggccccagccggctctgagcactgcccacaccccggatggctgcctggta

SEQ ID NO: 118107 - DNA, 122 bp, Homo sapiens
cgatgtaagcacgatgctgggatatatctccaacacaagttataatacacacagtataaacgtgatggcattccccaccccctccctaagatcttgtattcacgtttggaacgccgtgtgca

SEQ ID NO: 118108 - DNA, 122 bp, Homo sapiens
cctgcctcccatcctgcctgactcttgtctgtgcctgctcccaggatctggaacagtacgcggccagctacagcggcctgatgcgcatcgaacggctgcagttcattgctgatcactgcccc

SEQ ID NO: 118109 - DNA, 122 bp, Homo sapiens
ggtctgaaccctatcttgtttgatatcaaaacctcagcacgcctgcgtctctgctggggtcggactctgagtcagttctacaggccctgggaaactgggcgtccaggctccgaggatggtac

SEQ ID NO: 118110 - DNA, 122 bp, Homo sapiens
ctctttcgggcatttgaccgttttgctgattcagttaaataaagcagaatggcattccagcgatgatgctgtacttgtaattagcccaggtgagcagaggctcgttgaggtttttagataag

SEQ ID NO: 118111 - DNA, 122 bp, Homo sapiens
ttgtcacctgtctctactcccctcagaccaagacactggtctctatacactctaatccttcgccttcactctcccctctacccactccagccaggcttgcctcttcctccaggaaactgccc

SEQ ID NO: 118112 - DNA, 122 bp, Homo sapiens
acacagaactgccagctcagcagccggttacatcccgcccggccacccgtagccagcgtccgctaatgcgcgatcctggaagacccagcaaccccgccgcgagttccgattggctccgcgtg

SEQ ID NO: 118113 - DNA, 122 bp, Homo sapiens
ttactaacggctggctggcgctgcttccagcaaggtgagcagctgtggccagtggctatgcgtttgggtcatggattccaccatgccttgcatgtgtgtttggtcacatgttctgccgtgtc

SEQ ID NO: 118114 - DNA, 122 bp, Homo sapiens
ggtggtggactcttctgcgtcgggttcgcctgtctcgtccggacggcagccgcgccccctcgatgcctgctggctagctcgctcgctcaggcctggccggcacccctcgagcacagcgcact

SEQ ID NO: 118115 - DNA, 122 bp, Homo sapiens
cccccagccaggcgccttcccagctgtggtcctggggaaggtgggctgcacaggccctggcggtgctaccactgcgtgcccctgcctcacagctgacactcactctctgcggaggagggtgc

SEQ ID NO: 118116 - DNA, 122 bp, Homo sapiens
tggaacagaatatttgaaatggggccattctaggtgatcccaagctgctgaggtgcctttcggacccagctggtggcagccgttgcctgcaaggatctaggtggtggggagcccaggcttcc

SEQ ID NO: 118117 - DNA, 122 bp, Homo sapiens
cccacccccgcccccccttgggacctggcgaggagttgccccgcaaagttggggctggtgcggggttaaggggattacaattttcctaggacttagtgtgctgaagctgcttttgcgattag

SEQ ID NO: 118118 - DNA, 122 bp, Homo sapiens
tattgctgtgtgcttccagccacaggttctcacactcaattccaaagccttcctattgggcgaattccctcaaactctatttgacctgacagccatacgtattcccctctggtagccacaga

SEQ ID NO: 118119 - DNA, 122 bp, Homo sapiens
gggtgggtgcggtgaccccggcctcagaccctgtcctcatcattggcgcggggctgtcagcggccgacgcggtcctctacgcccgccactacaacatcccggtgatccatgccttccgccgg

SEQ ID NO: 118120 - DNA, 122 bp, Homo sapiens
cccgagtcggcccccggccccggccccggccccgccccggctcttcttggctgggtcgcgcggttcgggaggacgcctgcctttcaagcccggaagaggatccttaagaggtcttgcccggc

SEQ ID NO: 118121 - DNA, 122 bp, Homo sapiens
atttgcttttctcttcattatggttactgtcccacaattggaagactttttttttatccacgtgtacaaggaaatcgaagggttatgaagtccagagttgatatttgagaaactgaaaaaca

SEQ ID NO: 118122 - DNA, 122 bp, Homo sapiens
acttaaagaaaacaaataatccaattaaaaatggtcaaaggggctgggcatggtggctcacgcctgtaatctcagcactttgggaggccgaggtgggagaatcacaaggtcaggagactgag

SEQ ID NO: 118123 - DNA, 122 bp, Homo sapiens
ggtccccagtatcgggaattgctccctccgggcagccgcagaccccctgccgccctccagcgtgcccctagcccaaaaccacggcggatggcagcggattatccagccccgaacgccgcaaa

SEQ ID NO: 118124 - DNA, 122 bp, Homo sapiens
ggtttgaatggcatctgttcctcctaacccgtgacccctgactgactgtgtgaggcctgtcgggaggtctccacttcagctatctccccatccacaacctcactgtcttcatactgacccca

SEQ ID NO: 118125 - DNA, 122 bp, Homo sapiens
caagaacacacagctggctcttggccaagcctggccgggagcgaccttcttctgactttacggagtgtgttttcactacactcagtctctgattttatccctgccctggcttaattaagtgc

SEQ ID NO: 118126 - DNA, 122 bp, Homo sapiens
tacttctagaattaatttagggaataaataagaaaaagcacatcgcatgtcaaagtttcacgcctgatgtgaatgcttacaaaaatgtaactattgttatcagatttgctggcagagattga

SEQ ID NO: 118127 - DNA, 122 bp, Homo sapiens
gggcaacattgagcactgagtgaacgaggactccatctgcaatcccggcacctcgggaggcggaggctggcagatcactcgcggttaggagctggagaccagcccggccaacacagcgaaac

SEQ ID NO: 118128 - DNA, 122 bp, Homo sapiens
cccagacccttcccgcctttgccgcgcccagacatgtcttgtactaaacaaaatgcaacacggcaagcctcgcagcagtactttatatagtaataaatcggacctgattgggaactctccac

SEQ ID NO: 118129 - DNA, 122 bp, Homo sapiens
acttacgacggtaggcggggcttagcgcttcaccctttaacaaaacccaaacaaaccaaacggcgactggagcgaggtgggcggaaaaagccacctgggaaagtcagcggttttgtggatta

SEQ ID NO: 118130 - DNA, 122 bp, Homo sapiens
ctccgtggcttaagtaacccgaaagccatagactcgtggggaaggagcggctctcgctggcgtctaagacttccggcctccaacctcctggttggttaatatgagagatagattaaagagga

SEQ ID NO: 118131 - DNA, 122 bp, Homo sapiens
cggcgccccaaacgagcaggtcgatgcctgaggatttaatggagaaatcccaaagtgagccggggcgcgcggtggaggaggggcgcgccgcagccggggccgctgggccctgatgggcggga

SEQ ID NO: 118132 - DNA, 122 bp, Homo sapiens
gcagggcgggcagcaaaggcagcagagctcactcagcgacagcccattcatggcgggcgccgcccgggccgggcctccaccggggcccccgccaacaacgccgcctggcctggcccggcagg

SEQ ID NO: 118133 - DNA, 122 bp, Homo sapiens
gtttccctccttgttttcttctggttaatctttatcaggtcttttcttgttcaccctcagcgagtactgtgagagcaagtagtggggagagagggtgggaaaaacaaaaacacacacctcct

SEQ ID NO: 118134 - DNA, 122 bp, Homo sapiens
tcttctgtgaaaacatctcagttccctcagttacaattaatctgtctgatgcttgtatagcgctttttcatacttgttatagctgctatgtttgcatggtatgaaagaagtatacacggccg

SEQ ID NO: 118135 - DNA, 122 bp, Homo sapiens
tcacaaagaagaaaacaaactgaatccccactcctattactaatatcaatcccaagtagacgtcaagaatgtaggtatgaaaagcatactattcaattttcaggagctaaaacaggagaata

SEQ ID NO: 118136 - DNA, 122 bp, Homo sapiens
gttatcctgttcttttttcaaggtgcccagatttcatattgtttaaacacacatgttttacgaacaatttgtgcagtgaacgcaatcatcacagggtcctgaggcgaaatacatcctcagct

SEQ ID NO: 118137 - DNA, 122 bp, Homo sapiens
agccgtcgtcggagggggcggggttcaggtgcagggcggggctcagaactccgggagaggcggaagccgacgccggagggggcggggctcgagtgaggggcaaggctccaggatcctcgcag

SEQ ID NO: 118138 - DNA, 122 bp, Homo sapiens
tctgcgtggttccagcctaactcctgccccttgggtcttggcaaccagtttgggaaaattcggggtccatcagagactttgagagatgtcgaccctgctgccaatctgctccaagccgggcc

SEQ ID NO: 118139 - DNA, 122 bp, Homo sapiens
tgcatgtctgcaaatgaactacacacacgggcctatatctctggacagggaagtgatagccggcattcattttcttctttttacacattctcctctaatttccacatttcctacaaagggga

SEQ ID NO: 118140 - DNA, 122 bp, Homo sapiens
actgactgagaccagagttagagataaatgattggttttttccctttagagaaagcctagcgtttgtcatttatggtgtatttatttgcttatgaaaataacctaatgaggatggacccttt

SEQ ID NO: 118141 - DNA, 122 bp, Homo sapiens
ggatgaaccccacctccgcgaacttccgcagcaggtcggggcacacctgcctctgcaggacgacctcaggctggctccaggtgtcctgcaccgagccgtccctacctcgcttcttcttccct

SEQ ID NO: 118142 - DNA, 122 bp, Homo sapiens
gcacaatgacttttgatgatgcctccatgatccttcactttgcatgtacagacacagacacggagatgcaaactcctgcatcctacaagggtcatctgcaaattggcttatcagttttctca

SEQ ID NO: 118143 - DNA, 122 bp, Homo sapiens
ttatctctgagcttcggtttgctcatctgctagacggggggtttctgtgagtcccaggaccgccacagggatcacgagaagtactgaatgtccaggtaattttgtaaactagaaagtcccgc

SEQ ID NO: 118144 - DNA, 122 bp, Homo sapiens
agaggcggccggggctccccaccaggtgagcaggtcctgcccggcttgaggccaggggtccgggctgcggcccgagataagcgtcgcgcccgccgccgcttcctgcgcttccagcgccgcca

SEQ ID NO: 118145 - DNA, 122 bp, Homo sapiens
gtcttggggtttatagtccactgagcctcgccggaggtaaccccggctcagggatgctttcgttgccatggcaaccgccgggccggcgcgggcccctgagtgcagctgaggaagctgggaca

SEQ ID NO: 118146 - DNA, 122 bp, Homo sapiens
agctactcagctactcagcagtgggggttcaggcacgaagcagatgtttagtgtgtgcctcgggagtgccaggccctggggatggagctgtgagctgtgatgagggcccccaccttcaagga

SEQ ID NO: 118147 - DNA, 122 bp, Homo sapiens
ttttctccttcccacgtgaaacaggtacgcccagagccagaccgtgtttcaaaatccagacgcacaccccgccaacagcagcagcgccccgatgcccgtcctgctgatggggcaggcggtgc

SEQ ID NO: 118148 - DNA, 122 bp, Homo sapiens
cagtatccacataaaacattcgttgttcaaaggggcagaaatgcacccctaaataggaagcgcactccacgggtgatgggtactaaggttggatgcctttgctcacaaccaagaatttgaaa

SEQ ID NO: 118149 - DNA, 122 bp, Homo sapiens
ggtgaagggtgggggcaacccgacgctggccctgaggacactctctcccgggcaggagtacggtgttcccttcctggagaccagcgccaagactggcatgaatgtggagttagcctttctgg

SEQ ID NO: 118150 - DNA, 122 bp, Homo sapiens
aatgtgtgagacctgacaaacttgttctgcgggctgcggatgggtgcgagggtggaatctcggtgctgcgacgagtgtggggccagccgtggaggctccaggtgttctctctgccccagcag

SEQ ID NO: 118151 - DNA, 122 bp, Homo sapiens
tgaccacccgagggttccccttttccactctccttcccactctgtttttgtcccagcgcgcgccagcgcctctcaggcctgccgcctgctctcgcacctgctcgccttccccaggcgcccag

SEQ ID NO: 118152 - DNA, 122 bp, Homo sapiens
aagcgtaaggcggcgttctcaatgcttagcagtgcattgggatcgcctggtgaacgggaacgatactgacggccagcgcccccactcccaattcgactggtctaaagtggggcccagatact

SEQ ID NO: 118153 - DNA, 122 bp, Homo sapiens
aggaaagagtggatgatctgttcctgttgggaggacctgggccatggttgtttgtttctccgtaagcgccttcaattactgttccactactcatcaagcacataagttactcattgagaacc

SEQ ID NO: 118154 - DNA, 122 bp, Homo sapiens
cccaggagaaccagtgagacaagactggtggttctcaaagactcatatgtcccttacaggcgcctgcccccgcaaccgattcgaccactccctagatttggtgagactaattccaccccatt

SEQ ID NO: 118155 - DNA, 122 bp, Homo sapiens
ctgaggggctggcaatacagcataagaaagtcactccaaattctgttaagcaaggttttccgcaggcagccgtcagtatcacagcctccagtactataatcattgttaaagcattttaaaat

SEQ ID NO: 118156 - DNA, 122 bp, Homo sapiens
cagaggccttattcctccatcagggacattcttgaggtttaaccttgatcccttatgctgcgggccccagcctgttgcttctgttagcagaggttgggtcagctcgcaccactgctctccag

SEQ ID NO: 118157 - DNA, 122 bp, Homo sapiens
ttcatttcttagggaggctggaaaatctgtgcctggggagccgggtttcagtcagttaggcggaaaggccagtgagggggtgaatccaggggatcttcgccttggagggtcgggaatgcggc

SEQ ID NO: 118158 - DNA, 122 bp, Homo sapiens
ggggccaggacagtaaataggacaaagtgcacagcttcctgagcgctgcccttgtggctacgggcccaaaactcttaaaaatgtgcttgtacgccaactggaatctgggcgatggagtcatg

SEQ ID NO: 118159 - DNA, 122 bp, Homo sapiens
gcggcctttagccgcgaaaacagcgtggcgcacggtggcgccgccgcagccgtgggccgccgcgcccaggtagcgctccagctgcccgcatagctcctgcagcgccacctcgccggggcccg

SEQ ID NO: 118160 - DNA, 122 bp, Homo sapiens
aagaaaacttagttacttagcctttctgcggagaataattgcttatttgacagggtgacacgatggtgtgtgagctcagttgcttttagccagcactacttgaagtcctcccgtcatataaa

SEQ ID NO: 118161 - DNA, 122 bp, Homo sapiens
actgttgtaaatgtggctgcgaatgctctgggtttgatggggggctgccgacagataccacggttacggtgagacggctgctgcctgcgaacgtccgtcatggatggttttcctctaagtgg

SEQ ID NO: 118162 - DNA, 122 bp, Homo sapiens
ggaatgagtcgggcctggagctgctcacagcctattacaaccagctgtgcttcctggatgcgcgcttcctcacccctgccaggagcctcgggctcttcttccactggtaggggctctgcggg

SEQ ID NO: 118163 - DNA, 122 bp, Homo sapiens
aagtctctggtttccggggaggaagggggaggggagggatgaaaaaaagaacaaagaccccgccctgtgcctgcacctgcgccactcctgcagctcctgagcttcccccaccctcgctgccc

SEQ ID NO: 118164 - DNA, 122 bp, Homo sapiens
cgagcactctaggaacctccccaacatcaattaggcctcataactaggtatgctcacctccgcctccactgattaaagaagcgatagggggttctgggacctgcaccgtgctaaataccaca

SEQ ID NO: 118165 - DNA, 122 bp, Homo sapiens
acagtaaataatatagaaagaaagggagggagggagggaaggaaggaaaaaatgcggacgcggatgtcctgcaatagggaccttggggcatgcccccacccgcacaacacgagcacttacct

SEQ ID NO: 118166 - DNA, 122 bp, Homo sapiens
gaggcggcccagggccgtgggggctgcgagggtcccgccgcgcggggcttcacttaccgtcgctctcagccctgacaagcagggacatgcccttcagccgctccacgtagccagacgacaca

SEQ ID NO: 118167 - DNA, 122 bp, Homo sapiens
gagggctcagtgtgagccatcagaaccttccagggtatcttcccttgcttgttctctttgcgcagtccacttggtttgctaaactcctgctcttccatcaagacccaactcaaggccaggca

SEQ ID NO: 118168 - DNA, 122 bp, Homo sapiens
cgggcatcccagccccccgccgacgggctccaccgcgggcatcccagccaccccccccgacgggctccaccgcaggcatcccagctcccacacagggaggtctgtgggacacgaggccagta

SEQ ID NO: 118169 - DNA, 122 bp, Homo sapiens
aattattcacgtgcatcatgttcgcagatcttctgtcattaatatttttcttgtctcctacgttacatgtagtgatttttacagatgaattccaactctcttgtttgagcagctatcgtggg

SEQ ID NO: 118170 - DNA, 122 bp, Homo sapiens
cgtcgtcccgccctgtcccaccagctcggccccatcccgccggctcccgttggggccggccgggttcccattgctgccgctgccgccatccttgcctctgccacaccgcgccaccgggcccg

SEQ ID NO: 118171 - DNA, 122 bp, Homo sapiens
ggttgacgctgaggtccatcccattgtaattgtagccgtaagagccggtgtgcatggcagcgggatccctgtaagagccgctcagagagctgccactgccataatttagcaactgatagtcc

SEQ ID NO: 118172 - DNA, 122 bp, Homo sapiens
agccaattccacacttttctcttgtacactcaactgctactgggctccttaattaaaacacgctcaagtcactgtcattcaaaaacacctgcactgacttacagctccctctaggtggcatc

SEQ ID NO: 118173 - DNA, 122 bp, Homo sapiens
ttttttttttttagtgcatttggagggaagccacagagtccacactccactttccatagccgttaactgatggattcacaaaattcaattttgtggtgaaaggctgcagcctctctccatgt

SEQ ID NO: 118174 - DNA, 122 bp, Homo sapiens
ggtttatgcccctaatcccagcactttgggaggctgaagtgggaggatagcttgagcccacgagttggagaccaacttggctgatgtgatgagacccccatctctaaaaataataataaaaa

SEQ ID NO: 118175 - DNA, 122 bp, Homo sapiens
gagcccactgggaggaaggaagaactccagacgcactaccttaagagctgtaacattcaccgccaaggtctgcagcttcactcctgagcccagcgagaccacgaactcaccagaaggaagaa

SEQ ID NO: 118176 - DNA, 122 bp, Homo sapiens
gtctgagaccatggattccaggctgggctgatgccggcacgcaggaggcctcgcgcaagacggctggtcccagccagacccagaaaaattagattaactcggagaagctcgccaagacgatc

SEQ ID NO: 118177 - DNA, 122 bp, Homo sapiens
ccctggcctacgggtagaggccagtgactgagactctcattgcgggagggggcgattagtcgcaaagccgcccattccaggatttggagatgcagctccagcacacccttctttctctgtct

SEQ ID NO: 118178 - DNA, 122 bp, Homo sapiens
aaggaagagcggagtggcatgaccacagacgatgacaccatgagcgagatgaaaatggggcgctactggagcaaagaggagagaaagcagcacctggttagggccaaagagcagcgccgtcg

SEQ ID NO: 118179 - DNA, 122 bp, Homo sapiens
ggacccggctccctccctgggctctcccctccgctaccccccgcaactctgagttatgggcgatcagttaattggaatcggtggcatgacaggaccacccctagctggggggggggggtggt

SEQ ID NO: 118180 - DNA, 122 bp, Homo sapiens
tatcatcctctctccctgtggatattaggaagagtatcacagggctgtcgaaacccccagcggtactgggagtaatatcatcctctcgccctctggatatgaggaagattttcacagggctg

SEQ ID NO: 118181 - DNA, 122 bp, Homo sapiens
cccgatcagaaaccgcgagggcaagagagggagagaggaaagaggtaaatgaccgcagagcgggcgtctggttttcccttgagaagggtgcttccatgactttctgttttaaagaaggcacc

SEQ ID NO: 118182 - DNA, 122 bp, Homo sapiens
gtcggcaggagggtctgagggtcccgggggccgattcacgagggagtatttcttgcgccacgaaggcccatggtgggaagagtagcccctccggcttggacgagggtagcgggcactaaagg

SEQ ID NO: 118183 - DNA, 122 bp, Homo sapiens
ggctccccagcagtggcccatccatggaaatcagccctgccagggaccatggccccgttccgcccccgcctgcggtgttccaggccgcgcctccctccttcccgtatgggcggaccttgccc

SEQ ID NO: 118184 - DNA, 122 bp, Homo sapiens
gggcggctgcggggcgctagcaggtgcgagggggtcctgggcggctcataccctctgtcccgcgtcctccgcatcgcgaaggggaggctcggagaccaaggtccgtctgccgcccggaaggg

SEQ ID NO: 118185 - DNA, 122 bp, Homo sapiens
accaaggaggtctctgggagttagggggctgtagagtgctgcctctatgcctcctgggggcggaggggcagcaggagggacagggtctgcccagaatactgatatgccctcgccgcttccac

SEQ ID NO: 118186 - DNA, 122 bp, Homo sapiens
aaaaaaaagttccccaagcattcccagtgacccagtgatgagccaggattggtgaataaccgctctcactggggcttgcctgagtggactgagcacctgtgttgaagttaaaagacctgagg

SEQ ID NO: 118187 - DNA, 122 bp, Homo sapiens
gctccacgcttgggttggtcgagtccttactgtctccagagggtgggtcctggccacgagcgacagccgagaagcgcagcagggccagggggctgagcagatcagccgcatcacggaacccc

SEQ ID NO: 118188 - DNA, 122 bp, Homo sapiens
gggagagagcagggggcgcgctgggggccattcccaacggatgcggtctggggcgccacgcgcgggctttttgaaaacttgactgttggggttgggggcccggatctacccgccgcctctcc

SEQ ID NO: 118189 - DNA, 122 bp, Homo sapiens
ggcttctgcccgagcggaggtcagcgaggacccgggaggcagcgcctggatggagctggacggggagggctctgctggggctcctggtccccatgcggctgtgctgtcatggggagccctgg

SEQ ID NO: 118190 - DNA, 122 bp, Homo sapiens
aatgagctgggaaaggaggattttctcttttccaaccccgagccggggcctgtcgggtcgcgctatccccgggccctccactctctcgggcccagtggcccagcgctgggtaacattcatcc

SEQ ID NO: 118191 - DNA, 122 bp, Homo sapiens
tctttcctcagacaagtccgtaagggactcctgcccttaaccaagatggaaccttcctggcgtcaacacccctcgcctttcctctctgcctttacacaccacgagggaaaccagcgggaagg

SEQ ID NO: 118192 - DNA, 122 bp, Homo sapiens
tcttccacatattttctgcagttattttaactcagtataggagctagaggaagagatttccgaagtctgcaccccgcgcagagcactactgtaacttccaagggagcgctgggagcagcggg

SEQ ID NO: 118193 - DNA, 122 bp, Homo sapiens
aagtgaggccgggatctccggaacccgcctctcgctaccaggcgccggagctgccgctcccgaggttcctaggagatgcagaagacactgccctgaatgcctacagccggctggcaatgccg

SEQ ID NO: 118194 - DNA, 122 bp, Homo sapiens
gaacgctttagacatgcacatcctccagccccacccacccctgctgagttagaagctctgcggtgaggccagtgcactcaagtttgggaactaccaatatagagtaaaagatgggggagaaa

SEQ ID NO: 118195 - DNA, 122 bp, Homo sapiens
aagcagagaagacaaagtacatgagaagtagaaggcaatgagggatacaggctgtgataacgtagctcattagtggctaacaaggaggtcaccagtaaatacaaaataaatgagatggatga

SEQ ID NO: 118196 - DNA, 122 bp, Homo sapiens
tgaagcaccttcgttgtctggggtaaatgcctgaggttcgtcgtcttacgccaaggaaatcgaggacgaggacacgcaagaagtgagtttaagagaagaggtttaacagagagaaagggaaa

SEQ ID NO: 118197 - DNA, 122 bp, Homo sapiens
aacatgagccttcaataggatgactttggtatggccttcatttatttgaaccatccctgccgctccatccagactggctggccaataatatacagcaaggaacaatggaaaggatactgaat

SEQ ID NO: 118198 - DNA, 122 bp, Homo sapiens
cctgggaatcccaaggactgcacttggatcctgaaggtctgcacaagaccccagagaaagcggccgacaccccgtccctgcaatcaaaacacatcccgggagaagcgagggcgaggacctcc

SEQ ID NO: 118199 - DNA, 122 bp, Homo sapiens
ctagggagaaaagagcctcgtcggcagagccgggccactgggaaaagcgccaggacaaggcgagcgtgtgcctccccctgccggccagggaggcactgcggccccgaaacggccaggcggtg

SEQ ID NO: 118200 - DNA, 122 bp, Homo sapiens
ggagcgggcggctgctgctccggggcctcctggctcgagcccttagcccccgactcccggcgtttcggcgcccgatcagcgctccaggccgcccccgctccgccttctcccagtgcctttcc

SEQ ID NO: 118201 - DNA, 122 bp, Homo sapiens
cgccacccgccacccccggcgcctgccaaactggttgctgcctccccggcagccgcggcgcgtccacctgcgcagccaccgcgccgccctgcccgcgctaccattggctcgctaaaaatgcc

SEQ ID NO: 118202 - DNA, 122 bp, Homo sapiens
atctgcccgccttggcctcccaaaatgctgggattacaggcgtgagccactgcacctggccgatgcttgatatttctgcagtggcttctcatcatgatgatacctgtatggttcaagagctg

SEQ ID NO: 118203 - DNA, 122 bp, Homo sapiens
atataacagacgcgaagataatcctgccatctggcaaatcccaaatttggtgaccaagctcggaaagcaacagcgacggctcatcccgggagtaggtggctggtcctgccggactctccgga

SEQ ID NO: 118204 - DNA, 122 bp, Homo sapiens
gtggtggggggaggtggtcaaggcaagcggacccctccccgccatcagccaccgtgtcctcgctgtgcagtgccctttccatgggaagattgttccacgggacgacgaaggacggccgctcg

SEQ ID NO: 118205 - DNA, 122 bp, Homo sapiens
gccggcggcgcgggcgggacccactgggtggccgcgcgcgccacccgcgcgttttctgcgcgcctctgcccacccgcgaggccgcaacgcgccctgacacccgacctcagtgtggaccctca

SEQ ID NO: 118206 - DNA, 122 bp, Homo sapiens
gggtctcactcctcttcacccagagggaggctgcccaccaccttatcccctattgtgatgcgccttcctcaggatgtcgctgcgttcgtctgagatgacaggaaaggggcggggcacggggt

SEQ ID NO: 118207 - DNA, 122 bp, Homo sapiens
aaggccaggaccagccaggccgcgcggacctgaggttgaggaaccgggtgcaggcgagcacgatgggccggtcgtggctctggttgcagcagctcagacgagtgcgggacccgcagggctga

SEQ ID NO: 118208 - DNA, 122 bp, Homo sapiens
cctagtcccttctgcacccacgtccagcgcgcacccctgccagcggcgccagctgggattcggagacgacgccaggaaacgctatcctggtattttttcggaccgtctcatcgcccccttcc

SEQ ID NO: 118209 - DNA, 122 bp, Homo sapiens
tcctccccgcagtgaagcatgggccagaagctctcggggagcctcaagtcagtggaggtgcgagagccggcgctgcggccggccaagcgggagctgcggggtgcagagcccgggcggccggc

SEQ ID NO: 118210 - DNA, 122 bp, Homo sapiens
tctgtaacaagtcagtaattaaagtaacaaactcataaagtctttataggggcatttaggcgttcagtgtttgccaaactaagtggtttaattcgatgctagtgccggggagtggatgggct

SEQ ID NO: 118211 - DNA, 122 bp, Homo sapiens
ggcggcgctgcgctgacgggctgagtctggcggcggcggaagctgcagaggccaccggggcgctaactgggtggccggtgggccgctgtggcctcgagcagcctcttcgcgcggccccgcac

SEQ ID NO: 118212 - DNA, 122 bp, Homo sapiens
cgggtgcctggcggcgttttagaaaagctgtatttgaaaagcaaccgattggggtgaaggcgggggagcggaatcctgattacactgtcccaatttcagttgaggtgggcttttaaaagaaa

SEQ ID NO: 118213 - DNA, 122 bp, Homo sapiens
ccacttctagacctggcccacaaaaacctcccatgcatccctcttttcgatcagccccctcgaacttgataacctaggctggcctcaagagccatgtgctgaggggcacagagcggaggtca

SEQ ID NO: 118214 - DNA, 122 bp, Homo sapiens
tagagcagcagctttgtttctttgcttcactgctgtctccctagcacttagaacatagtacgtgctcaataaatgaatgagtgcctgactgaatgaatgaggatacatagatgagattcctc

SEQ ID NO: 118215 - DNA, 122 bp, Homo sapiens
aaaagaggcctctcaggatggggagtagatttcaacccctgcgggtccatcgcagctacccgcattgccaaggccttcacaaacccaaactggaaccgccgggaaaaagaccaacaactggt

SEQ ID NO: 118216 - DNA, 122 bp, Homo sapiens
tttgcgcctcagccgcgtggtctgaagggatgggcgggcgagcgcgggggtccggcagtccgtcgtgggggcacgggactgcctttctgggaaggcgtgctgcgtcttcgccgcgggggccc

SEQ ID NO: 118217 - DNA, 122 bp, Homo sapiens
cctctcacggttagcgctacggctccaaggctggcgcctgctcttcttcatctccctccccggcccttggcaggagcctcgccctacattggctcttcaagtccgggcgtccccttcatgtg

SEQ ID NO: 118218 - DNA, 122 bp, Homo sapiens
cacgcgggatgaagggcaacgggggccgcaagcgggggcaggagcgccaggaacgaggaacgaagggggaagggaggaaaggacgcccaggcttccggaagactcgggggtcccatccccac

SEQ ID NO: 118219 - DNA, 122 bp, Homo sapiens
ggtcccaccttcccgccttcccaatagagcgtggaggacatggtcttctggggtccacggcggggagggtggggtgcaccggcgcgtggatgcaggggtctcaaggccccaagccacacttc

SEQ ID NO: 118220 - DNA, 122 bp, Homo sapiens
ttttaaataaaatcctgtttctggctctggattgaatgaattgccctcactaagaactgccgccaaccccaagggtttcttctcggcctggtgtccgtcaatccagccttgctctgccctgt

SEQ ID NO: 118221 - DNA, 122 bp, Homo sapiens
ctaaccccacacgtagtgagtggttcccacgccacgttccagtaggagaaatgaagttcccggggacggaagaagatggcagtcacctggtgtgcccagcatgtttgaccccccgagcagct

SEQ ID NO: 118222 - DNA, 122 bp, Homo sapiens
gtacaacgccctggccctgcagtgctacaaccctgtcacaggtgggtggggctcagggaccgaggatagaggaccacaggcccctctgacaggcgacagtccgctcgtagtgatggtgagga

SEQ ID NO: 118223 - DNA, 122 bp, Homo sapiens
tagggcttggttgcaagttccagtaggaatggcggagttgtggcagtcacacatccatgacgcgaagtgaactaacaggtgccgtttctgtgctagaaaatggaaaaagagccagggccgga

SEQ ID NO: 118224 - DNA, 122 bp, Homo sapiens
gtgcctcagctctggcctccgcttaaccagaagaattctgaaaacagaacttcgtcagaacgcagcccgcgtgtgctgaagctggcacgctgacatggaaagacactcttcttcagggaggg

SEQ ID NO: 118225 - DNA, 122 bp, Homo sapiens
cctgtccccaggtagatctggaactgtgtcatggtttccttttcacttgtcatcccatttcgagaagcaagactcacagtgttgtctcagcaccatctgctgcagcttctaaaaggggtagg

SEQ ID NO: 118226 - DNA, 122 bp, Homo sapiens
tcccctgggcccgggggtcatggccagaacgcagagactttatgatgaggacggtgcccacgatgatgccgactaggcccagcaccaggcccagggcacagagcacagtctccgttgtctca

SEQ ID NO: 118227 - DNA, 122 bp, Homo sapiens
ctgtcttttgatacatcagtttggaaacactctttttgtagaatctggaagtggatatttcgatagctctaacgattttgttgaaaacgggaatagcttcatataaaatctaggcagaggca

SEQ ID NO: 118228 - DNA, 122 bp, Homo sapiens
tcttgcaccagacgctgaaagcgaagtttgcgaatcagaagttcagtggccttctgataacgtctgatttcacggagtgccacagtaccaggcctgtaatgatgaggtttcttcacccctcc

SEQ ID NO: 118229 - DNA, 122 bp, Homo sapiens
cttatttaaaagccattctgtttattaaaataatagttttggatgagaaacaatgaaattcgtagaatgctcatagaataacctttgctgcacaacagactgtctggggatcttcattaaaa

SEQ ID NO: 118230 - DNA, 122 bp, Homo sapiens
aaaactaaaaggcagaaatgaaatctacaggcagacagccctgtgctgcaccttgggcctcgttaaagattgacccctgacctaaccggttatgttatctatagattccagacattgtatgg

SEQ ID NO: 118231 - DNA, 122 bp, Homo sapiens
ggtgtccctgatctttgggtgccaaacattgtggcgaagggctccgccggcccctacagacgcgaacttggtgccgtagtctcgagtgccctctgccgtaacttgggaaaccagcgcttctt

SEQ ID NO: 118232 - DNA, 122 bp, Homo sapiens
tagcctctactacagagcctgggggctgggcagcgggcaggcaggacagggcctggacctcgtccaggaaagagctaatgatcaaccggctgcggtgtctgtgcagccgccctgggcctgcc

SEQ ID NO: 118233 - DNA, 122 bp, Homo sapiens
tcatttttccacagacacaataatgaactaaaaagaggaggcaaaaaggcagaggttgagcggggagtagaaaggaaagcccttaactgcagagctctgctctacaaatgcttaaccttaca

SEQ ID NO: 118234 - DNA, 122 bp, Homo sapiens
gccctaaacatcaaacttagaaactcatctttcagcagcagcggtagagcagtgaccaggcgtctccgcgatgggccccggggacttccgccgctgcagagagagaatttcccaggggctcc

SEQ ID NO: 118235 - DNA, 122 bp, Homo sapiens
ttggctgggctgtgcggggcggcctgcccgcctgtctgcctgcccgcccgcctgcccggccgtgggagctgccagcgccttgccctcccgctgcccacaggccctgccaggctgggcgcaag

SEQ ID NO: 118236 - DNA, 122 bp, Homo sapiens
gactttcctttgtccccatatttttctcttcctctctcttgggactctgctcaggggttacgcccgctctcgcttgtggtgaggcttcctcatagcctcgcaactcttaaaagaaaaccctg

SEQ ID NO: 118237 - DNA, 122 bp, Homo sapiens
tattctgggaggaagagacaaggctccacgaaagaaatgaaacccaagctgtcagggctacgggtggaaggagaatgaggaggcaaccaaaataagatcaaaaagtcaggtggcttcactcc

SEQ ID NO: 118238 - DNA, 122 bp, Homo sapiens
ttccgaagaaccaggaacccggggctctacagctcacccgggccctctcataggtctgggcgcctaacagctcagctgcgacctcgcctcaaacgcgtggaactacacttcccagaaagcca

SEQ ID NO: 118239 - DNA, 122 bp, Homo sapiens
ggtggtttactccacagaggcaggaaaacttcagtcacgaggcgaataccccactcagtgcgcatgctgcacagacctgttggtgcccatgtctgttgctatgcgtgtctgttgttgcgcag

SEQ ID NO: 118240 - DNA, 122 bp, Homo sapiens
cttcaacttctgagcacagagtgatttcggatgaattatacaacagatggacttcagttccgcacccttgcagaacgtcgccaccctggacttcagttttgtaacaagcccgttattggcat

SEQ ID NO: 118241 - DNA, 122 bp, Homo sapiens
cattgattggcaaagcaaggactgttaggtggctttttcaccccagagtctgttgcctggcggatttcttggtccttggttattgtaaagtagaattgacatttgtcagaaagaattggatt

SEQ ID NO: 118242 - DNA, 122 bp, Homo sapiens
gcttctccgctcttggctgtttggaaggccgcaggcggagctcacgggcctgtgagctcccggctggtggcagagtgccggagctggatcccctctccctccctcccagtcgccagaccctc

SEQ ID NO: 118243 - DNA, 122 bp, Homo sapiens
tcatttgggcttcaggaaacgcggtgcatgagctgtttcaggtgctggggaaaggctctgcgttagaacccacaccttccgtctcccgggccaggtctctttgtaggccaccacggagagag

SEQ ID NO: 118244 - DNA, 122 bp, Homo sapiens
tatcaggcgagaggcggagctggcccggcgcgccccgcccccgctgtagaaagggccgggcgagtgttactcgcggtcatcccggcctgggccttttatctcggtgctgccgggggaggcgg

SEQ ID NO: 118245 - DNA, 122 bp, Homo sapiens
gccaggccgagatgtacagctccttgacaactccagcattgttgagcaagatgctggaatcgctgcctggtctgtgcattggctcacagctcgctcactctcctcccaccctgctccccgct

SEQ ID NO: 118246 - DNA, 122 bp, Homo sapiens
ggaggtggctcccgggaggtgaatggctgagacttcgaagagatttcctcccggaaaggccgagcattgagccatccggggggtggggacagctggactaagaaagggcttagtaggcctga

SEQ ID NO: 118247 - DNA, 122 bp, Homo sapiens
atggtcattagacgtctcgacagccacctgctgttgaccacttgcctcctcaacaggagccgctgtcgtctgcatatgttcatactgtggcaagtaggctccttgcatagctgacgttgcag

SEQ ID NO: 118248 - DNA, 122 bp, Homo sapiens
gtggggcgggggccacaaacttggggccgttgggcggagttgggagcgcggcggggctcgcgggccggggtgcgcccgggaaggggccaggagagcgggtcccctccgcgcccctccggtgc

SEQ ID NO: 118249 - DNA, 122 bp, Homo sapiens
actcctaattccggagtgcgctgctcctcggctgtgccaggctgacttgctatgacctaccggagcaaagctgggcaggaccacacaccagtgaacgggacacaccttaccgcagcttcttc

SEQ ID NO: 118250 - DNA, 122 bp, Homo sapiens
aaccataccttgagccaagaatttggattctgagcttgtcttttcatttaagctatgtggcgctgttagcatgaccgccctgcccagcagatcttgacttcagtgtaatctttattctcttc

SEQ ID NO: 118251 - DNA, 122 bp, Homo sapiens
tgctctgacctctggcagctttccactagtttctagctttcattctgcttacctggatttcggaactctagcctgccccactcttagataaacgcatgccctctgtggccctggaaccttag

SEQ ID NO: 118252 - DNA, 122 bp, Homo sapiens
gcctgctccccgggggctgaatccgcccgcccgggggccaggtgccgttgagatcccaggcgctccacctggaggccctatctggatcgaaactcgcactcgccccgccctcttgttaccag

SEQ ID NO: 118253 - DNA, 122 bp, Homo sapiens
ggttgaataatggcccactaaagatgtcattgtcctaatcccaagaaccagtaaattcatcgccttatattgtaaaaaggactttgcagaaatgatgaaattaagaatcttgagatgagaat

SEQ ID NO: 118254 - DNA, 122 bp, Homo sapiens
aaaaaggaaatgtacctgtagagtatccgctgcacagcaaacaaggcactgctccaaacccgtgtcctctaccccctttttgcacccttctagccctccctcccttttttccatgtaaaact

SEQ ID NO: 118255 - DNA, 122 bp, Homo sapiens
gctgctcctgctgcctttcagtgcttgttccccttcacctttttgggggacctgttactccgactcttacttgtctgtcggccttgcagggatgctcccatttcccagtagcctccaggcct

SEQ ID NO: 118256 - DNA, 122 bp, Homo sapiens
aggacgggagaccgacagcgggccccagtgtgtcccagcctggaaggagcagccccaaagcgagaattacgaggcccagcagtcgaactcccactcagcccaaccctggaagtcctatgcgg

SEQ ID NO: 118257 - DNA, 122 bp, Homo sapiens
acatgctgtgacatttccaccacgaacccaaacaaatatgttgtaacccagtgtaggaaacgagatgcccagaaaaacaaatgaaaccaaccacactgtgtttcagggattgctcggtagca

SEQ ID NO: 118258 - DNA, 122 bp, Homo sapiens
ttactgttcatttttagaagttaccttaagaacacagtcattacagtttaagattgtcgtcgattcttgtgtgctgtcttatatgtagtccataaaacccatgagttctgggcactgggtca

SEQ ID NO: 118259 - DNA, 122 bp, Homo sapiens
ttccacctgagaaatgaacacggggatcgttcacgctgctgctattctatgtcccgggaccgggttctaggtacaattcggtgggggtatgcggcggcctctgaggttccgaccactctgcg

SEQ ID NO: 118260 - DNA, 122 bp, Homo sapiens
ccgctgcgggcactggaggacccggggctagagggcgccgctctcgcccggctcgcgcctcggctcccggaaaagcagctctgtccgccgttcggctgcgctcacctcctttccgcttccgg

SEQ ID NO: 118261 - DNA, 122 bp, Homo sapiens
ctccctagcctgaaccccaccactggggagagggcagtgatgctcaccttggtcgcattgcggtttgcatagttgacacaggcattgtggctctggttcagccactgaaaggcaatgatgag

SEQ ID NO: 118262 - DNA, 122 bp, Homo sapiens
gccaggcttcaggaggccctctccgttctcctaactgggcagactgtggctggtggtttacgcttgaccacctcagctttcccattgtgactgaacacaagctgccttcagagcacttgtag

SEQ ID NO: 118263 - DNA, 122 bp, Homo sapiens
cttgggtcctcactccagggttacttgctttcagtgtgcatatattataattccagacaccggtgtccaattttcctgtctgccacttatctgaggggatgccctggaaaaggcaggtggcc

SEQ ID NO: 118264 - DNA, 122 bp, Homo sapiens
ctcaacaacacaatccccacctccaacctcagccgccctggagcctctctcccgccagtccgcccactggaacacgggttccatgtgccatccagggtcaacgccgctctggggacgcgtca

SEQ ID NO: 118265 - DNA, 122 bp, Homo sapiens
gctgctacgtgcaagcactgccctacatgctgggacgcagctgtagtaggaatgaaataacgccagcattcctgcatgcgggcagtgcgggccctgtacagaaaggtacacgagataggcat

SEQ ID NO: 118266 - DNA, 122 bp, Homo sapiens
atattacaaccaaggactttgttaccacgggctctgtgtatgaaggtaattaacagcttccggtgccaataaagggagactttcgaagcttcccctgaggtcacacgtccttgcagatttgt

SEQ ID NO: 118267 - DNA, 122 bp, Homo sapiens
tgctaaagccaggcacacagctttttcctctgggaatgtgaataacacagcaaacgtgaccgcagagaggcagtggctgtacatcctactgggctcgcatgagtgtcatttgtatttttctc

SEQ ID NO: 118268 - DNA, 122 bp, Homo sapiens
gagaggagctcgcgctgggcccggcaggcctgctgctgccatccatgcggctccaacggccggtcctgggtgccttatataggctggcgggccctcccccgccgcacctgcctgcgccccgc

SEQ ID NO: 118269 - DNA, 122 bp, Homo sapiens
agggaaatgctagctgccatggggccctaatgtggtctgtattagggagtattgggagtccgtcccagtattgtggtctgtattgggaggattaagaagggcatgccctggagcctgggcta

SEQ ID NO: 118270 - DNA, 122 bp, Homo sapiens
caggggttgggatgtcctgcctgcggaggggccacagcccccatggggggcccctcgcagcggggcacaccgatccctattctgcaaggtgtatcccacaaggcccttcctcttggtggcac

SEQ ID NO: 118271 - DNA, 122 bp, Homo sapiens
accgggagtttctcctgggagtgtggggacaggaggaagggggccgtgtgtcacggaggacggtggctttcaccaaacctgctcaggtcccaggaaggaggaccgtgagaggcctccacgtg

SEQ ID NO: 118272 - DNA, 122 bp, Homo sapiens
accagcggtgactaatatgacacggatgatacagcatgaccagcggtgactaatatgacacggatgatacagcatgaccagcggtgactaatgtgacacggatgatacagcatgaccagcgg

SEQ ID NO: 118273 - DNA, 122 bp, Homo sapiens
gggaactgggccagggtatcacatcctccagggaatgtttggctgcgacctggggcccgacgggcgtctcctccgcgggtatgagcagtatgcctacgacggcaaggattacatcgccctga

SEQ ID NO: 118274 - DNA, 122 bp, Homo sapiens
acttgataaagtcccctccccagactccacaggcaaatactggacggtgggcagtgactccgcggtcaccagcagcggcgacactcctgtggacttcttcttcgagttctgcgactataaca

SEQ ID NO: 118275 - DNA, 122 bp, Homo sapiens
tgtccaatgattttctttaaaaaaaatttatttcacgtgagtataattgagcaattagcgcgccctagtgttatctaagtttccagtgtttcctttagtaattggcctttagtcactggtcg

SEQ ID NO: 118276 - DNA, 122 bp, Homo sapiens
gctgcactggcatcttggagagcttgctcatagttcttcatggtcaaatataactccgcccgcagcagcaataatgaattatcatcaggagctgaaagacaggaggaatacaaatcaataaa

SEQ ID NO: 118277 - DNA, 122 bp, Homo sapiens
gggcaccggcctgaaacttctttttttggcaaatggggatttgtttttcctcctccccggcggctgaacttgaccctgctgactccaggggctactgcagtttgaagtcgctggtttccaaa

SEQ ID NO: 118278 - DNA, 122 bp, Homo sapiens
tccagtagggaatccaaagaatttccattgcaattgtgactctgagaatatttcattgcccgatgccaggttcagaaagccactgaccccatcaccccgcctctttatacgctcggagctaa

SEQ ID NO: 118279 - DNA, 122 bp, Homo sapiens
gcttttcattaaggaacaggtaacgcatttaactttgattttatgactcagtctcgagaacgctatgatctgacctctggggtttagaaataaaccactttctcatcaatactggaatcatt

SEQ ID NO: 118280 - DNA, 122 bp, Homo sapiens
actaactcatttccaattgctctggtcaagtttgctgtttcatgtgtcttgggttggcttcgctgataagcagacctaggagctggtatgcctcagatgtaccctatgttcctgtatagcac

SEQ ID NO: 118281 - DNA, 122 bp, Homo sapiens
tttgtaggtggttaagaaaggcagcgggagggcgtgaaggcaaagacaagctttttttctcgtaggaacacacatcttctggtctggctgtgtttccggaggcatttccagaggacctagcg

SEQ ID NO: 118282 - DNA, 122 bp, Homo sapiens
gctttccatggctgggagctccttcgcttcaggaagagaatccagtcccaaggcaaggcacgcacatccccagtgagtaacacttcctgagggcggtccgcctgtcacacccgccagttaac

SEQ ID NO: 118283 - DNA, 122 bp, Homo sapiens
gtgtccaatcccttcatgaacccgtgttcactggagaagacgagaaaggaaactaacatacggtggctggacattaagccatttcagatttacagctatacccaatggtataactgttaact

SEQ ID NO: 118284 - DNA, 122 bp, Homo sapiens
ggaggggacaggagcgagcccgagagaggactgggcaggaagccctggtttgtccccagtcgcttcttctgctatcttgcacccactgtcaagccgaccaagaactcccaggaccccctgac

SEQ ID NO: 118285 - DNA, 122 bp, Homo sapiens
cagctctgggccctgcgggcaggtggcgctgtgttgtacatgccaggcccagcatggcttcggttctgacttgaagccctcctttctccctggggcagggaatgagaagcagccagggccgc

SEQ ID NO: 118286 - DNA, 122 bp, Homo sapiens
gcgtgtgcgcggatgggaggcgaagaagtgtccggcgcccggctcctggcattgtgagcccgccggcctccgccggtaacgggcgcgcgggcctagtaaccctttccgtcctggccgggccg

SEQ ID NO: 118287 - DNA, 122 bp, Homo sapiens
aataccatcagttaacaactgtatgaattttaccaaggagaataaagttttctagcacttcggggattgctaaataaagtttaaattacattccaagaagtctggtttcaacagggaaagaa

SEQ ID NO: 118288 - DNA, 122 bp, Homo sapiens
aagaatgaatatttgttctagaacctggaattgggtcatgaagaatgagtaggagttttccgggaaaggtaaaggcattctcagcagagagaagaggagctgcaatctagggagggatgtgt

SEQ ID NO: 118289 - DNA, 122 bp, Homo sapiens
ttctgggaattgtagttccgggcgggatgagggcagcacgcctggctccgctccttcttacgcatgcgcgactccgagctggccaaagaagttcgtcccctttgtgaggcccgggatgggag

SEQ ID NO: 118290 - DNA, 122 bp, Homo sapiens
tatattttttttgttgtcaggaaatgaacaaatacttatcaatgtaaaaactgctatctccgatctccccgccgggtttttcatactgatattctttgcaccccgtaacacaggaaatgaaa

SEQ ID NO: 118291 - DNA, 122 bp, Homo sapiens
ggcggggcggaggcggcggcgcccccaggatccactcgcccagcgccgggccctgcactccgagccgcggccgccacccgccccgcagccaacttgggccgaaacttccccgggtcccgcgc

SEQ ID NO: 118292 - DNA, 122 bp, Homo sapiens
tgtgaggagaagccacatcctgaggagacagtagagtcagtggggcagcagccgcgctcccggccttctcggccttctccctgccctgggctggtgcctctggctgagaccccattgccggt

SEQ ID NO: 118293 - DNA, 122 bp, Homo sapiens
gccaggtgtggtgtggtcagcctggcctccccgcacatggccttctccctcacctgcccccggctgcgtctctaagatgctcttgttgacgagcagctctgtagacagcgctggctgtgctt

SEQ ID NO: 118294 - DNA, 122 bp, Homo sapiens
tctcgctctcctcgctcaggatctgcatcaagatctcgttctcgttcatgttggaagtctcggtccctaaggccatctgtctctggttcaaggaagtgcaggctgagttctaggtctcgttc

SEQ ID NO: 118295 - DNA, 122 bp, Homo sapiens
actaaaatcttttcacattacccatttttggttctctcattgagaattagagtttgatttcgctggaaatcatcaagaacacttactaccctcctatttccacacctcaacttctgctgaaa

SEQ ID NO: 118296 - DNA, 122 bp, Homo sapiens
aaagaacaatgaggaaagacacccacgcttcccctcactgggctaggaaggagagctttgcgggtttagactgcagtctcccccgcccatagccacctgtgtgccggctccgcagacgaggt

SEQ ID NO: 118297 - DNA, 122 bp, Homo sapiens
tattagtgaaagccacatttggggaatcacagttctgaaacttgtgcatgtcagaactggcgggaacatctgttaaaacagagatggctggtccccacccactgagtttctgatttagcagg

SEQ ID NO: 118298 - DNA, 122 bp, Homo sapiens
ccactcatcctcatcctcttcctctgataaagcccctaccagtgctgataaagtctttctcgtgagagcctagaggccttaaaaaaaaaagtgcttgaaagagaaggggacaaaggaacacc

SEQ ID NO: 118299 - DNA, 122 bp, Homo sapiens
ttccgactgcttgctgttgcgtccccgagtatttatatttccctcgaattttctccactgcgccataatgtaaacatataattgagtaccccatgtccatccccaacccttcacatacacta

SEQ ID NO: 118300 - DNA, 122 bp, Homo sapiens
gaccctcttcatctcaatttctcgttctaagaagaacacattgactgtctcagtttgtgtcgtgtgtccagctttgacaaagatgggagtaagtagtttgtagccccatagtacaagtatga

SEQ ID NO: 118301 - DNA, 122 bp, Homo sapiens
gcctcacaacaaatcaaataccttcgcagaccacccccaaagactgatgtgggggagtcacggaaaaaaacacgcacacacacatacacaacgcgccaggcgtaggcacgctgttaatttcg

SEQ ID NO: 118302 - DNA, 122 bp, Homo sapiens
agctgagggaactgcatggtatgacatggccatgcaggtcccaccttagggtaccagtgacgtttttccacagaatgtagggggtggcagggtgatagtgctgtgtggaaaacagctatcat

SEQ ID NO: 118303 - DNA, 122 bp, Homo sapiens
ccccacagctcccgctgggggcgggctcgtgcggcattctgggaactgtagtttcggcgacgctccaggccacgtggaggaagcgcccggtctggcgcatgcgctctccagcgcgctctcca

SEQ ID NO: 118304 - DNA, 122 bp, Homo sapiens
agggttacgccctcatgaccttccgcgtacgagggttacgccctcatgaccttccgcgtacgagggttacgccctcatgaccttccgcgtacgagggttctgccctcatgaccttttcacct

SEQ ID NO: 118305 - DNA, 122 bp, Homo sapiens
cccacctccgaaagggaggaggccgaggggcgccctctgtaccctccaagatccggagggcgcaggttctgacgcatccgttagacgttctgtcctataacgtgggtcgggccaaacaatag

SEQ ID NO: 118306 - DNA, 122 bp, Homo sapiens
agcacgaaggagcccggccgtgggtccggaggccgcagtcgatggggacagttgcggggccgggggtacccaccttctgctcgacgccctgcaagccctggcccagctcctccctctgccgg

SEQ ID NO: 118307 - DNA, 122 bp, Homo sapiens
cctcggaacccgcggactaggggacggacagcacgcgaggcagacagacacgtgctggggcgggcaggcgagcgcctcagtctggtcgcctggcggtgcctccggccccaacgcgcccgggc

SEQ ID NO: 118308 - DNA, 122 bp, Homo sapiens
actctaataaaagagaacagttgtaaaacactgtaacaaatctactttctgtgcttctcacgattcaaatctgacttcagtttaaccatttgaatatttggccttaaatacaaattgatgac

SEQ ID NO: 118309 - DNA, 122 bp, Homo sapiens
gaagtgactcagaactgaatttccagatggtttgaaggtctgctgtgagggatatagaaacgttcagaggttgatccagagatgttatattgcattcaagaggagaaactttacttctaagt

SEQ ID NO: 118310 - DNA, 122 bp, Homo sapiens
ctgaggccggctaccacttggggctcagtttgggctcaaccagggccctctcaccttccacgcagatatcctcccaaggcccctctctatgtcttccctgatgggctgtcccacgcccatca

SEQ ID NO: 118311 - DNA, 122 bp, Homo sapiens
gggatggggcagcctcgggagatgctatctgctttaaggacgtcgcttcatcatgtctaccgtgcacctaacagtggctgctggggaaggaagggaggtgggcctggcccgggagctgtgca

SEQ ID NO: 118312 - DNA, 122 bp, Homo sapiens
agcagggccactgggagcctggggtctgtcccagcacagccaacagctcgctgggtagcccggccatccccatgccctgggcctcccgactggcacagggttggcatcacaagccctacacc

SEQ ID NO: 118313 - DNA, 122 bp, Homo sapiens
gcttgacttcctaggatctggaatctggtcagcaatcaggaatcccttcatcgtgacccccgcatgggcaaaggcttccctggaatctcccacactgtctgctccctataaaaggcaggcag

SEQ ID NO: 118314 - DNA, 122 bp, Homo sapiens
tatcttcacaatgtgctagtatgcctgaaattcacacaaagtaaataaattctattagcacgaggtagttatttttatcatcccggtcatacatgtaaggaaatgttacaattcacagtgaa

SEQ ID NO: 118315 - DNA, 122 bp, Homo sapiens
taggaacaagtaaaattaggacaaggctactcaaaggcatctctaacaaaattactaaagcgtattttttacattgagagttaataatttggtgacaaaaaggaatctttcttcaaatttag

SEQ ID NO: 118316 - DNA, 122 bp, Homo sapiens
acgctgagtgtgtaagactcatctgagaagcactatttgtcatgtccactgtttctgcatcgaagcaccagccgtacaagtccacaagaagccctttgaacaatggaatgaggaaatgggaa

SEQ ID NO: 118317 - DNA, 122 bp, Homo sapiens
aagcagctgaaaattcccgttgcctagtgaggttgcggcgtgtaatgtcacagtgcaacacgttatcactcgtttgtggtgatgctggtgtgaacacacctattacactgccagtcacatac

SEQ ID NO: 118318 - DNA, 122 bp, Homo sapiens
ctgatctgttgggttggttaggaggcccttcccctttcattcttgcaaaacaaaacaaaacgatactaaagccaaaactgagaagaaaaaagaaaaaaaaaactaatccacaagcacacaac

SEQ ID NO: 118319 - DNA, 122 bp, Homo sapiens
ttgtccgtctctcgaagagtcctcgggccctccctccccatctccaggcaaccactgatccgctttctgtcactgtaatttagcatgcatttgctggagttttacatacatggaaccatacg

SEQ ID NO: 118320 - DNA, 122 bp, Homo sapiens
aaggaggaggcggctatcacttactggctgtgtcagaagtcgccgggaacgcgttgctcccgaggccgaagggcccagagagctccagccaggcagcgggttcgtctccggcgcaagaaggc

SEQ ID NO: 118321 - DNA, 122 bp, Homo sapiens
ctgagccttgggaattgttccccgacattggttgttcctgggctccacagctaccccggccgacaaaagccacattgtggggctgacggcagctgccagcacctgctccctgcaccgcggct

SEQ ID NO: 118322 - DNA, 122 bp, Homo sapiens
gaaaatgcccatgggaaacggggtgtcgggggagcccaagcctgtggcccggacattctgcgcagtgagttgctgccagtccatgatgcgctgatgcaagtcatagctgctcagcacgactc

SEQ ID NO: 118323 - DNA, 122 bp, Homo sapiens
gcactgggccaacccgattgagatttgagctaagccaggaagggggcaagggtgtgagtccggtggctgcctggaggaagatctttcccagcatggggaaaagctagagccgaggcccagcg

SEQ ID NO: 118324 - DNA, 122 bp, Homo sapiens
tcgggttcctcgcctcagttacccactcctttctgaaagaccccagttctggtactagcacgtcacctagaaggaagaatcctggaatggcacgggtccaaactagaggcggcctctcagca

SEQ ID NO: 118325 - DNA, 122 bp, Homo sapiens
gtgcgcacattcctagatgctagccctgtggcggcgcacctcacgctcattcacagtacacggacatgctcacctgcccaccatgggtggtcaacccttggacacccacactcttctcacac

SEQ ID NO: 118326 - DNA, 122 bp, Homo sapiens
tatcagcctgacctaaagcgctctcgtgcattgggtcagaagtttggcaagcttaaacagcgtaagtagaaccggtttgggaatctttgaatgaggaagactgtttcttcctctcctacttg

SEQ ID NO: 118327 - DNA, 122 bp, Homo sapiens
gcgatcctcattggagaggaatcagcagtcgaaggaacagcgggccaagcgcagtcgtgacgtggcgttcagagagcggaagttgtcagatttcaccgggccgtaaagcgcgctggctgtgt

SEQ ID NO: 118328 - DNA, 122 bp, Homo sapiens
ggacacagattcccacagtatcccttgtggtaggctccagagtgtgcattagagcgagtgcgtcgggttctgattctgtccctccccatagcccagccccatccctgtcttgcttgttgccc

SEQ ID NO: 118329 - DNA, 122 bp, Homo sapiens
accaagggaagaatttacctttacaatggagtgatgtggcaggtgcctcttttaccaaagcgactgcacttggcattgtcccagcagggaggggctggccgtgcacccgctgtggctggagg

SEQ ID NO: 118330 - DNA, 122 bp, Homo sapiens
accaaggggaatgttcccagtgccattcttccaagtcagggagagcgtcacaatagaaaccgtctctgtggagaggatggcacctgaagccatggaataggaagggagcatcagaggctgct

SEQ ID NO: 118331 - DNA, 122 bp, Homo sapiens
gactagcacagaacctacacttcccctttccaacttaaagtttgcatcctttggtgtatgcgaacccacatgaagagatgttttttttgttttgttttttttttgagaggactccctcactt

SEQ ID NO: 118332 - DNA, 122 bp, Homo sapiens
tctccaggattttgcatctatcaggaagggatattgtgacctctgacaagttacagtcggcggtaggtatccatggagaattggttccaggaacctcctggataccaaaatccacagatgct

SEQ ID NO: 118333 - DNA, 122 bp, Homo sapiens
aggggataaccccggtgcgcgcctctcttcctgtttggtttactcaagcgcctgccccaacgccttctcagtcaagctgggaggaaactgcttcagcttgaaaaggatgcgggcaaaagccc

SEQ ID NO: 118334 - DNA, 122 bp, Homo sapiens
cgccccagctctccccactggtaaattgggtgccaaggagcctgactggtggactctggacggacccccgccatcgttgtcttggcctttcagcctggggggctgggagaccatgaaagcca

SEQ ID NO: 118335 - DNA, 122 bp, Homo sapiens
aacttaaaaaaggaaaaaggaaaagggaaaaaaaaaggaaagtcaagaaggatgagctgtcgtggaatgctgtgaagtttgagagtgactcagcactagctaaggggcagcaacaattaaat

SEQ ID NO: 118336 - DNA, 122 bp, Homo sapiens
acgtcatgaaatccgcagattcaatgaatgctactcaattccagccgactggctgagccccgctggcagcgcacgaagcgacgcggctccgagataaaagcgagtgcagcgccgcgtgctgg

SEQ ID NO: 118337 - DNA, 122 bp, Homo sapiens
cccagcaagggcggggaggggcagggggagggcgggacccgcgcagccaataggcgaggacgcagtcccgcgtggccttgtgggagctgtagtacgctccctgtgcccactttcctgggccg

SEQ ID NO: 118338 - DNA, 122 bp, Homo sapiens
cgagagccttcccccttccccccgccccgggtgggtgcggccagtgggggatttcaccgccgaaaggtccagaaaacccaagcccagaatccgggcaagaggcgcagccggaggcggcccga

SEQ ID NO: 118339 - DNA, 122 bp, Homo sapiens
ccgagcgctgcccccgccggcccgcggctgccagccggccctgcccgcgcccgggccccgcgagcggccgcacttcaccttacggaggggagataatgagatcaattagaggcgccgtcacc

SEQ ID NO: 118340 - DNA, 122 bp, Homo sapiens
gtcatgcccgccttgtagcccaggaaggccgtgaggtgcacgggctggctggggtcatcccgcggccacgtcttcaccttgccccggtgccggtggctcctcttatggggcaggaagcccag

SEQ ID NO: 118341 - DNA, 122 bp, Homo sapiens
cttaaagctgaaaaatgtttaaagcgatgtgatcaaagagatagctgcacttgtctctgccgctcgcctgctacatacttcaacctttgtcgaactaaaatgaatttaaaggtttattacag

SEQ ID NO: 118342 - DNA, 122 bp, Homo sapiens
aggaagaggagattgcgcggatcgcccggaggctggacaagatggtgaccaagaagagcgcggtgaggggcgcgggccgccaggaccccgggaaccccgccccgccgagaccccgtcgagcc

SEQ ID NO: 118343 - DNA, 122 bp, Homo sapiens
ctggtgcgtccctctgaggccctgtctgtccctccacagacacagggcgccctgtttccccgggagctggaacacgggccctctgttggcacctgggctggctgtcccccccgggcaggccg

SEQ ID NO: 118344 - DNA, 122 bp, Homo sapiens
agacggaaatttacatcaatatttgttttccttctttccctgaggttgctgagggtggaacgacagcgtccaggcaaaggcagtgtcccgaagtcccacggccggacccggtcccaggggag

SEQ ID NO: 118345 - DNA, 122 bp, Homo sapiens
agtttccttccttttcaagtctgaatcataccccactgtatgtggtaccacaggggtaaacgcacacttggattgcttccaccttctggatctcgtgaataaataacgctgctgtgaacata

SEQ ID NO: 118346 - DNA, 122 bp, Homo sapiens
ggcggggacggctgtccctccctcaaggagtggagttagcgaggctgcgctggggtgctccgttgccgaggatgggccgagttcgaggcggcaaaggtgcgggtgtgcaggggggaggcggc

SEQ ID NO: 118347 - DNA, 122 bp, Homo sapiens
gattcctttaaattacccaacctctcttgcttcattcaaacatgtgcagcttcaagtgggcgtctactgcattagattagataagtcacaagggcagagtctctggactgcaggcgttgctt

SEQ ID NO: 118348 - DNA, 122 bp, Homo sapiens
tcgggctgggccgcgacgcccgctctctgggatcagcctgggggcgagggtcggcgggggcggctgagtcatcgctttccagctgggcagacgggcggttttatttaccctcttcctttaaa

SEQ ID NO: 118349 - DNA, 122 bp, Homo sapiens
tcccatccagccccaggagtctggggcaagtagtcttgtaaggtcagtggcctgcggggacgcagtgagcgccgaatttgcctggggcaggggaaatgcgctctggcccatgtctgcgcact

SEQ ID NO: 118350 - DNA, 122 bp, Homo sapiens
gtgactccatggtccaggggattagagttagtcattaggggtgggaatttcttctcagaacgaagttagagctctgtaaccatcttatgtgaccaagtagatgtttgagaaagatctggaat

SEQ ID NO: 118351 - DNA, 122 bp, Homo sapiens
tttcccagctttgcagcctttgctggcaagggaggccagtgtcccaggggtggaagcccacgcagggccaggctcaatagagacctttctgatgctaatgcttttttctctcagattcttcc

SEQ ID NO: 118352 - DNA, 122 bp, Homo sapiens
aggaagggttgagagaggaagcacccatcatttcaaagcccgtgtgactgtgattttcagcggaatggagggtccccaccctctcccaggcctcccccaaaccagcgtcttcggtgggctgg

SEQ ID NO: 118353 - DNA, 122 bp, Homo sapiens
ctggcctggcgggggctgacccccacctccctcccggatggggtggctgcagggcggagacgctcctcacttcccagacggggtggctgccgggcggaggggctcttcacttctcagacgat

SEQ ID NO: 118354 - DNA, 122 bp, Homo sapiens
tatttggccagagctacgtgtagcacagggagccagggcggcagctgcacctgcgagcagcgcaggcggcaggcgcggcctccgggcgtggtggtgggcgtggccgggcggcgggggcgtgg

SEQ ID NO: 118355 - DNA, 122 bp, Homo sapiens
tgttagttcatcagctactgaggggcaaagtacacatccggtttgacttcgtggcttccacgacacagctggggctgaaaaagtattcgcagaatgtgctacaaaggtacattattggaggt

SEQ ID NO: 118356 - DNA, 122 bp, Homo sapiens
tggggtgttcgtaatgatgaggactgcagagactgatgctggcctccctggcaggccccacgcatgggcaccttcatgggcgtgtacctgccgtgcctgcagaacatctttggcgtcatcct

SEQ ID NO: 118357 - DNA, 122 bp, Homo sapiens
cagcctgacacattccctgatgtgatgatgaatagctacctaggtttgtgacctctgcgacgacaaataaattgtcttggttgtggtcattaaatttttttttttgatccatacagagcata

SEQ ID NO: 118358 - DNA, 122 bp, Homo sapiens
gtccagggctgtgggcggacaatggccctgatgtccaaggacagacaacagagggtgcggcgaacaggtccccacttggtgacggtgacgtccagttcctgctgcgtgcactggtttgtgac

SEQ ID NO: 118359 - DNA, 122 bp, Homo sapiens
gcactctgccagaatcatgtgaatttcagaggaaaatactcgttcacacatctcaaggaacgcacaggctcgtgagggagcattcttgccaatgcacatggtaaatgcccaatcgatgttcg

SEQ ID NO: 118360 - DNA, 122 bp, Homo sapiens
ccaataaatcaactccagctccctctgcgaggctggcatgattgttccatttcacccagccgctcagtcccttgcctgttacactgtggggctgaaacctaggcaggccgagccccagccac

SEQ ID NO: 118361 - DNA, 122 bp, Homo sapiens
aaaaccattaataattacccttaaatggccaacaaaaggaaattttcataatcagggtggcgtgcccgtaaagactataaaagtgtcatgattctgctcagctcttcaaactcctctttgat

SEQ ID NO: 118362 - DNA, 122 bp, Homo sapiens
atataaatctgattagtactgagcatttataggctttgccaagtagatcaagtgtggacccgtgccctaaggtaggctaatcagagggaagcctaggacatttattcagtgattagagataa

SEQ ID NO: 118363 - DNA, 122 bp, Homo sapiens
tgccacgtcaggagggtcaggacctggtggcaggagctgagaggcatcagggctgcagggcgggagcaatgaggcagagacggcaccagtgtctggctttggggattggtagcaaggcagaa

SEQ ID NO: 118364 - DNA, 122 bp, Homo sapiens
tgagagcctgagggtccccggactcgcccaggctctgagcgcgcgcccaccatgagcgcccggaccgcccccaggccgcaggtgctcctgctgccgctcctgctggtgctcctggcggcggc

SEQ ID NO: 118365 - DNA, 122 bp, Homo sapiens
cagctggatttgaggatttgagacttagactgggtcagggtcccccgcgtcgccagggggcgctgcaggccgctccccggaaggcctcatcctgcgcggctggacagcgcctggcgccggac

SEQ ID NO: 118366 - DNA, 122 bp, Homo sapiens
aaattttcctccgcaagaacagggacaggagagcgagaagctattgccgagttgggaacccgctagaggttacaataaggcaggcttggagtcgtggctggtgctagttaccgggaagagtt

SEQ ID NO: 118367 - DNA, 122 bp, Homo sapiens
gaggaggggttggtcttgctgccggagtggcagaggtgaagaaaatctgcttaatataagcgtatctgtgcagttcaaactcatggtattcaagagtccactgtatttgctactaagtttta

SEQ ID NO: 118368 - DNA, 122 bp, Homo sapiens
attcctttaggttctcagagtctcaactgactatgtaattgatttggtccttgatcacaccgtactcatgtcagaccctgtgttttgtcttctgaacaatgggaagctcactcactcattag

SEQ ID NO: 118369 - DNA, 122 bp, Homo sapiens
taatcatagaagaaatttcacatgagtagcacgactgctgagcaggtaggtgaccaagcccgggacagcttgaagatttaacatctctttgacaaacaggcaatctctcttatcaggggaga

SEQ ID NO: 118370 - DNA, 122 bp, Homo sapiens
tcccctagacctttacccagaggccttgggggcaacctgacacacatggtcctgcatgtgcgacttgggaggcgacgtgaccagctccaccaagccggccatatgcagggcccggccgaatc

SEQ ID NO: 118371 - DNA, 122 bp, Homo sapiens
acgtattttgtaagctcacctggacaggtggacttgatgaaggggatggctctgagatgccggttttcagccacaggcccttcagcgcttaaacagttagagacagggtacgtttctggccg

SEQ ID NO: 118372 - DNA, 122 bp, Homo sapiens
ttatttcggatcaccgggctgctggggtcctccctgtcctggaggcactcgcttcagtagcggacccaggtggtgcaaagtgcgtgctagaagcacactgggtgattgcgcagccacctgtc

SEQ ID NO: 118373 - DNA, 122 bp, Homo sapiens
gccaggccttctgccttcagtctgtgctctgcaacatttgcacattcagacacacaacaccggatttaacatcacagaaagtaatggattgttatgagtagtttacaacctgcacagttttt

SEQ ID NO: 118374 - DNA, 122 bp, Homo sapiens
ctgggcaaacagaaaagctgcctgcctccggtgctcccagacccccttccttctcaaacacgcatcagacactttgcaccaagaaaaaacaaagggcatccctcctggggccacctctgccc

SEQ ID NO: 118375 - DNA, 122 bp, Homo sapiens
tgcgtgactctcgactgttccctagactccatctttaaccgctagtttctaagcaatccccggtcctgccagctcccgggtctggctctccttttgttccattcccagtctagccttggcag

SEQ ID NO: 118376 - DNA, 122 bp, Homo sapiens
cgacccgatctttctgcccttgattcaaaacaatctgaggtccctaggcccttccctttccgcctctgcgctccccatggggtccggtgtagttttcccgccccttccctgcagctcccgag

SEQ ID NO: 118377 - DNA, 122 bp, Homo sapiens
tgccatctgacaacaggggtacctttccttggcaggcctgcctgtgtgagcaacagcctgcggtgggaccttgagggtgacaatgtctaatggagaaggaggtacctggaagccctgtggcc

SEQ ID NO: 118378 - DNA, 122 bp, Homo sapiens
gtcggcccccggccccggccccggccccgccccggctcttcttggctgggtcgcgcggttcgggaggacgcctgcctttcaagcccggaagaggatccttaagaggtcttgcccggcgtctc

SEQ ID NO: 118379 - DNA, 122 bp, Homo sapiens
ataagttttaaactgcatgcagttctgagtaatgtgatgaaatctcacacagtcccgcaccgccccactccgtcccgcctggaacatgaatcattcctttgtccagtgcatctacactgtgg

SEQ ID NO: 118380 - DNA, 122 bp, Homo sapiens
atctcagcctgctctatgagctggatatttcgtaggaaggagccgatttggcgaaagttacgtaaacaatggaattgtctcagtttgcgcctttgtttcgtttgacagccctccagggagtc

SEQ ID NO: 118381 - DNA, 122 bp, Homo sapiens
gaaaaaagctgaactcagatttgaactgtaagtaaaattcccacctgctccccaagtccgcgcacttaaggaaaataaatcacaccctgaaaacactagcacaggttgcaaaaactgcttct

SEQ ID NO: 118382 - DNA, 122 bp, Homo sapiens
cttcagagtctgtttctactcactagaatataagctttcagagtgtaagaaatctatttacgttgttaattggcatattccaagcatctagaacaaaacctggtgcacagttagtgttggca

SEQ ID NO: 118383 - DNA, 122 bp, Homo sapiens
agcccgggagtttaagacaagcctgggaaacctggcgaaatcctgtctctacaaaaattacgaaaattagccaggcatggtggtgactgtcccagctacttgggacccaaatgtcccagata

SEQ ID NO: 118384 - DNA, 122 bp, Homo sapiens
ccctacctcccgcccccgctgcgtgcgcgcgtgtgtccgtctgtctgtatgctctctcgacgtcagtgggaatttccagccaggaagtgagagagtgagcgagacagaaagagagagaagtg

SEQ ID NO: 118385 - DNA, 122 bp, Homo sapiens
aggctcattgtggtaaagcatcatgcaaaagttcatagaaatgcacccatgtggaggaaacgggtttgaactgttttgtctgattgcaaaccatggaattttgtcatagagatctaagtttc

SEQ ID NO: 118386 - DNA, 122 bp, Homo sapiens
cctcccggaatctggctttgatagagatcagggcccccgctaggtgccagcttggcctgtcgccagcattggcactggtaggcatacccatctgtcaggacctccagggtgtccatgtggtt

SEQ ID NO: 118387 - DNA, 122 bp, Homo sapiens
cccccgccctggccacttccggcgcgccgagtccttaggccgccagggggcgccggcgcgcgcccagattggggacaaaggaagccgggccggccgcgttattaccataaaaggcaaacact

SEQ ID NO: 118388 - DNA, 122 bp, Homo sapiens
cccctgctggtcgcagggaacctgttcccatcacgtccccactcacccacaaggcagcggcgcctcctcggtggtcctggcgcccatgacgcgttgctgggaaaatctcccacccggacgtt

SEQ ID NO: 118389 - DNA, 122 bp, Homo sapiens
agaccgagggggctggacgtgggacggcccgagggccggggcagggggtcacctgttgcgcgcgctcagcgcgccccgtgggcgcagcgcgcttccctcggggctggcgacgcgcaggggcc

SEQ ID NO: 118390 - DNA, 122 bp, Homo sapiens
tgaaagaaaaaaggctaagagtataccgtggtctaattagcatttgcttcttgtagccctcgaaatgtcagtcaccagttggtagcaaaataaagatgtaatgttagtgataatgaattaaa

SEQ ID NO: 118391 - DNA, 122 bp, Homo sapiens
aacttgggatgggaggagagacatgagatggcagcacctgcacaaccactagcattttatcgatgggaggtttcaattgagttgctgcaagtcacaagtgggttaatgggaggaaacggaac

SEQ ID NO: 118392 - DNA, 122 bp, Homo sapiens
agagttccaggggactggcagcgctggcaggatgagcccggctttgctgggtgtactcttcgtcctttcgtcggagattaaacctgagggtcagcgttgtaggcgcgctcttgagctcggag

SEQ ID NO: 118393 - DNA, 122 bp, Homo sapiens
cgtgcagctagggatccaagcctcctcaggctaaccctagagccgaactgaactctgagccgcccggggttcgcgcgctcagttcctggtcttggaaacgcccagctggggttctctctgca

SEQ ID NO: 118394 - DNA, 122 bp, Homo sapiens
ttccaagcccatgcagttgtggacagatttaggtcattgcctttgtaggactgagttccccgcttcaccctggctatcagcaaggagctgcttttcagctcctagaggctggctgccctctg

SEQ ID NO: 118395 - DNA, 122 bp, Homo sapiens
aaaatttatgccatgtaagctacatgtattcctaagaataagaatactcccaagtcctgacggctgcctggggcagtgagggctggagacgaagaggactcatctcttctttgtacttatac

SEQ ID NO: 118396 - DNA, 122 bp, Homo sapiens
gcccagcaggagaatggggcgcagccgggctgggctggggcgcgggggtcgcggcggctgcgccccagtcccgagctcggtttcccgcttcgctctttgagccccgcttcctctccctgaag

SEQ ID NO: 118397 - DNA, 122 bp, Homo sapiens
gctaaacacccggcttcaaatgagagagtgcgtcccgggcgtcctgggctgggcagtaaccgcggaacaaagagaaaaagcagagaggccgcattcatgaattagaaaacctaagcgggaaa

SEQ ID NO: 118398 - DNA, 122 bp, Homo sapiens
agatctcctggtgagggagacggaggccgtcatccacaagcaccgctcggccacctactgcgagcagctcctgcagcatgtgcaggccgtgccagccacacagtgaccacgctggtttcagc

SEQ ID NO: 118399 - DNA, 122 bp, Homo sapiens
catcctgcttactgattgcacattcttgaaatagctgtggttacaaataagcaccagggtcgtaggagccctaagaattcattgagggttcagagcccaaatccagtgctgcccagtagcca

SEQ ID NO: 118400 - DNA, 122 bp, Homo sapiens
gtgcgctgtcagctgggatggcattcctggctgtgcagagctctgtcctgctgctgctcccgcccccagaccaggacccagcccaccacagctcgtcacatcccaaagcgcccagcggctgt

SEQ ID NO: 118401 - DNA, 122 bp, Homo sapiens
aggattgcagtaattatcactctctgctaatgaggaccaggccgtggttcactcgagccccgccccagtagcaatctaattccaaccgcggccctctcagaagtcggtccccgcctttgcgc

SEQ ID NO: 118402 - DNA, 122 bp, Homo sapiens
ttctagttttagtccagtaagtgtccagggatctgaggcccagagtccccctcagtcttgcggtcctctttcttcctttttcacttggtctccattccagtctcattctgtgtggacctacc

SEQ ID NO: 118403 - DNA, 122 bp, Homo sapiens
cgtggtagtgatggtggtggggaacccaggatcctggaatgttcatcaatgcccaagcatcgccagaagactagaagcaaatcttttctctattggaactgaaccagaagtgcagaggcctc

SEQ ID NO: 118404 - DNA, 122 bp, Homo sapiens
tcttcccgggaacctcgaggacaggattgtttcctccatttcacagaggagggaagggggcggagctcagagagggcggatcagttttctaagtctgcacagccagcgaggtcgtgcagagt

SEQ ID NO: 118405 - DNA, 122 bp, Homo sapiens
gtgcatctgtggtttggtagaagtacaacagcaacctgtcctttctgtgcatgttctggtcgcatgtataatgcaataaactctggaaatgagttcactccctctgctttctgaaatggaaa

SEQ ID NO: 118406 - DNA, 122 bp, Homo sapiens
aactgcaggaagaaataaaaacatccccgactacttcatgctcttgtggcgtggaaaggccgcgcgggtcctgagtgtgcgtggaaaggccgtgcgggtcctgagtgtgcgtggaaaggccg

SEQ ID NO: 118407 - DNA, 122 bp, Homo sapiens
ccgggaggctgaactagagttaagttagaatctttcggttccccttcgggctgggctccccgcaggaaccaggaacgggctggccaggaggacatgatggaccgggagaaggtgacagaggc

SEQ ID NO: 118408 - DNA, 122 bp, Homo sapiens
actgggtgcagtggctcacatcggtaataccaactacttgggaagctcaggcaggagggtcgcttgagggcaaaaacttgatacaagccagggcgacctaataaaaccccagtctttaaaat

SEQ ID NO: 118409 - DNA, 122 bp, Homo sapiens
tgggtgtgtgagagagcacaggtgtgtgtgccattcctcatgtgtacacaagagtgcaagcgtgtgggtttgtgcacacacacacactgcctttgtgtgcctgcctgctcctggagagctga

SEQ ID NO: 118410 - DNA, 122 bp, Homo sapiens
gccagcaaccgcccgggcgtggcagggacaggcgggcgacttcacaacatcatcactcggcgacctcggttctgcggcgacaccgggtcaatggcagcccccacacaattggggaagccaaa

SEQ ID NO: 118411 - DNA, 122 bp, Homo sapiens
gaggttgcagtgagccgagatagcgccactgcactccagcctggtgacagagcgagactccgtctcaaaaaaaattaagaaaaagatgaaataaaatggtagttggggacatagttggctgg

SEQ ID NO: 118412 - DNA, 122 bp, Homo sapiens
atctctgcccatcagtatgtgcccatctgtgtctgtgccttgggacacatgtgccctgtgcgccggagggtgggtttcttgcaggtcggcctttcttctggtcagcctctccccgcgtctct

SEQ ID NO: 118413 - DNA, 122 bp, Homo sapiens
gcgtcccagccccgagggcaagcactgatccctcacaggacggggaagcctgtccttgtgcgccttcagacactggctcctctgcagccccattccctggccctgcaggctcctgctgcacc

SEQ ID NO: 118414 - DNA, 122 bp, Homo sapiens
cgctgcggatgttcggcagccagaaggccgtggagcgcgagcaggagcgcgtcaagtcggcgggggcctggatcatccacccgtacagcgacttcaggtaccgcctccgggagggccggtcg

SEQ ID NO: 118415 - DNA, 122 bp, Homo sapiens
gctggtccagcaagcgcttttgctgcacctgctgttctttgatcacctgaagcaggacggcgtggtccagcatctccgccctgccagcttctgggtttggaaagcacacagtcagagtgccc

SEQ ID NO: 118416 - DNA, 122 bp, Homo sapiens
gaaattaaaagacccaggatgaagggttcaccccaccagcccgtcgtccggctactctaacggcgagcgcagcctcctgggaaatgcagttccaagccgcccacgcccctatgtctggagga

SEQ ID NO: 118417 - DNA, 122 bp, Homo sapiens
ggtcgggcccaccccgtgctccgacggccccaccccggcggcgcagcccgcccgcccgcgcgtccctcggtccacctgcagcagggaggaagacaggcaatccctccggctgtccgaccaag

SEQ ID NO: 118418 - DNA, 122 bp, Homo sapiens
taaggattgcttaggatgttcatggtagttactgagagaagcataagatggcatgaattacgtaataacgtcaggatttatctacaggcaggctggaaaactggggctccaaataccttctt

SEQ ID NO: 118419 - DNA, 122 bp, Homo sapiens
gcagtactttatatagtaataaatcggacctgattgggaactctccacaccagctgcatccggtcggccgattcacagaccttgcgccctgcccacgacttcaggaaaaaatggaaaagggg

SEQ ID NO: 118420 - DNA, 122 bp, Homo sapiens
cccgggctgtgacccattctcgggacactggtggataagaatggggtctctggagtccgacgcctggattcacgtcctggctagtcgcgtgaaccttggtgctctcatctgtgcagtgggaa

SEQ ID NO: 118421 - DNA, 122 bp, Homo sapiens
atcgtaattggcccactcactgattccttgcttgcaatggtcagcactgtgctggcctcccggtgggatggtggtggacaaaggcagggcactgctccctgccctccctctgggagtttgtg

SEQ ID NO: 118422 - DNA, 122 bp, Homo sapiens
gtttctcagtgtaaatccctctgctcaaagttccgaaaacgtccacgatcgccagcggcccgcaaccctgcggcggcccccagtcgccctaacaattgtcggggagcctgcaggccctgcca

SEQ ID NO: 118423 - DNA, 122 bp, Homo sapiens
accacacagacaagaagaggttgcagagggcggtcaactactgtttttgcgacttctctgcgactctaacacgatcagaaagaaggatgtgagcggaagtcagtggtcacgtgacatctgtc

SEQ ID NO: 118424 - DNA, 122 bp, Homo sapiens
aaaaaaattgactcctcaaaaaaaagcccttgaactaaattaggaccacaaacttcaaagcgaggagccgagttctttacaaggaatagaaggagatatccatatattccagccttgcagag

SEQ ID NO: 118425 - DNA, 122 bp, Homo sapiens
tttcactgcagtttaaacactccgtgaggctctcaggaagcggcgggggtggggggcggccggagagaaggggcccgcgtctccgccgcttccatcaccgccctggaaatagcatctgaacg

SEQ ID NO: 118426 - DNA, 122 bp, Homo sapiens
actgtgcacggcgcaccccaggaattcagcttcctctcaaaagccatggttgcgaggtcgcgtgtttaacctcgcactggctgctgagggaattaacaggcctgcgcagcagcttcgttagc

SEQ ID NO: 118427 - DNA, 122 bp, Homo sapiens
cacaggactaaacatcccactgcaagggagaagctggatgcaaaaggccgggctccattccgagacatccagcaaaggcagcatcttcggggccagggagctggcagcagggactgcagagg

SEQ ID NO: 118428 - DNA, 122 bp, Homo sapiens
atatatgagaaagggatttgttcactaggtccaaaagcatttgctggtcccatatgtggtcggaccctgtgtgtagtaggcggggggcaacatctacgacaacctgagttcgtccccttaag

SEQ ID NO: 118429 - DNA, 122 bp, Homo sapiens
tgtttgggtggaaggcttaaaaagtagtgttctgtgagatagattgcaatttcttccattcgcttttgtttcttccttcttcgtaaccaaccgccccttcttctctactcccccaccacccc

SEQ ID NO: 118430 - DNA, 122 bp, Homo sapiens
gagcttccactgccagcacccgccgtgccgcatgagcatcgcggagcttgacccgtccatcgctgtggtacgtggcggccacctgagcacacaggcatttggtgctgaatgctgtttgggaa

SEQ ID NO: 118431 - DNA, 122 bp, Homo sapiens
tcaaataaaatggcaggagcatctccctgttcctgagcccagtcagcaaattcgggcaggcgaggcacccgagtgttctgggaaaagtcgaagaagaaaagctggtcctcgtcgtaggcctc

SEQ ID NO: 118432 - DNA, 122 bp, Homo sapiens
tctatcgcagtatacccctgctctctcaggggcatttgtgtccccgttttgtgtcgcaaacgagctgccgagggaggggtggaatggcgcaatgcgacttaccgcaattaataatctcaatt

SEQ ID NO: 118433 - DNA, 122 bp, Homo sapiens
aggacgtcatcctacgccgtccccacagctccgtgaacggctctgataccacaggaaggacgtcatcctacgtcgtccccacagttccatgaagaactgctctaagagtgagcaccaatcac

SEQ ID NO: 118434 - DNA, 122 bp, Homo sapiens
ggtgacagaacagcggctctgaagctcacacctcgcccaccctgtcacccagctgcggctcgagtgcaggaacagtcactttcaaagcaggcgttcttgtgactgctgatgccgcccaggcc

SEQ ID NO: 118435 - DNA, 122 bp, Homo sapiens
tgattcctgtctagaaaatcttccccaagtttcaccacctttctgtgcgaccgatcaaaacgcagtctgtctgggagcctcaggcaggcggctctagatccccaaagctagcgctgggcgag

SEQ ID NO: 118436 - DNA, 122 bp, Homo sapiens
cagcacgggcagaggcccaggcgtcctcatggtgccaggcgctggtgcagcctcgccgaccgcccctttatgcaggctgggggtggtccagggcggctccacgcctccacttcctgtggggc

SEQ ID NO: 118437 - DNA, 122 bp, Homo sapiens
cagagaggagggggcgctgcaggttaattgatagccacggaagcacctaggcgccccatgcgcggagccggagccgccagctcagtctgacccctgtcttttctctcctcttccctctccca

SEQ ID NO: 118438 - DNA, 122 bp, Homo sapiens
aacacagtatgttatacgaaggcaaagaggttcgtcttctttcatagcctctcctaaacccggcaactctgagctgtttttctggcaagccgccgtccattggcggcctctggcgccgcggc

SEQ ID NO: 118439 - DNA, 122 bp, Homo sapiens
gggtcagcccaagggagacagggccgccgccgtgggctctggggccagcctaagggaggccgagccgccgccgagggctccggggccagcctgagggagaccgggccgccgccgggggctcc

SEQ ID NO: 118440 - DNA, 122 bp, Homo sapiens
agaccttactccgccttcggaaccgccccagtggtgtcacatacttgagggcctgactctcggttgccagacatggcacagaatgttcgattttactaccagctctcacactccgcttctgt

SEQ ID NO: 118441 - DNA, 122 bp, Homo sapiens
acgaatggtgtcaaaacggccagtgggatcaatcagcctgacttgctcgcagaatcctcccggtgagtggtatggacagcaccccctagaggatcaatgtatacatagcaagctggaaatgt

SEQ ID NO: 118442 - DNA, 122 bp, Homo sapiens
tctcggttcgccgcgagccaggcccagcacacacagccccgtcgggtggagcagagcgcgcgactcagccagctccacccgggacattccccgcgccgggaaccccactgggggctgggcgg

SEQ ID NO: 118443 - DNA, 122 bp, Homo sapiens
ggtgggagcaggggtctcattggctgagggacttctgggtcatggtgacctcataaagcccgtaacactggcctgggctggggaagcctaggtaagctgaggggcagctctgggaaagtcct

SEQ ID NO: 118444 - DNA, 122 bp, Homo sapiens
tgaatcccactcggtacacaatcgctaaacactaaaacatgtcaagcaaagtacatggtgcgcagagtgtcttggtgaacctggaccgccttggccagtgcttggtggtctcgcccgttact

SEQ ID NO: 118445 - DNA, 122 bp, Homo sapiens
ctggcgcttgagggagatgagctgagagtcaagacctcggagcgtgaggttggcaaggtccgggcttcctgacactgccgtgaggccttcagggctcaggtacatgcccttgggtgggcgac

SEQ ID NO: 118446 - DNA, 122 bp, Homo sapiens
ttggctctctgtcctctccacttggccaggacctgtggctccagggacacagatgttaggcggcccaggctctagggagaccaccagggtgagctctttcttctggtgtccactgtgcccaa

SEQ ID NO: 118447 - DNA, 122 bp, Homo sapiens
aactttaagtcaccggaggcaaggagagctccaagttagcacaaagaatgttgatttcaccggggtgtggtgactggggataggcacacctggcaaaactccattctgtgggctactaaatc

SEQ ID NO: 118448 - DNA, 122 bp, Homo sapiens
cataggtcctgaagtacaaaggctttccccgagccctaaaactaatttattggcatcttgcgatccctttagttcaaaaatctacacatctacgtttctactttcgcagtagatcaattaat

SEQ ID NO: 118449 - DNA, 122 bp, Homo sapiens
aaggccctcggcacccaccaagacctgcctcacgagcccctggtcccgccaccggggccccgaagcgaccacagccacaaactcaacgccagggccacatcgctcgtgattctcgtccatcc

SEQ ID NO: 118450 - DNA, 122 bp, Homo sapiens
aaaaagtatttcatgataaatgagtgaacaaatgtcttaatagaaaagtaaaattgcaggcggggctgcttctgcccagctctacaggggtagactacaagtcccagtacgcctcgggtcag

SEQ ID NO: 118451 - DNA, 122 bp, Homo sapiens
agtaattattgccccttctttctcccttcctacctatctagttagaattgggcctagaaccgggaaagactaaatgccaagtgggactgggggaaacgttgtttggtttacagaaactggcg

SEQ ID NO: 118452 - DNA, 122 bp, Homo sapiens
attggaatactcctgcacttttctccctttgaatcccaccacggaaagaaaattctgtgacgtgtacccagtatttattggagggtatttcctagcaagaaaatgagggcgattgaccaggc

SEQ ID NO: 118453 - DNA, 122 bp, Homo sapiens
agccaccgcgcccggcctctcttaactcttttacatgctgcccccatacaaatcttctcacgcatgataggatgcttttgtgcttgtttgctcatggccccaccagctcactagaaggtaag

SEQ ID NO: 118454 - DNA, 122 bp, Homo sapiens
ttccggacgacgaggaaccgcccaacatggcctcggaggtgagtgggacctcggggactccggtcctcctagcctccaaaggagagagtgggggcgccagacctgcctcgggccaccctgct

SEQ ID NO: 118455 - DNA, 122 bp, Homo sapiens
ttccctgccgttctctggggcagggccagtgggggccttggcagaggtgctgcctgctcacgagggggggctttggctcccgcccctggtcccaccccctgcttggccttgtctcttgaaag

SEQ ID NO: 118456 - DNA, 122 bp, Homo sapiens
tctgtcccgtcccacctgctgggagactccaaagtctgcaaacatctggctccagaatttcgccactgcagagggagactgaattaattccctcctggatcggttaattaacgacaggtgcc

SEQ ID NO: 118457 - DNA, 122 bp, Homo sapiens
tactaccctttaattctcctctcgagagtaaaattcctccagggagttgtctgtttatcgcgtctccacttgctttccttcagttatctcttgaagccatgccaggcgggctcttgtccgca

SEQ ID NO: 118458 - DNA, 122 bp, Homo sapiens
tcaagatcatagctcttccttcgggtagtctggacacaataactgattcacatgagcaaccgcttgtctcagaaaaggaccacctaaaactggataatcctagcttcagagcctcctgaagg

SEQ ID NO: 118459 - DNA, 122 bp, Homo sapiens
gcagtgcatgccgggccctgtagtttttccggggagtcggtgccagggccgagattcccgcgcttcaagtcccgcagccctggctgcgtcttagagaggcgtgaaaccggatgatgggagcc

SEQ ID NO: 118460 - DNA, 122 bp, Homo sapiens
caaaacgtctatttacttcggatgccagaagagatgtaggttcatatacacacacacacccgccccacacacacacacagggtttgcttagcctcttcaccagcgcatttcaccgacagatg

SEQ ID NO: 118461 - DNA, 122 bp, Homo sapiens
gggggtggggggatgggggggtgggggggagacccccgttcattcatttagcgtctgaggcgggggagactctgagtgaaggggaagcccccgttcatttagtgtctgaggcgggggagact

SEQ ID NO: 118462 - DNA, 122 bp, Homo sapiens
ccggttgccaagccgccggaatttcagcaggagaggaaggctcaccctcccaccgcatggcgatgcccgggagactggagaagctcaggcaggcttggaagccaatccccggcatacagcag

SEQ ID NO: 118463 - DNA, 122 bp, Homo sapiens
gtcagggcccagggtataaacatagacatgctgtgcagcggtttctgtttctttcacgcacggcacagaaggaaaagcgtttggggttcagctctgccaggaaataaatacataaccggcct

SEQ ID NO: 118464 - DNA, 122 bp, Homo sapiens
gggcggcgcgggcgcgggcggggattcccggactccagccccaccacgttccggagcgtccggccctgttccttaattaccctgcagcatgcgcagcgcggtcggccacagcgccgccgccg

SEQ ID NO: 118465 - DNA, 122 bp, Homo sapiens
gcagcaggcgctgctttagttaccagcactttgcttcctccgtctccccgcgccaggcatcgggcatcccaacctcgactttggccttcaacttggcgcgctccggagctagagctctgcgg

SEQ ID NO: 118466 - DNA, 122 bp, Homo sapiens
ccgggccagcccagactccagctagtgaggccgccccctgtggcccaggtccagcgaggccgagtctcccaaggtgaaggaccgcacagtcccttgggctccacggctaacttgggccgacc

SEQ ID NO: 118467 - DNA, 122 bp, Homo sapiens
gcaccatggctcaccatggctccttgcagacctcagctgaatcagggtgtgatgtgttgtcgatgccacatattgtctgtcagtctcccaagggaggagctgacttttcctgttctagtttt

SEQ ID NO: 118468 - DNA, 122 bp, Homo sapiens
ggattccaaaacagttagtgtcttgtctttggcagcagtaaagccaagatactgcaggctcgcagccatatttcaagtccgagtgatcagcgagactgtcctaagtcctttttaccttgtct

SEQ ID NO: 118469 - DNA, 122 bp, Homo sapiens
agctgtcagataagaaggttgtattatttatttggttccagataaaattttgaactatatcgaaattatagactggctttctggaaaggaaatggtcctagacaatttataggctaatgagc

SEQ ID NO: 118470 - DNA, 122 bp, Homo sapiens
actggcacctgagtgacctcggccagctgcagtccagctccagctaccaggttttgtagccgtgccgtggagtgagaggctcctccctgttgctggtgttccccgttcactggggcgggagc

SEQ ID NO: 118471 - DNA, 122 bp, Homo sapiens
ccgagtcttgccaatcctggacccaggaaagaggatggggcgggaggggtcttaatctgccgctctacaggcttcctgcataggcaaccacccaaagtcagtcccagcccgcgcgcagggct

SEQ ID NO: 118472 - DNA, 122 bp, Homo sapiens
gagggagggagggggcagcggagggagggaggggcgccgccgcccccgtgcccgccacagcggtgcccccagcacgccattggctgcgccgctcaaagttctcggctcggggctgcgcgggg

SEQ ID NO: 118473 - DNA, 122 bp, Homo sapiens
ttttggctgcccagcaccttttgaacaccttactataatctgggggaatttccaaccttacgagaaccatcctcccacaatagaactcagagaactaatctgctttgcacctagggcacaag

SEQ ID NO: 118474 - DNA, 122 bp, Homo sapiens
caggcatctaggaagtcggagagcacagtgctggggaccttccatagaaacccaagtgtgcgccagctgcaggatttataatgtaaaaatcagtgctcgcgttaaggggcagcgccgaggga

SEQ ID NO: 118475 - DNA, 122 bp, Homo sapiens
ccttcaaaggattggacacaccacaaataaaaagtccttgcattcaaagggctggacacccgtatttggttgaagcctagaattctgcggatgggctgcttttgaaagctgctggtcattcc

SEQ ID NO: 118476 - DNA, 122 bp, Homo sapiens
ggcagggtggagggagagtcaaggcgccccgcagcccggcagccgcctctcgagctctgccgcccgcatccctctggcgtttgggaagcagcaggtcctcagcccgcccggggtcacgtggg

SEQ ID NO: 118477 - DNA, 122 bp, Homo sapiens
gtattcacctgcagggctggaggaaggggagggcgcctgagaaacaccttgaacccccagcgctcccgccgtcacctccacctccaagcccagctagcctgggatctgcgcctttcaggaca

SEQ ID NO: 118478 - DNA, 122 bp, Homo sapiens
gcttcatcacctcccaccagacgtccaggaagaaggccacgtcttcggcagaagtgtcaacggtcacatgttccagaaagcgctctagttctgcatggcagatggtggtgggcagggccatc

SEQ ID NO: 118479 - DNA, 122 bp, Homo sapiens
gatggacatggggcagcgcggctggcagacagcccataaactattactcagccccaaaaacgaatggacatggggcagatggactattttactcagccacaaaaacggatcaaaaacggatg

SEQ ID NO: 118480 - DNA, 122 bp, Homo sapiens
tggacaggatctatggctacggtttttcagccgctcagccgtgctgggccctcgatggcccgtgggagtgggagcgtttcctaagctccactgaagataagagcccaacccaacccctcccc

SEQ ID NO: 118481 - DNA, 122 bp, Homo sapiens
ggccattgtaatgctaattcacaagaggggtgctgccccagctctcttcttgcttcttggcgtgagtttttggaacaatctcttttcttcctgctgctggctttttgaacaggctgtccagg

SEQ ID NO: 118482 - DNA, 122 bp, Homo sapiens
tggggccccagaagctggaaaaggcaggcaggatcctcccctcgagctccggaggaagtgcggccctgcccactcctcgccttccggcttctggcctctagagctgtgagagcaatttcctg

SEQ ID NO: 118483 - DNA, 122 bp, Homo sapiens
tggggttcccttgaaagaagattccaaagtctcagtaagtatttttgccacctttctaggcgcaccgatgcagaactacagtaaacttaaggaaaaagcaaaagcactgaagttgtgaaaag

SEQ ID NO: 118484 - DNA, 122 bp, Homo sapiens
cgtctcctcgctgctggggttgtggctgttgctgtgcagctgcggatgccccgagggcgccgagctgcgtgctccgccagataaaatcggtaggcgagaagggggcggcgcgggaaggtgct

SEQ ID NO: 118485 - DNA, 122 bp, Homo sapiens
atgcaaacgccaaaataagaatagtcaaggcatcctctgaagaagaaggtgagaagtgctcgagttgttaaataatttaactgactttagaatgagggctgatgattaaaagaaacgtggct

SEQ ID NO: 118486 - DNA, 122 bp, Homo sapiens
tccctgccccctaaagatgaggggcactctctgtgtctgttgtgccacctcggtctctagcgaatcggaggaagatttccggcaccatgttctggcgattttgagccttgtgcattggtgtg

SEQ ID NO: 118487 - DNA, 122 bp, Homo sapiens
ttggctgctggcgaaggagtaagccacgcgggctgaaggagcaggcctgccccacacaggcgttactcctcccagaaaaataagaataaagtcaccattgactacacccctgagggcttctg

SEQ ID NO: 118488 - DNA, 122 bp, Homo sapiens
acaccgagaggaatcccattttacaggagagctttgtacccttaggagtaccgtggcctccgggactggagcagataacctgttttcgggccctctatgttcactcaacaactattaagaag

SEQ ID NO: 118489 - DNA, 122 bp, Homo sapiens
actgctcatccagcactcagggtgggccaccacagagggctcacattttccaccatcatccgcacccaccccctccagggtcccccattagactgaggctgtccttggcatctcaccgcatg

SEQ ID NO: 118490 - DNA, 122 bp, Homo sapiens
ctactgaggaccctcccagtgcagaagcatcacagacccagggatgcagaaaatagggcccgagaaagacagtgaggtgcggacctcagtgatgagtctgggactgacagacgtgtccacag

SEQ ID NO: 118491 - DNA, 122 bp, Homo sapiens
aaactcttcctcctctagctgctcaaagctgcatcaaacagtgggctgggtcttactgaacgggtgtccagtactttcctgtagaaaacattttgatgtccaaagagatagatgtccatagt

SEQ ID NO: 118492 - DNA, 122 bp, Homo sapiens
agatcctccctgccacagtttcagagccctttgtcatctgctgccagccccagcccacgccggctgatttccaagggagatgctgtagctgcccttcgcgtccacacactctgtcagtgccc

SEQ ID NO: 118493 - DNA, 122 bp, Homo sapiens
ggccatgtggcccccgctgttgctgctgctgctgctgctcccggccgccccggtccccaccgccaaagccgctccccacccggatgctaacacccaggaaggccttcagaacctgctccaag

SEQ ID NO: 118494 - DNA, 122 bp, Homo sapiens
gcagagagactggggaaaatcgagggagataaaccacattttgcggcggaatcgctgttccgtgacagaaagccatccaactggcaaccacgcttgcagaagcgtcactaccaccgacgaga

SEQ ID NO: 118495 - DNA, 122 bp, Homo sapiens
aacctggcacgcccgctctcctaccttcgcccagggctggccgttatctctgtgctgtcacgcggggaagtcccatctgaactggggccttatgaccttcggtacttttattcgaacgtagc

SEQ ID NO: 118496 - DNA, 122 bp, Homo sapiens
tagatcaaaagaaagtgaatgaaatttgagaattgtggcgctatgggggtgaggtggggtcgtggagggccatctggaatgaatgcctcattttacagaagaaacaaggataggacgagtaa

SEQ ID NO: 118497 - DNA, 122 bp, Homo sapiens
aaaggacagggcactgtggggtgggagagcagacatggcataaatcattcagtcccagaccggctgagctgaatgctctaatagaggcataaacagagcataatgggaatgttcggggccgg

SEQ ID NO: 118498 - DNA, 122 bp, Homo sapiens
aaaaggcagactctaacctgaaggcatctagaggaggagacagacacaattacgtaatcacgaatgcaaatgtagcaactttgataatgcaaacaagtcctacaaagcccagagtaaggcaa

SEQ ID NO: 118499 - DNA, 122 bp, Homo sapiens
cgggatttcgaactgagccactcccttcattggtgaaaagaaaacgaaccaggaactattcggaagtgtgattggctgttgctaggaaccgtctcaaggccttatgggccctggttacggaa

SEQ ID NO: 118500 - DNA, 122 bp, Homo sapiens
ggacgtacgctcccagtatgagcggcgctgaccccgggagcagcatggccctttgcagcccgagctgctggaacaggctgggacacgcctgccctctcgcggccccctgcccgaggggccct

SEQ ID NO: 118501 - DNA, 122 bp, Homo sapiens
tccccgcccgggctgggaacctcacccaaacaccacgccgctttctctccggctaccgggcgaggcttttgtggccaagcctaggggaagggggtccccaccccacccccaggccacccggg

SEQ ID NO: 118502 - DNA, 122 bp, Homo sapiens
gcctcgaggtctccaaccacacttgttctctttgccacatggtgcctggacacagcccaccgaggctgacccatggccacggctcccaggctctcgtctgcgcccccccgcctcccttctcg

SEQ ID NO: 118503 - DNA, 122 bp, Homo sapiens
aaatgctgctatagacggatgatgtggctttcttcctttccatagcctcatcgagcgatacggttcttgcttataacatcacacatgtgcttccaggttttggttgcatcatgttttcctcc

SEQ ID NO: 118504 - DNA, 122 bp, Homo sapiens
agacgtgggaggaaaccgggatggggatcagcagcctggaggccgcctccgctggaaccgcgcccgccccgccaggaggctctgcctgctgggcaaggcgcactcagccagccccgcaggcc

SEQ ID NO: 118505 - DNA, 122 bp, Homo sapiens
caaggttgtctgccgcagtcgcagcgaagggccctggggaccagcaggtgccagctgtaccgtaaggcgggagctctccacgctagaggagcctgggcaaggctctggcctcagggctttaa

SEQ ID NO: 118506 - DNA, 122 bp, Homo sapiens
acagaggaaaggggctgtcccagcccaagaaggcagttccactgggaagtcagtcaggtccggcggcagcgcttcctctggcagggccgaggctcgcgactgctggggtgggcggaggtcgc

SEQ ID NO: 118507 - DNA, 122 bp, Homo sapiens
gggggcacgtggagcggcctctggctcacctgcgcctcccgggccccagcccagcgccgccgcgtcaccgcccctcccgcggccccgccccagcccggctcattggctgccgctcggagggg

SEQ ID NO: 118508 - DNA, 122 bp, Homo sapiens
gaccagcttgggcagcgtggctagaccccatccctacaaaaattacaaaaagtagtccggcgtggtgggctcctgtgggcccatctactccgtgggctgaggcgggaggatggcctgagccc

SEQ ID NO: 118509 - DNA, 122 bp, Homo sapiens
acgtttttcctggtgtggtgcatctgcctcagtcatagaagcagtgttggtaatcagcatcgtggaggcggcgtcggtggtcagcgtcgtggaggccaggtcagtggtcagcgtcgtggagg

SEQ ID NO: 118510 - DNA, 122 bp, Homo sapiens
ggtgacttagagtgtcactgacaatttgtggggcttctgcctatggtggtgtacatctctcggatccaactcactgcggcactggcatcactctgatttgactggtccccctggagtgaggc

SEQ ID NO: 118511 - DNA, 122 bp, Homo sapiens
cccacgcccctgcctgcgcagcctttcatgcattgaatgggcagcttcatgatgctgctgcgacaatagcgacaatagcgggggcagaggagtttgctcaccctcttgcttctctgaaaaga

SEQ ID NO: 118512 - DNA, 122 bp, Homo sapiens
accagatgcctacctggtaagcccttggcaaaactgtgctgaatgtttaacatggtatcacggacagtgaattaggaacttggagaggaagtggctgctttcttctggaagatctaatcaag

SEQ ID NO: 118513 - DNA, 122 bp, Homo sapiens
cccggccacgcactggggtctcacaggggccaggctgaaaaacaatgcacgccttaaaggcgggaggctggcctggcgcaggctgaggaacactgatgaacgacctcctgcaaaggattgtc

SEQ ID NO: 118514 - DNA, 122 bp, Homo sapiens
gttgaacacaggtaagggggtggggctgaaagagaggttgcttagtcttttgtgtaccttcgaccaattctacccagaccatgaagaaaaaagtaaggccattttcagagagatggggtgga

SEQ ID NO: 118515 - DNA, 122 bp, Homo sapiens
accggggccggagggcggccagggagcaagggccagcgggccggtgagtgcctagctcttcgcggaggtgagctggcggcgggacgcagcggggaggctgagcaaacggcgcccgacctcga

SEQ ID NO: 118516 - DNA, 122 bp, Homo sapiens
gggtagccgcacctctcaccttcagccgaagatggtggcgcgggcgcacgtccccagccgcgaccacagatccagcgcctcagtcccaaacccaccgctgcctccgccgggctcctttagca

SEQ ID NO: 118517 - DNA, 122 bp, Homo sapiens
atgctatggagtagtatacagcaggtcaataaaacaaggaagctgtttacaaactgatatcggaacattcagttcccctaacttaaatgtggaataatgtttacagtgggatgctactatct

SEQ ID NO: 118518 - DNA, 122 bp, Homo sapiens
ggaggagggacgagccagtggcaatgacccagacccggacgacccccattgctgagccagcggagctgcttggtgagtggcctccaggcggcatctcttgctctcagcccggagggggtttt

SEQ ID NO: 118519 - DNA, 122 bp, Homo sapiens
ggacgtcatctcgggcccccaggacgtggcagggctcagggtctggggagtacgtcatctcgggcccccaggacgtggcagggctcagggtctggggaggacgtcatctcgggcccccagga

SEQ ID NO: 118520 - DNA, 122 bp, Homo sapiens
cttgtggggaggtgtggacagagaggcgcgggcgggaaccagggctgcgcacggtgcttgcgggccagcgccgagttccgagtgggcgtgggctcagcagcgggcactcagagcagccatcc

SEQ ID NO: 118521 - DNA, 122 bp, Homo sapiens
tccgcccacctcagcctcccaaagtgctgtgatgacaggcctgagctaccgtgcctggtccgtatttatttacatctacagtaaaggagtactaaaaaagactaataggaccagcgaggtgg

SEQ ID NO: 118522 - DNA, 122 bp, Homo sapiens
ggataaaaaaagaggcatttagaatgtgaaaactatcttcaaatatctgagaagaaccttcgaggagtaatttgagttggttttgtagcccatgtattcaatttagacaagtgagtggagaa

SEQ ID NO: 118523 - DNA, 122 bp, Homo sapiens
tgacctcccagaaagagttttgagcctccagccttgaggcaagtcccctctcactcagtgcggaggaactgagccccgggaggaggtgctcctgtgcagccccactgagtcagctcatctat

SEQ ID NO: 118524 - DNA, 122 bp, Homo sapiens
gcagcaggaggaaaggcaggaagccccccaggacctccagcatcctcagcgacagctcctcgctgtcccagaagtccaggcagatgaccaggtcgtaccaccagacggcagcctcggggaag

SEQ ID NO: 118525 - DNA, 122 bp, Homo sapiens
ggccgcggcggggcaggcgtaggctgcgcaggcaggggtggccgcgggtgctgagccagtcgccgccgcgcaggcgggcgctggagtctcagctacctggcgcgaccgccagcagcacccag

SEQ ID NO: 118526 - DNA, 122 bp, Homo sapiens
gggaagaccactgtctcctcttcctggggcccctgggatacataaaacagcctggactggcgcggaaggctccgccaaggcgcacgcagggcggggtgtaaggggagttcctgggactcccg

SEQ ID NO: 118527 - DNA, 122 bp, Homo sapiens
cttgtcagcctccggatgtggaattttgggagcccaggcaatggttgcctggataccagtcgtgtgactgttggaaatgatctgggagggccgggagggccggagcaggcatttaagagtca

SEQ ID NO: 118528 - DNA, 122 bp, Homo sapiens
taccttccacgtggaaggcataacagccagatggagcagtgactcccttcttccctgtcgcgcctcctgtctctcctgtctctccgggtgagtgttttagtgtagtttaactttttttcttt

SEQ ID NO: 118529 - DNA, 122 bp, Homo sapiens
cctctgaagccagtatgatgcaattctgctgatggacgaagagctgctgatgtggaaatacgttaatggagatagtgcattaaaatgtcaaagagaaggggcaaaaaacttcgaaatgtgtc

SEQ ID NO: 118530 - DNA, 122 bp, Homo sapiens
ggaaaacaggcagaaagatctccctctagccacatgaaatgccaggcatctcttaaagcccggggcaattttccattgaaaagcaagctggcctttaatgacaggaaaaatagctcagttta

SEQ ID NO: 118531 - DNA, 122 bp, Homo sapiens
atacctgcctctcaaatgagtgcttgcgagcttttttcctctctgtcgttttaaaggggtcggtggaaaagaggtggttactcgctagggtctcgctttagagggctgctgaggggaggcga

SEQ ID NO: 118532 - DNA, 122 bp, Homo sapiens
ggaggcgggcagaaaactggagcccaagctggatacacacctcctttcctacctgaacgccgtgagagccaatccgcgggcagctctaatgtcgcgtgactaggaaacaggccccgcccccc

SEQ ID NO: 118533 - DNA, 122 bp, Homo sapiens
cttgaggaggccaagcgcccacgaaccgcattccctgccttgctagttagttctccaacacgcgaaaaaggtagacgaggactggttttctttgcagctaaaatgaatcaagcctctggtaa

SEQ ID NO: 118534 - DNA, 122 bp, Homo sapiens
gtgctgccgccggggttctggcctgccgcccgcatcccggccaggtgccggatactggggcgaatacagcaagtgtgacctgcccctgaggaccctggagagcctgttgagtgggctgggcc

SEQ ID NO: 118535 - DNA, 122 bp, Homo sapiens
ctcaagcgatcctcccccctcggcctcccaaagtgctgggattgcaggcatgagccattgcgccaagcccatatgcccctttaaaaaaaagatatttagtagaaatggagcatcttgctaca

SEQ ID NO: 118536 - DNA, 122 bp, Homo sapiens
gcagaggtctgtcgcttgagaactgccagagggaaaccatcacttggaggtgtcggggatcgaaccgaggcctcatacatgcaaagcatgcgctctaccactgagctacacccccttactat

SEQ ID NO: 118537 - DNA, 122 bp, Homo sapiens
actttggcagtctgtccaacctgcaggtcactcagccaacagtggggatgaatttcaaaacgccacgtggaagctgtttgaatctttttgagatactgtaatattttcaataaacctgggac

SEQ ID NO: 118538 - DNA, 122 bp, Homo sapiens
tccttctcaaggcaaagtgccatatttgtcatagtactcatacatttcttaaccagttaacgtgtaaaattaggccactgtttttattaggttcctatctttcttttaatgtgtcagtgact

SEQ ID NO: 118539 - DNA, 122 bp, Homo sapiens
agcaaccacttcaattgcttccaataaaaatctggcttttgcatcccccacccttccttccgatccttcactctttcacgtctcctacaatctctctctctctctctctctcattttcattt

SEQ ID NO: 118540 - DNA, 122 bp, Homo sapiens
gtgggtggagacaagtgcgggagcccctggttgtatgtattgggcatgacacggtgagaacgattcagaacgatgctggtgtcacagggggatcaaagaagtgacctccactgatgaactgg

SEQ ID NO: 118541 - DNA, 122 bp, Homo sapiens
cttgtcacttctctaaacaagcattctcttgtgaggtgctatgaaagctcgagctctggccgccccttggagttactcactgcggacgttcccatgggtgtgcgtgatgcacgtggtaataa

SEQ ID NO: 118542 - DNA, 122 bp, Homo sapiens
gaaaccaaatgctgtttgcaggtgacgactcgctcactggcccatccaaggcacattggacgagcctccaaggctacgctcctgcctttctctattcagtagcccgtgaagagggcccttgg

SEQ ID NO: 118543 - DNA, 122 bp, Homo sapiens
ccagccagcctgaaagacattagaagggtggtactttagaatgctggttctccatcttctcggtttgctgactctccaatataatctgcttttcatcccaccaacccttgtctctcatgtct

SEQ ID NO: 118544 - DNA, 122 bp, Homo sapiens
ggcagatgaaaaactgaaagtacctgtggttgatcctttcctgcaaccgatcagactgatcgtgggttaagtctttacttgcataggatttgggatttattattctcctttccccttttgct

SEQ ID NO: 118545 - DNA, 122 bp, Homo sapiens
gcttgctcacctgggtgggcttgccgaaccacttccagagctgtcaggctggcaggaaggcggcaatcttgggccggttctccacggacggcaggcgctgccgcttggccagctccttggtg

SEQ ID NO: 118546 - DNA, 122 bp, Homo sapiens
ctcccaagccggcagcgaggttttccaggctcaaaatctccgggcggctctctgaggccacgaagctgggagctgggggacctggggttcaccggcgggtctttccgagcacagttgctccc

SEQ ID NO: 118547 - DNA, 122 bp, Homo sapiens
ccgcgatggcaaggcatcctgtgaattcatgcgctgcgagtggcggggctgcccagaggccgggggagcagacagggccggtgctccctctggaagcttgggtgaccggggccctggctccc

SEQ ID NO: 118548 - DNA, 122 bp, Homo sapiens
tttctccaaagctgagagagatcctttcactatttacatcattcagccctcaagactagacgcactgtattttgttaacaaaacaaggccatatacccaggcgtcagtggctgtcccctctg

SEQ ID NO: 118549 - DNA, 122 bp, Homo sapiens
cccgggcccggttgctccgagtggcgccggtgctgcgcaggggctcctggtctgtgtcctcgtcagaggccacgctgtcgtagtcgtgttggtcgtcgaggtcactctggctccgcagagac

SEQ ID NO: 118550 - DNA, 122 bp, Homo sapiens
tcggccaaccctaggtagaatcctaaaacaactgccctctcttccacgatctagatgttgcggcccgcggacaggaggttcaagaaatagtacactccgagcggcaggcagcgaggcggaaa

SEQ ID NO: 118551 - DNA, 122 bp, Homo sapiens
tcagggggcccatgataactcggtgacttgctgccccttgctcactccagttggcaatgtcggggcatttggtccctgctgtgggggctcccatgtctgtctggcccttggcctctcctccc

SEQ ID NO: 118552 - DNA, 122 bp, Homo sapiens
tccctgcagcctctcagtgctgactctacccctgatgtgaaccagtctcctcggggcaaacgccgggccaaggcggggagccgctcccgcaacagtactctcacgtccctgtgcgtgctcag

SEQ ID NO: 118553 - DNA, 122 bp, Homo sapiens
ttttctaattctgtctcattcaggagcagttagagcgccggtgttttgctgaattcccagcgtgcttttcatgagctccctcagaaagccaacaaaagagtcttgtcaacatgtttctgaca

SEQ ID NO: 118554 - DNA, 122 bp, Homo sapiens
gggggcctgttattgtttatggtttaccgggcgccaattacacccgaggtgctgtatgggcgggcccccgcaccctttgtggaggctccctctccgcctgctagagcagggcttgggtctcc

SEQ ID NO: 118555 - DNA, 122 bp, Homo sapiens
ccagtgggtgtttgaataatttcatctgcgagtgtgtgttgttgcttttggggtccactgcgcaggtctgaccaaccagcctggtccagacgtctttgaacagcagcctctgggtctgccct

SEQ ID NO: 118556 - DNA, 122 bp, Homo sapiens
agtgttcctccagtcatcagagccataccattttgttgcattggccgggaatccaaggtacgacactcatcggagtggtaagtatgggagtgagcttaaaatctcttctatcattccgaggc

SEQ ID NO: 118557 - DNA, 122 bp, Homo sapiens
gcgtccacaccggatgggctgggcgcagcctgaccggaagtgcagagagcggagcggctgcgctgagaccagacccggcagaatgcacaggcgaggcggaccgggcgcgggaagcggtgcgc

SEQ ID NO: 118558 - DNA, 122 bp, Homo sapiens
cagccaatcgtcaacgcgaaagcctgacgctctagccggctctatctcgctgccccgccgcgggcgcagagctggcgctctagcccacggagttggttaactcctctcaccggcccctggaa

SEQ ID NO: 118559 - DNA, 122 bp, Homo sapiens
tcccggagctggtgctagacaaaccgttggaccgcgaggagcagccccaactcaggctaacgctgatcgcgctggatggcgggtctccgccccggtcagggacctccgagattcagatccag

SEQ ID NO: 118560 - DNA, 122 bp, Homo sapiens
ttgcccagatctccatttaccattgattacagccacagatctctttttagtctttatcctcgtattctttatcatcattaaagatagtgcaagcctccaaaccttgactctttccctgtatc

SEQ ID NO: 118561 - DNA, 122 bp, Homo sapiens
aggtgcttgagcgggaccctgaggtgtttagtaggggcggagcagcagcatgagctgggccgtgaccacctgggggtgtggcttaaggcaggccctgaaggcgtgggcggggcggggaatgt

SEQ ID NO: 118562 - DNA, 122 bp, Homo sapiens
tggtctcgaactcctgacctcaggtgatccacccgcctcggcctcccaaagtgttgggatcgcaggtgtaagccaccgcgccctgccattttttgacattttaataggtgaaacacatttta

SEQ ID NO: 118563 - DNA, 122 bp, Homo sapiens
gccttgcaaaatgaggtcagcttggtctggctcggcctgttggcttgcctttcagctgcacggtggtgtgtcttgtgaccagaacatccgtgacatatagatacagtctttgcctccacgtt

SEQ ID NO: 118564 - DNA, 122 bp, Homo sapiens
ttcttcttgcttctggccagagtaaaagcaactgtcagtgttggctgacagtggcttgctcgggcagttgttgcctgggggtggggatgccgtagctgctggggcacagggcagggcagtgg

SEQ ID NO: 118565 - DNA, 122 bp, Homo sapiens
gccagaagccggagtctgtctttcgccaggtccggtgcccacggcccgtgttcagggcctcgctggacgtaccccagggcgccaccctgcctcggcagacacgcttgctccgcccggcgact

SEQ ID NO: 118566 - DNA, 122 bp, Homo sapiens
gtccaccagctagggagtgtctggtgctggtgggggctgcctgggggtacctggggtccacgaagggaggtacccacccagggctgagcagggggcttaccctctagagtgaccaatactca

SEQ ID NO: 118567 - DNA, 122 bp, Homo sapiens
tttctaggcctttctgttttccccctcctgcttgccattgcagggcctcctctggtcactcgtaccagtgagagatcaggctcctttaggaagtactcacagcggaaaatcagcttgaaact

SEQ ID NO: 118568 - DNA, 122 bp, Homo sapiens
catcctgcggcagcagatggaagagcggttcgtggcatccaatccttccaaagtgtcttacgagccaatcacaaccacactgcgtcgcaagcaggaggaggtatctgcagtggtcctgcagc

SEQ ID NO: 118569 - DNA, 122 bp, Homo sapiens
ggaaatttgtgctgaaagtacaacagcaagagttttcacatgaaaaacacgtgaagaacccgagcaagtgatagatccaaagacggaaaatgatcgtctattttgatagtaaaaataaaaag

SEQ ID NO: 118570 - DNA, 122 bp, Homo sapiens
cctcaacccaggaaggtggccagcgcgtcctcctgagcctgggtgggaaagcttggcgcccggaacctttgtactcgcccttccctgtgctcgggcactattgggcgttacgcgagggcggg

SEQ ID NO: 118571 - DNA, 122 bp, Homo sapiens
attaaactccagctgcttgtttcttcgctgcgtttcctcagatagattcaagagcggggccgtcatattttatcgtttcattattacggaagcggggggcacgtttcgttgcggataaggag

SEQ ID NO: 118572 - DNA, 122 bp, Homo sapiens
tccttcaggagcgctgcagtgggcctaagtgcctcctcccgggactagtacggggacggtcgtgagatctggacaacattcgccttttaatatttattgatcttttgtgacacgcgcgtggg

SEQ ID NO: 118573 - DNA, 122 bp, Homo sapiens
agagggcacaagtaagctgcacgagtagatggaccaggtttccatgtcatccatcactatcgcatttgcacctccccctcagcccacattgaggccacattatttatggtagtggtagttat

SEQ ID NO: 118574 - DNA, 122 bp, Homo sapiens
tacagcattcacacgcagaagaaagcagggttctccttcccgagcttggaggagggcaggcgaggaagcaaaatacattgaattcaattcaactgcatccagtatctgaaaggagtctcccc

SEQ ID NO: 118575 - DNA, 122 bp, Homo sapiens
gaaagtgctgctgctgggtctgcagacgcgatggataacgtgcagccgaaaataaaacatcgccccttctgcttcagtgtgaaaggccacgtgaagatgctgcggctggtgaggccgggccg

SEQ ID NO: 118576 - DNA, 122 bp, Homo sapiens
gccgggcagcggagagggggcctggcagttggctccggtccgccctggccctgcccagttcgccccagggcccacctgactgcgatggcgccgcgtccgccaggcccggctcatcaccgtgg

SEQ ID NO: 118577 - DNA, 122 bp, Homo sapiens
actccgttcggctgcgctcggtccgcgggcaacaaaggctgcagggcccgcccccttggccgctgcagaggcaaagaaaagacaagagagctagaaggagagaaagaaagaaagaaagaaag

SEQ ID NO: 118578 - DNA, 122 bp, Homo sapiens
ccccttttgaaaaacagggcgtgtctcagccctaggtatgcaaagctaaacgtctcaaaccgctctgcattcgaattagccaacttaagaacaagtccaacagcactgctaagcaagagcct

SEQ ID NO: 118579 - DNA, 122 bp, Homo sapiens
ctccaccgccgccgccccctcttcctcccccgccccctctccctgcccgcccccgtcacacggagccctggaggatcccccgctgctgcccgccctccctacgccacccccacgatggacag

SEQ ID NO: 118580 - DNA, 122 bp, Homo sapiens
gtgtccagaatgtcacccccaaactgctgctgaaggcacagcctctcacagcaacccctgcgggtccaaaccttatgcagttgcagggcttcccagggactgaaagaactgattccattgtt

SEQ ID NO: 118581 - DNA, 122 bp, Homo sapiens
agtgagagaaagaactcggctattttattatagtagagcaacaccgaagggagacgacttcgctgtagctcagagtctttttccattcttcacccacgcgcggggcagtcgcgcggcgcggt

SEQ ID NO: 118582 - DNA, 122 bp, Homo sapiens
agtcagcaacagagtacaacagggtttctatttacccaccaactactatacctttcatgacgttgaatgggacatagaactgtcctacatttatgtcaaagtatatatttgaatcgcttata

SEQ ID NO: 118583 - DNA, 122 bp, Homo sapiens
aacgggacaatacttcgcagccggcgcagcggttccgggcgggcgtccttcaaaaggacgcgaatggggacccgcgtgagcgtcatttccatatgtaaggggccagctcttacaaaagcgcg

SEQ ID NO: 118584 - DNA, 122 bp, Homo sapiens
ttgatcaatttaccttgatgcactaccggtgaagaacggggactcgaattcccttacaaacgcctccagcttgtagaggcggtcgtggaggacccagaggaggagacgaaggggaaggaggc

SEQ ID NO: 118585 - DNA, 122 bp, Homo sapiens
caaacacagataatctgactccaaattcagtgccctgtccatcacagctctggagccctgcggccacttacgactacgtgagctactgcttactgctaatttactagaggggcaatggcagt

SEQ ID NO: 118586 - DNA, 122 bp, Homo sapiens
tgcgcactgggcgcctgaataatggctcaggcgccggccctgcctgcgttgcccgcaggccggagtcccccaccctgctgcgggtttatcgctccagctcatgctcatactcctttgtacca

SEQ ID NO: 118587 - DNA, 122 bp, Homo sapiens
ccctactataacttatttggccagggctaaaatattaaagcttgagttttcacagcccatcgtttccccatttcagctaaagaaggtttggtctcaccaacagatttctggacaattttatg

SEQ ID NO: 118588 - DNA, 122 bp, Homo sapiens
tctatgtatattgtagctcatttaagaaaaactactgaatatgacagcatcagcccaaaccgggacttccagggccatccagatttgcagaaggacacatcaaaaaatgcctggactgatac

SEQ ID NO: 118589 - DNA, 122 bp, Homo sapiens
tggttcagtctggcagtgccctctggcagccaacccgcagctgcaggtaggggtgctggacgccccctgattttgttttgggaataataatgacactacctatagcctggacccaggtggcc

SEQ ID NO: 118590 - DNA, 122 bp, Homo sapiens
cctacccagtttgcctctcggctgcctctttctcctccttgctcagagtcaactgaatgccgtgacctcacagatgtctccccgcaccacctcagccactctccaccacattaacttgcctt

SEQ ID NO: 118591 - DNA, 122 bp, Homo sapiens
ttttcccccttgatatctctctccataaatcggtggcgcggcggaggcggcagagtcgggcgggaagcgcggggccggccggggcgcccgccgctcgccgccgcctccgcgcgcccgggggc

SEQ ID NO: 118592 - DNA, 122 bp, Homo sapiens
ccaccgtgacggccagcgcagcagcatcatggacgtgcggtgagcgcggcagcacctgcccggcccctcctagggctttcctgggggctgagccactggtcgcaactgcagaggccatgaga

SEQ ID NO: 118593 - DNA, 122 bp, Homo sapiens
atgtagattttgttgttgttgttgttgcagaaatggctccgtaaaatgattagttttgtgcgtgtgtgtgtgcgaacagttacacagttaagttcgttttcctgatagttttcttttgtctt

SEQ ID NO: 118594 - DNA, 122 bp, Homo sapiens
ttgagcctttgctggaggtggggtgcccggcccttctacaaacgcctgcttgattccctccgtgatgggcaaaggccttccctcccacaacacctgaattctgggcaccctgatctttggag

SEQ ID NO: 118595 - DNA, 122 bp, Homo sapiens
agatcgcccgaccaaatgtagtgcgtgaaacttgattggtcactgtttcaaacaccccggcgacaaccctataaagaattgtgcagaggcatttcaatttcagaaaccccaaagattttttt

SEQ ID NO: 118596 - DNA, 122 bp, Homo sapiens
tgtggggccctcactggcctcccttcctaggtgtcgagggagagggtggtgtgtgccagccggtggcaggtgggaggcctgggccctgcagaccccaagctgactccacaggggctgggctg

SEQ ID NO: 118597 - DNA, 122 bp, Homo sapiens
ccatccagatgttattgcttacatgactgtctacatccagagaaacactgctgaggacgccgcctctgagacactgttctataactcaccacttggctgttctctttccaaaaaaaaagact

SEQ ID NO: 118598 - DNA, 122 bp, Homo sapiens
ccttggtgttactgttggtctggtctgcaaggctccccgggagcttgtatataaagggggcgcccactatgactctgcggccccgcccagtccccaccctgcccagcctcctctgtgagggc

SEQ ID NO: 118599 - DNA, 122 bp, Homo sapiens
agctccctccacagtaacgactcccacatcttcctgaggccacaacattctcccaacgtccggatatcccactaggtagctggcccacattcgctgcgatcatcactaatgtacccaaacca

SEQ ID NO: 118600 - DNA, 122 bp, Homo sapiens
ctgagcggtcctccgaaaccgagaggcaggtcctgggtgcgccggcggtacagcggagagcgtggagagaccctcgccgcagccatttcctgccctttgtgtgacagccgctgcggcgaagg

SEQ ID NO: 118601 - DNA, 122 bp, Homo sapiens
gtgtctcactctgtatcccacgctggagtgcggtgctgcaattacagctcacagtagcctcgactcaagtgggctcaagcggccctcccacctctgcctgtcaagtagctgggaccacagtc

SEQ ID NO: 118602 - DNA, 122 bp, Homo sapiens
ccaggaatagcggcgtctgctcctgtacagaagagccagggccgatatcagggaaggccacgcccacaggactgggcctttctgccttcacttgcgcgaccactggcccctatcccttcagg

SEQ ID NO: 118603 - DNA, 122 bp, Homo sapiens
cttcctgttttttcaaacaccttgcccaccttctgcacaccaagcgtggattctgcaaaacgtgagcccaacaggaagctgcctgcaatttcaggtagcttttctgactcttaaagagatct

SEQ ID NO: 118604 - DNA, 122 bp, Homo sapiens
atttcccataaacaattagattcttggcttcttttgaaaaatctgaagatctgttaacaccgggcctgcatttctgtatgacaacaattggtgtttagatggagcatgttccttgccatttt

SEQ ID NO: 118605 - DNA, 122 bp, Homo sapiens
aggcaactctgaggacaactgcgacccagagcaccacagggtgtcctagagccacctgggcgtagaataatgacgtataaggatgtggaggccaccaattggctgcgctgtgcgaagacgga

SEQ ID NO: 118606 - DNA, 122 bp, Homo sapiens
gaggtgggcgccttgggggcaaaagggctggcgggtagatggattgtgcgcacctggcctcggctgctggcctctgggtattctcacctggaagcaagaacaatccgcaaaaagttgccgcg

SEQ ID NO: 118607 - DNA, 122 bp, Homo sapiens
gcggcggcggcctcaaccgagctgcgagacgcagggtcaggtctgcgcggactcaccgcgcgcggcaggcctcagcgcaggccaccccgcaaagatacacagcagagcaggttcacgcctgt

SEQ ID NO: 118608 - DNA, 122 bp, Homo sapiens
ataaaatcaagttgcaacccaataaccttgggcacatgttctcaggacttcctggggctacgtcatgggccttggtcactcacattaggctcagaataaacctccttaaatattttacagtg

SEQ ID NO: 118609 - DNA, 122 bp, Homo sapiens
aggattcaccagcgttccttttacaagtggagactggacagtgaattgctcacctgaggtcgcacagcttccagtggctgagctgtgaccatagagcaagtatcttgccacccagggcaagg

SEQ ID NO: 118610 - DNA, 122 bp, Homo sapiens
ctcaagtgatccacctgcctcgggctcccaaagtgctgggatttcaggaatgagccattgcgcctggccagttgttgcatttttatagtaaaatttcatttctatgggcctttccctctatg

SEQ ID NO: 118611 - DNA, 122 bp, Homo sapiens
gagtgggaggcgaagggggaaggccaaggagaggcacaggagcctttgcggccatgtgcgcgccttccttgtcttgtgtgcttcgccaggtagagcgggctcacagcagcggtggggattac

SEQ ID NO: 118612 - DNA, 122 bp, Homo sapiens
caaccccagaaccccgctcggtttatcctaacgacccccatgccggctgctcctcgaggacggggactggacccgcagcaccccctcaggcacctccatcccaaacacacctgccgcccacc

SEQ ID NO: 118613 - DNA, 122 bp, Homo sapiens
agatgcaaatccactctgctgaggacagcatatgcctatatgttttgctgaaatttcagtcgttcccgtggctgtttcagcacttgagctggttctcagaagatcctgctgtggagcagtgt

SEQ ID NO: 118614 - DNA, 122 bp, Homo sapiens
tccctggtctcacagacacctggggagcattccttatcctaagttaaacctcagtgctggcggtggcagcgcgcctgcagtgaccagtataatgcaccagtcatttaattaccgtggcagta

SEQ ID NO: 118615 - DNA, 122 bp, Homo sapiens
ttcctctctccgatatctccctagctagcgcatgaccctaccttttctactcaaagccctcgaggcttgtaaacacctcgcaggccttgtgaaaatcaagtccacaaatccctccgtcagaa

SEQ ID NO: 118616 - DNA, 122 bp, Homo sapiens
cgtggtcaggcctttccgcgtagccccgcccgcgtagccccgccaaacagccaatggacgcgcagctcgacgctccgcgcacctccgccaaccaactagaaaaggtcgagcagacgggcggg

SEQ ID NO: 118617 - DNA, 122 bp, Homo sapiens
agagagcaaacccattcctgtaaagcctttttataacagcatgaatccattcatgacagccgtcatgatctaaatacctcccattatgtgccacctcccaagacagttggagattcagtgcc

SEQ ID NO: 118618 - DNA, 122 bp, Homo sapiens
gtccttccttcctcaggcagcctcaggctggccggggagggggtgggggccaggcgcgggcgagacagtgcaagcctttgtcctcaggcaggtacggctgtgggcatgcagccgaggggcag

SEQ ID NO: 118619 - DNA, 122 bp, Homo sapiens
gccaagagcagcggttgttggagtgtaactgccatgctcagccgcgatggctggggctgccgggcgcgtccaagatcgcgccctgcggcggtttcccatcaccctgcctgtgggcgacgtga

SEQ ID NO: 118620 - DNA, 122 bp, Homo sapiens
acagtttaaagcaatgagtagtgacaaaatccaaaacaaaggaactgcctattatgcaaacgcctggccactcaaagccattcgaaaccattattgcttagacgagatcaagtaaaatcaaa

SEQ ID NO: 118621 - DNA, 122 bp, Homo sapiens
gcgctgatcctcggtgagatgggggttgatggcgtatttgccccctttgggagtgggaagcgagtactggaaataagacaaggaagggccattagaagaaggggagccacagtcacacaagg

SEQ ID NO: 118622 - DNA, 122 bp, Homo sapiens
gggcctggccatagctggactgtctctttccgccatgaggtaccattgctgaagctccatcgcagggtcaggttcactcctggggagagcaggagagtcagggagagagggtctctgcccag

SEQ ID NO: 118623 - DNA, 122 bp, Homo sapiens
ggtgctgggctagaaaattcacccacagttaggatgtcagagggagatataagtaaacgtcggcacccaactcattagtttctggctaaataaaagtcaaccgacagagcacaaaacaacag

SEQ ID NO: 118624 - DNA, 122 bp, Homo sapiens
cgtcgactccttattggtggcgttactacgcctcaaggcgtttcttccctctttgctgttcgcagggacgctgcctggtagtttcagttacttttgttttctttctgcctgcctttattgat

SEQ ID NO: 118625 - DNA, 122 bp, Homo sapiens
cgctcccagcctggagtgacggacgctgagcagcaggagcacagctgttcccgacacatccgtgatctgggcgtgcacctgtcactggggagagagcagtgctggtctccacgctttgggca

SEQ ID NO: 118626 - DNA, 122 bp, Homo sapiens
aaagaaagaacagaaaagaaagaaaaaagaattcctttaatttagtgtatggtgttaaaacgcaaccaaacgctccatccggcgaagagagagagaaaagaagagaggaaggaaagaaggaa

SEQ ID NO: 118627 - DNA, 122 bp, Homo sapiens
ccgcttaacgcaggccctggaagcttctgcctttgcgtaaggagtgggtgctgaaggagacgttgaaactgcagcttttctgaaaagcaaggcacctgtgcagtggccgaggatggctgtgg

SEQ ID NO: 118628 - DNA, 122 bp, Homo sapiens
ctactagtacatgcccttagggtgacagggcagacttctcgtcacataatgaaagcgggacgtcgctcctttagtcgtcctcagcttgtgctgcagtctgtctttccggcggggggacccag

SEQ ID NO: 118629 - DNA, 122 bp, Homo sapiens
tcgcgcccgcctttatgtaagctgcaatggacagcgcgcgtgtgtgtaacagccccaagacgccaatgcaaaaaaaggaaaaaagaaaggcaggcggcagggaaagagagcgtgagctggga

SEQ ID NO: 118630 - DNA, 122 bp, Homo sapiens
ggaaggccgggaagtaggaggtgtttgctcaacttctgaggacgtcacgcctctgcctcccgtagccaatcagcagccgccctgagggaacaaccttctcatctgccaatcggcggcgctgc

SEQ ID NO: 118631 - DNA, 122 bp, Homo sapiens
ggcaccagtcagctctgaggttattgaaattgatcatctaaatctacaccagggcttgagcggctgattaaatctcgattttgctcttaattaaatcctgcctggttgtatgagatggtgga

SEQ ID NO: 118632 - DNA, 122 bp, Homo sapiens
ggctgcgcgcgtgaccaccagcgggctgggatgtgttagggtcccttgcctgcctgggtacgggaatctctgtctagggtgactgaggcctgggtgttgggctggggcggggtagcgacctg

SEQ ID NO: 118633 - DNA, 122 bp, Homo sapiens
tggcaacaaattacaaaccaagtagcatatttaattttaacttaatatccaagtaacaatcgcccctagaccttaaattttttaaagataatttttatttgccctctaacgaccatgtttcc

SEQ ID NO: 118634 - DNA, 122 bp, Homo sapiens
gcgtgtgttcaccccacaaggtcctggaccttctctgtcccctggccccactgattcccacgctcaaccaggggcccccattcaaagcaaggctgggggagaggtgccccatccagcgtgga

SEQ ID NO: 118635 - DNA, 122 bp, Homo sapiens
tcttgccctgagggcagcatcctagccctaggtggttctctggtgtggcctcagtaaaaccgtgacgaggtcctcggcctctctgtccccaacaggcggctggcacacttcggggtctgaga

SEQ ID NO: 118636 - DNA, 122 bp, Homo sapiens
agggccggctgctacctacaggggctgggctggagcccaaatctgcccaagataagggtacggccagggcgggctggggccagggctgcctcgagggggtgaggtgggcaagaggggctggg

SEQ ID NO: 118637 - DNA, 122 bp, Homo sapiens
gcggacgctgtcggacgagagcctgtgcagcgggcgccgggagcccagcttcgccagccccgctggcctagagccagggctgcccagcgacgtgctcttcaccagcacctgcgccttcccgt

SEQ ID NO: 118638 - DNA, 122 bp, Homo sapiens
cttgagttcaaaaacttacaggagttctagacttttcaaactcacgatactaatcaagaacgattttaagtattaagagtttcctctgcttcattctgtttccaaaggaaaatatacgtcgc

SEQ ID NO: 118639 - DNA, 122 bp, Homo sapiens
gaggcggacaaagggcgttcacgcagccctcgttccccactccccctccccaataaaagacgaaagaaaaaccttgttttagatgaaaaaataaatgcttgtcatctgcctctgcagttgga

SEQ ID NO: 118640 - DNA, 122 bp, Homo sapiens
aagtgaggagcgtctcagcccggccgccatcccatctaggaagtgaggaacacctcttcccggccgccatcacatctaggaagtgaagagcgtctctgcccggccgcccatcgtctgagatg

SEQ ID NO: 118641 - DNA, 122 bp, Homo sapiens
gagcaaggggcacccgctggcatcttagagaggcaagtccagggatccatagggtataggcggagagaagatctgggagcccacttgccaggatcgccgggaggcacgccccggactccccc

SEQ ID NO: 118642 - DNA, 122 bp, Homo sapiens
tgggctgcaggagaggggccagcgggctgtgctgggtggccagcgggtgagccagcttgccgggctggggcgcttctagcttgcgcggcggtggctggcccgaaacctccgagcgcgctcac

SEQ ID NO: 118643 - DNA, 122 bp, Homo sapiens
cggtgtggggcttctgccacccgcggccagccgcgatgcggaaggggattctgacggagtcgtggtcacaccagctggccctgcgcagccccatgggaaataggcctggaattcctgtcggg

SEQ ID NO: 118644 - DNA, 122 bp, Homo sapiens
ctcagtctgcaattgacagtgtaaacaaggtttcacggaagaacagctcggcgatctgcccgggtagctgtgaagtcacagccatgttggccgatggatagtggacactgttccgtttttag

SEQ ID NO: 118645 - DNA, 122 bp, Homo sapiens
agtcacagataacctcccactgccacctgcaccgcccagcacggggacagaggaggagcccgccgccactcaccgagtagccgtcagcaacgctgaacactgtgaccaccttgctggcgtcg

SEQ ID NO: 118646 - DNA, 122 bp, Homo sapiens
aaatctttccagactgtgcttcccaaccccgacagccccgcaaagctggtttaagtgtcccggtgagcaactgtgtccacctaggttcactacccacagtagagggttttagtgctcaacca

SEQ ID NO: 118647 - DNA, 122 bp, Homo sapiens
agtgaagtgggtattgacaaggctgagtgaaaataggcgcaaacacaagactagtgaagtcgtgactaggatactgcctgcaaacaggcaatcccactttaggaatccatcctggctttttt

SEQ ID NO: 118648 - DNA, 122 bp, Homo sapiens
gaagtttgttccttaacttacaggtgatcagcgccacaagatgttgaaactaatggagaccgcagagatcatgtgctaaggggccttcctcctctgggtaaggaaatagacctagagaacgt

SEQ ID NO: 118649 - DNA, 122 bp, Homo sapiens
ctagattcaggcggtcatctgctgcctaacgcagtctggggtccctcatggtaggggaggcggggtcaggaatgggcggggcattcgctgttggtgccgacggatagagccaatgattgtgg

SEQ ID NO: 118650 - DNA, 122 bp, Homo sapiens
cgccgatcagtgcttctgcttgtgttttgaacatcaaacatcagctgaagcatcgctcaacgactttgctctgggtgactcagctatcaaggtcttcctcccacagtggaattgctgtgtgc

SEQ ID NO: 118651 - DNA, 122 bp, Homo sapiens
gcttctcctcctgatttctctgtggttttacggcatccgatagtctactaaatggccaggcgtggtggctaacgcctgtaacctcaacactttgggagggtgaggcaggtagatcgcctgag

SEQ ID NO: 118652 - DNA, 122 bp, Homo sapiens
ccgaaaccacctgcggttggcaggcaggagactaggcgtctgccggggagggcagggacccgctaagctgatctcctgtacagtagtgctacttaaaatatgctggggaccatcaccatcac

SEQ ID NO: 118653 - DNA, 122 bp, Homo sapiens
ccggggagctgggccgctttttgtcagctccgagctcggcccctcctccctccctccgcccgccccaccagccggagcccggcccagtgctccagagaaaggccggcctgcagcacccgcca

SEQ ID NO: 118654 - DNA, 122 bp, Homo sapiens
ggctgcttgggtcagctacctgtaagtggaaatagggggtgccaccttccgatgaaaacccggatcccgtactgtcaacggagggcccttgaattcacatccctcagcccgctagaaagccc

SEQ ID NO: 118655 - DNA, 122 bp, Homo sapiens
gcattatgttttagaatggaaaatgtaaattaagcctttgttttccatcatcattctcatcgtctttttcatgctctctggtggcagaaccccacccagctcccactgatttcagcttttgc

SEQ ID NO: 118656 - DNA, 122 bp, Homo sapiens
cagcctagacatgtgcaagcctagacacgtggccagcctagatgtgtcccagcctagaagcgtggccagcctagacgtgtgccagcctagacgtgtgccagcctagacgtgtgcccagccta

SEQ ID NO: 118657 - DNA, 122 bp, Homo sapiens
acttgcactcgtcctgagcctccaggctgaagttgtggaactgtagttctatgctgtgtccggcaggcaccgagatatgccaggtgcagagctgggggagggcataggtggagcaattcatg

SEQ ID NO: 118658 - DNA, 122 bp, Homo sapiens
acatgccgtcccacctgcccacgggggaggagccgcacccatccccaccggccaggcaggcgtgagccacatctcctgaggggcccaacctaacagcctctgacgacctgtgggtgacgcgt

SEQ ID NO: 118659 - DNA, 122 bp, Homo sapiens
aggatccaagcccgccattggtcggcttccgttacgccgctgatgtggagtagggccgagcgcggaacgcgaggggctgctggggtgtttgtcgcagcgggttttcctcggcggtttgcgga

SEQ ID NO: 118660 - DNA, 122 bp, Homo sapiens
cctaactggttgcccgtgccgcctcggaggtgaagtgtactgcgctgattggcttccaggcgccggccgcgtgtgatgtcccgggcaacgattggctctcgcctaccgggggcttctctcac

SEQ ID NO: 118661 - DNA, 122 bp, Homo sapiens
ctggggaagggtgcagaggaacggcttcgctccccttttccactcggctggttctgtcagcgtgtggccattaccccgacagcctcccgcgagcccgggatgttaccctcggccgttcccgc

SEQ ID NO: 118662 - DNA, 122 bp, Homo sapiens
tgctggttaggaacctccggctaaactgactctcctcccagcagagggcagacctgaacccgttcacagaggactgaaatggtggcatttcaggcatacaagcaggccaaggagggctttcc

SEQ ID NO: 118663 - DNA, 122 bp, Homo sapiens
gactgaacaagagggaagaggcaagttccgtgggtcagggcatcaccgaacaggaatccccggagacacgcccaggagccgaggagggcagaggtgctccagtcgggccgctgagccatcct

SEQ ID NO: 118664 - DNA, 122 bp, Homo sapiens
ccgtctccgtagaagcagaaaggcacacagcttccacgacacagattcactgactgcagccgcgttaaagacacgttcacactgaagcacctgacagtgactctgggccagtgatgatgggc

SEQ ID NO: 118665 - DNA, 122 bp, Homo sapiens
ttgaaaggttaccggatttgtacccggagtgggttctgcagggataggtgcatggttgcccgtttcacatcatgaatatgaacggggctggacacctagagccgaattattaatacttcaga

SEQ ID NO: 118666 - DNA, 122 bp, Homo sapiens
gtctttcctgctgctgcttctgccgctcccggggatgcctgcgggctcctgggacccggccggttacctgctctactgcccctgcatgggtaaggcctcccaagccctctgctcagatggag

SEQ ID NO: 118667 - DNA, 122 bp, Homo sapiens
aggtgggtgggagtgggggttggtggcgtgtagatgagagaagaaaagggtggggagaggcggaaaggaggcaggaagggggcgactagatctcagatcccagcattggtcagacggcgaag

SEQ ID NO: 118668 - DNA, 122 bp, Homo sapiens
gcaaagtgggctcatggccctgcaccctgaaccccttgcctctctccagctcccaggctccggggatgtccaccttgaatttggcacccaggccatggagcagaggctcccactcccctctg

SEQ ID NO: 118669 - DNA, 122 bp, Homo sapiens
gccagagccgctcatgttgccgatgagaaagctcaggccagggagggaggggacggggctcgcctgggctgatgccccatggctctcatctccaggccttggtggctctctctgcatctttt

SEQ ID NO: 118670 - DNA, 122 bp, Homo sapiens
tggaggccaagtcccctggagtatcagggggtgcgcgggctcgacccgacgccgcaccatcggagggcccatggccacaggcccaagctgcctggccatgtcacttggagccttcgggaaag

SEQ ID NO: 118671 - DNA, 122 bp, Homo sapiens
gcagcgggtgcacagggagcgccaggactccagcgtcttgccggaccagacccacacgcccgaggtgatgcccaccactaggcacatgaagtacttgagcatgaagacggcgtagtcgggcc

SEQ ID NO: 118672 - DNA, 122 bp, Homo sapiens
tgcaccggcagatggtggcaggggacaaggacggcgcggtgggccccgcgcccagctcaccgcgagtgctgctcccttcacaaaacgctagagagaccagcaccctccttgccccgcccctg

SEQ ID NO: 118673 - DNA, 122 bp, Homo sapiens
aaagctcaacgcaaaaaacagcccccatgtgtgattctctactgggcaataaaagccaatcgcgaccctcattttccccccattccagggcttccccaggatagaacgcggaaacgcttctt

SEQ ID NO: 118674 - DNA, 122 bp, Homo sapiens
tatctagttggccggcgataagggtttcaccttcaggactggagctccacaagattcaaccgttatatcaacctccccggcccaggtcttaccatcacagcgtcacaaactccaggtcgcct

SEQ ID NO: 118675 - DNA, 122 bp, Homo sapiens
cctgtggtttgtttcactttgcaattgatgaaaatgttcagaggcctatggagagtgctgcgatctgcccaggccttgtgggctgcagctcttctctggaggtcagaagtttcctccagagt

SEQ ID NO: 118676 - DNA, 122 bp, Homo sapiens
ccaggccactgctggaacaaaaagcctcactgcagacaatgggccctttctgtagatgcccgctcggggctgggcacaatcgccgattcataagccaggcaaggccccacaatacccaggct

SEQ ID NO: 118677 - DNA, 122 bp, Homo sapiens
tgttcctacccattggcttgcatgatggaatcaccacctcttcagacagctgctgttatccgcgactcttccttcattctcgctgccagatcccacttcgtctccggtgctacctctgtatg

SEQ ID NO: 118678 - DNA, 122 bp, Homo sapiens
ccactgagtccaaggccctgaggaggctgaggggcagcagcgggggctgccaaacacttccgatgctccagacgccacacaggttttctgagtcttccggtaacaggacagcaccagccaaa

SEQ ID NO: 118679 - DNA, 122 bp, Homo sapiens
ttgttgttgctgttgtttttccactagaattttgaatcggattttaccagcaattggtaacggaaaggaaaggatgtgtcttccaattgagaaacagtggttaaaaactgaaagtgggccgg

SEQ ID NO: 118680 - DNA, 122 bp, Homo sapiens
ttggagagatgggagtctgtgttgcctagggtggtctcgctatgttgcccctggtggtctcgaactcctggcctcaagcaatgctcttgccttggcctcccaaagcattaataaaaatacaa

SEQ ID NO: 118681 - DNA, 122 bp, Homo sapiens
agcctctactcttccatagctcagtttttccaaacttactgttttcctgcaccctggccacgaagcctgtgagaggtatctgtggagtcaactgaggcatagggggagggggtggagcaata

SEQ ID NO: 118682 - DNA, 122 bp, Homo sapiens
ccggcgagagtgactcagggattcggggtctgagtcacagcccaggaaagtgtcaggccccgcctagggaaacttcccgccagcagcctcacgttctcaggccggggctggggcccaggctg

SEQ ID NO: 118683 - DNA, 122 bp, Homo sapiens
cacagacacctatggtccacttggctttatctcccacctctacctcccaataatgtctcccggcgatgaagcatggagagcccaagacacagggaaacagattgaacctctcggggttgtca

SEQ ID NO: 118684 - DNA, 122 bp, Homo sapiens
gcgcccttccaggtaggggcggggccaggcggcgcgggaggcgggcgcgcggctcccccacgtggtctcctcaagccgcctcgctgggacggcctcccagtcgcgaccttttgtcttctctt

SEQ ID NO: 118685 - DNA, 122 bp, Homo sapiens
tcacaataatcctgaaaggcggaatgattacccccattacaaagatgagaagaatatggacgctcacacagagatggagccagtttgaaccaaggctgtctgcctgcagagtctttgctcct

SEQ ID NO: 118686 - DNA, 122 bp, Homo sapiens
cttggctcaccagggctgggtccttcgagagttcttcaggtcctagagccaggctcagcccggagggtgagggacctgcagggactgcccgaggtgaggctgcctttactcaaagaagaaca

SEQ ID NO: 118687 - DNA, 122 bp, Homo sapiens
gtagtgggcaagtgagcctgggtgtgagcaaagagacaacatggcggagtctgaccttcccgggacactcaccggaagagggaagaaggcctcggatgggcatgcgtcccacttctagccca

SEQ ID NO: 118688 - DNA, 122 bp, Homo sapiens
gatgatgataatgatgtaggcaactttgtcccacagcaggtcctaatggagggaactcagcgggatgtccattcctggaaactgtgagaactgatcagttactctggataggaaagagatag

SEQ ID NO: 118689 - DNA, 122 bp, Homo sapiens
ccgaggcgaatcctcacattgcggcgtggtggccgacaaaacccgggaccctgatcttggcgcctccacgccaccgcccggaggccaagacccccgagcgccgcagcatagcgtagcccaga

SEQ ID NO: 118690 - DNA, 122 bp, Homo sapiens
ggcaaaatctcccccatggagaagcacccttctacacacagaactaaggtgtgaagggagcgcagagggttcacctgctgcaagggcaaagaggacctgctccttcctgtctcccatggaac

SEQ ID NO: 118691 - DNA, 122 bp, Homo sapiens
gggggcggcgctcctaggggaggctcggggctgcgcaggagcccacagcggggggccaggcggggaggctcaggcatggcgggctgcaggtcctgagccctgccctgccgggaggcagctaa

SEQ ID NO: 118692 - DNA, 122 bp, Homo sapiens
cttattacagattcagggtgatgatctgagtgtccaccttgctgattactacggtacccccgcgtgtggcacagggtgtggcacacacagaagacaaggagatatgttaaagcccaaaggcc

SEQ ID NO: 118693 - DNA, 122 bp, Homo sapiens
tgattaagttacagatctagagatgagaagactctccaggtgatctcaatgtgatgacaacggtccttataagaggaaaggccaaaatgagggagggagatgtgatgacagaagcaggagtc

SEQ ID NO: 118694 - DNA, 122 bp, Homo sapiens
taggaccctccgagccaggtgcgggatataatcttgtggtgagcggttttttaagccggtcggaaaagcgcagtattcaggtgggagtgacccgattttccaggtgccgtccgtcacccctt

SEQ ID NO: 118695 - DNA, 122 bp, Homo sapiens
aaacaacagtctttgcttttcaaaagtgaaacttaaatgattcccctagggctttctactcggtctggacattcccaggaaaatcaaagtatgtaatttgtggatttgtgcagagggttttt

SEQ ID NO: 118696 - DNA, 122 bp, Homo sapiens
gcaggctcagcgccgcgtctccctcggcaaatccacccaaccaaaggcaccgcggcgtgacgccctgcacaccctgcagccagcaccacacaggtcccagtcaggcccggagccgggctccc

SEQ ID NO: 118697 - DNA, 122 bp, Homo sapiens
ctgtccccactacctgtggccattctgactggctcgacaatgtccactgggcagctaccccggagcaggcgaggctgtacatgccatggatgtggctgtgaagaagaggagccggccctgcc

SEQ ID NO: 118698 - DNA, 122 bp, Homo sapiens
ccgaggctgcaccgtgaccagcccctcaagacagagcgagacccaaataacccccgcgggcggacccgcagcgttctgtgactccaccgcggagtccaaaaggcagctgagggtgggagcgg

SEQ ID NO: 118699 - DNA, 122 bp, Homo sapiens
tctgaaggggaaggccagcccctttggccgtcagtgtgccctgtttttcctgggaggatgcgtgagggaaggagaggggcggcagggacggccgctggcgccggtttctttgtctgagccgg

SEQ ID NO: 118700 - DNA, 122 bp, Homo sapiens
ttggatggctgctgtgtcagtcagacacttctctgcttccgttggcgggaaggcttcaggcgggtagcggggactcggtactgccccctcccaagctgggagcagggcgcgtgacgtctcag

SEQ ID NO: 118701 - DNA, 122 bp, Homo sapiens
ggattagatatattgccttttcatgagtaagaatctcacaagtcttggacaattaaaccccgccttcatccctcccatctcatcatatctgacctcaaccagtttcctacctacactgctta

SEQ ID NO: 118702 - DNA, 122 bp, Homo sapiens
gcaacccgtgcggcgtgatgatgcagatgatgctggggggcatgtcccccgagacgggtgcggtgaggctattggctcagctggttagtgccctgtgcagcaggtactgcacaagcgccttg

SEQ ID NO: 118703 - DNA, 122 bp, Homo sapiens
taatctccacattctcagcctttgggacccgaggcagcgtgagttccgggtgcaggccgccgttgctcgggaatacagttgggtgttgctgaatgatggggatgcgtcctgagaaatgtgtc

SEQ ID NO: 118704 - DNA, 122 bp, Homo sapiens
ggatgtggccggtcttggtgccggtggctggcggtgctcaggaagcagtacctgttctcacgcttgctgggtgaaactggagcctgctgttccagtgggagggatttaagtgtaggagttga

SEQ ID NO: 118705 - DNA, 122 bp, Homo sapiens
tcagaggtgactgtatctgcagacatggaacacgtcatgaatttgggtgtcatgcctgcacgtgggccatgctaatcttctctatatcgttccagttttagtaggtgtggtctttaaagagg

SEQ ID NO: 118706 - DNA, 122 bp, Homo sapiens
cggggctgctcaggaggacaggcggctctgcgctgcggctgtggtgggctccgtgcacaccgcgctaggctcatagggcggctggcaggtccagagagcggcgtgggagcagctgctgccac

SEQ ID NO: 118707 - DNA, 122 bp, Homo sapiens
ctggtcgtggtggtgtgcacctgtgcctgtagtcccagcagctactcgggagactgaggacgaaaatagggaagcctgaatataaattagctataaaataaacccaaagaaagtacaaggaa

SEQ ID NO: 118708 - DNA, 122 bp, Homo sapiens
tctgtaggaaagagaaattagagccagcctgtgcggccacctttggaaaggtaaatgacacgtattggctatagtgacttataactaaagtcatgtcaggcagatagcatgaaaatgaattc

SEQ ID NO: 118709 - DNA, 122 bp, Homo sapiens
ctgcctggattccctttgtccatgatacagccggaaatacactccaggcagtaggctgggcggttgccacagtagggactgctgaactgttagggatcactgtccttcgttgcctttgtcta

SEQ ID NO: 118710 - DNA, 122 bp, Homo sapiens
ctgccgagaggcccgcagtcgggccggtggcgcacgagccgggcgggcgaccgcgggaggcgtccgcgtcatctcgcgtcacctcgccccgcccgcttcccaggcttcgagtcccgccctgc

SEQ ID NO: 118711 - DNA, 122 bp, Homo sapiens
actgacttccacacactgccccttagctataaattaccactttgctatattcagcccaatcgctctgacttatggcaaaactctatccctacctctgtcagattgggcctgaataaagtttg

SEQ ID NO: 118712 - DNA, 122 bp, Homo sapiens
ggcctgaagaatgatgcattctgtccaaacgcggctgtgtcggtgctgccaattccaatccggtgactgcactgccagctcaggtccaatttggaagagaaccctgggagcaggcccagcgc

SEQ ID NO: 118713 - DNA, 122 bp, Homo sapiens
tttccagatgtggcccctccactgccaacgacaggggctgggaatacagggccacctcctcgacgctccccactgcccactgcagaagctgcaaatgcctcttgggaggaagatgagaaatc

SEQ ID NO: 118714 - DNA, 122 bp, Homo sapiens
cgctaggggatgcagtggctcaaaggaccgagcgggcggtgcaggttggaacccgcggggcggaccaatcgcggctcggccacagcctcgcccgctgattggtccctccaggccccgccccc

SEQ ID NO: 118715 - DNA, 122 bp, Homo sapiens
cattgaggaaaggcgaggagtgcgcccccttccggcgcccgccgtagcctggccactccgcgggggacgagctgcaggaaggggtacagcctgtgtcaaaacaccttgattcatgagtaatg

SEQ ID NO: 118716 - DNA, 122 bp, Homo sapiens
gaggatagagcagggaagacaggacaggagaaatccaagagggcttctcaggggaggaggcgtgtagtttggcttagatgcagaggctagacaggggcctgagcagatgagtaggggactgg

SEQ ID NO: 118717 - DNA, 122 bp, Homo sapiens
acgttttgggggaggtgcctgcaggacccaacatactcaatgagcttccagcgcaatgtccgatcgctcggggccgactgccaagggaaaggatggaaagaagtattcctcgctcaacctgt

SEQ ID NO: 118718 - DNA, 122 bp, Homo sapiens
tggggcggagaggggaggcccggggagactgactctattatataaacttgtaattggctccggttcctgcggctcgggcggcactgcaggacgtttccaaccagatgggttgtgaggccccg

SEQ ID NO: 118719 - DNA, 122 bp, Homo sapiens
cagcaagaagctccttaactctggcgtccctcggcgggaggaggagacggacctactacgcgccggagcctttgcttttgtagcttacaggattgtcttcagtattgttcctattttatgga

SEQ ID NO: 118720 - DNA, 122 bp, Homo sapiens
ggccagggcgggcccacgagcgagcaccgtcgggaacaaaccgggagaaagaggaagagccggcgccaaaggtatcccgcccaccgcggtccccccagaactcttcctgcgcttgcaagcgc

SEQ ID NO: 118721 - DNA, 122 bp, Homo sapiens
cgaggttccggatttcgcacggatcctgtggggcccggccacccttggccatgctcaatacgcctcacctgtctgccattccgcttaggttgtgatgaattagcgaggaaattccttacccg

SEQ ID NO: 118722 - DNA, 122 bp, Homo sapiens
caagatctgctggttttataagtgtttggtagttcctcctgtgttcattctgtctcctgccgccttgtgaagaaggtgcttgtttctccttctccttcttccaccatgattctaagtttctg

SEQ ID NO: 118723 - DNA, 122 bp, Homo sapiens
atcccagatggggcccagacagtggcaaaagagggaggaagagagggagaaagggagcagcggctgctactgcaaacagttccccttcgcagctctgcgctcagctcgcccatcagtgtgcc

SEQ ID NO: 118724 - DNA, 122 bp, Homo sapiens
cccacatctggaggcaacggggcacggccgcaggcgtggtctgggggtgcggcctgagggcggaccccctgaggccccgccccaccccaaccccaaccgggcgtcccccagccgcgccccca

SEQ ID NO: 118725 - DNA, 122 bp, Homo sapiens
tacgttctcctttggcagcgctgatttacagaacgtgtccatcattgcagaaagttctaccggacagtgctgctctggagccgtcttcctccacttcttgcatcacttttgacactgataga

SEQ ID NO: 118726 - DNA, 122 bp, Homo sapiens
cagtccctgggtggggggggggtgcccgcctttctcctgcggacagcccctagttccgcgcgcgcccgcacccctgcgggtgtcctcactggcccggacggtcctcctgagcggagcgccca

SEQ ID NO: 118727 - DNA, 122 bp, Homo sapiens
ccatcctggaggcttcctggtcctggggtgaaggggtgacttctttaccctaatggtcttcgtaggcaggtctcaggatgtccactccaaagttcgtggtcttttttctagagaataataat

SEQ ID NO: 118728 - DNA, 122 bp, Homo sapiens
agtgacgtcggagtgtcaacatgcaagatggcggcccatcaccggcagaacacagcagggcggaggaaagtgcaggtatggaagcccggttcctcggtcttccggacgcggccggcagctcc

SEQ ID NO: 118729 - DNA, 122 bp, Homo sapiens
tcagttcttcaaccaggtcttccaccgccagcctggcagccagcatcaagggtgtggtcccgtcctctgtgcgagcgtccactgcagtttgtctgctacggagcagaagctggggagacaga

SEQ ID NO: 118730 - DNA, 122 bp, Homo sapiens
gaacccaagccattggttgccgggcaccgccccattcgtctattgggccaaagaagatgccgttcggtcacctagaatggcatatgtggtttttattggtctaaatgtgaagcagtgcccgc

SEQ ID NO: 118731 - DNA, 122 bp, Homo sapiens
gcgcgcagctggcggcggctgcaggcgctgaacacgcgcggaaacgggtgcctaccggcacggggagggcattgggcatggagggacagtcccccaacccccgcgcttctctgatccccacc

SEQ ID NO: 118732 - DNA, 122 bp, Homo sapiens
gccaggagtgtgcagctgggagtggagggcttcccaggggaggctcccccagcccgtctgcgtgggccctgggcacgcctcccaactggatctccccaagccactgccagctgaccctcttc

SEQ ID NO: 118733 - DNA, 122 bp, Homo sapiens
agcccaaggagcgctccactcgctgccgccggaggggccggtgacctcttggctaccccgcgtcggaggcttagatggctcaggcgaagatcaacgctaaagccaacgaggggcgcttctgc

SEQ ID NO: 118734 - DNA, 122 bp, Homo sapiens
caatgcctatgttccctctgtgaaaaactagtggattataactgacccttcttaagcctgcgaggtggttgtggtggggtcaggatctatctaaggagctttggaaagttttgccctaaaag

SEQ ID NO: 118735 - DNA, 122 bp, Homo sapiens
gctcctcggagggcggactccactggggagatacggagcgcgccgccgagggtcgctcgccgccacccctccagcgtgtctcagattgggaaggggaggtaaaaattgacagcctagcgccg

SEQ ID NO: 118736 - DNA, 122 bp, Homo sapiens
ctgactgaggttggcatttgctatctgattggctgatggccgtctacccaatcagaaagtcgtactagaatcgcctcatttgcattcacgccacttcccattgtccaatcagattttggata

SEQ ID NO: 118737 - DNA, 122 bp, Homo sapiens
gacggagttttgccatgttgcccaggctggtctccaactcctgagctcaagcaacctgcccgactctgcctcccaaagtgctaggattagacgccccaggagtttgcatttctaacaagttc

SEQ ID NO: 118738 - DNA, 122 bp, Homo sapiens
ctgtcgtttaagactcactctgtgtcttcagatggagctggaggaggggaaggcaggcagcggactccgccaatattatctgtccaagattgaagaactccaggtgaggacggactccagag

SEQ ID NO: 118739 - DNA, 122 bp, Homo sapiens
aggcttctaggctcaaatacagactcacaagaagtccccaggcttctttttgatcaaattcgatatgcttgtcaggtttcagggacgtcactaggggcagatgtggtggtgaaaaaaggaaa

SEQ ID NO: 118740 - DNA, 122 bp, Homo sapiens
gccgctggggtgagtcagggcgaacgccagggcggaggcggatggtgattagccaaattacggctgttattgttgggatgattatgctacctttacatagtagtcactgctttattaccagg

SEQ ID NO: 118741 - DNA, 122 bp, Homo sapiens
cttcgtgcggcagcagcacaccgggagtcccactccctttcctgctgcgtttggatctgccgtgacaaggactatcagaaccactcacagtaaggtcgggtcgcgtttctaaatccactgtt

SEQ ID NO: 118742 - DNA, 122 bp, Homo sapiens
gtctgagatcatacatcccagaagtggtgaagtcaagtttgaaacccaagcactctggctcgggatactgcttctctccccttagcgcatattactggcattagttgaagacttctttaatc

SEQ ID NO: 118743 - DNA, 122 bp, Homo sapiens
tctgtgccctctggtggctcattgtcctcagagcccagacagttccagccactaggaggccgtcttggaaccagcaagtcgcatttgccacttgacactgtccatggggttttattagtagc

SEQ ID NO: 118744 - DNA, 122 bp, Homo sapiens
ctagggtgacgggctttggggagtggaaagcgccggatcctgggagccagtcgccctactcgatcaagcattttctgacggccctatccaataacgtggggacgcagctgaaaaccatgcaa

SEQ ID NO: 118745 - DNA, 122 bp, Homo sapiens
aagtgctgagattacaggcgtgagccactgcgcccggtcaagactcccaaatttcaaactcgccagcacctcctccacctgggggagaagagcataataacgtcatttcctgccctgaaagc

SEQ ID NO: 118746 - DNA, 122 bp, Homo sapiens
gaggaagactgagagcaggtctgacatcttgctgggctttttcaaagagagccactgaaacgcgccccacctccttaaacaacctagcctcttcacccgccaaaatccaaggtccacctagc

SEQ ID NO: 118747 - DNA, 122 bp, Homo sapiens
gctcgtataatctttacaacccagtgtgcaaaacactggaggagagatggagaggccgggcgtgtaaaccaagcatgtgtcagtgcagatgtgtccaccacaaggagagagagaggcgggct

SEQ ID NO: 118748 - DNA, 122 bp, Homo sapiens
gctcagtccaccccacgtcaagcttatgaagcccatttcctggcccccttctaggaatgtcgggaggagggtgtcgcgtgggctttgaagtaggacagacctgggtttgggtttctgttctg

SEQ ID NO: 118749 - DNA, 122 bp, Homo sapiens
gctgcagccagaacaggtggctgagctgtggggccggggtgaccggatcgaatctctcagcgaccaggtgctgctgctggaggagaggctaggtgcctgtgagtcctcacactcctcccgcc

SEQ ID NO: 118750 - DNA, 122 bp, Homo sapiens
caggggtcaggagtggtaccaggaaacctcttctggccccgagagagcacttgggggacacggtatgtttaatggaggggaggctgagggaaaggctcgtagctggtgggttccgtggggcc

SEQ ID NO: 118751 - DNA, 122 bp, Homo sapiens
tgtcctattttttcagtgacaccaggtattgttggcatttgcttaccctaggaagaggtccgaggcacagtcctctgtgctcccaagcaccctaggagtccctgatctctgctctggagtcc

SEQ ID NO: 118752 - DNA, 122 bp, Homo sapiens
ccgaagcaggtgctcatagggcgagatggggtgtgggtggtgctcgggcacggtgctgtgcggggacttggcgatctcacgaggcgtcgacgtcagctttcggtcctgggatgccttgctgg

SEQ ID NO: 118753 - DNA, 122 bp, Homo sapiens
gccggaccccatgtgtgtcttcacctacgtccagtcgctgtacaaccacctgcgtcgcttcgagtaaagcccctgagcctggattgccaaagagcagccccaggaagaggccgggggtccgc

SEQ ID NO: 118754 - DNA, 122 bp, Homo sapiens
ctcagctcagccttcttgttccccaggcctctgggaagatggacgagaatgagttcgtcgcggtgaccagtacaaatgctgccaaaatcttcaatttttacccaaggaaggggcgagtggct

SEQ ID NO: 118755 - DNA, 122 bp, Homo sapiens
cagggcggagctcctgctctaattctctaacgtcccagggctatggacgggctcccttggcggccagttttgttgcgcgtagggaggcgttaggcgtgaaggtcttgagagggggtggagtc

SEQ ID NO: 118756 - DNA, 122 bp, Homo sapiens
gctcctgctccaccgcccagcccatgcgctccggcgccatggccgctgcctccagaccgccgcccgtcagcgacccgtcagccatttcaaatttccgcggacggcagcccaggcaacgacgt

SEQ ID NO: 118757 - DNA, 122 bp, Homo sapiens
ttccacggggactgggagatgactcctccacagggaggaccgccggcccccggggagcagcgccctgaggaaggcagagcatgtgggtgtgtacaagggaattcaagggcaaaccccgcgac

SEQ ID NO: 118758 - DNA, 122 bp, Homo sapiens
tcactgggaattgagtgtggtccctgctctctgaaggcgacaggtctacccagggtgggccggtctgtggggggacagagggatgcatgggggccacggagaaccagaggagacactctgtg

SEQ ID NO: 118759 - DNA, 122 bp, Homo sapiens
ccacccccgcaggcgccttcctggagcacgtccacaggccatgtgcagctgcatcccccacgacggcagggacaagttccttccatagggcccgggtggcccccagagctgcaccatttatg

SEQ ID NO: 118760 - DNA, 122 bp, Homo sapiens
agctgtcgccgcgtcctgagacaggcgtcaagacctggaactgcgcagccagggtcagggcgaacaccagcagggtgagagccagcgaggtccacgcgtaatgccgggcgtacagcttggtg

SEQ ID NO: 118761 - DNA, 122 bp, Homo sapiens
gccgtctagagcccctccgtctccgtcacctctcgccccttcactccgggcgaggactggcggtggctgcccagaggtgcccagccacaccttccttcggcccaaaaggactttcctggccg

SEQ ID NO: 118762 - DNA, 122 bp, Homo sapiens
ctacagagcagtacagaggctctcgctgaaaccagtcccaggctccacagagtcagatcacggcttcacaccagtcgttctggtcacttaggcgttcgcgtgagcgctcaaccccttaccgc

SEQ ID NO: 118763 - DNA, 122 bp, Homo sapiens
ggcgtgcgtttcccgggccacagacacaccttcccgcaccttcctgcactacggagcttgcgaacgcgagcacacaatgaaatcgcacagagcatgggggctattggtttactctgctgcct

SEQ ID NO: 118764 - DNA, 122 bp, Homo sapiens
ccctgtgcgccacaaagcggtttctggcatggcggcccgtctttggtgagcctctttctgcgtctctgcctgggtcaggaggccggttgtgaatggttttcgccggcccggatccgctttgt

SEQ ID NO: 118765 - DNA, 122 bp, Homo sapiens
gctggacatccaggggcagcgcgtggggacagtgccccgggcgctgggatggaacactcacggccgtgatactctgatgacccatccgtgtccctgtgaacggccgcattggggtgaaactg

SEQ ID NO: 118766 - DNA, 122 bp, Homo sapiens
catactccctggaggccaattacacttggaatcctcctgatctgccctgatcagggagtgcggcttcccctcacagtctattgtgctagctctgagccacctgatctgcctggtcctaccca

SEQ ID NO: 118767 - DNA, 122 bp, Homo sapiens
ggagatgatgggagcccaggaaatgtggtcagaaaaaggcccctggaggggtcctggaagcgtccttagctggtcctgggggactgggcggggaagggagcgcagaaggaagcaggtgggct

SEQ ID NO: 118768 - DNA, 122 bp, Homo sapiens
gctatccaaatttgagtctgacattttcagcaacacccctgtcttgtccactcagtgatacgatttttaaaaattaggccgggcgcgatggctcatgcctgtaatcccagcactttgggagg

SEQ ID NO: 118769 - DNA, 122 bp, Homo sapiens
aagcgaggagggctccccgcgggagaatccccgagaggcagagggcgagctccccgagagcggtggccccgcagccccccctgacgccgagctgtcacctcgctggagcagcagtgcagcgg

SEQ ID NO: 118770 - DNA, 122 bp, Homo sapiens
tttggtagacacagagtctcactattttgcgctgattggtctccaactcctggcctcaagcgatcctcctgcctaggcttcccaaattgctgggattacaggcatgagccataatgcctggc

SEQ ID NO: 118771 - DNA, 122 bp, Homo sapiens
gcgggggcgggggttggggtttcggggtctctgactgtctccgtgtctctcacggtctctcgccggctccgactgcccccgccccgcgcctccgcccgcccctccgcggagcccgccgctcg

SEQ ID NO: 118772 - DNA, 122 bp, Homo sapiens
cccgcagaagtgacagggagagggggaaagctcttttacagtggcgaaaccacgtggctgcgagagcttctcagggagagctcctgttttcaaagtctggcaaatttatcagtttgattttt

SEQ ID NO: 118773 - DNA, 122 bp, Homo sapiens
ccccatagtcaaactctgtggtcgtgtcatagtcctctgtggtgtttggagtttccatcccggcttctcctacaggttaaaaaaaaaaaaaagatttgtctttactctgctactaaaggcag

SEQ ID NO: 118774 - DNA, 122 bp, Homo sapiens
acctgctcatggacatgcacgcaaacgtgcaccgcgtggggtacccgtgtacattccacacgcagtgtgtgacacacgtctgaacaagcacacaaacgcacgtgaagatgcacccactacac

SEQ ID NO: 118775 - DNA, 122 bp, Homo sapiens
cagcactccccgtccaccttcacattgctcacagggagtgtacaccaacccagcactccccgtccaccttcacgtgcctcacagggtgcgtaaaccaatgcagcactccccgtccaccttca

SEQ ID NO: 118776 - DNA, 122 bp, Homo sapiens
ttcattgaaataaacgacaagtcacattgccacttacctttgaaactttattttcctcttcgttcatgaaactgctctcatcatttttatattgttccagggaaggagcaataactgatttt

SEQ ID NO: 118777 - DNA, 122 bp, Homo sapiens
tttatatgcaatacaatcccttaacccttaagcctcacaacaacattctaaggtaggtatcgttgcattttcattttgtaccagagaaaactagggcactgtgaggataagtaacttcccca

SEQ ID NO: 118778 - DNA, 122 bp, Homo sapiens
tgaggatccaactctcagcgcccgcctctctcccacctgctccctgtctgtgcacgccatcggctctgcctcctgctgctgtcagccgcagcccgcctcttgctttcagtcagttcctgtct

SEQ ID NO: 118779 - DNA, 122 bp, Homo sapiens
gtctaaagaggtaatttctgagatccaatcaaaacaaataataccaattatcagactgcacggtggggaaaagcaggtcaggtgggaaagtaagcacgtagaaaggaaacacgccactacta

SEQ ID NO: 118780 - DNA, 122 bp, Homo sapiens
tttccgtaggggggaagacggcgtatctctggccctttaaataggggcgtggtgaagaggcgcggaccgcccaggagggggagcagtgcgaggaggaaagcggaagcgctgcccgcagtggt

SEQ ID NO: 118781 - DNA, 122 bp, Homo sapiens
acgcttctcaatgctgatctagagaactgactgtccagcacccgcacggtgtctggaacgcgtctcaatgccgatccggagaactgactgtcgttgtttaggttcaactgagatttcacctc

SEQ ID NO: 118782 - DNA, 122 bp, Homo sapiens
cccactgagtcaggtatacttcgaatctggttcttagagagatccatcacatccaggtgccgtaggctacaaagttggggaggtaatgctcccagttggttcccagagaggctcagggtctt

SEQ ID NO: 118783 - DNA, 122 bp, Homo sapiens
gagcgatttgtctggttaattccgataacgaacgagactctggcatgctaactagttacgcgacccccgagcgggtctgcgcctgccacctgtgcgggggccggcaggaccccgacaagcag

SEQ ID NO: 118784 - DNA, 122 bp, Homo sapiens
acggcccgccgccctccgcccacccgcaggggcccgacccggcccggcagcccccatccccgcctgcagagccgaggcccagcccggggaccgccccgtcattcctcctcggagggacgcac

SEQ ID NO: 118785 - DNA, 122 bp, Homo sapiens
ggggctgagtggtaggcggtgctgctgtgctctgatgaagacccatgtggctagcaacagcgcttaccttttgtctctgggtcctggcctggggccatcaatccactttgggccactcactg

SEQ ID NO: 118786 - DNA, 122 bp, Homo sapiens
gcttgacgggcggtggttcccccgagacagaaacttgactgaaaaataataccaaatacccgtgctgcggcccgtggccctccatagggccacctgaactagcctcgcctgtccccttgctc

SEQ ID NO: 118787 - DNA, 122 bp, Homo sapiens
cgtcaggcacgacggtcccagaggctgggccttctgagccacatggtcctaaggcctcctcggaatccagcaccttctcagagcttacgcccgaaacccggcccccagggcacatggggctc

SEQ ID NO: 118788 - DNA, 122 bp, Homo sapiens
cacacacacccggtttctcgccaggctactatgcagaggatgttaggaaggggaagagagcgatttcagaatcgaggctcgccctgcaagtctttggtccaggccttaacccccctcttaac

SEQ ID NO: 118789 - DNA, 122 bp, Homo sapiens
cattcatcccccttcgttcacacctgtagcaaccgacagcaacatgggagccctctgtatcgtggcctgccgcaaagcagatactcctccggactctgggcttgttgccgttgttggctgca

SEQ ID NO: 118790 - DNA, 122 bp, Homo sapiens
tcttccagggttttacacataccaagatttatgaaacacctgtcagtgagaaacagaagtcggggaatacataactaagcttcacaaaaaacctcagccaataaagctgaaaaattggtata

SEQ ID NO: 118791 - DNA, 122 bp, Homo sapiens
gtacatcggtctggccgggctcgccactgacgtccagacagtgtaagtttcaagggtccccgcccacacccaggcctcttcttggaccatccaaccccggcgtcttgaccggccaaggtgtc

SEQ ID NO: 118792 - DNA, 122 bp, Homo sapiens
catgcagctgctgtgctcaagagggctttgaagtttcttttgagaatatgatcttctcttcgaacctgacaatgattttttttttctttttcctcagggtgaccagaggcaggtcattccca

SEQ ID NO: 118793 - DNA, 122 bp, Homo sapiens
gtgaccaccagggggaagcacagacctggtgctgctgtagacctggtcgctgggtgttcgcggcgggatttctccagccacagggtcctcccttccctcccggaaaacctctctgcgctgca

SEQ ID NO: 118794 - DNA, 122 bp, Homo sapiens
agaacttgccttatgcggctgcgtgggcatgccggaggtgagcatgcgcagtagcgggggcgggcacgcccgcggtgagttggctgcgccggagaggattctaaacagcaagctgggaaaat

SEQ ID NO: 118795 - DNA, 122 bp, Homo sapiens
cctgcttcggctctgcgtctggcggagacaattactcggatacgctccggctggccttcccgaggccccaggtcatttcagatctgggccccggtccttgggcagaagctgggccgagaaga

SEQ ID NO: 118796 - DNA, 122 bp, Homo sapiens
ggctctccaattgctgggccagagcgggacccttcctttccgcaccctcctgggtatctccggtcttcaggcctccttcggagagccctgctccgagcccattgggcttccaatcttggcct

SEQ ID NO: 118797 - DNA, 122 bp, Homo sapiens
cttagggactgggaagtggcgttttctccaaccagcagctcttgggaggttgtgggggggcgggggggggggggcggtgcgggggcaaacccgtggctggggcgcttttctggcagaaaggg

SEQ ID NO: 118798 - DNA, 122 bp, Homo sapiens
agtgatgtcacggcatgggcgcccgcccaccggaggagcgactggagttgatcggctgggcgctcaggtagcgaagataaatgtaatcttgtggcaggaaatcgacattctctgcactatct

SEQ ID NO: 118799 - DNA, 122 bp, Homo sapiens
ggaaggcgtgcacaaggctttgcgggcatttggggaaatgtagtccttttgtagcactaccgtgctgagcactacgactcccaggatgcaacgagcatttgcgcctgcgtacaaggctcaat

SEQ ID NO: 118800 - DNA, 122 bp, Homo sapiens
aatttttcaacaaatggttccatatttttattttgcactgggctcctcaaattatgtagccggtcctataaggaggggggaaactttgaagagagggcatggccttttcagtgtttggcagg

SEQ ID NO: 118801 - DNA, 122 bp, Homo sapiens
tttttaaatgcaggaagtattcctccagggcttttgtattttcttcctccaggctgcagccgcatttgcgagtgtgccaagctacgccactactgatttactgcgctgggaacagcactcca

SEQ ID NO: 118802 - DNA, 122 bp, Homo sapiens
agggcgtgtcctacgaagaggtagggcttggcaaggacccacggggcgtgtcctaggactcggtgagggcgtgacctcgggccaggggcggggagagaaccagagggcgaagtgggagggca

SEQ ID NO: 118803 - DNA, 122 bp, Homo sapiens
gcccctggctgggccccacctcccggagactcaggaagggcttggaatcggtgccagtttcgccggctgtgggccccacggcgatgatgaataacttgtttatctgctggagcttctcccac

SEQ ID NO: 118804 - DNA, 122 bp, Homo sapiens
gcttctaggtcgttaggcttgcgcacgcgctgcgggtcaatgtcttgcagcctggtgaagcgcgtggtgttgggatcccagtggtaaatgtaagagccgccaaacagctgggccacgaccac

SEQ ID NO: 118805 - DNA, 122 bp, Homo sapiens
gagacaggcggcagtgcacgggggcggggcccgtgccgttgtccggccccaccggctggccgcaagagcagaactcaggaaagaaaaaggaaagtaaattgaaggcttaagaaaaaggccaa

SEQ ID NO: 118806 - DNA, 122 bp, Homo sapiens
atctagctgctggtttttcaggaaaaatgatacttcaagtgcatactaaaacagaaccttcgactgcagagtagtgtcagcttgttctccgacggcttcaaatgagtggactttttttttta

SEQ ID NO: 118807 - DNA, 122 bp, Homo sapiens
tgtggagaggagccagaggccccagcggctgttctcccgcacctcgcctccacccctggccgctcctgcctggggccttgggaggagccgaaataacaataacaaacaacacagggcttagc

SEQ ID NO: 118808 - DNA, 122 bp, Homo sapiens
tttttgaacattcccgcagggggcccagggcttggggggcacagagttcagggtttccagcgagtggcgtgaccctgacggctggaaatcggctggcgggaacccaggagcccgacgggtgg

SEQ ID NO: 118809 - DNA, 122 bp, Homo sapiens
gtgggggcactgggcctccaagctctgcctcctgttctcagtgtgaggccctggacttcccggcacaggaagtttttccatgcacgcctcttcttgctcttcttgtagcaagaagacaacag

SEQ ID NO: 118810 - DNA, 122 bp, Homo sapiens
tagcggaggctgtagtggggctggtggtgcttccaactgcgggacaggaagtggccgtagcggcttgttggataaggtgaggagccggttcttgggaacagttgaatcctggggaggcctgg

SEQ ID NO: 118811 - DNA, 122 bp, Homo sapiens
tccctacaaggagatcagcgtgcacgtcttctaccgctgccagtgcaccacagtggagaccgtgcgggagctcactgagttcgccaagagcatccccagcttcagcagcctcttcctcaacg

SEQ ID NO: 118812 - DNA, 122 bp, Homo sapiens
tggatgtgtggagggcgtgtagtctctgaggtgcacaatattgttggtaggaggtgttggcgagtgtgtttgggaaatataattaagaaacaaaatatctaaacccaacaaacttctccaca

SEQ ID NO: 118813 - DNA, 122 bp, Homo sapiens
tcctgagtttgttccttctgacgttcggatgcattcggagtttcttccttctggtgggttcgtggtgtcgctggctcaggagtgaagctgcagaccttcgcggtgagtgttacagctcttaa

SEQ ID NO: 118814 - DNA, 122 bp, Homo sapiens
agctgaatgggcgttggctcggaggccgggccgtgagacctgaggaggaaccgttctctgcgcctggggcctccctgcccaggtggagacagagacctggtaccttcccctgccgtcgctgg

SEQ ID NO: 118815 - DNA, 122 bp, Homo sapiens
ttttacataaattatgacatatccattcaatagaacactatgaaactgttaaaaagaatgcggttaatctatgtgctggaacagaaacatgcacaaattttattaattgaaaaaaaggcaag

SEQ ID NO: 118816 - DNA, 122 bp, Homo sapiens
ctttgttctgcattcagcagctatttatcgagtacctactctgtcaggcactgtcataggcgtggggcaaagcaggaaccaagagacgaggttccctgatctcatgggacttaggttctggt

SEQ ID NO: 118817 - DNA, 122 bp, Homo sapiens
cccaggtcatcccgccctgatccccgcaggcgagtgtcggtggcctttcggcttgagtgccgcttggcaccgaaatcaagagttcacaactgaacttttagaatctccaactctaaaaatac

SEQ ID NO: 118818 - DNA, 122 bp, Homo sapiens
agggagtgttgccaacaaaatttacactccgtgtcatcagcgagagataacagcagctgacgcggccgatcgcctcccctgccatctgctcagtgcgggggccgcccgaggggcgagggccg

SEQ ID NO: 118819 - DNA, 122 bp, Homo sapiens
gggcgctgggggccctcggtctgcgcccagccgccgccggctccagcgaacctcctaccccgcccccactcacccggctcagcccctaggagagacgcgcaggaagcgtgttgcttcgccca

SEQ ID NO: 118820 - DNA, 122 bp, Homo sapiens
tggaaggggaaggtcgctgggggctccaccttggggtgccaaagggcaggtgccatcagccggaggagggagcaggagccccatcacgggggtcccccaagtgggggcttggccctcccctc

SEQ ID NO: 118821 - DNA, 122 bp, Homo sapiens
cccctccctatacactgctcctgtacattcccacctggccgccattgtggcagccaagaccgagggcctggtggggaacccaaaaaattatccttgttgcatctgggcactggaccgtgtta

SEQ ID NO: 118822 - DNA, 122 bp, Homo sapiens
gccagcggcaggagggaggccaggaggctgcagcacctgccagacagggccggaagaagccggctgggaagtctctggcctctgaagctccatctcagcccagcctcaacggaggcagccca

SEQ ID NO: 118823 - DNA, 122 bp, Homo sapiens
gattctctccggctttcaggacgtcctgaggctgcacccacgtggcaatggtgtctgtcgcgctgtcgcctggatccggcaccactagcggagccgagcagagcccagggctccaacgcgta

SEQ ID NO: 118824 - DNA, 122 bp, Homo sapiens
gccggttgttaggaggtgaaatgtggatcacagcgcctggggaggcccaccttggctgcccgccctggagcgacctgaagggagggattcgagctgggagtggggctgccgcgggtcggacg

SEQ ID NO: 118825 - DNA, 122 bp, Homo sapiens
gcctgcgaggcctcggctcgggccgctcccggaacctgcacttcaggggtcctggtccgccgcccccagcaggagcaaaacaagagcacgcgcacctgccggcccgcccgcccccttggtgc

SEQ ID NO: 118826 - DNA, 122 bp, Homo sapiens
cccgcccccgagcgaggggccggggtggcagaaaggccggcagttaagcttgctccccgccgcccccctcgggctagcctcccccggccccctgcgctcctcgcgctgccggccgggggaga

SEQ ID NO: 118827 - DNA, 122 bp, Homo sapiens
aattctcctatggttctggagctcagaagtctgaatggtctttcgaggctaacatcactgcgctgtcagagctgtgtttctttgggaggctcttggagagaacctgtctcctcctcaccttt

SEQ ID NO: 118828 - DNA, 122 bp, Homo sapiens
ccctgagctcccaaccagctgaccctccagggctgcagccatgtgtgacctccaccctcgcgaaggccagcggccgcagggtctggcttgggctatagcatctaggctctgagatgactgtg

SEQ ID NO: 118829 - DNA, 122 bp, Homo sapiens
tgctgaaattgtgaagcctcaacttcttcatgtgcaagagaaattaatgtactgtaatctcgatgtctgtgttgaggaccctccttgtaaattcaagtctctggcctctgccctttgaatgg

SEQ ID NO: 118830 - DNA, 122 bp, Homo sapiens
ccccctccgacttgatgatggattctttccgcggagggaggctgggcttctcctccatgtcggggtctgagatctcctcgtagcctgctgacgcagacatgtctgaagatgccttcctcagg

SEQ ID NO: 118831 - DNA, 122 bp, Homo sapiens
ggggccacccatgcttagatctcagagccaggcaagagccaggtcccgggggtccaggagcgcgctcggggctcctcctcgcccgcgccccccgcgcccctcgcgccccccgcgccccccgc

SEQ ID NO: 118832 - DNA, 122 bp, Homo sapiens
aggcggaccaccccggagcgctgtgcagaccctcaccaccccactgcgcagacgagaaaccgcctgggagctggcaggcgatctgcccagcgccacatggactgaacccacgctcttgcccc

SEQ ID NO: 118833 - DNA, 122 bp, Homo sapiens
ccagtctctgccctcaccaatcaccccagggtgactgggcaggtgaatcctggggatccccgctcctttactgggccctcatctcctgccaccccaagcttgacctcccagggctttttggg

SEQ ID NO: 118834 - DNA, 122 bp, Homo sapiens
tggagcctggccagcctccggaagcaagaagagaagtaaaacctgctcaccctactccctcggaccctgggcttgggagatgggataactagtgccagcccaggatgttagttaggactaac

SEQ ID NO: 118835 - DNA, 122 bp, Homo sapiens
ctccacagacagttctggttcagtgtaggagcactagtgtgggctcaggaatgctcctgacgtttcctgagttcccagcactgtcctaggccacaggtaagaaaggcccaggctgtatgctg

SEQ ID NO: 118836 - DNA, 122 bp, Homo sapiens
agacatcacagatagccaataaatgaagtcaggtatgatatgcatggtttaggctttcctcggtggttaaacaggccttttggaggcctagggttagcttgaatgtcagtccacattgcatg

SEQ ID NO: 118837 - DNA, 122 bp, Homo sapiens
tctcaccctggaggagtgaaggtgggcgcccggcgggggggtgtggctgcaccccagcaccgggagggggcacgcacgacaccagaggaagggacagccccacccatgtcaacagcaggcaa

SEQ ID NO: 118838 - DNA, 122 bp, Homo sapiens
cgctgtcgagtgattgttcttgagaagcttccagtagaggcaatggtgactattttaatgcgagcgatcaactccctgggaatccacgtcctagactctagccgtcccactgaccctctgag

SEQ ID NO: 118839 - DNA, 122 bp, Homo sapiens
ctctgacactgaccacccacaagcataaacagcaatcaaggacacctcctaggtgctggccgtcaccccaggtgctttgctggggcatttctgaacactcccattttaaaaaggctaaaact

SEQ ID NO: 118840 - DNA, 122 bp, Homo sapiens
cgactccaaagagagcgtcccagcttctttgaaagagggcaggtatgaacggaagtgctacggacacccagagtgtttctgactggcctgctgtcaggaggattaaccgaacgtcattcact

SEQ ID NO: 118841 - DNA, 122 bp, Homo sapiens
gaaggcaggtttgctgttttaacccagatagaggggtttctactcttatttctaggaacacgacgacactggttgtgggagggagagagaagggatctttggtttctcctaattctagaatc

SEQ ID NO: 118842 - DNA, 122 bp, Homo sapiens
cttaggtcgtccgcgccatctttgttgagggcgattgccaggcctggaggggcggggcggcgcctgtggctggaaccctgggctaggcctttagggaagcgggacccccaccctcagcccca

SEQ ID NO: 118843 - DNA, 122 bp, Homo sapiens
caggttgtgagaggtgcccgggtcggcttgtggggcacaggttgtgagaggtgcccgggacggcttgtggggcacaggttgtgagacgtgcccgggacggcttgtggggcacaggctgtgag

SEQ ID NO: 118844 - DNA, 122 bp, Homo sapiens
aggggtcagggagttccctttctgagtcaaagaaaggggtgaccgacgcacctggaaaatcgggtcactcccacccgaatactgcactttgcctaccggcttaaaaaacggcgcaccacgag

SEQ ID NO: 118845 - DNA, 122 bp, Homo sapiens
gcgccatggcaccgtggggcaagcggctggctggcgtgcgcggggtgctgcttgacatctcgggcgtgctgtacgacagcggcgcgggcggcggcacggccatcgccggctcggtggaggcg

SEQ ID NO: 118846 - DNA, 122 bp, Homo sapiens
gcagctcaaatggcacagggggtactgagaccctggaaccaagatccctccctccttgcccggaggctcaggaaggagggaaaaggcctttgggattctcccactgaactgtctgagccagg

SEQ ID NO: 118847 - DNA, 122 bp, Homo sapiens
gggagtcttcatatctgaagcagactaaacgctcctgccttctctcttgacactccaacccgtgtccgaaacctcccgggttcacaccattctcctgcttcagcctcccaagtagctgggac

SEQ ID NO: 118848 - DNA, 122 bp, Homo sapiens
ttttacttaatcttctcaacatctctgaggaggctactatcattattgagcctatggccccgttgaggaaattggttcagaaaagggtgcgagataaaaacaggcaagggcttcaatccaga

SEQ ID NO: 118849 - DNA, 122 bp, Homo sapiens
gcctagagaggtcatgcgagagacctcagcatgggagtgtgtgttgggctgcctggagcccgggtggctggtggccaccagggagctccactgccttagaaggatctgaggctggcagaggg

SEQ ID NO: 118850 - DNA, 122 bp, Homo sapiens
agggagcgtttgggagtggccccacccaaaggttgggcgacggagggggatggggaaatccgccgcctagaattgactggtttggactaaatgttgcaagcggggaaccttgagctacctac

SEQ ID NO: 118851 - DNA, 122 bp, Homo sapiens
tccggaaccccagcctcgaagcttccggtggccgggaacaaagccggttttgctcactgtcgcctggcaaagcaggcgcttgttagcacccactgaatgcgcttatgtgctcagaaacggtc

SEQ ID NO: 118852 - DNA, 122 bp, Homo sapiens
tcggtcagttaccaaagattctcacgacgcctttggtcaagtattagaacatcaactccacgagaataggccttggttttagtcattggatcttctgtgtttacagtactacttggcacagg

SEQ ID NO: 118853 - DNA, 122 bp, Homo sapiens
gaccccgcactggcgagccgtccctcccggcgctggacgccccacctgtcccggcgccgtcggaagagccctgcagagtgagcccctagggccaccccgctgccttcctccccgtccccgca

SEQ ID NO: 118854 - DNA, 122 bp, Homo sapiens
aggatgtccttctggctgttccagtactcagcgtcaggccgccccagctccgtcaccgcccggaactcccccacgtcgctgtcgaagcgcacggactcctcctggttatagaagtatctgtc

SEQ ID NO: 118855 - DNA, 122 bp, Homo sapiens
agtattttaccttttgatccccatcagttaagatgttacttactctacgtgtgtgtcactcgatgaccactgtgaagacagtaaaatgtacagtggttctcttgtggctcaagcgtaatgta

SEQ ID NO: 118856 - DNA, 122 bp, Homo sapiens
ggaagaagggccgggctgggccggggccgggggcgagggcgcggggaactgttgggcctacgcagcgccggcgcccttcattcctgtgggcccctgctgtggcgggcacatttctcattccc

SEQ ID NO: 118857 - DNA, 122 bp, Homo sapiens
tctgttcccccaaataaaactgactatgaaagtttttacaattgtcatccaaaacatcaccgctttctttagtgcttgctttattcctgtttatgtcacttgtaattctccccctctcctgc

SEQ ID NO: 118858 - DNA, 122 bp, Homo sapiens
ctgcccccggcttcccgcccctgcggctcctggcttaggtcggcctggacacggcgtttccggggcaagggaatgcccaggattcctggaaataacatgggagaaaaataagtaaaaaattt

SEQ ID NO: 118859 - DNA, 122 bp, Homo sapiens
cagactggctggtgcggggccggccctgcccgtcaatgtactgcgtgagccggatgtaagcgatgcaggcggcatcctctccaatgacgtgcacgtgtgggttcaggatggtcgtgtggatc

SEQ ID NO: 118860 - DNA, 122 bp, Homo sapiens
catgtgtagcctcagcctcctgccttgcccctgagaggatctgtgttaaattgacaccagcgatgaacagtgtggctgagaggcagggatgggcaaggaggggcaggaagcaggggctggtc

SEQ ID NO: 118861 - DNA, 122 bp, Homo sapiens
cctctggaaagccattcagcaggcaaggtggattcagcaggcaaggtggtgtgagagcagcgggtggcgtgagactggcgggtggtgtgagattggcgggtggcttgaggatggcgagtggt

SEQ ID NO: 118862 - DNA, 122 bp, Homo sapiens
tgtgtgtctactttatgtgataggccctgaattcaggaactgcctcccttaagctggtaccgtttgtaccaggaaaacacttgttgaatgagtgagtgaatgaatgcagttccacaagtgct

SEQ ID NO: 118863 - DNA, 122 bp, Homo sapiens
tccggccgctgccgggcggatgggagctgcgcgaggagacgggcgcgcgtggagagggcgcgggagttggcattcggtggtcctggcagttagctgagcacgccctctgagccgctcggtgg

SEQ ID NO: 118864 - DNA, 122 bp, Homo sapiens
ttgttccatagtatgcatggaaagatttagctttatctgtaagaaatacaaagccaaactcgaaccttcttaaaaagctgtcaaaatcaggccgggcacggtggttcacgcctgtaatccta

SEQ ID NO: 118865 - DNA, 122 bp, Homo sapiens
ctcctagcccaaataattaatcttcttgtgttagccaaataaattccatttaaattagttcgttctaaaggagaagaagaggcagaaatggtggagaaggtgggaggaggaggagatgcaga

SEQ ID NO: 118866 - DNA, 122 bp, Homo sapiens
accactacctgtaaaatgagccaatgacacctacacccacggggctctcgcgaggtgtcacgtgaacgcacccagcgagccctggaaccaggcagagaatcgcggcagccccgggggcgggg

SEQ ID NO: 118867 - DNA, 122 bp, Homo sapiens
gtcgcggcgcggagggcgcccgagggtgtcccaggggccctgggaagcgttctgggctcccgcgtctctgcaccgttgcatctcaaagcgggaggacacagttccgcgcctatgcccaagtg

SEQ ID NO: 118868 - DNA, 122 bp, Homo sapiens
ctccgtggccccggctgaagtgcagtggcgcgatctctgctcactgtaacctccatctcccgggttcaagtgatcctggcgcgtcagcctcccgagtagctggaattacagacgcccgtcac

SEQ ID NO: 118869 - DNA, 122 bp, Homo sapiens
gcggtaacaaatccccagaaacacagtgatgctggcgtgaggatgaaggggagcgagggacgccagtgaggctggtctagccttcctggggacagatgccaagaagttgtaggaaatcagaa

SEQ ID NO: 118870 - DNA, 122 bp, Homo sapiens
cacctggtttgaaaagaagaaaaaagaaaggactcaagtggggagaagatggaagaacgccgatgagcttcacaccactctggatgatacgggacttgtttttgtttttctgttatcggagg

SEQ ID NO: 118871 - DNA, 122 bp, Homo sapiens
gagagggcacctgacgcaactggggaggtcaggggaggctttgtgggaaggtaccccaaacggcaaccccactcacatgcacaattccagagattctactagaaggctgtcaagagccatgc

SEQ ID NO: 118872 - DNA, 122 bp, Homo sapiens
ggtcactgggaggcccctcataatctacagcattaggcactggtttccagcagccctggccggcaccacaaattgcatgagtgctctggccggagccggcctctaccgcccaaaagattttg

SEQ ID NO: 118873 - DNA, 122 bp, Homo sapiens
ggcagagcttggccggacctggcgacccctgagcttctgggaaatggacatggccagcaccgccttcaggttcctgcccagggcacggttccttcaggccggggatcccggggaggggttct

SEQ ID NO: 118874 - DNA, 122 bp, Homo sapiens
accggcatggccagtcaggcctcggagacgctgcaggtacctggggtgcgcagggagacccgggctgtgggatagagaggaatgagcagcccctggggaccccctgggcatccccacttagc

SEQ ID NO: 118875 - DNA, 122 bp, Homo sapiens
aacattctcttcccccgcccctttccttgcagttagctctgtttcaatgactgtctttctcgtagtccatcaatagctaaagcactcaatgacttttccacatcaggtttggttggttcatc

SEQ ID NO: 118876 - DNA, 122 bp, Homo sapiens
gcccaggtgttcccctgcaagtactgcccggccaccttctacagctcgcccggccttacgcggcacatcaacaagtgccacccatccgaaaacagacaggtgatcctcctgcaggtgcccgt

SEQ ID NO: 118877 - DNA, 122 bp, Homo sapiens
attaaaaaaaacacttaaattagtgaataaccttggtgaaaagccacgtccatgcttctacggcatttctcttcaaagctaaaaaaaaaaagaaaaaatcaaaaatcaacccaaaggtgtag

SEQ ID NO: 118878 - DNA, 122 bp, Homo sapiens
ttccacccacatataatttagaactataaattccacaattccctgcggttaaggtagccgcgccaactacggacacccggtcgggtcaataagtacctgcgcggccaaagtgcctagcatgg

SEQ ID NO: 118879 - DNA, 122 bp, Homo sapiens
ttgtgagctggcttttcttttttctccatcagtgccaatttatttacatgtttcagataacgagccagtgttccccagtgttgagttggcagccacttactgttgtgattcaggactcctgg

SEQ ID NO: 118880 - DNA, 122 bp, Homo sapiens
aggcctcctgacggtcacacagacaggcctcctgatggtcacacagacaggcctgcatgacggtcacacagacaggcctcctgatggtcgaacagacaggcctcctgacagtcacacagaca

SEQ ID NO: 118881 - DNA, 122 bp, Homo sapiens
ggtaactgggctggacatagtggctcccatctataatcccagcattttgggaggccgaggcgggatgctcacttgagcccaggagttcacaataagcctgagcaacatagcaaaccctgtct

SEQ ID NO: 118882 - DNA, 122 bp, Homo sapiens
gaatggggcctgggcacagcgcaggtagtgtacaaagatctgtttttctccccacacattcgtctagtggaaacatgtcaggcctcctcctccaaggctgtgcatttattttaaagaatgtt

SEQ ID NO: 118883 - DNA, 122 bp, Homo sapiens
ttcgccttatccttagcgggtcggttctaacaattttgtcacccaaactgaaccactcaccgggtcaactgggctgcaagcccttatgagttggagacaagtggcccagccccaacacagtc

SEQ ID NO: 118884 - DNA, 122 bp, Homo sapiens
cccttggtcacacggagtgtggagccagctgtcagtttctgggcaggctctggccgggaacgcatacaacgtcaaagcagtgaataagcgatttctgcagttcccgtagctgccagcctgtg

SEQ ID NO: 118885 - DNA, 122 bp, Homo sapiens
aggaggaggcaggtaaggctcagggcacttcgggggtggacatggctctgggcactttggcgtggggcacacaggaggtggctggcagggctgcttgcactgctgctgctggtaagacatct

SEQ ID NO: 118886 - DNA, 122 bp, Homo sapiens
tctacagagaaaaaacctgaagtgtctaaacataaacaagatactaaatctgactcacctcggttaaaatcagaacgagctgaagccttaaagcagagacctgatgggcgatctgtttctga

SEQ ID NO: 118887 - DNA, 122 bp, Homo sapiens
ccggggatgcagaagcggagtgactcttccaattctccgtccgcactgcgtggcggttcccgtggctcttctgatcccccatccgcactgtgtggcggttcccgtggctcttccaatcctcc

SEQ ID NO: 118888 - DNA, 122 bp, Homo sapiens
gttctcccatgtgccaggcaggcagaaacctgggaagactaggctgggtgcagtggctcacgcctgtaatcccggcactttgggagactgaggcaggtggatcaggaggttgggagatctag

SEQ ID NO: 118889 - DNA, 122 bp, Homo sapiens
ggattccctcgagtgacacagagcttcagaacctgacataatttttcactttcatcatctcgagcaagatatgattcttaaaaacccattaatagaatcctgtggttataaaatatattgtt

SEQ ID NO: 118890 - DNA, 122 bp, Homo sapiens
caccctccaaccccacccccaccggcccccagggctgagcagagacctctgggacatggtcgcgcacacacagaacctgtcccagaaggcaggaccccgtccctgccccagcttccggctgg

SEQ ID NO: 118891 - DNA, 122 bp, Homo sapiens
cacattgagcagcagcacacattctatcttacccctcctttggttctttgggatctaaagcgtcatttttttcacctcattttagggagctggtttggattaaagtcacatacaaactgagc

SEQ ID NO: 118892 - DNA, 122 bp, Homo sapiens
ggaggctgaggcgagacgatcgcttgagccagggaggtcaaggctgcagtgagccaagctcgcgccactgcactccagcccgggcgacagagtgagaccctgtctcaaaaaaaaaaaaaaca

SEQ ID NO: 118893 - DNA, 122 bp, Homo sapiens
tagagctgaagactgcaggatgggtaagggaaacgatagttacaaagtgtgttccatgcccgggaagagcctgtttcagtggcccacctacaggagggatcagagcacatccatggagctga

SEQ ID NO: 118894 - DNA, 122 bp, Homo sapiens
gaccaggaggacctgggtcccaaatgaatcctgccaatgtttactatggagatgtcaattcggctcttggagtaaagaggaagagtcccttttacttgtctcctggggctgctgtgaggtta

SEQ ID NO: 118895 - DNA, 122 bp, Homo sapiens
cagggtcgggaaaccttacagctgtttgggattcacctatagtgtgtgtgtgccccagggcgtcggcgccggtaagaagggtggaagatggttggggaggggttggcatccatcacactcca

SEQ ID NO: 118896 - DNA, 122 bp, Homo sapiens
cccccaccacaaatgggtgtaccccctctccccccacatactcactggtgcacatatacacgccacaccacattctgtagtggggaaaggatcatgtgcagccttaagggctggtttgcgta

SEQ ID NO: 118897 - DNA, 122 bp, Homo sapiens
tctgctctggccagtgtcgctcctgggtgcactaagatggattcgttaggatcctaaggacgttcatggccttgtgtcacccacaccccaaaagatgaaaagatgtcttttccttcgctgca

SEQ ID NO: 118898 - DNA, 122 bp, Homo sapiens
atagccgttaaactttggtttgaatgaagaatgtctctcaatccacctatatttctcaaacgaagtgaagaaaatagttcaaaatttgtggaaacaaaacagtcacaaactacttccatagc

SEQ ID NO: 118899 - DNA, 122 bp, Homo sapiens
gctggacagtgggagcgtgaagcctgctcacaggatggtaatttcattggttccactcgccggtcacagtggcacgtgctggtcaatgactctccactcagtaggcattggaggctaagggc

SEQ ID NO: 118900 - DNA, 122 bp, Homo sapiens
gtgagccagggcttggcgcggcggccgtggttgcggcgcgggaagtttggatcctggttccgtccgctaggagtctgcgtgcgaggtgagtaccgcgcgcgtaactacgggtcggtccgcat

SEQ ID NO: 118901 - DNA, 122 bp, Homo sapiens
aggatctcaaactcccttcccactcccagtcactatctgaataggacttaggtggggattcgagtgttgggaccccaatggtcattagcgagggctgcctcgaatgaccaagaaggttctgt

SEQ ID NO: 118902 - DNA, 122 bp, Homo sapiens
gggagggacgtccgacggaggcgccatctttaacaagggctatttgggaggccatcttggcgcagggcgtctttttgaaaggttacctgctagagattacgacctatcggggcatgcataga

SEQ ID NO: 118903 - DNA, 122 bp, Homo sapiens
ggcggcccccgcgcccggccccgccaacgcacccgaggcgcacaggctccggagcccccgcggttcctgcctcccggcttcccggccagggcagaaggagatcccagggccgcggaccccgg

SEQ ID NO: 118904 - DNA, 122 bp, Homo sapiens
ccgcacgacccagccaggcctaacgccagcagcccttcccctccggtggcaaggccactccgctcagctcccgcgccgacgctacttccggccgagtcaaggcccctcccccttagaaacgc

SEQ ID NO: 118905 - DNA, 122 bp, Homo sapiens
gggcagtgaaggccagcgagcccttatgtatggtacagaggtaggctagaccgcggcgttcgattggatggctatggtagccaatcagaaaaagaacctggcactcctaatttgcgtattcc

SEQ ID NO: 118906 - DNA, 122 bp, Homo sapiens
catcaccatacagcacgaaaagaaatattgaaaacaaatcaacagcctcacacttggactcgccctgccccaggacccaggaagagccccaggagtgtgggtgattgtcaggtgtgggggtg

SEQ ID NO: 118907 - DNA, 122 bp, Homo sapiens
agctggtttctaaactggcggttcgactttactccccaccgcgatgcacgcacactcccccgtgtcctcacctgcacttggcaaggttggtctttgtaatttcagctgctccaataggtgca

SEQ ID NO: 118908 - DNA, 122 bp, Homo sapiens
gcgcacacaaccagacggtggggcgtgcgggagatcggagcggtgtccctgcgggggctccgcctggctcctggcgctccgcacctcccagccctcggcgtcccggcgcgccaccacccgga

SEQ ID NO: 118909 - DNA, 122 bp, Homo sapiens
tggaaggggcccttggtgagtgggagctgctatttttgctgcagctgctgctgctgttgtcgttgttggatcatcgaagcctgggacaatgcctggctcctactgggcaggcgcaggtattt

SEQ ID NO: 118910 - DNA, 122 bp, Homo sapiens
aacagcaatacgatctgagaaattggtacttcctgcaaacgaacagctccgagggctgcacggccccaaagcaagagtgactggaaatcctgctaaaatatggctgtctaatcaaccgagag

SEQ ID NO: 118911 - DNA, 122 bp, Homo sapiens
gtgcctgcccctcctctggcatccagggagcatgtcctggggctctggctgggacatagccggacacctgcgggccctttacgtctctaaagagagaaagagggaagggcccctgtctaggg

SEQ ID NO: 118912 - DNA, 122 bp, Homo sapiens
acctcctggccggcagagatgtggcgcccgcttggtgtccggcttgcagaacccagcagccgcctcggacgtcctgagctgccagcctctccagtcccagttagcagaggaagtcaataggg

SEQ ID NO: 118913 - DNA, 122 bp, Homo sapiens
cttagcaacaccgcgaaaggcgatgtaggcgtccacctggagtttagctgcctcaacctccgccccggcctgccgggtctctggggaccccgtcttcctccagcgggctctgggatgcggcc

SEQ ID NO: 118914 - DNA, 122 bp, Homo sapiens
cggttccgggacaacccacacttagtctaggagcccggagatccctcatccagctttccccggggcaaggggtgaagcgctaagcaaggctgatcactgtcctcaatcatcacccaacccgc

SEQ ID NO: 118915 - DNA, 122 bp, Homo sapiens
tccagatggtggtaagtgcactgcagcatgataaagcagttccaggagctcctgagttagcggaggtggggggctgtttcaggcagagctgtcctttcatgcatagctgtcctcacagctct

SEQ ID NO: 118916 - DNA, 122 bp, Homo sapiens
tgagggtgaagaccgaggtgggccgcctcggtggctgaggcggagctgtgagggtgaagacgaggtgggcggcctcggtggctgaggcggagctgtgagggtgaagacgaggtgggcggcct

SEQ ID NO: 118917 - DNA, 122 bp, Homo sapiens
tgccactgaagccatcaggagaatcctagaactggaactggaacccagagctcctggccacgggctctttcagcagcatcgccttctattcctgttgtcctccatagtggctgactggccca

SEQ ID NO: 118918 - DNA, 122 bp, Homo sapiens
taattgcttttaaatggcctgccagctgcgggcaagcttttccccgcttgggctttgttccgagactttagctgcagggctcacaggcaactaggtgcgatgcacacagaatacaggaggca

SEQ ID NO: 118919 - DNA, 122 bp, Homo sapiens
ccagtcccgcgtcctcacctccaacatctcccccgcgccctccgcctcctccgcgggcgccgtggaatccgggttcgtcacccaggcctggatcaggccgcagaacctgaaggtgggggagg

SEQ ID NO: 118920 - DNA, 122 bp, Homo sapiens
ggggcgggtgtctgccattgcccgctagcgttggcgccccaagctcggtttcactccctccggaagtgggaccagccggctgcttttcccggatggaacttccgcctgccatgtgaccggcg

SEQ ID NO: 118921 - DNA, 122 bp, Homo sapiens
tgtgtgcactgctcatgtgtgtgttacccgtgcgtgcactgtgcgtatgtgtgtgatacccgtgcgtactctgcgcatgtgtgatacccgtgcacacactgagtgtgtgttacctgtgcaca

SEQ ID NO: 118922 - DNA, 122 bp, Homo sapiens
gacggccgactccacatccctaagacggacagaggggcagccgtggggaggattcgaaaccggtacttaccaacgcgaggcgttgcctgaattttcctctgcgggtttcaggaagaccctcc

SEQ ID NO: 118923 - DNA, 122 bp, Homo sapiens
aaattgggtctgccctgtataggaatctgacatttcacctttccaaaaattagaccatttcgtttgcatcctttaagctgatgtgtggagtaatgaacacattccaagagggaaatcgtatt

SEQ ID NO: 118924 - DNA, 122 bp, Homo sapiens
cggtgcctgggccagccgaggggtggggtgattggagtccgatctggaccaatgggcagccggcgggacgggggcggcgacgacaaccgcggccgcaagaatcaacgccgcgccgggccaat

SEQ ID NO: 118925 - DNA, 122 bp, Homo sapiens
atatatatacacacacactatacttgcagccattaactgagccatcagttcataaactttcgacaaagaagcctgacaattgtcccccacttttcccagaatatcaaataattagtactgtt

SEQ ID NO: 118926 - DNA, 122 bp, Homo sapiens
agcccggctggcctccgcggccggcgtcccctgcctccaccctgtgcccgagggggtgtccggtcctgcccatccgatactctggtggaaatgtggctctttgcagcatgtacgtttctccc

SEQ ID NO: 118927 - DNA, 122 bp, Homo sapiens
tccgcggaggaaaacaatgcgaccgcccggggctctgggctcggccccagtggccccgcccgcctcccagccgggcccacctcctgcccgcctttgggtcgccgcgactaatcccgccctcg

SEQ ID NO: 118928 - DNA, 122 bp, Homo sapiens
ggtagatgctcatcttctcctggcggccgggctggtccttggcgggcaccaggacgcccgcgatgcagctggtgccctccaggtagcgcttgacgcggtcgtcctccatgagctcttgcgtc

SEQ ID NO: 118929 - DNA, 122 bp, Homo sapiens
actctggaccagaaatgtgggcagcagctgggtacctgcgacttctgccccgtacctgcgcgcgcggcagagaggccttaggtcacgcgccgccccgcctacctccccctccagctcctggc

SEQ ID NO: 118930 - DNA, 122 bp, Homo sapiens
ctgcatctgcctctgtgagacccgctggggtccatgagtgaggagtgagcatggcctcatcggccttcctgcggtctcattgcaggcccccttccacctgcccccccccccacccagtcacc

SEQ ID NO: 118931 - DNA, 122 bp, Homo sapiens
cttcattgctgaaataagagctgtcctgcaaacagagtttggcgctcgctttctggcctccggctggtggagcaaggacgtttccagcacataagattccccactctgttaaaaaaaaatgt

SEQ ID NO: 118932 - DNA, 122 bp, Homo sapiens
cacacagatgaattacatcatatccacaaagacgagtgaattacatcatatccacaaagacgagtgaattacgtcatatccacaagatgagtgaattacatcatatccacaaagacgagtga

SEQ ID NO: 118933 - DNA, 122 bp, Homo sapiens
cccaggacttcgcggcggcagtcctaacccgtgcactgagtcgggcggggcgggcggcagcgtctgagtagagagctctctagaccaggcctggtgtctcccgggctttcctaggtgcctgt

SEQ ID NO: 118934 - DNA, 122 bp, Homo sapiens
acagtgccgagcaggacgcgcagaagccagaatgtgtgggccggtattgtggccccaggccgagtggcctctccatgacacagatgtcagggtttaactcagacctgccaagtggagcctcc

SEQ ID NO: 118935 - DNA, 122 bp, Homo sapiens
acagacttcacaaaatgactggattgccccagcaatatcagaaataaactagtttgtggccgggtgtgatggctcacacctgtaatcccagcactttgggaggccaaggcaggcagatcact

SEQ ID NO: 118936 - DNA, 122 bp, Homo sapiens
caccatgctgtgcagtagaatatcagaacttactcctcccagctgaagctttgtacccatcgaccagcatctcccctttcctcattcatgaccccccaccctctccccagcctctggtaaac

SEQ ID NO: 118937 - DNA, 122 bp, Homo sapiens
gaggaaactcggcccagatctagcggctgagtcctatgaggcccactaccctgtggaggccgcacgtggcgagcggtgtagctctctcgcgggtcaaggcagatgaaacagggaggccggga

SEQ ID NO: 118938 - DNA, 122 bp, Homo sapiens
gatgtgctggccgcgcaggtagtccagagccagtgccatctcgcagatgtacagcctcaccgtgtcctcggagaactgcacgttctgctgcaggtggtagcgcaggtccccgcccagtagca

SEQ ID NO: 118939 - DNA, 122 bp, Homo sapiens
aagttcaaagccctactctgcctgatccttttttcctgagcctcagagctaaaatgcccccgagctctttcctattggctggaaagacgaattgaagttcccttgcccatgttaggaggtgt

SEQ ID NO: 118940 - DNA, 122 bp, Homo sapiens
agctcccaggcccgtcctgcatgcgccttggggttgttcctccttgatggacgccgcctccgggttccatcccaagtttaaatgccagagatttcaatggaaataaagcccccatcttaaca

SEQ ID NO: 118941 - DNA, 122 bp, Homo sapiens
ttgttttttttgtggctgtggacatctttcaacactgccttcttggccttgcaaagccttcgctttggcttcggctttaggaggggcaggagcttccttcttcgttcttggcaccatcttat

SEQ ID NO: 118942 - DNA, 122 bp, Homo sapiens
gcgggcgtgcgaatcccaggcttgtcagaggggggcgctggaggctggggtcgctgggcccgcctcgggctggcagacgtccagactcacccagggtgagggcgccaggcttagggtagaac

SEQ ID NO: 118943 - DNA, 122 bp, Homo sapiens
ccgtggggtccgtagtcctttctttcttttgttaaaaattaaactgaggtttggttaaaacgttaaagattttatctgagcaaataacgacccgtgaatcaggaagccacaaccatggattg

SEQ ID NO: 118944 - DNA, 122 bp, Homo sapiens
gtgtaggctaaccctccagttactatctggcaggttaaggcagccagcctaagaagtaaacggttgaatgtggcaatagcctacttgaaaaaaatgtacatgtcatagactcagaaatctcg

SEQ ID NO: 118945 - DNA, 122 bp, Homo sapiens
agcctcccccacacactccacaaagaatgacccagccctcggtgtccacagcacccagggcgagaaaccctgctttgggccatgctgcctgggttaacagcccagctctatcacttgctagc

SEQ ID NO: 118946 - DNA, 122 bp, Homo sapiens
tccgtgagaacttcactgattttacgaggacaggagctacttctttgctgaaatgcatcacggtttcaactgctgaggttttccgcaaccttttgcattgtttggaatgtgagcagcacggc

SEQ ID NO: 118947 - DNA, 122 bp, Homo sapiens
cctgcaggtggcagcacgagtgccgatcgctgtcaggcgagggcgctcaggggtgggagccgaagagagtaatttagggatagaggtgagaacggagttagacacaaaagtaagatcacatg

SEQ ID NO: 118948 - DNA, 122 bp, Homo sapiens
agagcccggatccaccagcggccggagagctccctgccatgccacctcgcccctgggctgcggctgactccctgccattgtccaccaccattgttgccagggagaggtgtccacatgtgtgg

SEQ ID NO: 118949 - DNA, 122 bp, Homo sapiens
ccagacatccttttaggattctgtctattaaaaagtagaacagctttcccagagacattgcgggatgagaggagtgtccagaaaccaaggagcagcaagctgggactccctcgggtctgcat

SEQ ID NO: 118950 - DNA, 122 bp, Homo sapiens
ggcggttggagaaaactagagttgggggcggtacagccagggtgtacccttgcggtgggtcggctcggcgcacccacagctcccagctgctagcccaggcgctggggccgcagggactgaac

SEQ ID NO: 118951 - DNA, 122 bp, Homo sapiens
gtgacttggatttggaggctgttcctactcaggcttccctgaattcacctgtcttggcttcgtttcggaagtagggggcccctcctgcccaggcctggtgctgcttctgggtgtttgggggt

SEQ ID NO: 118952 - DNA, 122 bp, Homo sapiens
cgcccgcggcgcgcacctggctccacgagaaacgggagggagcggggcgcccagcccgcccggagccgcatacggagcccaccccacagccctcccggcggctcccactcacccaagggcgt

SEQ ID NO: 118953 - DNA, 122 bp, Homo sapiens
cacaggcccagctctcgctggctcatgcgggtgaagcccgtggtgaagatatggccctggcgcgtgaagacggcccgcatgggcctcatcccctcgtgggccgcaaacctctcctgggggga

SEQ ID NO: 118954 - DNA, 122 bp, Homo sapiens
ttgagggccaggttgggggtgctgtcccctcacaacagaagccctgctttctctgcccatcgcctgctggagatgccttctggaccccagttccttgagccccagctttaccccagctgagg

SEQ ID NO: 118955 - DNA, 122 bp, Homo sapiens
ggctccgtctgcgcaattgtgctccccagcccatccacccgggggcaagacggaactcctcgtctactcaccgctgccgcaaggctgggccaagttaaggccccacgcactttggcatccgg

SEQ ID NO: 118956 - DNA, 122 bp, Homo sapiens
ctatgcgccctccgcgggttgcggctcagtgctccccaaggacccagtgcgaagaagcctcggaccccacagctgccgtccgcgacccctaactccactctgcagcgaataaattaacatct

SEQ ID NO: 118957 - DNA, 122 bp, Homo sapiens
ctggaagaaatgtttatggccaatagtcccttagagccagtggtggcgtctggtcgaagtcgtggtgctcatgctgagagaaatgtttatggccactagtcccttagagccagtggtggtgt

SEQ ID NO: 118958 - DNA, 122 bp, Homo sapiens
ccgctgctgcgtggagcacttaaagtccagcctccaggaccggatgcccctcctgtctcccgctcccatcgtgcccttaaatgccagatctggtggagggaagagagaagaggtaggaagaa

SEQ ID NO: 118959 - DNA, 122 bp, Homo sapiens
gccacaggcagctgctgaggcctgagccggggacgaagctcctccctgcatggggacacgcggggctgcagccactcccaggcctccatcacacagggacggtacagaaatagcgtgtcttg

SEQ ID NO: 118960 - DNA, 122 bp, Homo sapiens
tatggagagggaggcctcagtgctgagggccaagcaaatatttgtggttatggattaactcgaactccaggctgtcatggcggcaggacggcgaacttgcagtatctccacgacccgcccct

SEQ ID NO: 118961 - DNA, 122 bp, Homo sapiens
tggatgagggcaggaggctcatggcttctgacactgtggggaacgtgcaggttgtgacaacgtgatcatggtgtgggacgtgggcactggggcggccatgctgacactgggcccagaggtgc

SEQ ID NO: 118962 - DNA, 122 bp, Homo sapiens
ctaccagcgccgctggttcgtgctgggcaatggtttgctctcttactacaggtatggaagcgccagggtgggacatgggggttggagggtggtgatgctgcagggatggtgatggagggcct

SEQ ID NO: 118963 - DNA, 122 bp, Homo sapiens
tagcgaagccgtggtggccgcctccccggagccgaggagtgggctggggcgagggtgcagcggcggggccggcgggatactccaacccccttccggccccggccctcagtactgctgcccac

SEQ ID NO: 118964 - DNA, 122 bp, Homo sapiens
tcaagcttgcagaataatttcaaagtagacagtaagtagtagggtagttcagagagggtgcgagatagttcacttctgttgaggctggagaggagagattcagaaaagtcttccagaaggca

SEQ ID NO: 118965 - DNA, 122 bp, Homo sapiens
cccagccgcgtccacacacgtcgcacacggcagcaaggacgcaagcagtgtggaggtggccgcgtcggcgacgtatgggccccgtggtgctgcggtgcacgacctctgtgctgtcaccccac

SEQ ID NO: 118966 - DNA, 122 bp, Homo sapiens
cagtcaaatgcatccacaagaacactggaaatgatcaccatatacaaagccttactgactcgtacagcagtgtctctgagccgtttgggtatatctacacgttttggttaataataaaccaa

SEQ ID NO: 118967 - DNA, 122 bp, Homo sapiens
tgaaatgtcaacgtagatcagggtctaaggtactgcagacaaagacctctggctaggaggcgatgctggatacacagcacacaccacactggacacacctttggggttttccctaagaaagt

SEQ ID NO: 118968 - DNA, 122 bp, Homo sapiens
gaaagaaaaatgcatgtttaaactgcattaacctgtcactggcatccaaacaaatttaaacgctgagatataaattatagtctagcggcgagataaacacattaaaatggactcccaccatt

SEQ ID NO: 118969 - DNA, 122 bp, Homo sapiens
atctcggctcattgcaacttctgcctcccaggttcaggcaattctcctgcctcagcctcccgggtagcagaggtgacaggtgcctgccactgggcccgctaatttttgtatttttagtagag

SEQ ID NO: 118970 - DNA, 122 bp, Homo sapiens
agccgcggcagcagctagggggcttgtgcacacagcgagggagacttagggactggcagacggacggacggacggcgaggaccctacccgagcccccgagccatggccgagagaaagcaatc

SEQ ID NO: 118971 - DNA, 122 bp, Homo sapiens
caagttggccatgttgcaggtgactgatgcttgatcctgtatttgtcaaaagtagcctcacggtcatttattctcttgaacttctaggttacatatgtgtatcaagcatgttaccacacctc

SEQ ID NO: 118972 - DNA, 122 bp, Homo sapiens
tgtggtgacccccagctccccggacagagtcaagagctcaccagcctgcaaaggttttcacggcccccagccagactcgggggcttcctcttgccctgctacttcctgggagctctgagggc

SEQ ID NO: 118973 - DNA, 122 bp, Homo sapiens
ctctcccccgccctaatctccaggccagtgagcgacttcagcatccagatcgggcgtgggcgggtgatattgacagagacctgctgcagatgcagtaacagcagcagctgtggcgtctcctc

SEQ ID NO: 118974 - DNA, 122 bp, Homo sapiens
gtgtgtaattcttacctagaaaatattatgggcaagagaagggctggcaaggttctttgacggccagactgttttcagagtagctgatccttaagtcactgtatgcttgccagtccttgata

SEQ ID NO: 118975 - DNA, 122 bp, Homo sapiens
acctctaaatcaccgcaagtttcaagaacagccagttgtgtcctggagctgtgctgagcacgcccaccagcccagcaggtgctgctgagagcagagggttttgcagggtcacacattcttcc

SEQ ID NO: 118976 - DNA, 122 bp, Homo sapiens
ccagcgtgctggtgacaaagcccaccccatattctgtctgtcagctgggaaccaactgcacgtagacgggctgctctcaaacccggctacctctcgcggcgcgcgtcatgtgagccgggcta

SEQ ID NO: 118977 - DNA, 122 bp, Homo sapiens
gcaactgctctccgtgcagaccaggaacagcagctgctttgtggagtggattcccaacaacgtcaaggtggctgtctgcgacatcccgccccgggggctgagcatggccgccaccttcattg

SEQ ID NO: 118978 - DNA, 122 bp, Homo sapiens
ggcgcgaagcacaccctgtcgtgtgtggggtcagcacccagcacaaatcggagttggaggcgagggggccagtttttggtgagaacccagagtccagctttgaggttcacctccttgacatc

SEQ ID NO: 118979 - DNA, 122 bp, Homo sapiens
gggctggagaggtctgaagagggttcctaaagtccaagggggtgtctgttgggttcaacccgagacgctgaacgcaagcaaataaataaataaacggtactttccgagcgtcgcgagcggag

SEQ ID NO: 118980 - DNA, 122 bp, Homo sapiens
gacccccaggccagcccaggccacgggtgactcctgggggctgcccgcggcccgcccgcccgcctggggaggaacccagaggagccccgtgggccatgtgcctgttcccaaactgcgatcca

SEQ ID NO: 118981 - DNA, 122 bp, Homo sapiens
ggctgcctgggatcaaatgcgaaatgggattggggcgagttcaccagctgtgtgccccaccgcccttatcttccttatctgcaaaatgggaataagatactatctcacctgttagcctcata

SEQ ID NO: 118982 - DNA, 122 bp, Homo sapiens
cagctgctgcagcttccatgcctattcagagcagcctccagggggagccctcagccataccgtgccctggtccgagaggctcggccaagggagtctgttgagggcgcagaggccagcagcct

SEQ ID NO: 118983 - DNA, 122 bp, Homo sapiens
atagttgcagaaacttctaaacaggccagttctcagaaacttcattctcctatggaggaacgtcagctggtttgcagtgacagttgtcacagactacacccaggggaaaacgtgtcacacca

SEQ ID NO: 118984 - DNA, 122 bp, Homo sapiens
ctggtatgggactgcatccgtttaaagtttgcacagaagcacctcttgatcgttgggctccgtacccagaatgggcaccttttcctaaggcatgcaagactcactataggatagcctctgcc

SEQ ID NO: 118985 - DNA, 122 bp, Homo sapiens
ggggaaccgttgagaatccggtaaccgatgcggacggtaaagccgtttgggttagagcggcgcgggtgtccagtccgcggaacggggagatcgttggcaccttcgcttttttaggggaacgg

SEQ ID NO: 118986 - DNA, 122 bp, Homo sapiens
gataacctagctctttatatcttcccttttaaatagaaacaactgtcttgagaagctcttcgaaacattttatggtaaggacttcacctatcattggtctttcctagctatatatcacattg

SEQ ID NO: 118987 - DNA, 122 bp, Homo sapiens
ctggcgagctatatcggtcgctgccatcgctcctgcgtccgccagggctgccacgggtgccgccgcaacgggagctactgcacaggaaacagaggagctcctccgacaaagagaaagtgtta

SEQ ID NO: 118988 - DNA, 122 bp, Homo sapiens
ggtcatggggccaggcgcgctccggcgcctgcagaactgatcggggatagtctcaggaggcgctagtcacgtgccccggtgatcggggatagtctcagaaggcgctagtctcctgccccggt

SEQ ID NO: 118989 - DNA, 122 bp, Homo sapiens
aggccgtgaatgggctgctttgttgcccggcccacacaggaggatggtggcagaagaccccggcacaaagtcagcacccactctgttcccaggctgggttcagggaggctgaaaagccactt

SEQ ID NO: 118990 - DNA, 122 bp, Homo sapiens
accgactttatctgaaatgagtgggacataattttggaaactcatacagttaagtcagcacgctcggcacagtgccgccgcttcctgccccgcccacagccaggaccccacacccctccgtg

SEQ ID NO: 118991 - DNA, 122 bp, Homo sapiens
gtggtggtctcctagcacacagctaccaactgcatcctgtctgcaagggagacttcttcccggggctttgctttctcctgggtttcagcaccatggaaggccgcctatattctacgccatag

SEQ ID NO: 118992 - DNA, 122 bp, Homo sapiens
ccggaggggggtctgcgcccagcggagcgccgtgctggggcgaggtggctgtgggcagagcgtgcaccggggttggggggagaaggggattgaaggggcggggggcgcgggagtacctgggc

SEQ ID NO: 118993 - DNA, 122 bp, Homo sapiens
gacaatagtgacacttggattgtacaatgtgctcccaacaaaaagcttcctattgaactacgtgattcttatcgaaaaggattttggacagaatttatgggcagagtctttaagtatttggg

SEQ ID NO: 118994 - DNA, 122 bp, Homo sapiens
ttctctctcctcaggggccacttctataacacactggagcaatatgactggcggcgcttccgggccctggctgaggagtcccagctctatgagcaaagcctcagcctctttctgcagcagtt

SEQ ID NO: 118995 - DNA, 122 bp, Homo sapiens
gtagcatcctgcacaattttcctttcttctctttttcaggtcacagttcatttttggcatcgtgcctgatgattgtctctcctttttccacagctgctcccaggtgcttagccgggcctaat

SEQ ID NO: 118996 - DNA, 122 bp, Homo sapiens
cccgctccggccggggcccgccgccggctcgcgctcgccggtaggcccaggcgctggccccgttgcccgggcaactgcatccaactcgccctgggctggctgcgtctctatggcaaccgcgc

SEQ ID NO: 118997 - DNA, 122 bp, Homo sapiens
ccgtcgtacgaactgctacagctgctcaagctgtcaacaggagatctccccgcctcgtggcgcgtgtgttgtgggtatctcgaaggggtggtggtacggtctctaggaggagaaacaggttc

SEQ ID NO: 118998 - DNA, 122 bp, Homo sapiens
gcagcacaagtcacatttaaaccacaccctgggtgaaaaggaccattacatcgtgttaatcggagtgcttctaagaaatgcttaactcatgaggaggacgtcaagaattggtgttaccaaga

SEQ ID NO: 118999 - DNA, 122 bp, Homo sapiens
cccaattcctttagagtgacacactagcttcatgaacagagcacttttttgcagtcccaacgtcttcttttctcagcttgactcttagtacggaacccgtctgccttttgagcaagttggtt

SEQ ID NO: 119000 - DNA, 122 bp, Homo sapiens
aaatcaattcatgagacatgtaaacgattaacctatttagttaaaaatatattggccaggcgtggtgactcatgcctgtatcctggtgctgtgggaggccaagttgggaagattgctccaag

SEQ ID NO: 119001 - DNA, 122 bp, Homo sapiens
gcccactgaatcatctctaggggtgaggtcagtatcttatttttaagcagctttgaaaagcgacaggctggttctaataaaccagcttcttcaatctgcaggattttgatagaaaactccct

SEQ ID NO: 119002 - DNA, 122 bp, Homo sapiens
tcgcgcctccagccgccgctcctccccaaggggctctggcctgtcgggtcccccccggcccgttgtcgccccaaccccgtcccagccgattctcttgacttctgtcagcggcactcacgctc

SEQ ID NO: 119003 - DNA, 122 bp, Homo sapiens
ccccgccccccaaatctccgggccgcggggtggaggcttagcagggcagctgcgggcctgcgggcgggcggagctcggggcgcccctctcccgctcgcaccgccggggcgcgcctttgtcat

SEQ ID NO: 119004 - DNA, 122 bp, Homo sapiens
tgagtgtcggaggctttgtgggtcgggcagtccaccgtgaccacgcagctctgcctgtggcgaaagctgccagagacaaggcgtgaaggagtgagcgagtgacagagtgagtgagtgagcac

SEQ ID NO: 119005 - DNA, 122 bp, Homo sapiens
gggtggggattctgggccggtggaggagtcactgtcgcttcagccaggctgcggagcggacggacgcgcctggtgccccggggaggggcgccaccgggggaggaggaggaggagaaggtgga

SEQ ID NO: 119006 - DNA, 122 bp, Homo sapiens
gtgaaccgcctcgggcaggcagcgccgtcgcggggacgcgcccgctcacctggaccagcgcgcccgctcacctgggccagcaaccgtcccctgtgcgcctgcgccggagcacggcgcgtcag

SEQ ID NO: 119007 - DNA, 122 bp, Homo sapiens
aaaacagcacagttcctgcccctctgggtgcgcaatttagtgagaaatgaacatgattaccggctcctggagttcttaatggccgccttcagcacagagaaattaagtgacttgcccaaggc

SEQ ID NO: 119008 - DNA, 122 bp, Homo sapiens
aaaataaagattccgagaattcaagataggtgactgggagaatataaaagtttggaagtgcggaggaaataatgagtttaaattttggacgtacaagtttgagaagcctatagtgcagtcac

SEQ ID NO: 119009 - DNA, 122 bp, Homo sapiens
ctctcccacctcccctcctctacttgctccctgcaattgctcgggcctacccacccacaccgctcaagacccccaggttaagaagccaccagacctctaggctctaacctggctcactctgc

SEQ ID NO: 119010 - DNA, 122 bp, Homo sapiens
ccatgatgaacaaaatagcattttaaataaaggccagatctgcccgtgcacttggttctacgcccttgattcgtgcaccctggggcgggggcaaattaaactaggggagcccattggactgg

SEQ ID NO: 119011 - DNA, 122 bp, Homo sapiens
aggttcagagaccacaattctgtcttttgagttcactagttttacaagctcatctataagcgttagttcagcaactcagatcaggccctaagtttccagaaatttgagctacttttcactgt

SEQ ID NO: 119012 - DNA, 122 bp, Homo sapiens
acttggcagaagggcgagggcggaggttttctttccccatttgcataatccccagctccccggcagcggagccgacctcttcaccgccgccgtcttcgcgggtgtcccagctgggccgcgcc

SEQ ID NO: 119013 - DNA, 122 bp, Homo sapiens
gagacacttgcaaatcccaccccggcctgcagaggcgctgtcccgcccccaacccaaccacgggcatttgcaacacgggcggaaaaaagaaccaaaacttcctaaggccccacttttttcta

SEQ ID NO: 119014 - DNA, 122 bp, Homo sapiens
gcctcttggtggcgctggagaaggtctcccggcctgagccgaggtagtagaaggcgcagacggccagcgccgcggccagcagcagggcgcagtagtgggagcgcacagcgcccaggcgcgcc

SEQ ID NO: 119015 - DNA, 122 bp, Homo sapiens
tacggggagcagtagagaaacggaagcttggcagctagagcggagccctagtgaacgacccggagttactggctccccctcctgaggcctccgaggtgtacctggcgcctgcgcagtaaggc

SEQ ID NO: 119016 - DNA, 122 bp, Homo sapiens
ggcttggtgctcccagagagctcagtggctacagaatgggtggggattctgcgtgtctcccggagcctgaacccctttcctggttatggccggtagctgtctccagggctaacgtgggcagc

SEQ ID NO: 119017 - DNA, 122 bp, Homo sapiens
cttgaatcgtatcttcccactttctgaggactactctggatcaggcttcggctccggctccggctctggatcaggatctgggagtggcttcctaacggaaatggaacaggattaccaactag

SEQ ID NO: 119018 - DNA, 122 bp, Homo sapiens
tgacgtcaccggtgccaagtgccggctgtgtgcggagcagttggagacacagtgggtgtccgagggggggctctgcgtccggaggtgagaggtgggtctcaacacagctgccctcccccatg

SEQ ID NO: 119019 - DNA, 122 bp, Homo sapiens
tgggacggaatacacagagcgtggggtgtctcaggcgcggggctcatgggaatcccaaggcgcaaggtgggaggctggaagcgaggagcgccctgggagcagggtgtccgaagcgcgggtac

SEQ ID NO: 119020 - DNA, 122 bp, Homo sapiens
cgcatgacgccagatgttccgaatcaccgctccttttcctggcaaataatcacgagcacccggaactcagctccacaccctggggggcctcctgtgcatgggcgaccccgggggctgggcct

SEQ ID NO: 119021 - DNA, 122 bp, Homo sapiens
actcttacaagtgacccataaaggctatcataggtctttgaacaatctatgagaaagcctcgacgttctaaataaattatttttcattaactcttgtttgatatatgggtgaacaatttaat

SEQ ID NO: 119022 - DNA, 122 bp, Homo sapiens
cctcgggtcagctcggcacccgcccgagcccccccagttccaggccctctcctcatcagacgtgccctgggccctcagcctgttcctctcgccgcccggaaccccgcagcagccccgggtcc

SEQ ID NO: 119023 - DNA, 122 bp, Homo sapiens
tagcgcgcctgcgctggcggggccttcccccttgtccctggaggccccagtgaggccctgcggtgcctggacggcttcccgccccgtttcttacctggacccaagagccccaggagatgtgg

SEQ ID NO: 119024 - DNA, 122 bp, Homo sapiens
cataggagacgacagctctgtgccggttattctagaacaagccatcgtcatcatagcagacgacagctctgtgcctgttattctagaacaagccatcgtcatcataggagacgacagctctg

SEQ ID NO: 119025 - DNA, 122 bp, Homo sapiens
gacttcttttcatttcttcttgtgtacaattgtgtctcatatgcataatcatgaccaatgcgaatgggattaccattgacttaagccaattatgacgtccccctgggcctagggtaggactc

SEQ ID NO: 119026 - DNA, 122 bp, Homo sapiens
tgtttttagctggtaatacatttctttccatattttagggatgcaatgagcaaggaaagacgaggaggggggtcctccttagaggcttagagatcaagcagttctctctccccacttcctgt

SEQ ID NO: 119027 - DNA, 122 bp, Homo sapiens
gggaggaatctgcacgcagccctgggatggcacagggatgcctcacgggacacctggcctcgtcctggtagccccttgcttgcatttcccggccctggggtgtcctccccgactgcacatgc

SEQ ID NO: 119028 - DNA, 122 bp, Homo sapiens
gaccaaggttggtctcaagtgtagtttttcagatggaacaagacctttgggtgactccaccggaatgggatccaagcaaacaaattccctacaagactgccaaataaggcagccttcctcag

SEQ ID NO: 119029 - DNA, 122 bp, Homo sapiens
gagcaactaggaaatagcttgtaaaattacacgtgcctaccactcttctaggaaaattctcgcccacgtatctacaaatacaagaatattcatagcaaactttataagttgcaaaagagcag

SEQ ID NO: 119030 - DNA, 122 bp, Homo sapiens
aagccccactttgttcctgtgggaaagtccagcctctcaggaaagagccctctctccggccggcccctggtctggggactcagcgaggcaaacaaagcctccatccgctggcaaggattctc

SEQ ID NO: 119031 - DNA, 122 bp, Homo sapiens
tttgcccctctctctctctgggcctcatcagaccaaaccaaagaccatggttcactgtgccggctgcaaaaggcccatcctggaccgctttctcttgaacgtgctggacagggcctggcacg

SEQ ID NO: 119032 - DNA, 122 bp, Homo sapiens
ggtggcagcaggcagggctgcatcaatttaccaggacgggggtgagagccggggcctaagcggtcgcctccgctcttgcgttttcccggagcctgtgggctgtgtgatgccggggcctcccg

SEQ ID NO: 119033 - DNA, 122 bp, Homo sapiens
tcagcgtttcccgctggctgggttttgaatcactgtcatggaaccctgttttgaagacaccgaatatggctatgttgtcttgcagaaaaaaaaatattagcaattgagacaaatctgctgct

SEQ ID NO: 119034 - DNA, 122 bp, Homo sapiens
accagacaaacccgcaggctcagcaggggccaggcaggctccctggcagcagcccagagccgcggggaagggcaggcagtgcttttggcagacatttcggcgtctaacaggggccattccag

SEQ ID NO: 119035 - DNA, 122 bp, Homo sapiens
tgccctttgtatcttgcactgtgagttttctacaaacataaacccttgtttaggccaaggcgtgaatacaacttgtcggtcccaaaccaacatcaatatcacgtgggaacttctgagaaatg

SEQ ID NO: 119036 - DNA, 122 bp, Homo sapiens
ggagggcgccccaggagcctctttctccccctgcatgggaggccgggtctgctcagccagcgccctcacctgcggtcggtgagctgtgcacggggaagcagagcctggcggccacgtcggcc

SEQ ID NO: 119037 - DNA, 122 bp, Homo sapiens
ctaggacttccagacacaaaccagctcagactgggctcaggcagaagggcagcctccagccgggtcacagggcctgggggtgaggtttctgggatcttgcagggtctctgcctccctgtctg

SEQ ID NO: 119038 - DNA, 122 bp, Homo sapiens
cctgaaccagctgatttgggacagttcatgtgtgtgtctgctttagcattgaggggcacgcggagcttaaagccttgttactggaaagccccaggcccctattaccactcgcgtgcccatgt

SEQ ID NO: 119039 - DNA, 122 bp, Homo sapiens
tgcaaccaaatagttcccacatgatatcatagcccacttgtgatacgggagtaccgggaacggaagagcgtggtccctttaaatgatacggaagtggggaagggaagtgaggggtagaggaa

SEQ ID NO: 119040 - DNA, 122 bp, Homo sapiens
cgaactcctggcctcaagcgatcttcccacctcggcctcccaaagtgatgggattataagcgtgagccaccatgcccaacagatacttcttgaacagatctggaaaatgggtgtcagatctt

SEQ ID NO: 119041 - DNA, 122 bp, Homo sapiens
tcaagttattccagagaagtttgtacacacattatgactttctctgaggccagtgagctgcgggcaaccctccaggaaacactgaggcttcctgtgcactaattcacattgtgtcaaaaata

SEQ ID NO: 119042 - DNA, 122 bp, Homo sapiens
gtatttcagatgtcagagcatagtaaaatgctaatttgaaactgtgcaatgggcacaagacgatgtgtgagcctagctagggaatggatttgtcactacatttaaaaaactattttgacctt

SEQ ID NO: 119043 - DNA, 122 bp, Homo sapiens
cgaggcgcggcggtgagaccgcagggatttcctgagcagcaagtcgtgtgccccttggcacgctttatctgcttcgcccgggccaggagcgtgcctgcccggctgctgcccgcgccaccggc

SEQ ID NO: 119044 - DNA, 122 bp, Homo sapiens
accccaccagcttcttcagggcgggaaccatctttctactgggacgtccgagcccggtggcggccgggaagctcagcggcagcggcggagcagctcgactcgcactgtgtccccgcgggaca

SEQ ID NO: 119045 - DNA, 122 bp, Homo sapiens
agtcccgggccgacgcattacctcttgggagtcgtggtcttcgatctggtaaacagaagacggcaactcggttaagtcttcccccaccgccccctgaaatccctcgccccacccgcgaggga

SEQ ID NO: 119046 - DNA, 122 bp, Homo sapiens
cgccctgtgcggagaccggtttgaggcccgggcgatgcttgagggataagcacttggtctcgtggctatggaaatctaggaaggtgacctcgggtagaagagctaagtggggtcggaggttg

SEQ ID NO: 119047 - DNA, 122 bp, Homo sapiens
cgcgacaggcctaccagcccgcacgcactgggcgaccagcctgaggccccgcccctcggccggctccccgcccgaggccccgcccctgagccagccccagcccgcctggccgctcgagtcac

SEQ ID NO: 119048 - DNA, 122 bp, Homo sapiens
ccccgccctctggtttccccccaggcggctggaagctgtggtccctgtggggcgaatgcacgcgggactgcgggggaggcctccagacgcggacgcgcacctgcctgcccgcgccgggcgtg

SEQ ID NO: 119049 - DNA, 122 bp, Homo sapiens
cttttttccttccgcacacagcccaggccctgccctcccgcctgcccctcggggtggcagcggctccactgcacatgttcccttcgaggctgccgcccctccgcggactccggtggactgag

SEQ ID NO: 119050 - DNA, 122 bp, Homo sapiens
cacagattctcttgcgtaacaccagttgcatgtcagcagggtggctgagctggaccgtcacgcgcacgatcaggaacaaccgctcgtccacgggcgtgcccctgctgagctgagggcagcca

SEQ ID NO: 119051 - DNA, 122 bp, Homo sapiens
tgaatccatagagatgtccacactgccgcccagacctcccaggcctctctccatccagaccgccagtcaagttcccatctgggaaagggggtctggccggtgcccagagccagggagaggtg

SEQ ID NO: 119052 - DNA, 122 bp, Homo sapiens
tagagacggggtttcaccatgttggtcagtctggtcttgaactcccgacctcaggtgatccgcccgggcacaggctcagagttttaagaaaaaccacaaagtgctatgaagtttgaggctac

SEQ ID NO: 119053 - DNA, 122 bp, Homo sapiens
ggcgccgcgccgactttgccctttaaatcggtctccaagccgattacagctgagctcccacgtgacgttttaccttctgtctcccggagcgcgttgcccgaggacagtccttccccggctgc

SEQ ID NO: 119054 - DNA, 122 bp, Homo sapiens
gaaaaataccccatccacacaggcgcacgacattcttgtatcctgggttcttcccacatccgtgtgagtggagcgcgagcgcctctgctgtccgccaggcaggcggccctacttctccccac

SEQ ID NO: 119055 - DNA, 122 bp, Homo sapiens
aggctgattctgaactgctgacctcaagtgatcctcccacctgagcctcccaaagtgctgcggtgacagggataagctactgtgcccagccccacttacatattctttttcttttttaaatt

SEQ ID NO: 119056 - DNA, 122 bp, Homo sapiens
ccaggtatatggaaccctgggaggaatgctgactcgacagccttttgccattggtggctccggcagcacctttatctatggttatgtggatgcagcatataagccaggcatgtctcccgagg

SEQ ID NO: 119057 - DNA, 122 bp, Homo sapiens
cattcacggaaagcgctcagtaacccaggccacaagtggggtgaaggaagctgtacaccgcggagtcacagctggggagttcgctaggcaggaggggcttccaccacttccgaaacgcctgg

SEQ ID NO: 119058 - DNA, 122 bp, Homo sapiens
tcacaacagcaacggccaccattcacagggtgctggcttcgtgccgggaacagttccaggcgtcttctttgtccgaggaatttacactgcaaccctgcagggccgttcgcaatgttcaccag

SEQ ID NO: 119059 - DNA, 122 bp, Homo sapiens
cagctctcagtagacctgaagcaggtagctcctttctgcaggaaggttgtctctcctttccgcaggaaggttgtcccaacaagttgagaagacgcacagtgggcagctccttcccgcagctg

SEQ ID NO: 119060 - DNA, 122 bp, Homo sapiens
actggtggggaagcaagacaggagcacactcttgccacccagggttcattctctttctgacgatttaaccatgaaaaccagctaacatttacgaaaaggttttgcatctacatattgacacg

SEQ ID NO: 119061 - DNA, 122 bp, Homo sapiens
gcctcgtgtgatccaccctccttggcctccccaagtgctgggattacaggcgtgacctatcgtgcccgccccagtggaactattgaccattccttcatcacagcaagttccactggacaaca

SEQ ID NO: 119062 - DNA, 122 bp, Homo sapiens
agaaagctgaagatgttgacgtccttggaggctgtgctccccttcacctgcagggccttccgggagtgtggggagctctcaaaggactccttccgtcgccgccgccgcttcttaatggcttt

SEQ ID NO: 119063 - DNA, 122 bp, Homo sapiens
cagcccttccctgggagaagcctggcccagcccgggttttggcctgcaactaacacattgcgtacaccaccgttatctcttcacttaagtcctgaaaggggtcaataaagttactcaagaag

SEQ ID NO: 119064 - DNA, 122 bp, Homo sapiens
gattctgaggattaggacatgaatttatctttttgggggtcaccattcagcccatgacaacgatcatgagagatatagtttttctttcttgcaatgtttctgtctgattttggcatcagggt

SEQ ID NO: 119065 - DNA, 122 bp, Homo sapiens
gagaggacagcttggggccggaatcctcccccatggctcctctttgccagggaccctgtgcgagccccatgctgacgtccctacccgaattctcctggaagttcctcctgtagcctcctggg

SEQ ID NO: 119066 - DNA, 122 bp, Homo sapiens
ggacggggcgcagatctccgtggatgaactgcgtctggactcttagattcataaaatattcgagggtttgggagtcacagaccctcccctctcctcagtgcactttggcatttgcacggtgt

SEQ ID NO: 119067 - DNA, 122 bp, Homo sapiens
gtgctttaacttcgccttcgcttttgttttatctccattactcccttcagttgccactggcgacaccactactcgcccacgcttcttactggaggaggcccgaccctccgtagaatccccgc

SEQ ID NO: 119068 - DNA, 122 bp, Homo sapiens
ctgcggcggggtttcaggggcttccagctcgttccgaggtcaatggcaggcgcaggtgcccgggaggcgtggggtgggctctggcgggaccccagcgcggtgggagcgggcgcagtgggcgc

SEQ ID NO: 119069 - DNA, 122 bp, Homo sapiens
agccattggcatcttgggtgggactgcagcaagcgttgctaaacactaagcatcccttcacgctcctaccaaatgcagtatggtccccttgtcatcaagacaacccaaaatgcccctgttcc

SEQ ID NO: 119070 - DNA, 122 bp, Homo sapiens
gggcaggactatataaccccagagggactgccccatgctgactccttgcttctttccagccggagccgctgccttgccccccggagactgaagacatggtgagtgagaatcctccaacccct

SEQ ID NO: 119071 - DNA, 122 bp, Homo sapiens
tgtgatgttccaggcagacatcagtgctttagcttctagcctcaacacaggcactcaatgcggccttgttagaaacactctgtccggtcttttatgacttgctacactacacaatggacaca

SEQ ID NO: 119072 - DNA, 122 bp, Homo sapiens
tcctcctccccgggtagccaggcagcaatgggctgccaagagctccgggttaggagagtacgggcgcggggccccaggcagcccttggagagcggtcctcgcggggcggtggcatgcgggac

SEQ ID NO: 119073 - DNA, 122 bp, Homo sapiens
aaccagcctgaccaacatggtgaaacctcgtctctactaaatacaaaaaaattagctgggcgtgatggcgcatgcctgttaatcccagctacttgggaggctgaggcaggagaatcgcttga

SEQ ID NO: 119074 - DNA, 122 bp, Homo sapiens
atatcgggtttgtcagacatggttgcggaggaaaagcggagcgaggcgcgcgagtacgagcgaagtctggtctgcgcagtggccaccaccgagttgtcgccataatatttttaataatgttt

SEQ ID NO: 119075 - DNA, 122 bp, Homo sapiens
gaaggagagtcaaataaaataagaccaccccccaacaccaaaaaatggatagagttagtacgagaagtgcccagtgaagccaaatgacacgtcattttacagtgtgacctttttttcccctt

SEQ ID NO: 119076 - DNA, 122 bp, Homo sapiens
gggagagagaagtgaaggacatgcagacctctgcattgagcactccatgactcatctgcccgttcccaaaacacacgcatgaaattcagaaaagttgaataatccagctgttgatgtttcct

SEQ ID NO: 119077 - DNA, 122 bp, Homo sapiens
tctgagccgctcgctgggggcccagtttcagaaccaagagccagatcccgtcttgggcgccgagcctcgcgcgcccccgaggatagcagcctagtcccatgccatgcactccctcccttgga

SEQ ID NO: 119078 - DNA, 122 bp, Homo sapiens
ttgttctttatctcttggctcctcatgattttctaaaaatccaccaacagtgaggtcattcgttcctaaattgtcatgaccaggagcctccatatgattggttggcccttccagtaaactgg

SEQ ID NO: 119079 - DNA, 122 bp, Homo sapiens
acgagtcccaggtccagctttattacctaatacaagtccaacctctggaacatccaaattcgctgttccaaagtttaattaaaaacacaatttacaaatatttaatatcttctgaaaagcat

SEQ ID NO: 119080 - DNA, 122 bp, Homo sapiens
ggaagggcgaaacgccgggatagaaccggaggtagaagctgggggcggagcttcagcgctcgcgccggcgcgggcgcgcacggcgctcctccttccagatcccgatgaaggggcggggcctg

SEQ ID NO: 119081 - DNA, 122 bp, Homo sapiens
gagcgctgtggcctggagatagggagggaccccaagcgctctgccccgagcacgggacaacgatagttaggagcccccctgtgggttattgacttccctgtggctgttacccccgtgtgtgt

SEQ ID NO: 119082 - DNA, 122 bp, Homo sapiens
caatgtgtatctaccctgcactattcccctggatttcccttccctccaaaacggttcgcgcgtgaagtcccctaggatgggaattactcagaaagaaggcagctggctcactctcttttttc

SEQ ID NO: 119083 - DNA, 122 bp, Homo sapiens
agggaggggagtgtcccggcgggaaggagcaagcagccccctcccccacagacacgccctcggcccgccagaaacaggaaaccggggtttcctcacccaccccgaccactgcagccccctag

SEQ ID NO: 119084 - DNA, 122 bp, Homo sapiens
ggtccgaccagggaaggtgggatgctctgatggccgggcctgcggcgctgagcgcggcggcggcggctgctctggcggccgccctgctcctgctgcgtcgtgaggacccggggccgggggct

SEQ ID NO: 119085 - DNA, 122 bp, Homo sapiens
tgtccactctgcctgtgtaaataggccacatggcctgaaatcccctagaagcctggtgtccgcatgacctccccctagggcggagcctctgcttccctgttctcttctgctctgtcctctgg

SEQ ID NO: 119086 - DNA, 122 bp, Homo sapiens
cccgccccgcgctgccatctcctcagggccgggcagcaggctcccgagcgcccacagacccggggtgcggcccagcccacaaccgtcacctcaggggcctcaggcgcccagcggtgctgggc

SEQ ID NO: 119087 - DNA, 122 bp, Homo sapiens
tgggagccactgaaggtttttaataaggcaaataacataatcagatatatcttttaagatcgcttttctagaaacattgctagattagaagagaaattagaggcagaaagaacaatgaaaag

SEQ ID NO: 119088 - DNA, 122 bp, Homo sapiens
acttttaacccacctcacctgctgagcagctttctgtgttttcattagtatttcaggcaccgaatctcatttttaaagttattatcaggattttaattggtggttctcactattcaccctta

SEQ ID NO: 119089 - DNA, 122 bp, Homo sapiens
gtccgggtcgcacccggcctgatccgcacgccgggctgtcgcgaatcccaggccccgcgccgcttcccccggtacccgccctcacctgcgggcccagctcggccggcagcttctgcagccgc

SEQ ID NO: 119090 - DNA, 122 bp, Homo sapiens
agggctgccctgttagagcctctgccttactgccaccagttgctggactataaagtcaggcgtttctgcctccatagacagtgcctgcaggcctagagggggagaggagcctggctggttcc

SEQ ID NO: 119091 - DNA, 122 bp, Homo sapiens
cttacgggaatctcctacccttagggaaacaatgcaaaatatagagaaagtttatagagccgggcatgggagagccctggttagaatccagcagcttctatactggagtactcaacagggtc

SEQ ID NO: 119092 - DNA, 122 bp, Homo sapiens
tacagaaaatacttttttttcagttaatttcttaattataggcgagatctatgttcccagcgcagatacttgatgggtgtctatttaataatgtgaatatttagtttgctttcacgaaggag

SEQ ID NO: 119093 - DNA, 122 bp, Homo sapiens
gacagtgtggtatgacctgggcaggtatagatcacactgggtcaggtgtaaaccctagaacggtgagccaccaacccagactcagcgggtcagctgcggcccctggccaggcggcccaggca

SEQ ID NO: 119094 - DNA, 122 bp, Homo sapiens
tctcagctggagggtccgtgcccactgcccctttccaccccgccccgggggagagcccagcgtgcactcccagctacacacctgcctccttacaggtggctgccagaatccgcccggtggct

SEQ ID NO: 119095 - DNA, 122 bp, Homo sapiens
cggggtcgcgacgagggtagtttgggcctcagaagggggcgatccgctacccagtgcgcgcggaggcctggcccagaccgggaaaagggccccgctgcctactaccagccggtagtcctggt

SEQ ID NO: 119096 - DNA, 122 bp, Homo sapiens
gcgaaccgagccggcagcgaactgctctgcggccggggaagtggaaggcaggtaggcgaccggccgttcctctaagtctccgccacgcaggaaacaaaagcgatagaaggtccgttcctgtc

SEQ ID NO: 119097 - DNA, 122 bp, Homo sapiens
atagagggggaggcgggagggggggcggaggggcgccgctctccgcgggagatgtggggacgactccggaaatctcgggaaataggcaataactcgagctttggcaacgtcccccagcctag

SEQ ID NO: 119098 - DNA, 122 bp, Homo sapiens
gggcagcgcgcgaccgcgtgtcctttcacagcgcaagtgcggaactgcgtttgtttccggcgtgggtccgggcaagaaccgcttgtagtttggtttaaattctgcacgggaggaccttctga

SEQ ID NO: 119099 - DNA, 122 bp, Homo sapiens
cagtagtttcggtttctcaacagtttccttttcctggcatttgtcaaatcgggatttggccggggccagatgagggcggaacaaattcctgaggatcaaattactttaggagagggaggaaa

SEQ ID NO: 119100 - DNA, 122 bp, Homo sapiens
caaagagaaaggcaaggggaaagtgaacacttgaagtaggcacggcgatcctaaagccaacgaaactcaaaagaaattggaggcgtagtctgacctgctccttctgggcctctgccttgcca

SEQ ID NO: 119101 - DNA, 122 bp, Homo sapiens
tccacgaaaaagggcggttcatagaggaaattccaaccaaggctccttgggtctgaatcccgttctcattcttaccagctgtgtgatctagagtctatgccttggtttcactcatttgcaaa

SEQ ID NO: 119102 - DNA, 122 bp, Homo sapiens
gcttcagagcctttcacattttactgggtaaaggagatagggagagaggggagttgttgtcggtcagcagcttgatttacagcagacttgcaagactgcattcttctaacaacaggctctag

SEQ ID NO: 119103 - DNA, 122 bp, Homo sapiens
cttctagtgtctgccaggactctcccaatacagaccattctgtttaggcattcatgtatacgaaacaatttgaaagaaaaattttagtttaagaatagagtcatgcatgtttggatttgctc

SEQ ID NO: 119104 - DNA, 122 bp, Homo sapiens
ttcacaaatgacaattttatactgtttagccccaagggcagcttgagagaatcacaattgcgatagtcatacttagtcttgatgtatcacctttcttctgagaacgtaaaaacatatcataa

SEQ ID NO: 119105 - DNA, 122 bp, Homo sapiens
aggttgacagcaggcttgactgggtctcaggcccctgctcctcagggccacttgatcacccgcagcgtccactaggggggaaggtcttggtcatgtggcgtcaggaaatgccctagagggcc

SEQ ID NO: 119106 - DNA, 122 bp, Homo sapiens
catctcaaaaaatcttggctcagagagggtaagagattcaccttggctacaaagccagaccgcagccaagattctaagtctgtctgaaaccacagttgaagccctttctcccaggaaacacc

SEQ ID NO: 119107 - DNA, 122 bp, Homo sapiens
ttttccccttctagtctcatattgacctctactgccagatcaattttcctcaaatccagccgcagcctgttacttcaaagctagtaatgcctgcttcatcacatccctctgtaaattccaga

SEQ ID NO: 119108 - DNA, 122 bp, Homo sapiens
catcaagcagatcctgctcgagtggtgccgcagcaagacgctgggctaccaggtgagccccggctcccctccggctgctgggacgccccagctaaaagcttgaccaagcgtcgcccctgtcc

SEQ ID NO: 119109 - DNA, 122 bp, Homo sapiens
ggaagcccagagccggtgattttggtggcctgtgttccccttggtgagctctctactcttcgctataccaaaaattggcgaggtggggcaggaccattcttggaacaaatgaggcgtataga

SEQ ID NO: 119110 - DNA, 122 bp, Homo sapiens
ttaaaaaagtatcgatcatttatcatggaaaaatacaccagcttacacaaattcttaaagcgtttttcgtgtgtgtttttcgtgtgtgtgtgtgtgtgcgtgtgtgtgcgtgtgcgcgtgtg

SEQ ID NO: 119111 - DNA, 122 bp, Homo sapiens
tggttttgttttgtcttgacctatgagtttgaagaagacaaagtggctctgtaaataagtcgacttcatttttaaagcgtttggaaaggttaaatgaggttgaatcttgagagtctttttgg

SEQ ID NO: 119112 - DNA, 122 bp, Homo sapiens
taagtcacagaactccaaattccaggctccttcccctacactaaaaaacttttaaagaagcgtaggagtgtggggctcagcggctcacacctgtaatcccagcactttgggaagccgagact

SEQ ID NO: 119113 - DNA, 122 bp, Homo sapiens
tgtcaatcacttctgacactctactcatatcatgttcctaaggaagttgaacaaaaggagcgatagccaaatgggactaactataatagctaatatttattgagtacttattaatactgtac

SEQ ID NO: 119114 - DNA, 122 bp, Homo sapiens
aaggtcccaggctctgcttctgcccgcccgcggcccgcggactgcgggtgacagggtccccggtccgagccccatctccctaggagagcggaccccagcgctcctgtaccctccacctggtg

SEQ ID NO: 119115 - DNA, 122 bp, Homo sapiens
agagctgctgggagtgtctcataggctgtggcgacctgggaagctgctctgcggagcctccggaggcgcagatttcagcacatcgagagcagatgagcggctagtcccaaaactgtccgcgc

SEQ ID NO: 119116 - DNA, 122 bp, Homo sapiens
cgaacccagcgccgacgaggacgacctgatgacctgctccaatgcgcgctgccggcgcaccgagaccatgttcaacgcctgcctctacttcaagtcctgccacagctgctacacctactact

SEQ ID NO: 119117 - DNA, 122 bp, Homo sapiens
aaggcgcccggttttgctgcgcgttcacctccggtcccgccccctcacggggcgggttttcggccccctattgcatcgggacatcccggagttttagaactcgcggaggcccaagtatctcg

SEQ ID NO: 119118 - DNA, 122 bp, Homo sapiens
catttgtattcctaagccctttgccatgaactgctgatgtccccaaacaaaaagaaagctcgtggtttctgttctggtaaattaaaaagccctttagcttaacagcaaagcatctgtctacc

SEQ ID NO: 119119 - DNA, 122 bp, Homo sapiens
atgggaaaggcaggtgagaaagtaaagacaggggtctgttctgagaagggaccgctaggacgagagggggtgtgtctgagcatggagttaactagtatagacagacaactcccagaacaaga

SEQ ID NO: 119120 - DNA, 122 bp, Homo sapiens
gaaaggggtccccagagagaagggcaggtgggcctagagtcacttccttttcgcagaggacgattaagctgactttatgctcataggagagttgtttgggagataattaacacttcctttcc

SEQ ID NO: 119121 - DNA, 122 bp, Homo sapiens
tcccttggctgttctctgagctcccaatacttccctccttctctttggcccctgctaccccgcctagcatcatttcctgtgcgctggatgctgattggtccgacagtcggaagtgagggcgg

SEQ ID NO: 119122 - DNA, 122 bp, Homo sapiens
agaaccatttcttggttatctgttaaataagagtgcatgtccagccgcgatgactgtggacggccttggaggtctgggaggccacgaaggactcccacacacagcagggtgtgaacccacca

SEQ ID NO: 119123 - DNA, 122 bp, Homo sapiens
tggtggcaaggtgggcagtgaggagctggcggtgcagcaaaagccagtgggtactggccccggcacggctgataagcagtgcccagccttcgctgctgccctgcctgccttcccagccgccc

SEQ ID NO: 119124 - DNA, 122 bp, Homo sapiens
cagacgcgaggcgctgtcctgaggtgacaccggctgcacggcacaagcagcaggcgccgccgatcaactagttcgcaccgaggattcctcttggtgcgtggcccagttttccttaggacggg

SEQ ID NO: 119125 - DNA, 122 bp, Homo sapiens
cgcggaagagcggggaccccgagaagctcgcgaagaaccccaagaacccggcgcgggaggcgctccccgaaaagttcctaacagacaaggagcgcaagaagctcgagaagaagctgctggag

SEQ ID NO: 119126 - DNA, 122 bp, Homo sapiens
gactctgcagtcttcagggctggtgcccttcaccgatgcagcttcacagcttttccatttcgggtcaccgttacattgtggtcctttccccggccctggactggccaccactggacagcagg

SEQ ID NO: 119127 - DNA, 122 bp, Homo sapiens
acaccggcggggcacggctagttcctcaaggcggccaacctggaaaccaacaacaggactcgggtcagggcaggggaagggggcctctgaccaccacgtgctcccagcacaggtgacccttt

SEQ ID NO: 119128 - DNA, 122 bp, Homo sapiens
tgttttcagttgtcaccgagccaagggctaccggcgcgaagggcccggcctcctgcaatgcgtggggcagtgatgcgccatgaggaaatgtcacggatcctacgtgacaaaatagtcttgcg

SEQ ID NO: 119129 - DNA, 122 bp, Homo sapiens
gctttttatagcttcatggcggaccacgttgagaacaacaacagcctggtccggggccagcgccaacttgtgcttcttggagccccttctccggccgctggcttctcggaccgcgcctctcc

SEQ ID NO: 119130 - DNA, 122 bp, Homo sapiens
aaggtggttgcttaaatatctgagtcaacacacactgatttctctccggctcaatactcccgtttaattgcactagggagtctctccactgacaaatctaacaccaagatatatagttaagt

SEQ ID NO: 119131 - DNA, 122 bp, Homo sapiens
gcatccaatgcctggttccaagtgtcctcctcatcttacctgcatggtgaccatccaggacgctctccctgagcccgctgcttactgagtgccacggaggcctgcagggggagtgggcacac

SEQ ID NO: 119132 - DNA, 122 bp, Homo sapiens
ccggcacacagcatgtcatccaggatgagctgccggtcgccagtgtgccctgaggcgttgcggtagggctgctcacagacggcgttctccagcacctgcacactcgcctgctgcaggcggta

SEQ ID NO: 119133 - DNA, 122 bp, Homo sapiens
ggggcctctggatggagctcgctcttgggactttcatatgcgggtgccctcacatccacccgtcatccatcttcccttctgtctttgcatcacataatggcagctaccttttgttgaagaaa

SEQ ID NO: 119134 - DNA, 122 bp, Homo sapiens
cggcagtagagcggtggccaggccgctggccttgctgtggcgatgtggtggcccaggaggcggcaggacggccaagaccagcgcgagggccctgggcaaggcccgacaggtgagcggggagg

SEQ ID NO: 119135 - DNA, 122 bp, Homo sapiens
tgaagtattgtatccccaaacttgcatgttaagtaggtgataatgtgtacatttgtctttcgtatacttttaaaccataaaacactgaactacctcatttttaacaagtttctttccctccc

SEQ ID NO: 119136 - DNA, 122 bp, Homo sapiens
acgcgcaaggaacctcaagtcccagaatcctatgaggactccaaatcccagaaacctgcacgcaaatctatcccgggtgccaagtcggccgaccgcagacgtgaccaagttgcgaggctagg

SEQ ID NO: 119137 - DNA, 122 bp, Homo sapiens
ctggcctcccggtcagcccgggtgctgtctgacgatgacaagcagcgtttgcagctggatcgtcagactggagatttgcttctgagggagaaactagaccgggaagagctctgtggtcctat

SEQ ID NO: 119138 - DNA, 122 bp, Homo sapiens
ccctgtctggctcctctctgtgttgccggctccaagcagagactggccacagccaaggctcggcaaaggtttctttttggttgtctgttcccagttggacgagatgaaaacaaacaaaaaaa

SEQ ID NO: 119139 - DNA, 122 bp, Homo sapiens
cgagcgcgggtcgggggccggacgccgagcgggcaatgcggctgacggagagtgaaagtgcggcggtgggaggcgcgcgccgggcgctttagaggggagagccaggcggggcggggcggggc

SEQ ID NO: 119140 - DNA, 122 bp, Homo sapiens
agccagccagtgcgtggagacgcagccccaacgtgctgctgctgctgcggacacctggggcgtggagccagggcacggggcagctgtccctctgcagccacacaccacaggggatgggcacc

SEQ ID NO: 119141 - DNA, 122 bp, Homo sapiens
gaggccagcttggccttggagtacagcacagacaccaggaagctgggtgggcaggggccacgcgcaccgtcatccacccgcacgcccggcctcctgggcaggcccgtgccagggtccagggg

SEQ ID NO: 119142 - DNA, 122 bp, Homo sapiens
tctgcagcaacaactgcgagaaggactcggtgattgtgtccatcatcaacggcttcacatcggtgtatgtggccatcgtggtctactccgtcattgggttccgcgccacacagcgctacgac

SEQ ID NO: 119143 - DNA, 122 bp, Homo sapiens
cagtggcgcccaccagcggccgccctccggggcccgcgtgggcactgacctgtgtgcgtccgctggtgtgctttcaagtgggagcttttggtgtaaactttcctgcagccgttaaagtggca

SEQ ID NO: 119144 - DNA, 122 bp, Homo sapiens
tgtactgaaaatgaaaaacagaatggctgtatgtgcactcaaagtatgatttctactgaacgcatatggcttttccactatcccaaatgccaaaaaaaggaaattcctgcaagttggggact

SEQ ID NO: 119145 - DNA, 122 bp, Homo sapiens
agctcaggcagagtcagggccaacctcggcccttcctgtgtttgcttctgggaagcccggcgtgcgtgggctcagacagctgccctcctcctctcagccctcagagcctggacctgggcatc

SEQ ID NO: 119146 - DNA, 122 bp, Homo sapiens
ccacccctccccctttctggggtgtgggtgctccctggatggtctgtggattcggtcctccgcagccctgccagccttggggacaataagccacatgcagtgggaaggcttggcgccctgcc

SEQ ID NO: 119147 - DNA, 122 bp, Homo sapiens
attataggcatgagccacagcacccggcctctgcattccttttcttttccatgtcgcggtcgcctgttgcggcacattcttcagtgtcttccacttgcgccccatggcctttctggcttcag

SEQ ID NO: 119148 - DNA, 122 bp, Homo sapiens
aagatggttctgacatccaagcaagtccgaaatccctgcgcagaggcacagttcagctctcggaaccacatgctgtgcttagacatccggtcccgagttcttcaagacccaaggggtgtttg

SEQ ID NO: 119149 - DNA, 122 bp, Homo sapiens
ctgggaggtgggttgggactgaatgagcccactgtggggttcagagtgtttaaggccttccgggggcctcagcccctcaggcagcagggtgagaaactcccaaaagctcacccaaaccacgc

SEQ ID NO: 119150 - DNA, 122 bp, Homo sapiens
ccagtgcaggctctgaaagatctggtggataagcttcaagtgttaactggcaatgagggccgcgtgtctgtggaaaacaaccagctgttgcagtctgcccacaaataatccagctttgacat

SEQ ID NO: 119151 - DNA, 122 bp, Homo sapiens
caaaggaatttagagaacctatcccaaatcccaggttcctcttggatacagcattttaatcgtcaacacccaaatcttgtgatagaaaagggcgggcacaccaataacttggaaacaacatt

SEQ ID NO: 119152 - DNA, 122 bp, Homo sapiens
gcgcggtctcctgggaattgtagttcctccgtgagcggccggcagcggcgaggccgccggcggactccagcgcctaggaagccctgcgcaggcgcaagcgtttcccaggcaaccacgccgcg

SEQ ID NO: 119153 - DNA, 122 bp, Homo sapiens
tctgcagtttttgcacagaagtccttccaacatttgagccttttcttgcatgttatttggcgtctaagaggaggcttaagagccatagttcacaaaaattttactagcctgtattttttttt

SEQ ID NO: 119154 - DNA, 122 bp, Homo sapiens
agctcaagtgtctgggtgcccgaaggagtttgacccttgccctaagcctggccctggccccgcagccaccccttcctcatgtgaccctgcccaactcagggctctctgtgtctcttggatct

SEQ ID NO: 119155 - DNA, 122 bp, Homo sapiens
ctctctctgattattttatgacttccttttatactttgtccattccactactgttgcctccgtgctatccaagcactgtggtaagctgatttatatacagtatcactctccctacttttaca

SEQ ID NO: 119156 - DNA, 122 bp, Homo sapiens
aaactccatcctttttatcccgaggagttatcacagtttgtaatcacgtgtgatgacctccgccttccctaagaaactgtatgttctacacaggtaggaacagtcagcttgactctttgtag

SEQ ID NO: 119157 - DNA, 122 bp, Homo sapiens
gcctggggacactcgcggcgggaagatttggaggggaggggagggggaggggcgtgggggcgcggcctcgctggagtccccctgaccccccgacccccgcccaccggcctgggcgtcctccc

SEQ ID NO: 119158 - DNA, 122 bp, Homo sapiens
acagatcaggcctggagtactgcccagggcatatggggaggagggacacagggaatgtggcgcaccctagaggtcacactggagttctgtctccctggagaggggtgagtgattgggcccac

SEQ ID NO: 119159 - DNA, 122 bp, Homo sapiens
aagctgccaaactcccaggagacaggggttcagatcctgtgctatggctgagagtgatgccgaggaagacacttccctccgagtcttagtctgcccgcctgtgaaactggctcgtaacaaac

SEQ ID NO: 119160 - DNA, 122 bp, Homo sapiens
taagcggtcggtgcccggaggcagcaactacagatgggggttggagtttcctccgctctccggtgtggcccgcgcagggacccggcggccctcggaggactctgcagggcggggtcacgggc

SEQ ID NO: 119161 - DNA, 122 bp, Homo sapiens
accccgggagcatcgcaagcctcgagcggcgtgccttccaccggatagacggacgctcgtcgcagaaacacacaccataattgtatagttaaggaactttcgaggggggccagccgtggcct

SEQ ID NO: 119162 - DNA, 122 bp, Homo sapiens
cttcctcttcatctgcctcctttaactgtggcctcggccctctggggcgacaccagagcgcggaagcctgagcccctcggagatccggggaggcacctacacatggcctcaatcctccaacc

SEQ ID NO: 119163 - DNA, 122 bp, Homo sapiens
gcagggagtcgagtgagccaaagatctcctccagccccccaggactgccgggggctcccccggtcggtatggcctcatcttcctgcatcagacggcttccatccaccgagcgccgagtcttc

SEQ ID NO: 119164 - DNA, 122 bp, Homo sapiens
cacttcccttatatgggctccttaacaaaaggctggaaaagaatttggccgcctacttaacgggcattatatgctaaataatgttggcttatagtgaagattgtcccgtgaagccaaggcgt

SEQ ID NO: 119165 - DNA, 122 bp, Homo sapiens
accagaacctggcttcctggatccaggggtgtctgggtgaaatgatcagcctgttccccacggcgagtcactctcagcacagagatgtcattgattgtaccacggtcatcaggctggtggaa

SEQ ID NO: 119166 - DNA, 122 bp, Homo sapiens
tttacgagccacggagagcttcggggctggagggccggggcctgcgaggccactcattagcgcctgatgaattggacatggggccgatggccctcctggggcagccaaatgctcgaaaacca

SEQ ID NO: 119167 - DNA, 122 bp, Homo sapiens
agtgcgcgactccggtgtccttaaagcagggaccactaaagctgtgtgattaagtttgagcgaacgtttggggacacgatccgcgaatgtcatcagactctcagagggaccaggtgttctgt

SEQ ID NO: 119168 - DNA, 122 bp, Homo sapiens
cgagtgaaccctcttttcccgcagtccagccctgactgaaaactgcgcaccgaccgcagccgggattacatcaatcaggcacaaagctggacacctgggacaggataagcgcacgcgcactg

SEQ ID NO: 119169 - DNA, 122 bp, Homo sapiens
tgcggacctgtttactgagccatctggacaccaggacgagcggagcctgacgccctagagcgagcgtcctgtcctcatcctcaactctcctgcctcgctggtccgtctgtggggaggggcct

SEQ ID NO: 119170 - DNA, 122 bp, Homo sapiens
gctcatattaataggaatcctgagtgtacacatgtctattaagaaacatgcagtacatttcggtattaaaagtagatcactgcttagatttggtcagcaggtgactggcaatgtccctttca

SEQ ID NO: 119171 - DNA, 122 bp, Homo sapiens
ccgctcgagccccctcgtctctcacttgctgtgttttcccctcttttcccgggcgtcctccgcctgtatcctgggccccccaagcagcgagccccggtgccccccacccttacccctcctcc

SEQ ID NO: 119172 - DNA, 122 bp, Homo sapiens
gccgttccggctccaatgtgggccggcctcccgctcccctgtcaatgtgggccggcctcccgctcccctgtgctgcgagctccacggcccgctctcagtggctgcctcagtgccacccctgc

SEQ ID NO: 119173 - DNA, 122 bp, Homo sapiens
tatttgaaaagaaaacaagatggaaagaatatatttcactggaatagcatgtgaataagacgtgaagttactggaattagtgttctaaggtccttttgaaactgcctttgcaaaattataac

SEQ ID NO: 119174 - DNA, 122 bp, Homo sapiens
tcgtcaaaacaactttaggaggttgggcactgttattatcccaactttgcagacaaaaaacgatatcacgcttgagcccaggaggtcgaggctgcagtgagccatgttcgcggcactgtact

SEQ ID NO: 119175 - DNA, 122 bp, Homo sapiens
tggtggatggcatcagccgtgagcactccagctgggacctggtgggcctggagaagtggacggagtaccgggtgtgggtgcgggcacacacagacgtgggccccggccccgagagcagcccg

SEQ ID NO: 119176 - DNA, 122 bp, Homo sapiens
tcgggcagcccgggggcacaggcgtccggcacccccatggccatccccggggcagctacgcggcctttgtggatgccaacctttgtcacagccaggagggggcctccctcgggaggggctgt

SEQ ID NO: 119177 - DNA, 122 bp, Homo sapiens
aggtccaaggcccagatgctggtgggctcagggacactgaggcccagagcttcaccccatcgctgtttgcgcctgtgcaccctgacacctgtccatcatcccttggaccaggagtgcaagga

SEQ ID NO: 119178 - DNA, 122 bp, Homo sapiens
cgcacgcctcatatttagcattacctgtgctggggcaagcgattgacatactgtagcggacgcaagtacagcggatctgcggcgagtccccttcgctctccgtagtgggcggggcttcaccc

SEQ ID NO: 119179 - DNA, 122 bp, Homo sapiens
atttgatactaaaagacaaagcaacagcttaggctaaggcacctacagggacagtggtgccgatcaaaggaggtgtggcatggggcagggaacagatgcaagtgttgggtttaagaatttag

SEQ ID NO: 119180 - DNA, 122 bp, Homo sapiens
cggcagaatctcccgaagtccacacctctcactccagcctggactttgatgctgtgggcacgcctcagagccagaagtttatggctcccacctgctcaatctgacaggaagcttctgctccc

SEQ ID NO: 119181 - DNA, 122 bp, Homo sapiens
ctgggattacaggcttgagtcaccgcgcccggcctgtatttatttttatatagagaagggcgagggagcggggtcattttgttacccagactggtctcgaactcctgggctcaagcgatcct

SEQ ID NO: 119182 - DNA, 122 bp, Homo sapiens
gatcacttccggtggggaaagtcccacctcttcggggcgagccgggtggcgctggagccgcgccctgctgagcgagcgagccggccggggacggtttcgggtcgggactccggcttcgggaa

SEQ ID NO: 119183 - DNA, 122 bp, Homo sapiens
ctcaagcaaagatttcagttacacagctacggcattttctccctttcttaataacaaacacgctacagaagaatgtttgtcactgtaattattgtccaggcaaagattgcaaattccagcca

SEQ ID NO: 119184 - DNA, 122 bp, Homo sapiens
tagggagcccgacatttgggaagggcaggcttgcctctgggatggggaggagccggtgcacggatcctgctgtgcctctgtgcagggcgcgcccagtagtttgggatttgcaagaaaatgca

SEQ ID NO: 119185 - DNA, 122 bp, Homo sapiens
ggcctgagagacggggtcctcccgggccacgggctcctcacctgagcttgctcttgagtgcgttcacctcgcggcccatggcctcgttgctctccgtggcctcatccagctcccgctgcagc

SEQ ID NO: 119186 - DNA, 122 bp, Homo sapiens
cgcacgtgggaaccgttcgcggctgccgggtttgcagcccctgcccgcgcagctgggagccgcaggaggcggcccgggactccagcctgcagcccctatcccgcctcctcccacgctccagc

SEQ ID NO: 119187 - DNA, 122 bp, Homo sapiens
aatgtgtagtctagtcacctcattttccaagtcaggaactgaaaccctgaaaaccccacacggttcagcaggagaactggtagctggctgcctagactgctgaccccagttcatccattttc

SEQ ID NO: 119188 - DNA, 122 bp, Homo sapiens
ggcagcggtgggagccctggggtaactgggggttccaggctgcagagccccccttccaggcgccctgcgatgcgctccgttaccggggcagggagccggaggtctcccggcgcgtgccggag

SEQ ID NO: 119189 - DNA, 122 bp, Homo sapiens
cagctccagcctacagggagaagcatgcacccacacatcagaaagccctcccaggcccagcgagcacttctgcttatgtgccagccaagtgtgtgtaacagggccacagccagctgtgaggc

SEQ ID NO: 119190 - DNA, 122 bp, Homo sapiens
gcttcgccttaaatgactgcatccctccttcaactcagccattccctgctgtctttgaaacggacacctttgtttaaaacaagaaagaaagagagaaagggaggaaagaaaagaaagagaga

SEQ ID NO: 119191 - DNA, 122 bp, Homo sapiens
acgggccaccctcaccccgagtcccgctggaagccactcgccaagcagcctctcaggtaccgccctctgtgataaacagggcaccatgtccaggccaggagcctccacgagagaaaggtcag

SEQ ID NO: 119192 - DNA, 122 bp, Homo sapiens
gaccctggggtccaggctcaggagagcccaggcagaggctggctgcagtctgggggctgtcggcctccacgcctcctatgctggcgttccttcttcctctctccgtctccctctcacgctgg

SEQ ID NO: 119193 - DNA, 122 bp, Homo sapiens
gggaggcccagctcagcctccaaaacacgcagggggctccaacacacctctaatgttggacggtgaagccgggcttccccagcagaggctactgggatagcacaccaaattagcttaatgag

SEQ ID NO: 119194 - DNA, 122 bp, Homo sapiens
ggccaagagagagcgcagccagcctcgcccaggcggggcgccagtgcctcaggcttggggcggctgttacttgggaatagctttgtgggtcactgcgggtgaatctgcacacagaagatgtg

SEQ ID NO: 119195 - DNA, 122 bp, Homo sapiens
actcagggcactttttcagccaggaatttactacctttgcagggtaaaggggactcaccacgctggaagtcaaaataagccaccagtgccaagtgttcaaagcccttagaatcacaatgctc

SEQ ID NO: 119196 - DNA, 122 bp, Homo sapiens
agaaaagtatcaggaaggcactatgatagcagtattctagaaagttcctgatgtccttatcgtttcgtgactctaaagtttcgtcatgaaactcagtgtttgctttttctccttctcctcag

SEQ ID NO: 119197 - DNA, 122 bp, Homo sapiens
agaaagtatggtatagatgagctgaagccccagaattatcattagtatcagcaactatttcgtagaccacctactatatgaaagataatatcccaagttatgagggagatacagatgggaat

SEQ ID NO: 119198 - DNA, 122 bp, Homo sapiens
ctgtcagaggagtcccatgtctcccaggaataggtttgtctcagtacccctgctgggttccgctattgcctctggaatcagcccatgagaagtgcagtctggtgcccacacagctacagtga

SEQ ID NO: 119199 - DNA, 122 bp, Homo sapiens
ggttggaagaataaacacccagatcttcaagacgtaaagtcccttgcagagaacccagaccggcccccttatttatggatgagaatcctgaagcccagattgtggcttttgaactaagctca

SEQ ID NO: 119200 - DNA, 122 bp, Homo sapiens
attgggaagcgtgaggaatactgccctaggtacaaagggaaggcggcaggtagcggtggacgaattaaagagcttcatgagcttgtgagtctccactgccctaaactggaggggatcgtcgt

SEQ ID NO: 119201 - DNA, 122 bp, Homo sapiens
ggcctggacagctggttctccagccgcggccagaggaagaagtgctgtcggccatgggaccggggacagggaccccagttccctgacctccagccaggagccccaggccctggcgatgccat

SEQ ID NO: 119202 - DNA, 122 bp, Homo sapiens
acacttgtttatctgcacagcgccagcctaatatctgacccctgatgtcgcatcgtggggcggtggtcagcagtgccatatctgagttttcagcagtgtgagatgggtgttctaattgcacc

SEQ ID NO: 119203 - DNA, 122 bp, Homo sapiens
aagaagaggacagcagcactgactgaacatcttcttaggggtcaactaggattatacacacgcatttaaagctcgctttgcagtcgtccccaccctttcccgcccttccttattgggggcca

SEQ ID NO: 119204 - DNA, 122 bp, Homo sapiens
agtggctctaaagacaggcccctgggctctttcctggctctgactcagcttcaaacctgccgtgcaactgctcagagtctaaatgtcttcatttatggaactgaaataatcctgctaagatt

SEQ ID NO: 119205 - DNA, 122 bp, Homo sapiens
tgcgggccccagcccgaaagctcagccccagttccctggagctgtcaggacctgtggctgcgtccggggatttgggagcgaccgcgggcacgtctgctgactaacgccgctggttagagacg

SEQ ID NO: 119206 - DNA, 122 bp, Homo sapiens
aggccatacgcttccaagtaatacgcagttttttgttcttcatctttctcgttctgggcacgtaacctttataagacataagaatggaattttaaaacattatgttattattactaaatgtt

SEQ ID NO: 119207 - DNA, 122 bp, Homo sapiens
tgttcggctccctgacgattgctgagttgtctgtgtattgtccggggtaactatgggtcacgcggagtctaaacgttatgcttatctctgctatattaaactcctgttaaaacaggggagag

SEQ ID NO: 119208 - DNA, 122 bp, Homo sapiens
ggcttgtagcccagctggaggaaggactgtcagcagacagtgtccagctgtcagcaccttcggggtctgccttggctgcagagagctgcctcctctgtctgaggtcaagccttttccagggg

SEQ ID NO: 119209 - DNA, 122 bp, Homo sapiens
aaagcaggcgggactgactttggctcttcagtgtttgcgcatgcgcgtaacgtcctgaggcggtgggtggtatattaggcgaagaggcggggtcgcccaagctgccgcgctggcattttctc

SEQ ID NO: 119210 - DNA, 122 bp, Homo sapiens
taaatgtgttatttgtatggcccttataaaggtgtttgctgtaattctgttaaaagacttcgcctatgccatactggtgtataaaaactgccgcaattggacgccggtgtggtactcatttc

SEQ ID NO: 119211 - DNA, 122 bp, Homo sapiens
gtttcagtatcaattgcaagtctaagatctcatctaaatacaataggccctccctatccacgggttctgcatccatggattaaaccaaccacaaatcaaaaatatttggaaaaaacaaaaag

SEQ ID NO: 119212 - DNA, 122 bp, Homo sapiens
tgggggcactctcctggggtctgtgacagcttgcccccaaccacggagaggtgacaggcacggtaacaatcctggggagtgagagcagccttaggggtacctaggtcacctgccttgggcca

SEQ ID NO: 119213 - DNA, 122 bp, Homo sapiens
ggggtctaattcgattgtgacgcagttgaaattagcttctcccccatgccttccctttcacgcttccgtcctgacgcaaacgtggggccgccttccgcactgcgggcttgtccttggccctg

SEQ ID NO: 119214 - DNA, 122 bp, Homo sapiens
gcctcccagttcctggtgttaccgcaccagccgcctcccagtgagcatctccacgtgtgccgacaacagctttgttgaggtagaacttaccagactcacctgttaaaagagtgcagtttggt

SEQ ID NO: 119215 - DNA, 122 bp, Homo sapiens
gggactggggcgggacggggaggggcccggtggctcggggcgccactagtgctgcctgggcggagcggaggcgccagcggcccctctgggatcgacctgcgcgcctggcgagtggagactgt

SEQ ID NO: 119216 - DNA, 122 bp, Homo sapiens
gttactggcgggcgtgtctctggatttttcctgtctctccaaagctgtccatctagtcctcggtgagcctctccccagcggccccagggaagcggcccacttggttcaacttctccgtaggg

SEQ ID NO: 119217 - DNA, 122 bp, Homo sapiens
aggggatggctggtttgggcagtggcaggcactgcagtccattctgacaagcagtgggtgcgtgtagggcagtggtgagagctcaggtggaaagggaggcaccagatcacagagggcctgtg

SEQ ID NO: 119218 - DNA, 122 bp, Homo sapiens
gatggcggtccagccacaatgacagcagcgcatgacaggagcccaaagacccgaaacagacgcagggcatccgccaaggcagttcccaccgggcaaccctgtgggtgtgctcccagccttgg

SEQ ID NO: 119219 - DNA, 122 bp, Homo sapiens
agcgtgggctggcgggcgactccccacgcctcctgcaacaccgccctctccctaccggagcgaggaggcaggaaaagcctagagacgcctggtcccatccgcctacccagtccccagccggc

SEQ ID NO: 119220 - DNA, 122 bp, Homo sapiens
cagtggcggcactgaactcgcggcaatttgtcccgcctctttcgcttcacggcagccaatcgcttccgccagagaaagaaaggcgccgaaatgaaacccgcctccgttcgccttcggaactg

SEQ ID NO: 119221 - DNA, 122 bp, Homo sapiens
gccgggcacgatggctcctgcctgtaatcccagcactttgggaggctgaggcaggaggatcgcttgagctcaggaattcaagactaagaccagcctgggcaacataatttaaaaatctaaaa

SEQ ID NO: 119222 - DNA, 122 bp, Homo sapiens
acacgattgtggcgagcagtcagtactttaattcaggtcaggctccgacacctggggagacggggtcctgcccgccccaccctgaggtggaacccccagctgctcctgggcacagaatcatt

SEQ ID NO: 119223 - DNA, 122 bp, Homo sapiens
agctgggtcaggacataaagcttgccactgaagaactactgcggctcagccaggtgagggcgtgagaggaacaggctcctaagggaaagggagggaaaatgggaaagatctgagcagggcat

SEQ ID NO: 119224 - DNA, 122 bp, Homo sapiens
actcaaattctacctggctaattccggtgattaattattgacaaaaggaaaacactcctacgcaaacttgtgtccaaccgcactgctcccagcgactccttccagaagagaatgcctgctgc

SEQ ID NO: 119225 - DNA, 122 bp, Homo sapiens
aaagttgtaaaaaaaaaaaaaaaaaaaaaaaaactagatattcttttctcttcatattatcgtcagtactttgggaaagagatttagcatataatatcaattagttttccgaatgtaattgc

SEQ ID NO: 119226 - DNA, 122 bp, Homo sapiens
gggagatggtggtcagggatctctgccttacagattttcaataaccctcctgtctgcagccggcccagatgcagggaccctccaagtcctgagctcactcggttccctgcgcactttttggc

SEQ ID NO: 119227 - DNA, 122 bp, Homo sapiens
aggaagccgacttggagagaaccctggatgtgtccacagtcactcctccgcccagtggagcgatccaggcagaaatcggggccctgagtctgaatccgggttctgcaaccagggcagatgcg

SEQ ID NO: 119228 - DNA, 122 bp, Homo sapiens
atggtttctcagtggcagttcatcccagcagcttctcctttctctgcctgtgacttctgccgcacttgcgggtgctaccatacactgccggtggtgttggtcccatggtgacacagcgcttg

SEQ ID NO: 119229 - DNA, 122 bp, Homo sapiens
agctgtcgcgccagtgccgggcgctgctggagatggggcacccggacaggtgggcgggcgcgtggccagttcacaggaatggtccagcaggacctgaagcttcgctgttgggagttggcgca

SEQ ID NO: 119230 - DNA, 122 bp, Homo sapiens
ctggctttttatttggggcagtaaaataaggtccctgttagcaaagtaaaatgtaatcatcgcaaagtgattgctacagattaactggaaacttgctctcaaagtcttctccccagccaatg

SEQ ID NO: 119231 - DNA, 122 bp, Homo sapiens
tggcaggctcccgtagcctcctgggaaatgtagttctccttggactctagcctgtttgctcgcggggtagcggactacgctcttccagctgtcggacctgggaaattctcctgtgctaaatc

SEQ ID NO: 119232 - DNA, 122 bp, Homo sapiens
atggctgcactgcagccctgctcaccctggacccccttccctcttgtcccctgtgctccccgaagttcacctcctagttctaagggagcaccttttccaggagcacctcaggcagaaccgca

SEQ ID NO: 119233 - DNA, 122 bp, Homo sapiens
tcggccggcaggtggcgccatggccacccccgggacgctcagggctgcggctccggagcccgcatttgaatttccccagaaaaccataagcatgcaagtaaaagttgccaaacgcctcgttt

SEQ ID NO: 119234 - DNA, 122 bp, Homo sapiens
gacgcctgaatcttgtttctcagaagagccgagaggcctaggctcaagcttggggcgatccggtacttggaggttcgaagctcctagtttcgggttgagaccgatgtggagggcgatgacgc

SEQ ID NO: 119235 - DNA, 122 bp, Homo sapiens
cctcctcctggctgctggacgggaacagctggctgctgtgctatggcttcctctacctggcgctctacgcgcaggtgtcccagtccaagccgtgcgagaggaccggctcctgcttctcgggc

SEQ ID NO: 119236 - DNA, 122 bp, Homo sapiens
ccgcaggagatagggcctggctcccgcttcagcaccgcgtggcctggagtgcagttctggcggccaagatctgagggctgtagcccgtgccctcaccaggatcccagacttagagtccctgc

SEQ ID NO: 119237 - DNA, 122 bp, Homo sapiens
caagcggctcagcctcaagtcctgcgagagcatcaccggccagggcttgcagatcgtggccgccaactgctttgacctccagacgctgaatgtccaggactgcgaggtctccgtggaggccc

SEQ ID NO: 119238 - DNA, 122 bp, Homo sapiens
agccgctccccatccctcgcattaccgcatgagctctgccacctgtcagatgagtggtgccgttccattctcatagaacccaactgggaactgagcatgccagggatctagattgcgtgctc

SEQ ID NO: 119239 - DNA, 122 bp, Homo sapiens
acgacaccacgctctaatctcagttgccatgacagcagccttttagatactgaaatgttccgattgccagctaaacaaaattgttgaatgtgaacatttggctggaagattaaaaggctaag

SEQ ID NO: 119240 - DNA, 122 bp, Homo sapiens
cctgggagtttatcagcagggagtggcagggcctgctaatcaggggctgctccaggcccccgggattaaccctgcagaccctgggccagggtcagcagccccggctaccagttatgctcccg

SEQ ID NO: 119241 - DNA, 122 bp, Homo sapiens
ataacgaggctcttccaatttcatgtgagcacatcctgctcagcgcctgcgtttgtttttcgtctcgttttttggtcttcagaaccactggtacttttcccattggataaaacgctgagagg

SEQ ID NO: 119242 - DNA, 122 bp, Homo sapiens
aggcgggtctggggctggacagtggctgccaaggccaagtggagaaacgaggccatttctcgactcctcagccctgcctccagtctcctggggtgggtggcaaagctagctactctggagcc

SEQ ID NO: 119243 - DNA, 122 bp, Homo sapiens
gtccgtccgcctgcctggctaccggtcagtctcagtctcccctactccctttacttcgctcgttttcctaagcttgctcgctctcttcgctgggctcccggctgccagacactcgttcgatc

SEQ ID NO: 119244 - DNA, 122 bp, Homo sapiens
gggtggaggaaaatcatgcatccttggggggatggtgcatgcgtgggcatctactaaggacgggaggacgtgctctgcaggtgggatggccaccaccgtgcgtcaccggcgcgcagtgctgg

SEQ ID NO: 119245 - DNA, 122 bp, Homo sapiens
tcatgaaactgtgggtataaaaatggaaactgcttgcttccatagaaatggaagggcttgcgtcaaagagcttcagttgaacaagggagacagaaaatgctctatacttagtataaacatta

SEQ ID NO: 119246 - DNA, 122 bp, Homo sapiens
cttaggcaggaggggtgggtcactcagtctccaggctcgggaggcccccagcaaatcggacgctgtgggctaggccgccaccgcgagcccactcgcccgatacgcgccttggggtccgggtc

SEQ ID NO: 119247 - DNA, 122 bp, Homo sapiens
aaataatgtgaggaaagttcgacattgaaaatgaataattaggccgggcgcagtggctcacgcctgtaatcccagcacttaggaaggctgaggcgggtggatcatgaggtcaagagatcaag

SEQ ID NO: 119248 - DNA, 122 bp, Homo sapiens
gctgcagcagcagggctggcaggagtttggtcacccacatggtgctgctggacgggctggcggatccctctggaggagatgcctgggtgaaagaatcctgttcggagtcagtgcctaaaaga

SEQ ID NO: 119249 - DNA, 122 bp, Homo sapiens
ttgggagcgaagaagactaaggcttttactgttctctgatattctagaagcagacgatctcgggctccaagtatttcagaatgatttaaaaagtcatgccacaggaagggtctattgcagaa

SEQ ID NO: 119250 - DNA, 122 bp, Homo sapiens
ggctgggcagagtatatgctcacagacaaaagccactcctccagtttctccttgacaagacgatctgaggccaaggttggccaagggctcacatcacacctctcccacttcagctatgagac

SEQ ID NO: 119251 - DNA, 122 bp, Homo sapiens
gagaaaaagttccctcttttggaggggctttgggggggcaaggcctaggaaaaaggcgagcgcagaggaaaaaaaatctatcatagaatatcgctgctagggtgttttttttctaattcact

SEQ ID NO: 119252 - DNA, 122 bp, Homo sapiens
ccgttacgaggagagcgaggtcatatctttgcccttcctggatcagctggtgtcaaccctcgtgggcctcctcagcccacacaacccggccctggccgctgccgccctcggtgagccttgga

SEQ ID NO: 119253 - DNA, 122 bp, Homo sapiens
gagccaagcagcctgggttcaactgccttttctaccacttagtagctgtgtgacgttgagcgggtcacttgactgtcgtgtgcattgttttccccatctgtaaaatcttagtgtccttaacc

SEQ ID NO: 119254 - DNA, 122 bp, Homo sapiens
gttcgttctcaaacaacgccacctggtagttgggcatcggaaacttcaggctccctctgccgctcgtgccccgccgggcccgtcgcgccggccccgcccgggcttcgggcaagttcggcggc

SEQ ID NO: 119255 - DNA, 122 bp, Homo sapiens
gaagatagcttcaggctttttgttctattctggccctcagtggattgcagaatgcctgcccgcattggcgaagggggatcttactttactctgtctactgattcaaatgcaaatatctgcca

SEQ ID NO: 119256 - DNA, 122 bp, Homo sapiens
tcggggtcctcgagcgcccagcctgggagcatgattgtggacaagctgctggacgacagccgcggcggagaggggctgcgggacgcggcgggcggctgcggcctcatgaccagcccgctcaa

SEQ ID NO: 119257 - DNA, 122 bp, Homo sapiens
ccttccggcgcccttccctccttagctgcacctggcaagccagcaagggagtgacccttgcgcaggaagggggcgcgtcacccggtttccccatagaaccgtgggcgtcgcaggcgagaagg

SEQ ID NO: 119258 - DNA, 122 bp, Homo sapiens
gccatgccatacctctgagggctccgggtagggggtaacacagaggctagggggagcttgcggcatcctccggggcagcctctggaacagctcctccgtcacgaagggcatgaagggtgaga

SEQ ID NO: 119259 - DNA, 122 bp, Homo sapiens
ccgtaaagagaaaaaggcaactggcacagctgtgtgtagcccccaggaagaccgagctcacgtgtgagccagcgtctccgtgtgaccctcctgcgcacacgcaacagagcctggggggagca

SEQ ID NO: 119260 - DNA, 122 bp, Homo sapiens
acccgagtccacacgtcaggaagacaggtgtgtcttcaactctgagccctgtgaaaatgccgctttccgctaacacactccggctcccacagcacagcagggcatgcccgacaccccaggac

SEQ ID NO: 119261 - DNA, 122 bp, Homo sapiens
attttttaataattgaaaaacattcaaaagaaaaacagtattttgtgacttgcaaacattcggtggacttcatcttttggtgtccataaatacactttacagaatgaacgtcccctgcccgc

SEQ ID NO: 119262 - DNA, 122 bp, Homo sapiens
attagacaagcaatgtgacaactacttaacttctgatgttctggggtacagtactattgtcgagttgaactgtgcaatggttcataaaaactgtaggcattgatttgctgatagagaaatgc

SEQ ID NO: 119263 - DNA, 122 bp, Homo sapiens
aggaggtatttacaatcaggaactgaaatatcacagttgtcctgtctgaaaggaatctgtcgtgcattagagaaaacagatgggttaagtgtgacaatgtcgcactgagcaggagggtgcca

SEQ ID NO: 119264 - DNA, 122 bp, Homo sapiens
tcgccagggagagaattctaaacaaagccgcggtccttgtccttcagtagcagagttttccggggggctggactttgtacactgctggaactcggctcctggttgaagagctttgttgtggt

SEQ ID NO: 119265 - DNA, 122 bp, Homo sapiens
acacgttcaaagtcgctaggccaaagcgctgagatacggtttcccaagccaattagagagcggctctcggatatggggcggaaccctgaaaaggcgagagctgagatgccgctccgttctgc

SEQ ID NO: 119266 - DNA, 122 bp, Homo sapiens
tgtcggccatcttgtgttgttgaggctgaggactgactggggttctgagactccctgtcccggaccgcaggtaaccagccgttccgtgtcgctcccctgcccggctctgctccgcgccccgg

SEQ ID NO: 119267 - DNA, 122 bp, Homo sapiens
aggagctggctacaggggtcccccgcagcccctcccttcctgctctgggggtctttgggacgcagggctgcatggggtgtggttttgggccatcttcccatggaagatgcggggtagggcga

SEQ ID NO: 119268 - DNA, 122 bp, Homo sapiens
gggcgctcgcttggtagggtgtgctggggcgtagagtttagggtcctgaggctgcgtctgcgtgtcaactcagtggagtctctcgaccgccctttgttaccctcctttagtgaccagaaggc

SEQ ID NO: 119269 - DNA, 122 bp, Homo sapiens
ggatgaggtcggagctctgggagaaggcctttccgcagtcatcgcacttgtaaggccgctcgccactgtggacccggtgatgctgcagaagcgtggaggagcggcagaagcccttgccgcac

SEQ ID NO: 119270 - DNA, 122 bp, Homo sapiens
gtaatgcttgctaaagaatcatagttgtctgtagttttcccagcagcctctagatgtccccgtcatccatgagatactgcttccagaactttaaaacgagcacagcctccaaggcctgagac

SEQ ID NO: 119271 - DNA, 122 bp, Homo sapiens
ggcgctaggagcggggctgggaagcgccatggtgcaggttgaacggggacattgggtcaccgggatgggtggaattagggtagggcgagtgaggcactggcttctggcacagaatttaagga

SEQ ID NO: 119272 - DNA, 122 bp, Homo sapiens
aaatgaggatattcaaagcctcataggagaagggatgttaatgcttaactcagatctaatcgtttctgagtatccactctgagtaaggtgtgctactaaggcatagggagtgaatgacataa

SEQ ID NO: 119273 - DNA, 122 bp, Homo sapiens
ttttaattcaacaccaagcccgaatgtttacctctcggatctgacaaaccagatgcagagcgacgaatggagaccaccttcccgggaggcggaacccagctgggttccagcctgctctggga

SEQ ID NO: 119274 - DNA, 122 bp, Homo sapiens
cctgcagaggtgacaccacagcctgcagagagcgaccctagtgcacccgggacgccgacacgcgtcattactgaggtggggcagaagcaacagttggttactcaccagatcagaaacgaacc

SEQ ID NO: 119275 - DNA, 122 bp, Homo sapiens
gtcgctttttatgaatgggggagcgggcggtgcgaggccttattactatgccgcgcaacgcgcgctgcgccccagcgcgccgcgcccattggctgatcggaccgctgacgtcaccgaaccgg

SEQ ID NO: 119276 - DNA, 122 bp, Homo sapiens
gctctgtctcccggcctgcctcggcgaggccctgctgaattagcccagcccctcccggcgcgcagcccgggtgcaccctcgtttagtgcccttggtgggaatccattgtattgacaatctcc

SEQ ID NO: 119277 - DNA, 122 bp, Homo sapiens
ctctgaacattaacatcaagatccagtgaggtgggaccagccgtaactcttaaacagctccgatcagaaagtacactgaagaaaagaaaaaaaaatgtaggttcatactgtgataaaaagct

SEQ ID NO: 119278 - DNA, 122 bp, Homo sapiens
taagtgcgatggtgagaattcctcccactttcttgtgtgtgtttctttcctgatggcctccgcgttatgccggattcttcctgagctccccaagttgcaggccacgtacatgaagccagtgt

SEQ ID NO: 119279 - DNA, 122 bp, Homo sapiens
tgacctcgtgatccacccaccttggcctcccaaagtgttgggattacagacatgagccaccgcgcccggcctaaattctaatatatgaattatttgtattgaattcatgttcggggccacgt

SEQ ID NO: 119280 - DNA, 122 bp, Homo sapiens
gcattgataaacatttcaaaactgcagagggaatttatcatatttgtctcaagggcacagcgcttttgatttactgtgttcagtaagatgcagggggctaaccaacctcttaggattaactg

SEQ ID NO: 119281 - DNA, 122 bp, Homo sapiens
gctgtttcttatgtataagagagacttattcgtgttaaaatggaatactctgtccctgagcgcttaatgggaaaaaaaatttgcatttgtgttaaggggtaggtgagtggtaaaatattctt

SEQ ID NO: 119282 - DNA, 122 bp, Homo sapiens
ccaagtcagaggatgtgccaccctccttccctggtgcctcctgccccattcaccaacccccgcctcacacggccatgtggtccacagtaaccaacaagcaggccaaataaatgaaaccagcc

SEQ ID NO: 119283 - DNA, 122 bp, Homo sapiens
agcatgggcgccgccattgtaactccagggtcttggtcaggtgactcagcctcactatgccgcgaggctccctgggaagcgtagttctggaaatgcattaaaaacgccataggctcggaccg

SEQ ID NO: 119284 - DNA, 122 bp, Homo sapiens
ggactatgcccccaccccactttttgtgggcatttcccattttgtctatgtatagaacttcggtactagcaaggatgtgggactgcttgtaaacctagtctttcaatttcccagtgcagtgc

SEQ ID NO: 119285 - DNA, 122 bp, Homo sapiens
gtctgggaggtgaggagcgtctctgcccggctgccctgtctgagaagtgaggagaccctccgcctggcaaccgccccatatgagaagtgaggagcccctctgaccggcagccaccctgtctg

SEQ ID NO: 119286 - DNA, 122 bp, Homo sapiens
cctggtgtactctgatggcaacaaggtcccttgcccctctcctaccctgtagaattccagcgcccccctcagcagtcctagcaaaggaaagcctgcctgctggcagtgagccatcatccacc

SEQ ID NO: 119287 - DNA, 122 bp, Homo sapiens
gtaagaatatataggctatagagagaatatagctatgagccaactgggaaccaccacaaacggtgggtcctttgggagttgggaattctcatgacttaggaaaaacttgagtattaaagagt

SEQ ID NO: 119288 - DNA, 122 bp, Homo sapiens
ggtctacctcgctgcggttattgagtacctgacggccaaggtcccggagctggcgggcaacgaggcccagaacagcggagagcggaacatcactcccctgctgctggacatggtggttcaca

SEQ ID NO: 119289 - DNA, 122 bp, Homo sapiens
gcacgtggtataggccccacagactcccacacacatgagggggaaggaggaggctcgaggcgcccacggcagccagccctgcctgggaatgaggtgcccttggcatgaaaatcacgcaggtg

SEQ ID NO: 119290 - DNA, 122 bp, Homo sapiens
attctccttcctcagcttcccaagtagctgagtgagaatataggcatgtgccaccacccccgcctaatttttgcattttcagtacagacagggtttcgccatgttggccaggctgatctcga

SEQ ID NO: 119291 - DNA, 122 bp, Homo sapiens
agtgggagggggaggtacctggaactgggagtgatgtcagctcccagctcggtgcctgcccggattcctgacatggtgtagtgcaggcagggtggggaaaggacggggaaggactcgtgtgc

SEQ ID NO: 119292 - DNA, 122 bp, Homo sapiens
tgctggtgagtgtgacggctggaactccggcccttcctttctttgtgtttgtccctcggccgccgtggaggggtggaactggcactcccacccctgacatgggctcacttcgcattagccct

SEQ ID NO: 119293 - DNA, 122 bp, Homo sapiens
gcgctgtcgggcaccgccggcggtggcggcccctggcggctcctggaggcactgcgccctcggagcccatccaggttcggggacgaacaactgcttggtgtcacaactaaactgtgcagacg

SEQ ID NO: 119294 - DNA, 122 bp, Homo sapiens
gggcccgagacgggggctggagacgcgcggaacccgggctgcggagagggtgctggggtgcgcggcagggccagggcagcccgcacagggcgcattctcacgcgaggtgtgccccgtgtctc

SEQ ID NO: 119295 - DNA, 122 bp, Homo sapiens
acttgccgcagctgaggctgtaaatcttcacctcattgaggctggagacctgcatggcgccgcacaacactgttcaagtcccgggtcctttcccaccagcgtgctcgagcaccgtaatcccg

SEQ ID NO: 119296 - DNA, 122 bp, Homo sapiens
taggggagcggcggcactagggccccgggggcagagacagggctgagccgcgaggaagctcggaggaaaagtcggaaggctacgcggaccctggggaggggctgcggagcggtcagatggaa

SEQ ID NO: 119297 - DNA, 122 bp, Homo sapiens
agcgcggccaaagtcagctgtaagtcagagccggccgggaagcagtccgaggagagcccacggcttcctccttggggctcacctccctccctggcctcgccgttcctctccccgttgccttt

SEQ ID NO: 119298 - DNA, 122 bp, Homo sapiens
tgtttcaggttgtatcttggttttgggttcccctgaaataaaacatcgagataaggattgcggttaatttatttgaaaggccatcctgggaaacatcagaaaaggagtgagaaagtgagtca

SEQ ID NO: 119299 - DNA, 122 bp, Homo sapiens
cttttcatttctaaattcaagaaacagttttggtttaggtcctttctcttttctgactcccgcagaatacagatgttctttcaagcaatgtatttagctaacaaaagttccctaaagcaaaa

SEQ ID NO: 119300 - DNA, 122 bp, Homo sapiens
tgaatgaatgggtggttgagtgaacgaatgttagtgtcactattgaggtcctctccgagccgtcgttcctttcacaggggtcatgcctgggttgcagggaggatgtgctgccccggggaggg

SEQ ID NO: 119301 - DNA, 122 bp, Homo sapiens
gaccgtggaaagtcggggccggtggggctaggtaggaagagcacactcctgtgaggttgccgggggcggggctccacctggacccctgctctagagctgctggcgccataggaagagaagat

SEQ ID NO: 119302 - DNA, 122 bp, Homo sapiens
gccgggggcgcggactacaagtcccaggaagcccagaggcaggcgcggggcggggcctggcgcaattccccgggatccggcgcgctgggaagcgccgaggaggacgcagcgccggcggccgg

SEQ ID NO: 119303 - DNA, 122 bp, Homo sapiens
ccttgttgtttgtctcttctgcagcaggctgccctgacgctgcagctttggctctctgctcgcggaggccgctggctcggggacctttccctgctgtctgctgcatcatgtgtctccctggg

SEQ ID NO: 119304 - DNA, 122 bp, Homo sapiens
gaagggactgggtcctctccgagttgcagtgcaggcaccacatggcggccgcagtgggagcgggccgggccgggagccgggacccaggcccagcagaggccgccgactcccgccagcgagcc

SEQ ID NO: 119305 - DNA, 122 bp, Homo sapiens
gaatgccccatccgactgcttcaggctcccagaccgctgacaaaaggaaaactggtccgtcgctttctgaatgatgtatcgagaccgcagtgtatttttagcatctgctgtttgtggtaaca

SEQ ID NO: 119306 - DNA, 122 bp, Homo sapiens
gcctggcagagagtgacatcgtggacattccccagctcttcttcctgaaaaacttctacgcggaagccttcttcccagacatggtgagagcccttgtgcagggtcctgctggggggtctgcg

SEQ ID NO: 119307 - DNA, 122 bp, Homo sapiens
gcgccggtggcgaatgctccaataggcggagagctggtcagcgctcacagcctattggctcggaggagctgccgctccgcgcctgggtcccgcccccctgcccctgtcgcgtagttgggttg

SEQ ID NO: 119308 - DNA, 122 bp, Homo sapiens
cttaccggattttaaattggtgagatgtttactgggctggtcggtctgaggacctgaggtcgtacgtggatctttctcacgagcaaagaacaggaggacaggggattgatctcccaagggaa

SEQ ID NO: 119309 - DNA, 122 bp, Homo sapiens
gcaacaggtacataggtaaccaaagtatagagcttatttggtgaatcttcatcctcattacgttttcgggacagccgcacacggattcggtatgggacattcttattcctttggcccagaca

SEQ ID NO: 119310 - DNA, 122 bp, Homo sapiens
ctttacccattaacgatgtctataatgcagtatcattgtttcctcctcacaggaactgaccgatatggccaggaatacaatacagtcttagtgatacagagtcattttgtgtctgttctgaa

SEQ ID NO: 119311 - DNA, 122 bp, Homo sapiens
ctcaaatggagacaaaaaaaccttccatatttggacaaagagcccagagaggcccagacccgcagccagcccaaacctcccccacccccagcctcctgccctgtctccctctgggcccctag

SEQ ID NO: 119312 - DNA, 122 bp, Homo sapiens
caaatatcagagctcccgacagttcatcatagcagctaattggaaaaaggagttgcacctcggctcaaaagatgccagaatcagaaagatattgaggagcaaatgattggagacggttttac

SEQ ID NO: 119313 - DNA, 122 bp, Homo sapiens
aataaaactttattaacaagatcagacagtgggggggggggggtagcatagtttgccaaacgaaaatccaataaaaatttattaaagatttaaatgtggccaagcgtggtggctcatgactg

SEQ ID NO: 119314 - DNA, 122 bp, Homo sapiens
taagttactattgcacaatttagagttagactgtcagtgctttgggatgtggatggtaatcgttacaagagattttgctaaaagtaagctttgaaataaataggttctgcttcagataccta

SEQ ID NO: 119315 - DNA, 122 bp, Homo sapiens
gaccagcgcaggggtcacctgggcggtggggactcacttaaggacaattaacgagacagacggagggcaatttggccgcagggcttggagaggtccccaaccgactcccgtgggcggttcga

SEQ ID NO: 119316 - DNA, 122 bp, Homo sapiens
cagacacggtcacttgccccgcgcacccgcacccccacccccaccccgccccatgccacccggagccctcctagccctgacacacagctgggactctcacgtccaaccagcggtcctggact

SEQ ID NO: 119317 - DNA, 122 bp, Homo sapiens
gagcctgaattttcagttcagttcattagtcagccattttggtcaacaccctgcttactgcgcacggccaatcctatgagaactcagcatcccagctcatctgagcagatcctggaagtgat

SEQ ID NO: 119318 - DNA, 122 bp, Homo sapiens
taccccggctgtggcggctgctgctctgggctgggaccgccttccaggtgacccagggaacgggaccggagcttcatgcctgcaaagaggtactgccgcccccctacccgatcccgctttgg

SEQ ID NO: 119319 - DNA, 122 bp, Homo sapiens
aaccaaagacacctttcaaagtggagcttcagcctcaacaccgctcatgtctggcttctgcgggttcccgagaaacatcccggagcgcaaagcactttcccacctcatgtgttcagagcttg

SEQ ID NO: 119320 - DNA, 122 bp, Homo sapiens
ccgcggcccccggggacgcaagagggctgggaggccgggcgggtgacggctgggccatctcggcctgggaaagcggaaggcccgggccagggagcgggtagcgagtgaattcagagaggccg

SEQ ID NO: 119321 - DNA, 122 bp, Homo sapiens
aagtttcctgagtgtcaaaaatcattgctacccaaaccaaatagcttcctgtgagggccacgtgtttatctttcaatgataccgaggagcaatacacacttacagcaggcaagtggcatttc

SEQ ID NO: 119322 - DNA, 122 bp, Homo sapiens
gcctaactactgcagaaaccaggagtgcgtcctccttttcggattcttgacgtcaagctccgacagccttggagcgtcgcaagggcggtagagagctgagggagggtgacagggaggggaag

SEQ ID NO: 119323 - DNA, 122 bp, Homo sapiens
cgagcctggtgagaatgactcaggagtggttgtccgagggtgtgccctgcggttcctgtccgagtagtgttcacgcgtgcccagtggtggccgatggggtcacggcccctctccccacccca

SEQ ID NO: 119324 - DNA, 122 bp, Homo sapiens
cctccaccctaagagttacccgaagctcggcatccgcgattgtctaaggggcctccgagacgttcgggcagcgtcagtcttcagccgccaagccgaggagatctgggaaggagtcggtgggg

SEQ ID NO: 119325 - DNA, 122 bp, Homo sapiens
ttgagtctccactcttccagggtattaactgttgagttagaggacattttcctagcattccgggtactaaaatcatttcttgtccccgccttcagctccacaaatagttcagtcccgccccg

SEQ ID NO: 119326 - DNA, 122 bp, Homo sapiens
ctactcttttcccctatagtaggccagcctatgaacgcaaccggcaaatttcgaccaatccgagtctagctcttctggattcccagcatgcagcgcagaccctgatccaattgctgtaaaga

SEQ ID NO: 119327 - DNA, 122 bp, Homo sapiens
attctctgtcctatagattctagagttgctcatgtgaatatgtgatctctcatcatccctcggttttcactagcaccacctaataatacaggctggctagtctccaaaactacatcttcaaa

SEQ ID NO: 119328 - DNA, 122 bp, Homo sapiens
cctcatcgccctgtcccccaccccgaggcccagcccagaggcgggcttcctcctctgccccgcggggggccgcaataattgctaatcagccaccgctaattatccggcccatggagaggtga

SEQ ID NO: 119329 - DNA, 122 bp, Homo sapiens
atgtattcgtgggagggtggttttgtaaccagttcagaagagttaaaacaaaaacgccaccgcaggaagggggtgtgcggcgaatggggccgaggaaggccggagtgaccgtgggcatctgt

SEQ ID NO: 119330 - DNA, 122 bp, Homo sapiens
tacagaggtttgtggtggggacgtttcagttggctgaacaaggcaagcccctcagaggcccggggctgaggtctctgttgagcccaggatgaggcctggggccagtgtggggcagtgggtgg

SEQ ID NO: 119331 - DNA, 122 bp, Homo sapiens
taggctctgctgctgcttttcccaccctccaatagcttaggttctgcgtggtgctcccagcgccctgtcctttgctgatgatggtgtcatgtataattcagtgtcagatgtgagaagcgcag

SEQ ID NO: 119332 - DNA, 122 bp, Homo sapiens
cctgcgtcgcaactccaggatcagccccaagcacggctgaggggtagccctagggtcctccgtagcgccaaggctgctctggcggttgctgcagtaaccccagccacaacaagtcgtggaca

SEQ ID NO: 119333 - DNA, 122 bp, Homo sapiens
ggggggccggccctccggccctctgctgcccgagggttcctcgcaggctggagctgacggcgctggagcgcgtggtacgaatctcagccaagcccaccaagcggctgcaggaggcgctgcag

SEQ ID NO: 119334 - DNA, 122 bp, Homo sapiens
ggcagctcagcggggccctcccgcttggatgttccgggaaagtgatgtgggtaggacaggcggggcgagccgcaggtgccagaacacagattgtataaaaggctgggggctggtggggagca

SEQ ID NO: 119335 - DNA, 122 bp, Homo sapiens
gcgcttgcctcgcggctgcgggtcccagcctgaacctgtgtcttgttccactgccgcgggcgcccgccacggagctgctgcttcctagggagacggttccatcgttgaaggaacggccagac

SEQ ID NO: 119336 - DNA, 122 bp, Homo sapiens
cagacttcagctttgtaggagaacacggagcttctgtgacaatgggatgtaaagttaggacgcagccgtgacagaaccccatgtgacattgggcgctgggctcagcccacgtgaccactgag

SEQ ID NO: 119337 - DNA, 122 bp, Homo sapiens
tcaggccctaaatacacccacccagtataaaattatcctaaacagaaaagaagcaggctgcgattggccgcatattgaaaacagacatgagacagcccccgcccccaactcatccccctccc

SEQ ID NO: 119338 - DNA, 122 bp, Homo sapiens
gtgaagctgcagaccttcgcggtgagaccttcgcggtgagtgttacagctcttaaggcaacgcatctggagttgttcgttcctcctagtgggctcgtggtcttgctgggctcagtagtgaag

SEQ ID NO: 119339 - DNA, 122 bp, Homo sapiens
gaccccaagggcttttcttctccctagttcaatggttttatgatacaaactactgacatacgtttttcaagttattttctccttcttctaggaaatcccttctgagtgatgtcacatcttgg

SEQ ID NO: 119340 - DNA, 122 bp, Homo sapiens
ggcccgcggacaggccccgcccccaccccggccccgccccgcccgtgggcgtgcacctggcgctgtcaggatctcctgccgcgggcgccagctttggtgtcccttcacctgtccccggcgcc

SEQ ID NO: 119341 - DNA, 122 bp, Homo sapiens
ggtcgccagccaagggggcagcgggcggaggatgaaccccggagcaagggaaagcgacagcgcgcgccttcaccctaccgccaacaagtcgaagtctcccaaaggaacctgatcggcggggc

SEQ ID NO: 119342 - DNA, 122 bp, Homo sapiens
gctcctcgagttccgattggttccacatgaggggcgtggctctctgtcgtcactggggagcgccttcgctgacgtcacaggcgcgggccctcggcgacgcaatagcgccaggccttccgcgt

SEQ ID NO: 119343 - DNA, 122 bp, Homo sapiens
ctggaactcctggggtcaagcggtcttcccacctaagcctctccgtgctgggactccggacgcgctccacctcacgcagccgtattcctgctttcaaagcagatggaagaggtgcgccagga

SEQ ID NO: 119344 - DNA, 122 bp, Homo sapiens
gggcgtgagatcagaaacccaaaccctgccccccacctccccaccccttaagccaccgtccggaaaaaataaactatttcctgcaaccagctccgaaacaaagtctgtgaatgcacagtgac

SEQ ID NO: 119345 - DNA, 122 bp, Homo sapiens
atgttcctggaagaaaaaagccacaaataggcgtcgctcaactggattccagcctgtgaccgcacagggcccaggggcagcagaggggcatacccactgtccccgtcacagggaaaccaagc

SEQ ID NO: 119346 - DNA, 122 bp, Homo sapiens
cactgaggacttcacctcctctcccttggtggacacctatccaggtctgagctcaggggacgttggtctgcagctcacagtgtccgtgcctgggccacagggaccacagcgggttgtgcatg

SEQ ID NO: 119347 - DNA, 122 bp, Homo sapiens
aactctccccacaccatcacagcgaacagtgatgctagagccagtcacctggtgagtcagcgcatcagagtggcccacccctcaggagggccccacccaggccgttcctggcccccaggagc

SEQ ID NO: 119348 - DNA, 122 bp, Homo sapiens
caagctgtcacacccccggggtcatcgtggggcaaggccatttcctggctttgcggggttcgtcttttggctttcgtggagaaggtgggggtgtctgggcctcagaatattcggtaggcgct

SEQ ID NO: 119349 - DNA, 122 bp, Homo sapiens
ggcagctccgcacttcggacacctgggggcgcccgtgccattccgccggcgactgggactcgtcgcccgggaaacaaagatggggatttaaagaaaagccttcaaaatgcaactccgaatgt

SEQ ID NO: 119350 - DNA, 122 bp, Homo sapiens
gtggtggggttcctgggcaacactgtggtctgcatcatcgtgtaccagaggccggctatgcgctcggccatcaacctgctgctggccaccctggccttctccgacatcatgctgtccctctg

SEQ ID NO: 119351 - DNA, 122 bp, Homo sapiens
gaacagaacaaacctctctgtgtcatgcaaaccagggaacctagcagagcttctgagacacggtgggaacacgtttcacatttggaggtaggtttatggtttacatttgttacaaggtactt

SEQ ID NO: 119352 - DNA, 122 bp, Homo sapiens
gatgcggacggtggacaggcggtgtggacggtggacactgagatgcggacggtggacaggcggtgtggacggtggacactgtgatgcggacggtggacaggcggtgtggacggtggacactg

SEQ ID NO: 119353 - DNA, 122 bp, Homo sapiens
caaaagaactaacacaactaactccattttcaattaagggagcccttatccattcctgcacgtaggctaggataattttagggcactgagataaaatgcaaaaacagcaatcatgtagtttt

SEQ ID NO: 119354 - DNA, 122 bp, Homo sapiens
tgagctgctgcacccggcccaagcctcttctcttaatccagtcactggtgattaactatccggaagggctcactcaatactccccactctacctcctgcccatttcctgacctttgcccctg

SEQ ID NO: 119355 - DNA, 122 bp, Homo sapiens
tatatccagggagtaaatgcctaggctcacatttgcatgctcactccatccatagccttgcggcttaagagggaattaaggaagagccattcttcatgtaagaaaggacacctttgtgtctc

SEQ ID NO: 119356 - DNA, 122 bp, Homo sapiens
gcggactaggaacagaccgtatcccgggttcgttagggcgcccactgagacgtaagtgggcggagcctagagaacgctcctctcggtgagtctgggacatagctccgccccttccaggcaag

SEQ ID NO: 119357 - DNA, 122 bp, Homo sapiens
aggagaattgcttgaacccaggaggcagaggttgcagtaagctgagattgcgccactgcacgccagcctggtgacagaacgagactccatctcaaaaaaagaaagaaagaaaaagaaaagaa

SEQ ID NO: 119358 - DNA, 122 bp, Homo sapiens
gccttctccagcagagccaggaggccagaagcctctcaagggggtgttgagccagaggtccgaggccttgcagatctgacgctccagaaccaggggtctcctccctgccccccaactatggg

SEQ ID NO: 119359 - DNA, 122 bp, Homo sapiens
tccttccccttccctctccctagctcccttttcccccagcaacatctttaggttctaaagcgagtaaaaggaatgtcagacaatccagaatgttccaagagcctgtgccaggaagcaccaac

SEQ ID NO: 119360 - DNA, 122 bp, Homo sapiens
ttacagctcttaaggcagtgagtctggagtcgttttttcctcccggtgggttcgtggtctcgctggcttcaggagtgaagctgcagaccttcgcggtgagtgttacagctcataaaggcagt

SEQ ID NO: 119361 - DNA, 122 bp, Homo sapiens
gcgccgggggtgactctcgggaggtgaagcacacaagcagcccataaggttgggatcctccgtctccaagtagcgcgactacagctcttgcccgcacggagcagcctcggacagcgcggccg

SEQ ID NO: 119362 - DNA, 122 bp, Homo sapiens
aacaaaccaaactggtctgtcgcatgttaagtcaatttcacgttcacctactggtcaccacgaagccgaggaaagttttaaaaagaacattccggggtctccagagatcatctctccaagtc

SEQ ID NO: 119363 - DNA, 122 bp, Homo sapiens
agagagcgctctttgagggctgggcacacccagccattgtacctggtggttgtcataaagcgggagacctcagcaggaccaagagttgaaaatcagacagtttaaatggagaggaaaaccag

SEQ ID NO: 119364 - DNA, 122 bp, Homo sapiens
ctttttagcgtcctgaagcgctttgagtaacggatgaaagctatggagcccccaaatacgcgcaaatacctaaccataaaaatgtacgtgaagtttattttgtaaccttggaaattgattta

SEQ ID NO: 119365 - DNA, 122 bp, Homo sapiens
ccacctaggtgctgtggcaagcagggcagggagagagtagataaaggccgggccaagaagcggggccctaaattctcaggagaagggccctggagaggcagtctcttccttgaaggagaaag

SEQ ID NO: 119366 - DNA, 122 bp, Homo sapiens
aaccttcccgtgtccctctgcggagcacgcgcagtacgctgccgcgctcgcacacgctcgcgcccggaaagccggggaaccggaaccggcctaaagccaagataagagtccgctgatttgac

SEQ ID NO: 119367 - DNA, 122 bp, Homo sapiens
ctcaagaaatgacattttcacatttcttaggcatctgtggtgccagaggagcaaacccatcgcacacgccaggtctgccatggggccctgggcggtggggattttggatgtaacgtgtctag

SEQ ID NO: 119368 - DNA, 122 bp, Homo sapiens
gtaacactcactgcgaaggtctgcagtttcactcttgagctagcgagaccaagaacccaccggaaggaagaaactcggaacacatctgaacatcagaagaaacaaactccagacacgctgcc

SEQ ID NO: 119369 - DNA, 122 bp, Homo sapiens
cctgtcgcccaggccctgttctcccggggctgcactgactggcgggtctttggctgccctcgcagagatgcccgggcagatggaggtctcagggctgaggacaccgccttcgtagccccgcc

SEQ ID NO: 119370 - DNA, 122 bp, Homo sapiens
gtgggtcatcaagccatcccatgtcatgccagaggccgaatgacctgttgcaggttcagacgccagcgccctggcagaaacaaccggtctgcagtgcaggaagaggtgtggacagggctgcg

SEQ ID NO: 119371 - DNA, 122 bp, Homo sapiens
ctctccccctacccccaccaccgaggaaatgagaatgaatcagcactgacgaagaatgagcggatgcaaaaagtaagagtcagcatttacaagaagcagaaataacaatgtgcaaaactaga

SEQ ID NO: 119372 - DNA, 122 bp, Homo sapiens
taaccttgtgatccgcccgcctccacctcccaaagtgctgggattacaggcgtgagccaccgcgcccggccgtaagatgcttttaaacaagccactgccagtgatttctaaacctacaagca

SEQ ID NO: 119373 - DNA, 122 bp, Homo sapiens
ggctgctggtggggcagccaatggcttggtcttctctcctctcacagatcagggctgctccgggcatggggtacaagaagagaggaggggctgagtgcaatggctcatgcctgtaaccctag

SEQ ID NO: 119374 - DNA, 122 bp, Homo sapiens
gtcctgtcagatgcacagtggagctcgctacccctcctctcctccaaaaatctcatcagacgatatcccagacaggagcggttagagagagaggaatcacatctccacacagttttagggtg

SEQ ID NO: 119375 - DNA, 122 bp, Homo sapiens
ccggaaaatggcaattctctggacagggccacaaggattaccgatagtgtaaagaacatccgtggtgatcgaatagatggggttcaggatggtaaagagaagcacactgttcacgctccgga

SEQ ID NO: 119376 - DNA, 122 bp, Homo sapiens
gcgacagtgtctagcgggagctccgcgtgtagctacgccggccgcctggctttgagacaacgtgattctccgcagctggtcgcctacccgtgatgttctgcccacgtcgagacctgagctga

SEQ ID NO: 119377 - DNA, 122 bp, Homo sapiens
atcggttcttctcaagtggtaactgcttattccagaccctccactgccaaaactcaaagtcgctcctttatgagccaacatctggctcagtctcccagccttcagaagggcagaaggaagtt

SEQ ID NO: 119378 - DNA, 122 bp, Homo sapiens
attttaattgggagtcattctttttcttaactactaagtgaagctctttggtgtgccaaacgacgtattttcagccttactattggttaacgtaaagttagcatctttttaattctcttttc

SEQ ID NO: 119379 - DNA, 122 bp, Homo sapiens
gaggctgtgccgggggtagagggcgcagagcacagcgccaggcaccagcgtctctgggctcgatccgctttcattaagctgtccccgccccttttcgcccccgcggtccgggactcaccgac

SEQ ID NO: 119380 - DNA, 122 bp, Homo sapiens
tttacaccttctgtctgctgctgattctgggcctgagctgtggcaataaggttgcgaagacgtcggttgtgctgaatcaactgaatcgtatggatggtgagactacatggctctgaggggat

SEQ ID NO: 119381 - DNA, 122 bp, Homo sapiens
ttatagcaagtcttctgttaatgctgatgttcctccacctagacacattatattaccactcggctagagaaagcaggcacagcatagagtcccttaccccaacacccttatcacaacacaaa

SEQ ID NO: 119382 - DNA, 122 bp, Homo sapiens
cgccacctgaaccgagacacctctttttgcactcaacttaccgcggctgggctgagctttcggcgcccccaggagcttttctctccttcctcccaccgagctcttcattctcctgctggcgg

SEQ ID NO: 119383 - DNA, 122 bp, Homo sapiens
aagttcttgctcctcagaccttcacatctggaacctctgggtagtttttgtttcaaaggtcggcagccttaggatcttttgagaagaagacaatagtgaaaacacttttaaatctttttatc

SEQ ID NO: 119384 - DNA, 122 bp, Homo sapiens
gccccctgctggcagctggggacactgccggaccctattgctgtcggtgtcgtggcagcacgccacctgcgggcagatggggactaggcagggcactcttggtcccggtgtgacggcctcct

SEQ ID NO: 119385 - DNA, 122 bp, Homo sapiens
gatggcgcccacgcacgctccgaggcacaagaaactccccctcgggatggcgcccacgcacgctccgaggcacaagaagctccccctcgggatggcgcccacgcacgctcggaggcacagga

SEQ ID NO: 119386 - DNA, 122 bp, Homo sapiens
gacggccatctgcgcctgcgcaaaaaagtcgccaatgttcatttccggtctttttcgccccgcccttcaaatgcgaaagcgactgccttcttgggtgagtgcattagctgggtagggtctgt

SEQ ID NO: 119387 - DNA, 122 bp, Homo sapiens
ttgtgggacgaaagaatgtcaaggacaattccaaacacaaaactttgattgtgctggaaccggaaaggcacagtaagaactccactgcgctcttcagttcaaaacctgcatcctgcagacaa

SEQ ID NO: 119388 - DNA, 122 bp, Homo sapiens
atgcagagtggcaccccggggcacccacgtggcagagaggatcgctgcggagtggcaccccggggtatcagtgtgcaagtttaaccatttgagttatttcagtttctggtaattacaaataa

SEQ ID NO: 119389 - DNA, 122 bp, Homo sapiens
gcggggctgggctggaatagccggctcacggagggctccggcagtgtttgttcagaggagcgcggcgctggtagcaggcgacgccaggactcttctccccaggtgctcccgccgcgcgcggg

SEQ ID NO: 119390 - DNA, 122 bp, Homo sapiens
gtgaatcctttcttcagtgttatagttaatagcaactgaaggaacgttttggtcaaatcccgaatacttattaggggctcactgcttggctgcatttttctcctctgcgtaaatcatctatc

SEQ ID NO: 119391 - DNA, 122 bp, Homo sapiens
agggggttcaattcaagtaaagtggctgagagctcgaggatggctcagccacatgtgggacgccaaagtcctggaggtgccccatgcgtgtgatggctcccggaggttatcacggacaggac

SEQ ID NO: 119392 - DNA, 122 bp, Homo sapiens
ctcctcttcctgggtcaggaggaaacctttattactaacccagtctcagagatgcaccctcgagccccacagaaacaaccatttttatggaaaatctgacccaaaccatggtttcttaagtg

SEQ ID NO: 119393 - DNA, 122 bp, Homo sapiens
gggatacctactgaaaaacactggaggcaaaactggcagcaagagaccgttacttctaaacgtggacagtctttttcccatgttcaccctaggctgcaggggacagcgctggaccgtacaga

SEQ ID NO: 119394 - DNA, 122 bp, Homo sapiens
cctttcagagtccgtttcaaatggcgtgggcagaactcctgagtgtgtgcaggtggacggcggccaggtgcccctggccacagaaaagagatggtggatttcttaactattttgggagggac

SEQ ID NO: 119395 - DNA, 122 bp, Homo sapiens
ccggcgcggcctgcgagctagcgaggttcgcgcggtgaagtactgctcgagctccgagtccgagtcctcttggctgcagtagccactgctcgtcgtgctgctccaggtcatttcgaaagaag

SEQ ID NO: 119396 - DNA, 122 bp, Homo sapiens
agtcgaggtccgcagtctcctcggggtcgaaatcgggcatcagcgccgtttagagaacaccgtcctgctgggcatggccgggatgcgaagatggccctgcaacgcacctcctagaatttggt

SEQ ID NO: 119397 - DNA, 122 bp, Homo sapiens
tcgactccgcggtccgctaccgcctcatacccaccctcctcctcgccccgctcccggcaccgccagaatgcacgttacgcacggcgtgcaaacgtcacttccgtggcctttggctcaggacg

SEQ ID NO: 119398 - DNA, 122 bp, Homo sapiens
gtgcacagtggagatgtgggcggtgcgtgtctccccagtggctgctgacccactctgtggcgagtctcagctccaccaggcggctcagccctgcctcccgggtaggagcccgaggttggcca

SEQ ID NO: 119399 - DNA, 122 bp, Homo sapiens
ggtttgtgtgcttgcgtatctgtatgtgtgcctgagcctgcgtgtgtgcctcaaggagtacgtgtgtgtgtttcccgattctctttgctgctgtgtgtctgctgtgcgcacatctggaggat

SEQ ID NO: 119400 - DNA, 122 bp, Homo sapiens
caaaaggcctcaggtctttggctcaaattcagacaaactattacttcttctttagaggtacgcggaagctccatttcatcacagaaggtctgaaaccaacaagaaacagttctgccaatcag

SEQ ID NO: 119401 - DNA, 122 bp, Homo sapiens
atcttcacagggccgtcttcccactatgtctgtgtctctgtgtccaaacctccctctcttcgagtaaagatcccagtcactggattatgccccaccctaatccagaatgacctcatcataac

SEQ ID NO: 119402 - DNA, 122 bp, Homo sapiens
cccctttatctcccagaaaattgagaagaagtaaactcctgcccactaacaatctcagtccgtgaacaaaaccaacatgaacattcctaaacaagagtgtgtgttactctaagaagaaggct

SEQ ID NO: 119403 - DNA, 122 bp, Homo sapiens
ccagttaactgagcatctattaggctccagcccctatgctgggttctgaggatgcagcgacgcagaatagaagacaagagaatgttccttctctctggagcttaccttctgctttggagaga

SEQ ID NO: 119404 - DNA, 122 bp, Homo sapiens
gggcagacaccagtttgccaatgaagcaacacatctgatctaaagactggctccagaccccgggctgccaggattatgcagtccacttggtctaccttaatttaacctgtggccaaactcag

SEQ ID NO: 119405 - DNA, 122 bp, Homo sapiens
gagtaatggtgctgagataaactgaccaatggtacagaattctaagagcctagaaaaacacgtatatatctgtgaaactttgatttttgacagaactgcctggaaaaggaaaagctggaaaa

SEQ ID NO: 119406 - DNA, 122 bp, Homo sapiens
tctccccgcccaacccaaggactgtgggtgggagaggtctccctgcgcacacggctgactcgacgcgcgccccgaggacctctgaactgacccaagtagggtgaagataattcggagggagg

SEQ ID NO: 119407 - DNA, 122 bp, Homo sapiens
ctttgcaacctcccttacggcgagtttcaggactgcccggttggtctggagagtgccgcacgcggcccagcgtttgatgtggttggtgctctgtgcccatgaggtcggcctccagaggaggg

SEQ ID NO: 119408 - DNA, 122 bp, Homo sapiens
ttcccaggatcaccctgtattttgtcctctcatttcaagtccttcttacctccttcaacacgatgactcaatcaatatcctctgcagctggtagcagacaggatagcagaggggacccatct

SEQ ID NO: 119409 - DNA, 122 bp, Homo sapiens
tgctgtccccaggcagagaggaggtggcgctgcctccacaaagtcctgccccggatctgccgctgagacaggccccaggcccgtgctggggatcagatcacaggctcgcttggtagctgggc

SEQ ID NO: 119410 - DNA, 122 bp, Homo sapiens
accacactaggcaaggccagtcccacatttgggaaaatttgggcaaaagcactcagagcacgactaaccagaaacatgcctgcatctgcctgcagcttgttcttatgctgtgacccagatga

SEQ ID NO: 119411 - DNA, 122 bp, Homo sapiens
gcaggggaagcacctggagtagtctggtatggaggacgtgcagagatgggtcctggtggccgcagtcttattgtgtgacagacagcacacatctacccctccctctgtgaggcgtatctggg

SEQ ID NO: 119412 - DNA, 122 bp, Homo sapiens
tggccccgatggctctgtgcaacggagactccaaggtcagcgtgggggtccctgcagcaccgcatcccggcggaggcgaggctcccggaccggggagccaccccgcgaggcccttccccacc

SEQ ID NO: 119413 - DNA, 122 bp, Homo sapiens
caaaaagtcttaatctgaatattttctacatcttttatgtcacctgtgtggtttggggcccgtttgctggctggattaatgatacttgctcgccattatgactgactcttagggattggata

SEQ ID NO: 119414 - DNA, 122 bp, Homo sapiens
tatttctctatagaagcaatgaaaatctcaactttcctatcacagtagttaccagaagagcgaaataggaataaatttaggaagacagcagtgtttgttcactgaaaataaaaaaacattcc

SEQ ID NO: 119415 - DNA, 122 bp, Homo sapiens
tccctcctgtcaggagtccaaggggcaagaggccacggagggcttcaggcaacacctgggcgagcccagcggctcctctgacactgcagacacctgcacctccctggtccccagaaccccca

SEQ ID NO: 119416 - DNA, 122 bp, Homo sapiens
tggggcatgaactggcggaagatgctgacactgccatgccagaaggtgggttctgggagccgccccaccacgctccacgcgcgagtctctgggtcataggcctctaccacgtccgagagttc

SEQ ID NO: 119417 - DNA, 122 bp, Homo sapiens
acacagctgtggtcttcaagttgccttgggattgggtggagccacacccacagctgcagccgagctgtgctatttgcaactcccccagggccaactgctgtgaaaagaacagtttattacaa

SEQ ID NO: 119418 - DNA, 122 bp, Homo sapiens
acatcttacagcacacttcttgaataccattcttctttcattcggcctcagggtgttactcggaaattgaaatgcagtattctaacccaggtgtttgaatacaagggaaaactataaggttt

SEQ ID NO: 119419 - DNA, 122 bp, Homo sapiens
agtctcgagctccgcgcctccgcgcccccgcgccgcgcccttccacctgcacccgttaggcgcgctgcgggacaacagcgcagatgcaaacagctttctcgcaaggaaaaagggaattgagg

SEQ ID NO: 119420 - DNA, 122 bp, Homo sapiens
actcagccggtacctctggcggggccatgggggccagaggacagcgcggggggcggcgagcgcggttgctaagctctccaaggcctcggagggacaggatctgggcgcacctcaccggttgc

SEQ ID NO: 119421 - DNA, 122 bp, Homo sapiens
tgcacatctgcagaatggaggtgcgcggacgggggcgagggtgcacgggggctacctcaacggccgctctcccctgagcccacccttgcaaaaagctccatcatccaggcagctccgttctg

SEQ ID NO: 119422 - DNA, 122 bp, Homo sapiens
tgtgggcgctacgctgccgcggactcggccgagactccggcccacgccctcccccacggacggtcacagccactcacttgggcccgcgacacccccgcggcccgcggctctggcggctcggc

SEQ ID NO: 119423 - DNA, 122 bp, Homo sapiens
tcgcgagggagatgttccgcagtgcgatggagtgctcccagtccttgaggcgcaggtcctcggtgaccgcgttgagcatggccagctcctgcttcagctgcagctccatgcctacgtgcgcc

SEQ ID NO: 119424 - DNA, 122 bp, Homo sapiens
gaccagggcaatttgtccacctcagggactgacaaaagaggccagtcactctgaccagaacgtcttctcatggctcagctacctgtgcctcagcaaagaacagactttccagagggaatcgg

SEQ ID NO: 119425 - DNA, 122 bp, Homo sapiens
gcggaccggccgggggagggggtgactccagtagggaagacccacccacgccccgcccgccgccgcggaggccccgcccaccccgcctgcccacccctaccgcacccgcacgcccccccgcc

SEQ ID NO: 119426 - DNA, 122 bp, Homo sapiens
tacacccaaggcatttaaaaaacaaattgcgtgcttgcatactcggcatcccctctccctcgcctctctctgcttctttggtgggctcacgaccacctgtcgcatccctacgcgtgcctgcg

SEQ ID NO: 119427 - DNA, 122 bp, Homo sapiens
aggacctttgctcatcttacacatcaagtgttcatgaacaactctgatgccactaagtttcgttcacaaacttgcacctcggtcgttcttttacaaaaaaaaaaaagaaaggttattttgca

SEQ ID NO: 119428 - DNA, 122 bp, Homo sapiens
cgctgcgctgagaacccaggcgtccgggctgggagaggggccgggagcgtccgcaggtggcgctggcccggatctcccgaccccaggaagggatcccggagcttcctggaggcggcgggcgg

SEQ ID NO: 119429 - DNA, 122 bp, Homo sapiens
tcgtcggtaaagcgcggcaccatggtacgggcggcaagggctttgctctccgcggtgacacgcttactcatcctggcggacatggcagatgtcatgagacttttatcccatctgaaaattgt

SEQ ID NO: 119430 - DNA, 122 bp, Homo sapiens
tcgccccgcccccgcgcggcgctgggaggcgggagctgtctctgagaacctgcgggagagcgcccgggcttgctgcttcccggacccgcgcgtctctcgagcaccctcgtcccaccaccttg

SEQ ID NO: 119431 - DNA, 122 bp, Homo sapiens
gcccgcccggcctcgacgtccctggggagggacccggcgcggctccggccgctggggctgcggctgctctcggcccacctcggccccgacaccgcgtccccgtcccaagccccgccgcgcgg

SEQ ID NO: 119432 - DNA, 122 bp, Homo sapiens
gaggaacgccatggcatgaaggagcccaggctggaggctcagctcctcggccaagctgcccgtctgccctggggggctgaacccagtaccctggcaggcatgcggggcggggtgagcatgtg

SEQ ID NO: 119433 - DNA, 122 bp, Homo sapiens
ggttggattttgggtctgccttgctcctggggcagctgctaggatcaaatgttgtgggggcgggtgtcaatggcactcaattggggcgccgcacacaccgtgagttttatgttggtgatgca

SEQ ID NO: 119434 - DNA, 122 bp, Homo sapiens
gaaagtgacttttgtaaaatatgtaagaacatatttcaatacaattccaattagctgtttcggttgtgcattgatgtgaagtggtgagaatgttgatattaagaaccaatgtttcaggtaca

SEQ ID NO: 119435 - DNA, 122 bp, Homo sapiens
cagcagctgctgcaggtttaaaagcccacactccggcggagtcggtggtcaggcaggtcccgagtgccggcagcatgaagacctccctcccacactcagggcggatggtgcgggggtggggg

SEQ ID NO: 119436 - DNA, 122 bp, Homo sapiens
tgagagactgggaggtcctgaaagccaatcaatgcggggttattatgggcgagccctccccgccttgccccgccccgccccgccccgcccttattcttccggacaacttgcctagtgggtgg

SEQ ID NO: 119437 - DNA, 122 bp, Homo sapiens
ggtccatatgcagttttacaaagttcaagtgaagaagactgtagggatgccatcaatgtgcgtgtctgaagactatggaagcttgtcaaaggggtaaccctacaactcctgtcactttaaca

SEQ ID NO: 119438 - DNA, 122 bp, Homo sapiens
cagcgtctctgcggggtcacgggccaggctgcggggctctgagcgcctgcctcgccgtcccggggcttaacggctgctggagccactttataattagccccaaaccgaaggaggcgcgcgcg

SEQ ID NO: 119439 - DNA, 122 bp, Homo sapiens
gtctttggccagaagctgagagtttaccatgtggacacaggaaacagcagtagagtgactcgggtgggtttgtccttaaccactcaggaatttcagcaattccgaccatgggtaaaacccag
